United States Patent Application Publication US 2005/0244851 A1 - sequence listing, part 9

SEQ ID NO: 319173 - DNA, 25 bp, Homo sapien
gctgcggaagcgggttgctggtggg

SEQ ID NO: 319174 - DNA, 25 bp, Homo sapien
ggcgctggggtccacggtctgcacc

SEQ ID NO: 319175 - DNA, 25 bp, Homo sapien
ttcttgcgcggccgcttgaccacgg

SEQ ID NO: 319176 - DNA, 25 bp, Homo sapien
cagcagcggcgcgatcagcgtgtcc

SEQ ID NO: 319177 - DNA, 25 bp, Homo sapien
tcagcgtgtccgtggccgtcttcct

SEQ ID NO: 319178 - DNA, 25 bp, Homo sapien
agtggtgggcggagcggtccagcag

SEQ ID NO: 319179 - DNA, 25 bp, Homo sapien
ccttgtagtggtgggcggagcggtc

SEQ ID NO: 319180 - DNA, 25 bp, Homo sapien
ccaggcctagcccacagtcctccgc

SEQ ID NO: 319181 - DNA, 25 bp, Homo sapien
cttggccttcttggtgccgaggatg

SEQ ID NO: 319182 - DNA, 25 bp, Homo sapien
tggccttcttggtgccgaggatgta

SEQ ID NO: 319183 - DNA, 25 bp, Homo sapien
gccttggccttcttggtgccgagga

SEQ ID NO: 319184 - DNA, 25 bp, Homo sapien
tgcagcagcgggtgtgtggcgtttc

SEQ ID NO: 319185 - DNA, 25 bp, Homo sapien
gaggtgagcggacgtggaacgggcc

SEQ ID NO: 319186 - DNA, 25 bp, Homo sapien
atggtgaggggctccgccttgccca

SEQ ID NO: 319187 - DNA, 25 bp, Homo sapien
gtggcgtttcggctcaggatggtga

SEQ ID NO: 319188 - DNA, 25 bp, Homo sapien
atggcgatgaggtcccccacgtcct

SEQ ID NO: 319189 - DNA, 25 bp, Homo sapien
cccacgtcctgcggcaggcgggggc

SEQ ID NO: 319190 - DNA, 25 bp, Homo sapien
cccccacgtcctgcggcaggcgggg

SEQ ID NO: 319191 - DNA, 25 bp, Homo sapien
gtcccccacgtcctgcggcaggcgg

SEQ ID NO: 319192 - DNA, 25 bp, Homo sapien
gaccgttctcggctcgtcgaaggtg

SEQ ID NO: 319193 - DNA, 25 bp, Homo sapien
accgttctcggctcgtcgaaggtgg

SEQ ID NO: 319194 - DNA, 25 bp, Homo sapien
cccaggcatgcggacagaggttggg

SEQ ID NO: 319195 - DNA, 25 bp, Homo sapien
ctctcggcggcctggacggtgccat

SEQ ID NO: 319196 - DNA, 25 bp, Homo sapien
gggatgcgcgcagtgcgggcgaagc

SEQ ID NO: 319197 - DNA, 25 bp, Homo sapien
tgtcgagcacgtgggggcgaaggcc

SEQ ID NO: 319198 - DNA, 25 bp, Homo sapien
tggcgatgccgtccgggcgggttcc

SEQ ID NO: 319199 - DNA, 25 bp, Homo sapien
gtgcctggcgatgccgtccgggcgg

SEQ ID NO: 319200 - DNA, 25 bp, Homo sapien
cctggcgatgccgtccgggcgggtt

SEQ ID NO: 319201 - DNA, 25 bp, Homo sapien
ccagtgcctggcgatgccgtccggg

SEQ ID NO: 319202 - DNA, 25 bp, Homo sapien
gatatgctcggtgctaccttgttaa

SEQ ID NO: 319203 - DNA, 25 bp, Homo sapien
tgcacgttgacctttgacccgaggg

SEQ ID NO: 319204 - DNA, 25 bp, Homo sapien
tcaggcgacaaggagaaagtgcacg

SEQ ID NO: 319205 - DNA, 25 bp, Homo sapien
tggttattgcgttgggccccttcac

SEQ ID NO: 319206 - DNA, 25 bp, Homo sapien
cagaccacactgagggcgcctcctc

SEQ ID NO: 319207 - DNA, 25 bp, Homo sapien
gtgttgttttgagcatcccagacca

SEQ ID NO: 319208 - DNA, 25 bp, Homo sapien
ccttcctggatcccgccagctctct

SEQ ID NO: 319209 - DNA, 25 bp, Homo sapien
tgtgttgttttgagcatcccagacc

SEQ ID NO: 319210 - DNA, 25 bp, Homo sapien
gccgagccatgcgggatgccgggtg

SEQ ID NO: 319211 - DNA, 25 bp, Homo sapien
tgagccgagccatgcgggatgccgg

SEQ ID NO: 319212 - DNA, 25 bp, Homo sapien
ctgagccgagccatgcgggatgccg

SEQ ID NO: 319213 - DNA, 25 bp, Homo sapien
gagccgagccatgcgggatgccggg

SEQ ID NO: 319214 - DNA, 25 bp, Homo sapien
ggctggccatgtggatgccctgttc

SEQ ID NO: 319215 - DNA, 25 bp, Homo sapien
atgtggatgccctgttcctggagca

SEQ ID NO: 319216 - DNA, 25 bp, Homo sapien
agagcttttgaggccctgacgccgg

SEQ ID NO: 319217 - DNA, 25 bp, Homo sapien
ccagaggagggtttctggaggtgcc

SEQ ID NO: 319218 - DNA, 25 bp, Homo sapien
ggaggggagagtgtccgagatccca

SEQ ID NO: 319219 - DNA, 25 bp, Homo sapien
tccgatccggctggggtcccctgca

SEQ ID NO: 319220 - DNA, 25 bp, Homo sapien
gggagagtgtccgagatcccagccc

SEQ ID NO: 319221 - DNA, 25 bp, Homo sapien
ggagaagcagaactgccctccgatc

SEQ ID NO: 319222 - DNA, 25 bp, Homo sapien
cccctcaggtccctggtcctgagtc

SEQ ID NO: 319223 - DNA, 25 bp, Homo sapien
aggactccgtgctggggagcctgct

SEQ ID NO: 319224 - DNA, 25 bp, Homo sapien
ttgggggagtccaacgcagcgccca

SEQ ID NO: 319225 - DNA, 25 bp, Homo sapien
caggcttggtctgggtctgcctgag

SEQ ID NO: 319226 - DNA, 25 bp, Homo sapien
gcatcccgggcccacgacttccttc

SEQ ID NO: 319227 - DNA, 25 bp, Homo sapien
atgcagacgactcgctgcccgcaag

SEQ ID NO: 319228 - DNA, 25 bp, Homo sapien
gctctcctgcaatggtccggccgcg

SEQ ID NO: 319229 - DNA, 25 bp, Homo sapien
cgaccccgggttcttggctgacctg

SEQ ID NO: 319230 - DNA, 25 bp, Homo sapien
tgcggcgcgggccctcaacggacgg

SEQ ID NO: 319231 - DNA, 25 bp, Homo sapien
tccatgcggcgcgggccctcaacgg

SEQ ID NO: 319232 - DNA, 25 bp, Homo sapien
gccggcctccatgcggcgcgggccc

SEQ ID NO: 319233 - DNA, 25 bp, Homo sapien
ggcctccatgcggcgcgggccctca

SEQ ID NO: 319234 - DNA, 25 bp, Homo sapien
gcgccgtccgcgccgcgcggcgtac

SEQ ID NO: 319235 - DNA, 25 bp, Homo sapien
agacgggaaacacacctgagccaga

SEQ ID NO: 319236 - DNA, 25 bp, Homo sapien
cacggaagtccggaccattagagca

SEQ ID NO: 319237 - DNA, 25 bp, Homo sapien
gctgccgaggcacaccggggaaact

SEQ ID NO: 319238 - DNA, 25 bp, Homo sapien
attagagcagcgcaaggctgccgag

SEQ ID NO: 319239 - DNA, 25 bp, Homo sapien
taaagaaactcctgtgcagccgggc

SEQ ID NO: 319240 - DNA, 25 bp, Homo sapien
tgggcggcggcttcctgcacctgtg

SEQ ID NO: 319241 - DNA, 25 bp, Homo sapien
cggcggcttcctgcacctgtgggga

SEQ ID NO: 319242 - DNA, 25 bp, Homo sapien
ggcggcggcttcctgcacctgtggg

SEQ ID NO: 319243 - DNA, 25 bp, Homo sapien
ctgggcggcggcttcctgcacctgt

SEQ ID NO: 319244 - DNA, 25 bp, Homo sapien
ctcgtgcggtggctgctgctcctcc

SEQ ID NO: 319245 - DNA, 25 bp, Homo sapien
gtggctgctgctcctccccgtccat

SEQ ID NO: 319246 - DNA, 25 bp, Homo sapien
tgcggtggctgctgctcctccccgt

SEQ ID NO: 319247 - DNA, 25 bp, Homo sapien
gcggtggctgctgctcctccccgtc

SEQ ID NO: 319248 - DNA, 25 bp, Homo sapien
gcccgtgaccgctccacggaccacg

SEQ ID NO: 319249 - DNA, 25 bp, Homo sapien
ggcccgtgaccgctccacggaccac

SEQ ID NO: 319250 - DNA, 25 bp, Homo sapien
cccgtgaccgctccacggaccacgt

SEQ ID NO: 319251 - DNA, 25 bp, Homo sapien
acccgtggccgctgtgtggaccaca

SEQ ID NO: 319252 - DNA, 25 bp, Homo sapien
tggaaagggacccgtggccgctgtg

SEQ ID NO: 319253 - DNA, 25 bp, Homo sapien
aaagggacccgtggccgctgtgtgg

SEQ ID NO: 319254 - DNA, 25 bp, Homo sapien
ggacccgtggccgctgtgtggacca

SEQ ID NO: 319255 - DNA, 25 bp, Homo sapien
ctccgtggcaactccacggaccacg

SEQ ID NO: 319256 - DNA, 25 bp, Homo sapien
tccgtggcaactccacggaccacgt

SEQ ID NO: 319257 - DNA, 25 bp, Homo sapien
tgacggcacaacaggttccacgttg

SEQ ID NO: 319258 - DNA, 25 bp, Homo sapien
gacggcacaacaggttccacgttgg

SEQ ID NO: 319259 - DNA, 25 bp, Homo sapien
acggcacaacaggttccacgttggc

SEQ ID NO: 319260 - DNA, 25 bp, Homo sapien
aggttctgggggtctccagaaagca

SEQ ID NO: 319261 - DNA, 25 bp, Homo sapien
caggttctgggggtctccagaaagc

SEQ ID NO: 319262 - DNA, 25 bp, Homo sapien
gttctgggggtctccagaaagcacc

SEQ ID NO: 319263 - DNA, 25 bp, Homo sapien
acaggttctgggggtctccagaaag

SEQ ID NO: 319264 - DNA, 25 bp, Homo sapien
tgctcccgtcctcagccaccaactg

SEQ ID NO: 319265 - DNA, 25 bp, Homo sapien
ccaactgggtcacagtgcgcggcag

SEQ ID NO: 319266 - DNA, 25 bp, Homo sapien
agcaggttgaaggcgtccacgtcgg

SEQ ID NO: 319267 - DNA, 25 bp, Homo sapien
cgctgacgccgccgcttcagcttca

SEQ ID NO: 319268 - DNA, 25 bp, Homo sapien
cctcttgctgtcgtcgctgaagtgg

SEQ ID NO: 319269 - DNA, 25 bp, Homo sapien
tcgtcgctgaagtgggctgtcccca

SEQ ID NO: 319270 - DNA, 25 bp, Homo sapien
tcttgctgtcgtcgctgaagtgggc

SEQ ID NO: 319271 - DNA, 25 bp, Homo sapien
tgtcgtcgctgaagtgggctgtccc

SEQ ID NO: 319272 - DNA, 25 bp, Homo sapien
actcccagggaccacagtgttgaag

SEQ ID NO: 319273 - DNA, 25 bp, Homo sapien
ccactcccagggaccacagtgttga

SEQ ID NO: 319274 - DNA, 25 bp, Homo sapien
cagggaccacagtgttgaagcagga

SEQ ID NO: 319275 - DNA, 25 bp, Homo sapien
cccagggaccacagtgttgaagcag

SEQ ID NO: 319276 - DNA, 25 bp, Homo sapien
aaggccgtcacggctcccaggcagg

SEQ ID NO: 319277 - DNA, 25 bp, Homo sapien
aggccgtcacggctcccaggcagga

SEQ ID NO: 319278 - DNA, 25 bp, Homo sapien
tcagcatggacacacgatattggca

SEQ ID NO: 319279 - DNA, 25 bp, Homo sapien
tccatcttcagcatggacacacgat

SEQ ID NO: 319280 - DNA, 25 bp, Homo sapien
tggacacacgatattggcagagctc

SEQ ID NO: 319281 - DNA, 25 bp, Homo sapien
atattggcagagctccacgaccacc

SEQ ID NO: 319282 - DNA, 25 bp, Homo sapien
ctttgaaaacacaaagcctggccgg

SEQ ID NO: 319283 - DNA, 25 bp, Homo sapien
aaacacaaagcctggccgggcgcgg

SEQ ID NO: 319284 - DNA, 25 bp, Homo sapien
gaggcgggagcatcactagaaccca

SEQ ID NO: 319285 - DNA, 25 bp, Homo sapien
ttgaaaacacaaagcctggccgggc

SEQ ID NO: 319286 - DNA, 25 bp, Homo sapien
ggactgccctttagaagacggccca

SEQ ID NO: 319287 - DNA, 25 bp, Homo sapien
ggcaggcgccaaacgtttagggaca

SEQ ID NO: 319288 - DNA, 25 bp, Homo sapien
ccacagaggtcttctttggtgactt

SEQ ID NO: 319289 - DNA, 25 bp, Homo sapien
ttggtgacttgcctcatctggagaa

SEQ ID NO: 319290 - DNA, 25 bp, Homo sapien
ccctagcgtgcagagggtcagacca

SEQ ID NO: 319291 - DNA, 25 bp, Homo sapien
tcagaccagagcagggagttctgtc

SEQ ID NO: 319292 - DNA, 25 bp, Homo sapien
acaggtgcaggaccaccctagcgtg

SEQ ID NO: 319293 - DNA, 25 bp, Homo sapien
ggagttctgtcccaacaggcacttc

SEQ ID NO: 319294 - DNA, 25 bp, Homo sapien
gtgtgcagacaccttcagcagcagc

SEQ ID NO: 319295 - DNA, 25 bp, Homo sapien
ggcctccctgaactcgccacctggg

SEQ ID NO: 319296 - DNA, 25 bp, Homo sapien
agcatctgcatcagccccgacatga

SEQ ID NO: 319297 - DNA, 25 bp, Homo sapien
ccagctgctcggtgatgtgtgcaga

SEQ ID NO: 319298 - DNA, 25 bp, Homo sapien
cccggaccacccctgtgagccacat

SEQ ID NO: 319299 - DNA, 25 bp, Homo sapien
tgtggccaccccctacctcaccctg

SEQ ID NO: 319300 - DNA, 25 bp, Homo sapien
acccctgtgagccacatccctgtgg

SEQ ID NO: 319301 - DNA, 25 bp, Homo sapien
tgtgagccacatccctgtggccacc

SEQ ID NO: 319302 - DNA, 25 bp, Homo sapien
tgcgatggccctcttgaaggtgacg

SEQ ID NO: 319303 - DNA, 25 bp, Homo sapien
atgggtcggtcacccaggtggaact

SEQ ID NO: 319304 - DNA, 25 bp, Homo sapien
gtggaacttgcagaaaggcaccttg

SEQ ID NO: 319305 - DNA, 25 bp, Homo sapien
ttctgccagaaggagagcgctgcga

SEQ ID NO: 319306 - DNA, 25 bp, Homo sapien
aggaagcacaggccccaagccagcc

SEQ ID NO: 319307 - DNA, 25 bp, Homo sapien
gcacaggccccaagccagcctgacc

SEQ ID NO: 319308 - DNA, 25 bp, Homo sapien
aagcacaggccccaagccagcctga

SEQ ID NO: 319309 - DNA, 25 bp, Homo sapien
ctgatggggtctgacaggaagcaca

SEQ ID NO: 319310 - DNA, 25 bp, Homo sapien
attggctgcgcttggacctgcacag

SEQ ID NO: 319311 - DNA, 25 bp, Homo sapien
gcagggaaggccttgagtgaggatt

SEQ ID NO: 319312 - DNA, 25 bp, Homo sapien
tgtttgggatttgtggcggaaggaa

SEQ ID NO: 319313 - DNA, 25 bp, Homo sapien
ccgggcagggaccacagcacgtttg

SEQ ID NO: 319314 - DNA, 25 bp, Homo sapien
cctggcgcagcatgtaggttaggta

SEQ ID NO: 319315 - DNA, 25 bp, Homo sapien
tgggaactcgccaatcatctcggcc

SEQ ID NO: 319316 - DNA, 25 bp, Homo sapien
acgtcgcgctccgagacgatggtgc

SEQ ID NO: 319317 - DNA, 25 bp, Homo sapien
tcatctgctccagtaggtccttctg

SEQ ID NO: 319318 - DNA, 25 bp, Homo sapien
gtcccacgcctgcgggcggccgtca

SEQ ID NO: 319319 - DNA, 25 bp, Homo sapien
tcccacgcctgcgggcggccgtcac

SEQ ID NO: 319320 - DNA, 25 bp, Homo sapien
ggaaggacaaggggtcagtacctgc

SEQ ID NO: 319321 - DNA, 25 bp, Homo sapien
accacggaggggacgcacttcctgg

SEQ ID NO: 319322 - DNA, 25 bp, Homo sapien
tcctggatgttgaggtcggtgctcc

SEQ ID NO: 319323 - DNA, 25 bp, Homo sapien
tcggtgctccagttcttctcgatgc

SEQ ID NO: 319324 - DNA, 25 bp, Homo sapien
ggcccatgcccacgacgcccacgac

SEQ ID NO: 319325 - DNA, 25 bp, Homo sapien
cactgccgcatgtggttggcctcca

SEQ ID NO: 319326 - DNA, 25 bp, Homo sapien
gggtcactgccgcatgtggttggcc

SEQ ID NO: 319327 - DNA, 25 bp, Homo sapien
gcctgggtcactgccgcatgtggtt

SEQ ID NO: 319328 - DNA, 25 bp, Homo sapien
gtcactgccgcatgtggttggcctc

SEQ ID NO: 319329 - DNA, 25 bp, Homo sapien
tgccggagacggacggcgggggcac

SEQ ID NO: 319330 - DNA, 25 bp, Homo sapien
ctgccggagacggacggcgggggca

SEQ ID NO: 319331 - DNA, 25 bp, Homo sapien
tgcggcggcccatccagtacaggct

SEQ ID NO: 319332 - DNA, 25 bp, Homo sapien
ggccttcacggccaaccgagacact

SEQ ID NO: 319333 - DNA, 25 bp, Homo sapien
agcgacaggaccaggctcgcggtgc

SEQ ID NO: 319334 - DNA, 25 bp, Homo sapien
caggcagtactgcgcggcgggcagc

SEQ ID NO: 319335 - DNA, 25 bp, Homo sapien
ggcctcgggcgggctaggatgcacc

SEQ ID NO: 319336 - DNA, 25 bp, Homo sapien
ataatcctttatttgggtgggctgg

SEQ ID NO: 319337 - DNA, 25 bp, Homo sapien
aataatcctttatttgggtgggctg

SEQ ID NO: 319338 - DNA, 25 bp, Homo sapien
gcaggggcctcgggcgggctaggat

SEQ ID NO: 319339 - DNA, 25 bp, Homo sapien
aacacagaatccctgcaggcagacg

SEQ ID NO: 319340 - DNA, 25 bp, Homo sapien
cgacgctcctgtggccggagcacag

SEQ ID NO: 319341 - DNA, 25 bp, Homo sapien
gagctgggtgtcttgtccagaagct

SEQ ID NO: 319342 - DNA, 25 bp, Homo sapien
cacagtgaggtagggacagtggcca

SEQ ID NO: 319343 - DNA, 25 bp, Homo sapien
gatgtttggctgcacgcgagcccac

SEQ ID NO: 319344 - DNA, 25 bp, Homo sapien
cttggccttccacataggtgcacac

SEQ ID NO: 319345 - DNA, 25 bp, Homo sapien
gggacagacccaagaacacgaattc

SEQ ID NO: 319346 - DNA, 25 bp, Homo sapien
cataggtgcacacattgtctgccca

SEQ ID NO: 319347 - DNA, 25 bp, Homo sapien
tcaacaccgagtcggcacagacaca

SEQ ID NO: 319348 - DNA, 25 bp, Homo sapien
gctggggctgcacgggctgtgtcct

SEQ ID NO: 319349 - DNA, 25 bp, Homo sapien
accgagtcggcacagacacaaccag

SEQ ID NO: 319350 - DNA, 25 bp, Homo sapien
atttgattcaacaccgagtcggcac

SEQ ID NO: 319351 - DNA, 25 bp, Homo sapien
gaatgaatccccgagtgtggcagga

SEQ ID NO: 319352 - DNA, 25 bp, Homo sapien
atgaatccccgagtgtggcaggaag

SEQ ID NO: 319353 - DNA, 25 bp, Homo sapien
tttctaaggaatgaatccccgagtg

SEQ ID NO: 319354 - DNA, 25 bp, Homo sapien
taaggaatgaatccccgagtgtggc

SEQ ID NO: 319355 - DNA, 25 bp, Homo sapien
agggtcttgagtgtcagcaggccac

SEQ ID NO: 319356 - DNA, 25 bp, Homo sapien
tctggtccacactctggaatctggt

SEQ ID NO: 319357 - DNA, 25 bp, Homo sapien
agtctggtccacactctggaatctg

SEQ ID NO: 319358 - DNA, 25 bp, Homo sapien
tgagtgtcagcaggccacctgcgtc

SEQ ID NO: 319359 - DNA, 25 bp, Homo sapien
ctcccgccggaagccagcctgcccc

SEQ ID NO: 319360 - DNA, 25 bp, Homo sapien
tcccgccggaagccagcctgccccg

SEQ ID NO: 319361 - DNA, 25 bp, Homo sapien
cccgccggaagccagcctgccccgc

SEQ ID NO: 319362 - DNA, 25 bp, Homo sapien
gcaagagtcgggcagccgcgagcga

SEQ ID NO: 319363 - DNA, 25 bp, Homo sapien
gaacagcgaccgaggggcaagagtc

SEQ ID NO: 319364 - DNA, 25 bp, Homo sapien
agccgcgagcgaagccccgagcgct

SEQ ID NO: 319365 - DNA, 25 bp, Homo sapien
atggcggcgcccgacaacgtagagc

SEQ ID NO: 319366 - DNA, 25 bp, Homo sapien
ctgcacgcgggtgaagcaggccccg

SEQ ID NO: 319367 - DNA, 25 bp, Homo sapien
tgcacgcgggtgaagcaggccccgg

SEQ ID NO: 319368 - DNA, 25 bp, Homo sapien
ccagcaacgccagcgcgggctctga

SEQ ID NO: 319369 - DNA, 25 bp, Homo sapien
cagcaacgccagcgcgggctctgac

SEQ ID NO: 319370 - DNA, 25 bp, Homo sapien
cccagcaacgccagcgcgggctctg

SEQ ID NO: 319371 - DNA, 25 bp, Homo sapien
gcccagcaacgccagcgcgggctct

SEQ ID NO: 319372 - DNA, 25 bp, Homo sapien
ttgccgctgaagaacagcgcggcct

SEQ ID NO: 319373 - DNA, 25 bp, Homo sapien
caggagcgcgttgccgctgaagaac

SEQ ID NO: 319374 - DNA, 25 bp, Homo sapien
ccgcagtagcagtgcgcggcgggct

SEQ ID NO: 319375 - DNA, 25 bp, Homo sapien
cgaactggccgaattggtggccgca

SEQ ID NO: 319376 - DNA, 25 bp, Homo sapien
cggtcgccgtgcacacctcgcccag

SEQ ID NO: 319377 - DNA, 25 bp, Homo sapien
ggcccggcgcccttgagctgcagct

SEQ ID NO: 319378 - DNA, 25 bp, Homo sapien
agctcccagcgctcgccggtcgccg

SEQ ID NO: 319379 - DNA, 25 bp, Homo sapien
gggcgtgggcccggcgcccttgagc

SEQ ID NO: 319380 - DNA, 25 bp, Homo sapien
tgtcaactctaagcaggtcgctggg

SEQ ID NO: 319381 - DNA, 25 bp, Homo sapien
caagcgctgtctatacacaggaggc

SEQ ID NO: 319382 - DNA, 25 bp, Homo sapien
gtcggtaaacatgagcggcgtccct

SEQ ID NO: 319383 - DNA, 25 bp, Homo sapien
tccgtgaagtcagtcgcagagcgag

SEQ ID NO: 319384 - DNA, 25 bp, Homo sapien
gccaagaacgctgccaaatccaatg

SEQ ID NO: 319385 - DNA, 25 bp, Homo sapien
tgctgactgcggctttgtagtaagt

SEQ ID NO: 319386 - DNA, 25 bp, Homo sapien
ttgcatgaggatccagttttcccag

SEQ ID NO: 319387 - DNA, 25 bp, Homo sapien
cgttcatggtgtagttaaggaccca

SEQ ID NO: 319388 - DNA, 25 bp, Homo sapien
tgtcacccagggacagtggcgtgat

SEQ ID NO: 319389 - DNA, 25 bp, Homo sapien
tatttttccgagacagtcttgccct

SEQ ID NO: 319390 - DNA, 25 bp, Homo sapien
tttccgagacagtcttgccctgtcg

SEQ ID NO: 319391 - DNA, 25 bp, Homo sapien
cactgtgcccgaccaaccttttatt

SEQ ID NO: 319392 - DNA, 25 bp, Homo sapien
tgatttaattatttgaggaacttcc

SEQ ID NO: 319393 - DNA, 25 bp, Homo sapien
ctgaatcatgtggtgatttaattat

SEQ ID NO: 319394 - DNA, 25 bp, Homo sapien
tgaatatcggtatacaaatcttgag

SEQ ID NO: 319395 - DNA, 25 bp, Homo sapien
aaatcttgagatcctgctcttgggg

SEQ ID NO: 319396 - DNA, 25 bp, Homo sapien
tatttcactgcaccacgtcctccag

SEQ ID NO: 319397 - DNA, 25 bp, Homo sapien
gaccagcttatttcactgcaccacg

SEQ ID NO: 319398 - DNA, 25 bp, Homo sapien
tgtaagtgggatcacccaggatttg

SEQ ID NO: 319399 - DNA, 25 bp, Homo sapien
tgttgtagcatatcagcatcttctt

SEQ ID NO: 319400 - DNA, 25 bp, Homo sapien
cagatcagtgctattaaatacgttc

SEQ ID NO: 319401 - DNA, 25 bp, Homo sapien
actgcagcaccaccctctcgcctca

SEQ ID NO: 319402 - DNA, 25 bp, Homo sapien
tacagatcagtgctattaaatacgt

SEQ ID NO: 319403 - DNA, 25 bp, Homo sapien
gatcagtgctattaaatacgttcat

SEQ ID NO: 319404 - DNA, 25 bp, Homo sapien
taaaaatgggcctgaacacacgcag

SEQ ID NO: 319405 - DNA, 25 bp, Homo sapien
cttcctgcccagaacgagggttccg

SEQ ID NO: 319406 - DNA, 25 bp, Homo sapien
caacagcctttgcaccaggatgggt

SEQ ID NO: 319407 - DNA, 25 bp, Homo sapien
cccggtacgggccagctgaggaatg

SEQ ID NO: 319408 - DNA, 25 bp, Homo sapien
gattaccatcatagaacacgtcgcg

SEQ ID NO: 319409 - DNA, 25 bp, Homo sapien
ttcgctgcatagaaactcccggatg

SEQ ID NO: 319410 - DNA, 25 bp, Homo sapien
gatgcttgaccgtaggaccttgcga

SEQ ID NO: 319411 - DNA, 25 bp, Homo sapien
ggaagctacacgcaacacaaccgtg

SEQ ID NO: 319412 - DNA, 25 bp, Homo sapien
gggacccttctctggtgcccgtggc

SEQ ID NO: 319413 - DNA, 25 bp, Homo sapien
tggtgctttgagacacaccagctcc

SEQ ID NO: 319414 - DNA, 25 bp, Homo sapien
gtgctttgagacacaccagctcccg

SEQ ID NO: 319415 - DNA, 25 bp, Homo sapien
cccctgctggtgctttgagacacac

SEQ ID NO: 319416 - DNA, 25 bp, Homo sapien
taagtagttccttgtcataaactcc

SEQ ID NO: 319417 - DNA, 25 bp, Homo sapien
aagtctaagtagttccttgtcataa

SEQ ID NO: 319418 - DNA, 25 bp, Homo sapien
tttcctcagtcaagtctaagtagtt

SEQ ID NO: 319419 - DNA, 25 bp, Homo sapien
atttcctcagtcaagtctaagtagt

SEQ ID NO: 319420 - DNA, 25 bp, Homo sapien
agaccaacgagcaactggaccatca

SEQ ID NO: 319421 - DNA, 25 bp, Homo sapien
agcctaggactccagaccaacgagc

SEQ ID NO: 319422 - DNA, 25 bp, Homo sapien
gaactgataactgatggctcacgtc

SEQ ID NO: 319423 - DNA, 25 bp, Homo sapien
catcagatcagaaagcctgagcagg

SEQ ID NO: 319424 - DNA, 25 bp, Homo sapien
caatgccagcattgccgctgggcgg

SEQ ID NO: 319425 - DNA, 25 bp, Homo sapien
acaatgccagcattgccgctgggcg

SEQ ID NO: 319426 - DNA, 25 bp, Homo sapien
gcctcagaggaagtcgtggccccag

SEQ ID NO: 319427 - DNA, 25 bp, Homo sapien
agaggaagtcgtggccccagatctt

SEQ ID NO: 319428 - DNA, 25 bp, Homo sapien
gacacacagacatattccacgtttg

SEQ ID NO: 319429 - DNA, 25 bp, Homo sapien
tttcggcaggtcttacacacggagg

SEQ ID NO: 319430 - DNA, 25 bp, Homo sapien
accccacgaggagtgttttcggcag

SEQ ID NO: 319431 - DNA, 25 bp, Homo sapien
gaatgcaccacagctttacctgaca

SEQ ID NO: 319432 - DNA, 25 bp, Homo sapien
aggaaaagacgttgttgtggctatt

SEQ ID NO: 319433 - DNA, 25 bp, Homo sapien
aaggaaaagacgttgttgtggctat

SEQ ID NO: 319434 - DNA, 25 bp, Homo sapien
aagacccgaggcgtcaacagcccaa

SEQ ID NO: 319435 - DNA, 25 bp, Homo sapien
cccgaggcgtcaacagcccaaacct

SEQ ID NO: 319436 - DNA, 25 bp, Homo sapien
gacccgaggcgtcaacagcccaaac

SEQ ID NO: 319437 - DNA, 25 bp, Homo sapien
ggaagacccgaggcgtcaacagccc

SEQ ID NO: 319438 - DNA, 25 bp, Homo sapien
tgctcatctgcagacttaaaaatct

SEQ ID NO: 319439 - DNA, 25 bp, Homo sapien
tgtgtgctcatctgcagacttaaaa

SEQ ID NO: 319440 - DNA, 25 bp, Homo sapien
agctgcactcgaatgtcgttcctcc

SEQ ID NO: 319441 - DNA, 25 bp, Homo sapien
tagtcgagcagctgcactcgaatgt

SEQ ID NO: 319442 - DNA, 25 bp, Homo sapien
tggatctcggggtaaaaggagctga

SEQ ID NO: 319443 - DNA, 25 bp, Homo sapien
tctgcacgctgtcgctggcatgagc

SEQ ID NO: 319444 - DNA, 25 bp, Homo sapien
gcacgctgtcgctggcatgagcagc

SEQ ID NO: 319445 - DNA, 25 bp, Homo sapien
gcctggatctcggggtaaaaggagc

SEQ ID NO: 319446 - DNA, 25 bp, Homo sapien
catcaagccatgtgggacgtctgtg

SEQ ID NO: 319447 - DNA, 25 bp, Homo sapien
tgggcatcaagacgtatcgacccac

SEQ ID NO: 319448 - DNA, 25 bp, Homo sapien
gccctgggcatcaagacgtatcgac

SEQ ID NO: 319449 - DNA, 25 bp, Homo sapien
tgtgacaaggacgatgccatcaagc

SEQ ID NO: 319450 - DNA, 25 bp, Homo sapien
tgcgtcactggcagaagactgaggc

SEQ ID NO: 319451 - DNA, 25 bp, Homo sapien
atgtctatgccggagcaccaggctg

SEQ ID NO: 319452 - DNA, 25 bp, Homo sapien
ttcaaggccaccgacgctcctggga

SEQ ID NO: 319453 - DNA, 25 bp, Homo sapien
ctgggaggcagtcagtgccgtctcc

SEQ ID NO: 319454 - DNA, 25 bp, Homo sapien
gatgctcatgttgtcggtgttgagc

SEQ ID NO: 319455 - DNA, 25 bp, Homo sapien
tgttgagcacgccgtggcagaagcc

SEQ ID NO: 319456 - DNA, 25 bp, Homo sapien
gaagccaaagggcccgtagtcgatg

SEQ ID NO: 319457 - DNA, 25 bp, Homo sapien
ccgtagtcgatggtgagccccagga

SEQ ID NO: 319458 - DNA, 25 bp, Homo sapien
tagtgcctttggaactcggcgtcaa

SEQ ID NO: 319459 - DNA, 25 bp, Homo sapien
gctgcttgctgtacgcgtagcggcc

SEQ ID NO: 319460 - DNA, 25 bp, Homo sapien
tgtcggaggcattgcacacgtggtc

SEQ ID NO: 319461 - DNA, 25 bp, Homo sapien
tgcgcatcttctgcaggtagtgcct

SEQ ID NO: 319462 - DNA, 25 bp, Homo sapien
gctggtaaccggctcacacagggtt

SEQ ID NO: 319463 - DNA, 25 bp, Homo sapien
gctgtacagcactgctcctgcgtca

SEQ ID NO: 319464 - DNA, 25 bp, Homo sapien
tcctgcgtcagctgtgatgtgcggt

SEQ ID NO: 319465 - DNA, 25 bp, Homo sapien
cggatgtgaacaagctccagggctc

SEQ ID NO: 319466 - DNA, 25 bp, Homo sapien
ttcacagactcggagcggagtggtt

SEQ ID NO: 319467 - DNA, 25 bp, Homo sapien
agtcaggttcacagactcggagcgg

SEQ ID NO: 319468 - DNA, 25 bp, Homo sapien
caggttcacagactcggagcggagt

SEQ ID NO: 319469 - DNA, 25 bp, Homo sapien
actcggagcggagtggttgctacca

SEQ ID NO: 319470 - DNA, 25 bp, Homo sapien
caggcctggcgactctagctccact

SEQ ID NO: 319471 - DNA, 25 bp, Homo sapien
caggaattccgccaggcctggcgac

SEQ ID NO: 319472 - DNA, 25 bp, Homo sapien
attccgccaggcctggcgactctag

SEQ ID NO: 319473 - DNA, 25 bp, Homo sapien
ctggccaggaattccgccaggcctg

SEQ ID NO: 319474 - DNA, 25 bp, Homo sapien
tattttccacgtctcatcctgcacg

SEQ ID NO: 319475 - DNA, 25 bp, Homo sapien
agcatcgcagagatgccctgaagcc

SEQ ID NO: 319476 - DNA, 25 bp, Homo sapien
cacgtgggcgggactcttcagacag

SEQ ID NO: 319477 - DNA, 25 bp, Homo sapien
cattctccctagaaacccagaggct

SEQ ID NO: 319478 - DNA, 25 bp, Homo sapien
tgtacgcctgtagccagtcagccca

SEQ ID NO: 319479 - DNA, 25 bp, Homo sapien
tgcccgggtgcccataagcgcgaac

SEQ ID NO: 319480 - DNA, 25 bp, Homo sapien
tgcgggtttgactgcgccagcatca

SEQ ID NO: 319481 - DNA, 25 bp, Homo sapien
tgctccagccgagactgctgctcca

SEQ ID NO: 319482 - DNA, 25 bp, Homo sapien
ctggaatgacatccgggctctggag

SEQ ID NO: 319483 - DNA, 25 bp, Homo sapien
ctttttccagcacgcgacccgccgt

SEQ ID NO: 319484 - DNA, 25 bp, Homo sapien
ccggtgaccatggacgcagggctca

SEQ ID NO: 319485 - DNA, 25 bp, Homo sapien
tcacagccgggctggactttttcca

SEQ ID NO: 319486 - DNA, 25 bp, Homo sapien
ggttgttggcgtgcatcacgcgcac

SEQ ID NO: 319487 - DNA, 25 bp, Homo sapien
tggcgtgcatcacgcgcacgtgctc

SEQ ID NO: 319488 - DNA, 25 bp, Homo sapien
tgttggcgtgcatcacgcgcacgtg

SEQ ID NO: 319489 - DNA, 25 bp, Homo sapien
ttcgggttgttggcgtgcatcacgc

SEQ ID NO: 319490 - DNA, 25 bp, Homo sapien
cgcgatgtagttcctcagcacgtac

SEQ ID NO: 319491 - DNA, 25 bp, Homo sapien
gcgctcggcagcctcgatggcattc

SEQ ID NO: 319492 - DNA, 25 bp, Homo sapien
gcctcgatggcattctgcgcgatgt

SEQ ID NO: 319493 - DNA, 25 bp, Homo sapien
gcattctgcgcgatgtagttcctca

SEQ ID NO: 319494 - DNA, 25 bp, Homo sapien
accacagggacaggcgtgtgcttgc

SEQ ID NO: 319495 - DNA, 25 bp, Homo sapien
ctggaggatcaggagggtgagaggg

SEQ ID NO: 319496 - DNA, 25 bp, Homo sapien
cagggaccacagggacaggcgtgtg

SEQ ID NO: 319497 - DNA, 25 bp, Homo sapien
tcccagggaccacagggacaggcgt

SEQ ID NO: 319498 - DNA, 25 bp, Homo sapien
gggtctccagtagtttcagcacccg

SEQ ID NO: 319499 - DNA, 25 bp, Homo sapien
ggtctccagtagtttcagcacccgc

SEQ ID NO: 319500 - DNA, 25 bp, Homo sapien
aaggggtctccagtagtttcagcac

SEQ ID NO: 319501 - DNA, 25 bp, Homo sapien
tggtaaggggtctccagtagtttca

SEQ ID NO: 319502 - DNA, 25 bp, Homo sapien
ctgctgtaggagcgctgcctgccgt

SEQ ID NO: 319503 - DNA, 25 bp, Homo sapien
tgtaggagcgctgcctgccgtccgc

SEQ ID NO: 319504 - DNA, 25 bp, Homo sapien
gctgtaggagcgctgcctgccgtcc

SEQ ID NO: 319505 - DNA, 25 bp, Homo sapien
ccgtcggcttccgtggcctcggcgt

SEQ ID NO: 319506 - DNA, 25 bp, Homo sapien
tcatgtcacgcacagttctgctgcc

SEQ ID NO: 319507 - DNA, 25 bp, Homo sapien
tcgggagactccaggggtgtggagc

SEQ ID NO: 319508 - DNA, 25 bp, Homo sapien
caggggtgtggagcgtgccgaggcc

SEQ ID NO: 319509 - DNA, 25 bp, Homo sapien
cacatgggggcctcgggagactcca

SEQ ID NO: 319510 - DNA, 25 bp, Homo sapien
cttggccactcagcagcacatgggg

SEQ ID NO: 319511 - DNA, 25 bp, Homo sapien
tctgccatcatggaaagacgggtgt

SEQ ID NO: 319512 - DNA, 25 bp, Homo sapien
cagtgtatagggcagcctggcatca

SEQ ID NO: 319513 - DNA, 25 bp, Homo sapien
cctcagacagagacgggtcaggtcc

SEQ ID NO: 319514 - DNA, 25 bp, Homo sapien
gcagaatcccccagtgtatagggca

SEQ ID NO: 319515 - DNA, 25 bp, Homo sapien
gtgctgttatcaacctgtcctgtgc

SEQ ID NO: 319516 - DNA, 25 bp, Homo sapien
ctgtgctgttatcaacctgtcctgt

SEQ ID NO: 319517 - DNA, 25 bp, Homo sapien
tgtcccaggctgagtagtgctggat

SEQ ID NO: 319518 - DNA, 25 bp, Homo sapien
accgcgctcggctgagacagggcat

SEQ ID NO: 319519 - DNA, 25 bp, Homo sapien
tgtcccccggatctcggtgattttc

SEQ ID NO: 319520 - DNA, 25 bp, Homo sapien
tctgttggtccgacgtccctgtccc

SEQ ID NO: 319521 - DNA, 25 bp, Homo sapien
ccctgtcccccggatctcggtgatt

SEQ ID NO: 319522 - DNA, 25 bp, Homo sapien
tcccccggatctcggtgattttctc

SEQ ID NO: 319523 - DNA, 25 bp, Homo sapien
gattaataacgttcatatataatca

SEQ ID NO: 319524 - DNA, 25 bp, Homo sapien
cgtaagttacaattgtagagcgaag

SEQ ID NO: 319525 - DNA, 25 bp, Homo sapien
tatgatctatagtgtaactattctt

SEQ ID NO: 319526 - DNA, 25 bp, Homo sapien
ttctcgtaagttacaattgtagagc

SEQ ID NO: 319527 - DNA, 25 bp, Homo sapien
gccgcgaggattgcgggcggacgcc

SEQ ID NO: 319528 - DNA, 25 bp, Homo sapien
cgaggccgcgaggattgcgggcgga

SEQ ID NO: 319529 - DNA, 25 bp, Homo sapien
gcctgcagcgaggccgcgaggattg

SEQ ID NO: 319530 - DNA, 25 bp, Homo sapien
cagcgaggccgcgaggattgcgggc

SEQ ID NO: 319531 - DNA, 25 bp, Homo sapien
aaagtggactaggagtgtgaccgct

SEQ ID NO: 319532 - DNA, 25 bp, Homo sapien
gaaagtggactaggagtgtgaccgc

SEQ ID NO: 319533 - DNA, 25 bp, Homo sapien
tattgtcactaatttactactgcta

SEQ ID NO: 319534 - DNA, 25 bp, Homo sapien
tgcatatcagggactattagtattg

SEQ ID NO: 319535 - DNA, 25 bp, Homo sapien
caaaggtcaagtgagacgtaggtca

SEQ ID NO: 319536 - DNA, 25 bp, Homo sapien
tgccggcactctgggtggactcacg

SEQ ID NO: 319537 - DNA, 25 bp, Homo sapien
ggagaaaaagcggtacgatgccttc

SEQ ID NO: 319538 - DNA, 25 bp, Homo sapien
tacgtcggggcccagacatcctggg

SEQ ID NO: 319539 - DNA, 25 bp, Homo sapien
agctgctgtacgccaaggagatctc

SEQ ID NO: 319540 - DNA, 25 bp, Homo sapien
aagctgctgtacgccaaggagatct

SEQ ID NO: 319541 - DNA, 25 bp, Homo sapien
acagctccagtcccactactaacca

SEQ ID NO: 319542 - DNA, 25 bp, Homo sapien
tcacagctccagtcccactactaac

SEQ ID NO: 319543 - DNA, 25 bp, Homo sapien
ccagcatgggagtttctgatgtgct

SEQ ID NO: 319544 - DNA, 25 bp, Homo sapien
agcatgggagtttctgatgtgctcc

SEQ ID NO: 319545 - DNA, 25 bp, Homo sapien
ttggagtatatgcagctttaagaaa

SEQ ID NO: 319546 - DNA, 25 bp, Homo sapien
cttggagtatatgcagctttaagaa

SEQ ID NO: 319547 - DNA, 25 bp, Homo sapien
taccttgagaggaatcgagcttaac

SEQ ID NO: 319548 - DNA, 25 bp, Homo sapien
gaaggtagtctaacctagcctaaca

SEQ ID NO: 319549 - DNA, 25 bp, Homo sapien
gaggatagagcccttcagagttcca

SEQ ID NO: 319550 - DNA, 25 bp, Homo sapien
gacaaaagcagaccccattctatgg

SEQ ID NO: 319551 - DNA, 25 bp, Homo sapien
tgcacaatgatggcttgacctcctg

SEQ ID NO: 319552 - DNA, 25 bp, Homo sapien
taaaaataagaagcacactcagcca

SEQ ID NO: 319553 - DNA, 25 bp, Homo sapien
taagaagcacactcagccagcatgc

SEQ ID NO: 319554 - DNA, 25 bp, Homo sapien
agccagcatgctagatcacgcctgt

SEQ ID NO: 319555 - DNA, 25 bp, Homo sapien
gctgctcagataaagttgatctgtg

SEQ ID NO: 319556 - DNA, 25 bp, Homo sapien
cagaacattaagtaaacatccatta

SEQ ID NO: 319557 - DNA, 25 bp, Homo sapien
ttgtcttctcaaatctgtagacttc

SEQ ID NO: 319558 - DNA, 25 bp, Homo sapien
ttactctcctttggctagctataaa

SEQ ID NO: 319559 - DNA, 25 bp, Homo sapien
actgcacccctccaatgctaatttg

SEQ ID NO: 319560 - DNA, 25 bp, Homo sapien
actgttttctgcctaaagtccattc

SEQ ID NO: 319561 - DNA, 25 bp, Homo sapien
gttttctgcctaaagtccattctat

SEQ ID NO: 319562 - DNA, 25 bp, Homo sapien
caatgctaatttgaatttgctcaca

SEQ ID NO: 319563 - DNA, 25 bp, Homo sapien
tctcaggtattctaaacagcagaaa

SEQ ID NO: 319564 - DNA, 25 bp, Homo sapien
gattaagacactgagcttcatataa

SEQ ID NO: 319565 - DNA, 25 bp, Homo sapien
cagattaagacactgagcttcatat

SEQ ID NO: 319566 - DNA, 25 bp, Homo sapien
tcaggtattctaaacagcagaaaac

SEQ ID NO: 319567 - DNA, 25 bp, Homo sapien
gatcatatagttccatgaaagcgcc

SEQ ID NO: 319568 - DNA, 25 bp, Homo sapien
gaatgttgcccatatgatcatatag

SEQ ID NO: 319569 - DNA, 25 bp, Homo sapien
tgatcatatagttccatgaaagcgc

SEQ ID NO: 319570 - DNA, 25 bp, Homo sapien
ctgcaacagaatgttgcccatatga

SEQ ID NO: 319571 - DNA, 25 bp, Homo sapien
atggcatatccgtcagacagaaggt

SEQ ID NO: 319572 - DNA, 25 bp, Homo sapien
gatggcatatccgtcagacagaagg

SEQ ID NO: 319573 - DNA, 25 bp, Homo sapien
ggatggcatatccgtcagacagaag

SEQ ID NO: 319574 - DNA, 25 bp, Homo sapien
aggatggcatatccgtcagacagaa

SEQ ID NO: 319575 - DNA, 25 bp, Homo sapien
gaaactggtataaactgactccaga

SEQ ID NO: 319576 - DNA, 25 bp, Homo sapien
gcaatggcactggtttagttacagc

SEQ ID NO: 319577 - DNA, 25 bp, Homo sapien
gatcacatcagagacatcctttaag

SEQ ID NO: 319578 - DNA, 25 bp, Homo sapien
ctcacctacagggaaggccttccat

SEQ ID NO: 319579 - DNA, 25 bp, Homo sapien
ccatgaccagctaatgtttacattt

SEQ ID NO: 319580 - DNA, 25 bp, Homo sapien
tttttttgagacggagtctcactct

SEQ ID NO: 319581 - DNA, 25 bp, Homo sapien
tttttgagacggagtctcactctgt

SEQ ID NO: 319582 - DNA, 25 bp, Homo sapien
tttgagacggagtctcactctgtag

SEQ ID NO: 319583 - DNA, 25 bp, Homo sapien
aaagacaaacattgtcagactggat

SEQ ID NO: 319584 - DNA, 25 bp, Homo sapien
ctgggtggattacaaaagaccatcg

SEQ ID NO: 319585 - DNA, 25 bp, Homo sapien
tacaaaagaccatcgacgaaatagg

SEQ ID NO: 319586 - DNA, 25 bp, Homo sapien
cgaaataggatcctgctagaagaat

SEQ ID NO: 319587 - DNA, 25 bp, Homo sapien
gaccatcgacgaaataggatcctgc

SEQ ID NO: 319588 - DNA, 25 bp, Homo sapien
ttctggacggtcctgtttctagcca

SEQ ID NO: 319589 - DNA, 25 bp, Homo sapien
agtgaatccaaccttgtcaaggctt

SEQ ID NO: 319590 - DNA, 25 bp, Homo sapien
ccagggaaagaagtgaatccaacct

SEQ ID NO: 319591 - DNA, 25 bp, Homo sapien
aatcagaacttgcaagatagggcag

SEQ ID NO: 319592 - DNA, 25 bp, Homo sapien
cacatatcagatactcctctctctg

SEQ ID NO: 319593 - DNA, 25 bp, Homo sapien
accaagcctggtctgcaatcagttt

SEQ ID NO: 319594 - DNA, 25 bp, Homo sapien
gaaatgcactaccagatgtctcacg

SEQ ID NO: 319595 - DNA, 25 bp, Homo sapien
tatttatgagtggtagcggcaaact

SEQ ID NO: 319596 - DNA, 25 bp, Homo sapien
gtttgtctgactgtaaagccggtga

SEQ ID NO: 319597 - DNA, 25 bp, Homo sapien
tgtaaagccggtgatgccctaggac

SEQ ID NO: 319598 - DNA, 25 bp, Homo sapien
ctaggacccctgacacgggagcctc

SEQ ID NO: 319599 - DNA, 25 bp, Homo sapien
gatgtaaatgcccaggtttgtctga

SEQ ID NO: 319600 - DNA, 25 bp, Homo sapien
gacatgcccctcaatgctcttgctt

SEQ ID NO: 319601 - DNA, 25 bp, Homo sapien
cctcaatgctcttgcttgctctgta

SEQ ID NO: 319602 - DNA, 25 bp, Homo sapien
atgcccctcaatgctcttgcttgct

SEQ ID NO: 319603 - DNA, 25 bp, Homo sapien
agcgtgctcgacatgcccctcaatg

SEQ ID NO: 319604 - DNA, 25 bp, Homo sapien
agcagacttcccagctgctcaacag

SEQ ID NO: 319605 - DNA, 25 bp, Homo sapien
cctctccaggttgggctcacaaagt

SEQ ID NO: 319606 - DNA, 25 bp, Homo sapien
ggttgggctcacaaagttagcagac

SEQ ID NO: 319607 - DNA, 25 bp, Homo sapien
aaagttagcagacttcccagctgct

SEQ ID NO: 319608 - DNA, 25 bp, Homo sapien
ctctgcagatccaccctcagcaaca

SEQ ID NO: 319609 - DNA, 25 bp, Homo sapien
cctcagcaacactagacccaagtcc

SEQ ID NO: 319610 - DNA, 25 bp, Homo sapien
agatccaccctcagcaacactagac

SEQ ID NO: 319611 - DNA, 25 bp, Homo sapien
agcaacactagacccaagtcctgga

SEQ ID NO: 319612 - DNA, 25 bp, Homo sapien
agcaacactagacccaagtccaaag

SEQ ID NO: 319613 - DNA, 25 bp, Homo sapien
cagcaacactagacccaagtccaaa

SEQ ID NO: 319614 - DNA, 25 bp, Homo sapien
agtccaaaggggtcatttctctcac

SEQ ID NO: 319615 - DNA, 25 bp, Homo sapien
ccaagtccaaaggggtcatttctct

SEQ ID NO: 319616 - DNA, 25 bp, Homo sapien
tgcaaacgagggcaaaggggtcacg

SEQ ID NO: 319617 - DNA, 25 bp, Homo sapien
ctgcaaacgagggcaaaggggtcac

SEQ ID NO: 319618 - DNA, 25 bp, Homo sapien
agggcaaaggggtcacgtctctcac

SEQ ID NO: 319619 - DNA, 25 bp, Homo sapien
acgagggcaaaggggtcacgtctct

SEQ ID NO: 319620 - DNA, 25 bp, Homo sapien
gcttctggttctgagccttacactc

SEQ ID NO: 319621 - DNA, 25 bp, Homo sapien
gtgttcaagtcaaacttccagaaca

SEQ ID NO: 319622 - DNA, 25 bp, Homo sapien
tccagcagcttgtcaacatgggacg

SEQ ID NO: 319623 - DNA, 25 bp, Homo sapien
gccttacactcctgcaagatgtcat

SEQ ID NO: 319624 - DNA, 25 bp, Homo sapien
gatcctgtgtgatgaggctcaccag

SEQ ID NO: 319625 - DNA, 25 bp, Homo sapien
ttctcctccatgtccaggggcggat

SEQ ID NO: 319626 - DNA, 25 bp, Homo sapien
gcggatcctgtgtgatgaggctcac

SEQ ID NO: 319627 - DNA, 25 bp, Homo sapien
tcctccatgtccaggggcggatcct

SEQ ID NO: 319628 - DNA, 25 bp, Homo sapien
ttcatcagaaatccccaactatggc

SEQ ID NO: 319629 - DNA, 25 bp, Homo sapien
ttcaacctcagaccccatgggagtg

SEQ ID NO: 319630 - DNA, 25 bp, Homo sapien
tcctgagtacagtagcctctgggac

SEQ ID NO: 319631 - DNA, 25 bp, Homo sapien
tttacggctcgcttcttcatcagaa

SEQ ID NO: 319632 - DNA, 25 bp, Homo sapien
cccttctgtcctgactcaaggccct

SEQ ID NO: 319633 - DNA, 25 bp, Homo sapien
acccttctgtcctgactcaaggccc

SEQ ID NO: 319634 - DNA, 25 bp, Homo sapien
ggctccagccatctcgccacactgc

SEQ ID NO: 319635 - DNA, 25 bp, Homo sapien
gctccagccatctcgccacactgcc

SEQ ID NO: 319636 - DNA, 25 bp, Homo sapien
tgcgggtcatgtgtgcctcgcagat

SEQ ID NO: 319637 - DNA, 25 bp, Homo sapien
gggacactgcgggtcatgtgtgcct

SEQ ID NO: 319638 - DNA, 25 bp, Homo sapien
ggtcatgtgtgcctcgcagatctgc

SEQ ID NO: 319639 - DNA, 25 bp, Homo sapien
tcatgtgtgcctcgcagatctgcac

SEQ ID NO: 319640 - DNA, 25 bp, Homo sapien
acatgacctgcaggccgaggtttgc

SEQ ID NO: 319641 - DNA, 25 bp, Homo sapien
gccgaggtttgctaacctgtatgta

SEQ ID NO: 319642 - DNA, 25 bp, Homo sapien
tcacaggacacacggaaaaggacat

SEQ ID NO: 319643 - DNA, 25 bp, Homo sapien
ggacacacggaaaaggacatgacct

SEQ ID NO: 319644 - DNA, 25 bp, Homo sapien
caggcgtgcgccactacgccctgct

SEQ ID NO: 319645 - DNA, 25 bp, Homo sapien
gcgtgcgccactacgccctgctaat

SEQ ID NO: 319646 - DNA, 25 bp, Homo sapien
aggcgtgcgccactacgccctgcta

SEQ ID NO: 319647 - DNA, 25 bp, Homo sapien
aatcttaactgcttgtgaccaatta

SEQ ID NO: 319648 - DNA, 25 bp, Homo sapien
aggctagtcatgtgacgcagacaga

SEQ ID NO: 319649 - DNA, 25 bp, Homo sapien
ctagtcatgtgacgcagacagactg

SEQ ID NO: 319650 - DNA, 25 bp, Homo sapien
ttaactgcttgtgaccaattaggtg

SEQ ID NO: 319651 - DNA, 25 bp, Homo sapien
gaagagtcctcccataattgagcct

SEQ ID NO: 319652 - DNA, 25 bp, Homo sapien
tcctcccataattgagcctgtggtc

SEQ ID NO: 319653 - DNA, 25 bp, Homo sapien
cctgtggtcatggaggtgttctgcc

SEQ ID NO: 319654 - DNA, 25 bp, Homo sapien
ggctaacaggttgcgggaggcggtg

SEQ ID NO: 319655 - DNA, 25 bp, Homo sapien
caagagctcacgaaaagaccaggag

SEQ ID NO: 319656 - DNA, 25 bp, Homo sapien
tgctccgcagaagcagggctagctg

SEQ ID NO: 319657 - DNA, 25 bp, Homo sapien
ggagcatccccaggctctagggctg

SEQ ID NO: 319658 - DNA, 25 bp, Homo sapien
gatcttggcaagcaaactagacaag

SEQ ID NO: 319659 - DNA, 25 bp, Homo sapien
caccatccagaaatagggaacttgg

SEQ ID NO: 319660 - DNA, 25 bp, Homo sapien
tagaaattccagtcaaacacagcag

SEQ ID NO: 319661 - DNA, 25 bp, Homo sapien
tggacactgatttggcggccagtaa

SEQ ID NO: 319662 - DNA, 25 bp, Homo sapien
agccggccacgtgaagactgacttg

SEQ ID NO: 319663 - DNA, 25 bp, Homo sapien
aggacgcagccctcaacagcagccc

SEQ ID NO: 319664 - DNA, 25 bp, Homo sapien
gtgaataaggtactttgctccctct

SEQ ID NO: 319665 - DNA, 25 bp, Homo sapien
tttgtaactggtagacagaggtggg

SEQ ID NO: 319666 - DNA, 25 bp, Homo sapien
aggagaggtacaccccacagcccag

SEQ ID NO: 319667 - DNA, 25 bp, Homo sapien
aaaactggcgagcagaggattgaga

SEQ ID NO: 319668 - DNA, 25 bp, Homo sapien
catggtccaagaagtcgtacaggag

SEQ ID NO: 319669 - DNA, 25 bp, Homo sapien
tgatctgcggcacatcacaagtcag

SEQ ID NO: 319670 - DNA, 25 bp, Homo sapien
aatggtcttgctgaaaaaactggcg

SEQ ID NO: 319671 - DNA, 25 bp, Homo sapien
gaatgtttgatggtatgaaacaatt

SEQ ID NO: 319672 - DNA, 25 bp, Homo sapien
aaaaattagcgggtcatgggggcag

SEQ ID NO: 319673 - DNA, 25 bp, Homo sapien
attagcgggtcatgggggcaggcac

SEQ ID NO: 319674 - DNA, 25 bp, Homo sapien
gttcaagactgccttgccaacatgg

SEQ ID NO: 319675 - DNA, 25 bp, Homo sapien
cctgggagacaaaagggagactttg

SEQ ID NO: 319676 - DNA, 25 bp, Homo sapien
ctgtctcagccccaccaaggagctg

SEQ ID NO: 319677 - DNA, 25 bp, Homo sapien
ttctcctgtctcagccccaccaagg

SEQ ID NO: 319678 - DNA, 25 bp, Homo sapien
tctcctgtctcagccccaccaagga

SEQ ID NO: 319679 - DNA, 25 bp, Homo sapien
tcctgtctcagccccaccaaggagc

SEQ ID NO: 319680 - DNA, 25 bp, Homo sapien
cagtgccaacaaggtgtagacagct

SEQ ID NO: 319681 - DNA, 25 bp, Homo sapien
tgtagacagctaagcgtgaggccat

SEQ ID NO: 319682 - DNA, 25 bp, Homo sapien
cagctggctgatgaccagtgccaac

SEQ ID NO: 319683 - DNA, 25 bp, Homo sapien
gcagctggctgatgaccagtgccaa

SEQ ID NO: 319684 - DNA, 25 bp, Homo sapien
agagtgcacaagacgccagctgctg

SEQ ID NO: 319685 - DNA, 25 bp, Homo sapien
acagagtgcacaagacgccagctgc

SEQ ID NO: 319686 - DNA, 25 bp, Homo sapien
gcacagagtgcacaagacgccagct

SEQ ID NO: 319687 - DNA, 25 bp, Homo sapien
gagtgcacaagacgccagctgctga

SEQ ID NO: 319688 - DNA, 25 bp, Homo sapien
caacagaaacgaatggtatagacag

SEQ ID NO: 319689 - DNA, 25 bp, Homo sapien
ttttccaacagaaacgaatggtata

SEQ ID NO: 319690 - DNA, 25 bp, Homo sapien
cagaaacgaatggtatagacagagc

SEQ ID NO: 319691 - DNA, 25 bp, Homo sapien
aaacgaatggtatagacagagctga

SEQ ID NO: 319692 - DNA, 25 bp, Homo sapien
ggggccgaccctgacaaccctgaga

SEQ ID NO: 319693 - DNA, 25 bp, Homo sapien
gcaggcggggccgaccctgacaacc

SEQ ID NO: 319694 - DNA, 25 bp, Homo sapien
gcggggccgaccctgacaaccctga

SEQ ID NO: 319695 - DNA, 25 bp, Homo sapien
gaggcaggcggggccgaccctgaca

SEQ ID NO: 319696 - DNA, 25 bp, Homo sapien
cataagcgctgaggtgccgatgtgc

SEQ ID NO: 319697 - DNA, 25 bp, Homo sapien
gtgccgatgtgcttcaacaccaggc

SEQ ID NO: 319698 - DNA, 25 bp, Homo sapien
gcaggtccataagcgctgaggtgcc

SEQ ID NO: 319699 - DNA, 25 bp, Homo sapien
tgcaggacgtcctgccggagcccgg

SEQ ID NO: 319700 - DNA, 25 bp, Homo sapien
atccacactccagggtaaacaacgg

SEQ ID NO: 319701 - DNA, 25 bp, Homo sapien
ccccacggagaaatgcacgctaggt

SEQ ID NO: 319702 - DNA, 25 bp, Homo sapien
cctcttcacagagccggaggctgga

SEQ ID NO: 319703 - DNA, 25 bp, Homo sapien
tggaaaaggtacaggccacaatcct

SEQ ID NO: 319704 - DNA, 25 bp, Homo sapien
tggctcgggtggatcaactccacaa

SEQ ID NO: 319705 - DNA, 25 bp, Homo sapien
tcctggctcgggtggatcaactcca

SEQ ID NO: 319706 - DNA, 25 bp, Homo sapien
tcgggtggatcaactccacaagcct

SEQ ID NO: 319707 - DNA, 25 bp, Homo sapien
atcctggctcgggtggatcaactcc

SEQ ID NO: 319708 - DNA, 25 bp, Homo sapien
gggaaacattaacacgcaatccgtg

SEQ ID NO: 319709 - DNA, 25 bp, Homo sapien
gtgatgggaacgtgcccctgctgac

SEQ ID NO: 319710 - DNA, 25 bp, Homo sapien
tcaaaacagggctaataatggtcag

SEQ ID NO: 319711 - DNA, 25 bp, Homo sapien
gatactgggctatacctgtgatcca

SEQ ID NO: 319712 - DNA, 25 bp, Homo sapien
tgtgaggagcgggtctggctccaga

SEQ ID NO: 319713 - DNA, 25 bp, Homo sapien
cccagcctaactatgtcacagagag

SEQ ID NO: 319714 - DNA, 25 bp, Homo sapien
agcctaactatgtcacagagagtct

SEQ ID NO: 319715 - DNA, 25 bp, Homo sapien
ccagcgctgtgaggagcgggtctgg

SEQ ID NO: 319716 - DNA, 25 bp, Homo sapien
ttcctccccgtggaggaccccagca

SEQ ID NO: 319717 - DNA, 25 bp, Homo sapien
caggccccaagttaacatgggctct

SEQ ID NO: 319718 - DNA, 25 bp, Homo sapien
cacacacaaaggatgcaaggatgct

SEQ ID NO: 319719 - DNA, 25 bp, Homo sapien
aggctcaaggcaaggcgccagggtt

SEQ ID NO: 319720 - DNA, 25 bp, Homo sapien
gacgaggcagctctccgtccggtct

SEQ ID NO: 319721 - DNA, 25 bp, Homo sapien
ggtgagtaacacctgagtcccactg

SEQ ID NO: 319722 - DNA, 25 bp, Homo sapien
aggtgagtaacacctgagtcccact

SEQ ID NO: 319723 - DNA, 25 bp, Homo sapien
ctgagtcccactgacgaggcagctc

SEQ ID NO: 319724 - DNA, 25 bp, Homo sapien
ggctgccatatcactgaggcgtcaa

SEQ ID NO: 319725 - DNA, 25 bp, Homo sapien
cacgatttctcctcgtgagactcac

SEQ ID NO: 319726 - DNA, 25 bp, Homo sapien
cagactgctcgtgtgggctgccata

SEQ ID NO: 319727 - DNA, 25 bp, Homo sapien
tcaagttcagctctacacgatttct

SEQ ID NO: 319728 - DNA, 25 bp, Homo sapien
tgttccacgcacatcgacaaatgca

SEQ ID NO: 319729 - DNA, 25 bp, Homo sapien
aactggtcgtgacgagcagcttcag

SEQ ID NO: 319730 - DNA, 25 bp, Homo sapien
cgcacatcgacaaatgcatcgccaa

SEQ ID NO: 319731 - DNA, 25 bp, Homo sapien
caaatgcatcgccaactggtcgtga

SEQ ID NO: 319732 - DNA, 25 bp, Homo sapien
ggagctgtggggacttgtcggaaca

SEQ ID NO: 319733 - DNA, 25 bp, Homo sapien
agctgtggggacttgtcggaacagt

SEQ ID NO: 319734 - DNA, 25 bp, Homo sapien
gacttgtcggaacagtccttgggga

SEQ ID NO: 319735 - DNA, 25 bp, Homo sapien
tgtggggacttgtcggaacagtcct

SEQ ID NO: 319736 - DNA, 25 bp, Homo sapien
tgacttgagggaaggactaggccac

SEQ ID NO: 319737 - DNA, 25 bp, Homo sapien
caccttgggagagttagacatcgtc

SEQ ID NO: 319738 - DNA, 25 bp, Homo sapien
gacacaccctataggatctcctggg

SEQ ID NO: 319739 - DNA, 25 bp, Homo sapien
aataagggagctacggccaccttgg

SEQ ID NO: 319740 - DNA, 25 bp, Homo sapien
tcaccagcaactcagtgcacccgct

SEQ ID NO: 319741 - DNA, 25 bp, Homo sapien
tgtggatgaggaaagcagatggaga

SEQ ID NO: 319742 - DNA, 25 bp, Homo sapien
cagcaactcagtgcacccgcttctt

SEQ ID NO: 319743 - DNA, 25 bp, Homo sapien
caactcagtgcacccgcttcttcca

SEQ ID NO: 319744 - DNA, 25 bp, Homo sapien
tggaagtccttcagccgaggctcga

SEQ ID NO: 319745 - DNA, 25 bp, Homo sapien
cagccgaggctcgatgccgtgtagt

SEQ ID NO: 319746 - DNA, 25 bp, Homo sapien
ccgtgtagtacgctgctgctgacag

SEQ ID NO: 319747 - DNA, 25 bp, Homo sapien
cgtatgacctttccagtccctgaga

SEQ ID NO: 319748 - DNA, 25 bp, Homo sapien
tccatcgtgttgagccggcagagct

SEQ ID NO: 319749 - DNA, 25 bp, Homo sapien
cagcagtaagtccatcgtgttgagc

SEQ ID NO: 319750 - DNA, 25 bp, Homo sapien
ccaatggtggtcaggatcgctttct

SEQ ID NO: 319751 - DNA, 25 bp, Homo sapien
tgaggcgggcgccatgcagacgggc

SEQ ID NO: 319752 - DNA, 25 bp, Homo sapien
cttccacacgctgacagaactgagc

SEQ ID NO: 319753 - DNA, 25 bp, Homo sapien
gccagacagcacttcgagcccagtt

SEQ ID NO: 319754 - DNA, 25 bp, Homo sapien
acggaccttccacacgcggacagac

SEQ ID NO: 319755 - DNA, 25 bp, Homo sapien
cacacgctgacagaactgagccaga

SEQ ID NO: 319756 - DNA, 25 bp, Homo sapien
agatgacgagcatcagccacacgga

SEQ ID NO: 319757 - DNA, 25 bp, Homo sapien
gcacgagaagatgctcgacatcact

SEQ ID NO: 319758 - DNA, 25 bp, Homo sapien
tatgatcactgtactgcaagaccct

SEQ ID NO: 319759 - DNA, 25 bp, Homo sapien
tattcacatggccaaaaagcacgag

SEQ ID NO: 319760 - DNA, 25 bp, Homo sapien
gcatagttccacttggaagtgcaaa

SEQ ID NO: 319761 - DNA, 25 bp, Homo sapien
gctccggttcccgttctcatgcgga

SEQ ID NO: 319762 - DNA, 25 bp, Homo sapien
tctcggatccgctggcttctgtcct

SEQ ID NO: 319763 - DNA, 25 bp, Homo sapien
tgggagagaatagcggctatgcata

SEQ ID NO: 319764 - DNA, 25 bp, Homo sapien
cgtgtggtcgttggcttcccaggcc

SEQ ID NO: 319765 - DNA, 25 bp, Homo sapien
caggatcctctgcaccaggcagcac

SEQ ID NO: 319766 - DNA, 25 bp, Homo sapien
ggatcctctgcaccaggcagcactt

SEQ ID NO: 319767 - DNA, 25 bp, Homo sapien
tgcgtgtggtcgttggcttcccagg

SEQ ID NO: 319768 - DNA, 25 bp, Homo sapien
cccacgtctcatgccacccgctgcc

SEQ ID NO: 319769 - DNA, 25 bp, Homo sapien
tcccacgtctcatgccacccgctgc

SEQ ID NO: 319770 - DNA, 25 bp, Homo sapien
ctgcaccaccgcgttggcgatccgt

SEQ ID NO: 319771 - DNA, 25 bp, Homo sapien
ttggcgatccgtgtgaggtggccca

SEQ ID NO: 319772 - DNA, 25 bp, Homo sapien
tggcgatccgtgtgaggtggcccat

SEQ ID NO: 319773 - DNA, 25 bp, Homo sapien
caccaccgcgttggcgatccgtgtg

SEQ ID NO: 319774 - DNA, 25 bp, Homo sapien
cgaccagcagaaggatgaccgggtt

SEQ ID NO: 319775 - DNA, 25 bp, Homo sapien
gcagagcttagtctcaggcggcagc

SEQ ID NO: 319776 - DNA, 25 bp, Homo sapien
cggtgcccgcgaccagcagaaggat

SEQ ID NO: 319777 - DNA, 25 bp, Homo sapien
agcttagtctcaggcggcagctcct

SEQ ID NO: 319778 - DNA, 25 bp, Homo sapien
gggctccggcaggtgcatcctgggt

SEQ ID NO: 319779 - DNA, 25 bp, Homo sapien
aaagaggcagcatagccgcgtgtcc

SEQ ID NO: 319780 - DNA, 25 bp, Homo sapien
cgctgctactgtggtcagcccgtct

SEQ ID NO: 319781 - DNA, 25 bp, Homo sapien
gggctttgccggatgagaaagaggc

SEQ ID NO: 319782 - DNA, 25 bp, Homo sapien
ctgcaagggaagtgctgcctggtga

SEQ ID NO: 319783 - DNA, 25 bp, Homo sapien
ggagaccccgtgcagatggtgcagg

SEQ ID NO: 319784 - DNA, 25 bp, Homo sapien
tgagccctgggagaccccgtgcaga

SEQ ID NO: 319785 - DNA, 25 bp, Homo sapien
accccgtgcagatggtgcagggcac

SEQ ID NO: 319786 - DNA, 25 bp, Homo sapien
gaagctctcccagcggccacggcag

SEQ ID NO: 319787 - DNA, 25 bp, Homo sapien
tccacgaagctctcccagcggccac

SEQ ID NO: 319788 - DNA, 25 bp, Homo sapien
cggccacggcagtccgcagggagcc

SEQ ID NO: 319789 - DNA, 25 bp, Homo sapien
acgaagctctcccagcggccacggc

SEQ ID NO: 319790 - DNA, 25 bp, Homo sapien
ggggtgggcgtgtgagccagcccag

SEQ ID NO: 319791 - DNA, 25 bp, Homo sapien
ttagggaaagcaccctcaatgtcct

SEQ ID NO: 319792 - DNA, 25 bp, Homo sapien
ttgatgttgtcgtcctggtcggcaa

SEQ ID NO: 319793 - DNA, 25 bp, Homo sapien
tgttgtcgtcctggtcggcaaactc

SEQ ID NO: 319794 - DNA, 25 bp, Homo sapien
gaagccaaactgatccacgaagttg

SEQ ID NO: 319795 - DNA, 25 bp, Homo sapien
gatgttgtcgtcctggtcggcaaac

SEQ ID NO: 319796 - DNA, 25 bp, Homo sapien
ctctgcgatcctgtcaaacggggca

SEQ ID NO: 319797 - DNA, 25 bp, Homo sapien
tcagcgtcgatgttgaagttgatct

SEQ ID NO: 319798 - DNA, 25 bp, Homo sapien
gaagttgatctctgcgatcctgtca

SEQ ID NO: 319799 - DNA, 25 bp, Homo sapien
ctgtcctcgtcagcgtcgatgttga

SEQ ID NO: 319800 - DNA, 25 bp, Homo sapien
ggcttagttcgggatgtgggagccc

SEQ ID NO: 319801 - DNA, 25 bp, Homo sapien
ggcaaggaaagcgactgttccgagc

SEQ ID NO: 319802 - DNA, 25 bp, Homo sapien
ctcccagaggggcttagttcgggat

SEQ ID NO: 319803 - DNA, 25 bp, Homo sapien
aggggcaaggaaagcgactgttccg

SEQ ID NO: 319804 - DNA, 25 bp, Homo sapien
atcacccgggcagcacagcgagtgt

SEQ ID NO: 319805 - DNA, 25 bp, Homo sapien
ccgggcagcacagcgagtgtcactg

SEQ ID NO: 319806 - DNA, 25 bp, Homo sapien
cacccgggcagcacagcgagtgtca

SEQ ID NO: 319807 - DNA, 25 bp, Homo sapien
catcacccgggcagcacagcgagtg

SEQ ID NO: 319808 - DNA, 25 bp, Homo sapien
catctctgtgtgcttccaagctcgc

SEQ ID NO: 319809 - DNA, 25 bp, Homo sapien
tctgtgtgcttccaagctcgccttc

SEQ ID NO: 319810 - DNA, 25 bp, Homo sapien
ctttgagcaactctctgaagcatgg

SEQ ID NO: 319811 - DNA, 25 bp, Homo sapien
tgggccattctttgagcaactctct

SEQ ID NO: 319812 - DNA, 25 bp, Homo sapien
cctccacagggggcgcttccttctt

SEQ ID NO: 319813 - DNA, 25 bp, Homo sapien
cacagggggcgcttccttcttcccg

SEQ ID NO: 319814 - DNA, 25 bp, Homo sapien
tccacagggggcgcttccttcttcc

SEQ ID NO: 319815 - DNA, 25 bp, Homo sapien
ctccacagggggcgcttccttcttc

SEQ ID NO: 319816 - DNA, 25 bp, Homo sapien
gtcctgtccccgatacccacactcc

SEQ ID NO: 319817 - DNA, 25 bp, Homo sapien
tgtcctgtccccgatacccacactc

SEQ ID NO: 319818 - DNA, 25 bp, Homo sapien
ctgtccccgatacccacactcccag

SEQ ID NO: 319819 - DNA, 25 bp, Homo sapien
catgtcctgtccccgatacccacac

SEQ ID NO: 319820 - DNA, 25 bp, Homo sapien
ggctgtgggcgttgagttcgctggc

SEQ ID NO: 319821 - DNA, 25 bp, Homo sapien
gagttcgctggctcatcaaacactg

SEQ ID NO: 319822 - DNA, 25 bp, Homo sapien
tgggcgttgagttcgctggctcatc

SEQ ID NO: 319823 - DNA, 25 bp, Homo sapien
gcgttgagttcgctggctcatcaaa

SEQ ID NO: 319824 - DNA, 25 bp, Homo sapien
agcagaaaggttggaagtcagtgaa

SEQ ID NO: 319825 - DNA, 25 bp, Homo sapien
tggaagtcagtgaacttggcccagc

SEQ ID NO: 319826 - DNA, 25 bp, Homo sapien
gtcagtgaacttggcccagcctttc

SEQ ID NO: 319827 - DNA, 25 bp, Homo sapien
aagtcagtgaacttggcccagcctt

SEQ ID NO: 319828 - DNA, 25 bp, Homo sapien
cctcagcatggctgcattctgtgtc

SEQ ID NO: 319829 - DNA, 25 bp, Homo sapien
attctgtgtccaccggagagctgca

SEQ ID NO: 319830 - DNA, 25 bp, Homo sapien
tcagggccttggctccggctgccct

SEQ ID NO: 319831 - DNA, 25 bp, Homo sapien
ttggctccggctgccctcagcatgg

SEQ ID NO: 319832 - DNA, 25 bp, Homo sapien
gacacacacgttccaggcacatgga

SEQ ID NO: 319833 - DNA, 25 bp, Homo sapien
ttccaggcacatggagaagccgggc

SEQ ID NO: 319834 - DNA, 25 bp, Homo sapien
ctggtgacacacacgttccaggcac

SEQ ID NO: 319835 - DNA, 25 bp, Homo sapien
acacacgttccaggcacatggagaa

SEQ ID NO: 319836 - DNA, 25 bp, Homo sapien
ctggtcgccatcctcgctgtgggag

SEQ ID NO: 319837 - DNA, 25 bp, Homo sapien
ccagaggagctactgtcagaggcca

SEQ ID NO: 319838 - DNA, 25 bp, Homo sapien
tcgctgccttctggtcgccatcctc

SEQ ID NO: 319839 - DNA, 25 bp, Homo sapien
cttctggtcgccatcctcgctgtgg

SEQ ID NO: 319840 - DNA, 25 bp, Homo sapien
gccactgtgggcagcgggggggcct

SEQ ID NO: 319841 - DNA, 25 bp, Homo sapien
ccactgtgggcagcgggggggcctc

SEQ ID NO: 319842 - DNA, 25 bp, Homo sapien
acgatgttctgtccacgaaagaagg

SEQ ID NO: 319843 - DNA, 25 bp, Homo sapien
tgtccacgaaagaaggccccacact

SEQ ID NO: 319844 - DNA, 25 bp, Homo sapien
tgttctgtccacgaaagaaggcccc

SEQ ID NO: 319845 - DNA, 25 bp, Homo sapien
cctccacgtaaacgcgtgggcacca

SEQ ID NO: 319846 - DNA, 25 bp, Homo sapien
atttcagtgactaaactttaagaag

SEQ ID NO: 319847 - DNA, 25 bp, Homo sapien
agtgactaaactttaagaaggaatg

SEQ ID NO: 319848 - DNA, 25 bp, Homo sapien
caaacaaacaaaaatttcagtgact

SEQ ID NO: 319849 - DNA, 25 bp, Homo sapien
ttcagtgactaaactttaagaagga

SEQ ID NO: 319850 - DNA, 25 bp, Homo sapien
cttactttgcacaatgatattccct

SEQ ID NO: 319851 - DNA, 25 bp, Homo sapien
tgtttttgccgacagtcagtctctc

SEQ ID NO: 319852 - DNA, 25 bp, Homo sapien
aagttttacgcagacagccccgtgg

SEQ ID NO: 319853 - DNA, 25 bp, Homo sapien
caggcagggctctaagtggcaagtt

SEQ ID NO: 319854 - DNA, 25 bp, Homo sapien
tgtgtggcaaacatggactccggtt

SEQ ID NO: 319855 - DNA, 25 bp, Homo sapien
ccaagtactgggacaagctgcctgt

SEQ ID NO: 319856 - DNA, 25 bp, Homo sapien
caggttgtgcccagctaggcagctc

SEQ ID NO: 319857 - DNA, 25 bp, Homo sapien
gacgacactgtgtctgactgaggga

SEQ ID NO: 319858 - DNA, 25 bp, Homo sapien
cagggcttaacagccggctgtcagc

SEQ ID NO: 319859 - DNA, 25 bp, Homo sapien
gggcaggcagggcttaacagccggc

SEQ ID NO: 319860 - DNA, 25 bp, Homo sapien
aggcagggcttaacagccggctgtc

SEQ ID NO: 319861 - DNA, 25 bp, Homo sapien
ggcaggcagggcttaacagccggct

SEQ ID NO: 319862 - DNA, 25 bp, Homo sapien
gtcctttgtcactgtccccagggtg

SEQ ID NO: 319863 - DNA, 25 bp, Homo sapien
tgtgactgccatgatgggccctagg

SEQ ID NO: 319864 - DNA, 25 bp, Homo sapien
ccttgctcagtgctgtggtgatggc

SEQ ID NO: 319865 - DNA, 25 bp, Homo sapien
cacggccagtgcagaagagactgct

SEQ ID NO: 319866 - DNA, 25 bp, Homo sapien
ttaaggcagctccttctggcggggc

SEQ ID NO: 319867 - DNA, 25 bp, Homo sapien
ggcagctccttctggcggggcatct

SEQ ID NO: 319868 - DNA, 25 bp, Homo sapien
aaggcagctccttctggcggggcat

SEQ ID NO: 319869 - DNA, 25 bp, Homo sapien
gcagctccttctggcggggcatctg

SEQ ID NO: 319870 - DNA, 25 bp, Homo sapien
ggtagttttctcgattaaggaggca

SEQ ID NO: 319871 - DNA, 25 bp, Homo sapien
ccaggtagttttctcgattaaggag

SEQ ID NO: 319872 - DNA, 25 bp, Homo sapien
gttttctcgattaaggaggcagcct

SEQ ID NO: 319873 - DNA, 25 bp, Homo sapien
aaaaagattgcatcaccaggtagtt

SEQ ID NO: 319874 - DNA, 25 bp, Homo sapien
ccgtgaccggtagtgctagaaacca

SEQ ID NO: 319875 - DNA, 25 bp, Homo sapien
taatcttctggacccttctaggacg

SEQ ID NO: 319876 - DNA, 25 bp, Homo sapien
agaaaccagtcttcgagcccctagt

SEQ ID NO: 319877 - DNA, 25 bp, Homo sapien
ttctaggacgacatggccgtgaccg

SEQ ID NO: 319878 - DNA, 25 bp, Homo sapien
tgcgctactacgaccaccgtgtgga

SEQ ID NO: 319879 - DNA, 25 bp, Homo sapien
ccttctttgacgtgagccttggccg

SEQ ID NO: 319880 - DNA, 25 bp, Homo sapien
taagactgtggacgagaaggccttc

SEQ ID NO: 319881 - DNA, 25 bp, Homo sapien
gcccactatgggtgcccctaagact

SEQ ID NO: 319882 - DNA, 25 bp, Homo sapien
gtcgctcgctgggtgtgtacctgca

SEQ ID NO: 319883 - DNA, 25 bp, Homo sapien
cctctggtgggagattgcgggtgct

SEQ ID NO: 319884 - DNA, 25 bp, Homo sapien
cagcgaccagagtagtggctcaacc

SEQ ID NO: 319885 - DNA, 25 bp, Homo sapien
ctgtacagccagttccagacagcag

SEQ ID NO: 319886 - DNA, 25 bp, Homo sapien
tgctgccggcgtcaggtcatagctt

SEQ ID NO: 319887 - DNA, 25 bp, Homo sapien
tggaagttgacagttggcctcgtgt

SEQ ID NO: 319888 - DNA, 25 bp, Homo sapien
taatttggccaacgactcaaggagg

SEQ ID NO: 319889 - DNA, 25 bp, Homo sapien
tcggctcagcaagctcccgtgtgtt

SEQ ID NO: 319890 - DNA, 25 bp, Homo sapien
ctcattactaggctgggcgcagcgg

SEQ ID NO: 319891 - DNA, 25 bp, Homo sapien
tctcattactaggctgggcgcagcg

SEQ ID NO: 319892 - DNA, 25 bp, Homo sapien
tcattgtcttaaagttgacgcggtc

SEQ ID NO: 319893 - DNA, 25 bp, Homo sapien
tgatggaggtgacccacaaagcaca

SEQ ID NO: 319894 - DNA, 25 bp, Homo sapien
gacgcggtctcattggtgctaacag

SEQ ID NO: 319895 - DNA, 25 bp, Homo sapien
tactgttactattgatgtggctggg

SEQ ID NO: 319896 - DNA, 25 bp, Homo sapien
tgggaaacgggcctttgtctgctcc

SEQ ID NO: 319897 - DNA, 25 bp, Homo sapien
gaccagcattgctcccagctgaggg

SEQ ID NO: 319898 - DNA, 25 bp, Homo sapien
ttgggattccccataactgtggtac

SEQ ID NO: 319899 - DNA, 25 bp, Homo sapien
actgtggtaccctgagattctggga

SEQ ID NO: 319900 - DNA, 25 bp, Homo sapien
ggagggacgcacagggaacagtggg

SEQ ID NO: 319901 - DNA, 25 bp, Homo sapien
gagcgcagctactcgaagcccggtc

SEQ ID NO: 319902 - DNA, 25 bp, Homo sapien
tccatcctcttcgatggagcgtgca

SEQ ID NO: 319903 - DNA, 25 bp, Homo sapien
aggcgtcacagcccgaccgtcctca

SEQ ID NO: 319904 - DNA, 25 bp, Homo sapien
gggcgaaccgtcgtccgagctgatc

SEQ ID NO: 319905 - DNA, 25 bp, Homo sapien
ccggacttccccacgctgcagcggg

SEQ ID NO: 319906 - DNA, 25 bp, Homo sapien
agcctgaccagcaagtccgcgggat

SEQ ID NO: 319907 - DNA, 25 bp, Homo sapien
gcgggattccgcagcgggctggcca

SEQ ID NO: 319908 - DNA, 25 bp, Homo sapien
ggcctcgggcgcgaagcgggcagcg

SEQ ID NO: 319909 - DNA, 25 bp, Homo sapien
ggtcctgcctggagcggagtcgcgg

SEQ ID NO: 319910 - DNA, 25 bp, Homo sapien
ccgggcgtgggcgtggcaagctggg

SEQ ID NO: 319911 - DNA, 25 bp, Homo sapien
gcaagctgggcacgggcgtccgtcg

SEQ ID NO: 319912 - DNA, 25 bp, Homo sapien
aggaggctgatgcaacccagggcgg

SEQ ID NO: 319913 - DNA, 25 bp, Homo sapien
ctgatgcaacccagggcggccgtcg

SEQ ID NO: 319914 - DNA, 25 bp, Homo sapien
gctgatgcaacccagggcggccgtc

SEQ ID NO: 319915 - DNA, 25 bp, Homo sapien
gcaacccagggcggccgtcgggatc

SEQ ID NO: 319916 - DNA, 25 bp, Homo sapien
tgcctctacacaggcctgggtcact

SEQ ID NO: 319917 - DNA, 25 bp, Homo sapien
tgggtcactgccaggggaagcccac

SEQ ID NO: 319918 - DNA, 25 bp, Homo sapien
acttttgcctctacacaggcctggg

SEQ ID NO: 319919 - DNA, 25 bp, Homo sapien
ccacttttgcctctacacaggcctg

SEQ ID NO: 319920 - DNA, 25 bp, Homo sapien
agggcccggtgaagcttccagacca

SEQ ID NO: 319921 - DNA, 25 bp, Homo sapien
ctctgtgcctggagggcccggtgaa

SEQ ID NO: 319922 - DNA, 25 bp, Homo sapien
cctggagggcccggtgaagcttcca

SEQ ID NO: 319923 - DNA, 25 bp, Homo sapien
tctgtgcctggagggcccggtgaag

SEQ ID NO: 319924 - DNA, 25 bp, Homo sapien
gggcccgagtgttggcggccaccat

SEQ ID NO: 319925 - DNA, 25 bp, Homo sapien
tcgggggcccgagtgttggcggcca

SEQ ID NO: 319926 - DNA, 25 bp, Homo sapien
ctgcgggggcccgagtgtcttcggg

SEQ ID NO: 319927 - DNA, 25 bp, Homo sapien
cgagtgtcttcgggggcccgagtgt

SEQ ID NO: 319928 - DNA, 25 bp, Homo sapien
acagcccactcgcaggagctgggct

SEQ ID NO: 319929 - DNA, 25 bp, Homo sapien
agcacacagcccactcgcaggagct

SEQ ID NO: 319930 - DNA, 25 bp, Homo sapien
acacagcccactcgcaggagctggg

SEQ ID NO: 319931 - DNA, 25 bp, Homo sapien
cccagcacacagcccactcgcagga

SEQ ID NO: 319932 - DNA, 25 bp, Homo sapien
cccatgagttgccacaggcggtggc

SEQ ID NO: 319933 - DNA, 25 bp, Homo sapien
agctgagtcctgccggccggccggt

SEQ ID NO: 319934 - DNA, 25 bp, Homo sapien
cggtcccatgagttgccacaggcgg

SEQ ID NO: 319935 - DNA, 25 bp, Homo sapien
cggccggtcccatgagttgccacag

SEQ ID NO: 319936 - DNA, 25 bp, Homo sapien
tgggcaggggtgtggcccggcccca

SEQ ID NO: 319937 - DNA, 25 bp, Homo sapien
ctgggatgggcaggggtgtggcccg

SEQ ID NO: 319938 - DNA, 25 bp, Homo sapien
gatgggcaggggtgtggcccggccc

SEQ ID NO: 319939 - DNA, 25 bp, Homo sapien
gggatgggcaggggtgtggcccggc

SEQ ID NO: 319940 - DNA, 25 bp, Homo sapien
cagcctaggtttacgtgtgcaaagc

SEQ ID NO: 319941 - DNA, 25 bp, Homo sapien
taggctccttgacgtaccagcactg

SEQ ID NO: 319942 - DNA, 25 bp, Homo sapien
tcgtccagacatggccccgtgtgtt

SEQ ID NO: 319943 - DNA, 25 bp, Homo sapien
gcactgcgtgtagaccagcctaggt

SEQ ID NO: 319944 - DNA, 25 bp, Homo sapien
gaagggctggttgtgcatgagagca

SEQ ID NO: 319945 - DNA, 25 bp, Homo sapien
aggccgggcttcagtctgactggac

SEQ ID NO: 319946 - DNA, 25 bp, Homo sapien
cccaggcacaaggccgggcttcagt

SEQ ID NO: 319947 - DNA, 25 bp, Homo sapien
cacaaggccgggcttcagtctgact

SEQ ID NO: 319948 - DNA, 25 bp, Homo sapien
gagggtgaccctagcaaacatttgt

SEQ ID NO: 319949 - DNA, 25 bp, Homo sapien
tcagttacgtggactcggcaatccc

SEQ ID NO: 319950 - DNA, 25 bp, Homo sapien
tgagaagcaactgtgaggagacccc

SEQ ID NO: 319951 - DNA, 25 bp, Homo sapien
tgtctggctgccaacaagggtctca

SEQ ID NO: 319952 - DNA, 25 bp, Homo sapien
cagagctggcgtcttggagcgtggc

SEQ ID NO: 319953 - DNA, 25 bp, Homo sapien
gttggagcaggcacggaaccgccaa

SEQ ID NO: 319954 - DNA, 25 bp, Homo sapien
gccaacgcaacttcccatgcatggg

SEQ ID NO: 319955 - DNA, 25 bp, Homo sapien
gaggacaccgtgagaacaaagtgcc

SEQ ID NO: 319956 - DNA, 25 bp, Homo sapien
tcactggagtggctcaatgaggatc

SEQ ID NO: 319957 - DNA, 25 bp, Homo sapien
caacaaccacagctggagattgatg

SEQ ID NO: 319958 - DNA, 25 bp, Homo sapien
gatatcgagggtgggtaattctcca

SEQ ID NO: 319959 - DNA, 25 bp, Homo sapien
cacctgcctagagttcggccacaga

SEQ ID NO: 319960 - DNA, 25 bp, Homo sapien
cagggagttaatgtgtcagcacagc

SEQ ID NO: 319961 - DNA, 25 bp, Homo sapien
caggctcctatatacaccccaggtt

SEQ ID NO: 319962 - DNA, 25 bp, Homo sapien
cggcctcagggagttaatgtgtcag

SEQ ID NO: 319963 - DNA, 25 bp, Homo sapien
ggttacataagtgtccgcagtaata

SEQ ID NO: 319964 - DNA, 25 bp, Homo sapien
gcctctctgcatggggtctgggtac

SEQ ID NO: 319965 - DNA, 25 bp, Homo sapien
caggagagcagtcagcagagcctct

SEQ ID NO: 319966 - DNA, 25 bp, Homo sapien
gagcagtcagcagagcctctctgca

SEQ ID NO: 319967 - DNA, 25 bp, Homo sapien
ggagagcagtcagcagagcctctct

SEQ ID NO: 319968 - DNA, 25 bp, Homo sapien
cctgggggtcggcagccgctggctc

SEQ ID NO: 319969 - DNA, 25 bp, Homo sapien
agcctgggggtcggcagccgctggc

SEQ ID NO: 319970 - DNA, 25 bp, Homo sapien
gcctgggggtcggcagccgctggct

SEQ ID NO: 319971 - DNA, 25 bp, Homo sapien
tgcaaagcgaaagtcagcagacgtc

SEQ ID NO: 319972 - DNA, 25 bp, Homo sapien
acgcctgagcggcacccatggccac

SEQ ID NO: 319973 - DNA, 25 bp, Homo sapien
cagacgtctgcttccggggtacagg

SEQ ID NO: 319974 - DNA, 25 bp, Homo sapien
acaggggacaccacgcctgagcggc

SEQ ID NO: 319975 - DNA, 25 bp, Homo sapien
gaggattgaacctatttcaccatca

SEQ ID NO: 319976 - DNA, 25 bp, Homo sapien
ctggtgggtgacacgcgaggacaca

SEQ ID NO: 319977 - DNA, 25 bp, Homo sapien
caagcctgcctctgctcgagggctg

SEQ ID NO: 319978 - DNA, 25 bp, Homo sapien
accatcatgtcagctccacgaggaa

SEQ ID NO: 319979 - DNA, 25 bp, Homo sapien
cgtgtagttccggaagctggccttg

SEQ ID NO: 319980 - DNA, 25 bp, Homo sapien
aagtccactgtctggtgcgtgtgca

SEQ ID NO: 319981 - DNA, 25 bp, Homo sapien
ctgacgaagtccactgtctggtgcg

SEQ ID NO: 319982 - DNA, 25 bp, Homo sapien
ccactgtctggtgcgtgtgcatgag

SEQ ID NO: 319983 - DNA, 25 bp, Homo sapien
gacgaagtccactgtctggtgcgtg

SEQ ID NO: 319984 - DNA, 25 bp, Homo sapien
gtccgggtccgactcatccaccagc

SEQ ID NO: 319985 - DNA, 25 bp, Homo sapien
gaaatctacgtccgggtccgactca

SEQ ID NO: 319986 - DNA, 25 bp, Homo sapien
ttccggatgccctccgctgtctgga

SEQ ID NO: 319987 - DNA, 25 bp, Homo sapien
ccttgtctgggtgggccttccggat

SEQ ID NO: 319988 - DNA, 25 bp, Homo sapien
ggagggggatggacagggcaggttg

SEQ ID NO: 319989 - DNA, 25 bp, Homo sapien
agggggatggacagggcaggttggg

SEQ ID NO: 319990 - DNA, 25 bp, Homo sapien
ggggatggacagggcaggttgggga

SEQ ID NO: 319991 - DNA, 25 bp, Homo sapien
ctgggagggggatggacagggcagg

SEQ ID NO: 319992 - DNA, 25 bp, Homo sapien
caggtcgtgcaggagcccgacgagg

SEQ ID NO: 319993 - DNA, 25 bp, Homo sapien
cccaggtcgtgcaggagcccgacga

SEQ ID NO: 319994 - DNA, 25 bp, Homo sapien
ttccccaggtcgtgcaggagcccga

SEQ ID NO: 319995 - DNA, 25 bp, Homo sapien
aggtcgtgcaggagcccgacgaggt

SEQ ID NO: 319996 - DNA, 25 bp, Homo sapien
tgggggaagatgttgccgatgactg

SEQ ID NO: 319997 - DNA, 25 bp, Homo sapien
agggacaggagggacgggcggccat

SEQ ID NO: 319998 - DNA, 25 bp, Homo sapien
ggacaggagggacgggcggccatgg

SEQ ID NO: 319999 - DNA, 25 bp, Homo sapien
ggaagatgttgccgatgactgccca

SEQ ID NO: 320000 - DNA, 25 bp, Homo sapien
catccgacggggaaggtgtcgccga

SEQ ID NO: 320001 - DNA, 25 bp, Homo sapien
ggaaggtgtcgccgacgacagccca

SEQ ID NO: 320002 - DNA, 25 bp, Homo sapien
gacggggaaggtgtcgccgacgaca

SEQ ID NO: 320003 - DNA, 25 bp, Homo sapien
tgcggacggcatccgacggggaagg

SEQ ID NO: 320004 - DNA, 25 bp, Homo sapien
gtggagtcgcagaaaaccacggagg

SEQ ID NO: 320005 - DNA, 25 bp, Homo sapien
ggtggagtcgcagaaaaccacggag

SEQ ID NO: 320006 - DNA, 25 bp, Homo sapien
tggagtcgcagaaaaccacggaggc

SEQ ID NO: 320007 - DNA, 25 bp, Homo sapien
aggaccctgtcgagcccacagtggg

SEQ ID NO: 320008 - DNA, 25 bp, Homo sapien
atgaggaccctgtcgagcccacagt

SEQ ID NO: 320009 - DNA, 25 bp, Homo sapien
gggctgatacatcccgagctctgtg

SEQ ID NO: 320010 - DNA, 25 bp, Homo sapien
acatgaggaccctgtcgagcccaca

SEQ ID NO: 320011 - DNA, 25 bp, Homo sapien
agagggtgtcaccagcaggcactgc

SEQ ID NO: 320012 - DNA, 25 bp, Homo sapien
gagggtgtcaccagcaggcactgcc

SEQ ID NO: 320013 - DNA, 25 bp, Homo sapien
accgccccactgcccgcctctggcc

SEQ ID NO: 320014 - DNA, 25 bp, Homo sapien
cagggggcagtgagaacttgttaaa

SEQ ID NO: 320015 - DNA, 25 bp, Homo sapien
ctcagggggcagtgagaacttgtta

SEQ ID NO: 320016 - DNA, 25 bp, Homo sapien
tcagggggcagtgagaacttgttaa

SEQ ID NO: 320017 - DNA, 25 bp, Homo sapien
ggtggacgggctgcgttgcccctcc

SEQ ID NO: 320018 - DNA, 25 bp, Homo sapien
tggacgggctgcgttgcccctcccc

SEQ ID NO: 320019 - DNA, 25 bp, Homo sapien
ctggtggacgggctgcgttgcccct

SEQ ID NO: 320020 - DNA, 25 bp, Homo sapien
tgcaggaccgggcctggtggacggg

SEQ ID NO: 320021 - DNA, 25 bp, Homo sapien
ctgcgggcaaggccacccagcggct

SEQ ID NO: 320022 - DNA, 25 bp, Homo sapien
gcgggcaaggccacccagcggctca

SEQ ID NO: 320023 - DNA, 25 bp, Homo sapien
cgggcaaggccacccagcggctcac

SEQ ID NO: 320024 - DNA, 25 bp, Homo sapien
tgcgggcaaggccacccagcggctc

SEQ ID NO: 320025 - DNA, 25 bp, Homo sapien
ggtagaaggagtggaaccggatcat

SEQ ID NO: 320026 - DNA, 25 bp, Homo sapien
agtggaaccggatcatgtagaaagc

SEQ ID NO: 320027 - DNA, 25 bp, Homo sapien
acagctgctggtagtcgcggcccgt

SEQ ID NO: 320028 - DNA, 25 bp, Homo sapien
cacagctgctggtagtcgcggcccg

SEQ ID NO: 320029 - DNA, 25 bp, Homo sapien
ggaggggcggtgagccccgtgaaga

SEQ ID NO: 320030 - DNA, 25 bp, Homo sapien
gaggggcggtgagccccgtgaagaa

SEQ ID NO: 320031 - DNA, 25 bp, Homo sapien
agcttgtccacgtccggcaggtccg

SEQ ID NO: 320032 - DNA, 25 bp, Homo sapien
gcacttggtgtagaggtcgaacttg

SEQ ID NO: 320033 - DNA, 25 bp, Homo sapien
ccgggcacttggtgtagaggtcgaa

SEQ ID NO: 320034 - DNA, 25 bp, Homo sapien
cacgtccggcaggtccgggcacttg

SEQ ID NO: 320035 - DNA, 25 bp, Homo sapien
gtgaaccctgatggcggctgtttgc

SEQ ID NO: 320036 - DNA, 25 bp, Homo sapien
ggagggccaggcctaggtccagcag

SEQ ID NO: 320037 - DNA, 25 bp, Homo sapien
caggtctttattgacgccaggcaca

SEQ ID NO: 320038 - DNA, 25 bp, Homo sapien
gacgccaggcacaagttgccgtgag

SEQ ID NO: 320039 - DNA, 25 bp, Homo sapien
cttggtgactgttttgagcatgtgg

SEQ ID NO: 320040 - DNA, 25 bp, Homo sapien
gagctgggtgactcgtcccccaggc

SEQ ID NO: 320041 - DNA, 25 bp, Homo sapien
ctgctgcagtaacacccagtggggc

SEQ ID NO: 320042 - DNA, 25 bp, Homo sapien
acggagcccagaggacttggtgact

SEQ ID NO: 320043 - DNA, 25 bp, Homo sapien
gaagcactgtcatcttccacgtcat

SEQ ID NO: 320044 - DNA, 25 bp, Homo sapien
ccaggaggaaaacacgaccaagctc

SEQ ID NO: 320045 - DNA, 25 bp, Homo sapien
tcccactattgcctctgtgattggc

SEQ ID NO: 320046 - DNA, 25 bp, Homo sapien
gccctttagatctgggcaccaataa

SEQ ID NO: 320047 - DNA, 25 bp, Homo sapien
gggcggcaaagggaccgcagggctg

SEQ ID NO: 320048 - DNA, 25 bp, Homo sapien
ccgcccaggaaaatgcgtaggcgcg

SEQ ID NO: 320049 - DNA, 25 bp, Homo sapien
gccactagttctggcgccattttgc

SEQ ID NO: 320050 - DNA, 25 bp, Homo sapien
gccattttgctgttcccgcccagga

SEQ ID NO: 320051 - DNA, 25 bp, Homo sapien
tcctccagatactcgcccagctggg

SEQ ID NO: 320052 - DNA, 25 bp, Homo sapien
tcttggtgaggtcgcggatgggctg

SEQ ID NO: 320053 - DNA, 25 bp, Homo sapien
agaggtgggcgaagcgcgcctccac

SEQ ID NO: 320054 - DNA, 25 bp, Homo sapien
gaggtcgcggatgggctgcaagagg

SEQ ID NO: 320055 - DNA, 25 bp, Homo sapien
aacgctggctcatctcctgtattcc

SEQ ID NO: 320056 - DNA, 25 bp, Homo sapien
cccaacgctggctcatctcctgtat

SEQ ID NO: 320057 - DNA, 25 bp, Homo sapien
tcctgtattccttctcagcaaatga

SEQ ID NO: 320058 - DNA, 25 bp, Homo sapien
cctgtattccttctcagcaaatgac

SEQ ID NO: 320059 - DNA, 25 bp, Homo sapien
ggtcttgccttcgtcaaaagaaatg

SEQ ID NO: 320060 - DNA, 25 bp, Homo sapien
gtggtcttgccttcgtcaaaagaaa

SEQ ID NO: 320061 - DNA, 25 bp, Homo sapien
tgtggtcttgccttcgtcaaaagaa

SEQ ID NO: 320062 - DNA, 25 bp, Homo sapien
tcttgccttcgtcaaaagaaatgca

SEQ ID NO: 320063 - DNA, 25 bp, Homo sapien
tactgtagacgcaggcagagccctg

SEQ ID NO: 320064 - DNA, 25 bp, Homo sapien
aacaacgctgcctcaatgaagttca

SEQ ID NO: 320065 - DNA, 25 bp, Homo sapien
cttcttactgtagacgcaggcagag

SEQ ID NO: 320066 - DNA, 25 bp, Homo sapien
cctggatcaacaacgctgcctcaat

SEQ ID NO: 320067 - DNA, 25 bp, Homo sapien
agacgagtgagtagaggtattccac

SEQ ID NO: 320068 - DNA, 25 bp, Homo sapien
gtagacgagtgagtagaggtattcc

SEQ ID NO: 320069 - DNA, 25 bp, Homo sapien
gcctggtagacgagtgagtagaggt

SEQ ID NO: 320070 - DNA, 25 bp, Homo sapien
gagatgaaatcaagggcctggtaga

SEQ ID NO: 320071 - DNA, 25 bp, Homo sapien
ctgtcctcctgcaccgaagagagct

SEQ ID NO: 320072 - DNA, 25 bp, Homo sapien
ctcctgcaccgaagagagctgcttg

SEQ ID NO: 320073 - DNA, 25 bp, Homo sapien
gagctggcaaccccattggccctgt

SEQ ID NO: 320074 - DNA, 25 bp, Homo sapien
gaccccggagctggcaaccccattg

SEQ ID NO: 320075 - DNA, 25 bp, Homo sapien
tcttgagatccacgttagtccggga

SEQ ID NO: 320076 - DNA, 25 bp, Homo sapien
gatccacgttagtccgggagtcagg

SEQ ID NO: 320077 - DNA, 25 bp, Homo sapien
actgggcgtctgatcattcttgaga

SEQ ID NO: 320078 - DNA, 25 bp, Homo sapien
cgtctgatcattcttgagatccacg

SEQ ID NO: 320079 - DNA, 25 bp, Homo sapien
gggcaggagggggatgatgaggacc

SEQ ID NO: 320080 - DNA, 25 bp, Homo sapien
ggcaggagggggatgatgaggacct

SEQ ID NO: 320081 - DNA, 25 bp, Homo sapien
gcaggagggggatgatgaggacctc

SEQ ID NO: 320082 - DNA, 25 bp, Homo sapien
ctgtacaggggattgttgttcttct

SEQ ID NO: 320083 - DNA, 25 bp, Homo sapien
tgtacaggggattgttgttcttctc

SEQ ID NO: 320084 - DNA, 25 bp, Homo sapien
ctggggtggggaacgcacgtgttca

SEQ ID NO: 320085 - DNA, 25 bp, Homo sapien
tcctgaaatccttccggctggccag

SEQ ID NO: 320086 - DNA, 25 bp, Homo sapien
tggggaacgcacgtgttcatcctga

SEQ ID NO: 320087 - DNA, 25 bp, Homo sapien
ggtggggaacgcacgtgttcatcct

SEQ ID NO: 320088 - DNA, 25 bp, Homo sapien
cgctggttccatgggggacatgccc

SEQ ID NO: 320089 - DNA, 25 bp, Homo sapien
gcatgggggaaacgcccgctggttc

SEQ ID NO: 320090 - DNA, 25 bp, Homo sapien
acgcccgctggttccatgggggaca

SEQ ID NO: 320091 - DNA, 25 bp, Homo sapien
catgggggacatgccctctggctcc

SEQ ID NO: 320092 - DNA, 25 bp, Homo sapien
caagccccccgcatccaagccctca

SEQ ID NO: 320093 - DNA, 25 bp, Homo sapien
cacggaaacttccattggctgctcc

SEQ ID NO: 320094 - DNA, 25 bp, Homo sapien
ctcctgggagaagccgagtgctggg

SEQ ID NO: 320095 - DNA, 25 bp, Homo sapien
ggctgctcctcagtcctcccggtgt

SEQ ID NO: 320096 - DNA, 25 bp, Homo sapien
agggctcctgcacacggaaacttcc

SEQ ID NO: 320097 - DNA, 25 bp, Homo sapien
aggatttggcgggtgccttgcacca

SEQ ID NO: 320098 - DNA, 25 bp, Homo sapien
ggtgccttgcaccatcctcgtcgtg

SEQ ID NO: 320099 - DNA, 25 bp, Homo sapien
tcctccctcagctttagtcacggag

SEQ ID NO: 320100 - DNA, 25 bp, Homo sapien
agtcacggagcccagaggatttggc

SEQ ID NO: 320101 - DNA, 25 bp, Homo sapien
ggggcatcgggccttctggagaggg

SEQ ID NO: 320102 - DNA, 25 bp, Homo sapien
ccacccaggggcatcgggccttctg

SEQ ID NO: 320103 - DNA, 25 bp, Homo sapien
caggggcatcgggccttctggagag

SEQ ID NO: 320104 - DNA, 25 bp, Homo sapien
cccacccaggggcatcgggccttct

SEQ ID NO: 320105 - DNA, 25 bp, Homo sapien
agctcaggttctgcaggcctccatg

SEQ ID NO: 320106 - DNA, 25 bp, Homo sapien
tcacagctcaggttctgcaggcctc

SEQ ID NO: 320107 - DNA, 25 bp, Homo sapien
acagctcaggttctgcaggcctcca

SEQ ID NO: 320108 - DNA, 25 bp, Homo sapien
tcaggttctgcaggcctccatgtgg

SEQ ID NO: 320109 - DNA, 25 bp, Homo sapien
ttgtgcaaggtgactcggccccaga

SEQ ID NO: 320110 - DNA, 25 bp, Homo sapien
gtcctccttgtgcaaggtgactcgg

SEQ ID NO: 320111 - DNA, 25 bp, Homo sapien
gtgcaaggtgactcggccccagagc

SEQ ID NO: 320112 - DNA, 25 bp, Homo sapien
ctccttgtgcaaggtgactcggccc

SEQ ID NO: 320113 - DNA, 25 bp, Homo sapien
ttgcaggacgggctgcaagacaggt

SEQ ID NO: 320114 - DNA, 25 bp, Homo sapien
ctgcaagacaggtgggcttctgccc

SEQ ID NO: 320115 - DNA, 25 bp, Homo sapien
tcttcaaaagggctggttgcaggac

SEQ ID NO: 320116 - DNA, 25 bp, Homo sapien
gaagctgctcttcaaaagggctggt

SEQ ID NO: 320117 - DNA, 25 bp, Homo sapien
cggcggccatcccaggttgccgtga

SEQ ID NO: 320118 - DNA, 25 bp, Homo sapien
cagcccgactgcagagaggcgcctt

SEQ ID NO: 320119 - DNA, 25 bp, Homo sapien
cagggctcaaatccttggacgccag

SEQ ID NO: 320120 - DNA, 25 bp, Homo sapien
tgccgtgagctcgacagggctcaaa

SEQ ID NO: 320121 - DNA, 25 bp, Homo sapien
gaaggatttcttggctctaggctgg

SEQ ID NO: 320122 - DNA, 25 bp, Homo sapien
atttcttggctctaggctgggtaca

SEQ ID NO: 320123 - DNA, 25 bp, Homo sapien
aaggaaggatttcttggctctaggc

SEQ ID NO: 320124 - DNA, 25 bp, Homo sapien
aggatttcttggctctaggctgggt

SEQ ID NO: 320125 - DNA, 25 bp, Homo sapien
ttgggttaacatcaagaaccctaca

SEQ ID NO: 320126 - DNA, 25 bp, Homo sapien
catcaagaaccctacaagggtcggg

SEQ ID NO: 320127 - DNA, 25 bp, Homo sapien
tgggttaacatcaagaaccctacaa

SEQ ID NO: 320128 - DNA, 25 bp, Homo sapien
taacatcaagaaccctacaagggtc

SEQ ID NO: 320129 - DNA, 25 bp, Homo sapien
ctcccgctcccgcagcatgtacctc

SEQ ID NO: 320130 - DNA, 25 bp, Homo sapien
tctggggccccctcccgctcccgca

SEQ ID NO: 320131 - DNA, 25 bp, Homo sapien
cccctcccgctcccgcagcatgtac

SEQ ID NO: 320132 - DNA, 25 bp, Homo sapien
cttcacgcaggatgcaggctctggg

SEQ ID NO: 320133 - DNA, 25 bp, Homo sapien
tcttgaagggcttagactccaagga

SEQ ID NO: 320134 - DNA, 25 bp, Homo sapien
gaagggcttagactccaaggagtca

SEQ ID NO: 320135 - DNA, 25 bp, Homo sapien
ttgaagggcttagactccaaggagt

SEQ ID NO: 320136 - DNA, 25 bp, Homo sapien
tttcttgaagggcttagactccaag

SEQ ID NO: 320137 - DNA, 25 bp, Homo sapien
ttcctcttgcgcttctgtcccagag

SEQ ID NO: 320138 - DNA, 25 bp, Homo sapien
ctcctccacacaggggggcacagag

SEQ ID NO: 320139 - DNA, 25 bp, Homo sapien
ggaagtcctgcagcttggcagcgcc

SEQ ID NO: 320140 - DNA, 25 bp, Homo sapien
cagccaggtaccactggtggaagtc

SEQ ID NO: 320141 - DNA, 25 bp, Homo sapien
gctcccagtggtccggagtgcacac

SEQ ID NO: 320142 - DNA, 25 bp, Homo sapien
agctcccagtggtccggagtgcaca

SEQ ID NO: 320143 - DNA, 25 bp, Homo sapien
ctgtgaaagaacatgctcagcacca

SEQ ID NO: 320144 - DNA, 25 bp, Homo sapien
tgtgaaagaacatgctcagcaccag

SEQ ID NO: 320145 - DNA, 25 bp, Homo sapien
tgaaagaacatgctcagcaccagcc

SEQ ID NO: 320146 - DNA, 25 bp, Homo sapien
aaagaacatgctcagcaccagccag

SEQ ID NO: 320147 - DNA, 25 bp, Homo sapien
tgcaaaggacggaccctttcgccga

SEQ ID NO: 320148 - DNA, 25 bp, Homo sapien
gccgcctgctgtcggcatggtctgc

SEQ ID NO: 320149 - DNA, 25 bp, Homo sapien
tttcgccgaagccgcctgctgtcgg

SEQ ID NO: 320150 - DNA, 25 bp, Homo sapien
ctgcaaaggacggaccctttcgccg

SEQ ID NO: 320151 - DNA, 25 bp, Homo sapien
cagacaaaggccttgtgagggctcc

SEQ ID NO: 320152 - DNA, 25 bp, Homo sapien
gccttgtgagggctccctcgtcctt

SEQ ID NO: 320153 - DNA, 25 bp, Homo sapien
aaaggccttgtgagggctccctcgt

SEQ ID NO: 320154 - DNA, 25 bp, Homo sapien
aggccccgtgccagtccacccaagg

SEQ ID NO: 320155 - DNA, 25 bp, Homo sapien
tgtgtccagtacaggacctccatgt

SEQ ID NO: 320156 - DNA, 25 bp, Homo sapien
gtgtgtccagtacaggacctccatg

SEQ ID NO: 320157 - DNA, 25 bp, Homo sapien
gcttccggagagtttccaactgctc

SEQ ID NO: 320158 - DNA, 25 bp, Homo sapien
ttccggagagtttccaactgctcct

SEQ ID NO: 320159 - DNA, 25 bp, Homo sapien
agcttccggagagtttccaactgct

SEQ ID NO: 320160 - DNA, 25 bp, Homo sapien
cagcttccggagagtttccaactgc

SEQ ID NO: 320161 - DNA, 25 bp, Homo sapien
tgcaggccgcagccactgctcagcc

SEQ ID NO: 320162 - DNA, 25 bp, Homo sapien
caggccgcagccactgctcagccac

SEQ ID NO: 320163 - DNA, 25 bp, Homo sapien
gcaggccgcagccactgctcagcca

SEQ ID NO: 320164 - DNA, 25 bp, Homo sapien
ctgcaggccgcagccactgctcagc

SEQ ID NO: 320165 - DNA, 25 bp, Homo sapien
ccagggaatcctccaggtggtcctc

SEQ ID NO: 320166 - DNA, 25 bp, Homo sapien
gtcttccagggaatcctccaggtgg

SEQ ID NO: 320167 - DNA, 25 bp, Homo sapien
cttccagggaatcctccaggtggtc

SEQ ID NO: 320168 - DNA, 25 bp, Homo sapien
gctgcccccaggtcttccagggaat

SEQ ID NO: 320169 - DNA, 25 bp, Homo sapien
aggtgggagagtgaacagcacgcag

SEQ ID NO: 320170 - DNA, 25 bp, Homo sapien
gtgaacagcacgcaggcagctagtc

SEQ ID NO: 320171 - DNA, 25 bp, Homo sapien
cagcacgcaggcagctagtcggcag

SEQ ID NO: 320172 - DNA, 25 bp, Homo sapien
gagagtgaacagcacgcaggcagct

SEQ ID NO: 320173 - DNA, 25 bp, Homo sapien
ccctcgggctccatgtactcctcag

SEQ ID NO: 320174 - DNA, 25 bp, Homo sapien
tgctccctcgggctccatgtactcc

SEQ ID NO: 320175 - DNA, 25 bp, Homo sapien
tccctcgggctccatgtactcctca

SEQ ID NO: 320176 - DNA, 25 bp, Homo sapien
gctccctcgggctccatgtactcct

SEQ ID NO: 320177 - DNA, 25 bp, Homo sapien
cacattccttcgaaccagctcctcg

SEQ ID NO: 320178 - DNA, 25 bp, Homo sapien
attccttcgaaccagctcctcgtag

SEQ ID NO: 320179 - DNA, 25 bp, Homo sapien
cagctcctcgtagctcagggacatc

SEQ ID NO: 320180 - DNA, 25 bp, Homo sapien
tcctcgtagctcagggacatcggca

SEQ ID NO: 320181 - DNA, 25 bp, Homo sapien
tcccagtccctgatgcgctggctca

SEQ ID NO: 320182 - DNA, 25 bp, Homo sapien
tccctgatgcgctggctcagctctg

SEQ ID NO: 320183 - DNA, 25 bp, Homo sapien
ctgtctcctggacaaacttctggga

SEQ ID NO: 320184 - DNA, 25 bp, Homo sapien
caaacttctgggaggtggcgatgaa

SEQ ID NO: 320185 - DNA, 25 bp, Homo sapien
ccgtggcacacagctctggttccca

SEQ ID NO: 320186 - DNA, 25 bp, Homo sapien
ggcacacagctctggttcccagcgg

SEQ ID NO: 320187 - DNA, 25 bp, Homo sapien
ctggttcccagcggccccgcctcac

SEQ ID NO: 320188 - DNA, 25 bp, Homo sapien
tctggttcccagcggccccgcctca

SEQ ID NO: 320189 - DNA, 25 bp, Homo sapien
ggtgtggatgtcaaagggcacatgc

SEQ ID NO: 320190 - DNA, 25 bp, Homo sapien
gtggatgtcaaagggcacatgctgc

SEQ ID NO: 320191 - DNA, 25 bp, Homo sapien
ctgggggaaccgtgagaccagctgg

SEQ ID NO: 320192 - DNA, 25 bp, Homo sapien
gggaaccgtgagaccagctggtccc

SEQ ID NO: 320193 - DNA, 25 bp, Homo sapien
atggaacgacacacctcgaaggccg

SEQ ID NO: 320194 - DNA, 25 bp, Homo sapien
ccagccaccagctccgcaaagggac

SEQ ID NO: 320195 - DNA, 25 bp, Homo sapien
catggaacgacacacctcgaaggcc

SEQ ID NO: 320196 - DNA, 25 bp, Homo sapien
ccgcaaagggacaccactcattgag

SEQ ID NO: 320197 - DNA, 25 bp, Homo sapien
tctccccctcccacgtatcccaggc

SEQ ID NO: 320198 - DNA, 25 bp, Homo sapien
ggaagcgcttgtgcgctcgctggtg

SEQ ID NO: 320199 - DNA, 25 bp, Homo sapien
gggcagcgtaggtctggaagcgctt

SEQ ID NO: 320200 - DNA, 25 bp, Homo sapien
agcgcttgtgcgctcgctggtgcgt

SEQ ID NO: 320201 - DNA, 25 bp, Homo sapien
ctcagggacatggtgtccacggcca

SEQ ID NO: 320202 - DNA, 25 bp, Homo sapien
gacacacggctcctcagtacacatt

SEQ ID NO: 320203 - DNA, 25 bp, Homo sapien
cacacggctcctcagtacacattcc

SEQ ID NO: 320204 - DNA, 25 bp, Homo sapien
acacacggctcctcagtacacattc

SEQ ID NO: 320205 - DNA, 25 bp, Homo sapien
agacacacggctcctcagtacacat

SEQ ID NO: 320206 - DNA, 25 bp, Homo sapien
tctctgcgcaggtgtacataaaagg

SEQ ID NO: 320207 - DNA, 25 bp, Homo sapien
gtgtactacaatgcaggccccaagg

SEQ ID NO: 320208 - DNA, 25 bp, Homo sapien
cacggattactacggccggagcaga

SEQ ID NO: 320209 - DNA, 25 bp, Homo sapien
taacgtggttagttcaggcaaggca

SEQ ID NO: 320210 - DNA, 25 bp, Homo sapien
tgggcctgggccgaaatcatcagtg

SEQ ID NO: 320211 - DNA, 25 bp, Homo sapien
gggcgccacggatcagtcattaatc

SEQ ID NO: 320212 - DNA, 25 bp, Homo sapien
ggcaccttggataagctggagtcta

SEQ ID NO: 320213 - DNA, 25 bp, Homo sapien
accaggtgccaatgatcagcggacg

SEQ ID NO: 320214 - DNA, 25 bp, Homo sapien
gcatattcggtacccccatatccgg

SEQ ID NO: 320215 - DNA, 25 bp, Homo sapien
ctcactccgggacctggtcaggacc

SEQ ID NO: 320216 - DNA, 25 bp, Homo sapien
ttgataaatcgtggctcagactccc

SEQ ID NO: 320217 - DNA, 25 bp, Homo sapien
ggataccctaacaccgcatattcgg

SEQ ID NO: 320218 - DNA, 25 bp, Homo sapien
cctattccagaatgggtatactgaa

SEQ ID NO: 320219 - DNA, 25 bp, Homo sapien
gataagtcctctctctacacataat

SEQ ID NO: 320220 - DNA, 25 bp, Homo sapien
gtgtgattattttgtggcccaatac

SEQ ID NO: 320221 - DNA, 25 bp, Homo sapien
ttgtctgcagatttgtcctattcca

SEQ ID NO: 320222 - DNA, 25 bp, Homo sapien
tagtggccccaaacggctgatattt

SEQ ID NO: 320223 - DNA, 25 bp, Homo sapien
agtggccccaaacggctgatattta

SEQ ID NO: 320224 - DNA, 25 bp, Homo sapien
gtagtggccccaaacggctgatatt

SEQ ID NO: 320225 - DNA, 25 bp, Homo sapien
gtggccccaaacggctgatatttat

SEQ ID NO: 320226 - DNA, 25 bp, Homo sapien
cttcattaataatgtagtcacgagg

SEQ ID NO: 320227 - DNA, 25 bp, Homo sapien
cattaataatgtagtcacgaggctg

SEQ ID NO: 320228 - DNA, 25 bp, Homo sapien
taataatgtagtcacgaggctgggt

SEQ ID NO: 320229 - DNA, 25 bp, Homo sapien
gctttttgaatcgtttcttcattaa

SEQ ID NO: 320230 - DNA, 25 bp, Homo sapien
gctagtgacaaaaatgtcagagata

SEQ ID NO: 320231 - DNA, 25 bp, Homo sapien
ttttttctcaggctagtgacaaaaa

SEQ ID NO: 320232 - DNA, 25 bp, Homo sapien
agtatttgtctgtctatttaagaaa

SEQ ID NO: 320233 - DNA, 25 bp, Homo sapien
tctcaggctagtgacaaaaatgtca

SEQ ID NO: 320234 - DNA, 25 bp, Homo sapien
aaagagcgttagtattccagagaca

SEQ ID NO: 320235 - DNA, 25 bp, Homo sapien
gcactaggacctgaatgtagatctc

SEQ ID NO: 320236 - DNA, 25 bp, Homo sapien
gggaacacctgactgaaagagcgtt

SEQ ID NO: 320237 - DNA, 25 bp, Homo sapien
taacagcacgttttgcaaccatgcg

SEQ ID NO: 320238 - DNA, 25 bp, Homo sapien
aatgacgtggatcgccctaggccac

SEQ ID NO: 320239 - DNA, 25 bp, Homo sapien
tctgccccgtgaaatcagcctaacg

SEQ ID NO: 320240 - DNA, 25 bp, Homo sapien
gctcgtgtcttcttaggcgtcctca

SEQ ID NO: 320241 - DNA, 25 bp, Homo sapien
tagtcctccgcttcgcagctgaaaa

SEQ ID NO: 320242 - DNA, 25 bp, Homo sapien
agtcattgtcactgtcccagtccca

SEQ ID NO: 320243 - DNA, 25 bp, Homo sapien
gtcattgtcactgtcccagtcccag

SEQ ID NO: 320244 - DNA, 25 bp, Homo sapien
cagcactatcccagtcattgtcact

SEQ ID NO: 320245 - DNA, 25 bp, Homo sapien
agcacagcactatcccagtcattgt

SEQ ID NO: 320246 - DNA, 25 bp, Homo sapien
tcgacagccgtcttgagtggaagcc

SEQ ID NO: 320247 - DNA, 25 bp, Homo sapien
ttgctgtcctaatgcctctctgcgg

SEQ ID NO: 320248 - DNA, 25 bp, Homo sapien
tcctgcctgatgaggttgagccccg

SEQ ID NO: 320249 - DNA, 25 bp, Homo sapien
cttagacttcggttgcagggccagc

SEQ ID NO: 320250 - DNA, 25 bp, Homo sapien
cgcccaggcggagcgggtccagttt

SEQ ID NO: 320251 - DNA, 25 bp, Homo sapien
cgagccagcgtccatccgccgccgc

SEQ ID NO: 320252 - DNA, 25 bp, Homo sapien
ggcctctccccatcgagcccgaggg

SEQ ID NO: 320253 - DNA, 25 bp, Homo sapien
ctctccccatcgagcccgagggccc

SEQ ID NO: 320254 - DNA, 25 bp, Homo sapien
ccagagccttccgtctgagacccag

SEQ ID NO: 320255 - DNA, 25 bp, Homo sapien
gccgggagtgcgggctcctgggcga

SEQ ID NO: 320256 - DNA, 25 bp, Homo sapien
agagccttccgtctgagacccaggc

SEQ ID NO: 320257 - DNA, 25 bp, Homo sapien
gccccagagccttccgtctgagacc

SEQ ID NO: 320258 - DNA, 25 bp, Homo sapien
caggactgttatctcgggagctgtc

SEQ ID NO: 320259 - DNA, 25 bp, Homo sapien
tcgccggcatcgtaggcccctgtgg

SEQ ID NO: 320260 - DNA, 25 bp, Homo sapien
ccaggtcagcggcaggactgttatc

SEQ ID NO: 320261 - DNA, 25 bp, Homo sapien
gctgcagccggctttgcttgctccg

SEQ ID NO: 320262 - DNA, 25 bp, Homo sapien
tggcttctaagaaccatggcaataa

SEQ ID NO: 320263 - DNA, 25 bp, Homo sapien
ctgaggctttgacccgtcagctggg

SEQ ID NO: 320264 - DNA, 25 bp, Homo sapien
gggagagccacactctcctgaggct

SEQ ID NO: 320265 - DNA, 25 bp, Homo sapien
tgtcctcagagtgtgtggaagtgct

SEQ ID NO: 320266 - DNA, 25 bp, Homo sapien
tgggctgggcgatccgttggtctcg

SEQ ID NO: 320267 - DNA, 25 bp, Homo sapien
tgtacctgtccctatgactgtcccc

SEQ ID NO: 320268 - DNA, 25 bp, Homo sapien
ggcgatccgttggtctcggagcttc

SEQ ID NO: 320269 - DNA, 25 bp, Homo sapien
cccctgtacctgtccctatgactgt

SEQ ID NO: 320270 - DNA, 25 bp, Homo sapien
ttggggcagcgggtctagacttttc

SEQ ID NO: 320271 - DNA, 25 bp, Homo sapien
cggcttggggcagcgggtctagact

SEQ ID NO: 320272 - DNA, 25 bp, Homo sapien
cgcggcttggggcagcgggtctaga

SEQ ID NO: 320273 - DNA, 25 bp, Homo sapien
gcttggggcagcgggtctagacttt

SEQ ID NO: 320274 - DNA, 25 bp, Homo sapien
gagctcggggcgatttcgcacctgc

SEQ ID NO: 320275 - DNA, 25 bp, Homo sapien
gaggcggccggcctgacctcctgct

SEQ ID NO: 320276 - DNA, 25 bp, Homo sapien
cacctgctgcgtttccgtagctggg

SEQ ID NO: 320277 - DNA, 25 bp, Homo sapien
tcctgctccgagctcggggcgattt

SEQ ID NO: 320278 - DNA, 25 bp, Homo sapien
ccgggcctctgcagaaacaccatga

SEQ ID NO: 320279 - DNA, 25 bp, Homo sapien
cctctgcagaaacaccatgagcttc

SEQ ID NO: 320280 - DNA, 25 bp, Homo sapien
cctcctgcttttccgtgagcgcccc

SEQ ID NO: 320281 - DNA, 25 bp, Homo sapien
agaaacaccatgagcttccgggcct

SEQ ID NO: 320282 - DNA, 25 bp, Homo sapien
gaacacatgcaggtgcgcaggtaga

SEQ ID NO: 320283 - DNA, 25 bp, Homo sapien
ggctggcactgtatgggcactcgtc

SEQ ID NO: 320284 - DNA, 25 bp, Homo sapien
acctcgttggagcagacggccttgg

SEQ ID NO: 320285 - DNA, 25 bp, Homo sapien
cactgtgttgtagcgcatcacggcg

SEQ ID NO: 320286 - DNA, 25 bp, Homo sapien
tgggcttcaaaataatcgacaacct

SEQ ID NO: 320287 - DNA, 25 bp, Homo sapien
aagagcaggaagttccgatcccagc

SEQ ID NO: 320288 - DNA, 25 bp, Homo sapien
tctgtggagacgcatcagtccctgg

SEQ ID NO: 320289 - DNA, 25 bp, Homo sapien
ccctggagagcagcgaagcagcttt

SEQ ID NO: 320290 - DNA, 25 bp, Homo sapien
gaagtcaaatgtctcgtccaagtct

SEQ ID NO: 320291 - DNA, 25 bp, Homo sapien
gggtgacgctcaggcctcatttaga

SEQ ID NO: 320292 - DNA, 25 bp, Homo sapien
cacaactctcttgggtgacagacgt

SEQ ID NO: 320293 - DNA, 25 bp, Homo sapien
ccagcggaccagtttcagaggcaag

SEQ ID NO: 320294 - DNA, 25 bp, Homo sapien
accaagcaaaggctgtaggccccac

SEQ ID NO: 320295 - DNA, 25 bp, Homo sapien
tagctgtatgcactgtacttgtttc

SEQ ID NO: 320296 - DNA, 25 bp, Homo sapien
ggatggagctggcacccacatgaat

SEQ ID NO: 320297 - DNA, 25 bp, Homo sapien
ctctgcccgtatgaagaggtcactg

SEQ ID NO: 320298 - DNA, 25 bp, Homo sapien
aacctcaggacgtccccagcaccgc

SEQ ID NO: 320299 - DNA, 25 bp, Homo sapien
tcatctccgcaggattctccctcaa

SEQ ID NO: 320300 - DNA, 25 bp, Homo sapien
aagctcttcatctccgcaggattct

SEQ ID NO: 320301 - DNA, 25 bp, Homo sapien
cctcaacctcaggacgtccccagca

SEQ ID NO: 320302 - DNA, 25 bp, Homo sapien
agctggaagactgttcatgagggac

SEQ ID NO: 320303 - DNA, 25 bp, Homo sapien
gagtgacgtaggctctgagatagct

SEQ ID NO: 320304 - DNA, 25 bp, Homo sapien
tttctctcagcccttaggtacctgt

SEQ ID NO: 320305 - DNA, 25 bp, Homo sapien
gctttgaaatgtgtgactctgctga

SEQ ID NO: 320306 - DNA, 25 bp, Homo sapien
tcatcgagagttcctaccaggtggc

SEQ ID NO: 320307 - DNA, 25 bp, Homo sapien
caatgaccagaatgttccgggaggg

SEQ ID NO: 320308 - DNA, 25 bp, Homo sapien
tagagtccaaactggcttcagggag

SEQ ID NO: 320309 - DNA, 25 bp, Homo sapien
tgaagatgtcttggccggctgtgcc

SEQ ID NO: 320310 - DNA, 25 bp, Homo sapien
acttagggcgagtaatttgaggctg

SEQ ID NO: 320311 - DNA, 25 bp, Homo sapien
ccgaatagattggtccttgggtcag

SEQ ID NO: 320312 - DNA, 25 bp, Homo sapien
ggtcagcaagactcaggtgacaccc

SEQ ID NO: 320313 - DNA, 25 bp, Homo sapien
gagggttactgcgatcagttgtgca

SEQ ID NO: 320314 - DNA, 25 bp, Homo sapien
cctaccaatggtgccgggagtactt

SEQ ID NO: 320315 - DNA, 25 bp, Homo sapien
tacgcgatgcgggtagtattgttcc

SEQ ID NO: 320316 - DNA, 25 bp, Homo sapien
gctttagggcctgtcgcttacgcga

SEQ ID NO: 320317 - DNA, 25 bp, Homo sapien
ttgcgcagttgaggacaccgaggtt

SEQ ID NO: 320318 - DNA, 25 bp, Homo sapien
actgattggcctccggcgcctcgga

SEQ ID NO: 320319 - DNA, 25 bp, Homo sapien
gcgcctcggattggcccaggccgtc

SEQ ID NO: 320320 - DNA, 25 bp, Homo sapien
gctccgccaactgattggcctccgg

SEQ ID NO: 320321 - DNA, 25 bp, Homo sapien
cggattggcccaggccgtccaacag

SEQ ID NO: 320322 - DNA, 25 bp, Homo sapien
tcccgtacgctaccgcgcccgggca

SEQ ID NO: 320323 - DNA, 25 bp, Homo sapien
cgcccgggcagttcctcgcccgcgc

SEQ ID NO: 320324 - DNA, 25 bp, Homo sapien
agctcctctccggtcttcccgtacg

SEQ ID NO: 320325 - DNA, 25 bp, Homo sapien
gcccgggcagttcctcgcccgcgca

SEQ ID NO: 320326 - DNA, 25 bp, Homo sapien
agagggcccggcaagggagccctcg

SEQ ID NO: 320327 - DNA, 25 bp, Homo sapien
caagggagccctcgcgccggagctg

SEQ ID NO: 320328 - DNA, 25 bp, Homo sapien
cttccttgtcggagcgccccagggg

SEQ ID NO: 320329 - DNA, 25 bp, Homo sapien
gctcaggacggacgcgcgctggacg

SEQ ID NO: 320330 - DNA, 25 bp, Homo sapien
tcactttcttcggctcttgggtttg

SEQ ID NO: 320331 - DNA, 25 bp, Homo sapien
cactttcttcggctcttgggtttga

SEQ ID NO: 320332 - DNA, 25 bp, Homo sapien
ttaaatcaggacgccctcaatggga

SEQ ID NO: 320333 - DNA, 25 bp, Homo sapien
gaggtgcgcaggccgaggagggggc

SEQ ID NO: 320334 - DNA, 25 bp, Homo sapien
gggggctgcggcaagctgcgagtct

SEQ ID NO: 320335 - DNA, 25 bp, Homo sapien
aatcaggacgccctcaatgggaggt

SEQ ID NO: 320336 - DNA, 25 bp, Homo sapien
tcagatgccccaaagaacaccatgg

SEQ ID NO: 320337 - DNA, 25 bp, Homo sapien
gaaatacctctgcaattacacctgg

SEQ ID NO: 320338 - DNA, 25 bp, Homo sapien
tacatatggtaccaaaggcctggga

SEQ ID NO: 320339 - DNA, 25 bp, Homo sapien
gccagaggtgcatttatcggttcca

SEQ ID NO: 320340 - DNA, 25 bp, Homo sapien
aatcctctttaccactggcaattga

SEQ ID NO: 320341 - DNA, 25 bp, Homo sapien
taatcctctttaccactggcaattg

SEQ ID NO: 320342 - DNA, 25 bp, Homo sapien
ctctttaccactggcaattgaaaag

SEQ ID NO: 320343 - DNA, 25 bp, Homo sapien
tcctctttaccactggcaattgaaa

SEQ ID NO: 320344 - DNA, 25 bp, Homo sapien
tgatcccatgttggtacacggagca

SEQ ID NO: 320345 - DNA, 25 bp, Homo sapien
tggtacacggagcatgcctgaagct

SEQ ID NO: 320346 - DNA, 25 bp, Homo sapien
ttcttggcctgaggcgatgtgattc

SEQ ID NO: 320347 - DNA, 25 bp, Homo sapien
gtgattcgtgatcccatgttggtac

SEQ ID NO: 320348 - DNA, 25 bp, Homo sapien
caggagtgccctcgtggaagcgttc

SEQ ID NO: 320349 - DNA, 25 bp, Homo sapien
gctggtccaccagtatgaggagctg

SEQ ID NO: 320350 - DNA, 25 bp, Homo sapien
ggctctaatccagcagatcctaagg

SEQ ID NO: 320351 - DNA, 25 bp, Homo sapien
tcaggctcagcagaggtatccttcc

SEQ ID NO: 320352 - DNA, 25 bp, Homo sapien
caagaggcttagcagaacaaataca

SEQ ID NO: 320353 - DNA, 25 bp, Homo sapien
gctagttacaactcctatgaaagcc

SEQ ID NO: 320354 - DNA, 25 bp, Homo sapien
gcttctcccaagtaacagatattca

SEQ ID NO: 320355 - DNA, 25 bp, Homo sapien
tctactctgtcacgattcttcaaag

SEQ ID NO: 320356 - DNA, 25 bp, Homo sapien
gaagtttcaatgtggtctatctagg

SEQ ID NO: 320357 - DNA, 25 bp, Homo sapien
tccttgtcgctagaaaacatcatct

SEQ ID NO: 320358 - DNA, 25 bp, Homo sapien
cagctgcatttaggacgcttttgtc

SEQ ID NO: 320359 - DNA, 25 bp, Homo sapien
ggtcattttccatgcatctccagct

SEQ ID NO: 320360 - DNA, 25 bp, Homo sapien
gtccttctcttctggatcatttcca

SEQ ID NO: 320361 - DNA, 25 bp, Homo sapien
tgacattaaccctctcaatcgtcaa

SEQ ID NO: 320362 - DNA, 25 bp, Homo sapien
attaaccctctcaatcgtcaacttg

SEQ ID NO: 320363 - DNA, 25 bp, Homo sapien
taaccctctcaatcgtcaacttgtc

SEQ ID NO: 320364 - DNA, 25 bp, Homo sapien
gagcatcattgtatggatgaacaaa

SEQ ID NO: 320365 - DNA, 25 bp, Homo sapien
tgacgcgaccattttaacgctttct

SEQ ID NO: 320366 - DNA, 25 bp, Homo sapien
tctccttcaatgacaaatcaagatg

SEQ ID NO: 320367 - DNA, 25 bp, Homo sapien
gttgtcagcgtccttccagactcct

SEQ ID NO: 320368 - DNA, 25 bp, Homo sapien
cacagatggaagatcgtcggcctta

SEQ ID NO: 320369 - DNA, 25 bp, Homo sapien
tgagcaatggtgctgcgaggaccac

SEQ ID NO: 320370 - DNA, 25 bp, Homo sapien
cacatgtcgtggtgtaagccccaga

SEQ ID NO: 320371 - DNA, 25 bp, Homo sapien
taccgcccgcaattttatctgtgga

SEQ ID NO: 320372 - DNA, 25 bp, Homo sapien
ttctccgggagaggcccgcgactgc

SEQ ID NO: 320373 - DNA, 25 bp, Homo sapien
cgccccgctcacctcgtgacacgcc

SEQ ID NO: 320374 - DNA, 25 bp, Homo sapien
cttctccgggagaggcccgcgactg

SEQ ID NO: 320375 - DNA, 25 bp, Homo sapien
tcgtgacacgccctgcggcgtccgc

SEQ ID NO: 320376 - DNA, 25 bp, Homo sapien
ggcggcgacagcgagtggaaggtgg

SEQ ID NO: 320377 - DNA, 25 bp, Homo sapien
gagaaaacatctccgcgcgatccgc

SEQ ID NO: 320378 - DNA, 25 bp, Homo sapien
agagaaaacatctccgcgcgatccg

SEQ ID NO: 320379 - DNA, 25 bp, Homo sapien
gcgacagcgagtggaaggtggagag

SEQ ID NO: 320380 - DNA, 25 bp, Homo sapien
ttctcacagtggtctgagtcgtagc

SEQ ID NO: 320381 - DNA, 25 bp, Homo sapien
caggccacagtcatcagtgatctca

SEQ ID NO: 320382 - DNA, 25 bp, Homo sapien
tgagtcgtagctgaggcccaggcca

SEQ ID NO: 320383 - DNA, 25 bp, Homo sapien
gatcttcgtcgtcaaattcttccag

SEQ ID NO: 320384 - DNA, 25 bp, Homo sapien
atctgtgtccccaactcttctccca

SEQ ID NO: 320385 - DNA, 25 bp, Homo sapien
aggccctcccttgagctggatctgt

SEQ ID NO: 320386 - DNA, 25 bp, Homo sapien
ctcccttgagctggatctgtgtccc

SEQ ID NO: 320387 - DNA, 25 bp, Homo sapien
ctaatgaggccctcccttgagctgg

SEQ ID NO: 320388 - DNA, 25 bp, Homo sapien
taggagaagggaaatcggggagcat

SEQ ID NO: 320389 - DNA, 25 bp, Homo sapien
agtcatcctggaaggagcagatggg

SEQ ID NO: 320390 - DNA, 25 bp, Homo sapien
ccagggtctcctccctcctggcctt

SEQ ID NO: 320391 - DNA, 25 bp, Homo sapien
tccctcctggccttccccatctccc

SEQ ID NO: 320392 - DNA, 25 bp, Homo sapien
gcaggtgcctctgagccagggtctc

SEQ ID NO: 320393 - DNA, 25 bp, Homo sapien
gggcaggtgcctctgagccagggtc

SEQ ID NO: 320394 - DNA, 25 bp, Homo sapien
ccagtgtggtcagacggagggtggt

SEQ ID NO: 320395 - DNA, 25 bp, Homo sapien
cccagtgtggtcagacggagggtgg

SEQ ID NO: 320396 - DNA, 25 bp, Homo sapien
ggggtggagatacatgacggcggtc

SEQ ID NO: 320397 - DNA, 25 bp, Homo sapien
ctggggtggagatacatgacggcgg

SEQ ID NO: 320398 - DNA, 25 bp, Homo sapien
tggggtggagatacatgacggcggt

SEQ ID NO: 320399 - DNA, 25 bp, Homo sapien
caggtcaaagcctccgttgttgttt

SEQ ID NO: 320400 - DNA, 25 bp, Homo sapien
gggcgggtgagcatagcgctgtctc

SEQ ID NO: 320401 - DNA, 25 bp, Homo sapien
tctgaggagggcgaagtcccccctg

SEQ ID NO: 320402 - DNA, 25 bp, Homo sapien
tcggagccgggcgaggacagctcct

SEQ ID NO: 320403 - DNA, 25 bp, Homo sapien
ccgctcgagcggcttctcaggtcag

SEQ ID NO: 320404 - DNA, 25 bp, Homo sapien
ggtcagcctcgatgccgggatctga

SEQ ID NO: 320405 - DNA, 25 bp, Homo sapien
gcgccccaggcggcgccgcccgcgt

SEQ ID NO: 320406 - DNA, 25 bp, Homo sapien
cgccccaggcggcgccgcccgcgtc

SEQ ID NO: 320407 - DNA, 25 bp, Homo sapien
tgctgcttccgccatcgctgctcag

SEQ ID NO: 320408 - DNA, 25 bp, Homo sapien
ctcctcgatggagttggtgaggtgc

SEQ ID NO: 320409 - DNA, 25 bp, Homo sapien
ggtgaggtgcgaggagcggccgctg

SEQ ID NO: 320410 - DNA, 25 bp, Homo sapien
tcgatggagttggtgaggtgcgagg

SEQ ID NO: 320411 - DNA, 25 bp, Homo sapien
gaccccgactcgtactcgctgttgg

SEQ ID NO: 320412 - DNA, 25 bp, Homo sapien
gccagggcgagtccgcgtcctcgct

SEQ ID NO: 320413 - DNA, 25 bp, Homo sapien
cgtcctcgctgaggtccggctccga

SEQ ID NO: 320414 - DNA, 25 bp, Homo sapien
tcgtactcgctgttggtgtcgtcgg

SEQ ID NO: 320415 - DNA, 25 bp, Homo sapien
ggagccctcggagatcatgcggctc

SEQ ID NO: 320416 - DNA, 25 bp, Homo sapien
gcagcggatgggcgaggagccctcg

SEQ ID NO: 320417 - DNA, 25 bp, Homo sapien
gccggggcagcggatgggcgaggag

SEQ ID NO: 320418 - DNA, 25 bp, Homo sapien
agccctcggagatcatgcggctcac

SEQ ID NO: 320419 - DNA, 25 bp, Homo sapien
cgggcgcggcgcaggagacaggcac

SEQ ID NO: 320420 - DNA, 25 bp, Homo sapien
agcgtctccatgtccaccagctcca

SEQ ID NO: 320421 - DNA, 25 bp, Homo sapien
cgcggccgcctcggggtcctgggag

SEQ ID NO: 320422 - DNA, 25 bp, Homo sapien
caccagctccacgccgccgggcccc

SEQ ID NO: 320423 - DNA, 25 bp, Homo sapien
gtccaccagctccacgccgccgggc

SEQ ID NO: 320424 - DNA, 25 bp, Homo sapien
tgaggaataggcagggcccgggctg

SEQ ID NO: 320425 - DNA, 25 bp, Homo sapien
gaggaataggcagggcccgggctgc

SEQ ID NO: 320426 - DNA, 25 bp, Homo sapien
aggaataggcagggcccgggctgcg

SEQ ID NO: 320427 - DNA, 25 bp, Homo sapien
ctgaggaataggcagggcccgggct

SEQ ID NO: 320428 - DNA, 25 bp, Homo sapien
cggcggagcaggctcgtcccgggcg

SEQ ID NO: 320429 - DNA, 25 bp, Homo sapien
ggagcaggctcgtcccgggcgggcg

SEQ ID NO: 320430 - DNA, 25 bp, Homo sapien
agcggcgtgatggtgtcacgcgtgg

SEQ ID NO: 320431 - DNA, 25 bp, Homo sapien
gcggcgtgatggtgtcacgcgtggg

SEQ ID NO: 320432 - DNA, 25 bp, Homo sapien
tcggcatcctcctcttcctcgtcgt

SEQ ID NO: 320433 - DNA, 25 bp, Homo sapien
gcatcctcctcttcctcgtcgtcct

SEQ ID NO: 320434 - DNA, 25 bp, Homo sapien
cggcatcctcctcttcctcgtcgtc

SEQ ID NO: 320435 - DNA, 25 bp, Homo sapien
ctcggcatcctcctcttcctcgtcg

SEQ ID NO: 320436 - DNA, 25 bp, Homo sapien
aggaccgagatgtgctgttgacgaa

SEQ ID NO: 320437 - DNA, 25 bp, Homo sapien
agctgcgtgtgctcatccaccacca

SEQ ID NO: 320438 - DNA, 25 bp, Homo sapien
cagcgtgtacttgaccgcgtcgtac

SEQ ID NO: 320439 - DNA, 25 bp, Homo sapien
aggtcagggctgtccggcgaggtgt

SEQ ID NO: 320440 - DNA, 25 bp, Homo sapien
cctcgccgttgaccagacaggagaa

SEQ ID NO: 320441 - DNA, 25 bp, Homo sapien
tgctctcgctcctcgccgttgacca

SEQ ID NO: 320442 - DNA, 25 bp, Homo sapien
tcgctcctcgccgttgaccagacag

SEQ ID NO: 320443 - DNA, 25 bp, Homo sapien
gctcctcgccgttgaccagacagga

SEQ ID NO: 320444 - DNA, 25 bp, Homo sapien
catgggcgtagaaggcaggaaacac

SEQ ID NO: 320445 - DNA, 25 bp, Homo sapien
ttgaagccacggaaccagaagtcgt

SEQ ID NO: 320446 - DNA, 25 bp, Homo sapien
tccagctcgtctggatgccgcggga

SEQ ID NO: 320447 - DNA, 25 bp, Homo sapien
ccccgtgcgcatgttgaagccacgg

SEQ ID NO: 320448 - DNA, 25 bp, Homo sapien
ggaactgcacgtcaaagcgctccac

SEQ ID NO: 320449 - DNA, 25 bp, Homo sapien
cacacaggatgccgttgccctggtg

SEQ ID NO: 320450 - DNA, 25 bp, Homo sapien
tgcacacaggatgccgttgccctgg

SEQ ID NO: 320451 - DNA, 25 bp, Homo sapien
acaggatgccgttgccctggtggca

SEQ ID NO: 320452 - DNA, 25 bp, Homo sapien
tcctccgctcagactcagcttgacc

SEQ ID NO: 320453 - DNA, 25 bp, Homo sapien
aggagggcgcaggtggacggtcagt

SEQ ID NO: 320454 - DNA, 25 bp, Homo sapien
caggtggacggtcagtttccgggca

SEQ ID NO: 320455 - DNA, 25 bp, Homo sapien
ccccgaagagagatctcgaggtcac

SEQ ID NO: 320456 - DNA, 25 bp, Homo sapien
ctagagcagaggtgggcagaagtcc

SEQ ID NO: 320457 - DNA, 25 bp, Homo sapien
tcatctggaagaaatggctgcagcg

SEQ ID NO: 320458 - DNA, 25 bp, Homo sapien
tcttcatctggaagaaatggctgca

SEQ ID NO: 320459 - DNA, 25 bp, Homo sapien
agccgcagaaggagatgttcttcat

SEQ ID NO: 320460 - DNA, 25 bp, Homo sapien
agctgttgcggggatggcagccgca

SEQ ID NO: 320461 - DNA, 25 bp, Homo sapien
gctgtctggtctgcgcccctgcccg

SEQ ID NO: 320462 - DNA, 25 bp, Homo sapien
gccccgctgtctggtctgcgcccct

SEQ ID NO: 320463 - DNA, 25 bp, Homo sapien
cctgcccgctgtcccacctctccac

SEQ ID NO: 320464 - DNA, 25 bp, Homo sapien
gctggccccgctgtctggtctgcgc

SEQ ID NO: 320465 - DNA, 25 bp, Homo sapien
agctccgaggtggggctggacgtta

SEQ ID NO: 320466 - DNA, 25 bp, Homo sapien
ggctggacgttacccctggtctgta

SEQ ID NO: 320467 - DNA, 25 bp, Homo sapien
ggaaagcagctccttgcggggcctc

SEQ ID NO: 320468 - DNA, 25 bp, Homo sapien
gctggacgttacccctggtctgtaa

SEQ ID NO: 320469 - DNA, 25 bp, Homo sapien
gagaccatatctcctgccaactcag

SEQ ID NO: 320470 - DNA, 25 bp, Homo sapien
tggagaccatatctcctgccaactc

SEQ ID NO: 320471 - DNA, 25 bp, Homo sapien
tcctcctgcgggcctagcagactga

SEQ ID NO: 320472 - DNA, 25 bp, Homo sapien
actggagaccatatctcctgccaac

SEQ ID NO: 320473 - DNA, 25 bp, Homo sapien
caagagttcacgctctgagttaatt

SEQ ID NO: 320474 - DNA, 25 bp, Homo sapien
cgctctgagttaattccatgatgac

SEQ ID NO: 320475 - DNA, 25 bp, Homo sapien
gctaccctctgtggccctattcagg

SEQ ID NO: 320476 - DNA, 25 bp, Homo sapien
tcccttctctgagccggtgctgcta

SEQ ID NO: 320477 - DNA, 25 bp, Homo sapien
agccttggccaccccacaaatgatg

SEQ ID NO: 320478 - DNA, 25 bp, Homo sapien
tgggggtcgcacaatttcaagatct

SEQ ID NO: 320479 - DNA, 25 bp, Homo sapien
cagtgtggagggcacgtcagagccc

SEQ ID NO: 320480 - DNA, 25 bp, Homo sapien
cacaaatgatgtagagagaagaggc

SEQ ID NO: 320481 - DNA, 25 bp, Homo sapien
acgtggcaggcgaagcggctcagca

SEQ ID NO: 320482 - DNA, 25 bp, Homo sapien
ggtgtttggtgatgaagccgaaata

SEQ ID NO: 320483 - DNA, 25 bp, Homo sapien
acactctgcgccaccggcctcatgg

SEQ ID NO: 320484 - DNA, 25 bp, Homo sapien
tggactcctgggagacaaagacgtg

SEQ ID NO: 320485 - DNA, 25 bp, Homo sapien
ccccaagtgtgaccctcagctctcc

SEQ ID NO: 320486 - DNA, 25 bp, Homo sapien
gcatggccatgtcacccccaagtgt

SEQ ID NO: 320487 - DNA, 25 bp, Homo sapien
caattctacccctgccagagtgcct

SEQ ID NO: 320488 - DNA, 25 bp, Homo sapien
ccagcaattctacccctgccagagt

SEQ ID NO: 320489 - DNA, 25 bp, Homo sapien
caggcgtacgccaggtgctcttggt

SEQ ID NO: 320490 - DNA, 25 bp, Homo sapien
caggtgctcttggtagtactccagg

SEQ ID NO: 320491 - DNA, 25 bp, Homo sapien
gccaggtgctcttggtagtactcca

SEQ ID NO: 320492 - DNA, 25 bp, Homo sapien
cgtacgccaggtgctcttggtagta

SEQ ID NO: 320493 - DNA, 25 bp, Homo sapien
ggtgagcatcaagaaccactcctag

SEQ ID NO: 320494 - DNA, 25 bp, Homo sapien
cagagagtttattgaggccatgggc

SEQ ID NO: 320495 - DNA, 25 bp, Homo sapien
ccgaagttctgaccccaaagtgaag

SEQ ID NO: 320496 - DNA, 25 bp, Homo sapien
gacattacctgtccctagagccgca

SEQ ID NO: 320497 - DNA, 25 bp, Homo sapien
tggtgttgcacgaatcctgggctca

SEQ ID NO: 320498 - DNA, 25 bp, Homo sapien
gatgcacttcctaacactgggcagc

SEQ ID NO: 320499 - DNA, 25 bp, Homo sapien
cacgggctgaacctctggatcatga

SEQ ID NO: 320500 - DNA, 25 bp, Homo sapien
agtttcaaacgtacacacccagtgg

SEQ ID NO: 320501 - DNA, 25 bp, Homo sapien
agtgatgagccgaggaagtgcccct

SEQ ID NO: 320502 - DNA, 25 bp, Homo sapien
ccatccttgggctagattggcggaa

SEQ ID NO: 320503 - DNA, 25 bp, Homo sapien
agcaggctgttgcacgaagacccag

SEQ ID NO: 320504 - DNA, 25 bp, Homo sapien
tcatgctgaggttcaacagggacct

SEQ ID NO: 320505 - DNA, 25 bp, Homo sapien
gggcttccatcgatttctaggcatc

SEQ ID NO: 320506 - DNA, 25 bp, Homo sapien
tcccggttcggatgggcatgtaccc

SEQ ID NO: 320507 - DNA, 25 bp, Homo sapien
tgaccgtggccgaagtcctggctgc

SEQ ID NO: 320508 - DNA, 25 bp, Homo sapien
cctcacaggaatggccggcaagtgg

SEQ ID NO: 320509 - DNA, 25 bp, Homo sapien
ggctcaaagtatggccacagtttat

SEQ ID NO: 320510 - DNA, 25 bp, Homo sapien
gccttgttctacagatgaaacctca

SEQ ID NO: 320511 - DNA, 25 bp, Homo sapien
ccagtggcaagaccggttacaggag

SEQ ID NO: 320512 - DNA, 25 bp, Homo sapien
aagaacatgggctcaaagtatggcc

SEQ ID NO: 320513 - DNA, 25 bp, Homo sapien
ggctcaaagtatggccacagtttat

SEQ ID NO: 320514 - DNA, 25 bp, Homo sapien
gccttgttctacagatgaaacctca

SEQ ID NO: 320515 - DNA, 25 bp, Homo sapien
ccagtggcaagaccggttacaggag

SEQ ID NO: 320516 - DNA, 25 bp, Homo sapien
aagaacatgggctcaaagtatggcc

SEQ ID NO: 320517 - DNA, 25 bp, Homo sapien
ttgtccacaattacacatgccaagg

SEQ ID NO: 320518 - DNA, 25 bp, Homo sapien
gaaaaacagccaagactactccctg

SEQ ID NO: 320519 - DNA, 25 bp, Homo sapien
cgtcaggtcatgcaatacaggaaaa

SEQ ID NO: 320520 - DNA, 25 bp, Homo sapien
cctaactttgtagctgttgtccaca

SEQ ID NO: 320521 - DNA, 25 bp, Homo sapien
cctccgtgtctggaggttctcgtgg

SEQ ID NO: 320522 - DNA, 25 bp, Homo sapien
tgtctggaggttctcgtggcctgac

SEQ ID NO: 320523 - DNA, 25 bp, Homo sapien
gttctcgtggcctgacccagtacca

SEQ ID NO: 320524 - DNA, 25 bp, Homo sapien
ggaggttctcgtggcctgacccagt

SEQ ID NO: 320525 - DNA, 25 bp, Homo sapien
cacttcagggcgtagatctgcttta

SEQ ID NO: 320526 - DNA, 25 bp, Homo sapien
cagttctggaggcggctctctgcag

SEQ ID NO: 320527 - DNA, 25 bp, Homo sapien
tcatcacggccagatcttccatggg

SEQ ID NO: 320528 - DNA, 25 bp, Homo sapien
ttgagctcttggacctgtgcaacga

SEQ ID NO: 320529 - DNA, 25 bp, Homo sapien
aggaacaagtaactggctggttgtg

SEQ ID NO: 320530 - DNA, 25 bp, Homo sapien
gaacaagtaactggctggttgtgat

SEQ ID NO: 320531 - DNA, 25 bp, Homo sapien
ggaacaagtaactggctggttgtga

SEQ ID NO: 320532 - DNA, 25 bp, Homo sapien
gagcgcccggggactccgcgcgcgg

SEQ ID NO: 320533 - DNA, 25 bp, Homo sapien
gccggagccccgtcggccgcgctgc

SEQ ID NO: 320534 - DNA, 25 bp, Homo sapien
ccgtcggccgcgctgcgcgggaggg

SEQ ID NO: 320535 - DNA, 25 bp, Homo sapien
gccgctcgcgccggggaacggagcg

SEQ ID NO: 320536 - DNA, 25 bp, Homo sapien
gtccgggatgccgacgcgcacgacc

SEQ ID NO: 320537 - DNA, 25 bp, Homo sapien
gatgccgacgcgcacgaccacggcg

SEQ ID NO: 320538 - DNA, 25 bp, Homo sapien
caggtccgggatgccgacgcgcacg

SEQ ID NO: 320539 - DNA, 25 bp, Homo sapien
ccgggatgccgacgcgcacgaccac

SEQ ID NO: 320540 - DNA, 25 bp, Homo sapien
tccaggttgggcgggtactcctgca

SEQ ID NO: 320541 - DNA, 25 bp, Homo sapien
gcccatagttgagcgcgtcctggag

SEQ ID NO: 320542 - DNA, 25 bp, Homo sapien
ggctgtggttgagggcgcagagcac

SEQ ID NO: 320543 - DNA, 25 bp, Homo sapien
agagcacgcgctgcttggcggccca

SEQ ID NO: 320544 - DNA, 25 bp, Homo sapien
gcaagtgagtccatgcacaaacccc

SEQ ID NO: 320545 - DNA, 25 bp, Homo sapien
agtgagtccatgcacaaaccccgtc

SEQ ID NO: 320546 - DNA, 25 bp, Homo sapien
ctgagcaagtgagtccatgcacaaa

SEQ ID NO: 320547 - DNA, 25 bp, Homo sapien
ccccggctgagcaagtgagtccatg

SEQ ID NO: 320548 - DNA, 25 bp, Homo sapien
agctttgcaaactgcttatcatcga

SEQ ID NO: 320549 - DNA, 25 bp, Homo sapien
tgggcataaactcgccgcttgtatc

SEQ ID NO: 320550 - DNA, 25 bp, Homo sapien
tgaggttctgggcataaactcgccg

SEQ ID NO: 320551 - DNA, 25 bp, Homo sapien
cttatcatcgatgaggttctgggca

SEQ ID NO: 320552 - DNA, 25 bp, Homo sapien
tggggaaatggactgagctaaagct

SEQ ID NO: 320553 - DNA, 25 bp, Homo sapien
ggcccctgatgatggggaaatggac

SEQ ID NO: 320554 - DNA, 25 bp, Homo sapien
agtacaggctctgggcccctgatga

SEQ ID NO: 320555 - DNA, 25 bp, Homo sapien
ctgggcccctgatgatggggaaatg

SEQ ID NO: 320556 - DNA, 25 bp, Homo sapien
ggccaggaatctgtgcccagccctt

SEQ ID NO: 320557 - DNA, 25 bp, Homo sapien
atggggccaggaatctgtgcccagc

SEQ ID NO: 320558 - DNA, 25 bp, Homo sapien
caaccatggggccaggaatctgtgc

SEQ ID NO: 320559 - DNA, 25 bp, Homo sapien
cccaaccatggggccaggaatctgt

SEQ ID NO: 320560 - DNA, 25 bp, Homo sapien
gtccgtgctatgcagctggacgtag

SEQ ID NO: 320561 - DNA, 25 bp, Homo sapien
accttgtccgtgctatgcagctgga

SEQ ID NO: 320562 - DNA, 25 bp, Homo sapien
agccccttgtccaacaggcgtgcca

SEQ ID NO: 320563 - DNA, 25 bp, Homo sapien
cgtgccaccttgtccgtgctatgca

SEQ ID NO: 320564 - DNA, 25 bp, Homo sapien
ttccgctggcgtgtggcacagtgca

SEQ ID NO: 320565 - DNA, 25 bp, Homo sapien
acagtgcacggcagtgagcccatcg

SEQ ID NO: 320566 - DNA, 25 bp, Homo sapien
agcccatcgcgagtgcggaagtcca

SEQ ID NO: 320567 - DNA, 25 bp, Homo sapien
tttagcaggtccgtggcgttgtcca

SEQ ID NO: 320568 - DNA, 25 bp, Homo sapien
tagtcaggtgaagcccccaggtcca

SEQ ID NO: 320569 - DNA, 25 bp, Homo sapien
cttgtagtcaggtgaagcccccagg

SEQ ID NO: 320570 - DNA, 25 bp, Homo sapien
gtgaagcccccaggtccagcagggt

SEQ ID NO: 320571 - DNA, 25 bp, Homo sapien
tgtagtcaggtgaagcccccaggtc

SEQ ID NO: 320572 - DNA, 25 bp, Homo sapien
ctgccagccattctcgtcggtgatc

SEQ ID NO: 320573 - DNA, 25 bp, Homo sapien
atccccagctgagcgtggtcgtgga

SEQ ID NO: 320574 - DNA, 25 bp, Homo sapien
attctcgtcggtgatccccagctga

SEQ ID NO: 320575 - DNA, 25 bp, Homo sapien
agctcacagcagagggcatccccac

SEQ ID NO: 320576 - DNA, 25 bp, Homo sapien
ggggaagagcaaggtgctgtagggt

SEQ ID NO: 320577 - DNA, 25 bp, Homo sapien
tgggggaagagcaaggtgctgtagg

SEQ ID NO: 320578 - DNA, 25 bp, Homo sapien
ggaagagcaaggtgctgtagggtcc

SEQ ID NO: 320579 - DNA, 25 bp, Homo sapien
ctgggggaagagcaaggtgctgtag

SEQ ID NO: 320580 - DNA, 25 bp, Homo sapien
ctccagatgctgcacgtgcccaaag

SEQ ID NO: 320581 - DNA, 25 bp, Homo sapien
cagggctgtgttccccgaggcgttc

SEQ ID NO: 320582 - DNA, 25 bp, Homo sapien
gaggcgttctgggcccccatgtctg

SEQ ID NO: 320583 - DNA, 25 bp, Homo sapien
ccatgtctgccccatagaacagcag

SEQ ID NO: 320584 - DNA, 25 bp, Homo sapien
gtacagggtcatctgtgtgcacaca

SEQ ID NO: 320585 - DNA, 25 bp, Homo sapien
gtgcacgcatgcaatcactgtacag

SEQ ID NO: 320586 - DNA, 25 bp, Homo sapien
cacgcatgcaatcactgtacagggt

SEQ ID NO: 320587 - DNA, 25 bp, Homo sapien
catgcaatcactgtacagggtcatc

SEQ ID NO: 320588 - DNA, 25 bp, Homo sapien
gtacagggtcatctgtgtgcacaca

SEQ ID NO: 320589 - DNA, 25 bp, Homo sapien
gtgcacgcatgcaatcactgtacag

SEQ ID NO: 320590 - DNA, 25 bp, Homo sapien
catgcaatcactgtacagggtcatc

SEQ ID NO: 320591 - DNA, 25 bp, Homo sapien
cacgcatgcaatcactgtacagggt

SEQ ID NO: 320592 - DNA, 25 bp, Homo sapien
ccccagaacaggcaagtatatccac

SEQ ID NO: 320593 - DNA, 25 bp, Homo sapien
cagaacaggcaagtatatccacact

SEQ ID NO: 320594 - DNA, 25 bp, Homo sapien
gaacaggcaagtatatccacactcc

SEQ ID NO: 320595 - DNA, 25 bp, Homo sapien
ccagaacaggcaagtatatccacac

SEQ ID NO: 320596 - DNA, 25 bp, Homo sapien
gtacagggtcatctgtgtgcacaca

SEQ ID NO: 320597 - DNA, 25 bp, Homo sapien
ccccagaacaggcaagtatatccac

SEQ ID NO: 320598 - DNA, 25 bp, Homo sapien
gtgcacgcatgcaatcactgtacag

SEQ ID NO: 320599 - DNA, 25 bp, Homo sapien
gaacaggcaagtatatccacactcc

SEQ ID NO: 320600 - DNA, 25 bp, Homo sapien
ccccagaacaggcaagtatatccac

SEQ ID NO: 320601 - DNA, 25 bp, Homo sapien
gtgcacgcatgcaatcactgtacag

SEQ ID NO: 320602 - DNA, 25 bp, Homo sapien
gcatgcaatcactgtacagggtcat

SEQ ID NO: 320603 - DNA, 25 bp, Homo sapien
gaacaggcaagtatatccacactcc

SEQ ID NO: 320604 - DNA, 25 bp, Homo sapien
ccctggtacacgtgtacaatcactg

SEQ ID NO: 320605 - DNA, 25 bp, Homo sapien
cactccctggtacacgtgtacaatc

SEQ ID NO: 320606 - DNA, 25 bp, Homo sapien
actccctggtacacgtgtacaatca

SEQ ID NO: 320607 - DNA, 25 bp, Homo sapien
tccctggtacacgtgtacaatcact

SEQ ID NO: 320608 - DNA, 25 bp, Homo sapien
ccagaacaggcaagtatatccacac

SEQ ID NO: 320609 - DNA, 25 bp, Homo sapien
cagaacaggcaagtatatccacact

SEQ ID NO: 320610 - DNA, 25 bp, Homo sapien
ccccagaacaggcaagtatatccac

SEQ ID NO: 320611 - DNA, 25 bp, Homo sapien
gaacaggcaagtatatccacactcc

SEQ ID NO: 320612 - DNA, 25 bp, Homo sapien
ttagctccacggaagagcaggacac

SEQ ID NO: 320613 - DNA, 25 bp, Homo sapien
tccctgttagctccacggaagagca

SEQ ID NO: 320614 - DNA, 25 bp, Homo sapien
ctgttgtagttgcggacatccctgt

SEQ ID NO: 320615 - DNA, 25 bp, Homo sapien
gcggacatccctgttagctccacgg

SEQ ID NO: 320616 - DNA, 25 bp, Homo sapien
cctggcgaggggacgaagggaacat

SEQ ID NO: 320617 - DNA, 25 bp, Homo sapien
aaatacccctcgcgtgctgggctcg

SEQ ID NO: 320618 - DNA, 25 bp, Homo sapien
ggggacgaagggaacatcaacacca

SEQ ID NO: 320619 - DNA, 25 bp, Homo sapien
aatacccctcgcgtgctgggctcgt

SEQ ID NO: 320620 - DNA, 25 bp, Homo sapien
tgggtcttgataacctctgcaagct

SEQ ID NO: 320621 - DNA, 25 bp, Homo sapien
caacatccgagtctttgtgggtctt

SEQ ID NO: 320622 - DNA, 25 bp, Homo sapien
gctcaaagttccctgcgatgatggc

SEQ ID NO: 320623 - DNA, 25 bp, Homo sapien
caagctcaaagttccctgcgatgat

SEQ ID NO: 320624 - DNA, 25 bp, Homo sapien
ggtcgcccaggtgggcagaactcac

SEQ ID NO: 320625 - DNA, 25 bp, Homo sapien
gggtcgcccaggtgggcagaactca

SEQ ID NO: 320626 - DNA, 25 bp, Homo sapien
gcagggtcgcccaggtgggcagaac

SEQ ID NO: 320627 - DNA, 25 bp, Homo sapien
tcagcagggtcgcccaggtgggcag

SEQ ID NO: 320628 - DNA, 25 bp, Homo sapien
atgcccgcagtggccactcagagac

SEQ ID NO: 320629 - DNA, 25 bp, Homo sapien
tcatgcccgcagtggccactcagag

SEQ ID NO: 320630 - DNA, 25 bp, Homo sapien
catgcccgcagtggccactcagaga

SEQ ID NO: 320631 - DNA, 25 bp, Homo sapien
gcccgcagtggccactcagagacca

SEQ ID NO: 320632 - DNA, 25 bp, Homo sapien
ctaggttggatagccagtaagtcgc

SEQ ID NO: 320633 - DNA, 25 bp, Homo sapien
tggatagccagtaagtcgcaaccat

SEQ ID NO: 320634 - DNA, 25 bp, Homo sapien
aggttggatagccagtaagtcgcaa

SEQ ID NO: 320635 - DNA, 25 bp, Homo sapien
gttggatagccagtaagtcgcaacc

SEQ ID NO: 320636 - DNA, 25 bp, Homo sapien
cagtgggcataggatgtagcaagtc

SEQ ID NO: 320637 - DNA, 25 bp, Homo sapien
taggatgtagcaagtcatgactgtc

SEQ ID NO: 320638 - DNA, 25 bp, Homo sapien
agagaaggcggcacctccttccagt

SEQ ID NO: 320639 - DNA, 25 bp, Homo sapien
accccagtgggcataggatgtagca

SEQ ID NO: 320640 - DNA, 25 bp, Homo sapien
cgaggggatgccaagccactggggc

SEQ ID NO: 320641 - DNA, 25 bp, Homo sapien
cgccgccgcttcgcatagctggggg

SEQ ID NO: 320642 - DNA, 25 bp, Homo sapien
gaggggatgccaagccactggggcc

SEQ ID NO: 320643 - DNA, 25 bp, Homo sapien
gccctgcctgctaaagggccactga

SEQ ID NO: 320644 - DNA, 25 bp, Homo sapien
cactgatgttgctctcctggtcggc

SEQ ID NO: 320645 - DNA, 25 bp, Homo sapien
gcttctcagcgagggtccaggagaa

SEQ ID NO: 320646 - DNA, 25 bp, Homo sapien
tcaggttgatatcgctggctgagcg

SEQ ID NO: 320647 - DNA, 25 bp, Homo sapien
ctctctctgcctcccggtgctggct

SEQ ID NO: 320648 - DNA, 25 bp, Homo sapien
tcctggctcaggtcccggcacccca

SEQ ID NO: 320649 - DNA, 25 bp, Homo sapien
ctctgcctcccggtgctggctcctc

SEQ ID NO: 320650 - DNA, 25 bp, Homo sapien
gctcaggtcccggcaccccaccctc

SEQ ID NO: 320651 - DNA, 25 bp, Homo sapien
tcgaattcgaatacagctcctgggc

SEQ ID NO: 320652 - DNA, 25 bp, Homo sapien
ccgagctcgaattcgaatacagctc

SEQ ID NO: 320653 - DNA, 25 bp, Homo sapien
gctcgaattcgaatacagctcctgg

SEQ ID NO: 320654 - DNA, 25 bp, Homo sapien
gaattcgaatacagctcctgggcgc

SEQ ID NO: 320655 - DNA, 25 bp, Homo sapien
tgtgcgccttcacggcgatgaactt

SEQ ID NO: 320656 - DNA, 25 bp, Homo sapien
cgccttcacggcgatgaacttgcgg

SEQ ID NO: 320657 - DNA, 25 bp, Homo sapien
ggctgtgcgccttcacggcgatgaa

SEQ ID NO: 320658 - DNA, 25 bp, Homo sapien
ttcacggcgatgaacttgcggccgg

SEQ ID NO: 320659 - DNA, 25 bp, Homo sapien
acttcctccacgcagtcggccggga

SEQ ID NO: 320660 - DNA, 25 bp, Homo sapien
cagtcggccgggaaccagcccgtgc

SEQ ID NO: 320661 - DNA, 25 bp, Homo sapien
ttcctccacgcagtcggccgggaac

SEQ ID NO: 320662 - DNA, 25 bp, Homo sapien
agaaaccgccctccccaatgctgag

SEQ ID NO: 320663 - DNA, 25 bp, Homo sapien
tggcctctggcagaactcggccccg

SEQ ID NO: 320664 - DNA, 25 bp, Homo sapien
cactccagtcccggaaatggatttt

SEQ ID NO: 320665 - DNA, 25 bp, Homo sapien
tctggcagaactcggccccgggatc

SEQ ID NO: 320666 - DNA, 25 bp, Homo sapien
agaggctctgcgcagtgtggccagc

SEQ ID NO: 320667 - DNA, 25 bp, Homo sapien
gtgtagtgccgaaagagccgcttcg

SEQ ID NO: 320668 - DNA, 25 bp, Homo sapien
gtgaggtgaggctgtcgtaggagcc

SEQ ID NO: 320669 - DNA, 25 bp, Homo sapien
ctgtgtgaggtgaggctgtcgtagg

SEQ ID NO: 320670 - DNA, 25 bp, Homo sapien
actgtgtagtgccgaaagagccgct

SEQ ID NO: 320671 - DNA, 25 bp, Homo sapien
tttggctccccggagcacaaaacca

SEQ ID NO: 320672 - DNA, 25 bp, Homo sapien
ttggctccccggagcacaaaaccaa

SEQ ID NO: 320673 - DNA, 25 bp, Homo sapien
cctccacgtccaccgactcgagata

SEQ ID NO: 320674 - DNA, 25 bp, Homo sapien
acgtccaccgactcgagatactgca

SEQ ID NO: 320675 - DNA, 25 bp, Homo sapien
atgaggaagtctcccgtgcgcagcc

SEQ ID NO: 320676 - DNA, 25 bp, Homo sapien
tggcgtgggcgtgaactcctcgatg

SEQ ID NO: 320677 - DNA, 25 bp, Homo sapien
gccgagccccgtcctcttctggctt

SEQ ID NO: 320678 - DNA, 25 bp, Homo sapien
gacacaaccttcatgacgaggcggt

SEQ ID NO: 320679 - DNA, 25 bp, Homo sapien
tgcttgtgtccgaccttcaccacgt

SEQ ID NO: 320680 - DNA, 25 bp, Homo sapien
ggttgccaccctggcgaatcagagc

SEQ ID NO: 320681 - DNA, 25 bp, Homo sapien
agctgctggcggtgtagggaaggag

SEQ ID NO: 320682 - DNA, 25 bp, Homo sapien
ggcagctgctggcggtgtagggaag

SEQ ID NO: 320683 - DNA, 25 bp, Homo sapien
cagctgctggcggtgtagggaagga

SEQ ID NO: 320684 - DNA, 25 bp, Homo sapien
caggcagctgctggcggtgtaggga

SEQ ID NO: 320685 - DNA, 25 bp, Homo sapien
aggatgagtcgcactgtgccaggat

SEQ ID NO: 320686 - DNA, 25 bp, Homo sapien
tactcccgcgaggatgagtcgcact

SEQ ID NO: 320687 - DNA, 25 bp, Homo sapien
atctcctcgtactcccgcgaggatg

SEQ ID NO: 320688 - DNA, 25 bp, Homo sapien
gtgcaggtgccacttgcgctccacc

SEQ ID NO: 320689 - DNA, 25 bp, Homo sapien
agttcctcgagctcagctgtcatgg

SEQ ID NO: 320690 - DNA, 25 bp, Homo sapien
gttcctcgagctcagctgtcatgga

SEQ ID NO: 320691 - DNA, 25 bp, Homo sapien
aagttcctcgagctcagctgtcatg

SEQ ID NO: 320692 - DNA, 25 bp, Homo sapien
tcctcgagctcagctgtcatggact

SEQ ID NO: 320693 - DNA, 25 bp, Homo sapien
gatggtcaaccagggcttgtgccca

SEQ ID NO: 320694 - DNA, 25 bp, Homo sapien
cacatgcaaacatactggtgggcca

SEQ ID NO: 320695 - DNA, 25 bp, Homo sapien
tggacgtgcacatgacaaggttgtt

SEQ ID NO: 320696 - DNA, 25 bp, Homo sapien
gcagggccacctgtcaatgagtgca

SEQ ID NO: 320697 - DNA, 25 bp, Homo sapien
tcacgtcaggacatgatcaagtata

SEQ ID NO: 320698 - DNA, 25 bp, Homo sapien
cacgtcaggacatgatcaagtatat

SEQ ID NO: 320699 - DNA, 25 bp, Homo sapien
cacagtgaggacaacggtcacacgt

SEQ ID NO: 320700 - DNA, 25 bp, Homo sapien
gatggccacatgtatagcacatacc

SEQ ID NO: 320701 - DNA, 25 bp, Homo sapien
tgtcacgtacagtgggacatgccca

SEQ ID NO: 320702 - DNA, 25 bp, Homo sapien
catgacgaggctgttgatggccaca

SEQ ID NO: 320703 - DNA, 25 bp, Homo sapien
aatggggtcccttcctgtggccagg

SEQ ID NO: 320704 - DNA, 25 bp, Homo sapien
gggctcagcctagaaccagaatggg

SEQ ID NO: 320705 - DNA, 25 bp, Homo sapien
gacttcagggttcagtttaggacca

SEQ ID NO: 320706 - DNA, 25 bp, Homo sapien
agactgaagccagggatagggctca

SEQ ID NO: 320707 - DNA, 25 bp, Homo sapien
gacgttggtagctgttctccaccct

SEQ ID NO: 320708 - DNA, 25 bp, Homo sapien
cacgtcagcccaatggacgttggta

SEQ ID NO: 320709 - DNA, 25 bp, Homo sapien
tggtgaaaattctgaccacgtcagc

SEQ ID NO: 320710 - DNA, 25 bp, Homo sapien
cctgaactaaactgcagttaagacc

SEQ ID NO: 320711 - DNA, 25 bp, Homo sapien
tgggccacctcctgccccactgcca

SEQ ID NO: 320712 - DNA, 25 bp, Homo sapien
gggccacctcctgccccactgccat

SEQ ID NO: 320713 - DNA, 25 bp, Homo sapien
agctgcctgggccacctcctgcccc

SEQ ID NO: 320714 - DNA, 25 bp, Homo sapien
ctcagctgcctgggccacctcctgc

SEQ ID NO: 320715 - DNA, 25 bp, Homo sapien
gcctctgtttgacggtggcggctct

SEQ ID NO: 320716 - DNA, 25 bp, Homo sapien
taatctcggcgggtgtgatcctccg

SEQ ID NO: 320717 - DNA, 25 bp, Homo sapien
tctggagtctgcgtctgcgatgtct

SEQ ID NO: 320718 - DNA, 25 bp, Homo sapien
tctgcggcggctgccagcatctcgt

SEQ ID NO: 320719 - DNA, 25 bp, Homo sapien
ctacagacttggtccgtggaatccc

SEQ ID NO: 320720 - DNA, 25 bp, Homo sapien
ttggtccgtggaatccccttccgca

SEQ ID NO: 320721 - DNA, 25 bp, Homo sapien
gtggaatccccttccgcaaggagcc

SEQ ID NO: 320722 - DNA, 25 bp, Homo sapien
ttccgcaaggagcccggcagcttct

SEQ ID NO: 320723 - DNA, 25 bp, Homo sapien
catgcagccccacagcgcagccata

SEQ ID NO: 320724 - DNA, 25 bp, Homo sapien
cccatgcagccccacagcgcagcca

SEQ ID NO: 320725 - DNA, 25 bp, Homo sapien
atgcagccccacagcgcagccatac

SEQ ID NO: 320726 - DNA, 25 bp, Homo sapien
ccatgcagccccacagcgcagccat

SEQ ID NO: 320727 - DNA, 25 bp, Homo sapien
tggggaaggcctaatccccacatgt

SEQ ID NO: 320728 - DNA, 25 bp, Homo sapien
tggacagggagtgtcggctgccggg

SEQ ID NO: 320729 - DNA, 25 bp, Homo sapien
cggctgccgggggaaagctctgggt

SEQ ID NO: 320730 - DNA, 25 bp, Homo sapien
ttggggaaggcctaatccccacatg

SEQ ID NO: 320731 - DNA, 25 bp, Homo sapien
catgcacttgggctgcaagggagca

SEQ ID NO: 320732 - DNA, 25 bp, Homo sapien
gagggtcagaaacttcacatgcact

SEQ ID NO: 320733 - DNA, 25 bp, Homo sapien
tgaccctggtgggagcagtttcaat

SEQ ID NO: 320734 - DNA, 25 bp, Homo sapien
caaccgcgatggaggcagctgagct

SEQ ID NO: 320735 - DNA, 25 bp, Homo sapien
aagacccaggtcaagggaggcagag

SEQ ID NO: 320736 - DNA, 25 bp, Homo sapien
agacccaggtcaagggaggcagaga

SEQ ID NO: 320737 - DNA, 25 bp, Homo sapien
ctttacagtgcagggctgaactgca

SEQ ID NO: 320738 - DNA, 25 bp, Homo sapien
ggtcttgcatcgaggtgctccgcgg

SEQ ID NO: 320739 - DNA, 25 bp, Homo sapien
cttgcatcgaggtgctccgcgggaa

SEQ ID NO: 320740 - DNA, 25 bp, Homo sapien
cgggtcttgcatcgaggtgctccgc

SEQ ID NO: 320741 - DNA, 25 bp, Homo sapien
gctccgcgggaagcgcccttccagc

SEQ ID NO: 320742 - DNA, 25 bp, Homo sapien
agtcgaagtagtagggcgcgggcgg

SEQ ID NO: 320743 - DNA, 25 bp, Homo sapien
gcgggatgccgcgaccctcgcgcac

SEQ ID NO: 320744 - DNA, 25 bp, Homo sapien
agctggagcgcaccgtgtcgtaggc

SEQ ID NO: 320745 - DNA, 25 bp, Homo sapien
gccccgagtcgaagtagtagggcgc

SEQ ID NO: 320746 - DNA, 25 bp, Homo sapien
gatgatcatggagcgcgcgcgcttc

SEQ ID NO: 320747 - DNA, 25 bp, Homo sapien
ggcgccgagtcctgcaggatgatca

SEQ ID NO: 320748 - DNA, 25 bp, Homo sapien
gcttctgccgctcgggatacggcag

SEQ ID NO: 320749 - DNA, 25 bp, Homo sapien
ccggctcgtacaggccggcagcgcc

SEQ ID NO: 320750 - DNA, 25 bp, Homo sapien
tgggtcgctcgggcggggtggccgc

SEQ ID NO: 320751 - DNA, 25 bp, Homo sapien
tggacggagcgaagaggctggcgct

SEQ ID NO: 320752 - DNA, 25 bp, Homo sapien
cttggacggagcgaagaggctggcg

SEQ ID NO: 320753 - DNA, 25 bp, Homo sapien
ttggacggagcgaagaggctggcgc

SEQ ID NO: 320754 - DNA, 25 bp, Homo sapien
ggccatcgcccgcgccgtagtcgag

SEQ ID NO: 320755 - DNA, 25 bp, Homo sapien
cgtagtcgaggccacccgggcgcgg

SEQ ID NO: 320756 - DNA, 25 bp, Homo sapien
cccgggccatcgcccgcgccgtagt

SEQ ID NO: 320757 - DNA, 25 bp, Homo sapien
tcggggagggctcgcgggcgaagct

SEQ ID NO: 320758 - DNA, 25 bp, Homo sapien
ggcgtgcacaacgatgaggccagct

SEQ ID NO: 320759 - DNA, 25 bp, Homo sapien
tctccgagctcaaggtggacatgct

SEQ ID NO: 320760 - DNA, 25 bp, Homo sapien
tcatcgctggacgacagctgggcag

SEQ ID NO: 320761 - DNA, 25 bp, Homo sapien
tagaaaagtgtgtccgtcagcgaag

SEQ ID NO: 320762 - DNA, 25 bp, Homo sapien
tttagaaatgacacacgggaatcca

SEQ ID NO: 320763 - DNA, 25 bp, Homo sapien
caaggaaagacctatgggatcagcc

SEQ ID NO: 320764 - DNA, 25 bp, Homo sapien
taagggattctaaggtggtgccaag

SEQ ID NO: 320765 - DNA, 25 bp, Homo sapien
gcaaagtccttaagttctgaacacg

SEQ ID NO: 320766 - DNA, 25 bp, Homo sapien
tgtacagaggcctaggaccaggctg

SEQ ID NO: 320767 - DNA, 25 bp, Homo sapien
cccagagcaattccccaggatgaca

SEQ ID NO: 320768 - DNA, 25 bp, Homo sapien
gattataacacccattctacgggca

SEQ ID NO: 320769 - DNA, 25 bp, Homo sapien
ttaggagaggcctcatgagcttccc

SEQ ID NO: 320770 - DNA, 25 bp, Homo sapien
acaggtgatgccgtgtgcagcctcg

SEQ ID NO: 320771 - DNA, 25 bp, Homo sapien
gcctgtgcagttggctcgctgtaaa

SEQ ID NO: 320772 - DNA, 25 bp, Homo sapien
cagcactaagctgtgacctcctgag

SEQ ID NO: 320773 - DNA, 25 bp, Homo sapien
ccaatgaccggcaaggaagtgagtt

SEQ ID NO: 320774 - DNA, 25 bp, Homo sapien
gagtaccggactccagccattaggg

SEQ ID NO: 320775 - DNA, 25 bp, Homo sapien
cagccagaagcaccggaagttaagg

SEQ ID NO: 320776 - DNA, 25 bp, Homo sapien
tgaaacaggactggactcagacatc

SEQ ID NO: 320777 - DNA, 25 bp, Homo sapien
ggtgggcacacaaggaccagatctg

SEQ ID NO: 320778 - DNA, 25 bp, Homo sapien
gaccccacatgggattcagatccga

SEQ ID NO: 320779 - DNA, 25 bp, Homo sapien
cagacgtgagccttactatggacct

SEQ ID NO: 320780 - DNA, 25 bp, Homo sapien
tctgggatcgaggattcaaaaggcc

SEQ ID NO: 320781 - DNA, 25 bp, Homo sapien
gagagtcccatgtaaagctaagtgc

SEQ ID NO: 320782 - DNA, 25 bp, Homo sapien
tcctggtacctagcacaaagccagg

SEQ ID NO: 320783 - DNA, 25 bp, Homo sapien
gcctcctggtacctagcacaaagcc

SEQ ID NO: 320784 - DNA, 25 bp, Homo sapien
ctcctggtacctagcacaaagccag

SEQ ID NO: 320785 - DNA, 25 bp, Homo sapien
cctggtacctagcacaaagccagga

SEQ ID NO: 320786 - DNA, 25 bp, Homo sapien
atgatacttcaccaggcaccgtcac

SEQ ID NO: 320787 - DNA, 25 bp, Homo sapien
aacacatgatacttcaccaggcacc

SEQ ID NO: 320788 - DNA, 25 bp, Homo sapien
acatgatacttcaccaggcaccgtc

SEQ ID NO: 320789 - DNA, 25 bp, Homo sapien
cacatgatacttcaccaggcaccgt

SEQ ID NO: 320790 - DNA, 25 bp, Homo sapien
caggctccggccgccaaacagccac

SEQ ID NO: 320791 - DNA, 25 bp, Homo sapien
gaccacggcgcagctcgacagagca

SEQ ID NO: 320792 - DNA, 25 bp, Homo sapien
ggcgctcgggaccacggcgcagctc

SEQ ID NO: 320793 - DNA, 25 bp, Homo sapien
cgctcgggaccacggcgcagctcga

SEQ ID NO: 320794 - DNA, 25 bp, Homo sapien
tcgggaccacggcgcagctcgacag

SEQ ID NO: 320795 - DNA, 25 bp, Homo sapien
cgtgtggacggcaagaggcatggga

SEQ ID NO: 320796 - DNA, 25 bp, Homo sapien
agcgtgtggacggcaagaggcatgg

SEQ ID NO: 320797 - DNA, 25 bp, Homo sapien
tgtggacggcaagaggcatgggatg

SEQ ID NO: 320798 - DNA, 25 bp, Homo sapien
gcgtgtggacggcaagaggcatggg

SEQ ID NO: 320799 - DNA, 25 bp, Homo sapien
tgtgaggccgtgcacaccctcaaca

SEQ ID NO: 320800 - DNA, 25 bp, Homo sapien
tgaggccgtgcacaccctcaacaca

SEQ ID NO: 320801 - DNA, 25 bp, Homo sapien
ggtgtgaggccgtgcacaccctcaa

SEQ ID NO: 320802 - DNA, 25 bp, Homo sapien
aggtgtgaggccgtgcacaccctca

SEQ ID NO: 320803 - DNA, 25 bp, Homo sapien
cccaggggatcctgggcaggttcca

SEQ ID NO: 320804 - DNA, 25 bp, Homo sapien
gagacttgggcagtacccttcaccg

SEQ ID NO: 320805 - DNA, 25 bp, Homo sapien
agggacagctgagtcgcgataaagg

SEQ ID NO: 320806 - DNA, 25 bp, Homo sapien
ccgggacgctgagacttgggcagta

SEQ ID NO: 320807 - DNA, 25 bp, Homo sapien
actggctggaatatgaggaatgact

SEQ ID NO: 320808 - DNA, 25 bp, Homo sapien
aggctccaagtgcagcccaaccaaa

SEQ ID NO: 320809 - DNA, 25 bp, Homo sapien
ctctcatggcaaagggcgggcttct

SEQ ID NO: 320810 - DNA, 25 bp, Homo sapien
tgggaccagagccagcgactggctg

SEQ ID NO: 320811 - DNA, 25 bp, Homo sapien
ggcgcgtctcgccacggggtagcgg

SEQ ID NO: 320812 - DNA, 25 bp, Homo sapien
cgacgcgggcttcaccgggctcggg

SEQ ID NO: 320813 - DNA, 25 bp, Homo sapien
gctgcgctgcgctgaaatggagctc

SEQ ID NO: 320814 - DNA, 25 bp, Homo sapien
ggcctcaccgagtacgaggccccgc

SEQ ID NO: 320815 - DNA, 25 bp, Homo sapien
tgcgcaccacgaagcgcacctcctt

SEQ ID NO: 320816 - DNA, 25 bp, Homo sapien
cacctccttgggctcgtgcgggatg

SEQ ID NO: 320817 - DNA, 25 bp, Homo sapien
aagcgcacctccttgggctcgtgcg

SEQ ID NO: 320818 - DNA, 25 bp, Homo sapien
cgcacctccttgggctcgtgcggga

SEQ ID NO: 320819 - DNA, 25 bp, Homo sapien
agcggcgacggcgagggggagcgac

SEQ ID NO: 320820 - DNA, 25 bp, Homo sapien
agggggagcgactgcgcgcgctcac

SEQ ID NO: 320821 - DNA, 25 bp, Homo sapien
cggcgacggcgagggggagcgactg

SEQ ID NO: 320822 - DNA, 25 bp, Homo sapien
acggcgagggggagcgactgcgcgc

SEQ ID NO: 320823 - DNA, 25 bp, Homo sapien
cacgaagtcgtccttggtaagcgcg

SEQ ID NO: 320824 - DNA, 25 bp, Homo sapien
tgagcgcgcgctcgatgttcatgcg

SEQ ID NO: 320825 - DNA, 25 bp, Homo sapien
tatctcatggtcctcgaagcggtcg

SEQ ID NO: 320826 - DNA, 25 bp, Homo sapien
taggtgcgcgccttctatctcatgg

SEQ ID NO: 320827 - DNA, 25 bp, Homo sapien
tcatcgctgagtgtgaggagtcaca

SEQ ID NO: 320828 - DNA, 25 bp, Homo sapien
tggtggccactcagtaatcaggcac

SEQ ID NO: 320829 - DNA, 25 bp, Homo sapien
agtctccgagcaacagcaaacagga

SEQ ID NO: 320830 - DNA, 25 bp, Homo sapien
taagcaatgtacagggcgagtctcc

SEQ ID NO: 320831 - DNA, 25 bp, Homo sapien
ggatggaactccatacaaaaggagg

SEQ ID NO: 320832 - DNA, 25 bp, Homo sapien
tataagaaacatagatctctgtggg

SEQ ID NO: 320833 - DNA, 25 bp, Homo sapien
caaaaggaggtgaagcggaactgac

SEQ ID NO: 320834 - DNA, 25 bp, Homo sapien
tatcacaacgtcagggtcaggaggc

SEQ ID NO: 320835 - DNA, 25 bp, Homo sapien
actcctggcactgcctggcctgcaa

SEQ ID NO: 320836 - DNA, 25 bp, Homo sapien
ctcctggcactgcctggcctgcaag

SEQ ID NO: 320837 - DNA, 25 bp, Homo sapien
tcacacgtggcgttatctttagcaa

SEQ ID NO: 320838 - DNA, 25 bp, Homo sapien
tatctttagcaaccacggacactgc

SEQ ID NO: 320839 - DNA, 25 bp, Homo sapien
acacgtggcgttatctttagcaacc

SEQ ID NO: 320840 - DNA, 25 bp, Homo sapien
ttagcaaccacggacactgccaaga

SEQ ID NO: 320841 - DNA, 25 bp, Homo sapien
cgatgcggacaccaccctgtgggtt

SEQ ID NO: 320842 - DNA, 25 bp, Homo sapien
tgcctgaaccgtaacccacaggggc

SEQ ID NO: 320843 - DNA, 25 bp, Homo sapien
caccctgtgggttttgcctgaaccg

SEQ ID NO: 320844 - DNA, 25 bp, Homo sapien
atgctgtgcagccttcccgccgacg

SEQ ID NO: 320845 - DNA, 25 bp, Homo sapien
ttttgccgacgaagcagtgagcagc

SEQ ID NO: 320846 - DNA, 25 bp, Homo sapien
catcgtgaattcagcaagctgcctc

SEQ ID NO: 320847 - DNA, 25 bp, Homo sapien
gcagtgagcacccatcgtgaattca

SEQ ID NO: 320848 - DNA, 25 bp, Homo sapien
tttttgccgacgaagcagtgagcag

SEQ ID NO: 320849 - DNA, 25 bp, Homo sapien
ggtgatctccacgagggcaatgtca

SEQ ID NO: 320850 - DNA, 25 bp, Homo sapien
gcagaggcgcctttactggtttatt

SEQ ID NO: 320851 - DNA, 25 bp, Homo sapien
tccacatatctctcttgcagaggcg

SEQ ID NO: 320852 - DNA, 25 bp, Homo sapien
tgaagcgcccacacgaaatgggagg

SEQ ID NO: 320853 - DNA, 25 bp, Homo sapien
tggacagagctctagagcgacagct

SEQ ID NO: 320854 - DNA, 25 bp, Homo sapien
gagacagcttggttatggacagagc

SEQ ID NO: 320855 - DNA, 25 bp, Homo sapien
gctacacccgtcttgaatggagagg

SEQ ID NO: 320856 - DNA, 25 bp, Homo sapien
aatggagaggtacctgccggacact

SEQ ID NO: 320857 - DNA, 25 bp, Homo sapien
catctggtgtcgagtgtatcaggta

SEQ ID NO: 320858 - DNA, 25 bp, Homo sapien
ctagaactcatctggtgtcgagtgt

SEQ ID NO: 320859 - DNA, 25 bp, Homo sapien
caggtagtgttggatgggcaagaga

SEQ ID NO: 320860 - DNA, 25 bp, Homo sapien
gtatcaggtagtgttggatgggcaa

SEQ ID NO: 320861 - DNA, 25 bp, Homo sapien
tagaataggacagcaacggttggca

SEQ ID NO: 320862 - DNA, 25 bp, Homo sapien
catgggtatcggcagctggaataga

SEQ ID NO: 320863 - DNA, 25 bp, Homo sapien
caaaaaaggttttgcatggcatcca

SEQ ID NO: 320864 - DNA, 25 bp, Homo sapien
tagaccacgccctcagagaaggaaa

SEQ ID NO: 320865 - DNA, 25 bp, Homo sapien
ccctgggggtggatctggacgtcac

SEQ ID NO: 320866 - DNA, 25 bp, Homo sapien
accctgggggtggatctggacgtca

SEQ ID NO: 320867 - DNA, 25 bp, Homo sapien
ggataccccgcgcacacattggttg

SEQ ID NO: 320868 - DNA, 25 bp, Homo sapien
tcgatcttgcctacaggataccccg

SEQ ID NO: 320869 - DNA, 25 bp, Homo sapien
ggtcgagttacacaagtccaggtcg

SEQ ID NO: 320870 - DNA, 25 bp, Homo sapien
gtccaggtcgatgagatccacacgt

SEQ ID NO: 320871 - DNA, 25 bp, Homo sapien
ggcgatccagttcagatagggccag

SEQ ID NO: 320872 - DNA, 25 bp, Homo sapien
gcaaagcgttagaaccaatcttgga

SEQ ID NO: 320873 - DNA, 25 bp, Homo sapien
tctttgcacatgagaggcccgccgc

SEQ ID NO: 320874 - DNA, 25 bp, Homo sapien
gccaggtggccgtgtagattccggg

SEQ ID NO: 320875 - DNA, 25 bp, Homo sapien
ggaggggtggccgattgaatcatac

SEQ ID NO: 320876 - DNA, 25 bp, Homo sapien
gaggtggaggggtggccgattgaat

SEQ ID NO: 320877 - DNA, 25 bp, Homo sapien
ggcggtcgagtggtgggaggtggag

SEQ ID NO: 320878 - DNA, 25 bp, Homo sapien
tcgaatcgggggcggtcgagtggtg

SEQ ID NO: 320879 - DNA, 25 bp, Homo sapien
tgggctgccggtggtcggggtggaa

SEQ ID NO: 320880 - DNA, 25 bp, Homo sapien
tgtggtagatgagggtgtaggtggg

SEQ ID NO: 320881 - DNA, 25 bp, Homo sapien
gctgccggtggtcggggtggaagtg

SEQ ID NO: 320882 - DNA, 25 bp, Homo sapien
ttttgtggtagatgagggtgtaggt

SEQ ID NO: 320883 - DNA, 25 bp, Homo sapien
tctgtggtctccatgtcataatggt

SEQ ID NO: 320884 - DNA, 25 bp, Homo sapien
tccccttcaagacctctatgagctg

SEQ ID NO: 320885 - DNA, 25 bp, Homo sapien
cataatggttctttccgtcggaata

SEQ ID NO: 320886 - DNA, 25 bp, Homo sapien
caggaggtcgaggtcagttctggga

SEQ ID NO: 320887 - DNA, 25 bp, Homo sapien
tcctttttctcaggagtgaagggct

SEQ ID NO: 320888 - DNA, 25 bp, Homo sapien
ctttttctcaggagtgaagggctca

SEQ ID NO: 320889 - DNA, 25 bp, Homo sapien
ttctcaggagtgaagggctcactgg

SEQ ID NO: 320890 - DNA, 25 bp, Homo sapien
ttttctcaggagtgaagggctcact

SEQ ID NO: 320891 - DNA, 25 bp, Homo sapien
ccgccttattgtagggtgaaggaga

SEQ ID NO: 320892 - DNA, 25 bp, Homo sapien
aattccgccttattgtagggtgaag

SEQ ID NO: 320893 - DNA, 25 bp, Homo sapien
gtacaagcaattccgccttattgta

SEQ ID NO: 320894 - DNA, 25 bp, Homo sapien
aagcaattccgccttattgtagggt

SEQ ID NO: 320895 - DNA, 25 bp, Homo sapien
gttccttgagagtaggccctgtctc

SEQ ID NO: 320896 - DNA, 25 bp, Homo sapien
ttgagagtaggccctgtctctccaa

SEQ ID NO: 320897 - DNA, 25 bp, Homo sapien
tgttccttgagagtaggccctgtct

SEQ ID NO: 320898 - DNA, 25 bp, Homo sapien
tccttgagagtaggccctgtctctc

SEQ ID NO: 320899 - DNA, 25 bp, Homo sapien
tgcagcgcaccgtgcacgagctgaa

SEQ ID NO: 320900 - DNA, 25 bp, Homo sapien
attatatcctgcatgtggctcggag

SEQ ID NO: 320901 - DNA, 25 bp, Homo sapien
agattatatcctgcatgtggctcgg

SEQ ID NO: 320902 - DNA, 25 bp, Homo sapien
catttccatctgagggttcatctca

SEQ ID NO: 320903 - DNA, 25 bp, Homo sapien
agttcattccatccaggtagagctg

SEQ ID NO: 320904 - DNA, 25 bp, Homo sapien
ttaaagttcattccatccaggtaga

SEQ ID NO: 320905 - DNA, 25 bp, Homo sapien
aaagttcattccatccaggtagagc

SEQ ID NO: 320906 - DNA, 25 bp, Homo sapien
tcattccatccaggtagagctgctc

SEQ ID NO: 320907 - DNA, 25 bp, Homo sapien
tacacaagccgtaaaatcgagtcct

SEQ ID NO: 320908 - DNA, 25 bp, Homo sapien
taccacaaggtacgtccatttggac

SEQ ID NO: 320909 - DNA, 25 bp, Homo sapien
tgaggaatagtttggaccttgtgcc

SEQ ID NO: 320910 - DNA, 25 bp, Homo sapien
gagagctagcagatatgcctgttca

SEQ ID NO: 320911 - DNA, 25 bp, Homo sapien
ttttatagttactttgaccatcctc

SEQ ID NO: 320912 - DNA, 25 bp, Homo sapien
tatagttactttgaccatcctcaac

SEQ ID NO: 320913 - DNA, 25 bp, Homo sapien
tattttatagttactttgaccatcc

SEQ ID NO: 320914 - DNA, 25 bp, Homo sapien
tttatagttactttgaccatcctca

SEQ ID NO: 320915 - DNA, 25 bp, Homo sapien
aagtcttcgcccgtaagcggtggct

SEQ ID NO: 320916 - DNA, 25 bp, Homo sapien
ggcaaggacacggacaagcaagtct

SEQ ID NO: 320917 - DNA, 25 bp, Homo sapien
ccacttagatggcaaggacacggac

SEQ ID NO: 320918 - DNA, 25 bp, Homo sapien
gcctatagtccagggatgccgagga

SEQ ID NO: 320919 - DNA, 25 bp, Homo sapien
tcaggccttcggccgggcagcctcc

SEQ ID NO: 320920 - DNA, 25 bp, Homo sapien
ggccgcatgcgcactccctgcggcc

SEQ ID NO: 320921 - DNA, 25 bp, Homo sapien
gcactcggccgcatgcgcactccct

SEQ ID NO: 320922 - DNA, 25 bp, Homo sapien
agccccagtcccgcactcggccgca

SEQ ID NO: 320923 - DNA, 25 bp, Homo sapien
taataacgaatgtcgacaagtcgag

SEQ ID NO: 320924 - DNA, 25 bp, Homo sapien
gctcaaatttaccccatcaaagaat

SEQ ID NO: 320925 - DNA, 25 bp, Homo sapien
cgacaagtcgagaaaattgctcaaa

SEQ ID NO: 320926 - DNA, 25 bp, Homo sapien
tcagttaataacgaatgtcgacaag

SEQ ID NO: 320927 - DNA, 25 bp, Homo sapien
ggagaggaccgggttcctctcctga

SEQ ID NO: 320928 - DNA, 25 bp, Homo sapien
gaggaccgggttcctctcctgattc

SEQ ID NO: 320929 - DNA, 25 bp, Homo sapien
ctgtgtggagaggaccgggttcctc

SEQ ID NO: 320930 - DNA, 25 bp, Homo sapien
tgtgtggagaggaccgggttcctct

SEQ ID NO: 320931 - DNA, 25 bp, Homo sapien
ctcttctccacaggcacatgggcgg

SEQ ID NO: 320932 - DNA, 25 bp, Homo sapien
ctccacaggcacatgggcggcgtac

SEQ ID NO: 320933 - DNA, 25 bp, Homo sapien
ttctccacaggcacatgggcggcgt

SEQ ID NO: 320934 - DNA, 25 bp, Homo sapien
tctgccccacaggaacctctcttct

SEQ ID NO: 320935 - DNA, 25 bp, Homo sapien
tgctcactgagataggttaatatgt

SEQ ID NO: 320936 - DNA, 25 bp, Homo sapien
taatatgtgatagcctcctttgcgg

SEQ ID NO: 320937 - DNA, 25 bp, Homo sapien
ctcctttgcggaggctattcagaaa

SEQ ID NO: 320938 - DNA, 25 bp, Homo sapien
gaggctattcagaaacccgaaagaa

SEQ ID NO: 320939 - DNA, 25 bp, Homo sapien
ctggagcaactcgactcttcgttac

SEQ ID NO: 320940 - DNA, 25 bp, Homo sapien
agatgcaaatctagtcgtaggctct

SEQ ID NO: 320941 - DNA, 25 bp, Homo sapien
gtgtgtagcagcctccgcgcaggac

SEQ ID NO: 320942 - DNA, 25 bp, Homo sapien
tccgcgcaggacgtaaagatgcaaa

SEQ ID NO: 320943 - DNA, 25 bp, Homo sapien
taaagatgcaaatctagtcgtaggc

SEQ ID NO: 320944 - DNA, 25 bp, Homo sapien
ccttcactgtccaggccaccagcat

SEQ ID NO: 320945 - DNA, 25 bp, Homo sapien
tctcccttcactgtccaggccacca

SEQ ID NO: 320946 - DNA, 25 bp, Homo sapien
taaatgtctcccaaatccacttctc

SEQ ID NO: 320947 - DNA, 25 bp, Homo sapien
ttctctcccttcactgtccaggcca

SEQ ID NO: 320948 - DNA, 25 bp, Homo sapien
tctgtagtgtggaaacaaattattc

SEQ ID NO: 320949 - DNA, 25 bp, Homo sapien
tgtagtgtggaaacaaattattcat

SEQ ID NO: 320950 - DNA, 25 bp, Homo sapien
attcatgcacaaggtcctcttactg

SEQ ID NO: 320951 - DNA, 25 bp, Homo sapien
attattcatgcacaaggtcctctta

SEQ ID NO: 320952 - DNA, 25 bp, Homo sapien
aggaggctgttattgaagtgaagca

SEQ ID NO: 320953 - DNA, 25 bp, Homo sapien
ggaggaggctgttattgaagtgaag

SEQ ID NO: 320954 - DNA, 25 bp, Homo sapien
gaattgtttttactaatctgcttat

SEQ ID NO: 320955 - DNA, 25 bp, Homo sapien
tgaagcagaattgtttttactaatc

SEQ ID NO: 320956 - DNA, 25 bp, Homo sapien
aaaagtcactgggttctctaagaag

SEQ ID NO: 320957 - DNA, 25 bp, Homo sapien
caaaaagtcactgggttctctaaga

SEQ ID NO: 320958 - DNA, 25 bp, Homo sapien
aggatttcacagatttaaggtgcaa

SEQ ID NO: 320959 - DNA, 25 bp, Homo sapien
cagatttaaggtgcaaaaagtcact

SEQ ID NO: 320960 - DNA, 25 bp, Homo sapien
taaacactggggtctacagtagtat

SEQ ID NO: 320961 - DNA, 25 bp, Homo sapien
ggggtctacagtagtatttgaagga

SEQ ID NO: 320962 - DNA, 25 bp, Homo sapien
cactggggtctacagtagtatttga

SEQ ID NO: 320963 - DNA, 25 bp, Homo sapien
tgaataaacactggggtctacagta

SEQ ID NO: 320964 - DNA, 25 bp, Homo sapien
gaaaccaaagtttagcctgagtcta

SEQ ID NO: 320965 - DNA, 25 bp, Homo sapien
gtctacaattaattgggcaataagc

SEQ ID NO: 320966 - DNA, 25 bp, Homo sapien
agtctacaattaattgggcaataag

SEQ ID NO: 320967 - DNA, 25 bp, Homo sapien
caaagtttagcctgagtctacaatt

SEQ ID NO: 320968 - DNA, 25 bp, Homo sapien
gagggtttaattgctcacctacttc

SEQ ID NO: 320969 - DNA, 25 bp, Homo sapien
cacagcataatagattcctaaaaaa

SEQ ID NO: 320970 - DNA, 25 bp, Homo sapien
catctgctaggagcttgctaaacac

SEQ ID NO: 320971 - DNA, 25 bp, Homo sapien
ttctacaacattgcttaacgcaagg

SEQ ID NO: 320972 - DNA, 25 bp, Homo sapien
tgaaggtgtctaatatcccagtttt

SEQ ID NO: 320973 - DNA, 25 bp, Homo sapien
ggatgaacaaactaattaagagccc

SEQ ID NO: 320974 - DNA, 25 bp, Homo sapien
ggagagattcaaatgccctgcttag

SEQ ID NO: 320975 - DNA, 25 bp, Homo sapien
acggcgctgatttgcactgtggaga

SEQ ID NO: 320976 - DNA, 25 bp, Homo sapien
catcccaactgtcttgatggtggct

SEQ ID NO: 320977 - DNA, 25 bp, Homo sapien
gatgagcagccgaagcctcaaggaa

SEQ ID NO: 320978 - DNA, 25 bp, Homo sapien
tatggcacgctatgatgatgagcag

SEQ ID NO: 320979 - DNA, 25 bp, Homo sapien
aatcttactatatgttatggcacgc

SEQ ID NO: 320980 - DNA, 25 bp, Homo sapien
gagcttccttcgcttttggtgccat

SEQ ID NO: 320981 - DNA, 25 bp, Homo sapien
caggagcttccttcgcttttggtgc

SEQ ID NO: 320982 - DNA, 25 bp, Homo sapien
ttaggatgagcaggagcttccttcg

SEQ ID NO: 320983 - DNA, 25 bp, Homo sapien
ggatgagcaggagcttccttcgctt

SEQ ID NO: 320984 - DNA, 25 bp, Homo sapien
aacatatgccttgttctccttatca

SEQ ID NO: 320985 - DNA, 25 bp, Homo sapien
ttcttcacggccgactcagtggcca

SEQ ID NO: 320986 - DNA, 25 bp, Homo sapien
tccttatcaggacaaatcagggtgg

SEQ ID NO: 320987 - DNA, 25 bp, Homo sapien
ttcacggccgactcagtggccagcg

SEQ ID NO: 320988 - DNA, 25 bp, Homo sapien
cagctggactcagtttaggtgatcc

SEQ ID NO: 320989 - DNA, 25 bp, Homo sapien
ttagccagctggactcagtttaggt

SEQ ID NO: 320990 - DNA, 25 bp, Homo sapien
tagccagctggactcagtttaggtg

SEQ ID NO: 320991 - DNA, 25 bp, Homo sapien
gccagctggactcagtttaggtgat

SEQ ID NO: 320992 - DNA, 25 bp, Homo sapien
tgagttctagtcaaataagctaata

SEQ ID NO: 320993 - DNA, 25 bp, Homo sapien
gcttgagttctagtcaaataagcta

SEQ ID NO: 320994 - DNA, 25 bp, Homo sapien
ttcaccaaactcctagaaatatagg

SEQ ID NO: 320995 - DNA, 25 bp, Homo sapien
taagttaacatgatttggataaaac

SEQ ID NO: 320996 - DNA, 25 bp, Homo sapien
atgtcagagggctgaaaactccacc

SEQ ID NO: 320997 - DNA, 25 bp, Homo sapien
tttaatgtcagagggctgaaaactc

SEQ ID NO: 320998 - DNA, 25 bp, Homo sapien
gaggatgcacagagcgagttttcat

SEQ ID NO: 320999 - DNA, 25 bp, Homo sapien
gttctggccagcgtacagaggatgc

SEQ ID NO: 321000 - DNA, 25 bp, Homo sapien
tgcatggacggattgggcaggacac

SEQ ID NO: 321001 - DNA, 25 bp, Homo sapien
aaggagttttggtttggctggccat

SEQ ID NO: 321002 - DNA, 25 bp, Homo sapien
tggccatgtgtgcaattagcgtgat

SEQ ID NO: 321003 - DNA, 25 bp, Homo sapien
tgcaattagcgtgatgagctctgac

SEQ ID NO: 321004 - DNA, 25 bp, Homo sapien
tcactttccaatccccacgaggggc

SEQ ID NO: 321005 - DNA, 25 bp, Homo sapien
accctcactttccaatccccacgag

SEQ ID NO: 321006 - DNA, 25 bp, Homo sapien
cctcactttccaatccccacgaggg

SEQ ID NO: 321007 - DNA, 25 bp, Homo sapien
agaccctcactttccaatccccacg

SEQ ID NO: 321008 - DNA, 25 bp, Homo sapien
tgggaactgttggcctctgcagatg

SEQ ID NO: 321009 - DNA, 25 bp, Homo sapien
gatcatgtggaaagatgacgtgaag

SEQ ID NO: 321010 - DNA, 25 bp, Homo sapien
cctggatcatgtggaaagatgacgt

SEQ ID NO: 321011 - DNA, 25 bp, Homo sapien
ggcctggatcatgtggaaagatgac

SEQ ID NO: 321012 - DNA, 25 bp, Homo sapien
atgcacggcccttcctggaccatag

SEQ ID NO: 321013 - DNA, 25 bp, Homo sapien
gcacggcccttcctggaccataggt

SEQ ID NO: 321014 - DNA, 25 bp, Homo sapien
tcaatgcacggcccttcctggacca

SEQ ID NO: 321015 - DNA, 25 bp, Homo sapien
aatgcacggcccttcctggaccata

SEQ ID NO: 321016 - DNA, 25 bp, Homo sapien
aggaggatggcagttaggcagctca

SEQ ID NO: 321017 - DNA, 25 bp, Homo sapien
ggaggatggcagttaggcagctcat

SEQ ID NO: 321018 - DNA, 25 bp, Homo sapien
gaggaggatggcagttaggcagctc

SEQ ID NO: 321019 - DNA, 25 bp, Homo sapien
agtagggacattaaagcaggagtgt

SEQ ID NO: 321020 - DNA, 25 bp, Homo sapien
ggtgatatggctgagacttctactt

SEQ ID NO: 321021 - DNA, 25 bp, Homo sapien
aaaagaagcaatggagtagggacat

SEQ ID NO: 321022 - DNA, 25 bp, Homo sapien
agtgtggtgatatggctgagacttc

SEQ ID NO: 321023 - DNA, 25 bp, Homo sapien
agctatgaataaatccttgggcagg

SEQ ID NO: 321024 - DNA, 25 bp, Homo sapien
gctatgaataaatccttgggcaggt

SEQ ID NO: 321025 - DNA, 25 bp, Homo sapien
tatgaataaatccttgggcaggtgc

SEQ ID NO: 321026 - DNA, 25 bp, Homo sapien
ggacctgctggaacccctgctcaca

SEQ ID NO: 321027 - DNA, 25 bp, Homo sapien
cagctggcactggaaatagctgtat

SEQ ID NO: 321028 - DNA, 25 bp, Homo sapien
ctggaggggaatctgcccctggtgc

SEQ ID NO: 321029 - DNA, 25 bp, Homo sapien
cgtggctctacaggaggtgccatga

SEQ ID NO: 321030 - DNA, 25 bp, Homo sapien
tgaggcccgtggctctacaggaggt

SEQ ID NO: 321031 - DNA, 25 bp, Homo sapien
gatgtggccctggtgggatcactgg

SEQ ID NO: 321032 - DNA, 25 bp, Homo sapien
gtgcctgtgtctcaatgagctccag

SEQ ID NO: 321033 - DNA, 25 bp, Homo sapien
catgtgcctgtgtctcaatgagctc

SEQ ID NO: 321034 - DNA, 25 bp, Homo sapien
gcttctgccaaatggccagaggcat

SEQ ID NO: 321035 - DNA, 25 bp, Homo sapien
gactcctgtcctgtggtacctggtg

SEQ ID NO: 321036 - DNA, 25 bp, Homo sapien
ctggtgactcctgtcctgtggtacc

SEQ ID NO: 321037 - DNA, 25 bp, Homo sapien
tcggggggggcttctgccaaatggc

SEQ ID NO: 321038 - DNA, 25 bp, Homo sapien
ccgaatgtccccctcagggtgaatt

SEQ ID NO: 321039 - DNA, 25 bp, Homo sapien
gggccgaatgtccccctcagggtga

SEQ ID NO: 321040 - DNA, 25 bp, Homo sapien
atgtccccctcagggtgaattccac

SEQ ID NO: 321041 - DNA, 25 bp, Homo sapien
ctggggccgaatgtccccctcaggg

SEQ ID NO: 321042 - DNA, 25 bp, Homo sapien
gcctgatgtccactggaggactgat

SEQ ID NO: 321043 - DNA, 25 bp, Homo sapien
atgtccactggaggactgatgttcc

SEQ ID NO: 321044 - DNA, 25 bp, Homo sapien
atgttcccctttgatctgatgtcca

SEQ ID NO: 321045 - DNA, 25 bp, Homo sapien
aggactgatgttcccctttgatctg

SEQ ID NO: 321046 - DNA, 25 bp, Homo sapien
gggttgaatgtccaactgtggccag

SEQ ID NO: 321047 - DNA, 25 bp, Homo sapien
ctggagcctgaggacccttctcagg

SEQ ID NO: 321048 - DNA, 25 bp, Homo sapien
aatccacttgataactggtgcccat

SEQ ID NO: 321049 - DNA, 25 bp, Homo sapien
gggcctgggaatccacttgataact

SEQ ID NO: 321050 - DNA, 25 bp, Homo sapien
cctgggaatccacttgataactggt

SEQ ID NO: 321051 - DNA, 25 bp, Homo sapien
ggaatccacttgataactggtgccc

SEQ ID NO: 321052 - DNA, 25 bp, Homo sapien
tggacataaagtaccagtggacatc

SEQ ID NO: 321053 - DNA, 25 bp, Homo sapien
ttgtccccgggtagtcatcaggccc

SEQ ID NO: 321054 - DNA, 25 bp, Homo sapien
accaggtcttaggtggacattaggc

SEQ ID NO: 321055 - DNA, 25 bp, Homo sapien
atgttgcaggtggacacccagcgcc

SEQ ID NO: 321056 - DNA, 25 bp, Homo sapien
gcttctctgcggtgattttttgttg

SEQ ID NO: 321057 - DNA, 25 bp, Homo sapien
ttgagatacccctagcggtccagag

SEQ ID NO: 321058 - DNA, 25 bp, Homo sapien
gccccgcttatctgcggcgcggttg

SEQ ID NO: 321059 - DNA, 25 bp, Homo sapien
catgggcgttctgtcagacttgggt

SEQ ID NO: 321060 - DNA, 25 bp, Homo sapien
tgaaccagataacctatgacatatg

SEQ ID NO: 321061 - DNA, 25 bp, Homo sapien
catgcatcttgtattaatgaaccag

SEQ ID NO: 321062 - DNA, 25 bp, Homo sapien
taaagacgtaataggcatcactgaa

SEQ ID NO: 321063 - DNA, 25 bp, Homo sapien
gaaaataagtatgctgactcctcac

SEQ ID NO: 321064 - DNA, 25 bp, Homo sapien
gggaaacagtggaaaaagcacttga

SEQ ID NO: 321065 - DNA, 25 bp, Homo sapien
gttgtttccacttgactgtcattga

SEQ ID NO: 321066 - DNA, 25 bp, Homo sapien
tgagctgccaattatccaactgggg

SEQ ID NO: 321067 - DNA, 25 bp, Homo sapien
cacttgactgtcattgagctgccaa

SEQ ID NO: 321068 - DNA, 25 bp, Homo sapien
ttgcactatgaattgaatgtgttac

SEQ ID NO: 321069 - DNA, 25 bp, Homo sapien
ggccctagcaattatatgtaaaggc

SEQ ID NO: 321070 - DNA, 25 bp, Homo sapien
gtggccctagcaattatatgtaaag

SEQ ID NO: 321071 - DNA, 25 bp, Homo sapien
tcagtggccctagcaattatatgta

SEQ ID NO: 321072 - DNA, 25 bp, Homo sapien
gtatcagtggccctagcaattatat

SEQ ID NO: 321073 - DNA, 25 bp, Homo sapien
ttctcagcttaggaagtcatttagc

SEQ ID NO: 321074 - DNA, 25 bp, Homo sapien
gacgtggttaaaattgctctgcaga

SEQ ID NO: 321075 - DNA, 25 bp, Homo sapien
gcctgacacgtgaattacttacaaa

SEQ ID NO: 321076 - DNA, 25 bp, Homo sapien
catatgccatctataacaagaaagg

SEQ ID NO: 321077 - DNA, 25 bp, Homo sapien
ctaaaaaacgttgacaatctcactg

SEQ ID NO: 321078 - DNA, 25 bp, Homo sapien
gaaagttacctagaatattcattaa

SEQ ID NO: 321079 - DNA, 25 bp, Homo sapien
gagaaagttacctagaatattcatt

SEQ ID NO: 321080 - DNA, 25 bp, Homo sapien
tgagaaagttacctagaatattcat

SEQ ID NO: 321081 - DNA, 25 bp, Homo sapien
ctgagataatgagagaatgtaagag

SEQ ID NO: 321082 - DNA, 25 bp, Homo sapien
caaaatgagcagagtaaccaactcc

SEQ ID NO: 321083 - DNA, 25 bp, Homo sapien
aacaaaatgagcagagtaaccaact

SEQ ID NO: 321084 - DNA, 25 bp, Homo sapien
tgagcagagtaaccaactcctttgc

SEQ ID NO: 321085 - DNA, 25 bp, Homo sapien
gcagagtaaccaactcctttgctag

SEQ ID NO: 321086 - DNA, 25 bp, Homo sapien
acaactgagaatagtataatatcct

SEQ ID NO: 321087 - DNA, 25 bp, Homo sapien
ttccctgtatggtagaaggagttta

SEQ ID NO: 321088 - DNA, 25 bp, Homo sapien
cctgtatggtagaaggagtttaata

SEQ ID NO: 321089 - DNA, 25 bp, Homo sapien
aacacctaatggctattaaacattc

SEQ ID NO: 321090 - DNA, 25 bp, Homo sapien
aaacacctaatggctattaaacatt

SEQ ID NO: 321091 - DNA, 25 bp, Homo sapien
ggcagagagctggtctacaaccggc

SEQ ID NO: 321092 - DNA, 25 bp, Homo sapien
gattctggaaccgaatggtgcttcg

SEQ ID NO: 321093 - DNA, 25 bp, Homo sapien
tgtccaaaagatacaccatgctggc

SEQ ID NO: 321094 - DNA, 25 bp, Homo sapien
gcacccctaggagtcgaggttcgga

SEQ ID NO: 321095 - DNA, 25 bp, Homo sapien
taagttatacttccctaacaatcaa

SEQ ID NO: 321096 - DNA, 25 bp, Homo sapien
gcaatacttgtttaattagcccaac

SEQ ID NO: 321097 - DNA, 25 bp, Homo sapien
gctctcatgtcatctacagcactca

SEQ ID NO: 321098 - DNA, 25 bp, Homo sapien
acttgtttaattagcccaacttctg

SEQ ID NO: 321099 - DNA, 25 bp, Homo sapien
taattagcccaacttctgtgctagt

SEQ ID NO: 321100 - DNA, 25 bp, Homo sapien
tgtcatgcgtattatactctcagca

SEQ ID NO: 321101 - DNA, 25 bp, Homo sapien
cagcatcctggataatagagttcat

SEQ ID NO: 321102 - DNA, 25 bp, Homo sapien
aacatgctccctatttctgcttgac

SEQ ID NO: 321103 - DNA, 25 bp, Homo sapien
caaacactttttcatagaatggctg

SEQ ID NO: 321104 - DNA, 25 bp, Homo sapien
aatccaactcagcacagaccctaca

SEQ ID NO: 321105 - DNA, 25 bp, Homo sapien
ccgccatagggcagtttttctcctt

SEQ ID NO: 321106 - DNA, 25 bp, Homo sapien
tctctgcccaaatatctcagtgcag

SEQ ID NO: 321107 - DNA, 25 bp, Homo sapien
aactcagcacagaccctacacgggt

SEQ ID NO: 321108 - DNA, 25 bp, Homo sapien
tgacaactttattaggcatgcacaa

SEQ ID NO: 321109 - DNA, 25 bp, Homo sapien
aaagccttgcagttccctagactta

SEQ ID NO: 321110 - DNA, 25 bp, Homo sapien
taactgtggtactcatgttcacccc

SEQ ID NO: 321111 - DNA, 25 bp, Homo sapien
tcctgggttcctatcaccgtacaaa

SEQ ID NO: 321112 - DNA, 25 bp, Homo sapien
gaatggcaatcgtgcatcttctcat

SEQ ID NO: 321113 - DNA, 25 bp, Homo sapien
aatggcaatcgtgcatcttctcatc

SEQ ID NO: 321114 - DNA, 25 bp, Homo sapien
caagataggctataaagtgttgcac

SEQ ID NO: 321115 - DNA, 25 bp, Homo sapien
gccatagataacaatgacaggttga

SEQ ID NO: 321116 - DNA, 25 bp, Homo sapien
tgttaatgaagctccctgccttggt

SEQ ID NO: 321117 - DNA, 25 bp, Homo sapien
tgttgcacgtgataatccaagcatc

SEQ ID NO: 321118 - DNA, 25 bp, Homo sapien
aatgtctaagacataggcagtggaa

SEQ ID NO: 321119 - DNA, 25 bp, Homo sapien
taaatgtggcagttgttagaagaca

SEQ ID NO: 321120 - DNA, 25 bp, Homo sapien
ggagctaaaattatgccaacccact

SEQ ID NO: 321121 - DNA, 25 bp, Homo sapien
cagtggagcacatgtcaagggaagc

SEQ ID NO: 321122 - DNA, 25 bp, Homo sapien
tatccagatataggcccatcataga

SEQ ID NO: 321123 - DNA, 25 bp, Homo sapien
aaggttcttctcagcaattctagta

SEQ ID NO: 321124 - DNA, 25 bp, Homo sapien
tttttaacaaggttcttctcagcaa

SEQ ID NO: 321125 - DNA, 25 bp, Homo sapien
aattctagtatccagatataggccc

SEQ ID NO: 321126 - DNA, 25 bp, Homo sapien
tcctggtgaatacagaagtttcctg

SEQ ID NO: 321127 - DNA, 25 bp, Homo sapien
ttcgctcctatatcagtgttttcag

SEQ ID NO: 321128 - DNA, 25 bp, Homo sapien
ctggactccttgatgagctactgct

SEQ ID NO: 321129 - DNA, 25 bp, Homo sapien
caagcgtgtacttcataatcctggt

SEQ ID NO: 321130 - DNA, 25 bp, Homo sapien
acataaatgtaagcgctaattctta

SEQ ID NO: 321131 - DNA, 25 bp, Homo sapien
taaatgtaagcgctaattcttatat

SEQ ID NO: 321132 - DNA, 25 bp, Homo sapien
taagcgctaattcttatattaaact

SEQ ID NO: 321133 - DNA, 25 bp, Homo sapien
ctataatacttaattggctgttttc

SEQ ID NO: 321134 - DNA, 25 bp, Homo sapien
taacatctagggtaagaactattcc

SEQ ID NO: 321135 - DNA, 25 bp, Homo sapien
gctagtttcgcttttgtacctcaaa

SEQ ID NO: 321136 - DNA, 25 bp, Homo sapien
actggaggccttccaaagtatgccc

SEQ ID NO: 321137 - DNA, 25 bp, Homo sapien
ctaatgtagggttcggtattatcca

SEQ ID NO: 321138 - DNA, 25 bp, Homo sapien
ccttgcattccagtatgacgagatg

SEQ ID NO: 321139 - DNA, 25 bp, Homo sapien
gattttgcacattgcctgcctgcag

SEQ ID NO: 321140 - DNA, 25 bp, Homo sapien
tggatcctatggacacgatcctagg

SEQ ID NO: 321141 - DNA, 25 bp, Homo sapien
tttggagagtgggacttccttcaag

SEQ ID NO: 321142 - DNA, 25 bp, Homo sapien
tgggtccattggcagtctagtcaca

SEQ ID NO: 321143 - DNA, 25 bp, Homo sapien
tagcctggaaagaactctacagtcc

SEQ ID NO: 321144 - DNA, 25 bp, Homo sapien
taggtcccagcggaaaatgatgcca

SEQ ID NO: 321145 - DNA, 25 bp, Homo sapien
ttaaactgccacaaggtagcctgga

SEQ ID NO: 321146 - DNA, 25 bp, Homo sapien
taaggtggagttggccatatgtctc

SEQ ID NO: 321147 - DNA, 25 bp, Homo sapien
cccagccagcatcaagagttttaaa

SEQ ID NO: 321148 - DNA, 25 bp, Homo sapien
tgagtagctagggtcgatccattgt

SEQ ID NO: 321149 - DNA, 25 bp, Homo sapien
tatcaaacagtatcgcatggtacac

SEQ ID NO: 321150 - DNA, 25 bp, Homo sapien
atgcatggatgactgtgtgtaattg

SEQ ID NO: 321151 - DNA, 25 bp, Homo sapien
tgcatggatgactgtgtgtaattga

SEQ ID NO: 321152 - DNA, 25 bp, Homo sapien
ctataggtggtacaacaccatctgg

SEQ ID NO: 321153 - DNA, 25 bp, Homo sapien
ataggtggtacaacaccatctggct

SEQ ID NO: 321154 - DNA, 25 bp, Homo sapien
tataggtggtacaacaccatctggc

SEQ ID NO: 321155 - DNA, 25 bp, Homo sapien
tttcaattgatcttctgtgaatttg

SEQ ID NO: 321156 - DNA, 25 bp, Homo sapien
caattgatcttctgtgaatttggtg

SEQ ID NO: 321157 - DNA, 25 bp, Homo sapien
ttcaattgatcttctgtgaatttgg

SEQ ID NO: 321158 - DNA, 25 bp, Homo sapien
tcaattgatcttctgtgaatttggt

SEQ ID NO: 321159 - DNA, 25 bp, Homo sapien
tccagtgcctgtgaggattccttac

SEQ ID NO: 321160 - DNA, 25 bp, Homo sapien
tacgttttttgaattgtccagtgcc

SEQ ID NO: 321161 - DNA, 25 bp, Homo sapien
tgtgcaacttcaagccttaccagga

SEQ ID NO: 321162 - DNA, 25 bp, Homo sapien
tgtctgggagactgcttacagctca

SEQ ID NO: 321163 - DNA, 25 bp, Homo sapien
cttatccttgaggtagcctgcaggc

SEQ ID NO: 321164 - DNA, 25 bp, Homo sapien
tcttatccttgaggtagcctgcagg

SEQ ID NO: 321165 - DNA, 25 bp, Homo sapien
taaattgacatttgctggtacggaa

SEQ ID NO: 321166 - DNA, 25 bp, Homo sapien
ggccacatgtctcttacgggcaaaa

SEQ ID NO: 321167 - DNA, 25 bp, Homo sapien
taagcaaggttgtggtaggaatacc

SEQ ID NO: 321168 - DNA, 25 bp, Homo sapien
gaagtgggcatagcaatcacattga

SEQ ID NO: 321169 - DNA, 25 bp, Homo sapien
gtggccatagcattaaagtgtgaat

SEQ ID NO: 321170 - DNA, 25 bp, Homo sapien
tttagtcacgctgtactttatttaa

SEQ ID NO: 321171 - DNA, 25 bp, Homo sapien
gccatagcattaaagtgtgaattca

SEQ ID NO: 321172 - DNA, 25 bp, Homo sapien
tcaaggtggggcagaagtttctaac

SEQ ID NO: 321173 - DNA, 25 bp, Homo sapien
tgattttaaagttcccgcctcaggc

SEQ ID NO: 321174 - DNA, 25 bp, Homo sapien
tcatcacggacattaggaaagcggg

SEQ ID NO: 321175 - DNA, 25 bp, Homo sapien
tgatattagctgcagttaagcgggc

SEQ ID NO: 321176 - DNA, 25 bp, Homo sapien
tgaccaagctttagaggccccgtgt

SEQ ID NO: 321177 - DNA, 25 bp, Homo sapien
ctttagcgccgcgaggctgccaggt

SEQ ID NO: 321178 - DNA, 25 bp, Homo sapien
cagcctgggccgcaagtgcgatgaa

SEQ ID NO: 321179 - DNA, 25 bp, Homo sapien
tgtggttcctagagcgctcccggga

SEQ ID NO: 321180 - DNA, 25 bp, Homo sapien
caagcatggcaaggagcagcgccag

SEQ ID NO: 321181 - DNA, 25 bp, Homo sapien
tttgagctcctgtagagactgccac

SEQ ID NO: 321182 - DNA, 25 bp, Homo sapien
ctgggctccctcaaatcaggatggg

SEQ ID NO: 321183 - DNA, 25 bp, Homo sapien
tactgtggcactacgaagcaagggc

SEQ ID NO: 321184 - DNA, 25 bp, Homo sapien
gcaaagtgtggataaccctgcccgc

SEQ ID NO: 321185 - DNA, 25 bp, Homo sapien
ctgagttcagctcctagttttgcca

SEQ ID NO: 321186 - DNA, 25 bp, Homo sapien
ttctagtcacgcctctcaattaggg

SEQ ID NO: 321187 - DNA, 25 bp, Homo sapien
tctgccccaggaagcggccctacct

SEQ ID NO: 321188 - DNA, 25 bp, Homo sapien
tgggcaccccagtatgtcttcatca

SEQ ID NO: 321189 - DNA, 25 bp, Homo sapien
ctcggtgaccctccctttgcaaggg

SEQ ID NO: 321190 - DNA, 25 bp, Homo sapien
cagaagaaattgcagctcggtgacc

SEQ ID NO: 321191 - DNA, 25 bp, Homo sapien
gcattttcatttggcctcatgccca

SEQ ID NO: 321192 - DNA, 25 bp, Homo sapien
tgagcaatccttcaggctctttctg

SEQ ID NO: 321193 - DNA, 25 bp, Homo sapien
gacccggtgctaactgaaaatgtgg

SEQ ID NO: 321194 - DNA, 25 bp, Homo sapien
cagtcaacagggaactccagctggg

SEQ ID NO: 321195 - DNA, 25 bp, Homo sapien
caaagtgcaggccttgtacatggga

SEQ ID NO: 321196 - DNA, 25 bp, Homo sapien
tctctctaaacatggaacagggcct

SEQ ID NO: 321197 - DNA, 25 bp, Homo sapien
cattctcgtatggaggtttgttttc

SEQ ID NO: 321198 - DNA, 25 bp, Homo sapien
cctttagacccattctcgtatggag

SEQ ID NO: 321199 - DNA, 25 bp, Homo sapien
gacccattctcgtatggaggtttgt

SEQ ID NO: 321200 - DNA, 25 bp, Homo sapien
agttcctttagacccattctcgtat

SEQ ID NO: 321201 - DNA, 25 bp, Homo sapien
tccctctggagactttggagccaat

SEQ ID NO: 321202 - DNA, 25 bp, Homo sapien
tcaactgggctctgttcacaaagca

SEQ ID NO: 321203 - DNA, 25 bp, Homo sapien
tacagagcatgtccttagcatagag

SEQ ID NO: 321204 - DNA, 25 bp, Homo sapien
caatgtgagggtacaggtatgctcc

SEQ ID NO: 321205 - DNA, 25 bp, Homo sapien
cattgccagagtaacctgtggtacg

SEQ ID NO: 321206 - DNA, 25 bp, Homo sapien
tcagctagaggtggagtcaaaaaca

SEQ ID NO: 321207 - DNA, 25 bp, Homo sapien
taaagcactgcctccatagaccaat

SEQ ID NO: 321208 - DNA, 25 bp, Homo sapien
tatggccacaggtaacgtaatctgc

SEQ ID NO: 321209 - DNA, 25 bp, Homo sapien
agtagagactaaacatacatttcac

SEQ ID NO: 321210 - DNA, 25 bp, Homo sapien
gccagaacccactattgtatcagga

SEQ ID NO: 321211 - DNA, 25 bp, Homo sapien
caccagtgggcatgatgttgcttcc

SEQ ID NO: 321212 - DNA, 25 bp, Homo sapien
cttccctgtgggatgatcagccaga

SEQ ID NO: 321213 - DNA, 25 bp, Homo sapien
tcatgtgaagctctgtacctgtaaa

SEQ ID NO: 321214 - DNA, 25 bp, Homo sapien
tgctgactatagttaccccgttgtg

SEQ ID NO: 321215 - DNA, 25 bp, Homo sapien
taatatcctacagcaccattccatg

SEQ ID NO: 321216 - DNA, 25 bp, Homo sapien
tgatgttggccaccttttcctaagt

SEQ ID NO: 321217 - DNA, 25 bp, Homo sapien
gctttttaacttagtgcaatcccaa

SEQ ID NO: 321218 - DNA, 25 bp, Homo sapien
agagggaggtgacacgccttacatg

SEQ ID NO: 321219 - DNA, 25 bp, Homo sapien
tcttcatagcaatgctctacttccc

SEQ ID NO: 321220 - DNA, 25 bp, Homo sapien
catagcaatgctctacttcccagta

SEQ ID NO: 321221 - DNA, 25 bp, Homo sapien
tgaagagggaggtgacacgccttac

SEQ ID NO: 321222 - DNA, 25 bp, Homo sapien
cagtaaatccctctttaatcttctt

SEQ ID NO: 321223 - DNA, 25 bp, Homo sapien
acaagtttgtctaaccattcagtag

SEQ ID NO: 321224 - DNA, 25 bp, Homo sapien
aacttggcaagggtagagaaatgga

SEQ ID NO: 321225 - DNA, 25 bp, Homo sapien
tagtaagatcattaagtgttcttgc

SEQ ID NO: 321226 - DNA, 25 bp, Homo sapien
ggttgaccacatgaccttaaggata

SEQ ID NO: 321227 - DNA, 25 bp, Homo sapien
gaatgccaccagaactttgatgagg

SEQ ID NO: 321228 - DNA, 25 bp, Homo sapien
cactgactatgatgtaggccatggg

SEQ ID NO: 321229 - DNA, 25 bp, Homo sapien
tttaaatcaagaggtgtgatgcctc

SEQ ID NO: 321230 - DNA, 25 bp, Homo sapien
tttttcctgatcagccatttatttt

SEQ ID NO: 321231 - DNA, 25 bp, Homo sapien
tttttttttcctgatcagccattta

SEQ ID NO: 321232 - DNA, 25 bp, Homo sapien
ttttttcctgatcagccatttattt

SEQ ID NO: 321233 - DNA, 25 bp, Homo sapien
tatatatattttattacactttaag

SEQ ID NO: 321234 - DNA, 25 bp, Homo sapien
ggtttgtatactcccagaaaattca

SEQ ID NO: 321235 - DNA, 25 bp, Homo sapien
aaagcagtatgagagaaattattgc

SEQ ID NO: 321236 - DNA, 25 bp, Homo sapien
aattttgtcattacttgccattgta

SEQ ID NO: 321237 - DNA, 25 bp, Homo sapien
gtaatgtactacctgtcacagaatg

SEQ ID NO: 321238 - DNA, 25 bp, Homo sapien
ttttagtgacattttgcacagactc

SEQ ID NO: 321239 - DNA, 25 bp, Homo sapien
tagtgacattttgcacagactctcc

SEQ ID NO: 321240 - DNA, 25 bp, Homo sapien
cagactctccaaataaaaaaccaag

SEQ ID NO: 321241 - DNA, 25 bp, Homo sapien
agaaataatttctagtgctaattta

SEQ ID NO: 321242 - DNA, 25 bp, Homo sapien
ttttgatgagtgaagactatttttc

SEQ ID NO: 321243 - DNA, 25 bp, Homo sapien
aactatctccttgaacagtttggag

SEQ ID NO: 321244 - DNA, 25 bp, Homo sapien
gctgacactgaatctatgactaatg

SEQ ID NO: 321245 - DNA, 25 bp, Homo sapien
gagcttctaggaacccatcatccaa

SEQ ID NO: 321246 - DNA, 25 bp, Homo sapien
cacacctgagattttgctctacgaa

SEQ ID NO: 321247 - DNA, 25 bp, Homo sapien
aaacacgtggcaatgtaaccaccag

SEQ ID NO: 321248 - DNA, 25 bp, Homo sapien
gtccatagttaagatgatgatgcca

SEQ ID NO: 321249 - DNA, 25 bp, Homo sapien
tgaagtccagcgtcagcagtttatg

SEQ ID NO: 321250 - DNA, 25 bp, Homo sapien
tttttcaatggccttgcacatggct

SEQ ID NO: 321251 - DNA, 25 bp, Homo sapien
aatgcaaagtaccatcaaaataaca

SEQ ID NO: 321252 - DNA, 25 bp, Homo sapien
atgcaaagtaccatcaaaataacac

SEQ ID NO: 321253 - DNA, 25 bp, Homo sapien
gactggtcatcaaacagtgtgtttc

SEQ ID NO: 321254 - DNA, 25 bp, Homo sapien
tagagtggatatcgcagagttctgg

SEQ ID NO: 321255 - DNA, 25 bp, Homo sapien
aagtaggcctgattacagaaatgag

SEQ ID NO: 321256 - DNA, 25 bp, Homo sapien
tggctgccacctttactacactgta

SEQ ID NO: 321257 - DNA, 25 bp, Homo sapien
ccactttgagctccatcttgctagg

SEQ ID NO: 321258 - DNA, 25 bp, Homo sapien
cttgctgggagctccaatcacttct

SEQ ID NO: 321259 - DNA, 25 bp, Homo sapien
taggagttccaatcactccaagccc

SEQ ID NO: 321260 - DNA, 25 bp, Homo sapien
tgctgggagctccaatcacttctag

SEQ ID NO: 321261 - DNA, 25 bp, Homo sapien
ccaaactccatcttgctctgagtac

SEQ ID NO: 321262 - DNA, 25 bp, Homo sapien
aatccctccaaactccatcttgctc

SEQ ID NO: 321263 - DNA, 25 bp, Homo sapien
ctccaaactccatcttgctctgagt

SEQ ID NO: 321264 - DNA, 25 bp, Homo sapien
tccctccaaactccatcttgctctg

SEQ ID NO: 321265 - DNA, 25 bp, Homo sapien
gctgagagctccaattacttccagc

SEQ ID NO: 321266 - DNA, 25 bp, Homo sapien
catcttgcttagagctccttcttgc

SEQ ID NO: 321267 - DNA, 25 bp, Homo sapien
tgaggaacatttgccccaagctcca

SEQ ID NO: 321268 - DNA, 25 bp, Homo sapien
ctgaacttcgtttgctccaagctcc

SEQ ID NO: 321269 - DNA, 25 bp, Homo sapien
gtctccagtgagacactcagagcct

SEQ ID NO: 321270 - DNA, 25 bp, Homo sapien
aaggctttgttgcatatctgtggac

SEQ ID NO: 321271 - DNA, 25 bp, Homo sapien
aaacatcagggagacaaaggctttg

SEQ ID NO: 321272 - DNA, 25 bp, Homo sapien
tcctctgttaccactgctgttttga

SEQ ID NO: 321273 - DNA, 25 bp, Homo sapien
taaagtaactgtggtggacatacac

SEQ ID NO: 321274 - DNA, 25 bp, Homo sapien
aaagtaactgtggtggacatacaca

SEQ ID NO: 321275 - DNA, 25 bp, Homo sapien
agtaactgtggtggacatacacaaa

SEQ ID NO: 321276 - DNA, 25 bp, Homo sapien
atcatttggagccatactgttgaac

SEQ ID NO: 321277 - DNA, 25 bp, Homo sapien
tcattgaaaagctagggaccccatt

SEQ ID NO: 321278 - DNA, 25 bp, Homo sapien
gcatggctatgcctaagtccccaaa

SEQ ID NO: 321279 - DNA, 25 bp, Homo sapien
tagaggacccagatgtaaacccaca

SEQ ID NO: 321280 - DNA, 25 bp, Homo sapien
ccaggataaagtgctagccagttgc

SEQ ID NO: 321281 - DNA, 25 bp, Homo sapien
tgaggaaactgctgtacagatacac

SEQ ID NO: 321282 - DNA, 25 bp, Homo sapien
tcaattctggccttctattccacag

SEQ ID NO: 321283 - DNA, 25 bp, Homo sapien
atcaattctggccttctattccaca

SEQ ID NO: 321284 - DNA, 25 bp, Homo sapien
gatcaattctggccttctattccac

SEQ ID NO: 321285 - DNA, 25 bp, Homo sapien
tgatcaattctggccttctattcca

SEQ ID NO: 321286 - DNA, 25 bp, Homo sapien
acaaatgtaccatatgtttcaaagt

SEQ ID NO: 321287 - DNA, 25 bp, Homo sapien
acacaaatgtaccatatgtttcaaa

SEQ ID NO: 321288 - DNA, 25 bp, Homo sapien
taacacaaatgtaccatatgtttca

SEQ ID NO: 321289 - DNA, 25 bp, Homo sapien
cttaacacaaatgtaccatatgttt

SEQ ID NO: 321290 - DNA, 25 bp, Homo sapien
ggaaagattctgaatgttgttacca

SEQ ID NO: 321291 - DNA, 25 bp, Homo sapien
acagataaagagatcaagaaactct

SEQ ID NO: 321292 - DNA, 25 bp, Homo sapien
gagatcaagaaactctcatatacat

SEQ ID NO: 321293 - DNA, 25 bp, Homo sapien
tcatccacagataaagagatcaaga

SEQ ID NO: 321294 - DNA, 25 bp, Homo sapien
taaagagatcaagaaactctcatat

SEQ ID NO: 321295 - DNA, 25 bp, Homo sapien
gaagcagtgtcatttagagcaacac

SEQ ID NO: 321296 - DNA, 25 bp, Homo sapien
cagtgtcatttagagcaacacagat

SEQ ID NO: 321297 - DNA, 25 bp, Homo sapien
taggaaatattctccagccatcaaa

SEQ ID NO: 321298 - DNA, 25 bp, Homo sapien
atgaagcagtgtcatttagagcaac

SEQ ID NO: 321299 - DNA, 25 bp, Homo sapien
gaacctgaacggacaattctgcaca

SEQ ID NO: 321300 - DNA, 25 bp, Homo sapien
taaaaagcatcctatagattaggca

SEQ ID NO: 321301 - DNA, 25 bp, Homo sapien
gaacaacaaataagagataaggtcc

SEQ ID NO: 321302 - DNA, 25 bp, Homo sapien
taattcacgaggagttgtcatctaa

SEQ ID NO: 321303 - DNA, 25 bp, Homo sapien
cagtctcagcttccgtagggacacg

SEQ ID NO: 321304 - DNA, 25 bp, Homo sapien
actgcttctccgaagctcgctctga

SEQ ID NO: 321305 - DNA, 25 bp, Homo sapien
caccactgcttctccgaagctcgct

SEQ ID NO: 321306 - DNA, 25 bp, Homo sapien
cctcgcaggaagtgcagtctcagct

SEQ ID NO: 321307 - DNA, 25 bp, Homo sapien
aaaaaacacatgaagggcattcatg

SEQ ID NO: 321308 - DNA, 25 bp, Homo sapien
tacgtgtgtctataatcaaagctca

SEQ ID NO: 321309 - DNA, 25 bp, Homo sapien
tgtgtgggagtcatattttggttga

SEQ ID NO: 321310 - DNA, 25 bp, Homo sapien
tgaagttgagtttctagtcaaagaa

SEQ ID NO: 321311 - DNA, 25 bp, Homo sapien
cagggtcgcaaaggtaatgatcacc

SEQ ID NO: 321312 - DNA, 25 bp, Homo sapien
ggtcgcaaaggtaatgatcacccct

SEQ ID NO: 321313 - DNA, 25 bp, Homo sapien
tcgcaaaggtaatgatcaccccttc

SEQ ID NO: 321314 - DNA, 25 bp, Homo sapien
tttcagggtcgcaaaggtaatgatc

SEQ ID NO: 321315 - DNA, 25 bp, Homo sapien
ggcgcttgcgtagagccccttcttc

SEQ ID NO: 321316 - DNA, 25 bp, Homo sapien
tcaaatgctgtgtactgagaggcgc

SEQ ID NO: 321317 - DNA, 25 bp, Homo sapien
gcacttgtccaggtaccatcaaatg

SEQ ID NO: 321318 - DNA, 25 bp, Homo sapien
tactgagaggcgcttgcgtagagcc

SEQ ID NO: 321319 - DNA, 25 bp, Homo sapien
caagcatttctaagaggcggagacc

SEQ ID NO: 321320 - DNA, 25 bp, Homo sapien
aaaatgggatttgtaggcagggcct

SEQ ID NO: 321321 - DNA, 25 bp, Homo sapien
gaggtctcgtcctgatgggcagaac

SEQ ID NO: 321322 - DNA, 25 bp, Homo sapien
cattttctggagctcacgtgcagcc

SEQ ID NO: 321323 - DNA, 25 bp, Homo sapien
gcacatgagcagtgcttgctcacat

SEQ ID NO: 321324 - DNA, 25 bp, Homo sapien
cacattcttcaattgaaggaactaa

SEQ ID NO: 321325 - DNA, 25 bp, Homo sapien
agtggtttgcgtgcttgccaggcac

SEQ ID NO: 321326 - DNA, 25 bp, Homo sapien
tgtccttctcctgagtggtttgcgt

SEQ ID NO: 321327 - DNA, 25 bp, Homo sapien
aaattgccttcaaatctggcaagaa

SEQ ID NO: 321328 - DNA, 25 bp, Homo sapien
aaaaaattgccttcaaatctggcaa

SEQ ID NO: 321329 - DNA, 25 bp, Homo sapien
ctttaaaaaattgccttcaaatctg

SEQ ID NO: 321330 - DNA, 25 bp, Homo sapien
ttaaaaaattgccttcaaatctggc

SEQ ID NO: 321331 - DNA, 25 bp, Homo sapien
ggagacgtcatgagtaactgtcggt

SEQ ID NO: 321332 - DNA, 25 bp, Homo sapien
atggagacgtcatgagtaactgtcg

SEQ ID NO: 321333 - DNA, 25 bp, Homo sapien
ctgtcggtaggaaacatcatgttct

SEQ ID NO: 321334 - DNA, 25 bp, Homo sapien
taggaaaaaacggcacagtgattta

SEQ ID NO: 321335 - DNA, 25 bp, Homo sapien
gagccagaggccacctagtggccaa

SEQ ID NO: 321336 - DNA, 25 bp, Homo sapien
gcagcggtggcaaacccggactctg

SEQ ID NO: 321337 - DNA, 25 bp, Homo sapien
agagacaagaacagcgaaaggatgg

SEQ ID NO: 321338 - DNA, 25 bp, Homo sapien
caagaacagcgaaaggatggtattg

SEQ ID NO: 321339 - DNA, 25 bp, Homo sapien
tcttccatgagaggatcaacccttg

SEQ ID NO: 321340 - DNA, 25 bp, Homo sapien
gaccagtgggcttggaaacaaccat

SEQ ID NO: 321341 - DNA, 25 bp, Homo sapien
accagtgggcttggaaacaaccatt

SEQ ID NO: 321342 - DNA, 25 bp, Homo sapien
gtgacaattagtgacttaaaggcaa

SEQ ID NO: 321343 - DNA, 25 bp, Homo sapien
tgagaggttcactaggagcacagaa

SEQ ID NO: 321344 - DNA, 25 bp, Homo sapien
gtcacaatgctacctctagagggcc

SEQ ID NO: 321345 - DNA, 25 bp, Homo sapien
tcttaggactaactgggatgtcacc

SEQ ID NO: 321346 - DNA, 25 bp, Homo sapien
gaagagcccagaaggaatggactcc

SEQ ID NO: 321347 - DNA, 25 bp, Homo sapien
catctgtggctattggctactgtac

SEQ ID NO: 321348 - DNA, 25 bp, Homo sapien
gagaggcagactcgtcgctgacaaa

SEQ ID NO: 321349 - DNA, 25 bp, Homo sapien
gtttaggcatctcaacacagggtca

SEQ ID NO: 321350 - DNA, 25 bp, Homo sapien
gggtcaaaaagctcctaggtacaca

SEQ ID NO: 321351 - DNA, 25 bp, Homo sapien
caggctctgatctaggacgacagtt

SEQ ID NO: 321352 - DNA, 25 bp, Homo sapien
gagggccctgcaaaaggcatctaca

SEQ ID NO: 321353 - DNA, 25 bp, Homo sapien
tatctccagtatggaagctctctgc

SEQ ID NO: 321354 - DNA, 25 bp, Homo sapien
tctgcagatgtaagcatgacacctg

SEQ ID NO: 321355 - DNA, 25 bp, Homo sapien
tcattccaggacgttgagaggctaa

SEQ ID NO: 321356 - DNA, 25 bp, Homo sapien
tttcagaccaagcaagggcacatgg

SEQ ID NO: 321357 - DNA, 25 bp, Homo sapien
taaagtattcggcatgcagccaggt

SEQ ID NO: 321358 - DNA, 25 bp, Homo sapien
aaggctgagacgatcatttgacccc

SEQ ID NO: 321359 - DNA, 25 bp, Homo sapien
tctgtggaaactgctatcagccagg

SEQ ID NO: 321360 - DNA, 25 bp, Homo sapien
tatgcaccgtatggaattccacagg

SEQ ID NO: 321361 - DNA, 25 bp, Homo sapien
gaagggaggatgtattctatgcacc

SEQ ID NO: 321362 - DNA, 25 bp, Homo sapien
catgacctaagttgacccaagccaa

SEQ ID NO: 321363 - DNA, 25 bp, Homo sapien
cactgttgcttgaataaagcagccc

SEQ ID NO: 321364 - DNA, 25 bp, Homo sapien
tgaccttattagagcacactgttgc

SEQ ID NO: 321365 - DNA, 25 bp, Homo sapien
cagccctgcagtctcacagtggagg

SEQ ID NO: 321366 - DNA, 25 bp, Homo sapien
cctggctcgattgctaccaattaag

SEQ ID NO: 321367 - DNA, 25 bp, Homo sapien
aggactgggagttctctggtcacaa

SEQ ID NO: 321368 - DNA, 25 bp, Homo sapien
ctctggtcacaagcgttctgccttt

SEQ ID NO: 321369 - DNA, 25 bp, Homo sapien
aagggctccgtgtgtagagactgaa

SEQ ID NO: 321370 - DNA, 25 bp, Homo sapien
ctgggagttctctggtcacaagcgt

SEQ ID NO: 321371 - DNA, 25 bp, Homo sapien
accagaaacccaaagatattggcac

SEQ ID NO: 321372 - DNA, 25 bp, Homo sapien
aaacccaaagatattggcacaaaga

SEQ ID NO: 321373 - DNA, 25 bp, Homo sapien
tggtaagaaaaatggaaccgcatgc

SEQ ID NO: 321374 - DNA, 25 bp, Homo sapien
aaatggaaccgcatgcagctgctga

SEQ ID NO: 321375 - DNA, 25 bp, Homo sapien
ggtgccaggaatgcggtgatgaata

SEQ ID NO: 321376 - DNA, 25 bp, Homo sapien
cacatttagctcttaatctgaccca

SEQ ID NO: 321377 - DNA, 25 bp, Homo sapien
gacccatttctcatgggccaggcct

SEQ ID NO: 321378 - DNA, 25 bp, Homo sapien
gaaaacaagtgaccatgaaaacaca

SEQ ID NO: 321379 - DNA, 25 bp, Homo sapien
tccgccctgaacgagagtacagtgg

SEQ ID NO: 321380 - DNA, 25 bp, Homo sapien
tccagcgccctagactgaagcagaa

SEQ ID NO: 321381 - DNA, 25 bp, Homo sapien
ccccgttctgggctaagacatggca

SEQ ID NO: 321382 - DNA, 25 bp, Homo sapien
ttccccgcggcagtagaggaacaga

SEQ ID NO: 321383 - DNA, 25 bp, Homo sapien
gactgtatgacattggcctgagcta

SEQ ID NO: 321384 - DNA, 25 bp, Homo sapien
taaaactactacaaggaaatataga

SEQ ID NO: 321385 - DNA, 25 bp, Homo sapien
aggaaatatagaaggagactgtatg

SEQ ID NO: 321386 - DNA, 25 bp, Homo sapien
aaggagactgtatgacattggcctg

SEQ ID NO: 321387 - DNA, 25 bp, Homo sapien
cattgcacaaacataggagatactc

SEQ ID NO: 321388 - DNA, 25 bp, Homo sapien
caaggttatccagtggagtttccac

SEQ ID NO: 321389 - DNA, 25 bp, Homo sapien
gatgaaaactaagagcatatgccca

SEQ ID NO: 321390 - DNA, 25 bp, Homo sapien
ggctaccccaggaccaatcattgca

SEQ ID NO: 321391 - DNA, 25 bp, Homo sapien
aaaactcatggatagtgactggaag

SEQ ID NO: 321392 - DNA, 25 bp, Homo sapien
ggaaataaaaactcatggatagtga

SEQ ID NO: 321393 - DNA, 25 bp, Homo sapien
aataaaaactcatggatagtgactg

SEQ ID NO: 321394 - DNA, 25 bp, Homo sapien
tgactggaagtggatcagtggttac

SEQ ID NO: 321395 - DNA, 25 bp, Homo sapien
gcctcgccatgggtctccctgcggg

SEQ ID NO: 321396 - DNA, 25 bp, Homo sapien
gagaccaggaacttggtcggtgctt

SEQ ID NO: 321397 - DNA, 25 bp, Homo sapien
aacttggtcggtgcttgcggcctga

SEQ ID NO: 321398 - DNA, 25 bp, Homo sapien
cttgcggcctgagatcgagctctgg

SEQ ID NO: 321399 - DNA, 25 bp, Homo sapien
ggacccactctttagaggccacgtg

SEQ ID NO: 321400 - DNA, 25 bp, Homo sapien
gttttactgaccactaattggccag

SEQ ID NO: 321401 - DNA, 25 bp, Homo sapien
tggaaagagataccttgccctccac

SEQ ID NO: 321402 - DNA, 25 bp, Homo sapien
gccagagctcctaaggcctataggg

SEQ ID NO: 321403 - DNA, 25 bp, Homo sapien
caagaagcttattctggggccattt

SEQ ID NO: 321404 - DNA, 25 bp, Homo sapien
acacaacaaatgaaaaacgaatagg

SEQ ID NO: 321405 - DNA, 25 bp, Homo sapien
atgaaaaacgaataggagacaattc

SEQ ID NO: 321406 - DNA, 25 bp, Homo sapien
tctctaaactactaaagaggcatta

SEQ ID NO: 321407 - DNA, 25 bp, Homo sapien
tatacttcatcctagggttggcagt

SEQ ID NO: 321408 - DNA, 25 bp, Homo sapien
gagattcttgattgcatagcagagc

SEQ ID NO: 321409 - DNA, 25 bp, Homo sapien
cataacctctctttacagggagctc

SEQ ID NO: 321410 - DNA, 25 bp, Homo sapien
tgcagcccctacagaaatgagtggc

SEQ ID NO: 321411 - DNA, 25 bp, Homo sapien
taattcagatgttggaactaaatgc

SEQ ID NO: 321412 - DNA, 25 bp, Homo sapien
cagagatgggaacagtaaaaggcaa

SEQ ID NO: 321413 - DNA, 25 bp, Homo sapien
cagcaagctgattagcagactggtc

SEQ ID NO: 321414 - DNA, 25 bp, Homo sapien
gactggtcatcagagctaaagaaag

SEQ ID NO: 321415 - DNA, 25 bp, Homo sapien
tgtgtctccaccattgtgtagtttc

SEQ ID NO: 321416 - DNA, 25 bp, Homo sapien
gcaaggcaaattgctgtaagacagg

SEQ ID NO: 321417 - DNA, 25 bp, Homo sapien
gtgtctccaccattgtgtagtttcc

SEQ ID NO: 321418 - DNA, 25 bp, Homo sapien
tctgcaaggcaaattgctgtaagac

SEQ ID NO: 321419 - DNA, 25 bp, Homo sapien
cagttgttgcactgaagcttgtaca

SEQ ID NO: 321420 - DNA, 25 bp, Homo sapien
actgaagcttgtacatgcccggcaa

SEQ ID NO: 321421 - DNA, 25 bp, Homo sapien
gaagcttgtacatgcccggcaaggc

SEQ ID NO: 321422 - DNA, 25 bp, Homo sapien
gcactgaagcttgtacatgcccggc

SEQ ID NO: 321423 - DNA, 25 bp, Homo sapien
tcaggacatggtacatccgttcttc

SEQ ID NO: 321424 - DNA, 25 bp, Homo sapien
ttgcttcaggacatggtacatccgt

SEQ ID NO: 321425 - DNA, 25 bp, Homo sapien
catccgttcttctactctaaaggta

SEQ ID NO: 321426 - DNA, 25 bp, Homo sapien
ctctaaaggtaggtccaagaggcag

SEQ ID NO: 321427 - DNA, 25 bp, Homo sapien
catcaggaattaggtggcagccaag

SEQ ID NO: 321428 - DNA, 25 bp, Homo sapien
ctcggagcagtgtgttagcacctgg

SEQ ID NO: 321429 - DNA, 25 bp, Homo sapien
gcacactcggagcagtgtgttagca

SEQ ID NO: 321430 - DNA, 25 bp, Homo sapien
ccatcaggaattaggtggcagccaa

SEQ ID NO: 321431 - DNA, 25 bp, Homo sapien
gcctgcagtgccatacgacccctga

SEQ ID NO: 321432 - DNA, 25 bp, Homo sapien
gacccctgaggcatggactggagcc

SEQ ID NO: 321433 - DNA, 25 bp, Homo sapien
caagaagcctgcagtgccatacgac

SEQ ID NO: 321434 - DNA, 25 bp, Homo sapien
tgcagtgccatacgacccctgaggc

SEQ ID NO: 321435 - DNA, 25 bp, Homo sapien
tgctgcttgtttcctctctgtggct

SEQ ID NO: 321436 - DNA, 25 bp, Homo sapien
tctgtggctccatttgtagcacagt

SEQ ID NO: 321437 - DNA, 25 bp, Homo sapien
cagttgttgcactgaagcttgtgca

SEQ ID NO: 321438 - DNA, 25 bp, Homo sapien
gtttctgagcctgctgcttgtttcc

SEQ ID NO: 321439 - DNA, 25 bp, Homo sapien
ctaacggccagacatggtacatcac

SEQ ID NO: 321440 - DNA, 25 bp, Homo sapien
ggccagacatggtacatcacttcta

SEQ ID NO: 321441 - DNA, 25 bp, Homo sapien
caggtgtaccagtcaccaactaacg

SEQ ID NO: 321442 - DNA, 25 bp, Homo sapien
gtaccagtcaccaactaacggccag

SEQ ID NO: 321443 - DNA, 25 bp, Homo sapien
tggcatgcacacgcccgagcgactg

SEQ ID NO: 321444 - DNA, 25 bp, Homo sapien
ccctcgaataggtggcttgttgctt

SEQ ID NO: 321445 - DNA, 25 bp, Homo sapien
gagcgactgccacacagctccgagt

SEQ ID NO: 321446 - DNA, 25 bp, Homo sapien
cagctccgagtgatcttgtcctgca

SEQ ID NO: 321447 - DNA, 25 bp, Homo sapien
gcaattaaaacagcccaggttggta

SEQ ID NO: 321448 - DNA, 25 bp, Homo sapien
gagcctatatatgccaccgcatgtg

SEQ ID NO: 321449 - DNA, 25 bp, Homo sapien
tgctgtcagtgcaagtaaagcaaaa

SEQ ID NO: 321450 - DNA, 25 bp, Homo sapien
tcactggactgcgtaattcactgcg

SEQ ID NO: 321451 - DNA, 25 bp, Homo sapien
tgcgtggccgtaggtgccaccttgc

SEQ ID NO: 321452 - DNA, 25 bp, Homo sapien
tggtacggtccactagcacagaaac

SEQ ID NO: 321453 - DNA, 25 bp, Homo sapien
cagctctccactgatatggtacggt

SEQ ID NO: 321454 - DNA, 25 bp, Homo sapien
cagaaactatggtatgggcatctga

SEQ ID NO: 321455 - DNA, 25 bp, Homo sapien
tgacttgctgctccaccactttgct

SEQ ID NO: 321456 - DNA, 25 bp, Homo sapien
cactcagtgtaatcggcccaggatg

SEQ ID NO: 321457 - DNA, 25 bp, Homo sapien
agtgtctcacaagggcaagtggagc

SEQ ID NO: 321458 - DNA, 25 bp, Homo sapien
gtgctccatcccagagacatgtgag

SEQ ID NO: 321459 - DNA, 25 bp, Homo sapien
aggccagaacggctagtcacccaaa

SEQ ID NO: 321460 - DNA, 25 bp, Homo sapien
tctgcccatcaagtacagagtctgg

SEQ ID NO: 321461 - DNA, 25 bp, Homo sapien
catgtggctttctgcgaagtttggt

SEQ ID NO: 321462 - DNA, 25 bp, Homo sapien
gaatgactaagttgcccgaacggga

SEQ ID NO: 321463 - DNA, 25 bp, Homo sapien
tggaggggcctgactcatactcctg

SEQ ID NO: 321464 - DNA, 25 bp, Homo sapien
aggatggagccaccgacccacacgg

SEQ ID NO: 321465 - DNA, 25 bp, Homo sapien
tggagccaccgacccacacggagta

SEQ ID NO: 321466 - DNA, 25 bp, Homo sapien
gatggagccaccgacccacacggag

SEQ ID NO: 321467 - DNA, 25 bp, Homo sapien
cttgggaggagcaacaatcttgatc

SEQ ID NO: 321468 - DNA, 25 bp, Homo sapien
tgggaggagcaacaatcttgatctt

SEQ ID NO: 321469 - DNA, 25 bp, Homo sapien
cttcatcgtgctaggcgctagggca

SEQ ID NO: 321470 - DNA, 25 bp, Homo sapien
ggcgctagggcagcgatctccttct

SEQ ID NO: 321471 - DNA, 25 bp, Homo sapien
tggtggtgccaccagatagcactgt

SEQ ID NO: 321472 - DNA, 25 bp, Homo sapien
gccaccagatagcactgtgttggtg

SEQ ID NO: 321473 - DNA, 25 bp, Homo sapien
tgtggatgtccacatcagacttcat

SEQ ID NO: 321474 - DNA, 25 bp, Homo sapien
gtctttgtggatgtccacatcagac

SEQ ID NO: 321475 - DNA, 25 bp, Homo sapien
caggaagcaaggctggaagagcacc

SEQ ID NO: 321476 - DNA, 25 bp, Homo sapien
ggaagcaaggctggaagagcacctc

SEQ ID NO: 321477 - DNA, 25 bp, Homo sapien
aagcaaggctggaagagcacctcgg

SEQ ID NO: 321478 - DNA, 25 bp, Homo sapien
ccaggaagcaaggctggaagagcac

SEQ ID NO: 321479 - DNA, 25 bp, Homo sapien
catggtggtgaacctatagccacgc

SEQ ID NO: 321480 - DNA, 25 bp, Homo sapien
atggtggtgaacctatagccacgct

SEQ ID NO: 321481 - DNA, 25 bp, Homo sapien
ccatggtggtgaacctatagccacg

SEQ ID NO: 321482 - DNA, 25 bp, Homo sapien
catgggggagggcattcccctcata

SEQ ID NO: 321483 - DNA, 25 bp, Homo sapien
ctaggcgcagggtggcatgggggag

SEQ ID NO: 321484 - DNA, 25 bp, Homo sapien
ggcacagtgtgggtgaccccgtcac

SEQ ID NO: 321485 - DNA, 25 bp, Homo sapien
cccctcatagatgggcacagtgtgg

SEQ ID NO: 321486 - DNA, 25 bp, Homo sapien
agaggtgtacaaggacagcacggct

SEQ ID NO: 321487 - DNA, 25 bp, Homo sapien
tgtacaaggacagcacggcttggat

SEQ ID NO: 321488 - DNA, 25 bp, Homo sapien
cagtagtacggccagaggtgtacaa

SEQ ID NO: 321489 - DNA, 25 bp, Homo sapien
agtacggccagaggtgtacaaggac

SEQ ID NO: 321490 - DNA, 25 bp, Homo sapien
atgccccccatcatgttctggtgcc

SEQ ID NO: 321491 - DNA, 25 bp, Homo sapien
gggcatcgtcacctgcaaagccggc

SEQ ID NO: 321492 - DNA, 25 bp, Homo sapien
ttgtcaatgacgagcacggcagtat

SEQ ID NO: 321493 - DNA, 25 bp, Homo sapien
acgagcacggcagtatcatcatcca

SEQ ID NO: 321494 - DNA, 25 bp, Homo sapien
caatgacgagcacggcagtatcatc

SEQ ID NO: 321495 - DNA, 25 bp, Homo sapien
tcttagctggctctgatgtttcatt

SEQ ID NO: 321496 - DNA, 25 bp, Homo sapien
ctgcaacgtactattttcatgcaag

SEQ ID NO: 321497 - DNA, 25 bp, Homo sapien
cgtactattttcatgcaagaggtct

SEQ ID NO: 321498 - DNA, 25 bp, Homo sapien
caacgtactattttcatgcaagagg

SEQ ID NO: 321499 - DNA, 25 bp, Homo sapien
ttcttcctgcaacgtactattttca

SEQ ID NO: 321500 - DNA, 25 bp, Homo sapien
agaaagttgcttctgagtatcattt

SEQ ID NO: 321501 - DNA, 25 bp, Homo sapien
cttttcttcatgaatcagaatctca

SEQ ID NO: 321502 - DNA, 25 bp, Homo sapien
tgcttctgagtatcattttgttcat

SEQ ID NO: 321503 - DNA, 25 bp, Homo sapien
aatattccagtgttctgttcttcag

SEQ ID NO: 321504 - DNA, 25 bp, Homo sapien
tgaaatactggaggtgtccccaaaa

SEQ ID NO: 321505 - DNA, 25 bp, Homo sapien
aaatactggaggtgtccccaaaatg

SEQ ID NO: 321506 - DNA, 25 bp, Homo sapien
atactggaggtgtccccaaaatgat

SEQ ID NO: 321507 - DNA, 25 bp, Homo sapien
catgaaatactggaggtgtccccaa

SEQ ID NO: 321508 - DNA, 25 bp, Homo sapien
ggtcgtgggaaagttgggatggcca

SEQ ID NO: 321509 - DNA, 25 bp, Homo sapien
ctgtttgatgggaagggtcgtggga

SEQ ID NO: 321510 - DNA, 25 bp, Homo sapien
tgtttgatgggaagggtcgtgggaa

SEQ ID NO: 321511 - DNA, 25 bp, Homo sapien
tgggaaagttgggatggccagaaaa

SEQ ID NO: 321512 - DNA, 25 bp, Homo sapien
tgttagtcctcgttatctctttttc

SEQ ID NO: 321513 - DNA, 25 bp, Homo sapien
cttccctcaattacgttagagagaa

SEQ ID NO: 321514 - DNA, 25 bp, Homo sapien
cctcaattacgttagagagaatccc

SEQ ID NO: 321515 - DNA, 25 bp, Homo sapien
agcctgatgcgtcctggtgatacaa

SEQ ID NO: 321516 - DNA, 25 bp, Homo sapien
ggaaattgctggctttcaggtgttc

SEQ ID NO: 321517 - DNA, 25 bp, Homo sapien
gaaattgctggctttcaggtgttct

SEQ ID NO: 321518 - DNA, 25 bp, Homo sapien
ttgatattaaggatagttatccctt

SEQ ID NO: 321519 - DNA, 25 bp, Homo sapien
tgatattaaggatagttatcccttt

SEQ ID NO: 321520 - DNA, 25 bp, Homo sapien
gatattaaggatagttatcccttta

SEQ ID NO: 321521 - DNA, 25 bp, Homo sapien
ctatcaccacccttatttatttctg

SEQ ID NO: 321522 - DNA, 25 bp, Homo sapien
ttatttatttctggttcttgagaca

SEQ ID NO: 321523 - DNA, 25 bp, Homo sapien
tttatttctggttcttgagacattt

SEQ ID NO: 321524 - DNA, 25 bp, Homo sapien
ctttctatcaccacccttatttatt

SEQ ID NO: 321525 - DNA, 25 bp, Homo sapien
caggctggagcgtagtggcagatct

SEQ ID NO: 321526 - DNA, 25 bp, Homo sapien
caccccccaggttcatggcattctc

SEQ ID NO: 321527 - DNA, 25 bp, Homo sapien
aagctccaccccccaggttcatggc

SEQ ID NO: 321528 - DNA, 25 bp, Homo sapien
ccaggctggagcgtagtggcagatc

SEQ ID NO: 321529 - DNA, 25 bp, Homo sapien
cacttcctttaagcctttgtgactc

SEQ ID NO: 321530 - DNA, 25 bp, Homo sapien
cttcctttaagcctttgtgactctt

SEQ ID NO: 321531 - DNA, 25 bp, Homo sapien
tcctttaagcctttgtgactcttcc

SEQ ID NO: 321532 - DNA, 25 bp, Homo sapien
ttcacttcctttaagcctttgtgac

SEQ ID NO: 321533 - DNA, 25 bp, Homo sapien
gacaaggtgactgataattcatgtg

SEQ ID NO: 321534 - DNA, 25 bp, Homo sapien
caactgaaatgatactatgtagcga

SEQ ID NO: 321535 - DNA, 25 bp, Homo sapien
cctggtactcactctcaagtttacg

SEQ ID NO: 321536 - DNA, 25 bp, Homo sapien
caactaagagtcgtgaattcagagc

SEQ ID NO: 321537 - DNA, 25 bp, Homo sapien
cactcaagcatcttgtcttttgcac

SEQ ID NO: 321538 - DNA, 25 bp, Homo sapien
taaaatgtctatcatgaacttgcct

SEQ ID NO: 321539 - DNA, 25 bp, Homo sapien
tggcccatggggtaaaacctactca

SEQ ID NO: 321540 - DNA, 25 bp, Homo sapien
ctctctgcatgcttaccttaaatca

SEQ ID NO: 321541 - DNA, 25 bp, Homo sapien
gtagtcagaaagtaactggcaaatt

SEQ ID NO: 321542 - DNA, 25 bp, Homo sapien
tttcagaagagacttttagtatctg

SEQ ID NO: 321543 - DNA, 25 bp, Homo sapien
tttgtagtcagaaagtaactggcaa

SEQ ID NO: 321544 - DNA, 25 bp, Homo sapien
tttctttgtagtcagaaagtaactg

SEQ ID NO: 321545 - DNA, 25 bp, Homo sapien
tgctgcctccttatgcagaagccac

SEQ ID NO: 321546 - DNA, 25 bp, Homo sapien
gaagccacgctaactttctccgtat

SEQ ID NO: 321547 - DNA, 25 bp, Homo sapien
tgcctccttatgcagaagccacgct

SEQ ID NO: 321548 - DNA, 25 bp, Homo sapien
gaatgcttcaaagatctgtgctgcc

SEQ ID NO: 321549 - DNA, 25 bp, Homo sapien
gatagatcttgagaagatacatcaa

SEQ ID NO: 321550 - DNA, 25 bp, Homo sapien
cgtctgtccagatagatcttgagaa

SEQ ID NO: 321551 - DNA, 25 bp, Homo sapien
tctggccgtctgtccagatagatct

SEQ ID NO: 321552 - DNA, 25 bp, Homo sapien
acagcatactctctggccgtctgtc

SEQ ID NO: 321553 - DNA, 25 bp, Homo sapien
tagaaggctgactatacttgccgat

SEQ ID NO: 321554 - DNA, 25 bp, Homo sapien
aggctgactatacttgccgatccac

SEQ ID NO: 321555 - DNA, 25 bp, Homo sapien
gtagaaggctgactatacttgccga

SEQ ID NO: 321556 - DNA, 25 bp, Homo sapien
gaaggctgactatacttgccgatcc

SEQ ID NO: 321557 - DNA, 25 bp, Homo sapien
tgtacaccaagtaacagtggtgtga

SEQ ID NO: 321558 - DNA, 25 bp, Homo sapien
tacaccaagtaacagtggtgtgagg

SEQ ID NO: 321559 - DNA, 25 bp, Homo sapien
caccaagtaacagtggtgtgaggcc

SEQ ID NO: 321560 - DNA, 25 bp, Homo sapien
caagtaacagtggtgtgaggccatg

SEQ ID NO: 321561 - DNA, 25 bp, Homo sapien
gagcggtatttccatactcatctgg

SEQ ID NO: 321562 - DNA, 25 bp, Homo sapien
tgtagatagcatagtgtagagcggt

SEQ ID NO: 321563 - DNA, 25 bp, Homo sapien
catctggaatattcggatcagtgcc

SEQ ID NO: 321564 - DNA, 25 bp, Homo sapien
tactcatctggaatattcggatcag

SEQ ID NO: 321565 - DNA, 25 bp, Homo sapien
cgctgacatagttggctactgcata

SEQ ID NO: 321566 - DNA, 25 bp, Homo sapien
gctgacatagttggctactgcatac

SEQ ID NO: 321567 - DNA, 25 bp, Homo sapien
cacgctgacatagttggctactgca

SEQ ID NO: 321568 - DNA, 25 bp, Homo sapien
ttcacgctgacatagttggctactg

SEQ ID NO: 321569 - DNA, 25 bp, Homo sapien
aaattgtagtgcactagctacagcc

SEQ ID NO: 321570 - DNA, 25 bp, Homo sapien
taggaaattgtagtgcactagctac

SEQ ID NO: 321571 - DNA, 25 bp, Homo sapien
tagtgcactagctacagccatatca

SEQ ID NO: 321572 - DNA, 25 bp, Homo sapien
tagctacagccatatcaatgataca

SEQ ID NO: 321573 - DNA, 25 bp, Homo sapien
agcctgctattactgtgccttcaaa

SEQ ID NO: 321574 - DNA, 25 bp, Homo sapien
tcccatgaaaaaagcacacgattta

SEQ ID NO: 321575 - DNA, 25 bp, Homo sapien
aatcgcaaacactgaatagcctgct

SEQ ID NO: 321576 - DNA, 25 bp, Homo sapien
aaaagcacacgatttattatctctc

SEQ ID NO: 321577 - DNA, 25 bp, Homo sapien
caataaagtccatagcatcacagaa

SEQ ID NO: 321578 - DNA, 25 bp, Homo sapien
gaaagaaaaggctcactatgcgatg

SEQ ID NO: 321579 - DNA, 25 bp, Homo sapien
aatggcactgggatacatgactagc

SEQ ID NO: 321580 - DNA, 25 bp, Homo sapien
gcctggcagaagtacaaccatctga

SEQ ID NO: 321581 - DNA, 25 bp, Homo sapien
tttcaattccgaccaacagtgtaca

SEQ ID NO: 321582 - DNA, 25 bp, Homo sapien
ctttagacgtatatccagaagaggc

SEQ ID NO: 321583 - DNA, 25 bp, Homo sapien
tattaatccactctgcaattcatgg

SEQ ID NO: 321584 - DNA, 25 bp, Homo sapien
tcatttctgggttgagttccttaca

SEQ ID NO: 321585 - DNA, 25 bp, Homo sapien
ttatctctatattggctgggcacgg

SEQ ID NO: 321586 - DNA, 25 bp, Homo sapien
gcaggagcagcacttgaacccggag

SEQ ID NO: 321587 - DNA, 25 bp, Homo sapien
gccgaagtgtgtggatcacgagatc

SEQ ID NO: 321588 - DNA, 25 bp, Homo sapien
aggagcagcacttgaacccggaggc

SEQ ID NO: 321589 - DNA, 25 bp, Homo sapien
tcttcgcctagttcttatccaagaa

SEQ ID NO: 321590 - DNA, 25 bp, Homo sapien
gctacccaagagttgaccaaaggtg

SEQ ID NO: 321591 - DNA, 25 bp, Homo sapien
gagtcacacagttaatccagaatat

SEQ ID NO: 321592 - DNA, 25 bp, Homo sapien
ggaaacatagttgcacaaatcttct

SEQ ID NO: 321593 - DNA, 25 bp, Homo sapien
ttttaccagaggaattggctctcac

SEQ ID NO: 321594 - DNA, 25 bp, Homo sapien
tcacatctattgtaaaggccaacca

SEQ ID NO: 321595 - DNA, 25 bp, Homo sapien
tacacctggtatacggacaacatgg

SEQ ID NO: 321596 - DNA, 25 bp, Homo sapien
gagtcacaagcaaagtctacacctg

SEQ ID NO: 321597 - DNA, 25 bp, Homo sapien
tagactttagagaaactaatgttct

SEQ ID NO: 321598 - DNA, 25 bp, Homo sapien
aatgtgttacctccgtggcacacga

SEQ ID NO: 321599 - DNA, 25 bp, Homo sapien
tcttatctgacagtactttcctgta

SEQ ID NO: 321600 - DNA, 25 bp, Homo sapien
ttgtatcagaattacaggagtttcc

SEQ ID NO: 321601 - DNA, 25 bp, Homo sapien
gcagtatatctgcacaacacaatac

SEQ ID NO: 321602 - DNA, 25 bp, Homo sapien
tccatccatagatgaagggatgaag

SEQ ID NO: 321603 - DNA, 25 bp, Homo sapien
caacacaatactcttcatccataat

SEQ ID NO: 321604 - DNA, 25 bp, Homo sapien
gaagaaactgcagtatatctgcaca

SEQ ID NO: 321605 - DNA, 25 bp, Homo sapien
gccgaagcactgtcctcagcagtca

SEQ ID NO: 321606 - DNA, 25 bp, Homo sapien
cacctggtggctcctgataattcta

SEQ ID NO: 321607 - DNA, 25 bp, Homo sapien
gtttcttccccaggatgcgccctca

SEQ ID NO: 321608 - DNA, 25 bp, Homo sapien
gcgccctcaagttatcccaaagctg

SEQ ID NO: 321609 - DNA, 25 bp, Homo sapien
caatgtaaaccaggatagatatttt

SEQ ID NO: 321610 - DNA, 25 bp, Homo sapien
gtcaattacatataacgttttcagc

SEQ ID NO: 321611 - DNA, 25 bp, Homo sapien
tcctacactatcattgggtccagcc

SEQ ID NO: 321612 - DNA, 25 bp, Homo sapien
tgtaaaacaacttcaacagcactaa

SEQ ID NO: 321613 - DNA, 25 bp, Homo sapien
ttgagctccaaatcccgttcagatt

SEQ ID NO: 321614 - DNA, 25 bp, Homo sapien
gcagctcccggacaagcactaggtt

SEQ ID NO: 321615 - DNA, 25 bp, Homo sapien
ttcggttgcaggcaccaaccccttc

SEQ ID NO: 321616 - DNA, 25 bp, Homo sapien
agattcagttcttcactgatgatga

SEQ ID NO: 321617 - DNA, 25 bp, Homo sapien
gtccccagccacgatcctcgggctg

SEQ ID NO: 321618 - DNA, 25 bp, Homo sapien
tcctccatgaagccagacacagtcc

SEQ ID NO: 321619 - DNA, 25 bp, Homo sapien
tgcgcagtggagtgtgctgcctgca

SEQ ID NO: 321620 - DNA, 25 bp, Homo sapien
tcgggctgctctcaccacggcctgt

SEQ ID NO: 321621 - DNA, 25 bp, Homo sapien
tgttcttcaggcaaaatgcgtgcat

SEQ ID NO: 321622 - DNA, 25 bp, Homo sapien
gttagaggagcaagagcgagctctc

SEQ ID NO: 321623 - DNA, 25 bp, Homo sapien
tgtgagagactagcagaggacagac

SEQ ID NO: 321624 - DNA, 25 bp, Homo sapien
gaaaaattgccggattccagccttg

SEQ ID NO: 321625 - DNA, 25 bp, Homo sapien
gccttgtattgagtgagctgaaact

SEQ ID NO: 321626 - DNA, 25 bp, Homo sapien
gaagctcaggagttgaaagatgcag

SEQ ID NO: 321627 - DNA, 25 bp, Homo sapien
gaaaaaatggacaagatggacctca

SEQ ID NO: 321628 - DNA, 25 bp, Homo sapien
ggacctcattaaagtgaaacatgtc

SEQ ID NO: 321629 - DNA, 25 bp, Homo sapien
aaacatgtctgctgtgccagagaca

SEQ ID NO: 321630 - DNA, 25 bp, Homo sapien
acttgtgggcaggatgctccctcct

SEQ ID NO: 321631 - DNA, 25 bp, Homo sapien
tctgtacaagttgtggctaaaaggg

SEQ ID NO: 321632 - DNA, 25 bp, Homo sapien
agtgggtttaaagtctctgtacaag

SEQ ID NO: 321633 - DNA, 25 bp, Homo sapien
gggcaccaaaagtagccacttgtgg

SEQ ID NO: 321634 - DNA, 25 bp, Homo sapien
ctctaccccaaacagctcagttccc

SEQ ID NO: 321635 - DNA, 25 bp, Homo sapien
tctctaccccaaacagctcagttcc

SEQ ID NO: 321636 - DNA, 25 bp, Homo sapien
taccccaaacagctcagttccccag

SEQ ID NO: 321637 - DNA, 25 bp, Homo sapien
tctaccccaaacagctcagttcccc

SEQ ID NO: 321638 - DNA, 25 bp, Homo sapien
gccaaagcgcccgcggagcagagca

SEQ ID NO: 321639 - DNA, 25 bp, Homo sapien
ccaaagcgcccgcggagcagagcag

SEQ ID NO: 321640 - DNA, 25 bp, Homo sapien
ggccaaagcgcccgcggagcagagc

SEQ ID NO: 321641 - DNA, 25 bp, Homo sapien
cggccaaagcgcccgcggagcagag

SEQ ID NO: 321642 - DNA, 25 bp, Homo sapien
gtgctgttgtcccagtcaccaccgt

SEQ ID NO: 321643 - DNA, 25 bp, Homo sapien
agtcaccaccgtaaccagtgatcca

SEQ ID NO: 321644 - DNA, 25 bp, Homo sapien
ccaccgtaaccagtgatccagttct

SEQ ID NO: 321645 - DNA, 25 bp, Homo sapien
gctgttgtcccagtcaccaccgtaa

SEQ ID NO: 321646 - DNA, 25 bp, Homo sapien
gccatgtaggtttgtgagtacaccc

SEQ ID NO: 321647 - DNA, 25 bp, Homo sapien
cctgcgggcaacagactgtaccata

SEQ ID NO: 321648 - DNA, 25 bp, Homo sapien
catatagcctcagtgtgtagtcagc

SEQ ID NO: 321649 - DNA, 25 bp, Homo sapien
gagtacaccctatgagatctgcaca

SEQ ID NO: 321650 - DNA, 25 bp, Homo sapien
aacaactggtctattcaagctcaac

SEQ ID NO: 321651 - DNA, 25 bp, Homo sapien
caagctcaaccagagcatataagag

SEQ ID NO: 321652 - DNA, 25 bp, Homo sapien
gtgagggtaaggtgttttcatcaga

SEQ ID NO: 321653 - DNA, 25 bp, Homo sapien
taagaaggtagctgaagtcctctgc

SEQ ID NO: 321654 - DNA, 25 bp, Homo sapien
ctgttggtaagcagtcaagatggtg

SEQ ID NO: 321655 - DNA, 25 bp, Homo sapien
tgttggtaagcagtcaagatggtga

SEQ ID NO: 321656 - DNA, 25 bp, Homo sapien
tctgttggtaagcagtcaagatggt

SEQ ID NO: 321657 - DNA, 25 bp, Homo sapien
ttctgttggtaagcagtcaagatgg

SEQ ID NO: 321658 - DNA, 25 bp, Homo sapien
acacccatacccacctacacccaga

SEQ ID NO: 321659 - DNA, 25 bp, Homo sapien
cagacaccagacacacccgcacaca

SEQ ID NO: 321660 - DNA, 25 bp, Homo sapien
ccagacaccagacacacccgcacac

SEQ ID NO: 321661 - DNA, 25 bp, Homo sapien
taggtgcaagaattgggcggatctc

SEQ ID NO: 321662 - DNA, 25 bp, Homo sapien
gaattgggcggatctctgatcagct

SEQ ID NO: 321663 - DNA, 25 bp, Homo sapien
tcccaaggccttgatgtaggtgcaa

SEQ ID NO: 321664 - DNA, 25 bp, Homo sapien
tgatggcgatggttaggtttctgct

SEQ ID NO: 321665 - DNA, 25 bp, Homo sapien
ggcagccctgttcagtgttgtccca

SEQ ID NO: 321666 - DNA, 25 bp, Homo sapien
tgttcagtgttgtcccatagaaacc

SEQ ID NO: 321667 - DNA, 25 bp, Homo sapien
caatagtgtgctggaagctgtgttc

SEQ ID NO: 321668 - DNA, 25 bp, Homo sapien
ctctcatccaaggtgtttcagtggc

SEQ ID NO: 321669 - DNA, 25 bp, Homo sapien
ccttggtccgggctgatgctttgac

SEQ ID NO: 321670 - DNA, 25 bp, Homo sapien
ggcgagcacctgagctagcagagac

SEQ ID NO: 321671 - DNA, 25 bp, Homo sapien
cctggcgagcacctgagctagcaga

SEQ ID NO: 321672 - DNA, 25 bp, Homo sapien
gccgcagcggtactggaggcgcaga

SEQ ID NO: 321673 - DNA, 25 bp, Homo sapien
ttcccgatgggtcccagcttggacg

SEQ ID NO: 321674 - DNA, 25 bp, Homo sapien
caacttcccgatgggtcccagcttg

SEQ ID NO: 321675 - DNA, 25 bp, Homo sapien
agcttggacggtccgatgggcagca

SEQ ID NO: 321676 - DNA, 25 bp, Homo sapien
ggcagccggtccaacttcccgatgg

SEQ ID NO: 321677 - DNA, 25 bp, Homo sapien
tgacacttgattatgaacagtaaag

SEQ ID NO: 321678 - DNA, 25 bp, Homo sapien
taataaggactaattgacacttgat

SEQ ID NO: 321679 - DNA, 25 bp, Homo sapien
taaagttatatcacttctcataaaa

SEQ ID NO: 321680 - DNA, 25 bp, Homo sapien
attgacacttgattatgaacagtaa

SEQ ID NO: 321681 - DNA, 25 bp, Homo sapien
gaatcaagtggccatggataccttt

SEQ ID NO: 321682 - DNA, 25 bp, Homo sapien
cttttaatctctaacactgccgagt

SEQ ID NO: 321683 - DNA, 25 bp, Homo sapien
tggccatggatacctttcttgaaag

SEQ ID NO: 321684 - DNA, 25 bp, Homo sapien
ccgagtatgtgagtagactggaaag

SEQ ID NO: 321685 - DNA, 25 bp, Homo sapien
ggcatctgactagccgtaagagctt

SEQ ID NO: 321686 - DNA, 25 bp, Homo sapien
actagccgtaagagcttctgggtgg

SEQ ID NO: 321687 - DNA, 25 bp, Homo sapien
tgactagccgtaagagcttctgggt

SEQ ID NO: 321688 - DNA, 25 bp, Homo sapien
atctgactagccgtaagagcttctg

SEQ ID NO: 321689 - DNA, 25 bp, Homo sapien
ccgacgaaagacagattcaattgac

SEQ ID NO: 321690 - DNA, 25 bp, Homo sapien
ttcaaaatcttgtatccgacgaaag

SEQ ID NO: 321691 - DNA, 25 bp, Homo sapien
ggccttctcagaagctaataggaaa

SEQ ID NO: 321692 - DNA, 25 bp, Homo sapien
caagtagttgaaagccatgggatca

SEQ ID NO: 321693 - DNA, 25 bp, Homo sapien
gtctcgatctggatcccaaaggaca

SEQ ID NO: 321694 - DNA, 25 bp, Homo sapien
cagtctcgatctggatcccaaagga

SEQ ID NO: 321695 - DNA, 25 bp, Homo sapien
ctcgatctggatcccaaaggacatg

SEQ ID NO: 321696 - DNA, 25 bp, Homo sapien
tcagtctcgatctggatcccaaagg

SEQ ID NO: 321697 - DNA, 25 bp, Homo sapien
tggctgatggcattccagtactggg

SEQ ID NO: 321698 - DNA, 25 bp, Homo sapien
gatggcattccagtactgggttgtg

SEQ ID NO: 321699 - DNA, 25 bp, Homo sapien
tggcattccagtactgggttgtgaa

SEQ ID NO: 321700 - DNA, 25 bp, Homo sapien
gctgatggcattccagtactgggtt

SEQ ID NO: 321701 - DNA, 25 bp, Homo sapien
aagagtggggtcaccatagcataga

SEQ ID NO: 321702 - DNA, 25 bp, Homo sapien
tcaccatagcatagaacaaagtttc

SEQ ID NO: 321703 - DNA, 25 bp, Homo sapien
tagaatgtccgagtcctgggctcac

SEQ ID NO: 321704 - DNA, 25 bp, Homo sapien
gtagaatgtccgagtcctgggctca

SEQ ID NO: 321705 - DNA, 25 bp, Homo sapien
atacatgaccataagagagctatag

SEQ ID NO: 321706 - DNA, 25 bp, Homo sapien
tgataccacagccaaatgagaccca

SEQ ID NO: 321707 - DNA, 25 bp, Homo sapien
cataagagagctatagcacagtgat

SEQ ID NO: 321708 - DNA, 25 bp, Homo sapien
gagagctatagcacagtgataccac

SEQ ID NO: 321709 - DNA, 25 bp, Homo sapien
ggccttatgtctcccagtgcttgaa

SEQ ID NO: 321710 - DNA, 25 bp, Homo sapien
ggtagagaaggccttatgtctccca

SEQ ID NO: 321711 - DNA, 25 bp, Homo sapien
agaaggccttatgtctcccagtgct

SEQ ID NO: 321712 - DNA, 25 bp, Homo sapien
tagagaaggccttatgtctcccagt

SEQ ID NO: 321713 - DNA, 25 bp, Homo sapien
aacccagcacagtatgaccagtttg

SEQ ID NO: 321714 - DNA, 25 bp, Homo sapien
ttgggaactgtagaagagacatacc

SEQ ID NO: 321715 - DNA, 25 bp, Homo sapien
ctttcaggacaagagtataggatcc

SEQ ID NO: 321716 - DNA, 25 bp, Homo sapien
taatgagcttagagtgtagcaaaac

SEQ ID NO: 321717 - DNA, 25 bp, Homo sapien
gaagaggaagatctgaattgtccac

SEQ ID NO: 321718 - DNA, 25 bp, Homo sapien
tatagcattaggaaagttatcttcc

SEQ ID NO: 321719 - DNA, 25 bp, Homo sapien
cctctatagcattaggaaagttatc

SEQ ID NO: 321720 - DNA, 25 bp, Homo sapien
gcattaggaaagttatcttccaaga

SEQ ID NO: 321721 - DNA, 25 bp, Homo sapien
tagcctctatagcattaggaaagtt

SEQ ID NO: 321722 - DNA, 25 bp, Homo sapien
caagtgctgtgaagtagttgaggac

SEQ ID NO: 321723 - DNA, 25 bp, Homo sapien
aagtgctgtgaagtagttgaggaca

SEQ ID NO: 321724 - DNA, 25 bp, Homo sapien
gtagttgaggacatcagggatgtat

SEQ ID NO: 321725 - DNA, 25 bp, Homo sapien
tgaagtagttgaggacatcagggat

SEQ ID NO: 321726 - DNA, 25 bp, Homo sapien
tctgtctaaaagcaaacttccactt

SEQ ID NO: 321727 - DNA, 25 bp, Homo sapien
gacatctgtctaaaagcaaacttcc

SEQ ID NO: 321728 - DNA, 25 bp, Homo sapien
ccacagacatctgtctaaaagcaaa

SEQ ID NO: 321729 - DNA, 25 bp, Homo sapien
ctaggaccacagacatctgtctaaa

SEQ ID NO: 321730 - DNA, 25 bp, Homo sapien
gatgattcgtcttgtagttttggtt

SEQ ID NO: 321731 - DNA, 25 bp, Homo sapien
gatataagccatcttaactagggtt

SEQ ID NO: 321732 - DNA, 25 bp, Homo sapien
ccacatcctagccagtatttcttac

SEQ ID NO: 321733 - DNA, 25 bp, Homo sapien
tagccagtatttcttactgcctgtc

SEQ ID NO: 321734 - DNA, 25 bp, Homo sapien
gggccgaatgtccccctcagggtga

SEQ ID NO: 321735 - DNA, 25 bp, Homo sapien
atgtccccctcagggtgaattccac

SEQ ID NO: 321736 - DNA, 25 bp, Homo sapien
ctggggccgaatgtccccctcaggg

SEQ ID NO: 321737 - DNA, 25 bp, Homo sapien
ccgaatgtccccctcagggtgaatt

SEQ ID NO: 321738 - DNA, 25 bp, Homo sapien
gggctttgtgatcacctgggagcca

SEQ ID NO: 321739 - DNA, 25 bp, Homo sapien
ctgtacatctgggaccttggtgtct

SEQ ID NO: 321740 - DNA, 25 bp, Homo sapien
gctgtacatctgggaccttggtgtc

SEQ ID NO: 321741 - DNA, 25 bp, Homo sapien
tgtacatctgggaccttggtgtcta

SEQ ID NO: 321742 - DNA, 25 bp, Homo sapien
tacatctgggaccttggtgtctatc

SEQ ID NO: 321743 - DNA, 25 bp, Homo sapien
ccgaatgtccccctcagggtgaatt

SEQ ID NO: 321744 - DNA, 25 bp, Homo sapien
gggccgaatgtccccctcagggtga

SEQ ID NO: 321745 - DNA, 25 bp, Homo sapien
atgtccccctcagggtgaattccac

SEQ ID NO: 321746 - DNA, 25 bp, Homo sapien
ctggggccgaatgtccccctcaggg

SEQ ID NO: 321747 - DNA, 25 bp, Homo sapien
atcacctgggagctggatatcaact

SEQ ID NO: 321748 - DNA, 25 bp, Homo sapien
tgatctactgcatcctgttgctcag

SEQ ID NO: 321749 - DNA, 25 bp, Homo sapien
gcatcctgttgctcagctttggcct

SEQ ID NO: 321750 - DNA, 25 bp, Homo sapien
acctgggagctggatatcaacttgg

SEQ ID NO: 321751 - DNA, 25 bp, Homo sapien
tggctacctggtgactgccatcctc

SEQ ID NO: 321752 - DNA, 25 bp, Homo sapien
ttggcgtctatctgaggcctgatgg

SEQ ID NO: 321753 - DNA, 25 bp, Homo sapien
ctgtacatctgggaccttggcgtct

SEQ ID NO: 321754 - DNA, 25 bp, Homo sapien
cctgatggctacctggtgactgcca

SEQ ID NO: 321755 - DNA, 25 bp, Homo sapien
tgtggacccgtgtccacgtagtgcc

SEQ ID NO: 321756 - DNA, 25 bp, Homo sapien
ctgtggacccgtgtccacgtagtgc

SEQ ID NO: 321757 - DNA, 25 bp, Homo sapien
tccacgtagtgcctgatgtccacct

SEQ ID NO: 321758 - DNA, 25 bp, Homo sapien
gtccacgtagtgcctgatgtccacc

SEQ ID NO: 321759 - DNA, 25 bp, Homo sapien
gtgtcaatgtgtggcctgatgtaaa

SEQ ID NO: 321760 - DNA, 25 bp, Homo sapien
gaccaggtgtcaatgtgtggcctga

SEQ ID NO: 321761 - DNA, 25 bp, Homo sapien
ctgggaccaggtgtcaatgtgtggc

SEQ ID NO: 321762 - DNA, 25 bp, Homo sapien
tcaatgtgtggcctgatgtaaacct

SEQ ID NO: 321763 - DNA, 25 bp, Homo sapien
gggttgaatgtccaactgtggccag

SEQ ID NO: 321764 - DNA, 25 bp, Homo sapien
acctaggccacaggttgatacacag

SEQ ID NO: 321765 - DNA, 25 bp, Homo sapien
gctccaagtggccacctaggccaca

SEQ ID NO: 321766 - DNA, 25 bp, Homo sapien
tccaagtggccacctaggccacagg

SEQ ID NO: 321767 - DNA, 25 bp, Homo sapien
taaagctccaagtggccacctaggc

SEQ ID NO: 321768 - DNA, 25 bp, Homo sapien
gacaacaggcataggtgaacttcag

SEQ ID NO: 321769 - DNA, 25 bp, Homo sapien
ggtcttcaggcgctaggttgacaca

SEQ ID NO: 321770 - DNA, 25 bp, Homo sapien
agtctgtgccccaattaaacaccgg

SEQ ID NO: 321771 - DNA, 25 bp, Homo sapien
tagatacgagatggacactcaggcc

SEQ ID NO: 321772 - DNA, 25 bp, Homo sapien
aatccgtgaatatcccaacatctgt

SEQ ID NO: 321773 - DNA, 25 bp, Homo sapien
cactagtgaagctatgtgagcctgg

SEQ ID NO: 321774 - DNA, 25 bp, Homo sapien
tgagcctgggctagactgaagaaga

SEQ ID NO: 321775 - DNA, 25 bp, Homo sapien
tactggcctcaaaaatgaattgatg

SEQ ID NO: 321776 - DNA, 25 bp, Homo sapien
gattactaatcagatgaacaagtga

SEQ ID NO: 321777 - DNA, 25 bp, Homo sapien
caagtgattaacctttttatccagt

SEQ ID NO: 321778 - DNA, 25 bp, Homo sapien
aaaatgtgtcactgacttcatggaa

SEQ ID NO: 321779 - DNA, 25 bp, Homo sapien
ttagaaactttgattactaatcaga

SEQ ID NO: 321780 - DNA, 25 bp, Homo sapien
atcaagccccattgttgtctggaag

SEQ ID NO: 321781 - DNA, 25 bp, Homo sapien
ggatctattgcagaatcaagcccca

SEQ ID NO: 321782 - DNA, 25 bp, Homo sapien
ttgcagaatcaagccccattgttgt

SEQ ID NO: 321783 - DNA, 25 bp, Homo sapien
gaatcaagccccattgttgtctgga

SEQ ID NO: 321784 - DNA, 25 bp, Homo sapien
taaaagtccgtaaatgccgaatagc

SEQ ID NO: 321785 - DNA, 25 bp, Homo sapien
gaatcagacaggttcgtcttaggga

SEQ ID NO: 321786 - DNA, 25 bp, Homo sapien
gtaaatgccgaatagcagcagaaag

SEQ ID NO: 321787 - DNA, 25 bp, Homo sapien
aatcagacaggttcgtcttagggaa

SEQ ID NO: 321788 - DNA, 25 bp, Homo sapien
ttcaatttgttttctctcttgagaa

SEQ ID NO: 321789 - DNA, 25 bp, Homo sapien
tttctctcttgagaaagggaaacca

SEQ ID NO: 321790 - DNA, 25 bp, Homo sapien
tctcttgagaaagggaaaccatcag

SEQ ID NO: 321791 - DNA, 25 bp, Homo sapien
ttgttttctctcttgagaaagggaa

SEQ ID NO: 321792 - DNA, 25 bp, Homo sapien
ttttgagagtgcttgagctttcaga

SEQ ID NO: 321793 - DNA, 25 bp, Homo sapien
ttgagagtgcttgagctttcagaaa

SEQ ID NO: 321794 - DNA, 25 bp, Homo sapien
gagagtgcttgagctttcagaaaac

SEQ ID NO: 321795 - DNA, 25 bp, Homo sapien
ttttttgagagtgcttgagctttca

SEQ ID NO: 321796 - DNA, 25 bp, Homo sapien
ctgatcctctgtcccgcaaaagaaa

SEQ ID NO: 321797 - DNA, 25 bp, Homo sapien
atctgatcctctgtcccgcaaaaga

SEQ ID NO: 321798 - DNA, 25 bp, Homo sapien
tctgatcctctgtcccgcaaaagaa

SEQ ID NO: 321799 - DNA, 25 bp, Homo sapien
tgaacaaaccgattatttgtattga

SEQ ID NO: 321800 - DNA, 25 bp, Homo sapien
acactactacgtacagaaagcaaag

SEQ ID NO: 321801 - DNA, 25 bp, Homo sapien
gcataggaggcaacatagggtcata

SEQ ID NO: 321802 - DNA, 25 bp, Homo sapien
catagggtcataattcttctgagcc

SEQ ID NO: 321803 - DNA, 25 bp, Homo sapien
cactctatcgagacccatgctggga

SEQ ID NO: 321804 - DNA, 25 bp, Homo sapien
aacttaggctgaaacattgctccca

SEQ ID NO: 321805 - DNA, 25 bp, Homo sapien
caaaagtgcaatcctacccaggagt

SEQ ID NO: 321806 - DNA, 25 bp, Homo sapien
gagtattttctggtcgacttggcta

SEQ ID NO: 321807 - DNA, 25 bp, Homo sapien
gacaagtttgtgtggcccatattcc

SEQ ID NO: 321808 - DNA, 25 bp, Homo sapien
gataaattttgatcttcatggagga

SEQ ID NO: 321809 - DNA, 25 bp, Homo sapien
ctgtggcaggaaaagagaaagataa

SEQ ID NO: 321810 - DNA, 25 bp, Homo sapien
tttgatcttcatggaggagctcact

SEQ ID NO: 321811 - DNA, 25 bp, Homo sapien
ggagctcactgtccttgaatctcac

SEQ ID NO: 321812 - DNA, 25 bp, Homo sapien
ttttatgctgtttctccctataagt

SEQ ID NO: 321813 - DNA, 25 bp, Homo sapien
cctgtacttcttgattttatgctgt

SEQ ID NO: 321814 - DNA, 25 bp, Homo sapien
aaacctgtacttcttgattttatgc

SEQ ID NO: 321815 - DNA, 25 bp, Homo sapien
tatgctgtttctccctataagtttg

SEQ ID NO: 321816 - DNA, 25 bp, Homo sapien
ttcgttgtgctgctatgtttgtgtg

SEQ ID NO: 321817 - DNA, 25 bp, Homo sapien
gctggctttcgttgtgctgctatgt

SEQ ID NO: 321818 - DNA, 25 bp, Homo sapien
ggctttcgttgtgctgctatgtttg

SEQ ID NO: 321819 - DNA, 25 bp, Homo sapien
ctttcgttgtgctgctatgtttgtg

SEQ ID NO: 321820 - DNA, 25 bp, Homo sapien
agagatgttgaatatactagtcata

SEQ ID NO: 321821 - DNA, 25 bp, Homo sapien
ggactcagcggccagcctgagtctg

SEQ ID NO: 321822 - DNA, 25 bp, Homo sapien
cggccagcctgagtctgacagagga

SEQ ID NO: 321823 - DNA, 25 bp, Homo sapien
gctggactcagcggccagcctgagt

SEQ ID NO: 321824 - DNA, 25 bp, Homo sapien
tcagcggccagcctgagtctgacag

SEQ ID NO: 321825 - DNA, 25 bp, Homo sapien
aaagtccaagaaaagccctgtactg

SEQ ID NO: 321826 - DNA, 25 bp, Homo sapien
cataagtagagctccatttggagct

SEQ ID NO: 321827 - DNA, 25 bp, Homo sapien
cagaatgcccataagtagagctcca

SEQ ID NO: 321828 - DNA, 25 bp, Homo sapien
gaatgcccataagtagagctccatt

SEQ ID NO: 321829 - DNA, 25 bp, Homo sapien
gcccataagtagagctccatttgga

SEQ ID NO: 321830 - DNA, 25 bp, Homo sapien
cagtgttcctctattcaaatatctc

SEQ ID NO: 321831 - DNA, 25 bp, Homo sapien
aatatctcttttgagtgttgccctc

SEQ ID NO: 321832 - DNA, 25 bp, Homo sapien
tgtcctctcagtgttcctctattca

SEQ ID NO: 321833 - DNA, 25 bp, Homo sapien
aacaccaggagttgtaacgaaactg

SEQ ID NO: 321834 - DNA, 25 bp, Homo sapien
taaaattcgaacacataatgccaaa

SEQ ID NO: 321835 - DNA, 25 bp, Homo sapien
gatatgtggttaaaattcgaacaca

SEQ ID NO: 321836 - DNA, 25 bp, Homo sapien
tttgggcatccatgctaaagcaata

SEQ ID NO: 321837 - DNA, 25 bp, Homo sapien
ttgggcatccatgctaaagcaataa

SEQ ID NO: 321838 - DNA, 25 bp, Homo sapien
tacttctgctccaactaaaccaaaa

SEQ ID NO: 321839 - DNA, 25 bp, Homo sapien
atacttctgctccaactaaaccaaa

SEQ ID NO: 321840 - DNA, 25 bp, Homo sapien
gcataatcctccagatccatgtaaa

SEQ ID NO: 321841 - DNA, 25 bp, Homo sapien
tgtgcataatcctccagatccatgt

SEQ ID NO: 321842 - DNA, 25 bp, Homo sapien
tcctccagatccatgtaaaccaata

SEQ ID NO: 321843 - DNA, 25 bp, Homo sapien
taatcctccagatccatgtaaacca

SEQ ID NO: 321844 - DNA, 25 bp, Homo sapien
agtcaaaacaaggaatcctctcttc

SEQ ID NO: 321845 - DNA, 25 bp, Homo sapien
ttcctgccagcagactaatacatac

SEQ ID NO: 321846 - DNA, 25 bp, Homo sapien
aacaattcctgccagcagactaata

SEQ ID NO: 321847 - DNA, 25 bp, Homo sapien
caattcctgccagcagactaataca

SEQ ID NO: 321848 - DNA, 25 bp, Homo sapien
aatcccaaaacaattcctgccagca

SEQ ID NO: 321849 - DNA, 25 bp, Homo sapien
agaggctatggcgttattaagcata

SEQ ID NO: 321850 - DNA, 25 bp, Homo sapien
tccttatagaggctatggcgttatt

SEQ ID NO: 321851 - DNA, 25 bp, Homo sapien
ccttatagaggctatggcgttatta

SEQ ID NO: 321852 - DNA, 25 bp, Homo sapien
gctatggcgttattaagcataccac

SEQ ID NO: 321853 - DNA, 25 bp, Homo sapien
tgaaatatcttccttggtctggaat

SEQ ID NO: 321854 - DNA, 25 bp, Homo sapien
tcttccttggtctggaatgagcttt

SEQ ID NO: 321855 - DNA, 25 bp, Homo sapien
tatcttccttggtctggaatgagct

SEQ ID NO: 321856 - DNA, 25 bp, Homo sapien
taagccactgaaatatcttccttgg

SEQ ID NO: 321857 - DNA, 25 bp, Homo sapien
tgtcatccatactgctagcagccat

SEQ ID NO: 321858 - DNA, 25 bp, Homo sapien
tcatccatactgctagcagccatta

SEQ ID NO: 321859 - DNA, 25 bp, Homo sapien
gtcatccatactgctagcagccatt

SEQ ID NO: 321860 - DNA, 25 bp, Homo sapien
tgtgtaaaggacaacaacagcagga

SEQ ID NO: 321861 - DNA, 25 bp, Homo sapien
aaaggacaacaacagcaggagagac

SEQ ID NO: 321862 - DNA, 25 bp, Homo sapien
aggacaacaacagcaggagagacag

SEQ ID NO: 321863 - DNA, 25 bp, Homo sapien
gacaacaacagcaggagagacagca

SEQ ID NO: 321864 - DNA, 25 bp, Homo sapien
ttgaaataaccttactcgatttgta

SEQ ID NO: 321865 - DNA, 25 bp, Homo sapien
tgaaataaccttactcgatttgtaa

SEQ ID NO: 321866 - DNA, 25 bp, Homo sapien
aataaccttactcgatttgtaattg

SEQ ID NO: 321867 - DNA, 25 bp, Homo sapien
gagtccaagcccaactcgtattaga

SEQ ID NO: 321868 - DNA, 25 bp, Homo sapien
gaacattcctaattgtaaaaccagc

SEQ ID NO: 321869 - DNA, 25 bp, Homo sapien
actcgtattagaataatgttaaggg

SEQ ID NO: 321870 - DNA, 25 bp, Homo sapien
gaccatgcgttaggaacatggacat

SEQ ID NO: 321871 - DNA, 25 bp, Homo sapien
gttctcccagttgtagaaggttatg

SEQ ID NO: 321872 - DNA, 25 bp, Homo sapien
gattgtaggtgatactgtgtatttc

SEQ ID NO: 321873 - DNA, 25 bp, Homo sapien
ctcccagttgtagaaggttatgtaa

SEQ ID NO: 321874 - DNA, 25 bp, Homo sapien
cccagttgtagaaggttatgtaatt

SEQ ID NO: 321875 - DNA, 25 bp, Homo sapien
tgacccactgagagcttttaggcat

SEQ ID NO: 321876 - DNA, 25 bp, Homo sapien
gaggctgtgattgacccactgagag

SEQ ID NO: 321877 - DNA, 25 bp, Homo sapien
gaaactcttgactgctggaggctgt

SEQ ID NO: 321878 - DNA, 25 bp, Homo sapien
ggatctgggatgctaattcagaaac

SEQ ID NO: 321879 - DNA, 25 bp, Homo sapien
tagtagcgtccttagctccgcactt

SEQ ID NO: 321880 - DNA, 25 bp, Homo sapien
ccttagctccgcacttcttgcaggg

SEQ ID NO: 321881 - DNA, 25 bp, Homo sapien
agcgtccttagctccgcacttcttg

SEQ ID NO: 321882 - DNA, 25 bp, Homo sapien
ccttagtagcgtccttagctccgca

SEQ ID NO: 321883 - DNA, 25 bp, Homo sapien
cattcctgagtgaatcagttctggc

SEQ ID NO: 321884 - DNA, 25 bp, Homo sapien
ctacacattcctgagtgaatcagtt

SEQ ID NO: 321885 - DNA, 25 bp, Homo sapien
cacattcctgagtgaatcagttctg

SEQ ID NO: 321886 - DNA, 25 bp, Homo sapien
ttcctgagtgaatcagttctggcca

SEQ ID NO: 321887 - DNA, 25 bp, Homo sapien
cgcctctgagctggtctcgtgtgag

SEQ ID NO: 321888 - DNA, 25 bp, Homo sapien
agctggtctcgtgtgagctgctgct

SEQ ID NO: 321889 - DNA, 25 bp, Homo sapien
tagtaccagctcaaagtgtccgtga

SEQ ID NO: 321890 - DNA, 25 bp, Homo sapien
tgctgctggtagtgggctctgccct

SEQ ID NO: 321891 - DNA, 25 bp, Homo sapien
ccaaagtgctgcttgggctcaaggt

SEQ ID NO: 321892 - DNA, 25 bp, Homo sapien
cgagccgcttcatggtcccaaacca

SEQ ID NO: 321893 - DNA, 25 bp, Homo sapien
ctcaaggttgtaattatttgcagcc

SEQ ID NO: 321894 - DNA, 25 bp, Homo sapien
gagccgcttcatggtcccaaaccag

SEQ ID NO: 321895 - DNA, 25 bp, Homo sapien
ctggagcagcggacctccttgctta

SEQ ID NO: 321896 - DNA, 25 bp, Homo sapien
gcggacctccttgcttactttgaat

SEQ ID NO: 321897 - DNA, 25 bp, Homo sapien
gcagcggacctccttgcttactttg

SEQ ID NO: 321898 - DNA, 25 bp, Homo sapien
gagcagcggacctccttgcttactt

SEQ ID NO: 321899 - DNA, 25 bp, Homo sapien
tccagagggaaaaactgggtggtga

SEQ ID NO: 321900 - DNA, 25 bp, Homo sapien
gactggacagggatgccacaggggc

SEQ ID NO: 321901 - DNA, 25 bp, Homo sapien
gtgacagggactggacagggatgcc

SEQ ID NO: 321902 - DNA, 25 bp, Homo sapien
ctgggtggtgacagggactggacag

SEQ ID NO: 321903 - DNA, 25 bp, Homo sapien
atcagtctcccctggaaggccaaca

SEQ ID NO: 321904 - DNA, 25 bp, Homo sapien
agtctcccctggaaggccaacagct

SEQ ID NO: 321905 - DNA, 25 bp, Homo sapien
gttgatcagtctcccctggaaggcc

SEQ ID NO: 321906 - DNA, 25 bp, Homo sapien
gtgaggttgatcagtctcccctgga

SEQ ID NO: 321907 - DNA, 25 bp, Homo sapien
tcctctcccgtgtaagcaaggcaaa

SEQ ID NO: 321908 - DNA, 25 bp, Homo sapien
aggttgcaggttgaccagaactcac

SEQ ID NO: 321909 - DNA, 25 bp, Homo sapien
tggccacacaatggtcaagttggat

SEQ ID NO: 321910 - DNA, 25 bp, Homo sapien
ggtaaggagccagttccagacctgg

SEQ ID NO: 321911 - DNA, 25 bp, Homo sapien
caacccagccaagacccagtgcctt

SEQ ID NO: 321912 - DNA, 25 bp, Homo sapien
aacccagccaagacccagtgccttg

SEQ ID NO: 321913 - DNA, 25 bp, Homo sapien
cctgacccttatgattaacatggga

SEQ ID NO: 321914 - DNA, 25 bp, Homo sapien
gaaaagtgagagagtcctgaccctt

SEQ ID NO: 321915 - DNA, 25 bp, Homo sapien
ggccagatcttgaccccaatacagg

SEQ ID NO: 321916 - DNA, 25 bp, Homo sapien
gatatgaacaggcaacagctgggtt

SEQ ID NO: 321917 - DNA, 25 bp, Homo sapien
cacttagtaagcatggtatccgctc

SEQ ID NO: 321918 - DNA, 25 bp, Homo sapien
ttagtaagcatggtatccgctcagg

SEQ ID NO: 321919 - DNA, 25 bp, Homo sapien
gcctctgtgggcatccatctcctct

SEQ ID NO: 321920 - DNA, 25 bp, Homo sapien
tagtaagcatggtatccgctcaggg

SEQ ID NO: 321921 - DNA, 25 bp, Homo sapien
tctgacagatcatagccatgttagt

SEQ ID NO: 321922 - DNA, 25 bp, Homo sapien
cccacagtcacaggggccaatggat

SEQ ID NO: 321923 - DNA, 25 bp, Homo sapien
tttactacagcatagaattttgcct

SEQ ID NO: 321924 - DNA, 25 bp, Homo sapien
cacaggggccaatggattaaattat

SEQ ID NO: 321925 - DNA, 25 bp, Homo sapien
gcttcctggatggtgtaggatgaac

SEQ ID NO: 321926 - DNA, 25 bp, Homo sapien
cctggatggtgtaggatgaaccaca

SEQ ID NO: 321927 - DNA, 25 bp, Homo sapien
gatggtgtaggatgaaccacactcc

SEQ ID NO: 321928 - DNA, 25 bp, Homo sapien
aattgcttcctggatggtgtaggat

SEQ ID NO: 321929 - DNA, 25 bp, Homo sapien
gcattgtacaatatccccaggtcac

SEQ ID NO: 321930 - DNA, 25 bp, Homo sapien
tgattctacgaaccgtacagcccgg

SEQ ID NO: 321931 - DNA, 25 bp, Homo sapien
gaatgtacaatgctcagtgcctggg

SEQ ID NO: 321932 - DNA, 25 bp, Homo sapien
cagagactttgaccgcagttggcag

SEQ ID NO: 321933 - DNA, 25 bp, Homo sapien
gaagtttaatcgttggtccagccat

SEQ ID NO: 321934 - DNA, 25 bp, Homo sapien
aatatatctatgtgccatggcctgg

SEQ ID NO: 321935 - DNA, 25 bp, Homo sapien
gaatgtggcactaccaaaagaagac

SEQ ID NO: 321936 - DNA, 25 bp, Homo sapien
cagtgtgattcagtcctcagaccta

SEQ ID NO: 321937 - DNA, 25 bp, Homo sapien
taactctgcagtctgtaacatcatg

SEQ ID NO: 321938 - DNA, 25 bp, Homo sapien
tcatcagaaactgtcaatgtctgct

SEQ ID NO: 321939 - DNA, 25 bp, Homo sapien
ttactgtttatgctcatcagaaact

SEQ ID NO: 321940 - DNA, 25 bp, Homo sapien
atgctcatcagaaactgtcaatgtc

SEQ ID NO: 321941 - DNA, 25 bp, Homo sapien
tgcacagtttgaactgatgctgttc

SEQ ID NO: 321942 - DNA, 25 bp, Homo sapien
gctgttctatataaggtacttttcc

SEQ ID NO: 321943 - DNA, 25 bp, Homo sapien
cagacaggcataattaggtcctcag

SEQ ID NO: 321944 - DNA, 25 bp, Homo sapien
tttgcagacaggcataattaggtcc

SEQ ID NO: 321945 - DNA, 25 bp, Homo sapien
aggacaggtgttgtgttaatctcac

SEQ ID NO: 321946 - DNA, 25 bp, Homo sapien
tcacacagtaaggacaggtgttgtg

SEQ ID NO: 321947 - DNA, 25 bp, Homo sapien
cacagtaaggacaggtgttgtgtta

SEQ ID NO: 321948 - DNA, 25 bp, Homo sapien
atctctgactacagtgctatatttt

SEQ ID NO: 321949 - DNA, 25 bp, Homo sapien
acttttttataagaatgacatcttc

SEQ ID NO: 321950 - DNA, 25 bp, Homo sapien
ccatttttgtgatcgaagaattctt

SEQ ID NO: 321951 - DNA, 25 bp, Homo sapien
ggcaccacctagcagagtcagtgaa

SEQ ID NO: 321952 - DNA, 25 bp, Homo sapien
ggtggcacttaggtgtgtaaaagca

SEQ ID NO: 321953 - DNA, 25 bp, Homo sapien
tacttcccgtgaccacggcagtgca

SEQ ID NO: 321954 - DNA, 25 bp, Homo sapien
gacacgagtacttcccgtgaccacg

SEQ ID NO: 321955 - DNA, 25 bp, Homo sapien
gagtacttcccgtgaccacggcagt

SEQ ID NO: 321956 - DNA, 25 bp, Homo sapien
cccgaagacacgagtacttcccgtg

SEQ ID NO: 321957 - DNA, 25 bp, Homo sapien
tgtggatggcagtgcaggttgattc

SEQ ID NO: 321958 - DNA, 25 bp, Homo sapien
gatatctgtgtggatggcagtgcag

SEQ ID NO: 321959 - DNA, 25 bp, Homo sapien
gatggcagtgcaggttgattcttct

SEQ ID NO: 321960 - DNA, 25 bp, Homo sapien
tggatggcagtgcaggttgattctt

SEQ ID NO: 321961 - DNA, 25 bp, Homo sapien
cgcgaacaccccatcaactacccgg

SEQ ID NO: 321962 - DNA, 25 bp, Homo sapien
catctacgcccgaggcctcagccat

SEQ ID NO: 321963 - DNA, 25 bp, Homo sapien
ccttgaaatgccctaaggttcaggg

SEQ ID NO: 321964 - DNA, 25 bp, Homo sapien
ggcttcatggttgctgcttcatggg

SEQ ID NO: 321965 - DNA, 25 bp, Homo sapien
ccaaacacggaataaaggcaaacat

SEQ ID NO: 321966 - DNA, 25 bp, Homo sapien
atcaagtaccaaacacggaataaag

SEQ ID NO: 321967 - DNA, 25 bp, Homo sapien
tttgtcttcttagagtcaggattcc

SEQ ID NO: 321968 - DNA, 25 bp, Homo sapien
tattctctgcctgggtttgtcctgc

SEQ ID NO: 321969 - DNA, 25 bp, Homo sapien
tcttctggactcctcgggctctccc

SEQ ID NO: 321970 - DNA, 25 bp, Homo sapien
agctccagggctgaagggactgtgc

SEQ ID NO: 321971 - DNA, 25 bp, Homo sapien
gggctgaagggactgtgctgtccat

SEQ ID NO: 321972 - DNA, 25 bp, Homo sapien
ccttgggttcagtgccagccgctgg

SEQ ID NO: 321973 - DNA, 25 bp, Homo sapien
tggggcactcctgacaccgatcgtt

SEQ ID NO: 321974 - DNA, 25 bp, Homo sapien
agccaccccagggttgattctgtaa

SEQ ID NO: 321975 - DNA, 25 bp, Homo sapien
atcagcacggaccagcactccactg

SEQ ID NO: 321976 - DNA, 25 bp, Homo sapien
ccaaagagcccagtcctaaagccac

SEQ ID NO: 321977 - DNA, 25 bp, Homo sapien
gatttgctcattgaactgagcttgg

SEQ ID NO: 321978 - DNA, 25 bp, Homo sapien
tgctcattgaactgagcttggtcat

SEQ ID NO: 321979 - DNA, 25 bp, Homo sapien
gctcattgaactgagcttggtcatt

SEQ ID NO: 321980 - DNA, 25 bp, Homo sapien
tttgctcattgaactgagcttggtc

SEQ ID NO: 321981 - DNA, 25 bp, Homo sapien
catgacacagtccaccactaatttc

SEQ ID NO: 321982 - DNA, 25 bp, Homo sapien
gtaaagttgcacacagtctgagttt

SEQ ID NO: 321983 - DNA, 25 bp, Homo sapien
acaggcgacatggttcatgacacag

SEQ ID NO: 321984 - DNA, 25 bp, Homo sapien
ccgagtacaggcgacatggttcatg

SEQ ID NO: 321985 - DNA, 25 bp, Homo sapien
gggctggtgtgcagagcagggtctg

SEQ ID NO: 321986 - DNA, 25 bp, Homo sapien
ctgcgtcggcgtggcagcgtgctgt

SEQ ID NO: 321987 - DNA, 25 bp, Homo sapien
gctggtgtgcagagcagggtctgcg

SEQ ID NO: 321988 - DNA, 25 bp, Homo sapien
tggtgtgcagagcagggtctgcgtc

SEQ ID NO: 321989 - DNA, 25 bp, Homo sapien
tcctataaaggatcctcttagctct

SEQ ID NO: 321990 - DNA, 25 bp, Homo sapien
tggagggacgatacagacattaatc

SEQ ID NO: 321991 - DNA, 25 bp, Homo sapien
tcatattcatttcagttaccctaca

SEQ ID NO: 321992 - DNA, 25 bp, Homo sapien
gggaaataaggcagataactactgc

SEQ ID NO: 321993 - DNA, 25 bp, Homo sapien
gtgcatgtgaaactcaccgtggaag

SEQ ID NO: 321994 - DNA, 25 bp, Homo sapien
gacttgcaatttgtatccactgaca

SEQ ID NO: 321995 - DNA, 25 bp, Homo sapien
cacttaagttctcggaagtgctgga

SEQ ID NO: 321996 - DNA, 25 bp, Homo sapien
gaagcatccctgcacaaaacctctg

SEQ ID NO: 321997 - DNA, 25 bp, Homo sapien
ggaccgggatccatgtgtctttcct

SEQ ID NO: 321998 - DNA, 25 bp, Homo sapien
aggaggaccgggatccatgtgtctt

SEQ ID NO: 321999 - DNA, 25 bp, Homo sapien
tgtctttcctggtgactaggatgtc

SEQ ID NO: 322000 - DNA, 25 bp, Homo sapien
tcggaggagaacaagtgcgtggagc

SEQ ID NO: 322001 - DNA, 25 bp, Homo sapien
aggttcttccgtacaatttaagatg

SEQ ID NO: 322002 - DNA, 25 bp, Homo sapien
tcagtcttttgaattagatgcataa

SEQ ID NO: 322003 - DNA, 25 bp, Homo sapien
gccctgacagaactgtactcagtct

SEQ ID NO: 322004 - DNA, 25 bp, Homo sapien
cttccgtacaatttaagatgtaggg

SEQ ID NO: 322005 - DNA, 25 bp, Homo sapien
cagtgtgcttccaactggctcataa

SEQ ID NO: 322006 - DNA, 25 bp, Homo sapien
aactggctcataatcaacttcctgg

SEQ ID NO: 322007 - DNA, 25 bp, Homo sapien
ggctcataatcaacttcctggtata

SEQ ID NO: 322008 - DNA, 25 bp, Homo sapien
ctggctcataatcaacttcctggta

SEQ ID NO: 322009 - DNA, 25 bp, Homo sapien
catttataaaggttctgataaatcc

SEQ ID NO: 322010 - DNA, 25 bp, Homo sapien
aatcctgccggttttccagacatgg

SEQ ID NO: 322011 - DNA, 25 bp, Homo sapien
gacatggaaagaacttgaattctgg

SEQ ID NO: 322012 - DNA, 25 bp, Homo sapien
aaaggttctgataaatcctgccggt

SEQ ID NO: 322013 - DNA, 25 bp, Homo sapien
ccataggcaaatcccgccaactccc

SEQ ID NO: 322014 - DNA, 25 bp, Homo sapien
ctggatataccgcaagccataggca

SEQ ID NO: 322015 - DNA, 25 bp, Homo sapien
tccaccacttaacatcaaagggaca

SEQ ID NO: 322016 - DNA, 25 bp, Homo sapien
atataccgcaagccataggcaaatc

SEQ ID NO: 322017 - DNA, 25 bp, Homo sapien
tgtaaattacaaatgtggtacccaa

SEQ ID NO: 322018 - DNA, 25 bp, Homo sapien
ctgcctatcacagccaggtgacaat

SEQ ID NO: 322019 - DNA, 25 bp, Homo sapien
tgcctatcacagccaggtgacaatg

SEQ ID NO: 322020 - DNA, 25 bp, Homo sapien
ggattcatcccaaaggtaaagccca

SEQ ID NO: 322021 - DNA, 25 bp, Homo sapien
tggattcatcccaaaggtaaagccc

SEQ ID NO: 322022 - DNA, 25 bp, Homo sapien
atggattcatcccaaaggtaaagcc

SEQ ID NO: 322023 - DNA, 25 bp, Homo sapien
cccttaagcacagaacctggtgttc

SEQ ID NO: 322024 - DNA, 25 bp, Homo sapien
cactgggcacaagcatcatgggttc

SEQ ID NO: 322025 - DNA, 25 bp, Homo sapien
ccctaggcttaggttgtagtgcggc

SEQ ID NO: 322026 - DNA, 25 bp, Homo sapien
tgttccataggccacaagaagtttt

SEQ ID NO: 322027 - DNA, 25 bp, Homo sapien
gtttcattataagtatctattatca

SEQ ID NO: 322028 - DNA, 25 bp, Homo sapien
cattataagtatctattatcatttg

SEQ ID NO: 322029 - DNA, 25 bp, Homo sapien
ggcagatagatgggtactgtccttc

SEQ ID NO: 322030 - DNA, 25 bp, Homo sapien
gggcagatagatgggtactgtcctt

SEQ ID NO: 322031 - DNA, 25 bp, Homo sapien
gcagatagatgggtactgtccttca

SEQ ID NO: 322032 - DNA, 25 bp, Homo sapien
tgggcagatagatgggtactgtcct

SEQ ID NO: 322033 - DNA, 25 bp, Homo sapien
cctggcttccacgtgcctccaggca

SEQ ID NO: 322034 - DNA, 25 bp, Homo sapien
ctcctggcttccacgtgcctccagg

SEQ ID NO: 322035 - DNA, 25 bp, Homo sapien
ctggcttccacgtgcctccaggcat

SEQ ID NO: 322036 - DNA, 25 bp, Homo sapien
tcctggcttccacgtgcctccaggc

SEQ ID NO: 322037 - DNA, 25 bp, Homo sapien
caatatacttgatcagttctgaaca

SEQ ID NO: 322038 - DNA, 25 bp, Homo sapien
taatgtagtaagagctatatgctgc

SEQ ID NO: 322039 - DNA, 25 bp, Homo sapien
cgcctggcctaacatcgtattgtct

SEQ ID NO: 322040 - DNA, 25 bp, Homo sapien
tagtcccatctcctagctgttcaaa

SEQ ID NO: 322041 - DNA, 25 bp, Homo sapien
cattgtggcaattaggtccaggaga

SEQ ID NO: 322042 - DNA, 25 bp, Homo sapien
gacatgagcagatcgtgaaactctc

SEQ ID NO: 322043 - DNA, 25 bp, Homo sapien
ctgtatccagagtgcccctcgcttg

SEQ ID NO: 322044 - DNA, 25 bp, Homo sapien
gacggttggaaacgtgtgcctatca

SEQ ID NO: 322045 - DNA, 25 bp, Homo sapien
taaccagagaggcatgaagttcaat

SEQ ID NO: 322046 - DNA, 25 bp, Homo sapien
tttcatggcatgtagatgacacaga

SEQ ID NO: 322047 - DNA, 25 bp, Homo sapien
gaaattgacaattgattttaagact

SEQ ID NO: 322048 - DNA, 25 bp, Homo sapien
tctcatgacataatgcaatcacagt

SEQ ID NO: 322049 - DNA, 25 bp, Homo sapien
tattcatgagttgagagactcatca

SEQ ID NO: 322050 - DNA, 25 bp, Homo sapien
tcttttttgaacttcgtgtctcatc

SEQ ID NO: 322051 - DNA, 25 bp, Homo sapien
ttcttttttgaacttcgtgtctcat

SEQ ID NO: 322052 - DNA, 25 bp, Homo sapien
ttttttgaacttcgtgtctcatctt

SEQ ID NO: 322053 - DNA, 25 bp, Homo sapien
cttttttgaacttcgtgtctcatct

SEQ ID NO: 322054 - DNA, 25 bp, Homo sapien
caatgtccttcaatggacactgtgt

SEQ ID NO: 322055 - DNA, 25 bp, Homo sapien
tcaatggacactgtgttcggcttag

SEQ ID NO: 322056 - DNA, 25 bp, Homo sapien
attttcctgccacaggtctctttct

SEQ ID NO: 322057 - DNA, 25 bp, Homo sapien
tctttctttttcatgagtatgagaa

SEQ ID NO: 322058 - DNA, 25 bp, Homo sapien
tgattttcctgccacaggtctcttt

SEQ ID NO: 322059 - DNA, 25 bp, Homo sapien
tttctttttcatgagtatgagaagt

SEQ ID NO: 322060 - DNA, 25 bp, Homo sapien
tctttttcatacaactcttcagcct

SEQ ID NO: 322061 - DNA, 25 bp, Homo sapien
ttccaatgatttgagagtcagttta

SEQ ID NO: 322062 - DNA, 25 bp, Homo sapien
gatttgagagtcagtttagattgtt

SEQ ID NO: 322063 - DNA, 25 bp, Homo sapien
tcagtttgtgtcctatattgctctt

SEQ ID NO: 322064 - DNA, 25 bp, Homo sapien
tgtagttaaatatacttatcttaaa

SEQ ID NO: 322065 - DNA, 25 bp, Homo sapien
ctgtagttaaatatacttatcttaa

SEQ ID NO: 322066 - DNA, 25 bp, Homo sapien
ctttcaagattctgatgctctgtga

SEQ ID NO: 322067 - DNA, 25 bp, Homo sapien
ttcctttcaagattctgatgctctg

SEQ ID NO: 322068 - DNA, 25 bp, Homo sapien
tctgtttcagatagtaccttttgta

SEQ ID NO: 322069 - DNA, 25 bp, Homo sapien
tagtaccttttgtagtatgctaata

SEQ ID NO: 322070 - DNA, 25 bp, Homo sapien
cacatgcagctgttgcattcttgat

SEQ ID NO: 322071 - DNA, 25 bp, Homo sapien
cattcttgattttcgataggttaac

SEQ ID NO: 322072 - DNA, 25 bp, Homo sapien
tttcacatgcagctgttgcattctt

SEQ ID NO: 322073 - DNA, 25 bp, Homo sapien
tatcctctattgatctttcacatgc

SEQ ID NO: 322074 - DNA, 25 bp, Homo sapien
tctcactgctatacttccactgcta

SEQ ID NO: 322075 - DNA, 25 bp, Homo sapien
accttggtgatgtactcttgctata

SEQ ID NO: 322076 - DNA, 25 bp, Homo sapien
ctcttgctataggtgtggttggaga

SEQ ID NO: 322077 - DNA, 25 bp, Homo sapien
catctctctcactgctatacttcca

SEQ ID NO: 322078 - DNA, 25 bp, Homo sapien
ggcaggtccagcggcagccacaggt

SEQ ID NO: 322079 - DNA, 25 bp, Homo sapien
ccatctggctggcaagtcacggtgt

SEQ ID NO: 322080 - DNA, 25 bp, Homo sapien
cagttgacccgatgactcttcagca

SEQ ID NO: 322081 - DNA, 25 bp, Homo sapien
cccggtcacagttgacccgatgact

SEQ ID NO: 322082 - DNA, 25 bp, Homo sapien
gtctggcaaggtccagacgtccccg

SEQ ID NO: 322083 - DNA, 25 bp, Homo sapien
ccatcctcatccatgcgaatcctaa

SEQ ID NO: 322084 - DNA, 25 bp, Homo sapien
atcctcatccatgcgaatcctaaca

SEQ ID NO: 322085 - DNA, 25 bp, Homo sapien
cctcatccatgcgaatcctaacaaa

SEQ ID NO: 322086 - DNA, 25 bp, Homo sapien
tcatccatgcgaatcctaacaaatc

SEQ ID NO: 322087 - DNA, 25 bp, Homo sapien
gaccatggtagggaggtcttcgatt

SEQ ID NO: 322088 - DNA, 25 bp, Homo sapien
gccaagatccgtagctgggctgcat

SEQ ID NO: 322089 - DNA, 25 bp, Homo sapien
tgcccaaggtgaccatggtagggag

SEQ ID NO: 322090 - DNA, 25 bp, Homo sapien
gcatcgtagcgatctccaattccaa

SEQ ID NO: 322091 - DNA, 25 bp, Homo sapien
cggcctggcaccatgcatttctgaa

SEQ ID NO: 322092 - DNA, 25 bp, Homo sapien
cctggcaccatgcatttctgaagtc

SEQ ID NO: 322093 - DNA, 25 bp, Homo sapien
ggcctggcaccatgcatttctgaag

SEQ ID NO: 322094 - DNA, 25 bp, Homo sapien
tgctgcatccactgaatccacagag

SEQ ID NO: 322095 - DNA, 25 bp, Homo sapien
gagcactgacccctgagtgagagga

SEQ ID NO: 322096 - DNA, 25 bp, Homo sapien
gaaatgaaagccttagcaaaactct

SEQ ID NO: 322097 - DNA, 25 bp, Homo sapien
tcaaaagaagaagctgggaaactgg

SEQ ID NO: 322098 - DNA, 25 bp, Homo sapien
catccaggagaaggatcacgtccag

SEQ ID NO: 322099 - DNA, 25 bp, Homo sapien
ctatattggcttttgaaatgaaagc

SEQ ID NO: 322100 - DNA, 25 bp, Homo sapien
ggcactggccgccaggcctacaacc

SEQ ID NO: 322101 - DNA, 25 bp, Homo sapien
caaagataaccaggaaggtgagcac

SEQ ID NO: 322102 - DNA, 25 bp, Homo sapien
ctgcaaagataaccaggaaggtgag

SEQ ID NO: 322103 - DNA, 25 bp, Homo sapien
gccaggcctacaacctgacatccca

SEQ ID NO: 322104 - DNA, 25 bp, Homo sapien
cagctcctgaacgttggcattaggg

SEQ ID NO: 322105 - DNA, 25 bp, Homo sapien
ctccagctcctgaacgttggcatta

SEQ ID NO: 322106 - DNA, 25 bp, Homo sapien
gggcattgggccagccgatcctctc

SEQ ID NO: 322107 - DNA, 25 bp, Homo sapien
cctgaacgttggcattagggcccac

SEQ ID NO: 322108 - DNA, 25 bp, Homo sapien
gccctggacgtagcggacaaagttc

SEQ ID NO: 322109 - DNA, 25 bp, Homo sapien
tactgcagcaccgtgacgtggatgc

SEQ ID NO: 322110 - DNA, 25 bp, Homo sapien
catgaactccttgctcctgttgaag

SEQ ID NO: 322111 - DNA, 25 bp, Homo sapien
gcttcagggcggtcgatcttgctga

SEQ ID NO: 322112 - DNA, 25 bp, Homo sapien
gggagccgtcgtggtactccaccac

SEQ ID NO: 322113 - DNA, 25 bp, Homo sapien
ccgatgtaggcgtgggagccgtcgt

SEQ ID NO: 322114 - DNA, 25 bp, Homo sapien
cttgagcccgatgtaggcgtgggag

SEQ ID NO: 322115 - DNA, 25 bp, Homo sapien
cgtgggagccgtcgtggtactccac

SEQ ID NO: 322116 - DNA, 25 bp, Homo sapien
aggagatgcgcagccgctccatcat

SEQ ID NO: 322117 - DNA, 25 bp, Homo sapien
ctaggagatgcgcagccgctccatc

SEQ ID NO: 322118 - DNA, 25 bp, Homo sapien
atgcgcagccgctccatcatgtcca

SEQ ID NO: 322119 - DNA, 25 bp, Homo sapien
agatgcgcagccgctccatcatgtc

SEQ ID NO: 322120 - DNA, 25 bp, Homo sapien
ttcaaactcagcctcggacagcctg

SEQ ID NO: 322121 - DNA, 25 bp, Homo sapien
cctgctgcagtagaaatcgtgcaac

SEQ ID NO: 322122 - DNA, 25 bp, Homo sapien
tagcctgctgcagtagaaatcgtgc

SEQ ID NO: 322123 - DNA, 25 bp, Homo sapien
gcctgctgcagtagaaatcgtgcaa

SEQ ID NO: 322124 - DNA, 25 bp, Homo sapien
ccggctcctggcaggcttcacaggt

SEQ ID NO: 322125 - DNA, 25 bp, Homo sapien
aggtgagggtgacaccatcacagtg

SEQ ID NO: 322126 - DNA, 25 bp, Homo sapien
ctgtgggaggtaccaccaggcctcc

SEQ ID NO: 322127 - DNA, 25 bp, Homo sapien
gcatctgtgggaggtaccaccaggc

SEQ ID NO: 322128 - DNA, 25 bp, Homo sapien
tgcttgcagcttcagcgtgcaccgt

SEQ ID NO: 322129 - DNA, 25 bp, Homo sapien
ggacttctgtccacacactgcttgc

SEQ ID NO: 322130 - DNA, 25 bp, Homo sapien
cccagtaaagctgacaaggcggcag

SEQ ID NO: 322131 - DNA, 25 bp, Homo sapien
gcttcagcgtgcaccgtggcagctg

SEQ ID NO: 322132 - DNA, 25 bp, Homo sapien
tcgttcttgtttgtgcagatggtgg

SEQ ID NO: 322133 - DNA, 25 bp, Homo sapien
cccaggcagtgttcgttcttgtttg

SEQ ID NO: 322134 - DNA, 25 bp, Homo sapien
agtgttcgttcttgtttgtgcagat

SEQ ID NO: 322135 - DNA, 25 bp, Homo sapien
gttcttgtttgtgcagatggtggtg

SEQ ID NO: 322136 - DNA, 25 bp, Homo sapien
cactgggattcaaggtgactttctt

SEQ ID NO: 322137 - DNA, 25 bp, Homo sapien
tcagggtcaacgcaggtctgcaaaa

SEQ ID NO: 322138 - DNA, 25 bp, Homo sapien
gtcttcagggtcaacgcaggtctgc

SEQ ID NO: 322139 - DNA, 25 bp, Homo sapien
agggtcaacgcaggtctgcaaaagc

SEQ ID NO: 322140 - DNA, 25 bp, Homo sapien
cagtcttcagggtcaacgcaggtct

SEQ ID NO: 322141 - DNA, 25 bp, Homo sapien
gctcagggtgctgacacgtgacttg

SEQ ID NO: 322142 - DNA, 25 bp, Homo sapien
gcacagctgttatagcgccactcac

SEQ ID NO: 322143 - DNA, 25 bp, Homo sapien
tgctgacacgtgacttgacaggcag

SEQ ID NO: 322144 - DNA, 25 bp, Homo sapien
caggtgcacagctgttatagcgcca

SEQ ID NO: 322145 - DNA, 25 bp, Homo sapien
cccggagattcctctcctcgcagct

SEQ ID NO: 322146 - DNA, 25 bp, Homo sapien
actcatacccgttctcccggagatt

SEQ ID NO: 322147 - DNA, 25 bp, Homo sapien
cagacccatgtggtgatggcctgcg

SEQ ID NO: 322148 - DNA, 25 bp, Homo sapien
actgcagacccatgtggtgatggcc

SEQ ID NO: 322149 - DNA, 25 bp, Homo sapien
cccatgtggtgatggcctgcgccat

SEQ ID NO: 322150 - DNA, 25 bp, Homo sapien
gactgcagacccatgtggtgatggc

SEQ ID NO: 322151 - DNA, 25 bp, Homo sapien
aatgtggccgtcctccaggtcacca

SEQ ID NO: 322152 - DNA, 25 bp, Homo sapien
atgtggccgtcctccaggtcaccac

SEQ ID NO: 322153 - DNA, 25 bp, Homo sapien
caggtgtcgtaaatgcagacatcca

SEQ ID NO: 322154 - DNA, 25 bp, Homo sapien
cagcaatggtgtcgcagaagcaggc

SEQ ID NO: 322155 - DNA, 25 bp, Homo sapien
ggcgcagtccccaatggactcacag

SEQ ID NO: 322156 - DNA, 25 bp, Homo sapien
ggagcaggtgtcgtaaatgcagaca

SEQ ID NO: 322157 - DNA, 25 bp, Homo sapien
ttgttgcagtcctggaagacgtcac

SEQ ID NO: 322158 - DNA, 25 bp, Homo sapien
tcactggtaaggattctacaggagg

SEQ ID NO: 322159 - DNA, 25 bp, Homo sapien
cttgttgcagtcctggaagacgtca

SEQ ID NO: 322160 - DNA, 25 bp, Homo sapien
aaggattctacaggaggaatccacc

SEQ ID NO: 322161 - DNA, 25 bp, Homo sapien
ccagacgtagttttctggtgtcagc

SEQ ID NO: 322162 - DNA, 25 bp, Homo sapien
tggtgtcagcagactgcgagctcac

SEQ ID NO: 322163 - DNA, 25 bp, Homo sapien
tctggtgtcagcagactgcgagctc

SEQ ID NO: 322164 - DNA, 25 bp, Homo sapien
tttctggtgtcagcagactgcgagc

SEQ ID NO: 322165 - DNA, 25 bp, Homo sapien
ggatgccatcaaaattcccacacag

SEQ ID NO: 322166 - DNA, 25 bp, Homo sapien
ctggatgccatcaaaattcccacac

SEQ ID NO: 322167 - DNA, 25 bp, Homo sapien
tctggatgccatcaaaattcccaca

SEQ ID NO: 322168 - DNA, 25 bp, Homo sapien
tggatgccatcaaaattcccacaca

SEQ ID NO: 322169 - DNA, 25 bp, Homo sapien
ccttatttcctcctctgaactggat

SEQ ID NO: 322170 - DNA, 25 bp, Homo sapien
tttcctcctctgaactggatttcat

SEQ ID NO: 322171 - DNA, 25 bp, Homo sapien
cttatttcctcctctgaactggatt

SEQ ID NO: 322172 - DNA, 25 bp, Homo sapien
tatttcctcctctgaactggatttc

SEQ ID NO: 322173 - DNA, 25 bp, Homo sapien
tgtacgctactttacagcatcctct

SEQ ID NO: 322174 - DNA, 25 bp, Homo sapien
tacgctactttacagcatcctcttg

SEQ ID NO: 322175 - DNA, 25 bp, Homo sapien
ttgattgtacgctactttacagcat

SEQ ID NO: 322176 - DNA, 25 bp, Homo sapien
gattgtacgctactttacagcatcc

SEQ ID NO: 322177 - DNA, 25 bp, Homo sapien
tctatcacaataagcatctgttcca

SEQ ID NO: 322178 - DNA, 25 bp, Homo sapien
tctgttccactaaattccactgcag

SEQ ID NO: 322179 - DNA, 25 bp, Homo sapien
catgcccatgcatgcttggggaagc

SEQ ID NO: 322180 - DNA, 25 bp, Homo sapien
cagaagccagatgcatttcatgccc

SEQ ID NO: 322181 - DNA, 25 bp, Homo sapien
gctttctatcttctataagctttac

SEQ ID NO: 322182 - DNA, 25 bp, Homo sapien
ttctgtaagctttctatcttctata

SEQ ID NO: 322183 - DNA, 25 bp, Homo sapien
gcttagaaaagccatcatttctttc

SEQ ID NO: 322184 - DNA, 25 bp, Homo sapien
gactcttatgcttagaaaagccatc

SEQ ID NO: 322185 - DNA, 25 bp, Homo sapien
tgagcttctggtggctgattcatcc

SEQ ID NO: 322186 - DNA, 25 bp, Homo sapien
cagggaaagccggtgaagaattaag

SEQ ID NO: 322187 - DNA, 25 bp, Homo sapien
tggttccaggttaaatgatcagctc

SEQ ID NO: 322188 - DNA, 25 bp, Homo sapien
gaaccgtaatgcgtagcaggtggca

SEQ ID NO: 322189 - DNA, 25 bp, Homo sapien
tttgtaatgcaatgttttggttcat

SEQ ID NO: 322190 - DNA, 25 bp, Homo sapien
tttttgtaatgcaatgttttggttc

SEQ ID NO: 322191 - DNA, 25 bp, Homo sapien
caagctgtcaactgtataaagattt

SEQ ID NO: 322192 - DNA, 25 bp, Homo sapien
ctacaagctgtcaactgtataaaga

SEQ ID NO: 322193 - DNA, 25 bp, Homo sapien
tacatgtggataaactacaagaatg

SEQ ID NO: 322194 - DNA, 25 bp, Homo sapien
ttatgattgtttttcaggcctctca

SEQ ID NO: 322195 - DNA, 25 bp, Homo sapien
tgaatgctgtgaaattcatgaaaca

SEQ ID NO: 322196 - DNA, 25 bp, Homo sapien
gaataaaaccttaggatattccatg

SEQ ID NO: 322197 - DNA, 25 bp, Homo sapien
tcggtttctttgagaccgaagcttc

SEQ ID NO: 322198 - DNA, 25 bp, Homo sapien
cgcagacagaggcccactaaagaca

SEQ ID NO: 322199 - DNA, 25 bp, Homo sapien
gacagaggcccactaaagacacgct

SEQ ID NO: 322200 - DNA, 25 bp, Homo sapien
cagacagaggcccactaaagacacg

SEQ ID NO: 322201 - DNA, 25 bp, Homo sapien
agacagaggcccactaaagacacgc

SEQ ID NO: 322202 - DNA, 25 bp, Homo sapien
tgtcccgaatctgttttgtcgaccc

SEQ ID NO: 322203 - DNA, 25 bp, Homo sapien
ccgaatctgttttgtcgaccccctg

SEQ ID NO: 322204 - DNA, 25 bp, Homo sapien
aatctgttttgtcgaccccctggat

SEQ ID NO: 322205 - DNA, 25 bp, Homo sapien
gtgtcccgaatctgttttgtcgacc

SEQ ID NO: 322206 - DNA, 25 bp, Homo sapien
aggccttgatgtaaaaatcgatgat

SEQ ID NO: 322207 - DNA, 25 bp, Homo sapien
ccttgatgtaaaaatcgatgatgct

SEQ ID NO: 322208 - DNA, 25 bp, Homo sapien
atggaggccttgatgtaaaaatcga

SEQ ID NO: 322209 - DNA, 25 bp, Homo sapien
tgtaaaaatcgatgatgctttcttg

SEQ ID NO: 322210 - DNA, 25 bp, Homo sapien
ctgaacgtggggcaggagagtccca

SEQ ID NO: 322211 - DNA, 25 bp, Homo sapien
gaacgtggggcaggagagtcccagg

SEQ ID NO: 322212 - DNA, 25 bp, Homo sapien
gcaggagagtcccaggagcaacaca

SEQ ID NO: 322213 - DNA, 25 bp, Homo sapien
ggagagtcccaggagcaacacatat

SEQ ID NO: 322214 - DNA, 25 bp, Homo sapien
agagcctcttaacaagtcacattca

SEQ ID NO: 322215 - DNA, 25 bp, Homo sapien
tcttaacaagtcacattcagcatct

SEQ ID NO: 322216 - DNA, 25 bp, Homo sapien
gcctcttaacaagtcacattcagca

SEQ ID NO: 322217 - DNA, 25 bp, Homo sapien
acaagtcacattcagcatctttact

SEQ ID NO: 322218 - DNA, 25 bp, Homo sapien
tacataatagtacggtgcttctggc

SEQ ID NO: 322219 - DNA, 25 bp, Homo sapien
gctgcacggcaattaatgagtcaca

SEQ ID NO: 322220 - DNA, 25 bp, Homo sapien
actttgcctgactgccatgggtaca

SEQ ID NO: 322221 - DNA, 25 bp, Homo sapien
tatccaaccctattgcaggagtgac

SEQ ID NO: 322222 - DNA, 25 bp, Homo sapien
gctgtagtgtaggattctatggccc

SEQ ID NO: 322223 - DNA, 25 bp, Homo sapien
tgtagtgtaggattctatggcccca

SEQ ID NO: 322224 - DNA, 25 bp, Homo sapien
agctgtagtgtaggattctatggcc

SEQ ID NO: 322225 - DNA, 25 bp, Homo sapien
gtagtgtaggattctatggccccac

SEQ ID NO: 322226 - DNA, 25 bp, Homo sapien
tgtctcccgtcaattattttgtcat

SEQ ID NO: 322227 - DNA, 25 bp, Homo sapien
gcagcatatagcagtgtgatcaaga

SEQ ID NO: 322228 - DNA, 25 bp, Homo sapien
gatggcagcatatagcagtgtgatc

SEQ ID NO: 322229 - DNA, 25 bp, Homo sapien
gcatatagcagtgtgatcaagaaaa

SEQ ID NO: 322230 - DNA, 25 bp, Homo sapien
aatatatgattaacaaaacgggtag

SEQ ID NO: 322231 - DNA, 25 bp, Homo sapien
tatatgattaacaaaacgggtaggc

SEQ ID NO: 322232 - DNA, 25 bp, Homo sapien
tcagagatgcaatgaaaaatgccag

SEQ ID NO: 322233 - DNA, 25 bp, Homo sapien
tatgattaacaaaacgggtaggctc

SEQ ID NO: 322234 - DNA, 25 bp, Homo sapien
gacacagaagaattctatcggcggt

SEQ ID NO: 322235 - DNA, 25 bp, Homo sapien
cattgctgatctggatggccagtat

SEQ ID NO: 322236 - DNA, 25 bp, Homo sapien
aaaacgccacatcacgacacagaag

SEQ ID NO: 322237 - DNA, 25 bp, Homo sapien
cggcggtagcttaatggtagtatca

SEQ ID NO: 322238 - DNA, 25 bp, Homo sapien
ctgataacagggaaaatgtcatcag

SEQ ID NO: 322239 - DNA, 25 bp, Homo sapien
taacagggaaaatgtcatcagcaat

SEQ ID NO: 322240 - DNA, 25 bp, Homo sapien
aacagggaaaatgtcatcagcaatg

SEQ ID NO: 322241 - DNA, 25 bp, Homo sapien
gataacagggaaaatgtcatcagca

SEQ ID NO: 322242 - DNA, 25 bp, Homo sapien
tggaacagaaccgagaaaagcctga

SEQ ID NO: 322243 - DNA, 25 bp, Homo sapien
tgctgcatgaaattatcccggattg

SEQ ID NO: 322244 - DNA, 25 bp, Homo sapien
tcaaaggccattctcgtatagtgag

SEQ ID NO: 322245 - DNA, 25 bp, Homo sapien
tatagtgagactgatatacatctgc

SEQ ID NO: 322246 - DNA, 25 bp, Homo sapien
ttgcccccacaataataaagctgat

SEQ ID NO: 322247 - DNA, 25 bp, Homo sapien
ggataatttgatccaaaattgcccc

SEQ ID NO: 322248 - DNA, 25 bp, Homo sapien
tgccaaaaaagtaatgcagccttat

SEQ ID NO: 322249 - DNA, 25 bp, Homo sapien
gccttatttctcctcaagtctttgt

SEQ ID NO: 322250 - DNA, 25 bp, Homo sapien
gtcattagcttttcgataaatttca

SEQ ID NO: 322251 - DNA, 25 bp, Homo sapien
ccagaatgtgtcattagcttttcga

SEQ ID NO: 322252 - DNA, 25 bp, Homo sapien
aatgtgtcattagcttttcgataaa

SEQ ID NO: 322253 - DNA, 25 bp, Homo sapien
tagcttttcgataaatttcaaacat

SEQ ID NO: 322254 - DNA, 25 bp, Homo sapien
aaggcaacctcaccacagtagagaa

SEQ ID NO: 322255 - DNA, 25 bp, Homo sapien
caaaggcaacctcaccacagtagag

SEQ ID NO: 322256 - DNA, 25 bp, Homo sapien
ccaaaggcaacctcaccacagtaga

SEQ ID NO: 322257 - DNA, 25 bp, Homo sapien
ggcaacctcaccacagtagagaaca

SEQ ID NO: 322258 - DNA, 25 bp, Homo sapien
ggagtctctggccaaggactatttc

SEQ ID NO: 322259 - DNA, 25 bp, Homo sapien
gtctctggccaaggactatttcttc

SEQ ID NO: 322260 - DNA, 25 bp, Homo sapien
tctttcgaagatgaaactcctcctg

SEQ ID NO: 322261 - DNA, 25 bp, Homo sapien
gactatttcttctttcgaagatgaa

SEQ ID NO: 322262 - DNA, 25 bp, Homo sapien
tcactgatacgttctgcatcagaat

SEQ ID NO: 322263 - DNA, 25 bp, Homo sapien
gggagtttcactgatacgttctgca

SEQ ID NO: 322264 - DNA, 25 bp, Homo sapien
gatacgttctgcatcagaatttaga

SEQ ID NO: 322265 - DNA, 25 bp, Homo sapien
cagtgggagggagtttcactgatac

SEQ ID NO: 322266 - DNA, 25 bp, Homo sapien
cccagctgttgtgccgaaatggatt

SEQ ID NO: 322267 - DNA, 25 bp, Homo sapien
tacactgagaatcccagctgcgcag

SEQ ID NO: 322268 - DNA, 25 bp, Homo sapien
tgtgccgaaatggattacactgaga

SEQ ID NO: 322269 - DNA, 25 bp, Homo sapien
ttgcctgaaataactaggtgggtgc

SEQ ID NO: 322270 - DNA, 25 bp, Homo sapien
catgacgccattgggagattcgtcc

SEQ ID NO: 322271 - DNA, 25 bp, Homo sapien
actttctgtctgacatgacgccatt

SEQ ID NO: 322272 - DNA, 25 bp, Homo sapien
gatgaaggccataccatgtgtctgc

SEQ ID NO: 322273 - DNA, 25 bp, Homo sapien
cattgggagattcgtcctcgtggct

SEQ ID NO: 322274 - DNA, 25 bp, Homo sapien
tgtagcagaggccacactcccagca

SEQ ID NO: 322275 - DNA, 25 bp, Homo sapien
gacagagagacgtgagacatgtagc

SEQ ID NO: 322276 - DNA, 25 bp, Homo sapien
ctggacagagagacgtgagacatgt

SEQ ID NO: 322277 - DNA, 25 bp, Homo sapien
agagagacgtgagacatgtagcaga

SEQ ID NO: 322278 - DNA, 25 bp, Homo sapien
tatttgtgctgagggatgtgttcgt

SEQ ID NO: 322279 - DNA, 25 bp, Homo sapien
ctatttgtgctgagggatgtgttcg

SEQ ID NO: 322280 - DNA, 25 bp, Homo sapien
tttgtgctgagggatgtgttcgtgg

SEQ ID NO: 322281 - DNA, 25 bp, Homo sapien
gtgctgagggatgtgttcgtggaac

SEQ ID NO: 322282 - DNA, 25 bp, Homo sapien
ggtggtgaagcaacacaaggcacac

SEQ ID NO: 322283 - DNA, 25 bp, Homo sapien
agcaggttttcggtggtgaagcaac

SEQ ID NO: 322284 - DNA, 25 bp, Homo sapien
tgcagcaggttttcggtggtgaagc

SEQ ID NO: 322285 - DNA, 25 bp, Homo sapien
cggtggtgaagcaacacaaggcaca

SEQ ID NO: 322286 - DNA, 25 bp, Homo sapien
ggttgagttattgctcctctgggag

SEQ ID NO: 322287 - DNA, 25 bp, Homo sapien
tattgctcctctgggaggcctgtac

SEQ ID NO: 322288 - DNA, 25 bp, Homo sapien
tgggaggcctgtactccagaaccgg

SEQ ID NO: 322289 - DNA, 25 bp, Homo sapien
tgtactccagaaccggttctttcaa

SEQ ID NO: 322290 - DNA, 25 bp, Homo sapien
ctgggcagtgtgagcaggcatacac

SEQ ID NO: 322291 - DNA, 25 bp, Homo sapien
aggtcaaggtctttgatgccatgca

SEQ ID NO: 322292 - DNA, 25 bp, Homo sapien
cagcatcaaccctttggtaaaagta

SEQ ID NO: 322293 - DNA, 25 bp, Homo sapien
taaaagtacctctggagtctgggca

SEQ ID NO: 322294 - DNA, 25 bp, Homo sapien
agcacagtctgtgggatgagctgaa

SEQ ID NO: 322295 - DNA, 25 bp, Homo sapien
tgccagcacagtctgtgggatgagc

SEQ ID NO: 322296 - DNA, 25 bp, Homo sapien
gagctgaaaggcttgtcacactggc

SEQ ID NO: 322297 - DNA, 25 bp, Homo sapien
tctgtgggatgagctgaaaggcttg

SEQ ID NO: 322298 - DNA, 25 bp, Homo sapien
aaggagatggagatttcttttccgg

SEQ ID NO: 322299 - DNA, 25 bp, Homo sapien
ttcccactcatggatttgctgtcct

SEQ ID NO: 322300 - DNA, 25 bp, Homo sapien
actcatggatttgctgtcctctttt

SEQ ID NO: 322301 - DNA, 25 bp, Homo sapien
tttttcaaaggagatggagatttct

SEQ ID NO: 322302 - DNA, 25 bp, Homo sapien
tgtagtgtagacagttcttggtgac

SEQ ID NO: 322303 - DNA, 25 bp, Homo sapien
tagacagttcttggtgacatgggtc

SEQ ID NO: 322304 - DNA, 25 bp, Homo sapien
tccttgtgtagtgtagacagttctt

SEQ ID NO: 322305 - DNA, 25 bp, Homo sapien
tgacatgggtctggaagtgcaccaa

SEQ ID NO: 322306 - DNA, 25 bp, Homo sapien
agatggccctgcactcagggcaggt

SEQ ID NO: 322307 - DNA, 25 bp, Homo sapien
tgcactcagggcaggtgtagggaga

SEQ ID NO: 322308 - DNA, 25 bp, Homo sapien
ggccctgcactcagggcaggtgtag

SEQ ID NO: 322309 - DNA, 25 bp, Homo sapien
ctgcagatggccctgcactcagggc

SEQ ID NO: 322310 - DNA, 25 bp, Homo sapien
cttttgtccactcatatctgcagcc

SEQ ID NO: 322311 - DNA, 25 bp, Homo sapien
gaaatgtgtagccagggatctcttg

SEQ ID NO: 322312 - DNA, 25 bp, Homo sapien
aagtcttttgtccactcatatctgc

SEQ ID NO: 322313 - DNA, 25 bp, Homo sapien
gattatgtctacacagtttggaggg

SEQ ID NO: 322314 - DNA, 25 bp, Homo sapien
tcccagttatgccagactgaatttt

SEQ ID NO: 322315 - DNA, 25 bp, Homo sapien
ccgatatgactgtcccagttatgcc

SEQ ID NO: 322316 - DNA, 25 bp, Homo sapien
ccagttatgccagactgaatttttg

SEQ ID NO: 322317 - DNA, 25 bp, Homo sapien
aaggagccgatatgactgtcccagt

SEQ ID NO: 322318 - DNA, 25 bp, Homo sapien
tatgatatgacctgctgagactggc

SEQ ID NO: 322319 - DNA, 25 bp, Homo sapien
gatgaagaagaactattgctcgatg

SEQ ID NO: 322320 - DNA, 25 bp, Homo sapien
gaaactatgatatgacctgctgaga

SEQ ID NO: 322321 - DNA, 25 bp, Homo sapien
tgctcgatggagaaactatgatatg

SEQ ID NO: 322322 - DNA, 25 bp, Homo sapien
cacccccttctccttatgcccacgg

SEQ ID NO: 322323 - DNA, 25 bp, Homo sapien
gaggttgcatttgttgtaaacaatg

SEQ ID NO: 322324 - DNA, 25 bp, Homo sapien
ggaaaggaggttgcatttgttgtaa

SEQ ID NO: 322325 - DNA, 25 bp, Homo sapien
tctttgtacaatggttgcacgttac

SEQ ID NO: 322326 - DNA, 25 bp, Homo sapien
caatgaggttctttgtacaatggtt

SEQ ID NO: 322327 - DNA, 25 bp, Homo sapien
tgcacatgctccatctgttgtagtg

SEQ ID NO: 322328 - DNA, 25 bp, Homo sapien
cgatgcacatgctccatctgttgta

SEQ ID NO: 322329 - DNA, 25 bp, Homo sapien
gatgcacatgctccatctgttgtag

SEQ ID NO: 322330 - DNA, 25 bp, Homo sapien
ttcgatgcacatgctccatctgttg

SEQ ID NO: 322331 - DNA, 25 bp, Homo sapien
ctgggtcagactcttcaagtgcaaa

SEQ ID NO: 322332 - DNA, 25 bp, Homo sapien
ggtcagactcttcaagtgcaaagga

SEQ ID NO: 322333 - DNA, 25 bp, Homo sapien
tcagactcttcaagtgcaaaggagt

SEQ ID NO: 322334 - DNA, 25 bp, Homo sapien
tgggtcagactcttcaagtgcaaag

SEQ ID NO: 322335 - DNA, 25 bp, Homo sapien
catcagtaatgtgatccctgcattg

SEQ ID NO: 322336 - DNA, 25 bp, Homo sapien
ctaagccagaaggttaaggttggca

SEQ ID NO: 322337 - DNA, 25 bp, Homo sapien
cagaaggttaaggttggcaaggtgc

SEQ ID NO: 322338 - DNA, 25 bp, Homo sapien
aagccagaaggttaaggttggcaag

SEQ ID NO: 322339 - DNA, 25 bp, Homo sapien
gaaggttaaggttggcaaggtgcac

SEQ ID NO: 322340 - DNA, 25 bp, Homo sapien
ggcatcatgacagcttgctcctgta

SEQ ID NO: 322341 - DNA, 25 bp, Homo sapien
tggcatcatgacagcttgctcctgt

SEQ ID NO: 322342 - DNA, 25 bp, Homo sapien
gacagaggcagcaggtatgaccgtg

SEQ ID NO: 322343 - DNA, 25 bp, Homo sapien
aggcagcaggtatgaccgtggcttt

SEQ ID NO: 322344 - DNA, 25 bp, Homo sapien
cagaggcagcaggtatgaccgtggc

SEQ ID NO: 322345 - DNA, 25 bp, Homo sapien
cagcaggtatgaccgtggctttcac

SEQ ID NO: 322346 - DNA, 25 bp, Homo sapien
ggggattgctgttgtggatcctgca

SEQ ID NO: 322347 - DNA, 25 bp, Homo sapien
attgctgttgtggatcctgcaggag

SEQ ID NO: 322348 - DNA, 25 bp, Homo sapien
gggactgtctggttgctttagggat

SEQ ID NO: 322349 - DNA, 25 bp, Homo sapien
ctgatatgctgatggaagtgagaat

SEQ ID NO: 322350 - DNA, 25 bp, Homo sapien
taacattaatgttactagggcctgg

SEQ ID NO: 322351 - DNA, 25 bp, Homo sapien
tgagaatgaagaataagatgggatg

SEQ ID NO: 322352 - DNA, 25 bp, Homo sapien
ggtaagtaatgttactaacagtgcc

SEQ ID NO: 322353 - DNA, 25 bp, Homo sapien
cacttttaagctgtgtaggaaacac

SEQ ID NO: 322354 - DNA, 25 bp, Homo sapien
actgagcggtccaattcaaaacatg

SEQ ID NO: 322355 - DNA, 25 bp, Homo sapien
tcaaaacatgaatatctgtgctgga

SEQ ID NO: 322356 - DNA, 25 bp, Homo sapien
taagtcacatctaagaccctctgcc

SEQ ID NO: 322357 - DNA, 25 bp, Homo sapien
gtgtggccctctgtattataaaatg

SEQ ID NO: 322358 - DNA, 25 bp, Homo sapien
ggtgtggccctctgtattataaaat

SEQ ID NO: 322359 - DNA, 25 bp, Homo sapien
gtggccctctgtattataaaatgtt

SEQ ID NO: 322360 - DNA, 25 bp, Homo sapien
tgtggccctctgtattataaaatgt

SEQ ID NO: 322361 - DNA, 25 bp, Homo sapien
tctgagtcaccacttacactgtgtt

SEQ ID NO: 322362 - DNA, 25 bp, Homo sapien
ctgagtcaccacttacactgtgttc

SEQ ID NO: 322363 - DNA, 25 bp, Homo sapien
gtgctctgagtcaccacttacactg

SEQ ID NO: 322364 - DNA, 25 bp, Homo sapien
gctctgagtcaccacttacactgtg

SEQ ID NO: 322365 - DNA, 25 bp, Homo sapien
aatattggttgaaatcttcctgctg

SEQ ID NO: 322366 - DNA, 25 bp, Homo sapien
gaatattggttgaaatcttcctgct

SEQ ID NO: 322367 - DNA, 25 bp, Homo sapien
aggcttgtgggaagtctaagtccat

SEQ ID NO: 322368 - DNA, 25 bp, Homo sapien
aaggcttgtgggaagtctaagtcca

SEQ ID NO: 322369 - DNA, 25 bp, Homo sapien
agaaactgtgcccgcagcctatagt

SEQ ID NO: 322370 - DNA, 25 bp, Homo sapien
tgatggggtctatgaggtaattcag

SEQ ID NO: 322371 - DNA, 25 bp, Homo sapien
ttaagccatacagggatagggtagg

SEQ ID NO: 322372 - DNA, 25 bp, Homo sapien
atagggtaggagatgccatttggat

SEQ ID NO: 322373 - DNA, 25 bp, Homo sapien
aggttaagccatacagggatagggt

SEQ ID NO: 322374 - DNA, 25 bp, Homo sapien
gagtttccctaggttaagccataca

SEQ ID NO: 322375 - DNA, 25 bp, Homo sapien
gcagagactcagcaggaagagtgtc

SEQ ID NO: 322376 - DNA, 25 bp, Homo sapien
agggcagagactcagcaggaagagt

SEQ ID NO: 322377 - DNA, 25 bp, Homo sapien
cagagactcagcaggaagagtgtct

SEQ ID NO: 322378 - DNA, 25 bp, Homo sapien
cagagggcagagactcagcaggaag

SEQ ID NO: 322379 - DNA, 25 bp, Homo sapien
tattacaggctattataaaaagcaa

SEQ ID NO: 322380 - DNA, 25 bp, Homo sapien
aaagcaatgcgggtatgtaatctgt

SEQ ID NO: 322381 - DNA, 25 bp, Homo sapien
ttgtggatattctgttattacaggc

SEQ ID NO: 322382 - DNA, 25 bp, Homo sapien
ggatgaaactgatatattactgcca

SEQ ID NO: 322383 - DNA, 25 bp, Homo sapien
tgaggtccagaggcttatattgtcc

SEQ ID NO: 322384 - DNA, 25 bp, Homo sapien
gagtgggaagaagcgagtgtaggca

SEQ ID NO: 322385 - DNA, 25 bp, Homo sapien
ggtccagaggcttatattgtccttc

SEQ ID NO: 322386 - DNA, 25 bp, Homo sapien
tgggaagaagcgagtgtaggcaacc

SEQ ID NO: 322387 - DNA, 25 bp, Homo sapien
tcactgaactgagagggaatcccac

SEQ ID NO: 322388 - DNA, 25 bp, Homo sapien
gaactgagagggaatcccactttgc

SEQ ID NO: 322389 - DNA, 25 bp, Homo sapien
gatccactgtcactgaactgagagg

SEQ ID NO: 322390 - DNA, 25 bp, Homo sapien
ctgtcactgaactgagagggaatcc

SEQ ID NO: 322391 - DNA, 25 bp, Homo sapien
ggagactgggtcatctggatgtcac

SEQ ID NO: 322392 - DNA, 25 bp, Homo sapien
ggtcatctggatgtcacatctggca

SEQ ID NO: 322393 - DNA, 25 bp, Homo sapien
tcgcccggcaagtgatggtgactct

SEQ ID NO: 322394 - DNA, 25 bp, Homo sapien
tgactctgtctcctacagatgcaga

SEQ ID NO: 322395 - DNA, 25 bp, Homo sapien
gctgagtgggggaccttgcatccgt

SEQ ID NO: 322396 - DNA, 25 bp, Homo sapien
gaccagcctataaaaagtcttcagg

SEQ ID NO: 322397 - DNA, 25 bp, Homo sapien
gggaccttgcatccgtgctgtgtcc

SEQ ID NO: 322398 - DNA, 25 bp, Homo sapien
tgaccagcctataaaaagtcttcag

SEQ ID NO: 322399 - DNA, 25 bp, Homo sapien
aagtaggatgacaaaggccacatgc

SEQ ID NO: 322400 - DNA, 25 bp, Homo sapien
agtaggatgacaaaggccacatgcc

SEQ ID NO: 322401 - DNA, 25 bp, Homo sapien
catgccctgagtaatgctctgagct

SEQ ID NO: 322402 - DNA, 25 bp, Homo sapien
ggccacatgccctgagtaatgctct

SEQ ID NO: 322403 - DNA, 25 bp, Homo sapien
gatacatctctggattcaaatgcgc

SEQ ID NO: 322404 - DNA, 25 bp, Homo sapien
tctttgtgcataatttttgcagtca

SEQ ID NO: 322405 - DNA, 25 bp, Homo sapien
gctgccaggatccatatatccagat

SEQ ID NO: 322406 - DNA, 25 bp, Homo sapien
cagaggactggatttctgggaaatg

SEQ ID NO: 322407 - DNA, 25 bp, Homo sapien
cacacagcttgtgtagaatgcttct

SEQ ID NO: 322408 - DNA, 25 bp, Homo sapien
gcacacagcttgtgtagaatgcttc

SEQ ID NO: 322409 - DNA, 25 bp, Homo sapien
cacagcttgtgtagaatgcttctac

SEQ ID NO: 322410 - DNA, 25 bp, Homo sapien
acacagcttgtgtagaatgcttcta

SEQ ID NO: 322411 - DNA, 25 bp, Homo sapien
tttcagagtgaaatcagtgcctgac

SEQ ID NO: 322412 - DNA, 25 bp, Homo sapien
gattttcagagtgaaatcagtgcct

SEQ ID NO: 322413 - DNA, 25 bp, Homo sapien
tgattttcagagtgaaatcagtgcc

SEQ ID NO: 322414 - DNA, 25 bp, Homo sapien
ttttcagagtgaaatcagtgcctga

SEQ ID NO: 322415 - DNA, 25 bp, Homo sapien
ttcaaataggtgtattcatcatcag

SEQ ID NO: 322416 - DNA, 25 bp, Homo sapien
ccagaggcccggttggaaacctcat

SEQ ID NO: 322417 - DNA, 25 bp, Homo sapien
tccagaggcccggttggaaacctca

SEQ ID NO: 322418 - DNA, 25 bp, Homo sapien
caaataggtgtattcatcatcagta

SEQ ID NO: 322419 - DNA, 25 bp, Homo sapien
ccaatttgttactagccagcaggga

SEQ ID NO: 322420 - DNA, 25 bp, Homo sapien
taaaatgaaccaatttgttactagc

SEQ ID NO: 322421 - DNA, 25 bp, Homo sapien
tatcatgaaaagtagactttctaaa

SEQ ID NO: 322422 - DNA, 25 bp, Homo sapien
tttgagcaactttcatgattttcct

SEQ ID NO: 322423 - DNA, 25 bp, Homo sapien
ttagcagccccaggagctgagcagg

SEQ ID NO: 322424 - DNA, 25 bp, Homo sapien
cagagacccagagcattagcagccc

SEQ ID NO: 322425 - DNA, 25 bp, Homo sapien
ccccaggagctgagcagggagcctc

SEQ ID NO: 322426 - DNA, 25 bp, Homo sapien
ccaggagctgagcagggagcctcat

SEQ ID NO: 322427 - DNA, 25 bp, Homo sapien
ctgaattctccaagaacctcctgtt

SEQ ID NO: 322428 - DNA, 25 bp, Homo sapien
tgaattctccaagaacctcctgttc

SEQ ID NO: 322429 - DNA, 25 bp, Homo sapien
gaattctccaagaacctcctgttct

SEQ ID NO: 322430 - DNA, 25 bp, Homo sapien
gaggagtttgtagagcttgcatgca

SEQ ID NO: 322431 - DNA, 25 bp, Homo sapien
gtagagcttgcatgcagtgataaac

SEQ ID NO: 322432 - DNA, 25 bp, Homo sapien
ctgggatgccacaggagggaggttt

SEQ ID NO: 322433 - DNA, 25 bp, Homo sapien
gatgccacaggagggaggtttcttt

SEQ ID NO: 322434 - DNA, 25 bp, Homo sapien
gcccggttcaaaaccaaatagatca

SEQ ID NO: 322435 - DNA, 25 bp, Homo sapien
tgcagaggcccggttcaaaaccaaa

SEQ ID NO: 322436 - DNA, 25 bp, Homo sapien
tgggactgcagaggcccggttcaaa

SEQ ID NO: 322437 - DNA, 25 bp, Homo sapien
cggttcaaaaccaaatagatcagga

SEQ ID NO: 322438 - DNA, 25 bp, Homo sapien
tgcaggtaccaaataggtttattcc

SEQ ID NO: 322439 - DNA, 25 bp, Homo sapien
ctgcaggtaccaaataggtttattc

SEQ ID NO: 322440 - DNA, 25 bp, Homo sapien
ccctgtatacaaggctgtgactaga

SEQ ID NO: 322441 - DNA, 25 bp, Homo sapien
ttattcccccctgtatacaaggctg

SEQ ID NO: 322442 - DNA, 25 bp, Homo sapien
gtggagtttgggtcatcataatatc

SEQ ID NO: 322443 - DNA, 25 bp, Homo sapien
tatccaggggtgacgagcagggaga

SEQ ID NO: 322444 - DNA, 25 bp, Homo sapien
tgacgagcagggagagtggagtttg

SEQ ID NO: 322445 - DNA, 25 bp, Homo sapien
ttgggtcatcataatatccccactg

SEQ ID NO: 322446 - DNA, 25 bp, Homo sapien
tagcagccccaggagctgagcaggg

SEQ ID NO: 322447 - DNA, 25 bp, Homo sapien
ccaggagctgagcagggagcctcat

SEQ ID NO: 322448 - DNA, 25 bp, Homo sapien
agggacccatagcattagcagcccc

SEQ ID NO: 322449 - DNA, 25 bp, Homo sapien
cagggacccatagcattagcagccc

SEQ ID NO: 322450 - DNA, 25 bp, Homo sapien
tgataccaggctaaggagctgccaa

SEQ ID NO: 322451 - DNA, 25 bp, Homo sapien
taccaggctaaggagctgccaatgc

SEQ ID NO: 322452 - DNA, 25 bp, Homo sapien
atgaggaaccagggagcttttccag

SEQ ID NO: 322453 - DNA, 25 bp, Homo sapien
gatgaggaaccagggagcttttcca

SEQ ID NO: 322454 - DNA, 25 bp, Homo sapien
acaaagacaaggagtcaagagactg

SEQ ID NO: 322455 - DNA, 25 bp, Homo sapien
gacaaggagtcaagagactgcatca

SEQ ID NO: 322456 - DNA, 25 bp, Homo sapien
gagtcaagagactgcatcaacataa

SEQ ID NO: 322457 - DNA, 25 bp, Homo sapien
caagagactgcatcaacataacttc

SEQ ID NO: 322458 - DNA, 25 bp, Homo sapien
cctgaaagcccatcaccaagaggca

SEQ ID NO: 322459 - DNA, 25 bp, Homo sapien
aaagcccatcaccaagaggcagagg

SEQ ID NO: 322460 - DNA, 25 bp, Homo sapien
agaggagcagggccaggaagagcat

SEQ ID NO: 322461 - DNA, 25 bp, Homo sapien
cagaggagcagggccaggaagagca

SEQ ID NO: 322462 - DNA, 25 bp, Homo sapien
cttggagtgtccagggaacctgctg

SEQ ID NO: 322463 - DNA, 25 bp, Homo sapien
ggtgacgtagatgcctcgggtccca

SEQ ID NO: 322464 - DNA, 25 bp, Homo sapien
tgggggtgacgtagatgcctcgggt

SEQ ID NO: 322465 - DNA, 25 bp, Homo sapien
ggggtgacgtagatgcctcgggtcc

SEQ ID NO: 322466 - DNA, 25 bp, Homo sapien
tggtgggggtgacgtagatgcctcg

SEQ ID NO: 322467 - DNA, 25 bp, Homo sapien
atttattactaatgctgtgactcac

SEQ ID NO: 322468 - DNA, 25 bp, Homo sapien
cgtctgcagttttgttgcagcatga

SEQ ID NO: 322469 - DNA, 25 bp, Homo sapien
tgctgataccagactaatttattac

SEQ ID NO: 322470 - DNA, 25 bp, Homo sapien
ttgactgctactgaaccaggatggg

SEQ ID NO: 322471 - DNA, 25 bp, Homo sapien
tggcaagtgatagtgactctgtctc

SEQ ID NO: 322472 - DNA, 25 bp, Homo sapien
ctggcaagtgatagtgactctgtct

SEQ ID NO: 322473 - DNA, 25 bp, Homo sapien
gtcatctggatatcacgtctggtac

SEQ ID NO: 322474 - DNA, 25 bp, Homo sapien
tctggatatcacgtctggtacctga

SEQ ID NO: 322475 - DNA, 25 bp, Homo sapien
ctggatatcacgtctggtacctgag

SEQ ID NO: 322476 - DNA, 25 bp, Homo sapien
catctggatatcacgtctggtacct

SEQ ID NO: 322477 - DNA, 25 bp, Homo sapien
tgaacctggtcaactacttcctgtt

SEQ ID NO: 322478 - DNA, 25 bp, Homo sapien
aggctgacagcagagaaccgctgct

SEQ ID NO: 322479 - DNA, 25 bp, Homo sapien
cctctctgtgaaggcgctgtgtggt

SEQ ID NO: 322480 - DNA, 25 bp, Homo sapien
gctttgacttgaacctggtcaacta

SEQ ID NO: 322481 - DNA, 25 bp, Homo sapien
gcagtgggctctcagcaggcagacg

SEQ ID NO: 322482 - DNA, 25 bp, Homo sapien
agtgggctctcagcaggcagacggc

SEQ ID NO: 322483 - DNA, 25 bp, Homo sapien
tgggctctcagcaggcagacggcca

SEQ ID NO: 322484 - DNA, 25 bp, Homo sapien
cagcctgactctgcagtgggctctc

SEQ ID NO: 322485 - DNA, 25 bp, Homo sapien
gagactgaggatgcttgctggcaac

SEQ ID NO: 322486 - DNA, 25 bp, Homo sapien
gctctctatgtaagggatgcggtcc

SEQ ID NO: 322487 - DNA, 25 bp, Homo sapien
ccccaagcaggcaaaggatgtatat

SEQ ID NO: 322488 - DNA, 25 bp, Homo sapien
tattacagagctttagagtgtggcg

SEQ ID NO: 322489 - DNA, 25 bp, Homo sapien
gccggacgtgacagagcctatggat

SEQ ID NO: 322490 - DNA, 25 bp, Homo sapien
tccagatccacctggacatagtcca

SEQ ID NO: 322491 - DNA, 25 bp, Homo sapien
tgaggactgccgcaggcacatctgt

SEQ ID NO: 322492 - DNA, 25 bp, Homo sapien
catctgttcatgcatggtcttctgc

SEQ ID NO: 322493 - DNA, 25 bp, Homo sapien
agggtggaagtgggagtggcagtgt

SEQ ID NO: 322494 - DNA, 25 bp, Homo sapien
tggtgccaccggaaacaggaaatgc

SEQ ID NO: 322495 - DNA, 25 bp, Homo sapien
ggatgttaccagtgctcctcggcgg

SEQ ID NO: 322496 - DNA, 25 bp, Homo sapien
ctgctggtgccaccggaaacaggaa

SEQ ID NO: 322497 - DNA, 25 bp, Homo sapien
gccgcgtagtggatgttaccagtgc

SEQ ID NO: 322498 - DNA, 25 bp, Homo sapien
tggtgatgctctgcgtggagatggg

SEQ ID NO: 322499 - DNA, 25 bp, Homo sapien
cttctgagtctgtgttggtgatgct

SEQ ID NO: 322500 - DNA, 25 bp, Homo sapien
cgggaaaagatacctctctccactg

SEQ ID NO: 322501 - DNA, 25 bp, Homo sapien
ggaaaagatacctctctccactgtc

SEQ ID NO: 322502 - DNA, 25 bp, Homo sapien
ctgtcatgggaagaaggcaaggagt

SEQ ID NO: 322503 - DNA, 25 bp, Homo sapien
tcatgggaagaaggcaaggagtaca

SEQ ID NO: 322504 - DNA, 25 bp, Homo sapien
gtcatgggaagaaggcaaggagtac

SEQ ID NO: 322505 - DNA, 25 bp, Homo sapien
atgggaagaaggcaaggagtacatc

SEQ ID NO: 322506 - DNA, 25 bp, Homo sapien
ggagagctcattgatgaccctgttg

SEQ ID NO: 322507 - DNA, 25 bp, Homo sapien
accagggctctgtgacaggtggctt

SEQ ID NO: 322508 - DNA, 25 bp, Homo sapien
tgttgtttctcaggttgggcggtgt

SEQ ID NO: 322509 - DNA, 25 bp, Homo sapien
tgtttctcaggttgggcggtgttgg

SEQ ID NO: 322510 - DNA, 25 bp, Homo sapien
tagacaccatgaggtgctgaggctc

SEQ ID NO: 322511 - DNA, 25 bp, Homo sapien
tggaagcaggtagacaccatgaggt

SEQ ID NO: 322512 - DNA, 25 bp, Homo sapien
cagcgccactcgctgggtctggttc

SEQ ID NO: 322513 - DNA, 25 bp, Homo sapien
tgaggctccagcgccactcgctggg

SEQ ID NO: 322514 - DNA, 25 bp, Homo sapien
caggactgatccccacccagttatc

SEQ ID NO: 322515 - DNA, 25 bp, Homo sapien
cagttatcccactccttccttgaac

SEQ ID NO: 322516 - DNA, 25 bp, Homo sapien
ggaacctgagctctagctcttcttc

SEQ ID NO: 322517 - DNA, 25 bp, Homo sapien
ctggaacctgagctctagctcttct

SEQ ID NO: 322518 - DNA, 25 bp, Homo sapien
gccaaggccacagggtgaggtcatg

SEQ ID NO: 322519 - DNA, 25 bp, Homo sapien
gaggtcatggcagcctggaacctga

SEQ ID NO: 322520 - DNA, 25 bp, Homo sapien
ggttaggcttgaggctgcggttgac

SEQ ID NO: 322521 - DNA, 25 bp, Homo sapien
ttaggcttgaggctgcggttgacag

SEQ ID NO: 322522 - DNA, 25 bp, Homo sapien
taggcttgaggctgcggttgacagg

SEQ ID NO: 322523 - DNA, 25 bp, Homo sapien
tctggttaggcttgaggctgcggtt

SEQ ID NO: 322524 - DNA, 25 bp, Homo sapien
ctgaggtcttggtgcatagaaagct

SEQ ID NO: 322525 - DNA, 25 bp, Homo sapien
gggagccaagcaggtcaaagcgaac

SEQ ID NO: 322526 - DNA, 25 bp, Homo sapien
agcgaacaagacatgagcccacagg

SEQ ID NO: 322527 - DNA, 25 bp, Homo sapien
gccaagcaggtcaaagcgaacaaga

SEQ ID NO: 322528 - DNA, 25 bp, Homo sapien
gcaggtcaaagcgaacaagacatga

SEQ ID NO: 322529 - DNA, 25 bp, Homo sapien
gtctgacaggcccacaagcgttctt

SEQ ID NO: 322530 - DNA, 25 bp, Homo sapien
cctgggaatcatcgcctgcttgctt

SEQ ID NO: 322531 - DNA, 25 bp, Homo sapien
gctgtctgacaggcccacaagcgtt

SEQ ID NO: 322532 - DNA, 25 bp, Homo sapien
gcttgcttcacagccggcagggtag

SEQ ID NO: 322533 - DNA, 25 bp, Homo sapien
tggaaaccatcagggagactaagtc

SEQ ID NO: 322534 - DNA, 25 bp, Homo sapien
cattcgatgtggatgccaaggcagc

SEQ ID NO: 322535 - DNA, 25 bp, Homo sapien
gatgtctgggcacttctagctctca

SEQ ID NO: 322536 - DNA, 25 bp, Homo sapien
caaggcaaggatcacatcagatgtc

SEQ ID NO: 322537 - DNA, 25 bp, Homo sapien
accatgctgggtgtacttgccggag

SEQ ID NO: 322538 - DNA, 25 bp, Homo sapien
catgcatggactcagcaggccggct

SEQ ID NO: 322539 - DNA, 25 bp, Homo sapien
atgcatggactcagcaggccggctg

SEQ ID NO: 322540 - DNA, 25 bp, Homo sapien
cctccaccatgctgggtgtacttgc

SEQ ID NO: 322541 - DNA, 25 bp, Homo sapien
tagctaaccactgagaacccggtgc

SEQ ID NO: 322542 - DNA, 25 bp, Homo sapien
aaccactgagaacccggtgccacct

SEQ ID NO: 322543 - DNA, 25 bp, Homo sapien
ctgagaacccggtgccacctcccct

SEQ ID NO: 322544 - DNA, 25 bp, Homo sapien
tgagaacccggtgccacctcccctc

SEQ ID NO: 322545 - DNA, 25 bp, Homo sapien
catcggctgttgtctactgcaggaa

SEQ ID NO: 322546 - DNA, 25 bp, Homo sapien
ggtggccggaacaccactattgttc

SEQ ID NO: 322547 - DNA, 25 bp, Homo sapien
cactgacatgcttctgcctgacttg

SEQ ID NO: 322548 - DNA, 25 bp, Homo sapien
taacgtgactgtcctaggaatctgg

SEQ ID NO: 322549 - DNA, 25 bp, Homo sapien
caggggattctgtgggtgctgcctc

SEQ ID NO: 322550 - DNA, 25 bp, Homo sapien
cattatccgcctcagagcctgtgag

SEQ ID NO: 322551 - DNA, 25 bp, Homo sapien
tgaggctgcctctggtgtggccatg

SEQ ID NO: 322552 - DNA, 25 bp, Homo sapien
tgaattctgcattgtgctggctggg

SEQ ID NO: 322553 - DNA, 25 bp, Homo sapien
caacactgtatccactgtgctgggc

SEQ ID NO: 322554 - DNA, 25 bp, Homo sapien
tggatgtgaccgctgaccccatcaa

SEQ ID NO: 322555 - DNA, 25 bp, Homo sapien
ccatcaacactgtatccactgtgct

SEQ ID NO: 322556 - DNA, 25 bp, Homo sapien
gatgtgaccgctgaccccatcaaca

SEQ ID NO: 322557 - DNA, 25 bp, Homo sapien
gcagacagatctggatgagccctcc

SEQ ID NO: 322558 - DNA, 25 bp, Homo sapien
gtggaggaggtgtcacgaacacaca

SEQ ID NO: 322559 - DNA, 25 bp, Homo sapien
acaatcaggtgggatgagcacacgg

SEQ ID NO: 322560 - DNA, 25 bp, Homo sapien
ccctgcaggacaggcgtcacagcag

SEQ ID NO: 322561 - DNA, 25 bp, Homo sapien
cttcagctgtgtcatgggagtacag

SEQ ID NO: 322562 - DNA, 25 bp, Homo sapien
ctgtgtcatgggagtacaggtggtg

SEQ ID NO: 322563 - DNA, 25 bp, Homo sapien
gctgtgtcatgggagtacaggtggt

SEQ ID NO: 322564 - DNA, 25 bp, Homo sapien
ttgcttcagctgtgtcatgggagta

SEQ ID NO: 322565 - DNA, 25 bp, Homo sapien
atgggccaggtgggcggcacacagt

SEQ ID NO: 322566 - DNA, 25 bp, Homo sapien
cacagtgagacaccgggggctcaga

SEQ ID NO: 322567 - DNA, 25 bp, Homo sapien
tctctggctggcgtgctggtgcgag

SEQ ID NO: 322568 - DNA, 25 bp, Homo sapien
cgagcggagacaccccggaggtgca

SEQ ID NO: 322569 - DNA, 25 bp, Homo sapien
gaggccgtgactggctgaggaaatg

SEQ ID NO: 322570 - DNA, 25 bp, Homo sapien
aggccgtgactggctgaggaaatgt

SEQ ID NO: 322571 - DNA, 25 bp, Homo sapien
cagaggccgtgactggctgaggaaa

SEQ ID NO: 322572 - DNA, 25 bp, Homo sapien
agaggccgtgactggctgaggaaat

SEQ ID NO: 322573 - DNA, 25 bp, Homo sapien
tgtgcactccaagatgagctcccat

SEQ ID NO: 322574 - DNA, 25 bp, Homo sapien
aagcagccacggcaccaaggatgaa

SEQ ID NO: 322575 - DNA, 25 bp, Homo sapien
caagatgaatgctctaccagtggag

SEQ ID NO: 322576 - DNA, 25 bp, Homo sapien
ggccttgtagctccaaaagacctgc

SEQ ID NO: 322577 - DNA, 25 bp, Homo sapien
ttcatgtcctccctggtctcagcca

SEQ ID NO: 322578 - DNA, 25 bp, Homo sapien
gatgtcaaacatatagcccttctga

SEQ ID NO: 322579 - DNA, 25 bp, Homo sapien
tgggtcactgctagtctggcccctc

SEQ ID NO: 322580 - DNA, 25 bp, Homo sapien
gcttcttggagccatcattcttgta

SEQ ID NO: 322581 - DNA, 25 bp, Homo sapien
caaaggcgcaaatgccgggtcaggt

SEQ ID NO: 322582 - DNA, 25 bp, Homo sapien
gtggccacttctcgtgcttccgccg

SEQ ID NO: 322583 - DNA, 25 bp, Homo sapien
tcagccagccgctgtacagcacgtg

SEQ ID NO: 322584 - DNA, 25 bp, Homo sapien
ttccgggccacgaagacaaaggcgc

SEQ ID NO: 322585 - DNA, 25 bp, Homo sapien
agggtgagggggacggcagggacat

SEQ ID NO: 322586 - DNA, 25 bp, Homo sapien
gagggtgagggggacggcagggaca

SEQ ID NO: 322587 - DNA, 25 bp, Homo sapien
cctcatcccatactctgcttctaac

SEQ ID NO: 322588 - DNA, 25 bp, Homo sapien
tcctcatcccatactctgcttctaa

SEQ ID NO: 322589 - DNA, 25 bp, Homo sapien
ttcctcatcccatactctgcttcta

SEQ ID NO: 322590 - DNA, 25 bp, Homo sapien
gccagcacctcgcaaggagccttgg

SEQ ID NO: 322591 - DNA, 25 bp, Homo sapien
ccagcacctcgcaaggagccttgga

SEQ ID NO: 322592 - DNA, 25 bp, Homo sapien
aattcagtgtgcgagaggccactgc

SEQ ID NO: 322593 - DNA, 25 bp, Homo sapien
tgcgagaggccactgcagtactcac

SEQ ID NO: 322594 - DNA, 25 bp, Homo sapien
tgtgactcagcatgtccctggaaat

SEQ ID NO: 322595 - DNA, 25 bp, Homo sapien
gactcagcatgtccctggaaatctg

SEQ ID NO: 322596 - DNA, 25 bp, Homo sapien
agcatgtccctggaaatctgtcagc

SEQ ID NO: 322597 - DNA, 25 bp, Homo sapien
cagcatgtccctggaaatctgtcag

SEQ ID NO: 322598 - DNA, 25 bp, Homo sapien
ttcgtagatattaaaaggtgcataa

SEQ ID NO: 322599 - DNA, 25 bp, Homo sapien
gatattaaaaggtgcataatggctt

SEQ ID NO: 322600 - DNA, 25 bp, Homo sapien
ctttcgtagatattaaaaggtgcat

SEQ ID NO: 322601 - DNA, 25 bp, Homo sapien
atattaaaaggtgcataatggcttt

SEQ ID NO: 322602 - DNA, 25 bp, Homo sapien
caccagctgcctgatggtgagcatg

SEQ ID NO: 322603 - DNA, 25 bp, Homo sapien
accaccagctgcctgatggtgagca

SEQ ID NO: 322604 - DNA, 25 bp, Homo sapien
ccaccagctgcctgatggtgagcat

SEQ ID NO: 322605 - DNA, 25 bp, Homo sapien
tccattgaaacttttgcagaatatt

SEQ ID NO: 322606 - DNA, 25 bp, Homo sapien
aaaatagatggcacttccattgaaa

SEQ ID NO: 322607 - DNA, 25 bp, Homo sapien
tcaccaacttgttaaaaatagatgg

SEQ ID NO: 322608 - DNA, 25 bp, Homo sapien
aacttttgcagaatattgatgattc

SEQ ID NO: 322609 - DNA, 25 bp, Homo sapien
ttgtggacaccataggtgacagggc

SEQ ID NO: 322610 - DNA, 25 bp, Homo sapien
caaacttgtggacaccataggtgac

SEQ ID NO: 322611 - DNA, 25 bp, Homo sapien
acttgtggacaccataggtgacagg

SEQ ID NO: 322612 - DNA, 25 bp, Homo sapien
aaacttgtggacaccataggtgaca

SEQ ID NO: 322613 - DNA, 25 bp, Homo sapien
gtggatgatgagaggatgaagtcca

SEQ ID NO: 322614 - DNA, 25 bp, Homo sapien
ataacagcattgtggatgatgagag

SEQ ID NO: 322615 - DNA, 25 bp, Homo sapien
acagcattgtggatgatgagaggat

SEQ ID NO: 322616 - DNA, 25 bp, Homo sapien
cattgtggatgatgagaggatgaag

SEQ ID NO: 322617 - DNA, 25 bp, Homo sapien
ctgagtacatcagcacaaaggaatt

SEQ ID NO: 322618 - DNA, 25 bp, Homo sapien
agtacatcagcacaaaggaattcac

SEQ ID NO: 322619 - DNA, 25 bp, Homo sapien
tgagtacatcagcacaaaggaattc

SEQ ID NO: 322620 - DNA, 25 bp, Homo sapien
gagtacatcagcacaaaggaattca

SEQ ID NO: 322621 - DNA, 25 bp, Homo sapien
gcatcaggatggtcttggtggccat

SEQ ID NO: 322622 - DNA, 25 bp, Homo sapien
cagcatcaggatggtcttggtggcc

SEQ ID NO: 322623 - DNA, 25 bp, Homo sapien
agcatcaggatggtcttggtggcca

SEQ ID NO: 322624 - DNA, 25 bp, Homo sapien
gaatgaccatgtatacacttgagag

SEQ ID NO: 322625 - DNA, 25 bp, Homo sapien
taagcccaggatatcgtattttgta

SEQ ID NO: 322626 - DNA, 25 bp, Homo sapien
tccttaatataaggctgctgctgtg

SEQ ID NO: 322627 - DNA, 25 bp, Homo sapien
tgagagcagcgtgattcctatgaag

SEQ ID NO: 322628 - DNA, 25 bp, Homo sapien
ttgaaaatgtgtgggctctccgtcc

SEQ ID NO: 322629 - DNA, 25 bp, Homo sapien
cctagaggcaaccagcgggctggat

SEQ ID NO: 322630 - DNA, 25 bp, Homo sapien
gctggatccgcacagcggccctggg

SEQ ID NO: 322631 - DNA, 25 bp, Homo sapien
gaatggatcgtgtacaggggacaaa

SEQ ID NO: 322632 - DNA, 25 bp, Homo sapien
tcttccttcactaccttcgctctgc

SEQ ID NO: 322633 - DNA, 25 bp, Homo sapien
ttcgctctgcactaggccataagct

SEQ ID NO: 322634 - DNA, 25 bp, Homo sapien
ttccttcactaccttcgctctgcac

SEQ ID NO: 322635 - DNA, 25 bp, Homo sapien
taccttcgctctgcactaggccata

SEQ ID NO: 322636 - DNA, 25 bp, Homo sapien
tgccctccagtggtttatcatctat

SEQ ID NO: 322637 - DNA, 25 bp, Homo sapien
tcctcaggaagtctgtaacctcacc

SEQ ID NO: 322638 - DNA, 25 bp, Homo sapien
taacctcaccagacgaggcatccat

SEQ ID NO: 322639 - DNA, 25 bp, Homo sapien
tgtgggacatggcacaaaggaagaa

SEQ ID NO: 322640 - DNA, 25 bp, Homo sapien
ctctccccacacattctgctgtaac

SEQ ID NO: 322641 - DNA, 25 bp, Homo sapien
cattctgctgtaactgagactcgcc

SEQ ID NO: 322642 - DNA, 25 bp, Homo sapien
gtaactgagactcgcctgctccctg

SEQ ID NO: 322643 - DNA, 25 bp, Homo sapien
tgctgtaactgagactcgcctgctc

SEQ ID NO: 322644 - DNA, 25 bp, Homo sapien
ctccagagatagacagctctgggct

SEQ ID NO: 322645 - DNA, 25 bp, Homo sapien
gatgctatctccaaatagtgtcaga

SEQ ID NO: 322646 - DNA, 25 bp, Homo sapien
cactggtgtctagggggtgggcggt

SEQ ID NO: 322647 - DNA, 25 bp, Homo sapien
tgctatctccaaatagtgtcagaat

SEQ ID NO: 322648 - DNA, 25 bp, Homo sapien
ctgatgctatctccaaatagtgtca

SEQ ID NO: 322649 - DNA, 25 bp, Homo sapien
tgaaggaacttaaccgctagtgccg

SEQ ID NO: 322650 - DNA, 25 bp, Homo sapien
gataaattgcatgcggcatggcccc

SEQ ID NO: 322651 - DNA, 25 bp, Homo sapien
cacgttaaacgaacaggatgggccg

SEQ ID NO: 322652 - DNA, 25 bp, Homo sapien
tatgtggcgggcatttgggatacca

SEQ ID NO: 322653 - DNA, 25 bp, Homo sapien
aatttcaaggcatgggacaatggcc

SEQ ID NO: 322654 - DNA, 25 bp, Homo sapien
taagcaagggagaaggtccaaggcc

SEQ ID NO: 322655 - DNA, 25 bp, Homo sapien
cctttacagggagcatcaggaccag

SEQ ID NO: 322656 - DNA, 25 bp, Homo sapien
tctgtgaaccatgcacgtgctggca

SEQ ID NO: 322657 - DNA, 25 bp, Homo sapien
tgaagctgtcgagcaggtccaagca

SEQ ID NO: 322658 - DNA, 25 bp, Homo sapien
ttgagctcgtagagccagagcaccg

SEQ ID NO: 322659 - DNA, 25 bp, Homo sapien
tagacggcgataagcaggtagcgca

SEQ ID NO: 322660 - DNA, 25 bp, Homo sapien
cagggtgttgacatagccatgagca

SEQ ID NO: 322661 - DNA, 25 bp, Homo sapien
gcgatggagtagataagccaggcca

SEQ ID NO: 322662 - DNA, 25 bp, Homo sapien
tgaaggcgatggagtagataagcca

SEQ ID NO: 322663 - DNA, 25 bp, Homo sapien
ggagtgaaggcgatggagtagataa

SEQ ID NO: 322664 - DNA, 25 bp, Homo sapien
tggagtagataagccaggccaggta

SEQ ID NO: 322665 - DNA, 25 bp, Homo sapien
gccccggctgttcttggcgaagaag

SEQ ID NO: 322666 - DNA, 25 bp, Homo sapien
ttggccccagcggtagcggccgagg

SEQ ID NO: 322667 - DNA, 25 bp, Homo sapien
cccggctgttcttggcgaagaagat

SEQ ID NO: 322668 - DNA, 25 bp, Homo sapien
caggtggtggttgtgcgcgccgctg

SEQ ID NO: 322669 - DNA, 25 bp, Homo sapien
tccaggagcaccagtacaggtcggt

SEQ ID NO: 322670 - DNA, 25 bp, Homo sapien
acggcgatgaggtacaggtccagca

SEQ ID NO: 322671 - DNA, 25 bp, Homo sapien
accagtacaggtcggtgacggcgat

SEQ ID NO: 322672 - DNA, 25 bp, Homo sapien
caccaggtcagtggcgatccaggag

SEQ ID NO: 322673 - DNA, 25 bp, Homo sapien
ctgggggcgcagccgcggcgccgac

SEQ ID NO: 322674 - DNA, 25 bp, Homo sapien
agcagcaacacgggcagcaggaggc

SEQ ID NO: 322675 - DNA, 25 bp, Homo sapien
ccgcagcagcagcaacacgggcagc

SEQ ID NO: 322676 - DNA, 25 bp, Homo sapien
cagcagcaacacgggcagcaggagg

SEQ ID NO: 322677 - DNA, 25 bp, Homo sapien
cagccgcagcagcagcaacacgggc

SEQ ID NO: 322678 - DNA, 25 bp, Homo sapien
gcgcccccgccgaagtccgcggctg

SEQ ID NO: 322679 - DNA, 25 bp, Homo sapien
cgcccccgccgaagtccgcggctgt

SEQ ID NO: 322680 - DNA, 25 bp, Homo sapien
cccgccgaagtccgcggctgtcatg

SEQ ID NO: 322681 - DNA, 25 bp, Homo sapien
gccgaagtccgcggctgtcatgctg

SEQ ID NO: 322682 - DNA, 25 bp, Homo sapien
ccagcggcttgctgacgctgaggct

SEQ ID NO: 322683 - DNA, 25 bp, Homo sapien
ttgggcaccagcggcttgctgacgc

SEQ ID NO: 322684 - DNA, 25 bp, Homo sapien
ctgacgctgaggctctcgtcgtcgt

SEQ ID NO: 322685 - DNA, 25 bp, Homo sapien
gacgctgaggctctcgtcgtcgtcc

SEQ ID NO: 322686 - DNA, 25 bp, Homo sapien
cgcctcccccgcggctggtgctggt

SEQ ID NO: 322687 - DNA, 25 bp, Homo sapien
tcgccggagcctctccggccgcgga

SEQ ID NO: 322688 - DNA, 25 bp, Homo sapien
aggagaccgagcgagggtggccgag

SEQ ID NO: 322689 - DNA, 25 bp, Homo sapien
cggaggagaccgagcgagggtggcc

SEQ ID NO: 322690 - DNA, 25 bp, Homo sapien
gaggcgggctaggcggccgagggga

SEQ ID NO: 322691 - DNA, 25 bp, Homo sapien
cgaggcgggctaggcggccgagggg

SEQ ID NO: 322692 - DNA, 25 bp, Homo sapien
gcaggcggtgaaccgagcggaccgc

SEQ ID NO: 322693 - DNA, 25 bp, Homo sapien
gcggcggcgagatccggactggagc

SEQ ID NO: 322694 - DNA, 25 bp, Homo sapien
actggagccactggactgggcgagc

SEQ ID NO: 322695 - DNA, 25 bp, Homo sapien
agccactggactgggcgagccgggc

SEQ ID NO: 322696 - DNA, 25 bp, Homo sapien
ggacgacccgattccagcggatgga

SEQ ID NO: 322697 - DNA, 25 bp, Homo sapien
agccatctcagggacgacccgattc

SEQ ID NO: 322698 - DNA, 25 bp, Homo sapien
ttccagcggatggagaagttccctg

SEQ ID NO: 322699 - DNA, 25 bp, Homo sapien
gacccgattccagcggatggagaag

SEQ ID NO: 322700 - DNA, 25 bp, Homo sapien
tttgaagctgctgctgcgggctcat

SEQ ID NO: 322701 - DNA, 25 bp, Homo sapien
ctttgaagctgctgctgcgggctca

SEQ ID NO: 322702 - DNA, 25 bp, Homo sapien
tgttaagacactctgccgacaggct

SEQ ID NO: 322703 - DNA, 25 bp, Homo sapien
gttagactgccacgaaaggcacgtg

SEQ ID NO: 322704 - DNA, 25 bp, Homo sapien
tctccgggcaataaactacaataca

SEQ ID NO: 322705 - DNA, 25 bp, Homo sapien
tacccagcagggaaaaagagtcact

SEQ ID NO: 322706 - DNA, 25 bp, Homo sapien
gaagcataagtctcggtgcccgtgg

SEQ ID NO: 322707 - DNA, 25 bp, Homo sapien
ggttcctgggattgtagacgcctgt

SEQ ID NO: 322708 - DNA, 25 bp, Homo sapien
ctccatgagccctggactgaagcat

SEQ ID NO: 322709 - DNA, 25 bp, Homo sapien
tccaaggacaggctccgtggactgt

SEQ ID NO: 322710 - DNA, 25 bp, Homo sapien
gctctggcttgctgagggctgttgc

SEQ ID NO: 322711 - DNA, 25 bp, Homo sapien
caggttggcgccgtatacgtcagac

SEQ ID NO: 322712 - DNA, 25 bp, Homo sapien
tctgcaggtactggtggaacaggtt

SEQ ID NO: 322713 - DNA, 25 bp, Homo sapien
gttctggcgccccatcatgcgttgc

SEQ ID NO: 322714 - DNA, 25 bp, Homo sapien
tggcaggggcagccacaccggaaaa

SEQ ID NO: 322715 - DNA, 25 bp, Homo sapien
ctggcaggggcagccacaccggaaa

SEQ ID NO: 322716 - DNA, 25 bp, Homo sapien
caggggcagccacaccggaaaagga

SEQ ID NO: 322717 - DNA, 25 bp, Homo sapien
ggcaggggcagccacaccggaaaag

SEQ ID NO: 322718 - DNA, 25 bp, Homo sapien
atcaggccctcgtatctcagctcct

SEQ ID NO: 322719 - DNA, 25 bp, Homo sapien
gcctgtcgcctgatcaggtcctcgg

SEQ ID NO: 322720 - DNA, 25 bp, Homo sapien
ccacagcatagagcttccggatggg

SEQ ID NO: 322721 - DNA, 25 bp, Homo sapien
tcggcatactggtaagtgaggatgc

SEQ ID NO: 322722 - DNA, 25 bp, Homo sapien
tgccagaaacgagcacgcagcagtt

SEQ ID NO: 322723 - DNA, 25 bp, Homo sapien
gcttaaatcctgctgtagagctgag

SEQ ID NO: 322724 - DNA, 25 bp, Homo sapien
ggtgtgaaaaagaccttcgcttgcc

SEQ ID NO: 322725 - DNA, 25 bp, Homo sapien
tctagagaacacgactgccactgtc

SEQ ID NO: 322726 - DNA, 25 bp, Homo sapien
cagccatccacaggagatccatgtt

SEQ ID NO: 322727 - DNA, 25 bp, Homo sapien
catccacaggagatccatgttgctg

SEQ ID NO: 322728 - DNA, 25 bp, Homo sapien
ttggcttcagccatccacaggagat

SEQ ID NO: 322729 - DNA, 25 bp, Homo sapien
cacaggagatccatgttgctggcta

SEQ ID NO: 322730 - DNA, 25 bp, Homo sapien
ctttaaagaacagaggcgcaggtga

SEQ ID NO: 322731 - DNA, 25 bp, Homo sapien
acccatggtgcacccagctgggcag

SEQ ID NO: 322732 - DNA, 25 bp, Homo sapien
aggatgccagctagggctacccatc

SEQ ID NO: 322733 - DNA, 25 bp, Homo sapien
gcggcaggccctcaggatgccagct

SEQ ID NO: 322734 - DNA, 25 bp, Homo sapien
tctgagtcaccggtaaaacacgcct

SEQ ID NO: 322735 - DNA, 25 bp, Homo sapien
gattctcctgtatgactgtggccaa

SEQ ID NO: 322736 - DNA, 25 bp, Homo sapien
cagggacgctacatactcaggacaa

SEQ ID NO: 322737 - DNA, 25 bp, Homo sapien
tcatcggtaaacagcccaggactag

SEQ ID NO: 322738 - DNA, 25 bp, Homo sapien
cttcaatgcgggggaagtcattcct

SEQ ID NO: 322739 - DNA, 25 bp, Homo sapien
caatgcgggggaagtcattcctcgg

SEQ ID NO: 322740 - DNA, 25 bp, Homo sapien
tgcgggggaagtcattcctcgggag

SEQ ID NO: 322741 - DNA, 25 bp, Homo sapien
ttcaatgcgggggaagtcattcctc

SEQ ID NO: 322742 - DNA, 25 bp, Homo sapien
caaaggagaggctatcaacacaagt

SEQ ID NO: 322743 - DNA, 25 bp, Homo sapien
ggctatcaacacaagtcgccttcca

SEQ ID NO: 322744 - DNA, 25 bp, Homo sapien
gagaggctatcaacacaagtcgcct

SEQ ID NO: 322745 - DNA, 25 bp, Homo sapien
aaggagaggctatcaacacaagtcg

SEQ ID NO: 322746 - DNA, 25 bp, Homo sapien
gaacaggcaggacaccatgggtgaa

SEQ ID NO: 322747 - DNA, 25 bp, Homo sapien
catgtcggttcttgagcaggcagct

SEQ ID NO: 322748 - DNA, 25 bp, Homo sapien
taaacaactatgtgacccgggacag

SEQ ID NO: 322749 - DNA, 25 bp, Homo sapien
taaaatcaggcagctaaggtgaggc

SEQ ID NO: 322750 - DNA, 25 bp, Homo sapien
tccaggtccaccatgtcaagcagag

SEQ ID NO: 322751 - DNA, 25 bp, Homo sapien
ccacggtgacgacatttcggaagcc

SEQ ID NO: 322752 - DNA, 25 bp, Homo sapien
ggaaaggccatccgcagctcatcca

SEQ ID NO: 322753 - DNA, 25 bp, Homo sapien
agctcatccacggtgacgacatttc

SEQ ID NO: 322754 - DNA, 25 bp, Homo sapien
tggagcaagctcaggaagtaatgct

SEQ ID NO: 322755 - DNA, 25 bp, Homo sapien
caggaagtaatgctggacagttctt

SEQ ID NO: 322756 - DNA, 25 bp, Homo sapien
aatgctggacagttcttggggaaga

SEQ ID NO: 322757 - DNA, 25 bp, Homo sapien
gaagtaatgctggacagttcttggg

SEQ ID NO: 322758 - DNA, 25 bp, Homo sapien
ccacacctgtgacgccctcctgtga

SEQ ID NO: 322759 - DNA, 25 bp, Homo sapien
gctccacacctgtgacgccctcctg

SEQ ID NO: 322760 - DNA, 25 bp, Homo sapien
catcgcacacgctccacacctgtga

SEQ ID NO: 322761 - DNA, 25 bp, Homo sapien
acacgctccacacctgtgacgccct

SEQ ID NO: 322762 - DNA, 25 bp, Homo sapien
tcgatcacacgccatcgcacacgct

SEQ ID NO: 322763 - DNA, 25 bp, Homo sapien
ccttcgatcacacgccatcgcacac

SEQ ID NO: 322764 - DNA, 25 bp, Homo sapien
atcacacgccatcgcacacgctcca

SEQ ID NO: 322765 - DNA, 25 bp, Homo sapien
cggccttcgatcacacgccatcgca

SEQ ID NO: 322766 - DNA, 25 bp, Homo sapien
tcctgtgagcttacaggccttcgat

SEQ ID NO: 322767 - DNA, 25 bp, Homo sapien
gagcttacaggccttcgatcacacg

SEQ ID NO: 322768 - DNA, 25 bp, Homo sapien
tgtgagcttacaggccttcgatcac

SEQ ID NO: 322769 - DNA, 25 bp, Homo sapien
ctgtgagcttacaggccttcgatca

SEQ ID NO: 322770 - DNA, 25 bp, Homo sapien
cggccttcgatcacacgccatcgca

SEQ ID NO: 322771 - DNA, 25 bp, Homo sapien
tcgatcacacgccatcgcacacgct

SEQ ID NO: 322772 - DNA, 25 bp, Homo sapien
atcgcacacgctccacacctgtggc

SEQ ID NO: 322773 - DNA, 25 bp, Homo sapien
ccatcgcacacgctccacacctgtg

SEQ ID NO: 322774 - DNA, 25 bp, Homo sapien
gagcttacaggccttcgatcacacg

SEQ ID NO: 322775 - DNA, 25 bp, Homo sapien
ctgtgagcttacaggccttcgatca

SEQ ID NO: 322776 - DNA, 25 bp, Homo sapien
tgagcttacaggccttcgatcacac

SEQ ID NO: 322777 - DNA, 25 bp, Homo sapien
tgtgagcttacaggccttcgatcac

SEQ ID NO: 322778 - DNA, 25 bp, Homo sapien
tcccattcagagtgtgcggcagacc

SEQ ID NO: 322779 - DNA, 25 bp, Homo sapien
tactgctcatggtgttattcttgcc

SEQ ID NO: 322780 - DNA, 25 bp, Homo sapien
gattcataagtcctacgccctcatc

SEQ ID NO: 322781 - DNA, 25 bp, Homo sapien
gcacacgctcctttactgctcatgg

SEQ ID NO: 322782 - DNA, 25 bp, Homo sapien
agccagagttaagaccaaaaggata

SEQ ID NO: 322783 - DNA, 25 bp, Homo sapien
cagccagagttaagaccaaaaggat

SEQ ID NO: 322784 - DNA, 25 bp, Homo sapien
tcagccagagttaagaccaaaagga

SEQ ID NO: 322785 - DNA, 25 bp, Homo sapien
agaggataacttggtctgcatccac

SEQ ID NO: 322786 - DNA, 25 bp, Homo sapien
cgcttctcatggtactcggagaaga

SEQ ID NO: 322787 - DNA, 25 bp, Homo sapien
atccgcttctcatggtactcggaga

SEQ ID NO: 322788 - DNA, 25 bp, Homo sapien
tgtgagagaggataacttggtctgc

SEQ ID NO: 322789 - DNA, 25 bp, Homo sapien
gcatttgtaacaaaaaccacgggca

SEQ ID NO: 322790 - DNA, 25 bp, Homo sapien
gtaagatgttcccagcatttgtaac

SEQ ID NO: 322791 - DNA, 25 bp, Homo sapien
cctgggagttcaccagccttcggaa

SEQ ID NO: 322792 - DNA, 25 bp, Homo sapien
agctgcccctgggagttcaccagcc

SEQ ID NO: 322793 - DNA, 25 bp, Homo sapien
caagtaatccttccaactcccaaag

SEQ ID NO: 322794 - DNA, 25 bp, Homo sapien
gagataagcaaagcaggtgttgaaa

SEQ ID NO: 322795 - DNA, 25 bp, Homo sapien
aaggctgggtgcactagtgtcatct

SEQ ID NO: 322796 - DNA, 25 bp, Homo sapien
taatcattgctcaatctgggagatg

SEQ ID NO: 322797 - DNA, 25 bp, Homo sapien
taagtgaagccgctaacagactgca

SEQ ID NO: 322798 - DNA, 25 bp, Homo sapien
tgctctaccggaagagtcacttgga

SEQ ID NO: 322799 - DNA, 25 bp, Homo sapien
gagacatttcgggactctgcagaga

SEQ ID NO: 322800 - DNA, 25 bp, Homo sapien
tctgcagagatgctagagccaatac

SEQ ID NO: 322801 - DNA, 25 bp, Homo sapien
gacaaagtgattcctttttccagaa

SEQ ID NO: 322802 - DNA, 25 bp, Homo sapien
aatattacttgtgcgtttagaagac

SEQ ID NO: 322803 - DNA, 25 bp, Homo sapien
agcgtgagagccgtggatctgacca

SEQ ID NO: 322804 - DNA, 25 bp, Homo sapien
caaaacggcccaagggagcgtgaga

SEQ ID NO: 322805 - DNA, 25 bp, Homo sapien
tctcccgcgggagtagcgtttccga

SEQ ID NO: 322806 - DNA, 25 bp, Homo sapien
gacccaaacgtcctcatggtggaaa

SEQ ID NO: 322807 - DNA, 25 bp, Homo sapien
gaaatcagaagacgcgcagggaaaa

SEQ ID NO: 322808 - DNA, 25 bp, Homo sapien
caggacctgagaaaacgtacttgaa

SEQ ID NO: 322809 - DNA, 25 bp, Homo sapien
agcatagcacctgcgggcggggcgg

SEQ ID NO: 322810 - DNA, 25 bp, Homo sapien
cccacagcatagcacctgcgggcgg

SEQ ID NO: 322811 - DNA, 25 bp, Homo sapien
ccacagcatagcacctgcgggcggg

SEQ ID NO: 322812 - DNA, 25 bp, Homo sapien
acagcatagcacctgcgggcggggc

SEQ ID NO: 322813 - DNA, 25 bp, Homo sapien
gcgccgcgccgagcgcagccacaca

SEQ ID NO: 322814 - DNA, 25 bp, Homo sapien
cgcagccacacagccccacgcagcc

SEQ ID NO: 322815 - DNA, 25 bp, Homo sapien
cagccacacagccccacgcagccat

SEQ ID NO: 322816 - DNA, 25 bp, Homo sapien
agcgcagccacacagccccacgcag

SEQ ID NO: 322817 - DNA, 25 bp, Homo sapien
gctgcacagccaatcagcggtcggc

SEQ ID NO: 322818 - DNA, 25 bp, Homo sapien
cgagtccgtccgctgcacagccaat

SEQ ID NO: 322819 - DNA, 25 bp, Homo sapien
gtccgctgcacagccaatcagcggt

SEQ ID NO: 322820 - DNA, 25 bp, Homo sapien
gcacagccaatcagcggtcggcgcg

SEQ ID NO: 322821 - DNA, 25 bp, Homo sapien
accagtaggaggcagacgaaagaaa

SEQ ID NO: 322822 - DNA, 25 bp, Homo sapien
aagagaagttggttcccagtacagg

SEQ ID NO: 322823 - DNA, 25 bp, Homo sapien
agtaggaggcagacgaaagaaaaga

SEQ ID NO: 322824 - DNA, 25 bp, Homo sapien
acaccagtaggaggcagacgaaaga

SEQ ID NO: 322825 - DNA, 25 bp, Homo sapien
tgagagaagctgggaagaaagaacc

SEQ ID NO: 322826 - DNA, 25 bp, Homo sapien
gaagctgggaagaaagaaccaagca

SEQ ID NO: 322827 - DNA, 25 bp, Homo sapien
ctgagagaagctgggaagaaagaac

SEQ ID NO: 322828 - DNA, 25 bp, Homo sapien
gctgggaagaaagaaccaagcatac

SEQ ID NO: 322829 - DNA, 25 bp, Homo sapien
aagtctgtgttctgcctgtccctgc

SEQ ID NO: 322830 - DNA, 25 bp, Homo sapien
gaagtctgtgttctgcctgtccctg

SEQ ID NO: 322831 - DNA, 25 bp, Homo sapien
gattccctgccatccttgagttggg

SEQ ID NO: 322832 - DNA, 25 bp, Homo sapien
ggtaaggcactgaatcacctgcaga

SEQ ID NO: 322833 - DNA, 25 bp, Homo sapien
tgcgcagttgggacctaaaagatct

SEQ ID NO: 322834 - DNA, 25 bp, Homo sapien
tgtgttggaggtcccctgcgcagtt

SEQ ID NO: 322835 - DNA, 25 bp, Homo sapien
gccaagtgcttctcacagggtcgct

SEQ ID NO: 322836 - DNA, 25 bp, Homo sapien
aaagtcattctaggccaggccgggt

SEQ ID NO: 322837 - DNA, 25 bp, Homo sapien
agtactaactagctttgggcccagg

SEQ ID NO: 322838 - DNA, 25 bp, Homo sapien
ttcaccagctatgggaaaggccagg

SEQ ID NO: 322839 - DNA, 25 bp, Homo sapien
cacatctgctatgaacttatcccat

SEQ ID NO: 322840 - DNA, 25 bp, Homo sapien
tctcactctccaacagggtactgta

SEQ ID NO: 322841 - DNA, 25 bp, Homo sapien
gatttccatgaaagtatttttctca

SEQ ID NO: 322842 - DNA, 25 bp, Homo sapien
tttttctcactctccaacagggtac

SEQ ID NO: 322843 - DNA, 25 bp, Homo sapien
cataggacaagcctttggcaccaaa

SEQ ID NO: 322844 - DNA, 25 bp, Homo sapien
tacagggtggttcctcaagtcagac

SEQ ID NO: 322845 - DNA, 25 bp, Homo sapien
catggccagctgtttgagggtcctc

SEQ ID NO: 322846 - DNA, 25 bp, Homo sapien
gcaccaaacatagctgggtcatcag

SEQ ID NO: 322847 - DNA, 25 bp, Homo sapien
gacagacttctatggggatgtcctt

SEQ ID NO: 322848 - DNA, 25 bp, Homo sapien
aaagcaaatccatggccgattctgg

SEQ ID NO: 322849 - DNA, 25 bp, Homo sapien
gatgtcctttttccaggagtaagtc

SEQ ID NO: 322850 - DNA, 25 bp, Homo sapien
taagtcctgactgcggggtgtttgc

SEQ ID NO: 322851 - DNA, 25 bp, Homo sapien
tctccggcgtggaagaagtaaggca

SEQ ID NO: 322852 - DNA, 25 bp, Homo sapien
cttggcggggatcatcagagcttcc

SEQ ID NO: 322853 - DNA, 25 bp, Homo sapien
gcagcttaacgccatccttggcggg

SEQ ID NO: 322854 - DNA, 25 bp, Homo sapien
ttgtagtcatgcaaggagtggccag

SEQ ID NO: 322855 - DNA, 25 bp, Homo sapien
gtcacctaagaaatgtcctggttgt

SEQ ID NO: 322856 - DNA, 25 bp, Homo sapien
tagattctttatgagattgccgagc

SEQ ID NO: 322857 - DNA, 25 bp, Homo sapien
gtcctggttgtgcttcgatttggtg

SEQ ID NO: 322858 - DNA, 25 bp, Homo sapien
ctttatgagattgccgagctgtcac

SEQ ID NO: 322859 - DNA, 25 bp, Homo sapien
tcggagccccatggccattcggatg

SEQ ID NO: 322860 - DNA, 25 bp, Homo sapien
caccaccgtggggaacttgattcgg

SEQ ID NO: 322861 - DNA, 25 bp, Homo sapien
gccattcggatggattctgcgatga

SEQ ID NO: 322862 - DNA, 25 bp, Homo sapien
tggattctgcgatgacagccacatc

SEQ ID NO: 322863 - DNA, 25 bp, Homo sapien
gattttgattccaataaactcaggg

SEQ ID NO: 322864 - DNA, 25 bp, Homo sapien
tcagggtgagtttccacaaacttct

SEQ ID NO: 322865 - DNA, 25 bp, Homo sapien
tggtaagtcttcactgaccactctt

SEQ ID NO: 322866 - DNA, 25 bp, Homo sapien
tcttcgtcatggtgctctccactga

SEQ ID NO: 322867 - DNA, 25 bp, Homo sapien
ccagggacagcaagggggacacagt

SEQ ID NO: 322868 - DNA, 25 bp, Homo sapien
agcagctgcaaggcggccactgcca

SEQ ID NO: 322869 - DNA, 25 bp, Homo sapien
ggagagttgggagtgggcaggtgac

SEQ ID NO: 322870 - DNA, 25 bp, Homo sapien
cactgcttccctaactccaggtgca

SEQ ID NO: 322871 - DNA, 25 bp, Homo sapien
ctaagaaccacgaagccatcgtgga

SEQ ID NO: 322872 - DNA, 25 bp, Homo sapien
taagaaccacgaagccatcgtggaa

SEQ ID NO: 322873 - DNA, 25 bp, Homo sapien
ctctaagaaccacgaagccatcgtg

SEQ ID NO: 322874 - DNA, 25 bp, Homo sapien
tctaagaaccacgaagccatcgtgg

SEQ ID NO: 322875 - DNA, 25 bp, Homo sapien
ggcacattggcatcactcaaggaga

SEQ ID NO: 322876 - DNA, 25 bp, Homo sapien
gtgtttgtaatctcccaggtggtgc

SEQ ID NO: 322877 - DNA, 25 bp, Homo sapien
ctagggtgcgatatacagctgggct

SEQ ID NO: 322878 - DNA, 25 bp, Homo sapien
ggaggccgaccacatttcagaattt

SEQ ID NO: 322879 - DNA, 25 bp, Homo sapien
cagcctttgttactgagcattagga

SEQ ID NO: 322880 - DNA, 25 bp, Homo sapien
ctttgttactgagcattaggaacac

SEQ ID NO: 322881 - DNA, 25 bp, Homo sapien
ctcagcggccaggatagtccgtcca

SEQ ID NO: 322882 - DNA, 25 bp, Homo sapien
aggatagtccgtccacagcagccca

SEQ ID NO: 322883 - DNA, 25 bp, Homo sapien
cagagcccagttccattccagggaa

SEQ ID NO: 322884 - DNA, 25 bp, Homo sapien
gagcccagttccattccagggaatc

SEQ ID NO: 322885 - DNA, 25 bp, Homo sapien
cccagttccattccagggaatccat

SEQ ID NO: 322886 - DNA, 25 bp, Homo sapien
gcccagttccattccagggaatcca

SEQ ID NO: 322887 - DNA, 25 bp, Homo sapien
ttgaggtgggcgtggctattaggac

SEQ ID NO: 322888 - DNA, 25 bp, Homo sapien
tcgccatttgaggtgggcgtggcta

SEQ ID NO: 322889 - DNA, 25 bp, Homo sapien
atgctctctgggatcgccatttgag

SEQ ID NO: 322890 - DNA, 25 bp, Homo sapien
gctctctgggatcgccatttgaggt

SEQ ID NO: 322891 - DNA, 25 bp, Homo sapien
caacagatccaagtggagacatgca

SEQ ID NO: 322892 - DNA, 25 bp, Homo sapien
caagagatcggactctccaggatcc

SEQ ID NO: 322893 - DNA, 25 bp, Homo sapien
tgccgctaaactcaccaagggtatt

SEQ ID NO: 322894 - DNA, 25 bp, Homo sapien
ttgccagcgcctcccttttcagaaa

SEQ ID NO: 322895 - DNA, 25 bp, Homo sapien
tcagcatgttactgaaactgctcaa

SEQ ID NO: 322896 - DNA, 25 bp, Homo sapien
tcccatggacgattatgcatctgca

SEQ ID NO: 322897 - DNA, 25 bp, Homo sapien
tttggcccctaagatggctctatcc

SEQ ID NO: 322898 - DNA, 25 bp, Homo sapien
tctcagcttatgtcacgaggccctg

SEQ ID NO: 322899 - DNA, 25 bp, Homo sapien
gtcctcgtagaactcctgcatgctc

SEQ ID NO: 322900 - DNA, 25 bp, Homo sapien
catagtctctgaacactggtgcgta

SEQ ID NO: 322901 - DNA, 25 bp, Homo sapien
gtttgtgtaaatcacctccgggtgc

SEQ ID NO: 322902 - DNA, 25 bp, Homo sapien
gatctccatgtagagcacgttgtcc

SEQ ID NO: 322903 - DNA, 25 bp, Homo sapien
taggtgacattcctcaccagccagt

SEQ ID NO: 322904 - DNA, 25 bp, Homo sapien
aaactcagtgacgttctgcacccgc

SEQ ID NO: 322905 - DNA, 25 bp, Homo sapien
gttgggtgagcaaatctgaactgca

SEQ ID NO: 322906 - DNA, 25 bp, Homo sapien
ttggaacatttttctgatggacggg

SEQ ID NO: 322907 - DNA, 25 bp, Homo sapien
agtgcatgctgggtgggaatatcag

SEQ ID NO: 322908 - DNA, 25 bp, Homo sapien
tgagcgtcatgagcctctcattggc

SEQ ID NO: 322909 - DNA, 25 bp, Homo sapien
gtgggaatatcagggtcctcatggc

SEQ ID NO: 322910 - DNA, 25 bp, Homo sapien
cttcatctcagcgattttgagcgtc

SEQ ID NO: 322911 - DNA, 25 bp, Homo sapien
gagccgaagaaagacattgccacag

SEQ ID NO: 322912 - DNA, 25 bp, Homo sapien
gatgcgcccgtgtttcatctatgga

SEQ ID NO: 322913 - DNA, 25 bp, Homo sapien
agcaagaagcacagggctggccgct

SEQ ID NO: 322914 - DNA, 25 bp, Homo sapien
catctatggatagagctgagccgaa

SEQ ID NO: 322915 - DNA, 25 bp, Homo sapien
gatgcctggactaggaaagggctca

SEQ ID NO: 322916 - DNA, 25 bp, Homo sapien
agggctcagatggagactccacggg

SEQ ID NO: 322917 - DNA, 25 bp, Homo sapien
cagatttaagggtggaactctgatc

SEQ ID NO: 322918 - DNA, 25 bp, Homo sapien
gatttaagggtggaactctgatctt

SEQ ID NO: 322919 - DNA, 25 bp, Homo sapien
tttaagggtggaactctgatcttcc

SEQ ID NO: 322920 - DNA, 25 bp, Homo sapien
cctacagatttaagggtggaactct

SEQ ID NO: 322921 - DNA, 25 bp, Homo sapien
atccaccagactcggactcctaaag

SEQ ID NO: 322922 - DNA, 25 bp, Homo sapien
gatccaccagactcggactcctaaa

SEQ ID NO: 322923 - DNA, 25 bp, Homo sapien
gtgatccaccagactcggactccta

SEQ ID NO: 322924 - DNA, 25 bp, Homo sapien
ggtgatccaccagactcggactcct

SEQ ID NO: 322925 - DNA, 25 bp, Homo sapien
ctcggaacagctccagaaactgagg

SEQ ID NO: 322926 - DNA, 25 bp, Homo sapien
agctccagaaactgagggctgtttg

SEQ ID NO: 322927 - DNA, 25 bp, Homo sapien
gaacagctccagaaactgagggctg

SEQ ID NO: 322928 - DNA, 25 bp, Homo sapien
tcggaacagctccagaaactgaggg

SEQ ID NO: 322929 - DNA, 25 bp, Homo sapien
agatggcagagcagtcacggcactt

SEQ ID NO: 322930 - DNA, 25 bp, Homo sapien
ggtgctctcgggtccactccataaa

SEQ ID NO: 322931 - DNA, 25 bp, Homo sapien
aaaatcagaatattgggcaaaaggg

SEQ ID NO: 322932 - DNA, 25 bp, Homo sapien
taaaatcagtaagagggtgcaagtg

SEQ ID NO: 322933 - DNA, 25 bp, Homo sapien
gatcgcagaccctttgtcaacagag

SEQ ID NO: 322934 - DNA, 25 bp, Homo sapien
agtacaccagacttaggcccaggaa

SEQ ID NO: 322935 - DNA, 25 bp, Homo sapien
tgccagggcgtttgcatgacagaaa

SEQ ID NO: 322936 - DNA, 25 bp, Homo sapien
catgcgttttacacaggaaggccca

SEQ ID NO: 322937 - DNA, 25 bp, Homo sapien
tgcctcccgcagttatgacaatcag

SEQ ID NO: 322938 - DNA, 25 bp, Homo sapien
gaagtagcaagttgtctgcctcccg

SEQ ID NO: 322939 - DNA, 25 bp, Homo sapien
cactgctgacatttgcgccagatat

SEQ ID NO: 322940 - DNA, 25 bp, Homo sapien
gtgggaacttttctgccaggaggaa

SEQ ID NO: 322941 - DNA, 25 bp, Homo sapien
cattacccagcttaattaggccagg

SEQ ID NO: 322942 - DNA, 25 bp, Homo sapien
gctgctaaggaaacagcatgcaact

SEQ ID NO: 322943 - DNA, 25 bp, Homo sapien
taattttcctaggaatgtcaccagc

SEQ ID NO: 322944 - DNA, 25 bp, Homo sapien
cataaactgtcccagctctaagccg

SEQ ID NO: 322945 - DNA, 25 bp, Homo sapien
gccacagcaccaggtggatcatcgc

SEQ ID NO: 322946 - DNA, 25 bp, Homo sapien
agcagccacagcaccaggtggatca

SEQ ID NO: 322947 - DNA, 25 bp, Homo sapien
ctagaatctcagcagccacagcacc

SEQ ID NO: 322948 - DNA, 25 bp, Homo sapien
gcagccacagcaccaggtggatcat

SEQ ID NO: 322949 - DNA, 25 bp, Homo sapien
tgtggtgcttgcagtcaccgtctgg

SEQ ID NO: 322950 - DNA, 25 bp, Homo sapien
taatatctgttgagcaactgctcca

SEQ ID NO: 322951 - DNA, 25 bp, Homo sapien
gggcaggtccctgctccgacctgtg

SEQ ID NO: 322952 - DNA, 25 bp, Homo sapien
tggcccgtgaacaaattggccaggg

SEQ ID NO: 322953 - DNA, 25 bp, Homo sapien
tgtggcctgacccacagcccttcat

SEQ ID NO: 322954 - DNA, 25 bp, Homo sapien
ctgtggcctgacccacagcccttca

SEQ ID NO: 322955 - DNA, 25 bp, Homo sapien
tacaggccagcaccaccacgcccaa

SEQ ID NO: 322956 - DNA, 25 bp, Homo sapien
acaggccagcaccaccacgcccaac

SEQ ID NO: 322957 - DNA, 25 bp, Homo sapien
tgctgtcttgattgcctttagtcct

SEQ ID NO: 322958 - DNA, 25 bp, Homo sapien
ttcacacaacgaggcaatgtcctta

SEQ ID NO: 322959 - DNA, 25 bp, Homo sapien
gaggcaatgtccttagtttctctga

SEQ ID NO: 322960 - DNA, 25 bp, Homo sapien
tgcctttagtccttcacacaacgag

SEQ ID NO: 322961 - DNA, 25 bp, Homo sapien
agatgactgccattctgccctgcct

SEQ ID NO: 322962 - DNA, 25 bp, Homo sapien
ccaatgcaacaaagatgactgccat

SEQ ID NO: 322963 - DNA, 25 bp, Homo sapien
aagatgactgccattctgccctgcc

SEQ ID NO: 322964 - DNA, 25 bp, Homo sapien
tgaatttgccaatgcaacaaagatg

SEQ ID NO: 322965 - DNA, 25 bp, Homo sapien
tgaaaggggtggtcttctgacgtcc

SEQ ID NO: 322966 - DNA, 25 bp, Homo sapien
catgaaaggggtggtcttctgacgt

SEQ ID NO: 322967 - DNA, 25 bp, Homo sapien
atgaaaggggtggtcttctgacgtc

SEQ ID NO: 322968 - DNA, 25 bp, Homo sapien
tcatgaaaggggtggtcttctgacg

SEQ ID NO: 322969 - DNA, 25 bp, Homo sapien
gcagccgctgttgggaggtcacaga

SEQ ID NO: 322970 - DNA, 25 bp, Homo sapien
ggcagccgctgttgggaggtcacag

SEQ ID NO: 322971 - DNA, 25 bp, Homo sapien
tgccctggcccgcagtagtagtaag

SEQ ID NO: 322972 - DNA, 25 bp, Homo sapien
ctagtgggaatgtaccaaaggaact

SEQ ID NO: 322973 - DNA, 25 bp, Homo sapien
ctgaacacagttgggactagtggga

SEQ ID NO: 322974 - DNA, 25 bp, Homo sapien
tggcccaagcatggaaaacaccaag

SEQ ID NO: 322975 - DNA, 25 bp, Homo sapien
ttctgggctattattgattaacctg

SEQ ID NO: 322976 - DNA, 25 bp, Homo sapien
cgctgcagctcagagagtttgtcca

SEQ ID NO: 322977 - DNA, 25 bp, Homo sapien
tccaccgtatcagagcctggatcac

SEQ ID NO: 322978 - DNA, 25 bp, Homo sapien
aacctgtttatattccaccgtatca

SEQ ID NO: 322979 - DNA, 25 bp, Homo sapien
cagcaatgcaggagagtcggcgact

SEQ ID NO: 322980 - DNA, 25 bp, Homo sapien
gagagtcggcgacttcagggactga

SEQ ID NO: 322981 - DNA, 25 bp, Homo sapien
ttcctttctagacgcagcaatgcag

SEQ ID NO: 322982 - DNA, 25 bp, Homo sapien
gcattcctttctagacgcagcaatg

SEQ ID NO: 322983 - DNA, 25 bp, Homo sapien
tggtcctgtgcatccggctggtcat

SEQ ID NO: 322984 - DNA, 25 bp, Homo sapien
caacgtgtatacctgcttgcttcaa

SEQ ID NO: 322985 - DNA, 25 bp, Homo sapien
gtccactgggacctccctgctggtc

SEQ ID NO: 322986 - DNA, 25 bp, Homo sapien
tcatcagctcatcgtgcctcagggt

SEQ ID NO: 322987 - DNA, 25 bp, Homo sapien
tctggatttcaggcagtgaggtcat

SEQ ID NO: 322988 - DNA, 25 bp, Homo sapien
agtctggatttcaggcagtgaggtc

SEQ ID NO: 322989 - DNA, 25 bp, Homo sapien
gtctggatttcaggcagtgaggtca

SEQ ID NO: 322990 - DNA, 25 bp, Homo sapien
cataggacctttgactcttctgttt

SEQ ID NO: 322991 - DNA, 25 bp, Homo sapien
cctagtgtgaatacccagttggcat

SEQ ID NO: 322992 - DNA, 25 bp, Homo sapien
tagctgaggccgcaggcatgtacta

SEQ ID NO: 322993 - DNA, 25 bp, Homo sapien
gaatgccattgctgatcagcatagg

SEQ ID NO: 322994 - DNA, 25 bp, Homo sapien
cacagaacattcaacgctgacaaac

SEQ ID NO: 322995 - DNA, 25 bp, Homo sapien
tcacagaacattcaacgctgacaaa

SEQ ID NO: 322996 - DNA, 25 bp, Homo sapien
ttcacagaacattcaacgctgacaa

SEQ ID NO: 322997 - DNA, 25 bp, Homo sapien
gtgtaagaaccacagggtccatggc

SEQ ID NO: 322998 - DNA, 25 bp, Homo sapien
gtaagaaccacagggtccatggcag

SEQ ID NO: 322999 - DNA, 25 bp, Homo sapien
gaagtaatagagtgtaagaaccaca

SEQ ID NO: 323000 - DNA, 25 bp, Homo sapien
gggaagtaatagagtgtaagaacca

SEQ ID NO: 323001 - DNA, 25 bp, Homo sapien
cgccatgtgaaatgaagaggtatgt

SEQ ID NO: 323002 - DNA, 25 bp, Homo sapien
tagtactcagcttgacgccatgtga

SEQ ID NO: 323003 - DNA, 25 bp, Homo sapien
ccctagatgccagggcagtgctgtt

SEQ ID NO: 323004 - DNA, 25 bp, Homo sapien
ggtatgtggaacttggtgatatgaa

SEQ ID NO: 323005 - DNA, 25 bp, Homo sapien
cttccatttccttttgataaccctg

SEQ ID NO: 323006 - DNA, 25 bp, Homo sapien
ttccttttgataaccctggtctcca

SEQ ID NO: 323007 - DNA, 25 bp, Homo sapien
tccttttgataaccctggtctccat

SEQ ID NO: 323008 - DNA, 25 bp, Homo sapien
catttccttttgataaccctggtct

SEQ ID NO: 323009 - DNA, 25 bp, Homo sapien
tcttttacgcaatttacggagaaca

SEQ ID NO: 323010 - DNA, 25 bp, Homo sapien
cgcaatttacggagaacactgagtc

SEQ ID NO: 323011 - DNA, 25 bp, Homo sapien
caggagacattttagaagtgaaagc

SEQ ID NO: 323012 - DNA, 25 bp, Homo sapien
tatgttaataactgttaagagctcc

SEQ ID NO: 323013 - DNA, 25 bp, Homo sapien
gactcattgatacttatcctttggg

SEQ ID NO: 323014 - DNA, 25 bp, Homo sapien
aatactgtttacttagctgctcaaa

SEQ ID NO: 323015 - DNA, 25 bp, Homo sapien
tggaaattctttcaggttgactcct

SEQ ID NO: 323016 - DNA, 25 bp, Homo sapien
tcttttggtactgccattgtttggc

SEQ ID NO: 323017 - DNA, 25 bp, Homo sapien
cctcagcgggcatattgttggatct

SEQ ID NO: 323018 - DNA, 25 bp, Homo sapien
gcacgatgatgtggagctcaaatac

SEQ ID NO: 323019 - DNA, 25 bp, Homo sapien
tgatggccgtttaccattgcctggt

SEQ ID NO: 323020 - DNA, 25 bp, Homo sapien
ctggcagcagtcgatgggcaaagct

SEQ ID NO: 323021 - DNA, 25 bp, Homo sapien
tccatacacattttgctagcttctg

SEQ ID NO: 323022 - DNA, 25 bp, Homo sapien
agggaatcttggtgaacctgacagt

SEQ ID NO: 323023 - DNA, 25 bp, Homo sapien
ggtcgagtgctcacaacttaaaggg

SEQ ID NO: 323024 - DNA, 25 bp, Homo sapien
tgagtattgatcataaccctgttca

SEQ ID NO: 323025 - DNA, 25 bp, Homo sapien
gtcagcttgaacgaaggcgaggaag

SEQ ID NO: 323026 - DNA, 25 bp, Homo sapien
gttaagtcagcttgaacgaaggcga

SEQ ID NO: 323027 - DNA, 25 bp, Homo sapien
taagtcagcttgaacgaaggcgagg

SEQ ID NO: 323028 - DNA, 25 bp, Homo sapien
aagtcagcttgaacgaaggcgagga

SEQ ID NO: 323029 - DNA, 25 bp, Homo sapien
tcagattgacagtccatgaacagga

SEQ ID NO: 323030 - DNA, 25 bp, Homo sapien
cgttgctgcctgctaccagtttgca

SEQ ID NO: 323031 - DNA, 25 bp, Homo sapien
ttagatccatggtgcagtgcctctt

SEQ ID NO: 323032 - DNA, 25 bp, Homo sapien
gactcagaccttggcagaaagatcg

SEQ ID NO: 323033 - DNA, 25 bp, Homo sapien
aggttgtataaatagcgggtgctca

SEQ ID NO: 323034 - DNA, 25 bp, Homo sapien
tgtataaatagcgggtgctcacact

SEQ ID NO: 323035 - DNA, 25 bp, Homo sapien
gttgtataaatagcgggtgctcaca

SEQ ID NO: 323036 - DNA, 25 bp, Homo sapien
ggttgtataaatagcgggtgctcac

SEQ ID NO: 323037 - DNA, 25 bp, Homo sapien
cagtctgccagtggtatgtcctggt

SEQ ID NO: 323038 - DNA, 25 bp, Homo sapien
cagtggtatgtcctggtgtgtttct

SEQ ID NO: 323039 - DNA, 25 bp, Homo sapien
tctgccagtggtatgtcctggtgtg

SEQ ID NO: 323040 - DNA, 25 bp, Homo sapien
tgtccagtctgccagtggtatgtcc

SEQ ID NO: 323041 - DNA, 25 bp, Homo sapien
gggtgtcagctcttaagatcagcct

SEQ ID NO: 323042 - DNA, 25 bp, Homo sapien
ggggtgtcagctcttaagatcagcc

SEQ ID NO: 323043 - DNA, 25 bp, Homo sapien
ttataccatttatgagggtgtcggt

SEQ ID NO: 323044 - DNA, 25 bp, Homo sapien
ggtttataccatttatgagggtgtc

SEQ ID NO: 323045 - DNA, 25 bp, Homo sapien
ccatttatgagggtgtcggtttcct

SEQ ID NO: 323046 - DNA, 25 bp, Homo sapien
cttagggtttataccatttatgagg

SEQ ID NO: 323047 - DNA, 25 bp, Homo sapien
tcttccttggcggtgacctgcatgt

SEQ ID NO: 323048 - DNA, 25 bp, Homo sapien
cctgcatgttgctggagtcctgtgc

SEQ ID NO: 323049 - DNA, 25 bp, Homo sapien
agcatttcttccttggcggtgacct

SEQ ID NO: 323050 - DNA, 25 bp, Homo sapien
gagtcctgtgctgttgccctcttct

SEQ ID NO: 323051 - DNA, 25 bp, Homo sapien
ttcagctggcctttcagctattgct

SEQ ID NO: 323052 - DNA, 25 bp, Homo sapien
tcagctggcctttcagctattgctg

SEQ ID NO: 323053 - DNA, 25 bp, Homo sapien
tgggctgaagcactcttcctgtctt

SEQ ID NO: 323054 - DNA, 25 bp, Homo sapien
cacacctggccccctctctacttcc

SEQ ID NO: 323055 - DNA, 25 bp, Homo sapien
ccacacctggccccctctctacttc

SEQ ID NO: 323056 - DNA, 25 bp, Homo sapien
gctgaagcactcttcctgtcttggc

SEQ ID NO: 323057 - DNA, 25 bp, Homo sapien
tacggtgtgcagtaaattggcattc

SEQ ID NO: 323058 - DNA, 25 bp, Homo sapien
gatgtccccgtgcttgacattctga

SEQ ID NO: 323059 - DNA, 25 bp, Homo sapien
taggcgacgctttgcatacggtgtg

SEQ ID NO: 323060 - DNA, 25 bp, Homo sapien
catttagcacacacttgatgtcccc

SEQ ID NO: 323061 - DNA, 25 bp, Homo sapien
caatagggacttctagaatctcctt

SEQ ID NO: 323062 - DNA, 25 bp, Homo sapien
tctatctttaggacggatggtttcc

SEQ ID NO: 323063 - DNA, 25 bp, Homo sapien
ttcacgtctatctttaggacggatg

SEQ ID NO: 323064 - DNA, 25 bp, Homo sapien
tttgtcaatagggacttctagaatc

SEQ ID NO: 323065 - DNA, 25 bp, Homo sapien
caaccttgggcatcttacagataga

SEQ ID NO: 323066 - DNA, 25 bp, Homo sapien
taaactcatagattacccaggttgc

SEQ ID NO: 323067 - DNA, 25 bp, Homo sapien
tgacttaatagtcctagaggccctg

SEQ ID NO: 323068 - DNA, 25 bp, Homo sapien
tttcttgcccagtccagtcttggaa

SEQ ID NO: 323069 - DNA, 25 bp, Homo sapien
cagtttgagagctgtaagcaagcct

SEQ ID NO: 323070 - DNA, 25 bp, Homo sapien
gaagataacagttcatggtctagga

SEQ ID NO: 323071 - DNA, 25 bp, Homo sapien
gctggtcctagtctcctgagcgcaa

SEQ ID NO: 323072 - DNA, 25 bp, Homo sapien
tgtggagacactctgaccaaggtaa

SEQ ID NO: 323073 - DNA, 25 bp, Homo sapien
tttgggttggactctgccgtgcagc

SEQ ID NO: 323074 - DNA, 25 bp, Homo sapien
tagtgaaaaccttaagacctgcagt

SEQ ID NO: 323075 - DNA, 25 bp, Homo sapien
tgagtagtgtaagaaccccaccctg

SEQ ID NO: 323076 - DNA, 25 bp, Homo sapien
tttacctggccgtacacacgagctg

SEQ ID NO: 323077 - DNA, 25 bp, Homo sapien
tgggacacaagttttgcctccaggc

SEQ ID NO: 323078 - DNA, 25 bp, Homo sapien
tgaactctaacgtcagaacggctga

SEQ ID NO: 323079 - DNA, 25 bp, Homo sapien
cgttcaggaaaccatgcagcccctt

SEQ ID NO: 323080 - DNA, 25 bp, Homo sapien
tgtttcactgagagcgacacttacc

SEQ ID NO: 323081 - DNA, 25 bp, Homo sapien
aaacccagacttccatcaggacgaa

SEQ ID NO: 323082 - DNA, 25 bp, Homo sapien
catcaggacgaaggcgtgaactagg

SEQ ID NO: 323083 - DNA, 25 bp, Homo sapien
ggacgaaggcgtgaactaggccaca

SEQ ID NO: 323084 - DNA, 25 bp, Homo sapien
tgcatccagaatccacggaggcggg

SEQ ID NO: 323085 - DNA, 25 bp, Homo sapien
tagtagttgcatttcagtgtaattt

SEQ ID NO: 323086 - DNA, 25 bp, Homo sapien
ttagtagttgcatttcagtgtaatt

SEQ ID NO: 323087 - DNA, 25 bp, Homo sapien
ctggcaaccaccccgtctgagaagt

SEQ ID NO: 323088 - DNA, 25 bp, Homo sapien
tgcccagccggcccgtctgagaagt

SEQ ID NO: 323089 - DNA, 25 bp, Homo sapien
tgaggagaccctctgcctggcaacc

SEQ ID NO: 323090 - DNA, 25 bp, Homo sapien
cgggccatgatgacagtggcagttt

SEQ ID NO: 323091 - DNA, 25 bp, Homo sapien
aaatgcagcgcaagtaattatgtcc

SEQ ID NO: 323092 - DNA, 25 bp, Homo sapien
gggactggcttcatcgcttgttctg

SEQ ID NO: 323093 - DNA, 25 bp, Homo sapien
tggctccactctaagacgaagactg

SEQ ID NO: 323094 - DNA, 25 bp, Homo sapien
gcttgttctgtccagcagtcgcgtc

SEQ ID NO: 323095 - DNA, 25 bp, Homo sapien
cattttggtccttagatgcaggtaa

SEQ ID NO: 323096 - DNA, 25 bp, Homo sapien
tagatgcaggtaatctgagctgaac

SEQ ID NO: 323097 - DNA, 25 bp, Homo sapien
tggtccttagatgcaggtaatctga

SEQ ID NO: 323098 - DNA, 25 bp, Homo sapien
ggcatttacattttggtccttagat

SEQ ID NO: 323099 - DNA, 25 bp, Homo sapien
aagaaaattagcatgggccggccgt

SEQ ID NO: 323100 - DNA, 25 bp, Homo sapien
taagtgcactacatctagatatgag

SEQ ID NO: 323101 - DNA, 25 bp, Homo sapien
gctagtaagcggtaaactaagattc

SEQ ID NO: 323102 - DNA, 25 bp, Homo sapien
tgtgtaatctccctgacttgtccaa

SEQ ID NO: 323103 - DNA, 25 bp, Homo sapien
gatggagtcgcccagcctgtagcca

SEQ ID NO: 323104 - DNA, 25 bp, Homo sapien
gctttttacacttgtaacattctta

SEQ ID NO: 323105 - DNA, 25 bp, Homo sapien
ttgctttttacacttgtaacattct

SEQ ID NO: 323106 - DNA, 25 bp, Homo sapien
gagtcgcccagcctgtagccaggct

SEQ ID NO: 323107 - DNA, 25 bp, Homo sapien
tggagccagcagtctcgtgacaagt

SEQ ID NO: 323108 - DNA, 25 bp, Homo sapien
cgtgacaagtctgacagcaaagtca

SEQ ID NO: 323109 - DNA, 25 bp, Homo sapien
tgagcacagctctacagtggagcca

SEQ ID NO: 323110 - DNA, 25 bp, Homo sapien
cacagtgggaataaatgagcacagc

SEQ ID NO: 323111 - DNA, 25 bp, Homo sapien
gatcagttgacagtgctgcacctcc

SEQ ID NO: 323112 - DNA, 25 bp, Homo sapien
gactctacaccagaaccatccttag

SEQ ID NO: 323113 - DNA, 25 bp, Homo sapien
gtaacaaaaagtcatggatcattcc

SEQ ID NO: 323114 - DNA, 25 bp, Homo sapien
gtggccggagtagcctctgaatgct

SEQ ID NO: 323115 - DNA, 25 bp, Homo sapien
ttcctttgtgaaaggcccactatca

SEQ ID NO: 323116 - DNA, 25 bp, Homo sapien
actgcctgatgaagacggctcgggc

SEQ ID NO: 323117 - DNA, 25 bp, Homo sapien
actggtgttccttccgttgctgcgg

SEQ ID NO: 323118 - DNA, 25 bp, Homo sapien
tctgcttccaggatcgactgcctga

SEQ ID NO: 323119 - DNA, 25 bp, Homo sapien
tcttcggcatgtaccgaggtgggct

SEQ ID NO: 323120 - DNA, 25 bp, Homo sapien
ttgcagcgagcggagatcgcaccat

SEQ ID NO: 323121 - DNA, 25 bp, Homo sapien
cctaggtgacagagcgagactccat

SEQ ID NO: 323122 - DNA, 25 bp, Homo sapien
cagcctaggtgacagagcgagactc

SEQ ID NO: 323123 - DNA, 25 bp, Homo sapien
tgcactccagcctaggtgacagagc

SEQ ID NO: 323124 - DNA, 25 bp, Homo sapien
tcagaagagttgtgagccccagcta

SEQ ID NO: 323125 - DNA, 25 bp, Homo sapien
cacttacagatcacacaatggcaga

SEQ ID NO: 323126 - DNA, 25 bp, Homo sapien
taatggtgggagctaaacctggcat

SEQ ID NO: 323127 - DNA, 25 bp, Homo sapien
tatagataaaacagcctgaccctgg

SEQ ID NO: 323128 - DNA, 25 bp, Homo sapien
tagaccagatttagagaccaacttg

SEQ ID NO: 323129 - DNA, 25 bp, Homo sapien
ccagtgtcccctcaaatggtggctg

SEQ ID NO: 323130 - DNA, 25 bp, Homo sapien
aaccctcaagaaaggcctgggcgag

SEQ ID NO: 323131 - DNA, 25 bp, Homo sapien
aggttcctctgcgtgggtgtctgcc

SEQ ID NO: 323132 - DNA, 25 bp, Homo sapien
gcagctcttagtcgtcacctacgga

SEQ ID NO: 323133 - DNA, 25 bp, Homo sapien
accatgtactagctgcaaggccctg

SEQ ID NO: 323134 - DNA, 25 bp, Homo sapien
agcaccctttcgaatccctggatgg

SEQ ID NO: 323135 - DNA, 25 bp, Homo sapien
aactgcatttgagtatgggccctgg

SEQ ID NO: 323136 - DNA, 25 bp, Homo sapien
cataactcttttaataaataaagca

SEQ ID NO: 323137 - DNA, 25 bp, Homo sapien
ataactcttttaataaataaagcat

SEQ ID NO: 323138 - DNA, 25 bp, Homo sapien
tacatcacctttaggccagacggag

SEQ ID NO: 323139 - DNA, 25 bp, Homo sapien
ccagacggagagtggagacccagga

SEQ ID NO: 323140 - DNA, 25 bp, Homo sapien
caaatacatcacctttaggccagac

SEQ ID NO: 323141 - DNA, 25 bp, Homo sapien
acctttaggccagacggagagtgga

SEQ ID NO: 323142 - DNA, 25 bp, Homo sapien
gggcatcgctgataaatacagagca

SEQ ID NO: 323143 - DNA, 25 bp, Homo sapien
aacaattaggcaaggcatgagtgac

SEQ ID NO: 323144 - DNA, 25 bp, Homo sapien
ctgcagaaccggctggacactgtca

SEQ ID NO: 323145 - DNA, 25 bp, Homo sapien
cagcaggagagctgacgacgagctc

SEQ ID NO: 323146 - DNA, 25 bp, Homo sapien
aacaaggctccccggacttctggca

SEQ ID NO: 323147 - DNA, 25 bp, Homo sapien
caaggctccccggacttctggcatc

SEQ ID NO: 323148 - DNA, 25 bp, Homo sapien
ccaaacaaggctccccggacttctg

SEQ ID NO: 323149 - DNA, 25 bp, Homo sapien
caaacaaggctccccggacttctgg

SEQ ID NO: 323150 - DNA, 25 bp, Homo sapien
ttttacgatctccattatagatctc

SEQ ID NO: 323151 - DNA, 25 bp, Homo sapien
acctttattttacgatctccattat

SEQ ID NO: 323152 - DNA, 25 bp, Homo sapien
tttacgatctccattatagatctca

SEQ ID NO: 323153 - DNA, 25 bp, Homo sapien
tattttacgatctccattatagatc

SEQ ID NO: 323154 - DNA, 25 bp, Homo sapien
gaaagatacatggtaccctttactc

SEQ ID NO: 323155 - DNA, 25 bp, Homo sapien
tactcccgcagaggaatgcccttgt

SEQ ID NO: 323156 - DNA, 25 bp, Homo sapien
ctttactcccgcagaggaatgccct

SEQ ID NO: 323157 - DNA, 25 bp, Homo sapien
taccctttactcccgcagaggaatg

SEQ ID NO: 323158 - DNA, 25 bp, Homo sapien
caaatctaggtcttacattcctaag

SEQ ID NO: 323159 - DNA, 25 bp, Homo sapien
cattcctaagtgtgataatcagcta

SEQ ID NO: 323160 - DNA, 25 bp, Homo sapien
gtctccaggtcccatagtagcaaaa

SEQ ID NO: 323161 - DNA, 25 bp, Homo sapien
tttacatatgatgaattcagtctcc

SEQ ID NO: 323162 - DNA, 25 bp, Homo sapien
catcaacatcgtttttggtggcaat

SEQ ID NO: 323163 - DNA, 25 bp, Homo sapien
cctggtcaatttggacatcaacatc

SEQ ID NO: 323164 - DNA, 25 bp, Homo sapien
ttgtacataggaattgccttctgca

SEQ ID NO: 323165 - DNA, 25 bp, Homo sapien
tgtcttcaggcaggtaggactcctg

SEQ ID NO: 323166 - DNA, 25 bp, Homo sapien
gtttcctgcaacgaacaatcattcg

SEQ ID NO: 323167 - DNA, 25 bp, Homo sapien
ccagagggaaatcttgtttcctgca

SEQ ID NO: 323168 - DNA, 25 bp, Homo sapien
aatcattcggggctccagcaactgg

SEQ ID NO: 323169 - DNA, 25 bp, Homo sapien
tcggggctccagcaactggtacaaa

SEQ ID NO: 323170 - DNA, 25 bp, Homo sapien
gagctggtctctaataggcattcta

SEQ ID NO: 323171 - DNA, 25 bp, Homo sapien
tacataattgagtagtaggcctgga

SEQ ID NO: 323172 - DNA, 25 bp, Homo sapien
tggaagtcttatccaagcagacaga

SEQ ID NO: 323173 - DNA, 25 bp, Homo sapien
tgtggctatcaacagtagatctggt

SEQ ID NO: 323174 - DNA, 25 bp, Homo sapien
cacttggtacctggttgtatctttt

SEQ ID NO: 323175 - DNA, 25 bp, Homo sapien
tggtacctggttgtatcttttacca

SEQ ID NO: 323176 - DNA, 25 bp, Homo sapien
cagcaatagaaatctccacttcagt

SEQ ID NO: 323177 - DNA, 25 bp, Homo sapien
gaaatctccacttcagtaccaatgt

SEQ ID NO: 323178 - DNA, 25 bp, Homo sapien
tctctaaccacagcaatagaaatct

SEQ ID NO: 323179 - DNA, 25 bp, Homo sapien
tccacttcagtaccaatgtctcaga

SEQ ID NO: 323180 - DNA, 25 bp, Homo sapien
agcccagcttgtgaacaggccacgc

SEQ ID NO: 323181 - DNA, 25 bp, Homo sapien
cttatttacagggttcaatgacggc

SEQ ID NO: 323182 - DNA, 25 bp, Homo sapien
agttgcatgcaacagtatacttgga

SEQ ID NO: 323183 - DNA, 25 bp, Homo sapien
caatgacggcaagaagttaagactg

SEQ ID NO: 323184 - DNA, 25 bp, Homo sapien
ctgatactcagaatttagtgatgga

SEQ ID NO: 323185 - DNA, 25 bp, Homo sapien
gagtctcgcttgattcatcaaattg

SEQ ID NO: 323186 - DNA, 25 bp, Homo sapien
cgcttgattcatcaaattggacatc

SEQ ID NO: 323187 - DNA, 25 bp, Homo sapien
tctcttgctctgaggactttgagtc

SEQ ID NO: 323188 - DNA, 25 bp, Homo sapien
aggactttgagtctcgcttgattca

SEQ ID NO: 323189 - DNA, 25 bp, Homo sapien
tctttagtctttgggtttgcacaag

SEQ ID NO: 323190 - DNA, 25 bp, Homo sapien
aagccgacctttctctatgttgaac

SEQ ID NO: 323191 - DNA, 25 bp, Homo sapien
tgggtttgcacaagccgacctttct

SEQ ID NO: 323192 - DNA, 25 bp, Homo sapien
cttctgctgctcaatctgtttctct

SEQ ID NO: 323193 - DNA, 25 bp, Homo sapien
gatcacaaggtcaagagattgagac

SEQ ID NO: 323194 - DNA, 25 bp, Homo sapien
cagcacttggggaggacgaggtagg

SEQ ID NO: 323195 - DNA, 25 bp, Homo sapien
gcacttggggaggacgaggtaggcg

SEQ ID NO: 323196 - DNA, 25 bp, Homo sapien
catcctggccaacacggtgaaaccc

SEQ ID NO: 323197 - DNA, 25 bp, Homo sapien
tttctcattggcttcttgttcaatg

SEQ ID NO: 323198 - DNA, 25 bp, Homo sapien
caatgaaagccatcatatgctttat

SEQ ID NO: 323199 - DNA, 25 bp, Homo sapien
tgttcaatgaaagccatcatatgct

SEQ ID NO: 323200 - DNA, 25 bp, Homo sapien
tcttgttcaatgaaagccatcatat

SEQ ID NO: 323201 - DNA, 25 bp, Homo sapien
tagatgtgtgggaaatcactgacct

SEQ ID NO: 323202 - DNA, 25 bp, Homo sapien
tctgtggccaccatcgtgtttccaa

SEQ ID NO: 323203 - DNA, 25 bp, Homo sapien
tacctaatccagacctagatgtgtg

SEQ ID NO: 323204 - DNA, 25 bp, Homo sapien
catggtacttacaatatcttgagcc

SEQ ID NO: 323205 - DNA, 25 bp, Homo sapien
ttttgcacgtcagcatcgctgagag

SEQ ID NO: 323206 - DNA, 25 bp, Homo sapien
ctgcttttgcacgtcagcatcgctg

SEQ ID NO: 323207 - DNA, 25 bp, Homo sapien
gcacgtcagcatcgctgagagccat

SEQ ID NO: 323208 - DNA, 25 bp, Homo sapien
gcttttgcacgtcagcatcgctgag

SEQ ID NO: 323209 - DNA, 25 bp, Homo sapien
aatgctaggccggtgaacagtaggc

SEQ ID NO: 323210 - DNA, 25 bp, Homo sapien
cgcagatctcgggttcctttacttt

SEQ ID NO: 323211 - DNA, 25 bp, Homo sapien
aatcggcaaagggaacccctgcgca

SEQ ID NO: 323212 - DNA, 25 bp, Homo sapien
acagtaggctcgagtttaggtttga

SEQ ID NO: 323213 - DNA, 25 bp, Homo sapien
ggtcacatctggacggagagacctc

SEQ ID NO: 323214 - DNA, 25 bp, Homo sapien
tccggataccgttccggatgtcagg

SEQ ID NO: 323215 - DNA, 25 bp, Homo sapien
tccggatgtcaggtagttcaggtcc

SEQ ID NO: 323216 - DNA, 25 bp, Homo sapien
tggtcggtccttccgctccggatac

SEQ ID NO: 323217 - DNA, 25 bp, Homo sapien
tagggccgcgggtcggagcactcac

SEQ ID NO: 323218 - DNA, 25 bp, Homo sapien
ggcggcggcggtagattagggccgc

SEQ ID NO: 323219 - DNA, 25 bp, Homo sapien
cggcggcggtagattagggccgcgg

SEQ ID NO: 323220 - DNA, 25 bp, Homo sapien
gtagattagggccgcgggtcggagc

SEQ ID NO: 323221 - DNA, 25 bp, Homo sapien
gggggaccctgtcggaagcaactgc

SEQ ID NO: 323222 - DNA, 25 bp, Homo sapien
accctgtcggaagcaactgccgccg

SEQ ID NO: 323223 - DNA, 25 bp, Homo sapien
ctgtcggaagcaactgccgccgccg

SEQ ID NO: 323224 - DNA, 25 bp, Homo sapien
gggaccctgtcggaagcaactgccg

SEQ ID NO: 323225 - DNA, 25 bp, Homo sapien
atgtacaaataatcccgagaccagg

SEQ ID NO: 323226 - DNA, 25 bp, Homo sapien
catgttcctcgttagtagagaaaaa

SEQ ID NO: 323227 - DNA, 25 bp, Homo sapien
tgtacaaataatcccgagaccaggt

SEQ ID NO: 323228 - DNA, 25 bp, Homo sapien
tgttcataactcatgttcctcgtta

SEQ ID NO: 323229 - DNA, 25 bp, Homo sapien
tctgaacaattgatgccttcatatg

SEQ ID NO: 323230 - DNA, 25 bp, Homo sapien
attgatgccttcatatgttacttgg

SEQ ID NO: 323231 - DNA, 25 bp, Homo sapien
tctgttatctgaacaattgatgcct

SEQ ID NO: 323232 - DNA, 25 bp, Homo sapien
gccttcatatgttacttggtcccca

SEQ ID NO: 323233 - DNA, 25 bp, Homo sapien
gcaatgcgaggaaccacttggaact

SEQ ID NO: 323234 - DNA, 25 bp, Homo sapien
caggtgtggccacgtagcaatgcga

SEQ ID NO: 323235 - DNA, 25 bp, Homo sapien
aaatctagcatggtaacgttcagcc

SEQ ID NO: 323236 - DNA, 25 bp, Homo sapien
cacatggccctgcttaactgcaagg

SEQ ID NO: 323237 - DNA, 25 bp, Homo sapien
tccccacttgtgagtgcaactgcaa

SEQ ID NO: 323238 - DNA, 25 bp, Homo sapien
cacatgtgtcttgtgtcaaggcagg

SEQ ID NO: 323239 - DNA, 25 bp, Homo sapien
aggttcctgctaagatcccacgggc

SEQ ID NO: 323240 - DNA, 25 bp, Homo sapien
taactctggctagagagacacatgt

SEQ ID NO: 323241 - DNA, 25 bp, Homo sapien
gagttcaagagtggtggcatcttca

SEQ ID NO: 323242 - DNA, 25 bp, Homo sapien
gtgtctttccatgcccgagggccac

SEQ ID NO: 323243 - DNA, 25 bp, Homo sapien
cagtatatgctagttgagcatcggc

SEQ ID NO: 323244 - DNA, 25 bp, Homo sapien
gacgtcactatgcagggcacacgtg

SEQ ID NO: 323245 - DNA, 25 bp, Homo sapien
cagatgcagccactacctaactagg

SEQ ID NO: 323246 - DNA, 25 bp, Homo sapien
tgttcatttcctcaggctttgcgct

SEQ ID NO: 323247 - DNA, 25 bp, Homo sapien
gagtgagccgtgaacctggagacat

SEQ ID NO: 323248 - DNA, 25 bp, Homo sapien
tgattccctcaataatatgacagta

SEQ ID NO: 323249 - DNA, 25 bp, Homo sapien
tgttctttgcaccaccagaagaaac

SEQ ID NO: 323250 - DNA, 25 bp, Homo sapien
gctcagagtgaaattgttctcaggg

SEQ ID NO: 323251 - DNA, 25 bp, Homo sapien
tccaggtgattctaccccgctgtca

SEQ ID NO: 323252 - DNA, 25 bp, Homo sapien
tccctgttgcagagtttggaataac

SEQ ID NO: 323253 - DNA, 25 bp, Homo sapien
caacctgtttccattgtggttggaa

SEQ ID NO: 323254 - DNA, 25 bp, Homo sapien
aatggctgacgtatggatggatgtg

SEQ ID NO: 323255 - DNA, 25 bp, Homo sapien
tgtaggcgcagtgtggttcaacctg

SEQ ID NO: 323256 - DNA, 25 bp, Homo sapien
taaaagtccactccaaaacatgaaa

SEQ ID NO: 323257 - DNA, 25 bp, Homo sapien
cactgcgcggcagcacttcttttta

SEQ ID NO: 323258 - DNA, 25 bp, Homo sapien
gaaatcatgagtccgtcagtgccct

SEQ ID NO: 323259 - DNA, 25 bp, Homo sapien
ttactcatatgcgtctccagtggcc

SEQ ID NO: 323260 - DNA, 25 bp, Homo sapien
cagccctagcgtggtatgtattgca

SEQ ID NO: 323261 - DNA, 25 bp, Homo sapien
cctgggacatagcttaccactggaa

SEQ ID NO: 323262 - DNA, 25 bp, Homo sapien
ttgaaaaagtcaagcccctgtgtac

SEQ ID NO: 323263 - DNA, 25 bp, Homo sapien
ggcacccgtggcttcatgtctttag

SEQ ID NO: 323264 - DNA, 25 bp, Homo sapien
gatactgcctgctgtaagaccatcc

SEQ ID NO: 323265 - DNA, 25 bp, Homo sapien
ccgtgtgtagatttacagatgtgca

SEQ ID NO: 323266 - DNA, 25 bp, Homo sapien
taatttttaagtgggaacctgcaca

SEQ ID NO: 323267 - DNA, 25 bp, Homo sapien
catgtgtggatgatatgaaggccat

SEQ ID NO: 323268 - DNA, 25 bp, Homo sapien
ggaaataaaggcaccgtgtgtagat

SEQ ID NO: 323269 - DNA, 25 bp, Homo sapien
tgaccacatcgagctttagccagtc

SEQ ID NO: 323270 - DNA, 25 bp, Homo sapien
gaagtcacagctatcttccagcctg

SEQ ID NO: 323271 - DNA, 25 bp, Homo sapien
ccagggctccgtctacactggaagc

SEQ ID NO: 323272 - DNA, 25 bp, Homo sapien
ggaacgctgttgacatgccagggct

SEQ ID NO: 323273 - DNA, 25 bp, Homo sapien
ccttccaacaattcagctgggttta

SEQ ID NO: 323274 - DNA, 25 bp, Homo sapien
tccttccaacaattcagctgggttt

SEQ ID NO: 323275 - DNA, 25 bp, Homo sapien
cttccaacaattcagctgggtttaa

SEQ ID NO: 323276 - DNA, 25 bp, Homo sapien
caccaggagtgtgacgtgagccttt

SEQ ID NO: 323277 - DNA, 25 bp, Homo sapien
accaggagtgtgacgtgagcctttg

SEQ ID NO: 323278 - DNA, 25 bp, Homo sapien
caggagtgtgacgtgagcctttgcc

SEQ ID NO: 323279 - DNA, 25 bp, Homo sapien
ccaggagtgtgacgtgagcctttgc

SEQ ID NO: 323280 - DNA, 25 bp, Homo sapien
gttgtgtgaaagacatcacggagca

SEQ ID NO: 323281 - DNA, 25 bp, Homo sapien
taggtgcgtaggttctggttaataa

SEQ ID NO: 323282 - DNA, 25 bp, Homo sapien
acatcacggagcaaggacggcgtgt

SEQ ID NO: 323283 - DNA, 25 bp, Homo sapien
cagcaccagcatggtcttctccttc

SEQ ID NO: 323284 - DNA, 25 bp, Homo sapien
agggcagtggccaggtccctgttcc

SEQ ID NO: 323285 - DNA, 25 bp, Homo sapien
cagtggccaggtccctgttccggtc

SEQ ID NO: 323286 - DNA, 25 bp, Homo sapien
ggcagtggccaggtccctgttccgg

SEQ ID NO: 323287 - DNA, 25 bp, Homo sapien
cagggcagtggccaggtccctgttc

SEQ ID NO: 323288 - DNA, 25 bp, Homo sapien
ctcctccgaccggctggtgttcctg

SEQ ID NO: 323289 - DNA, 25 bp, Homo sapien
tcctccgaccggctggtgttcctga

SEQ ID NO: 323290 - DNA, 25 bp, Homo sapien
accaggcccggagggatgctacggt

SEQ ID NO: 323291 - DNA, 25 bp, Homo sapien
caggcccggagggatgctacggtcc

SEQ ID NO: 323292 - DNA, 25 bp, Homo sapien
tcaccaggcccggagggatgctacg

SEQ ID NO: 323293 - DNA, 25 bp, Homo sapien
ggcccggagggatgctacggtccat

SEQ ID NO: 323294 - DNA, 25 bp, Homo sapien
cctggcaatattccggatgatgtct

SEQ ID NO: 323295 - DNA, 25 bp, Homo sapien
aatattccggatgatgtcttcttga

SEQ ID NO: 323296 - DNA, 25 bp, Homo sapien
tgtccccgacctgggcgaggtgcct

SEQ ID NO: 323297 - DNA, 25 bp, Homo sapien
cgaggtgcctggcaatattccggat

SEQ ID NO: 323298 - DNA, 25 bp, Homo sapien
tgagtaccagcgctgagctgggttc

SEQ ID NO: 323299 - DNA, 25 bp, Homo sapien
gtccgcgatgggacaaggccagccc

SEQ ID NO: 323300 - DNA, 25 bp, Homo sapien
agcgggcgggctgagtaccagcgct

SEQ ID NO: 323301 - DNA, 25 bp, Homo sapien
gggcacgtgctccactccaccaggg

SEQ ID NO: 323302 - DNA, 25 bp, Homo sapien
cacgcctgaggtacaagcctggcag

SEQ ID NO: 323303 - DNA, 25 bp, Homo sapien
cgtctcaggaaaaccccagttgtca

SEQ ID NO: 323304 - DNA, 25 bp, Homo sapien
cacttttgccctctcaagcctgaga

SEQ ID NO: 323305 - DNA, 25 bp, Homo sapien
ccagttgtcactggcaccggcaagg

SEQ ID NO: 323306 - DNA, 25 bp, Homo sapien
atgaaggccacgctcaactgccacg

SEQ ID NO: 323307 - DNA, 25 bp, Homo sapien
cagcacttgctgtgttattgtctga

SEQ ID NO: 323308 - DNA, 25 bp, Homo sapien
agctccatgaaggccacgctcaact

SEQ ID NO: 323309 - DNA, 25 bp, Homo sapien
tcaactgccacgctccctgccgcct

SEQ ID NO: 323310 - DNA, 25 bp, Homo sapien
tgaggacagaagattgcttaaggcc

SEQ ID NO: 323311 - DNA, 25 bp, Homo sapien
agaaggtaagctccctaagggctgt

SEQ ID NO: 323312 - DNA, 25 bp, Homo sapien
ttaaagggagccaggtgtaccgcac

SEQ ID NO: 323313 - DNA, 25 bp, Homo sapien
aatgaatgggccctgtacctagctc

SEQ ID NO: 323314 - DNA, 25 bp, Homo sapien
tattcttcccaagcgggagtggctg

SEQ ID NO: 323315 - DNA, 25 bp, Homo sapien
agcactggcagctcgtggcccagtg

SEQ ID NO: 323316 - DNA, 25 bp, Homo sapien
cggttgccatcagtctgcagctcat

SEQ ID NO: 323317 - DNA, 25 bp, Homo sapien
tgccatcagtctgcagctcatcgta

SEQ ID NO: 323318 - DNA, 25 bp, Homo sapien
taggtttgtgatgcactcatccctg

SEQ ID NO: 323319 - DNA, 25 bp, Homo sapien
gtaggtttgtgatgcactcatccct

SEQ ID NO: 323320 - DNA, 25 bp, Homo sapien
cagtaggtttgtgatgcactcatcc

SEQ ID NO: 323321 - DNA, 25 bp, Homo sapien
agtaggtttgtgatgcactcatccc

SEQ ID NO: 323322 - DNA, 25 bp, Homo sapien
ctgcaggaggtctcaacaggcagag

SEQ ID NO: 323323 - DNA, 25 bp, Homo sapien
ggagcttcccactaggtgagaaggc

SEQ ID NO: 323324 - DNA, 25 bp, Homo sapien
ttaagcagcactgcccgtagatggc

SEQ ID NO: 323325 - DNA, 25 bp, Homo sapien
gaggaatctgctggacctcctgaaa

SEQ ID NO: 323326 - DNA, 25 bp, Homo sapien
aacaggcggagcctctttccgctca

SEQ ID NO: 323327 - DNA, 25 bp, Homo sapien
acaggcggagcctctttccgctcat

SEQ ID NO: 323328 - DNA, 25 bp, Homo sapien
tgtgcttccaacaggcggagcctct

SEQ ID NO: 323329 - DNA, 25 bp, Homo sapien
ttccaacaggcggagcctctttccg

SEQ ID NO: 323330 - DNA, 25 bp, Homo sapien
agggtattgggcagatggaagattt

SEQ ID NO: 323331 - DNA, 25 bp, Homo sapien
ctccttcacgggctcaggagggtat

SEQ ID NO: 323332 - DNA, 25 bp, Homo sapien
ccttcacgggctcaggagggtattg

SEQ ID NO: 323333 - DNA, 25 bp, Homo sapien
ctcaggagggtattgggcagatgga

SEQ ID NO: 323334 - DNA, 25 bp, Homo sapien
tgtccttaatccgaatcccacaggg

SEQ ID NO: 323335 - DNA, 25 bp, Homo sapien
tgggtgtgtccttaatccgaatccc

SEQ ID NO: 323336 - DNA, 25 bp, Homo sapien
tccttaatccgaatcccacagggag

SEQ ID NO: 323337 - DNA, 25 bp, Homo sapien
ggtgtgtccttaatccgaatcccac

SEQ ID NO: 323338 - DNA, 25 bp, Homo sapien
agggactgttcttggggtactgact

SEQ ID NO: 323339 - DNA, 25 bp, Homo sapien
tgggtgtgcccagaccagagaaaga

SEQ ID NO: 323340 - DNA, 25 bp, Homo sapien
ttcttggggtactgactgtgtttgg

SEQ ID NO: 323341 - DNA, 25 bp, Homo sapien
gcagctgggtgtgcccagaccagag

SEQ ID NO: 323342 - DNA, 25 bp, Homo sapien
ggcagcgcggcagctccgactcact

SEQ ID NO: 323343 - DNA, 25 bp, Homo sapien
gcagcgcggcagctccgactcactc

SEQ ID NO: 323344 - DNA, 25 bp, Homo sapien
tggttcacagtgtcccagtggcgac

SEQ ID NO: 323345 - DNA, 25 bp, Homo sapien
actctgccggatgggggtgacattc

SEQ ID NO: 323346 - DNA, 25 bp, Homo sapien
aggactctgccggatgggggtgaca

SEQ ID NO: 323347 - DNA, 25 bp, Homo sapien
tctgccggatgggggtgacattccc

SEQ ID NO: 323348 - DNA, 25 bp, Homo sapien
ctccaggactctgccggatgggggt

SEQ ID NO: 323349 - DNA, 25 bp, Homo sapien
aggcctcccctccaatcctcaccac

SEQ ID NO: 323350 - DNA, 25 bp, Homo sapien
ccccagcaggcaccgccaggcccct

SEQ ID NO: 323351 - DNA, 25 bp, Homo sapien
cacggcctcgccaggaaggcgcttc

SEQ ID NO: 323352 - DNA, 25 bp, Homo sapien
gcctcgccaggaaggcgcttctgcc

SEQ ID NO: 323353 - DNA, 25 bp, Homo sapien
ggtttcggagacacgactgaggctc

SEQ ID NO: 323354 - DNA, 25 bp, Homo sapien
tcggagacacgactgaggctccagg

SEQ ID NO: 323355 - DNA, 25 bp, Homo sapien
tttcggagacacgactgaggctcca

SEQ ID NO: 323356 - DNA, 25 bp, Homo sapien
ctggtttcggagacacgactgaggc

SEQ ID NO: 323357 - DNA, 25 bp, Homo sapien
gacatgtttggctgaaataaaacca

SEQ ID NO: 323358 - DNA, 25 bp, Homo sapien
cccataaacctaaaagtccatggag

SEQ ID NO: 323359 - DNA, 25 bp, Homo sapien
agtccatggagaattcaatttctca

SEQ ID NO: 323360 - DNA, 25 bp, Homo sapien
tagaaccaatacaagagtatgaaaa

SEQ ID NO: 323361 - DNA, 25 bp, Homo sapien
cacagatgctgaatacagtgaatcg

SEQ ID NO: 323362 - DNA, 25 bp, Homo sapien
caaagcctgtgtgtccggctcaaga

SEQ ID NO: 323363 - DNA, 25 bp, Homo sapien
ttattgaatcagctgtccctatgag

SEQ ID NO: 323364 - DNA, 25 bp, Homo sapien
ggtagagaatttgccgagtcagtaa

SEQ ID NO: 323365 - DNA, 25 bp, Homo sapien
aggtcagtatgatcacccccatttg

SEQ ID NO: 323366 - DNA, 25 bp, Homo sapien
gggtctggctctgttccgcaggccg

SEQ ID NO: 323367 - DNA, 25 bp, Homo sapien
tctggctctgttccgcaggccggac

SEQ ID NO: 323368 - DNA, 25 bp, Homo sapien
ttgccaaagatttacatcaattacg

SEQ ID NO: 323369 - DNA, 25 bp, Homo sapien
ttacgtgaacttagatgattattgt

SEQ ID NO: 323370 - DNA, 25 bp, Homo sapien
cggcccctcgctgcccaccgagcca

SEQ ID NO: 323371 - DNA, 25 bp, Homo sapien
atcatgaccccagcaccgctgcaca

SEQ ID NO: 323372 - DNA, 25 bp, Homo sapien
cctcgctgcccaccgagccatcatg

SEQ ID NO: 323373 - DNA, 25 bp, Homo sapien
gcccaccgagccatcatgaccccag

SEQ ID NO: 323374 - DNA, 25 bp, Homo sapien
gcgaggatccgcacatcattgccag

SEQ ID NO: 323375 - DNA, 25 bp, Homo sapien
tcattgccagtgctctaaggagcgg

SEQ ID NO: 323376 - DNA, 25 bp, Homo sapien
gtgtctgcggtgctggaaagaccac

SEQ ID NO: 323377 - DNA, 25 bp, Homo sapien
tgaccgcgctttgtcagccctgagc

SEQ ID NO: 323378 - DNA, 25 bp, Homo sapien
gaggcagcgtctcccaggcgcgcgg

SEQ ID NO: 323379 - DNA, 25 bp, Homo sapien
aggcgcgcggacacggtcgactacc

SEQ ID NO: 323380 - DNA, 25 bp, Homo sapien
gtcgactacccgcttcctccttatg

SEQ ID NO: 323381 - DNA, 25 bp, Homo sapien
cttcctccttatggcgccccgcgcg

SEQ ID NO: 323382 - DNA, 25 bp, Homo sapien
tccagcgccgctgggataattccta

SEQ ID NO: 323383 - DNA, 25 bp, Homo sapien
ttcctaatgattctctgggaaacat

SEQ ID NO: 323384 - DNA, 25 bp, Homo sapien
cgccgctgggataattcctaatgat

SEQ ID NO: 323385 - DNA, 25 bp, Homo sapien
cagcgccgctgggataattcctaat

SEQ ID NO: 323386 - DNA, 25 bp, Homo sapien
tcaaacacggtgctctgagcccgaa

SEQ ID NO: 323387 - DNA, 25 bp, Homo sapien
tctgagcccgaatgagggtttcttt

SEQ ID NO: 323388 - DNA, 25 bp, Homo sapien
ttcatatcctcaaacacggtgctct

SEQ ID NO: 323389 - DNA, 25 bp, Homo sapien
tctcattcatatcctcaaacacggt

SEQ ID NO: 323390 - DNA, 25 bp, Homo sapien
tcagatcacaatggggatcggaccc

SEQ ID NO: 323391 - DNA, 25 bp, Homo sapien
ttcccacggctccagagcagtagtg

SEQ ID NO: 323392 - DNA, 25 bp, Homo sapien
gaaggagactgcagcattcccacgg

SEQ ID NO: 323393 - DNA, 25 bp, Homo sapien
ctggagagcacgttctctgtggaag

SEQ ID NO: 323394 - DNA, 25 bp, Homo sapien
ccacggctccagagcagtagtggcg

SEQ ID NO: 323395 - DNA, 25 bp, Homo sapien
ggctcgctgcagtaacagactggga

SEQ ID NO: 323396 - DNA, 25 bp, Homo sapien
gagctccggacctggcgtattgcta

SEQ ID NO: 323397 - DNA, 25 bp, Homo sapien
agctccggacctggcgtattgctag

SEQ ID NO: 323398 - DNA, 25 bp, Homo sapien
gcaggctcgctgcagtaacagactg

SEQ ID NO: 323399 - DNA, 25 bp, Homo sapien
aagagtgccgagattgatgctgtcc

SEQ ID NO: 323400 - DNA, 25 bp, Homo sapien
gctcttcacatccctgggtgaagat

SEQ ID NO: 323401 - DNA, 25 bp, Homo sapien
ccatccagcgtctccgcggtcacca

SEQ ID NO: 323402 - DNA, 25 bp, Homo sapien
tggggagacagtgcgcgtagcttac

SEQ ID NO: 323403 - DNA, 25 bp, Homo sapien
cagggtgcggttctgaccagaagca

SEQ ID NO: 323404 - DNA, 25 bp, Homo sapien
aagccacggcacagaactctacaag

SEQ ID NO: 323405 - DNA, 25 bp, Homo sapien
cttgggatagaagccacggcacaga

SEQ ID NO: 323406 - DNA, 25 bp, Homo sapien
tctacaagggacactggtgcactga

SEQ ID NO: 323407 - DNA, 25 bp, Homo sapien
cttcgtgagctgtaactggccaggg

SEQ ID NO: 323408 - DNA, 25 bp, Homo sapien
cagatcaagtttcttgggccccaat

SEQ ID NO: 323409 - DNA, 25 bp, Homo sapien
gggccccaatttcctgtcatcaaag

SEQ ID NO: 323410 - DNA, 25 bp, Homo sapien
tgatagtacattcctcagaggcggg

SEQ ID NO: 323411 - DNA, 25 bp, Homo sapien
aggtgccgctcattccccggccggg

SEQ ID NO: 323412 - DNA, 25 bp, Homo sapien
tgtgctctcactgaagctcaggtgc

SEQ ID NO: 323413 - DNA, 25 bp, Homo sapien
tcttcttgagggtgggctgtctcca

SEQ ID NO: 323414 - DNA, 25 bp, Homo sapien
agggtgggctgtctccaggtgccgc

SEQ ID NO: 323415 - DNA, 25 bp, Homo sapien
tgcactgagacccaggtgtcatcgt

SEQ ID NO: 323416 - DNA, 25 bp, Homo sapien
ttcctttcctacaaactgcactgag

SEQ ID NO: 323417 - DNA, 25 bp, Homo sapien
tgaagttcatgccagccagaggagc

SEQ ID NO: 323418 - DNA, 25 bp, Homo sapien
cattcctgtgttcgcttctgtacca

SEQ ID NO: 323419 - DNA, 25 bp, Homo sapien
actgagaggctcctctcgcctgctg

SEQ ID NO: 323420 - DNA, 25 bp, Homo sapien
gcccctcaacgctgacactccagca

SEQ ID NO: 323421 - DNA, 25 bp, Homo sapien
gctgggccgggtgcctgtgggttga

SEQ ID NO: 323422 - DNA, 25 bp, Homo sapien
tgtgggttgagcagcccctcaacgc

SEQ ID NO: 323423 - DNA, 25 bp, Homo sapien
ccatctggacaaatccctcatcctt

SEQ ID NO: 323424 - DNA, 25 bp, Homo sapien
ggacaaatccctcatccttgacgat

SEQ ID NO: 323425 - DNA, 25 bp, Homo sapien
tcatccttgacgatggccttgtgaa

SEQ ID NO: 323426 - DNA, 25 bp, Homo sapien
atccttgacgatggccttgtgaaga

SEQ ID NO: 323427 - DNA, 25 bp, Homo sapien
gcccccgctgcaggaagaccttggg

SEQ ID NO: 323428 - DNA, 25 bp, Homo sapien
ctgctgaaaaagctcctggtgaagc

SEQ ID NO: 323429 - DNA, 25 bp, Homo sapien
cacgaagaggctgctgaaaaagctc

SEQ ID NO: 323430 - DNA, 25 bp, Homo sapien
gggcacacgaagaggctgctgaaaa

SEQ ID NO: 323431 - DNA, 25 bp, Homo sapien
agagctgctgcggtctttccctccc

SEQ ID NO: 323432 - DNA, 25 bp, Homo sapien
tggcttctagctgcctgtaggcggt

SEQ ID NO: 323433 - DNA, 25 bp, Homo sapien
cggtgtggctcacgtgcacagagct

SEQ ID NO: 323434 - DNA, 25 bp, Homo sapien
tggaatagctgggaacgcagctgga

SEQ ID NO: 323435 - DNA, 25 bp, Homo sapien
ttgagaacgcttgacgcaggaagtc

SEQ ID NO: 323436 - DNA, 25 bp, Homo sapien
gctctactagaactgggtgtcctca

SEQ ID NO: 323437 - DNA, 25 bp, Homo sapien
tcaagggaagacttaactctccgag

SEQ ID NO: 323438 - DNA, 25 bp, Homo sapien
cattgctggtcaaaatcggcctgag

SEQ ID NO: 323439 - DNA, 25 bp, Homo sapien
caaaggctcgggtccaccttccaga

SEQ ID NO: 323440 - DNA, 25 bp, Homo sapien
tgcaaaggctcgggtccaccttcca

SEQ ID NO: 323441 - DNA, 25 bp, Homo sapien
tctgcaaaggctcgggtccaccttc

SEQ ID NO: 323442 - DNA, 25 bp, Homo sapien
tctctgcaaaggctcgggtccacct

SEQ ID NO: 323443 - DNA, 25 bp, Homo sapien
aggctgaccaggaccagaaggtgac

SEQ ID NO: 323444 - DNA, 25 bp, Homo sapien
tggaggatgccacagtgttaaggct

SEQ ID NO: 323445 - DNA, 25 bp, Homo sapien
tgggctctcctgctacgtctggcca

SEQ ID NO: 323446 - DNA, 25 bp, Homo sapien
gttaaggctgaccaggaccagaagg

SEQ ID NO: 323447 - DNA, 25 bp, Homo sapien
agcagatccctaggccacactcctt

SEQ ID NO: 323448 - DNA, 25 bp, Homo sapien
ccggttttgtggcattcgaggagag

SEQ ID NO: 323449 - DNA, 25 bp, Homo sapien
ctacaagggccgaaggcggctctgc

SEQ ID NO: 323450 - DNA, 25 bp, Homo sapien
ccttccaagccactttgcaaactgt

SEQ ID NO: 323451 - DNA, 25 bp, Homo sapien
agatggaatctagaaaccctcctct

SEQ ID NO: 323452 - DNA, 25 bp, Homo sapien
ctgtggcggccactagcggcgttat

SEQ ID NO: 323453 - DNA, 25 bp, Homo sapien
tgagaacaggtggagaatcagcgct

SEQ ID NO: 323454 - DNA, 25 bp, Homo sapien
gcggcgttatctcccggatgtgcat

SEQ ID NO: 323455 - DNA, 25 bp, Homo sapien
gccactagcggcgttatctcccgga

SEQ ID NO: 323456 - DNA, 25 bp, Homo sapien
tccagatggtctagcgccagggtga

SEQ ID NO: 323457 - DNA, 25 bp, Homo sapien
ttatgtccccatgaagatccggcac

SEQ ID NO: 323458 - DNA, 25 bp, Homo sapien
taaatagatgcacgtgaggagcacc

SEQ ID NO: 323459 - DNA, 25 bp, Homo sapien
tgatctgcttgagaggcaccagcct

SEQ ID NO: 323460 - DNA, 25 bp, Homo sapien
ctccagcatctcattgagaatctgc

SEQ ID NO: 323461 - DNA, 25 bp, Homo sapien
agctcctgctgcagtcgactctgcc

SEQ ID NO: 323462 - DNA, 25 bp, Homo sapien
actgccatgcgttcccggagctcct

SEQ ID NO: 323463 - DNA, 25 bp, Homo sapien
gcagtcgactctgccggtcttccag

SEQ ID NO: 323464 - DNA, 25 bp, Homo sapien
cttccactgccatgcgttcccggag

SEQ ID NO: 323465 - DNA, 25 bp, Homo sapien
tcctgcatcagcttggggtcgtcct

SEQ ID NO: 323466 - DNA, 25 bp, Homo sapien
cgtagcgcaccatggcgttcttctc

SEQ ID NO: 323467 - DNA, 25 bp, Homo sapien
actagcttgaaccactcctgcatca

SEQ ID NO: 323468 - DNA, 25 bp, Homo sapien
agctccgactcgtagcgcaccatgg

SEQ ID NO: 323469 - DNA, 25 bp, Homo sapien
ctgccgagagaacgcttgtgtcggg

SEQ ID NO: 323470 - DNA, 25 bp, Homo sapien
gcttgtgtcgggtgcagggagtgcc

SEQ ID NO: 323471 - DNA, 25 bp, Homo sapien
tcgggtgcagggagtgccgcgccca

SEQ ID NO: 323472 - DNA, 25 bp, Homo sapien
agaacgcttgtgtcgggtgcaggga

SEQ ID NO: 323473 - DNA, 25 bp, Homo sapien
actagctatggagagctcgcccacg

SEQ ID NO: 323474 - DNA, 25 bp, Homo sapien
aatgccaccggagacgtgcggacag

SEQ ID NO: 323475 - DNA, 25 bp, Homo sapien
cggacagcgctcactagctatggag

SEQ ID NO: 323476 - DNA, 25 bp, Homo sapien
tccccacgaagatacagaaaatgcc

SEQ ID NO: 323477 - DNA, 25 bp, Homo sapien
gaaggagagaggtctacgtcgtgga

SEQ ID NO: 323478 - DNA, 25 bp, Homo sapien
gaggtctacgtcgtggagtcccgcc

SEQ ID NO: 323479 - DNA, 25 bp, Homo sapien
ggcagaaggagagaggtctacgtcg

SEQ ID NO: 323480 - DNA, 25 bp, Homo sapien
cgtggagtcccgccactgggctcaa

SEQ ID NO: 323481 - DNA, 25 bp, Homo sapien
ctccaaccaagactcttcaccttgg

SEQ ID NO: 323482 - DNA, 25 bp, Homo sapien
acactgcatcaagaagacacccggg

SEQ ID NO: 323483 - DNA, 25 bp, Homo sapien
tctccaaccaagactcttcaccttg

SEQ ID NO: 323484 - DNA, 25 bp, Homo sapien
tctggtactcgaaatccaagagcca

SEQ ID NO: 323485 - DNA, 25 bp, Homo sapien
ttctggtactcgaaatccaagagcc

SEQ ID NO: 323486 - DNA, 25 bp, Homo sapien
tactcgaaatccaagagccatagcc

SEQ ID NO: 323487 - DNA, 25 bp, Homo sapien
ggtactcgaaatccaagagccatag

SEQ ID NO: 323488 - DNA, 25 bp, Homo sapien
tgacccactggcttctacatggatg

SEQ ID NO: 323489 - DNA, 25 bp, Homo sapien
tagcccgacaaccaccagtgacaat

SEQ ID NO: 323490 - DNA, 25 bp, Homo sapien
gatgatgcgggagactactaattta

SEQ ID NO: 323491 - DNA, 25 bp, Homo sapien
tacatgaatcatggcctgtggtaag

SEQ ID NO: 323492 - DNA, 25 bp, Homo sapien
ggccaccaacgctaaccacgtggca

SEQ ID NO: 323493 - DNA, 25 bp, Homo sapien
agccacagcgggcaggcacgtcggc

SEQ ID NO: 323494 - DNA, 25 bp, Homo sapien
aggcacgtcggcgggccgtcctcca

SEQ ID NO: 323495 - DNA, 25 bp, Homo sapien
aggcctgctggacaactggccccgg

SEQ ID NO: 323496 - DNA, 25 bp, Homo sapien
tccagtctaaaacctcgggcgatga

SEQ ID NO: 323497 - DNA, 25 bp, Homo sapien
ggaagcctatttggtgggcaccacc

SEQ ID NO: 323498 - DNA, 25 bp, Homo sapien
cacgcgttgggaaacctcgcaggtt

SEQ ID NO: 323499 - DNA, 25 bp, Homo sapien
gctgactaagaaggcactcggctat

SEQ ID NO: 323500 - DNA, 25 bp, Homo sapien
ctggtccaagggttgttttgagtct

SEQ ID NO: 323501 - DNA, 25 bp, Homo sapien
tgggccggcctgttcagggtcccag

SEQ ID NO: 323502 - DNA, 25 bp, Homo sapien
tctctggtccaagggttgttttgag

SEQ ID NO: 323503 - DNA, 25 bp, Homo sapien
tttccagtcatctgtctgttctagt

SEQ ID NO: 323504 - DNA, 25 bp, Homo sapien
ggataacaggtgtgaattttttcac

SEQ ID NO: 323505 - DNA, 25 bp, Homo sapien
cagtgaaattcacttagaatagaca

SEQ ID NO: 323506 - DNA, 25 bp, Homo sapien
agacataaacactcccgaggtggtg

SEQ ID NO: 323507 - DNA, 25 bp, Homo sapien
caggtgtgaattttttcacacagtg

SEQ ID NO: 323508 - DNA, 25 bp, Homo sapien
gtgtggaggtctctgaacacaccag

SEQ ID NO: 323509 - DNA, 25 bp, Homo sapien
cctgggacactgagggagtctccaa

SEQ ID NO: 323510 - DNA, 25 bp, Homo sapien
attggaatgtaagcaccggcccttc

SEQ ID NO: 323511 - DNA, 25 bp, Homo sapien
gaaaagcgtctgttaattggaatgt

SEQ ID NO: 323512 - DNA, 25 bp, Homo sapien
tgagagccccgccttggacgtggca

SEQ ID NO: 323513 - DNA, 25 bp, Homo sapien
tgggccaagaagtgaccctcttaaa

SEQ ID NO: 323514 - DNA, 25 bp, Homo sapien
aaatgaatgggccaagaagtgaccc

SEQ ID NO: 323515 - DNA, 25 bp, Homo sapien
gcactgtctgataggtggaatcaca

SEQ ID NO: 323516 - DNA, 25 bp, Homo sapien
ccaggattcccctcaacagaatgac

SEQ ID NO: 323517 - DNA, 25 bp, Homo sapien
ttgaagaccacctctaggcatggag

SEQ ID NO: 323518 - DNA, 25 bp, Homo sapien
acctctaagctagtggttctcctgc

SEQ ID NO: 323519 - DNA, 25 bp, Homo sapien
tagagggcatcagaacccactggaa

SEQ ID NO: 323520 - DNA, 25 bp, Homo sapien
aaaatggtcgggctgagatcttggc

SEQ ID NO: 323521 - DNA, 25 bp, Homo sapien
gcagtgagctccctagcagatatga

SEQ ID NO: 323522 - DNA, 25 bp, Homo sapien
cgcactcagctcttctgggagaaac

SEQ ID NO: 323523 - DNA, 25 bp, Homo sapien
ttgttatgggcacccgtcaacctgg

SEQ ID NO: 323524 - DNA, 25 bp, Homo sapien
agcggggagatcagcacgctgctct

SEQ ID NO: 323525 - DNA, 25 bp, Homo sapien
gccatttggttattgggttgatttc

SEQ ID NO: 323526 - DNA, 25 bp, Homo sapien
cgtcagcggggttagtgtcagcaca

SEQ ID NO: 323527 - DNA, 25 bp, Homo sapien
tccttgtttttgtgagcagggactg

SEQ ID NO: 323528 - DNA, 25 bp, Homo sapien
cccagatgcaagtcgatgaggtcac

SEQ ID NO: 323529 - DNA, 25 bp, Homo sapien
acccagatgcaagtcgatgaggtca

SEQ ID NO: 323530 - DNA, 25 bp, Homo sapien
cagatgcaagtcgatgaggtcactg

SEQ ID NO: 323531 - DNA, 25 bp, Homo sapien
gatgcaagtcgatgaggtcactgta

SEQ ID NO: 323532 - DNA, 25 bp, Homo sapien
gaaggagtttgcactacgacagtgg

SEQ ID NO: 323533 - DNA, 25 bp, Homo sapien
gatagagatatctgctgaagactca

SEQ ID NO: 323534 - DNA, 25 bp, Homo sapien
gctactaaggcccatcttgaaaaac

SEQ ID NO: 323535 - DNA, 25 bp, Homo sapien
gaaatatcccaacagagctactaag

SEQ ID NO: 323536 - DNA, 25 bp, Homo sapien
gatttgctgtgatccaactgtggaa

SEQ ID NO: 323537 - DNA, 25 bp, Homo sapien
gcctgtcagcgagtccctttatgta

SEQ ID NO: 323538 - DNA, 25 bp, Homo sapien
tctgtccgggagagctacagctcac

SEQ ID NO: 323539 - DNA, 25 bp, Homo sapien
tatgccaacttttcacccactggag

SEQ ID NO: 323540 - DNA, 25 bp, Homo sapien
agcgcagccgcgcaggttccctgga

SEQ ID NO: 323541 - DNA, 25 bp, Homo sapien
gccgcgcaggttccctggatggaat

SEQ ID NO: 323542 - DNA, 25 bp, Homo sapien
ctatgctgagcgcagccgcgcaggt

SEQ ID NO: 323543 - DNA, 25 bp, Homo sapien
gatggaatggcaggaatgagcgcac

SEQ ID NO: 323544 - DNA, 25 bp, Homo sapien
ccggagtctgctccacgtcggctgg

SEQ ID NO: 323545 - DNA, 25 bp, Homo sapien
tctgctccacgtcggctggtcacat

SEQ ID NO: 323546 - DNA, 25 bp, Homo sapien
agcagcagtcacgagcacagggccc

SEQ ID NO: 323547 - DNA, 25 bp, Homo sapien
gcagcagtcacgagcacagggccct

SEQ ID NO: 323548 - DNA, 25 bp, Homo sapien
agcctctccagccctgccctaagtg

SEQ ID NO: 323549 - DNA, 25 bp, Homo sapien
cctgagcctctccagccctgcccta

SEQ ID NO: 323550 - DNA, 25 bp, Homo sapien
tgagcctctccagccctgccctaag

SEQ ID NO: 323551 - DNA, 25 bp, Homo sapien
gcctctccagccctgccctaagtga

SEQ ID NO: 323552 - DNA, 25 bp, Homo sapien
acatgctccccgaccagcggtgttg

SEQ ID NO: 323553 - DNA, 25 bp, Homo sapien
ctggaaatctgtgtgtgccgagggt

SEQ ID NO: 323554 - DNA, 25 bp, Homo sapien
tgctccccgaccagcggtgttgagg

SEQ ID NO: 323555 - DNA, 25 bp, Homo sapien
tgtgtgtgccgagggtggccacatg

SEQ ID NO: 323556 - DNA, 25 bp, Homo sapien
tgcttcgccccggagcgccttctcc

SEQ ID NO: 323557 - DNA, 25 bp, Homo sapien
ttcgccccggagcgccttctccaca

SEQ ID NO: 323558 - DNA, 25 bp, Homo sapien
cgccccggagcgccttctccacagc

SEQ ID NO: 323559 - DNA, 25 bp, Homo sapien
gcttcgccccggagcgccttctcca

SEQ ID NO: 323560 - DNA, 25 bp, Homo sapien
ctgcccaaccctcccatgcatgtgc

SEQ ID NO: 323561 - DNA, 25 bp, Homo sapien
ccagccaaaggtgacctgggtggca

SEQ ID NO: 323562 - DNA, 25 bp, Homo sapien
accagccaaaggtgacctgggtggc

SEQ ID NO: 323563 - DNA, 25 bp, Homo sapien
aaccctcccatgcatgtgccctggt

SEQ ID NO: 323564 - DNA, 25 bp, Homo sapien
gggctcgatgcagccgcttaagctc

SEQ ID NO: 323565 - DNA, 25 bp, Homo sapien
gccttttgcacacgccgggtcagct

SEQ ID NO: 323566 - DNA, 25 bp, Homo sapien
ctgggctcgatgcagccgcttaagc

SEQ ID NO: 323567 - DNA, 25 bp, Homo sapien
gatgcagccgcttaagctcctcctg

SEQ ID NO: 323568 - DNA, 25 bp, Homo sapien
gtacccgggcagataggacaagctg

SEQ ID NO: 323569 - DNA, 25 bp, Homo sapien
cgggcacacctaagatccacagagt

SEQ ID NO: 323570 - DNA, 25 bp, Homo sapien
ggacacacgctcctttatcactgag

SEQ ID NO: 323571 - DNA, 25 bp, Homo sapien
gacaagctgtcctctgtagagtaga

SEQ ID NO: 323572 - DNA, 25 bp, Homo sapien
tggcccaatccagtgcaagtccacg

SEQ ID NO: 323573 - DNA, 25 bp, Homo sapien
ctagcgccatcgagaacagaagagg

SEQ ID NO: 323574 - DNA, 25 bp, Homo sapien
ccgctggccgctaggaagaagagag

SEQ ID NO: 323575 - DNA, 25 bp, Homo sapien
gccagggctgttgcgcctagcgcca

SEQ ID NO: 323576 - DNA, 25 bp, Homo sapien
gacatgcatgcaacggtgaccagct

SEQ ID NO: 323577 - DNA, 25 bp, Homo sapien
ggcgccgggtggttaatcacagaca

SEQ ID NO: 323578 - DNA, 25 bp, Homo sapien
catcagtggtgtttcagcgctgcac

SEQ ID NO: 323579 - DNA, 25 bp, Homo sapien
cagagggtcccctgaacagtcagtc

SEQ ID NO: 323580 - DNA, 25 bp, Homo sapien
ccgggacttctgtgaggacttctca

SEQ ID NO: 323581 - DNA, 25 bp, Homo sapien
tcctcggagaagctcagctggcgcc

SEQ ID NO: 323582 - DNA, 25 bp, Homo sapien
gacttctcaaggacatcgtcgctgg

SEQ ID NO: 323583 - DNA, 25 bp, Homo sapien
catcgtcgctggagaggtctgagtc

SEQ ID NO: 323584 - DNA, 25 bp, Homo sapien
cacgcggacccggctgctgacgcac

SEQ ID NO: 323585 - DNA, 25 bp, Homo sapien
tgcacgcggacccggctgctgacgc

SEQ ID NO: 323586 - DNA, 25 bp, Homo sapien
cctgcacgcggacccggctgctgac

SEQ ID NO: 323587 - DNA, 25 bp, Homo sapien
tgcctgcacgcggacccggctgctg

SEQ ID NO: 323588 - DNA, 25 bp, Homo sapien
gaataggatttgagggacactggcc

SEQ ID NO: 323589 - DNA, 25 bp, Homo sapien
tgtacccggagaagacggacttcca

SEQ ID NO: 323590 - DNA, 25 bp, Homo sapien
gtcttgtcgtcataggtgtcctcca

SEQ ID NO: 323591 - DNA, 25 bp, Homo sapien
ccctcggatgaagtgaaagagccat

SEQ ID NO: 323592 - DNA, 25 bp, Homo sapien
cacagctttcagatccgagggggca

SEQ ID NO: 323593 - DNA, 25 bp, Homo sapien
ctgtgatcggatgggagagtgcaca

SEQ ID NO: 323594 - DNA, 25 bp, Homo sapien
tcactggctgtgatcggatgggaga

SEQ ID NO: 323595 - DNA, 25 bp, Homo sapien
tcggatgggagagtgcacagctttc

SEQ ID NO: 323596 - DNA, 25 bp, Homo sapien
gtggcggcagggacaggtgggagtt

SEQ ID NO: 323597 - DNA, 25 bp, Homo sapien
gggtggcggcagggacaggtgggag

SEQ ID NO: 323598 - DNA, 25 bp, Homo sapien
ctgggtggcggcagggacaggtggg

SEQ ID NO: 323599 - DNA, 25 bp, Homo sapien
ggcggcagggacaggtgggagttgg

SEQ ID NO: 323600 - DNA, 25 bp, Homo sapien
gctgattcctggggagaccggatgg

SEQ ID NO: 323601 - DNA, 25 bp, Homo sapien
tgattcctggggagaccggatgggg

SEQ ID NO: 323602 - DNA, 25 bp, Homo sapien
ctgattcctggggagaccggatggg

SEQ ID NO: 323603 - DNA, 25 bp, Homo sapien
ggcaaacgcagctctctgtcagcat

SEQ ID NO: 323604 - DNA, 25 bp, Homo sapien
tctctcttggtgcttcggtgaggcg

SEQ ID NO: 323605 - DNA, 25 bp, Homo sapien
atccgacgggctgtcagaccagtgc

SEQ ID NO: 323606 - DNA, 25 bp, Homo sapien
cctcagctgggcacggcaaacgcag

SEQ ID NO: 323607 - DNA, 25 bp, Homo sapien
gagcagccgcgccacttgctcattt

SEQ ID NO: 323608 - DNA, 25 bp, Homo sapien
tgggtgcacaccctaagtgaggcca

SEQ ID NO: 323609 - DNA, 25 bp, Homo sapien
gcccttcttacgcagggacagacct

SEQ ID NO: 323610 - DNA, 25 bp, Homo sapien
ttgctcatttgcaacacagctgctc

SEQ ID NO: 323611 - DNA, 25 bp, Homo sapien
cttgattttgctggaaagcatattg

SEQ ID NO: 323612 - DNA, 25 bp, Homo sapien
ttgctggaaagcatattgccttcat

SEQ ID NO: 323613 - DNA, 25 bp, Homo sapien
gattttgctggaaagcatattgcct

SEQ ID NO: 323614 - DNA, 25 bp, Homo sapien
ttttgctggaaagcatattgccttc

SEQ ID NO: 323615 - DNA, 25 bp, Homo sapien
tctatctcggctggttctgagtcca

SEQ ID NO: 323616 - DNA, 25 bp, Homo sapien
tctcggctggttctgagtccacatc

SEQ ID NO: 323617 - DNA, 25 bp, Homo sapien
ccccttctatctcggctggttctga

SEQ ID NO: 323618 - DNA, 25 bp, Homo sapien
ggttctgagtccacatcttcctcta

SEQ ID NO: 323619 - DNA, 25 bp, Homo sapien
agccaggcctgcaccgccgcgtggc

SEQ ID NO: 323620 - DNA, 25 bp, Homo sapien
aggcctgcaccgccgcgtggcgtat

SEQ ID NO: 323621 - DNA, 25 bp, Homo sapien
tgcaccgccgcgtggcgtatggagg

SEQ ID NO: 323622 - DNA, 25 bp, Homo sapien
ccgcgtggcgtatggagggaaggtc

SEQ ID NO: 323623 - DNA, 25 bp, Homo sapien
agtacaggtgtcacaactgacagca

SEQ ID NO: 323624 - DNA, 25 bp, Homo sapien
taccattttgcatcaatggagaaag

SEQ ID NO: 323625 - DNA, 25 bp, Homo sapien
gaacttcacatatcctcagatgaaa

SEQ ID NO: 323626 - DNA, 25 bp, Homo sapien
gtccacaacctcttaatccacagag

SEQ ID NO: 323627 - DNA, 25 bp, Homo sapien
cagtgcacgtcagcctggatctcca

SEQ ID NO: 323628 - DNA, 25 bp, Homo sapien
aggatccgccgcgtgcatgacctgc

SEQ ID NO: 323629 - DNA, 25 bp, Homo sapien
gcgtgcatgacctgctggagcctct

SEQ ID NO: 323630 - DNA, 25 bp, Homo sapien
tcctctctctcacggatatgagtcc

SEQ ID NO: 323631 - DNA, 25 bp, Homo sapien
ccagggtcaaggggtggagaaatga

SEQ ID NO: 323632 - DNA, 25 bp, Homo sapien
cccagggtcaaggggtggagaaatg

SEQ ID NO: 323633 - DNA, 25 bp, Homo sapien
ggaggggatgaaatagcatgggaaa

SEQ ID NO: 323634 - DNA, 25 bp, Homo sapien
gaaggaggggatgaaatagcatggg

SEQ ID NO: 323635 - DNA, 25 bp, Homo sapien
ctgatggccaggtgacgagagaggt

SEQ ID NO: 323636 - DNA, 25 bp, Homo sapien
gattgtgtcattctgccgccagccg

SEQ ID NO: 323637 - DNA, 25 bp, Homo sapien
gccaggtgacgagagaggtgggaag

SEQ ID NO: 323638 - DNA, 25 bp, Homo sapien
agattgtgtcattctgccgccagcc

SEQ ID NO: 323639 - DNA, 25 bp, Homo sapien
tcctgctaatacatgcagccttggg

SEQ ID NO: 323640 - DNA, 25 bp, Homo sapien
ctttctttatggtgctgggtgggac

SEQ ID NO: 323641 - DNA, 25 bp, Homo sapien
tgcacccggccgtcaatttgccttt

SEQ ID NO: 323642 - DNA, 25 bp, Homo sapien
gggacttatcgacagcacaagccag

SEQ ID NO: 323643 - DNA, 25 bp, Homo sapien
cttggctggagatgagcttgcagta

SEQ ID NO: 323644 - DNA, 25 bp, Homo sapien
aaacatatgcggcatagatggggcc

SEQ ID NO: 323645 - DNA, 25 bp, Homo sapien
gctggagatgagcttgcagtaaaac

SEQ ID NO: 323646 - DNA, 25 bp, Homo sapien
tagatggggccgcattccatgaggc

SEQ ID NO: 323647 - DNA, 25 bp, Homo sapien
accagggagagtagcccagtgagat

SEQ ID NO: 323648 - DNA, 25 bp, Homo sapien
gtctgtgagacatgctcttggaggc

SEQ ID NO: 323649 - DNA, 25 bp, Homo sapien
gttactttgcgcctgactgtctggg

SEQ ID NO: 323650 - DNA, 25 bp, Homo sapien
ggaggcaaattttggatggctgcca

SEQ ID NO: 323651 - DNA, 25 bp, Homo sapien
gcttcgacccgaagctgtgccaggg

SEQ ID NO: 323652 - DNA, 25 bp, Homo sapien
tctgcgtgaaggaaagctcggctca

SEQ ID NO: 323653 - DNA, 25 bp, Homo sapien
tcggctcaactctcctgaaaaggga

SEQ ID NO: 323654 - DNA, 25 bp, Homo sapien
caaagctgccgagtgatcatcatca

SEQ ID NO: 323655 - DNA, 25 bp, Homo sapien
ctgctggctagcagaggccacgccg

SEQ ID NO: 323656 - DNA, 25 bp, Homo sapien
tctgctggctagcagaggccacgcc

SEQ ID NO: 323657 - DNA, 25 bp, Homo sapien
tgctggctagcagaggccacgccgg

SEQ ID NO: 323658 - DNA, 25 bp, Homo sapien
agggagagcccagattcacagaccc

SEQ ID NO: 323659 - DNA, 25 bp, Homo sapien
ggagtgcgggtcactaagggctgcc

SEQ ID NO: 323660 - DNA, 25 bp, Homo sapien
tgcgggtcactaagggctgcctgtg

SEQ ID NO: 323661 - DNA, 25 bp, Homo sapien
gtcactaagggctgcctgtgggtcc

SEQ ID NO: 323662 - DNA, 25 bp, Homo sapien
cctcagagggaagagtagagaactg

SEQ ID NO: 323663 - DNA, 25 bp, Homo sapien
ttccacggaacaccacccaggtcag

SEQ ID NO: 323664 - DNA, 25 bp, Homo sapien
cggaacaccacccaggtcagatggg

SEQ ID NO: 323665 - DNA, 25 bp, Homo sapien
gatccgcacggcctccttccacgga

SEQ ID NO: 323666 - DNA, 25 bp, Homo sapien
cacggcctccttccacggaacacca

SEQ ID NO: 323667 - DNA, 25 bp, Homo sapien
agcccatggaagttcctgactgcag

SEQ ID NO: 323668 - DNA, 25 bp, Homo sapien
gctcaaactcaagccacagccccat

SEQ ID NO: 323669 - DNA, 25 bp, Homo sapien
cagccgctcaaactcaagccacagc

SEQ ID NO: 323670 - DNA, 25 bp, Homo sapien
aagttcctgactgcagccgctcaaa

SEQ ID NO: 323671 - DNA, 25 bp, Homo sapien
gaagaatctcgccttgtccaaagag

SEQ ID NO: 323672 - DNA, 25 bp, Homo sapien
ggagaccccggttcatgttgcatag

SEQ ID NO: 323673 - DNA, 25 bp, Homo sapien
acgaaagtaacctagacacgcctgg

SEQ ID NO: 323674 - DNA, 25 bp, Homo sapien
gaggctttgggtagcacggtatcca

SEQ ID NO: 323675 - DNA, 25 bp, Homo sapien
attcaattatcttcccctcacaacg

SEQ ID NO: 323676 - DNA, 25 bp, Homo sapien
acaacgcacttgctagacactgtag

SEQ ID NO: 323677 - DNA, 25 bp, Homo sapien
ttattcaattatcttcccctcacaa

SEQ ID NO: 323678 - DNA, 25 bp, Homo sapien
ctcacaacgcacttgctagacactg

SEQ ID NO: 323679 - DNA, 25 bp, Homo sapien
gacactggcagacctagcatgggaa

SEQ ID NO: 323680 - DNA, 25 bp, Homo sapien
tgcataaggagaagtcgggattccc

SEQ ID NO: 323681 - DNA, 25 bp, Homo sapien
tattccagttagaagagcgtccagc

SEQ ID NO: 323682 - DNA, 25 bp, Homo sapien
tgcctgcctggatgcaacctgagaa

SEQ ID NO: 323683 - DNA, 25 bp, Homo sapien
gagcagctgggactactcggcccgc

SEQ ID NO: 323684 - DNA, 25 bp, Homo sapien
agcagctgggactactcggcccgcc

SEQ ID NO: 323685 - DNA, 25 bp, Homo sapien
cggcccgccaccacgcctggctaat

SEQ ID NO: 323686 - DNA, 25 bp, Homo sapien
gtaactccgggcatcaaggcttcgt

SEQ ID NO: 323687 - DNA, 25 bp, Homo sapien
taaattgccaacagctagcaggtgg

SEQ ID NO: 323688 - DNA, 25 bp, Homo sapien
gacggctggaaaggcacccaattct

SEQ ID NO: 323689 - DNA, 25 bp, Homo sapien
ttaaggaaaccaatacaaggctgcc

SEQ ID NO: 323690 - DNA, 25 bp, Homo sapien
acaggcaggtccggataattttcat

SEQ ID NO: 323691 - DNA, 25 bp, Homo sapien
ttacaggcaggtccggataattttc

SEQ ID NO: 323692 - DNA, 25 bp, Homo sapien
ggattacaggcaggtccggataatt

SEQ ID NO: 323693 - DNA, 25 bp, Homo sapien
gattacaggcaggtccggataattt

SEQ ID NO: 323694 - DNA, 25 bp, Homo sapien
cccggctcttcacttttaagagact

SEQ ID NO: 323695 - DNA, 25 bp, Homo sapien
cacttttaagagactgtttttcatt

SEQ ID NO: 323696 - DNA, 25 bp, Homo sapien
tttcattctgtatagcactgaatgc

SEQ ID NO: 323697 - DNA, 25 bp, Homo sapien
cgcacccggctcttcacttttaaga

SEQ ID NO: 323698 - DNA, 25 bp, Homo sapien
cttctggaaagcgttcttggacctt

SEQ ID NO: 323699 - DNA, 25 bp, Homo sapien
cagtagctctgctcaagggtttata

SEQ ID NO: 323700 - DNA, 25 bp, Homo sapien
gaaaatggtgctgacccacactcag

SEQ ID NO: 323701 - DNA, 25 bp, Homo sapien
tcagcccaaggtcaagccagtagct

SEQ ID NO: 323702 - DNA, 25 bp, Homo sapien
tcaaatgctctccaaggccacttga

SEQ ID NO: 323703 - DNA, 25 bp, Homo sapien
aaggccacttgaggcctctgcccct

SEQ ID NO: 323704 - DNA, 25 bp, Homo sapien
tctgcccctcgggtttgcagcctgt

SEQ ID NO: 323705 - DNA, 25 bp, Homo sapien
agcctgtgtttctgtcctgaagccc

SEQ ID NO: 323706 - DNA, 25 bp, Homo sapien
tgtaatcggctgaacactttgaagc

SEQ ID NO: 323707 - DNA, 25 bp, Homo sapien
gctgaacactttgaagccttcgctg

SEQ ID NO: 323708 - DNA, 25 bp, Homo sapien
gaagccttcgctgatactggaagcc

SEQ ID NO: 323709 - DNA, 25 bp, Homo sapien
ctcttgatcatctgtaatcggctga

SEQ ID NO: 323710 - DNA, 25 bp, Homo sapien
tcacccagctggatgtgattacagc

SEQ ID NO: 323711 - DNA, 25 bp, Homo sapien
ttcactgagaagaaaccgagacaca

SEQ ID NO: 323712 - DNA, 25 bp, Homo sapien
gaattgagtctgatggaggagtcct

SEQ ID NO: 323713 - DNA, 25 bp, Homo sapien
gcccggtgcactggtggctgaatca

SEQ ID NO: 323714 - DNA, 25 bp, Homo sapien
gagtctcctccggtacctcctgcag

SEQ ID NO: 323715 - DNA, 25 bp, Homo sapien
tccagcacgctgctcaggttgtgct

SEQ ID NO: 323716 - DNA, 25 bp, Homo sapien
gggacaggcggtagttctccagctc

SEQ ID NO: 323717 - DNA, 25 bp, Homo sapien
agtcgcttggcgatgctgggctcct

SEQ ID NO: 323718 - DNA, 25 bp, Homo sapien
catttgcagagttgccagaggccag

SEQ ID NO: 323719 - DNA, 25 bp, Homo sapien
gcaggacaaaggtcagagcatttgc

SEQ ID NO: 323720 - DNA, 25 bp, Homo sapien
catgtgagagggaatttcactctgc

SEQ ID NO: 323721 - DNA, 25 bp, Homo sapien
agaaaggaaggtggccctgtctgcc

SEQ ID NO: 323722 - DNA, 25 bp, Homo sapien
agtctggtgtccagtaatatttccc

SEQ ID NO: 323723 - DNA, 25 bp, Homo sapien
tgcccaggaaacatgagtgaagcag

SEQ ID NO: 323724 - DNA, 25 bp, Homo sapien
gaaacatgagtgaagcagcaagtct

SEQ ID NO: 323725 - DNA, 25 bp, Homo sapien
ccaggaaacatgagtgaagcagcaa

SEQ ID NO: 323726 - DNA, 25 bp, Homo sapien
catactcctggaaagctgcatccac

SEQ ID NO: 323727 - DNA, 25 bp, Homo sapien
cactgtgtgcatactcctggaaagc

SEQ ID NO: 323728 - DNA, 25 bp, Homo sapien
tgtgcatactcctggaaagctgcat

SEQ ID NO: 323729 - DNA, 25 bp, Homo sapien
ctgtgtgcatactcctggaaagctg

SEQ ID NO: 323730 - DNA, 25 bp, Homo sapien
tacgacgtgtcaagtaccatgagcc

SEQ ID NO: 323731 - DNA, 25 bp, Homo sapien
tgcaggaatcctttcggtacgacgt

SEQ ID NO: 323732 - DNA, 25 bp, Homo sapien
gggaacgcatactgtctggcaagaa

SEQ ID NO: 323733 - DNA, 25 bp, Homo sapien
caagaattctactaggaccacggga

SEQ ID NO: 323734 - DNA, 25 bp, Homo sapien
ggccattgagccaggtccacacaga

SEQ ID NO: 323735 - DNA, 25 bp, Homo sapien
ctgcctgcatgagctccacacatca

SEQ ID NO: 323736 - DNA, 25 bp, Homo sapien
tgcctgcatgagctccacacatcat

SEQ ID NO: 323737 - DNA, 25 bp, Homo sapien
caggcggtactgggtattttcgctg

SEQ ID NO: 323738 - DNA, 25 bp, Homo sapien
tctggtcaagctgcacatcaactgg

SEQ ID NO: 323739 - DNA, 25 bp, Homo sapien
tcggggacttcaccactcctctggt

SEQ ID NO: 323740 - DNA, 25 bp, Homo sapien
tctagcctatttttaggagaagtca

SEQ ID NO: 323741 - DNA, 25 bp, Homo sapien
catcaactggtatctgcgggagaag

SEQ ID NO: 323742 - DNA, 25 bp, Homo sapien
gaatggctcgatgtcctgacacaag

SEQ ID NO: 323743 - DNA, 25 bp, Homo sapien
aaaagagactacctcgaatggctcg

SEQ ID NO: 323744 - DNA, 25 bp, Homo sapien
caagcacttcacttcacggtagaga

SEQ ID NO: 323745 - DNA, 25 bp, Homo sapien
gaaattctgacgaagacgccaatgg

SEQ ID NO: 323746 - DNA, 25 bp, Homo sapien
gattccaagaggaaatcaggtaccc

SEQ ID NO: 323747 - DNA, 25 bp, Homo sapien
gagcagctgcgggtctatcatcacc

SEQ ID NO: 323748 - DNA, 25 bp, Homo sapien
tatacatactcccttggctagctgc

SEQ ID NO: 323749 - DNA, 25 bp, Homo sapien
gcagtgcccatgactaccctgtaaa

SEQ ID NO: 323750 - DNA, 25 bp, Homo sapien
gtaagctcacgacccttcaccgtgg

SEQ ID NO: 323751 - DNA, 25 bp, Homo sapien
tctgacgtggtaagctcacgaccct

SEQ ID NO: 323752 - DNA, 25 bp, Homo sapien
tctccacaaggtctgacgtggtaag

SEQ ID NO: 323753 - DNA, 25 bp, Homo sapien
ccgaccaaccaactctccacaaggt

SEQ ID NO: 323754 - DNA, 25 bp, Homo sapien
agcaggagtgcagtacatggaggac

SEQ ID NO: 323755 - DNA, 25 bp, Homo sapien
ctgaccagcaggagtgcagtacatg

SEQ ID NO: 323756 - DNA, 25 bp, Homo sapien
gaccagcaggagtgcagtacatgga

SEQ ID NO: 323757 - DNA, 25 bp, Homo sapien
ggagtgcagtacatggaggaccaac

SEQ ID NO: 323758 - DNA, 25 bp, Homo sapien
tagctctgggcttgccgtccacaga

SEQ ID NO: 323759 - DNA, 25 bp, Homo sapien
tgcctggtgaacaggtagctctggg

SEQ ID NO: 323760 - DNA, 25 bp, Homo sapien
tccacagacaggaaatccatgagag

SEQ ID NO: 323761 - DNA, 25 bp, Homo sapien
cacagacaggaaatccatgagagag

SEQ ID NO: 323762 - DNA, 25 bp, Homo sapien
ttggtcactgccactcgctgagcac

SEQ ID NO: 323763 - DNA, 25 bp, Homo sapien
aagtagctgcatgagccgcctgaac

SEQ ID NO: 323764 - DNA, 25 bp, Homo sapien
ccaagtagctgcatgagccgcctga

SEQ ID NO: 323765 - DNA, 25 bp, Homo sapien
gtagctgcatgagccgcctgaactt

SEQ ID NO: 323766 - DNA, 25 bp, Homo sapien
gaagcagttacaccagaactcaaag

SEQ ID NO: 323767 - DNA, 25 bp, Homo sapien
tcttaagaggactgtgaatggcagc

SEQ ID NO: 323768 - DNA, 25 bp, Homo sapien
actcaggcctttgaaacgtatcaga

SEQ ID NO: 323769 - DNA, 25 bp, Homo sapien
ctcaggctggattcgagaggaccaa

SEQ ID NO: 323770 - DNA, 25 bp, Homo sapien
gtgcaggagagttgatcacagaaca

SEQ ID NO: 323771 - DNA, 25 bp, Homo sapien
tctcatgtgattaatgtagaagcac

SEQ ID NO: 323772 - DNA, 25 bp, Homo sapien
gcacaaagagctgggtaagtacaga

SEQ ID NO: 323773 - DNA, 25 bp, Homo sapien
atcagtcacttaacagtcacacctg

SEQ ID NO: 323774 - DNA, 25 bp, Homo sapien
ctcccgggcaatgaaacgtgtttct

SEQ ID NO: 323775 - DNA, 25 bp, Homo sapien
tataaagaaagaggtgttggcagcc

SEQ ID NO: 323776 - DNA, 25 bp, Homo sapien
caacagggtgctgagaattccgggc

SEQ ID NO: 323777 - DNA, 25 bp, Homo sapien
cacgtggctggtagaacccggaagt

SEQ ID NO: 323778 - DNA, 25 bp, Homo sapien
cctggctctatgtccctatggttga

SEQ ID NO: 323779 - DNA, 25 bp, Homo sapien
tacacaggagtcctctgttaacggg

SEQ ID NO: 323780 - DNA, 25 bp, Homo sapien
tcccaccctctggtcaagagaaagg

SEQ ID NO: 323781 - DNA, 25 bp, Homo sapien
tgttaacgggaagctatgtcaggta

SEQ ID NO: 323782 - DNA, 25 bp, Homo sapien
tttattctcttaaataagaatgtaa

SEQ ID NO: 323783 - DNA, 25 bp, Homo sapien
gattgtttggaatttattctcttaa

SEQ ID NO: 323784 - DNA, 25 bp, Homo sapien
ttattctcttaaataagaatgtaac

SEQ ID NO: 323785 - DNA, 25 bp, Homo sapien
gaagattgtttggaatttattctct

SEQ ID NO: 323786 - DNA, 25 bp, Homo sapien
gcaccccaagctgaatggctcggga

SEQ ID NO: 323787 - DNA, 25 bp, Homo sapien
tggaactccttttgggacagcctag

SEQ ID NO: 323788 - DNA, 25 bp, Homo sapien
caccaaaagataggagtgggctcaa

SEQ ID NO: 323789 - DNA, 25 bp, Homo sapien
gggctcaaacggctaactcagtgga

SEQ ID NO: 323790 - DNA, 25 bp, Homo sapien
gaacaagcagctttagaaacagctt

SEQ ID NO: 323791 - DNA, 25 bp, Homo sapien
caaagccctgacctggagtacggct

SEQ ID NO: 323792 - DNA, 25 bp, Homo sapien
gtgctgcccgtacgctgctgtgcat

SEQ ID NO: 323793 - DNA, 25 bp, Homo sapien
gctcccgtggttctcagaaccagga

SEQ ID NO: 323794 - DNA, 25 bp, Homo sapien
taccatgggcctgagctaatgactg

SEQ ID NO: 323795 - DNA, 25 bp, Homo sapien
taagaaaatctgtgccaggaccact

SEQ ID NO: 323796 - DNA, 25 bp, Homo sapien
taatgaacccggtgatgagcactcg

SEQ ID NO: 323797 - DNA, 25 bp, Homo sapien
gaatcaagtgccgtcatcatcgcct

SEQ ID NO: 323798 - DNA, 25 bp, Homo sapien
gaatggcaacctcgaccagatggga

SEQ ID NO: 323799 - DNA, 25 bp, Homo sapien
ggatgcaactctgggaacctctcgt

SEQ ID NO: 323800 - DNA, 25 bp, Homo sapien
tgagctgccggactaagatgttctg

SEQ ID NO: 323801 - DNA, 25 bp, Homo sapien
tcagaatcaagaaccacgcggacag

SEQ ID NO: 323802 - DNA, 25 bp, Homo sapien
gcagctggcacatgaaaaaggagtc

SEQ ID NO: 323803 - DNA, 25 bp, Homo sapien
ggaactcccctctgatttgcaccag

SEQ ID NO: 323804 - DNA, 25 bp, Homo sapien
tgttgcccgaatgaagaaatgttgc

SEQ ID NO: 323805 - DNA, 25 bp, Homo sapien
gcacctccgacaggccatagagaaa

SEQ ID NO: 323806 - DNA, 25 bp, Homo sapien
ggcgttggcccgtccgtttgcatct

SEQ ID NO: 323807 - DNA, 25 bp, Homo sapien
ccgtccgtttgcatctgtggtggcg

SEQ ID NO: 323808 - DNA, 25 bp, Homo sapien
tggagctggccacggcgttggcccg

SEQ ID NO: 323809 - DNA, 25 bp, Homo sapien
gtttgcatctgtggtggcgccatcc

SEQ ID NO: 323810 - DNA, 25 bp, Homo sapien
tgggttcaccgcgacaaagacaggt

SEQ ID NO: 323811 - DNA, 25 bp, Homo sapien
cctcctgagtcacccggagtcaaag

SEQ ID NO: 323812 - DNA, 25 bp, Homo sapien
caaagtctagatccacctaggtgca

SEQ ID NO: 323813 - DNA, 25 bp, Homo sapien
cagtccctctgcaggcaacagaagc

SEQ ID NO: 323814 - DNA, 25 bp, Homo sapien
gccagagagtcgatagcagtagtgt

SEQ ID NO: 323815 - DNA, 25 bp, Homo sapien
ggagccactgccggtctcttccttt

SEQ ID NO: 323816 - DNA, 25 bp, Homo sapien
ttcctttgtgcgtagccagagagtc

SEQ ID NO: 323817 - DNA, 25 bp, Homo sapien
tagtgtggcttacagtagaatttac

SEQ ID NO: 323818 - DNA, 25 bp, Homo sapien
tcctcgatgtcgtaggcgtaggccg

SEQ ID NO: 323819 - DNA, 25 bp, Homo sapien
ggtggaagaacttgccctcggcact

SEQ ID NO: 323820 - DNA, 25 bp, Homo sapien
cgtagacccgcttctggcagaagta

SEQ ID NO: 323821 - DNA, 25 bp, Homo sapien
cgcagtactcgcacttgaagcagct

SEQ ID NO: 323822 - DNA, 25 bp, Homo sapien
gggagcacctcagggagtgccacac

SEQ ID NO: 323823 - DNA, 25 bp, Homo sapien
acagccttgcgagagcaaagccaac

SEQ ID NO: 323824 - DNA, 25 bp, Homo sapien
agtgccacacaggccctcctagagg

SEQ ID NO: 323825 - DNA, 25 bp, Homo sapien
gaggcacagccttgcgagagcaaag

SEQ ID NO: 323826 - DNA, 25 bp, Homo sapien
taactggctacggtcaactgtgctc

SEQ ID NO: 323827 - DNA, 25 bp, Homo sapien
aatgctatgatacagcctggcgacg

SEQ ID NO: 323828 - DNA, 25 bp, Homo sapien
agaacacttggcacaaccgcgaaag

SEQ ID NO: 323829 - DNA, 25 bp, Homo sapien
tggcgacgccgggaaatatcgacaa

SEQ ID NO: 323830 - DNA, 25 bp, Homo sapien
ctccgcccgtgtacatctttatata

SEQ ID NO: 323831 - DNA, 25 bp, Homo sapien
aatgagctcactccgcccgtgtaca

SEQ ID NO: 323832 - DNA, 25 bp, Homo sapien
ttcctttgaagctgattggctatct

SEQ ID NO: 323833 - DNA, 25 bp, Homo sapien
gattggctatctgctcagccaatga

SEQ ID NO: 323834 - DNA, 25 bp, Homo sapien
ccacgcaggggtaccggcacaggca

SEQ ID NO: 323835 - DNA, 25 bp, Homo sapien
acatcgcgtcagtgtccacgcaggg

SEQ ID NO: 323836 - DNA, 25 bp, Homo sapien
tggaagaaaaacatcgcgtcagtgt

SEQ ID NO: 323837 - DNA, 25 bp, Homo sapien
gaaaaacatcgcgtcagtgtccacg

SEQ ID NO: 323838 - DNA, 25 bp, Homo sapien
gccaacagcccccttaggacatggc

SEQ ID NO: 323839 - DNA, 25 bp, Homo sapien
ggatgccaacagcccccttaggaca

SEQ ID NO: 323840 - DNA, 25 bp, Homo sapien
catgagccattatcccggggatgcc

SEQ ID NO: 323841 - DNA, 25 bp, Homo sapien
attatcccggggatgccaacagccc

SEQ ID NO: 323842 - DNA, 25 bp, Homo sapien
gaaagctcccactggtcgacaaaaa

SEQ ID NO: 323843 - DNA, 25 bp, Homo sapien
tggtcgacaaaaaatcgacgaggag

SEQ ID NO: 323844 - DNA, 25 bp, Homo sapien
gcagaggagcggagactaagagaaa

SEQ ID NO: 323845 - DNA, 25 bp, Homo sapien
aaaaatcgacgaggaggttcaggct

SEQ ID NO: 323846 - DNA, 25 bp, Homo sapien
ggaacgcggtcccgcagctgtgggc

SEQ ID NO: 323847 - DNA, 25 bp, Homo sapien
aacgcggtcccgcagctgtgggccg

SEQ ID NO: 323848 - DNA, 25 bp, Homo sapien
cctggaacgcggtcccgcagctgtg

SEQ ID NO: 323849 - DNA, 25 bp, Homo sapien
ctggaacgcggtcccgcagctgtgg

SEQ ID NO: 323850 - DNA, 25 bp, Homo sapien
cttcaacaccctctgcttgagacac

SEQ ID NO: 323851 - DNA, 25 bp, Homo sapien
ttcaacaccctctgcttgagacact

SEQ ID NO: 323852 - DNA, 25 bp, Homo sapien
acttcaacaccctctgcttgagaca

SEQ ID NO: 323853 - DNA, 25 bp, Homo sapien
atgccacgggttcatgctcttttac

SEQ ID NO: 323854 - DNA, 25 bp, Homo sapien
gtgccccgtgtgcttggctctcagc

SEQ ID NO: 323855 - DNA, 25 bp, Homo sapien
tcagcatcccatgccacgggttcat

SEQ ID NO: 323856 - DNA, 25 bp, Homo sapien
cgtgccccgtgtgcttggctctcag

SEQ ID NO: 323857 - DNA, 25 bp, Homo sapien
ggggctctgcttgccacggttgtca

SEQ ID NO: 323858 - DNA, 25 bp, Homo sapien
ggttgtcagcatcaagatccctgta

SEQ ID NO: 323859 - DNA, 25 bp, Homo sapien
tgtcagcatcaagatccctgtatgt

SEQ ID NO: 323860 - DNA, 25 bp, Homo sapien
ggctctgcttgccacggttgtcagc

SEQ ID NO: 323861 - DNA, 25 bp, Homo sapien
gcagggcgaacctgcccaggcaggc

SEQ ID NO: 323862 - DNA, 25 bp, Homo sapien
gggggcagggcgaacctgcccaggc

SEQ ID NO: 323863 - DNA, 25 bp, Homo sapien
ggggcagggcgaacctgcccaggca

SEQ ID NO: 323864 - DNA, 25 bp, Homo sapien
tgggggcagggcgaacctgcccagg

SEQ ID NO: 323865 - DNA, 25 bp, Homo sapien
tgttctggttcccaacggcaacgtc

SEQ ID NO: 323866 - DNA, 25 bp, Homo sapien
tgcgggcgcattctcttcaaatttg

SEQ ID NO: 323867 - DNA, 25 bp, Homo sapien
tctccgtatgccgatggactgtgcg

SEQ ID NO: 323868 - DNA, 25 bp, Homo sapien
tgtctgtcagagtgctcaccagggt

SEQ ID NO: 323869 - DNA, 25 bp, Homo sapien
ctctgattgactggtctttctcctc

SEQ ID NO: 323870 - DNA, 25 bp, Homo sapien
ctcctctgattgactggtctttctc

SEQ ID NO: 323871 - DNA, 25 bp, Homo sapien
cctctgattgactggtctttctcct

SEQ ID NO: 323872 - DNA, 25 bp, Homo sapien
tcctctgattgactggtctttctcc

SEQ ID NO: 323873 - DNA, 25 bp, Homo sapien
aacgcttccgagagatggtctggcc

SEQ ID NO: 323874 - DNA, 25 bp, Homo sapien
tcctcggcatttaggtccaaggtgt

SEQ ID NO: 323875 - DNA, 25 bp, Homo sapien
tctggccaagtttgcttaggaagga

SEQ ID NO: 323876 - DNA, 25 bp, Homo sapien
cttgggagaacgcttccgagagatg

SEQ ID NO: 323877 - DNA, 25 bp, Homo sapien
gggagtccttaaacatctcgtagaa

SEQ ID NO: 323878 - DNA, 25 bp, Homo sapien
catttctttgcctgtcatgatggga

SEQ ID NO: 323879 - DNA, 25 bp, Homo sapien
catcaccatggacagcttatcaggc

SEQ ID NO: 323880 - DNA, 25 bp, Homo sapien
gaactgagtcaggtacatcaccatg

SEQ ID NO: 323881 - DNA, 25 bp, Homo sapien
gccctctatcctgggaaatagggcg

SEQ ID NO: 323882 - DNA, 25 bp, Homo sapien
gaaatagggcgggacctgtctctaa

SEQ ID NO: 323883 - DNA, 25 bp, Homo sapien
tctatcctgggaaatagggcgggac

SEQ ID NO: 323884 - DNA, 25 bp, Homo sapien
ggaaatagggcgggacctgtctcta

SEQ ID NO: 323885 - DNA, 25 bp, Homo sapien
cagcagtttgcttgaacgagctaca

SEQ ID NO: 323886 - DNA, 25 bp, Homo sapien
caggtcagggcggtatctatggata

SEQ ID NO: 323887 - DNA, 25 bp, Homo sapien
gataattgcacaaagggccaagcca

SEQ ID NO: 323888 - DNA, 25 bp, Homo sapien
gagatctgtcacgtttacccctgca

SEQ ID NO: 323889 - DNA, 25 bp, Homo sapien
cgggaattcaccaggctctccattt

SEQ ID NO: 323890 - DNA, 25 bp, Homo sapien
aatatcttttgtttcgccagtatca

SEQ ID NO: 323891 - DNA, 25 bp, Homo sapien
ggttcgggaattcaccaggctctcc

SEQ ID NO: 323892 - DNA, 25 bp, Homo sapien
ggtggttcgggaattcaccaggctc

SEQ ID NO: 323893 - DNA, 25 bp, Homo sapien
gaagttcttactcacattctcaggg

SEQ ID NO: 323894 - DNA, 25 bp, Homo sapien
aagttgacgttgatattgggatacc

SEQ ID NO: 323895 - DNA, 25 bp, Homo sapien
cagggtcgatactgtactggctgaa

SEQ ID NO: 323896 - DNA, 25 bp, Homo sapien
ggtctgaggcagcaacctgtaaata

SEQ ID NO: 323897 - DNA, 25 bp, Homo sapien
tagagaccaacttcggaccatccag

SEQ ID NO: 323898 - DNA, 25 bp, Homo sapien
tccaggcagagtccatagcagctag

SEQ ID NO: 323899 - DNA, 25 bp, Homo sapien
cagagtccatagcagctagaaagcc

SEQ ID NO: 323900 - DNA, 25 bp, Homo sapien
caaagggctcgttcctagagaccaa

SEQ ID NO: 323901 - DNA, 25 bp, Homo sapien
gttctcggaggcatacatacaagtg

SEQ ID NO: 323902 - DNA, 25 bp, Homo sapien
tagtaactggtgtccgttctgctcc

SEQ ID NO: 323903 - DNA, 25 bp, Homo sapien
tgctgggtagagaagtctgccgcct

SEQ ID NO: 323904 - DNA, 25 bp, Homo sapien
tccacgttttctcgggaaagcagga

SEQ ID NO: 323905 - DNA, 25 bp, Homo sapien
ccagagaaagaggagggtagggatg

SEQ ID NO: 323906 - DNA, 25 bp, Homo sapien
ggatggagaagctctggcactcagc

SEQ ID NO: 323907 - DNA, 25 bp, Homo sapien
agagaaagaggagggtagggatgga

SEQ ID NO: 323908 - DNA, 25 bp, Homo sapien
agctctggcactcagccagaaccat

SEQ ID NO: 323909 - DNA, 25 bp, Homo sapien
actggccacgtgttgagaactgtga

SEQ ID NO: 323910 - DNA, 25 bp, Homo sapien
aatattactgacagaacactggcca

SEQ ID NO: 323911 - DNA, 25 bp, Homo sapien
gccatagttaagagttgttcacgct

SEQ ID NO: 323912 - DNA, 25 bp, Homo sapien
tcacgctaaactggaaaacatcagg

SEQ ID NO: 323913 - DNA, 25 bp, Homo sapien
aggaaaaacccatcagacaattctt

SEQ ID NO: 323914 - DNA, 25 bp, Homo sapien
tctttctcttggtgatattaaccac

SEQ ID NO: 323915 - DNA, 25 bp, Homo sapien
ttcattcccttgcaggaaaaaccca

SEQ ID NO: 323916 - DNA, 25 bp, Homo sapien
gagttttgaaggaaatccgtggctc

SEQ ID NO: 323917 - DNA, 25 bp, Homo sapien
ctgctttttggctgtcataacgaaa

SEQ ID NO: 323918 - DNA, 25 bp, Homo sapien
tgtcatctttgtagtaaacgatgtt

SEQ ID NO: 323919 - DNA, 25 bp, Homo sapien
gtagtaaacgatgttctccaagtca

SEQ ID NO: 323920 - DNA, 25 bp, Homo sapien
gtcataacgaaatagtgtgtgtcat

SEQ ID NO: 323921 - DNA, 25 bp, Homo sapien
gttgataaaatttgccgtgatggcg

SEQ ID NO: 323922 - DNA, 25 bp, Homo sapien
gatggccagtttgccacggaattct

SEQ ID NO: 323923 - DNA, 25 bp, Homo sapien
tctgctgttgtatttcggttgataa

SEQ ID NO: 323924 - DNA, 25 bp, Homo sapien
gaatataaaagccacaccactgatc

SEQ ID NO: 323925 - DNA, 25 bp, Homo sapien
tactctgacacaggatgagtcttgg

SEQ ID NO: 323926 - DNA, 25 bp, Homo sapien
actctgacacaggatgagtcttggg

SEQ ID NO: 323927 - DNA, 25 bp, Homo sapien
caaggtgttcctccgaccatcccca

SEQ ID NO: 323928 - DNA, 25 bp, Homo sapien
atccccaccgatgatcacttcaaat

SEQ ID NO: 323929 - DNA, 25 bp, Homo sapien
tccacattgacgtggatttcaatgc

SEQ ID NO: 323930 - DNA, 25 bp, Homo sapien
ttcaaaagtattagttggagctgac

SEQ ID NO: 323931 - DNA, 25 bp, Homo sapien
agtattagttggagctgacggatac

SEQ ID NO: 323932 - DNA, 25 bp, Homo sapien
cgtggatttcaatgcctaggatcaa

SEQ ID NO: 323933 - DNA, 25 bp, Homo sapien
tcgtagatcatgtatggtgaatggc

SEQ ID NO: 323934 - DNA, 25 bp, Homo sapien
gaaggcatctcgtttctcaataaca

SEQ ID NO: 323935 - DNA, 25 bp, Homo sapien
ccccagtaaggataagtcgatggct

SEQ ID NO: 323936 - DNA, 25 bp, Homo sapien
ttcttggcacccagacctcgtagat

SEQ ID NO: 323937 - DNA, 25 bp, Homo sapien
ccagtagttaagcttggacttgagc

SEQ ID NO: 323938 - DNA, 25 bp, Homo sapien
gactgccccgtttgtccaattttgc

SEQ ID NO: 323939 - DNA, 25 bp, Homo sapien
tggtggcctggacaaaccggtcaaa

SEQ ID NO: 323940 - DNA, 25 bp, Homo sapien
gacttgagcttgtgatagaaggagc

SEQ ID NO: 323941 - DNA, 25 bp, Homo sapien
tgggtccacctgacactgtcacgtt

SEQ ID NO: 323942 - DNA, 25 bp, Homo sapien
tgtgggtccacctgacactgtcacg

SEQ ID NO: 323943 - DNA, 25 bp, Homo sapien
ctgtgggtccacctgacactgtcac

SEQ ID NO: 323944 - DNA, 25 bp, Homo sapien
ggtccacctgacactgtcacgttaa

SEQ ID NO: 323945 - DNA, 25 bp, Homo sapien
gaaatacctcacgagatgaccggag

SEQ ID NO: 323946 - DNA, 25 bp, Homo sapien
ttggtaggccgtacagggcaacctc

SEQ ID NO: 323947 - DNA, 25 bp, Homo sapien
tctgctgattaaagggctacccggt

SEQ ID NO: 323948 - DNA, 25 bp, Homo sapien
tataacgtcggtgcagaagtcagtg

SEQ ID NO: 323949 - DNA, 25 bp, Homo sapien
atcatcctcattgagacaccaccag

SEQ ID NO: 323950 - DNA, 25 bp, Homo sapien
attgcatgagcctcccctacttctg

SEQ ID NO: 323951 - DNA, 25 bp, Homo sapien
agctctcacttgctcattgcatgag

SEQ ID NO: 323952 - DNA, 25 bp, Homo sapien
ccatttaaaacacccatcagacacg

SEQ ID NO: 323953 - DNA, 25 bp, Homo sapien
gatacccttctcagatgtgcacgca

SEQ ID NO: 323954 - DNA, 25 bp, Homo sapien
gcttaccgtctagtggaaaatacag

SEQ ID NO: 323955 - DNA, 25 bp, Homo sapien
tacaacctatgggtgctagaaagga

SEQ ID NO: 323956 - DNA, 25 bp, Homo sapien
gataccaatgaggtgtgcacctgag

SEQ ID NO: 323957 - DNA, 25 bp, Homo sapien
ggaaaaactcaggcaaggaagaagc

SEQ ID NO: 323958 - DNA, 25 bp, Homo sapien
caaatgcacaggtcattcacagggt

SEQ ID NO: 323959 - DNA, 25 bp, Homo sapien
acaaatgcacaggtcattcacaggg

SEQ ID NO: 323960 - DNA, 25 bp, Homo sapien
aaaaactcaggcaaggaagaagcac

SEQ ID NO: 323961 - DNA, 25 bp, Homo sapien
cagggtctcgctcaggcatccaagc

SEQ ID NO: 323962 - DNA, 25 bp, Homo sapien
agggtctcgctcaggcatccaagct

SEQ ID NO: 323963 - DNA, 25 bp, Homo sapien
ctccagcctgggcacagccgactcc

SEQ ID NO: 323964 - DNA, 25 bp, Homo sapien
gagtatgttctaaacgcagccagca

SEQ ID NO: 323965 - DNA, 25 bp, Homo sapien
tacactgttgctacgggctccgtgc

SEQ ID NO: 323966 - DNA, 25 bp, Homo sapien
tacaaagatgactgcctacgtgtgg

SEQ ID NO: 323967 - DNA, 25 bp, Homo sapien
gaagaatgacatcgctaccgtgtgt

SEQ ID NO: 323968 - DNA, 25 bp, Homo sapien
tgaggtcacgtccacgaaagcactg

SEQ ID NO: 323969 - DNA, 25 bp, Homo sapien
cctatggaatgagtgtgagggcctc

SEQ ID NO: 323970 - DNA, 25 bp, Homo sapien
cactctgaggccacatagtcggtaa

SEQ ID NO: 323971 - DNA, 25 bp, Homo sapien
gccgtctgtgacttgcctgagaaaa

SEQ ID NO: 323972 - DNA, 25 bp, Homo sapien
agaggatgttcgtggtctgccccag

SEQ ID NO: 323973 - DNA, 25 bp, Homo sapien
ccttgagtgagcggctgaccagctg

SEQ ID NO: 323974 - DNA, 25 bp, Homo sapien
ggtccttgagtgagcggctgaccag

SEQ ID NO: 323975 - DNA, 25 bp, Homo sapien
ttgagtgagcggctgaccagctgca

SEQ ID NO: 323976 - DNA, 25 bp, Homo sapien
tgccgcagggcccactggttggagg

SEQ ID NO: 323977 - DNA, 25 bp, Homo sapien
gccgcagggcccactggttggaggc

SEQ ID NO: 323978 - DNA, 25 bp, Homo sapien
ctgccgcagggcccactggttggag

SEQ ID NO: 323979 - DNA, 25 bp, Homo sapien
cgcagggcccactggttggaggccc

SEQ ID NO: 323980 - DNA, 25 bp, Homo sapien
gccctgtgagctgttaaaaagtctt

SEQ ID NO: 323981 - DNA, 25 bp, Homo sapien
agtgctttctaaactgtgccctgtg

SEQ ID NO: 323982 - DNA, 25 bp, Homo sapien
ttgatttcagcaccccacccgattt

SEQ ID NO: 323983 - DNA, 25 bp, Homo sapien
cccacccgatttgcaggcagtgctt

SEQ ID NO: 323984 - DNA, 25 bp, Homo sapien
cacacgcaacaggtgaacggacgta

SEQ ID NO: 323985 - DNA, 25 bp, Homo sapien
ggcacacgcaacaggtgaacggacg

SEQ ID NO: 323986 - DNA, 25 bp, Homo sapien
acgcaacaggtgaacggacgtacgg

SEQ ID NO: 323987 - DNA, 25 bp, Homo sapien
ggacagcaaggcacatcggggaggg

SEQ ID NO: 323988 - DNA, 25 bp, Homo sapien
gaagattcccacaggtcagggtccg

SEQ ID NO: 323989 - DNA, 25 bp, Homo sapien
agattcccacaggtcagggtccggg

SEQ ID NO: 323990 - DNA, 25 bp, Homo sapien
aagattcccacaggtcagggtccgg

SEQ ID NO: 323991 - DNA, 25 bp, Homo sapien
aggaagattcccacaggtcagggtc

SEQ ID NO: 323992 - DNA, 25 bp, Homo sapien
gacaccggcttgatcatcatgaggc

SEQ ID NO: 323993 - DNA, 25 bp, Homo sapien
taggtcatgatagtggaagcagcac

SEQ ID NO: 323994 - DNA, 25 bp, Homo sapien
ttctgtagggtatgtaactgagcat

SEQ ID NO: 323995 - DNA, 25 bp, Homo sapien
agggcctgggacaccggcttgatca

SEQ ID NO: 323996 - DNA, 25 bp, Homo sapien
cttccaacatgaaccgtgaactctg

SEQ ID NO: 323997 - DNA, 25 bp, Homo sapien
acttccaacatgaaccgtgaactct

SEQ ID NO: 323998 - DNA, 25 bp, Homo sapien
ttccaacatgaaccgtgaactctga

SEQ ID NO: 323999 - DNA, 25 bp, Homo sapien
ccaacatgaaccgtgaactctgaga

SEQ ID NO: 324000 - DNA, 25 bp, Homo sapien
ctgtggctccacaaacaggcgggca

SEQ ID NO: 324001 - DNA, 25 bp, Homo sapien
caaacaggcgggcaggctgccccag

SEQ ID NO: 324002 - DNA, 25 bp, Homo sapien
tgtggctccacaaacaggcgggcag

SEQ ID NO: 324003 - DNA, 25 bp, Homo sapien
aggcgggcaggctgccccagtcaca

SEQ ID NO: 324004 - DNA, 25 bp, Homo sapien
ggaagtctgcgagcatccgatatct

SEQ ID NO: 324005 - DNA, 25 bp, Homo sapien
gaaccaagtcatactcctggcactt

SEQ ID NO: 324006 - DNA, 25 bp, Homo sapien
aacaaggccagctttaccaacaggg

SEQ ID NO: 324007 - DNA, 25 bp, Homo sapien
gggacagctaacaatgctgatggaa

SEQ ID NO: 324008 - DNA, 25 bp, Homo sapien
ccctgacatccatttgaccaggaga

SEQ ID NO: 324009 - DNA, 25 bp, Homo sapien
ctaaaactcgacttccgccgtcgct

SEQ ID NO: 324010 - DNA, 25 bp, Homo sapien
ggcaggttccccgatgcccataaag

SEQ ID NO: 324011 - DNA, 25 bp, Homo sapien
ctctgtgttcaaacccccggcaggt

SEQ ID NO: 324012 - DNA, 25 bp, Homo sapien
agcttcgaggccgtggtagacacag

SEQ ID NO: 324013 - DNA, 25 bp, Homo sapien
ttcgaggccgtggtagacacagcac

SEQ ID NO: 324014 - DNA, 25 bp, Homo sapien
caaccagcttcgaggccgtggtaga

SEQ ID NO: 324015 - DNA, 25 bp, Homo sapien
ccgtggtagacacagcaccgtggtc

SEQ ID NO: 324016 - DNA, 25 bp, Homo sapien
tctcctgccagagttaaccagaccg

SEQ ID NO: 324017 - DNA, 25 bp, Homo sapien
cgtgcctaatgcaggaagactcctc

SEQ ID NO: 324018 - DNA, 25 bp, Homo sapien
tatacaattcaacagacacctgcag

SEQ ID NO: 324019 - DNA, 25 bp, Homo sapien
cctgccagagttaaccagactgaat

SEQ ID NO: 324020 - DNA, 25 bp, Homo sapien
ttctgaaccacatccccaccacgcc

SEQ ID NO: 324021 - DNA, 25 bp, Homo sapien
acatccccaccacgcccacaatgta

SEQ ID NO: 324022 - DNA, 25 bp, Homo sapien
atccccaccacgcccacaatgtact

SEQ ID NO: 324023 - DNA, 25 bp, Homo sapien
cccaccacgcccacaatgtactgca

SEQ ID NO: 324024 - DNA, 25 bp, Homo sapien
ttcattctctgcaaatgcagacgtt

SEQ ID NO: 324025 - DNA, 25 bp, Homo sapien
ggcccatctggtcttattaaatact

SEQ ID NO: 324026 - DNA, 25 bp, Homo sapien
cggcccatctggtcttattaaatac

SEQ ID NO: 324027 - DNA, 25 bp, Homo sapien
attctctgcaaatgcagacgttttc

SEQ ID NO: 324028 - DNA, 25 bp, Homo sapien
tggtatctttaagtccttccgcttc

SEQ ID NO: 324029 - DNA, 25 bp, Homo sapien
ggatgataagttctaccttgaatgt

SEQ ID NO: 324030 - DNA, 25 bp, Homo sapien
ggtaatgtctatgcagcacctagca

SEQ ID NO: 324031 - DNA, 25 bp, Homo sapien
cactacctagtcatcagaaaagcac

SEQ ID NO: 324032 - DNA, 25 bp, Homo sapien
tggacatgtgaaaccaacgacaacc

SEQ ID NO: 324033 - DNA, 25 bp, Homo sapien
tactcgacagatgcaggaaagggtc

SEQ ID NO: 324034 - DNA, 25 bp, Homo sapien
caggcttcgaccatctgggccactt

SEQ ID NO: 324035 - DNA, 25 bp, Homo sapien
ggtaattcatctggttccacctgga

SEQ ID NO: 324036 - DNA, 25 bp, Homo sapien
ttaaaacttctaaacctggagcaca

SEQ ID NO: 324037 - DNA, 25 bp, Homo sapien
aaacttctaaacctggagcacaaga

SEQ ID NO: 324038 - DNA, 25 bp, Homo sapien
acttctaaacctggagcacaagaaa

SEQ ID NO: 324039 - DNA, 25 bp, Homo sapien
taaaacttctaaacctggagcacaa

SEQ ID NO: 324040 - DNA, 25 bp, Homo sapien
taagacttgaacaatctggggctgg

SEQ ID NO: 324041 - DNA, 25 bp, Homo sapien
aatcaaatatggaatgaacggcatc

SEQ ID NO: 324042 - DNA, 25 bp, Homo sapien
caaatatggaatgaacggcatcctc

SEQ ID NO: 324043 - DNA, 25 bp, Homo sapien
ggaatgaacggcatcctctgagagg

SEQ ID NO: 324044 - DNA, 25 bp, Homo sapien
aatatggaatgaacggcatcctctg

SEQ ID NO: 324045 - DNA, 25 bp, Homo sapien
tttctcagcttaaaacccagttcat

SEQ ID NO: 324046 - DNA, 25 bp, Homo sapien
caatgaactggcctgtgtgcggcca

SEQ ID NO: 324047 - DNA, 25 bp, Homo sapien
taggaagatgtctttctcagcttaa

SEQ ID NO: 324048 - DNA, 25 bp, Homo sapien
ctcatccctggagtacaacgactgt

SEQ ID NO: 324049 - DNA, 25 bp, Homo sapien
gcctgatattcaaatgtcatcctct

SEQ ID NO: 324050 - DNA, 25 bp, Homo sapien
gaccaaatacacattggtggcctga

SEQ ID NO: 324051 - DNA, 25 bp, Homo sapien
tcagatgggaccaaatacacattgg

SEQ ID NO: 324052 - DNA, 25 bp, Homo sapien
tatggagcaaagtgtcagatgggac

SEQ ID NO: 324053 - DNA, 25 bp, Homo sapien
gcaagcccggttccgtgtagggctc

SEQ ID NO: 324054 - DNA, 25 bp, Homo sapien
tttctgctaggccaggcaagcccgg

SEQ ID NO: 324055 - DNA, 25 bp, Homo sapien
tgtagggctcctcaagatggtttct

SEQ ID NO: 324056 - DNA, 25 bp, Homo sapien
ctcgctgcggctggctttctgctag

SEQ ID NO: 324057 - DNA, 25 bp, Homo sapien
gccggcgtcgctgtggcgggccagt

SEQ ID NO: 324058 - DNA, 25 bp, Homo sapien
ctctgcctcatactgcggtgtccct

SEQ ID NO: 324059 - DNA, 25 bp, Homo sapien
gcagcccgagcgtccggcgcggtag

SEQ ID NO: 324060 - DNA, 25 bp, Homo sapien
cggtaggtagcagccggagaagcgg

SEQ ID NO: 324061 - DNA, 25 bp, Homo sapien
tcagtcttgccagaatctcacggga

SEQ ID NO: 324062 - DNA, 25 bp, Homo sapien
aaagaaataagctgtcgccacgccc

SEQ ID NO: 324063 - DNA, 25 bp, Homo sapien
tacattcctcaaagcccaacgggag

SEQ ID NO: 324064 - DNA, 25 bp, Homo sapien
tacacctcgaaaactggcaagcggc

SEQ ID NO: 324065 - DNA, 25 bp, Homo sapien
cagcatgcacatcggcattttcaga

SEQ ID NO: 324066 - DNA, 25 bp, Homo sapien
tggaactaatgaacttgaaaccgcc

SEQ ID NO: 324067 - DNA, 25 bp, Homo sapien
aagcctcagaatggaactaatgaac

SEQ ID NO: 324068 - DNA, 25 bp, Homo sapien
gaatagcggtagaagaggccctgat

SEQ ID NO: 324069 - DNA, 25 bp, Homo sapien
cctgacaatgaaggccctgaggagc

SEQ ID NO: 324070 - DNA, 25 bp, Homo sapien
acaatgaaggccctgaggagcgagt

SEQ ID NO: 324071 - DNA, 25 bp, Homo sapien
gaaggccctgaggagcgagtggaca

SEQ ID NO: 324072 - DNA, 25 bp, Homo sapien
cttcctgacaatgaaggccctgagg

SEQ ID NO: 324073 - DNA, 25 bp, Homo sapien
gaggtcaggtgaaaacactaccagc

SEQ ID NO: 324074 - DNA, 25 bp, Homo sapien
tgtgtgtatcacaacatgacacgcc

SEQ ID NO: 324075 - DNA, 25 bp, Homo sapien
tgacacgcctacgaagaatgctgag

SEQ ID NO: 324076 - DNA, 25 bp, Homo sapien
tcagctccacggtggtaactgtggc

SEQ ID NO: 324077 - DNA, 25 bp, Homo sapien
tcgggggtgcctgggtacgctcttc

SEQ ID NO: 324078 - DNA, 25 bp, Homo sapien
ggtgcctgcctacgcgggcgctccc

SEQ ID NO: 324079 - DNA, 25 bp, Homo sapien
gtggctgctcgcacaacccctgcag

SEQ ID NO: 324080 - DNA, 25 bp, Homo sapien
gactagggcttcacagccgcatcac

SEQ ID NO: 324081 - DNA, 25 bp, Homo sapien
tgcagctgcgatcccgcccagttag

SEQ ID NO: 324082 - DNA, 25 bp, Homo sapien
gtccaccagactccgaggaaagaga

SEQ ID NO: 324083 - DNA, 25 bp, Homo sapien
tatattctgtttcacccgggctttg

SEQ ID NO: 324084 - DNA, 25 bp, Homo sapien
gatacacagtcattccatgagcaag

SEQ ID NO: 324085 - DNA, 25 bp, Homo sapien
tgctctgcagggacagaactaagta

SEQ ID NO: 324086 - DNA, 25 bp, Homo sapien
aaaaatgaggcccttatgctcagcg

SEQ ID NO: 324087 - DNA, 25 bp, Homo sapien
tgggaccaacatattctcagtggtc

SEQ ID NO: 324088 - DNA, 25 bp, Homo sapien
gacagatcggaagtgacaacagtgg

SEQ ID NO: 324089 - DNA, 25 bp, Homo sapien
gacattggtatgtagatggtgataa

SEQ ID NO: 324090 - DNA, 25 bp, Homo sapien
gccttggacccggactcgttatgaa

SEQ ID NO: 324091 - DNA, 25 bp, Homo sapien
cagtttgttttctcacggcacaggg

SEQ ID NO: 324092 - DNA, 25 bp, Homo sapien
tgagtctttgatcgtaaccaggagc

SEQ ID NO: 324093 - DNA, 25 bp, Homo sapien
gaactggttagtgaggacccctcca

SEQ ID NO: 324094 - DNA, 25 bp, Homo sapien
cctgggaacccttcaataagagcaa

SEQ ID NO: 324095 - DNA, 25 bp, Homo sapien
tctttgtgcagatacatacagagac

SEQ ID NO: 324096 - DNA, 25 bp, Homo sapien
taaacgggacaatgccaacatgctc

SEQ ID NO: 324097 - DNA, 25 bp, Homo sapien
caggagcagacacgcagtcctggga

SEQ ID NO: 324098 - DNA, 25 bp, Homo sapien
ttcagcactgttaaggtattgcaag

SEQ ID NO: 324099 - DNA, 25 bp, Homo sapien
tgcaagaatgcccaaccctctggtg

SEQ ID NO: 324100 - DNA, 25 bp, Homo sapien
taaggtattgcaagaatgcccaacc

SEQ ID NO: 324101 - DNA, 25 bp, Homo sapien
cactgttaaggtattgcaagaatgc

SEQ ID NO: 324102 - DNA, 25 bp, Homo sapien
cagaggggctaatgtgcccagtgcc

SEQ ID NO: 324103 - DNA, 25 bp, Homo sapien
gcaaaacagactcagaggggctaat

SEQ ID NO: 324104 - DNA, 25 bp, Homo sapien
ccagtgccccaccgcttttaaatgg

SEQ ID NO: 324105 - DNA, 25 bp, Homo sapien
tgccccaccgcttttaaatggtaga

SEQ ID NO: 324106 - DNA, 25 bp, Homo sapien
tgtgagctctgttgctgccctaact

SEQ ID NO: 324107 - DNA, 25 bp, Homo sapien
taactgcagtgcctatcatctgagc

SEQ ID NO: 324108 - DNA, 25 bp, Homo sapien
tccttagcagatggcctcatggcca

SEQ ID NO: 324109 - DNA, 25 bp, Homo sapien
gagtgatctcaaatatgccctatga

SEQ ID NO: 324110 - DNA, 25 bp, Homo sapien
gcctcagttttcttggcgggagtta

SEQ ID NO: 324111 - DNA, 25 bp, Homo sapien
ccaggaccaggaatgctgaatggta

SEQ ID NO: 324112 - DNA, 25 bp, Homo sapien
gaggctttgacctggctgttctgct

SEQ ID NO: 324113 - DNA, 25 bp, Homo sapien
gaatggtagaagtcacccctctgag

SEQ ID NO: 324114 - DNA, 25 bp, Homo sapien
gcctcattttcctaagtagctgggg

SEQ ID NO: 324115 - DNA, 25 bp, Homo sapien
atcagatcactgaagccttgagctc

SEQ ID NO: 324116 - DNA, 25 bp, Homo sapien
tcagatcactgaagccttgagctcc

SEQ ID NO: 324117 - DNA, 25 bp, Homo sapien
tcattttcctaagtagctggggcta

SEQ ID NO: 324118 - DNA, 25 bp, Homo sapien
catgttctgatccacctgaggcaaa

SEQ ID NO: 324119 - DNA, 25 bp, Homo sapien
gaacacatgttctgatccacctgag

SEQ ID NO: 324120 - DNA, 25 bp, Homo sapien
tctgatccacctgaggcaaaaggcg

SEQ ID NO: 324121 - DNA, 25 bp, Homo sapien
cctgaggcaaaaggcgcccctgtgg

SEQ ID NO: 324122 - DNA, 25 bp, Homo sapien
tgaaacccatgccaggaaaatgaaa

SEQ ID NO: 324123 - DNA, 25 bp, Homo sapien
aaattgccagaggatagggagtgcc

SEQ ID NO: 324124 - DNA, 25 bp, Homo sapien
tactctcaagtagtccagcaaaaga

SEQ ID NO: 324125 - DNA, 25 bp, Homo sapien
cacattctgtttgagttgcaccctg

SEQ ID NO: 324126 - DNA, 25 bp, Homo sapien
tgcaagtatagtccaaagaacttcc

SEQ ID NO: 324127 - DNA, 25 bp, Homo sapien
gagaattccagggacactgaaagta

SEQ ID NO: 324128 - DNA, 25 bp, Homo sapien
tgtgaaacagtattaagcctacaga

SEQ ID NO: 324129 - DNA, 25 bp, Homo sapien
actctttcgcgcatgattttgagaa

SEQ ID NO: 324130 - DNA, 25 bp, Homo sapien
tggcatgcgggcagaatgaacctgt

SEQ ID NO: 324131 - DNA, 25 bp, Homo sapien
tattcagtatctacttttattggta

SEQ ID NO: 324132 - DNA, 25 bp, Homo sapien
tggtatgaagtgtggcttcccattt

SEQ ID NO: 324133 - DNA, 25 bp, Homo sapien
tttgtgggagagtactttgaaactg

SEQ ID NO: 324134 - DNA, 25 bp, Homo sapien
gcagcaacaccaattactttgctcc

SEQ ID NO: 324135 - DNA, 25 bp, Homo sapien
caacaccaattactttgctccaccg

SEQ ID NO: 324136 - DNA, 25 bp, Homo sapien
agcaacaccaattactttgctccac

SEQ ID NO: 324137 - DNA, 25 bp, Homo sapien
aacaccaattactttgctccaccga

SEQ ID NO: 324138 - DNA, 25 bp, Homo sapien
ctgacgatggacgtgtggatagcct

SEQ ID NO: 324139 - DNA, 25 bp, Homo sapien
caatgtaagcggagtctgggctgac

SEQ ID NO: 324140 - DNA, 25 bp, Homo sapien
tgtgtaaacaccatactgcgcaaag

SEQ ID NO: 324141 - DNA, 25 bp, Homo sapien
atgctgcactgtgggcgacactgcc

SEQ ID NO: 324142 - DNA, 25 bp, Homo sapien
gaagaggacaacatcttggaaaatg

SEQ ID NO: 324143 - DNA, 25 bp, Homo sapien
ctttcatcagctttccctcaatgat

SEQ ID NO: 324144 - DNA, 25 bp, Homo sapien
caatgatgagctcaaaatcctcttt

SEQ ID NO: 324145 - DNA, 25 bp, Homo sapien
gacaacatcttggaaaatgcagcct

SEQ ID NO: 324146 - DNA, 25 bp, Homo sapien
ccaagcttattccaccacagtcagg

SEQ ID NO: 324147 - DNA, 25 bp, Homo sapien
ttagccctgccggacactcggagca

SEQ ID NO: 324148 - DNA, 25 bp, Homo sapien
gtcatctatgttgttagcggccctc

SEQ ID NO: 324149 - DNA, 25 bp, Homo sapien
tctatgttgttagcggccctcagga

SEQ ID NO: 324150 - DNA, 25 bp, Homo sapien
acctgttgaccctttgtgttgtcca

SEQ ID NO: 324151 - DNA, 25 bp, Homo sapien
taacagaaacgcatggtctcccaga

SEQ ID NO: 324152 - DNA, 25 bp, Homo sapien
ccttccttggagcttgaccttgtca

SEQ ID NO: 324153 - DNA, 25 bp, Homo sapien
tcagacaggtatagatgagtgttcc

SEQ ID NO: 324154 - DNA, 25 bp, Homo sapien
tgatcagccatgcaagaataaatga

SEQ ID NO: 324155 - DNA, 25 bp, Homo sapien
gaatgctgagtaaattggccaaaaa

SEQ ID NO: 324156 - DNA, 25 bp, Homo sapien
taaaagcctttaacccagaatgctg

SEQ ID NO: 324157 - DNA, 25 bp, Homo sapien
caatattataggagttgcatgggta

SEQ ID NO: 324158 - DNA, 25 bp, Homo sapien
aactaagtcaacttatacaagtgaa

SEQ ID NO: 324159 - DNA, 25 bp, Homo sapien
cctttaagccaggagtcaacagtga

SEQ ID NO: 324160 - DNA, 25 bp, Homo sapien
ccctttaagccaggagtcaacagtg

SEQ ID NO: 324161 - DNA, 25 bp, Homo sapien
gagatggcgttttttcctcaggaag

SEQ ID NO: 324162 - DNA, 25 bp, Homo sapien
tatttcagggtaggtatcattctcc

SEQ ID NO: 324163 - DNA, 25 bp, Homo sapien
cagggtaggtatcattctccagtgt

SEQ ID NO: 324164 - DNA, 25 bp, Homo sapien
gtgagttatttcagggtaggtatca

SEQ ID NO: 324165 - DNA, 25 bp, Homo sapien
tcccccaaaactggcacggaagaca

SEQ ID NO: 324166 - DNA, 25 bp, Homo sapien
taatccatgggggaaaactgctgtg

SEQ ID NO: 324167 - DNA, 25 bp, Homo sapien
ctttaaagtgtatctagattggcag

SEQ ID NO: 324168 - DNA, 25 bp, Homo sapien
tctgcattgcagtggatcgtggatg

SEQ ID NO: 324169 - DNA, 25 bp, Homo sapien
agtttcacaactcttaatccatggg

SEQ ID NO: 324170 - DNA, 25 bp, Homo sapien
ttttacagatgtcttgtacagtgtc

SEQ ID NO: 324171 - DNA, 25 bp, Homo sapien
tacagcgtccttattagcgaattcg

SEQ ID NO: 324172 - DNA, 25 bp, Homo sapien
gcgaattcgtatacagcatcctcat

SEQ ID NO: 324173 - DNA, 25 bp, Homo sapien
tgtcttgtacggtgtccttataagc

SEQ ID NO: 324174 - DNA, 25 bp, Homo sapien
tgtcattagcgatgtcatatagagc

SEQ ID NO: 324175 - DNA, 25 bp, Homo sapien
ggtgtcattagcgatgtcatataga

SEQ ID NO: 324176 - DNA, 25 bp, Homo sapien
tcattagcgatgtcatatagagcat

SEQ ID NO: 324177 - DNA, 25 bp, Homo sapien
tagcatgccttgtgggtgtcattag

SEQ ID NO: 324178 - DNA, 25 bp, Homo sapien
gtgatgtcttatatggtgtcctcat

SEQ ID NO: 324179 - DNA, 25 bp, Homo sapien
tggtgatgtcttatatggtgtcctc

SEQ ID NO: 324180 - DNA, 25 bp, Homo sapien
ggtgatgtcttatatggtgtcctca

SEQ ID NO: 324181 - DNA, 25 bp, Homo sapien
ctcgttagcaatgccttgtacagtg

SEQ ID NO: 324182 - DNA, 25 bp, Homo sapien
agcgatggcttgtacactgtcctca

SEQ ID NO: 324183 - DNA, 25 bp, Homo sapien
cattagcgatggcttgtacactgtc

SEQ ID NO: 324184 - DNA, 25 bp, Homo sapien
tcctcattagcgatggcttgtacac

SEQ ID NO: 324185 - DNA, 25 bp, Homo sapien
gcgtcctcattaccgatgccttgta

SEQ ID NO: 324186 - DNA, 25 bp, Homo sapien
agcgtcctcattaccgatgccttgt

SEQ ID NO: 324187 - DNA, 25 bp, Homo sapien
acagcgtcctcattaccgatgcctt

SEQ ID NO: 324188 - DNA, 25 bp, Homo sapien
tcctcattaccgatgccttgtatgg

SEQ ID NO: 324189 - DNA, 25 bp, Homo sapien
actagccggtcaatagtgagatggc

SEQ ID NO: 324190 - DNA, 25 bp, Homo sapien
cggcactagccggtcaatagtgaga

SEQ ID NO: 324191 - DNA, 25 bp, Homo sapien
cggtcaatagtgagatggctcctca

SEQ ID NO: 324192 - DNA, 25 bp, Homo sapien
gccggtcaatagtgagatggctcct

SEQ ID NO: 324193 - DNA, 25 bp, Homo sapien
tcttggcatccagattgttttcttg

SEQ ID NO: 324194 - DNA, 25 bp, Homo sapien
tttcttggcatccagattgttttct

SEQ ID NO: 324195 - DNA, 25 bp, Homo sapien
ttcttggcatccagattgttttctt

SEQ ID NO: 324196 - DNA, 25 bp, Homo sapien
ctttcttggcatccagattgttttc

SEQ ID NO: 324197 - DNA, 25 bp, Homo sapien
gcctcagaggggccacctgcaccac

SEQ ID NO: 324198 - DNA, 25 bp, Homo sapien
aagcctcagaggggccacctgcacc

SEQ ID NO: 324199 - DNA, 25 bp, Homo sapien
tagattcaagcctcagaggggccac

SEQ ID NO: 324200 - DNA, 25 bp, Homo sapien
tcaagcctcagaggggccacctgca

SEQ ID NO: 324201 - DNA, 25 bp, Homo sapien
caaagctttttgaggggtatgtcat

SEQ ID NO: 324202 - DNA, 25 bp, Homo sapien
acaaagctttttgaggggtatgtca

SEQ ID NO: 324203 - DNA, 25 bp, Homo sapien
tgtccttgtgaactagagactcctc

SEQ ID NO: 324204 - DNA, 25 bp, Homo sapien
ctgtccttgtgaactagagactcct

SEQ ID NO: 324205 - DNA, 25 bp, Homo sapien
gcttgtccaatctttcaagattgct

SEQ ID NO: 324206 - DNA, 25 bp, Homo sapien
tctttcaagattgctgaagactgta

SEQ ID NO: 324207 - DNA, 25 bp, Homo sapien
agattgctgaagactgtatgatgga

SEQ ID NO: 324208 - DNA, 25 bp, Homo sapien
ctgaagcttgtccaatctttcaaga

SEQ ID NO: 324209 - DNA, 25 bp, Homo sapien
tcatagttttctgctcggatttcaa

SEQ ID NO: 324210 - DNA, 25 bp, Homo sapien
tctgctcggatttcaataagaaact

SEQ ID NO: 324211 - DNA, 25 bp, Homo sapien
aggattggtcatattggtcatagtt

SEQ ID NO: 324212 - DNA, 25 bp, Homo sapien
tattggtcatagttttctgctcgga

SEQ ID NO: 324213 - DNA, 25 bp, Homo sapien
actggttggtgtgcacagcatatct

SEQ ID NO: 324214 - DNA, 25 bp, Homo sapien
cagatttcctgtagaatccttttct

SEQ ID NO: 324215 - DNA, 25 bp, Homo sapien
tggaggctctccagacaaaagccag

SEQ ID NO: 324216 - DNA, 25 bp, Homo sapien
catggaggctctccagacaaaagcc

SEQ ID NO: 324217 - DNA, 25 bp, Homo sapien
gccagcagttaagctccagatttcc

SEQ ID NO: 324218 - DNA, 25 bp, Homo sapien
cattgaatgtgctccctgaagtcac

SEQ ID NO: 324219 - DNA, 25 bp, Homo sapien
tttttggaaggcttcttcgagtcac

SEQ ID NO: 324220 - DNA, 25 bp, Homo sapien
tttcacacgctttttggaaggcttc

SEQ ID NO: 324221 - DNA, 25 bp, Homo sapien
cttggtagtagagtagggcttcctt

SEQ ID NO: 324222 - DNA, 25 bp, Homo sapien
gcttccttttcacacgctttttgga

SEQ ID NO: 324223 - DNA, 25 bp, Homo sapien
aaaggttcaatctgctctgaccttt

SEQ ID NO: 324224 - DNA, 25 bp, Homo sapien
tctgctctgacctttgaaaaactca

SEQ ID NO: 324225 - DNA, 25 bp, Homo sapien
accacaaaggttcaatctgctctga

SEQ ID NO: 324226 - DNA, 25 bp, Homo sapien
aatgaaaccacaaaggttcaatctg

SEQ ID NO: 324227 - DNA, 25 bp, Homo sapien
gaattggatacttcagagatctccc

SEQ ID NO: 324228 - DNA, 25 bp, Homo sapien
ggatacttcagagatctcccttacc

SEQ ID NO: 324229 - DNA, 25 bp, Homo sapien
attggatacttcagagatctccctt

SEQ ID NO: 324230 - DNA, 25 bp, Homo sapien
ctgaattggatacttcagagatctc

SEQ ID NO: 324231 - DNA, 25 bp, Homo sapien
tatatatttgattattgtaccaagc

SEQ ID NO: 324232 - DNA, 25 bp, Homo sapien
tatatttgattattgtaccaagcag

SEQ ID NO: 324233 - DNA, 25 bp, Homo sapien
gtgtagtcccagtgtggtgtagccc

SEQ ID NO: 324234 - DNA, 25 bp, Homo sapien
cccagtgtggtgtagccccagctac

SEQ ID NO: 324235 - DNA, 25 bp, Homo sapien
tctcttagaagactccgtagatcca

SEQ ID NO: 324236 - DNA, 25 bp, Homo sapien
gaagactccgtagatccaggaacgg

SEQ ID NO: 324237 - DNA, 25 bp, Homo sapien
tagatccaggaacggaaatggaaaa

SEQ ID NO: 324238 - DNA, 25 bp, Homo sapien
aaatctcttagaagactccgtagat

SEQ ID NO: 324239 - DNA, 25 bp, Homo sapien
atgtaaaccagaagatatgcagttt

SEQ ID NO: 324240 - DNA, 25 bp, Homo sapien
atcttcatgtaaaccagaagatatg

SEQ ID NO: 324241 - DNA, 25 bp, Homo sapien
gtaaaccagaagatatgcagtttcc

SEQ ID NO: 324242 - DNA, 25 bp, Homo sapien
taaaccagaagatatgcagtttcct

SEQ ID NO: 324243 - DNA, 25 bp, Homo sapien
ggagtaagcttgcagggcggctggg

SEQ ID NO: 324244 - DNA, 25 bp, Homo sapien
agaaagggagtaagcttgcagggcg

SEQ ID NO: 324245 - DNA, 25 bp, Homo sapien
catggatcagctctgagaccccgag

SEQ ID NO: 324246 - DNA, 25 bp, Homo sapien
ggacaagatcccaggatctcagcct

SEQ ID NO: 324247 - DNA, 25 bp, Homo sapien
tttaatgaagtagactttaagaaga

SEQ ID NO: 324248 - DNA, 25 bp, Homo sapien
agaaaagtattattagaggtaagag

SEQ ID NO: 324249 - DNA, 25 bp, Homo sapien
agaatttactaggagccaggcgcaa

SEQ ID NO: 324250 - DNA, 25 bp, Homo sapien
aaagtattattagaggtaagagaca

SEQ ID NO: 324251 - DNA, 25 bp, Homo sapien
ttcgagtttaagtgggtgtcgcatc

SEQ ID NO: 324252 - DNA, 25 bp, Homo sapien
acttcgagtttaagtgggtgtcgca

SEQ ID NO: 324253 - DNA, 25 bp, Homo sapien
tctttgcaacttcgagtttaagtgg

SEQ ID NO: 324254 - DNA, 25 bp, Homo sapien
tgcaacttcgagtttaagtgggtgt

SEQ ID NO: 324255 - DNA, 25 bp, Homo sapien
ctggggagactaagcagtccccagc

SEQ ID NO: 324256 - DNA, 25 bp, Homo sapien
gggagactaagcagtccccagcccc

SEQ ID NO: 324257 - DNA, 25 bp, Homo sapien
tggggagactaagcagtccccagcc

SEQ ID NO: 324258 - DNA, 25 bp, Homo sapien
ggggagactaagcagtccccagccc

SEQ ID NO: 324259 - DNA, 25 bp, Homo sapien
cgtacaatatttgagaagaccttgg

SEQ ID NO: 324260 - DNA, 25 bp, Homo sapien
tcagcagcaacagcggtgtgggcaa

SEQ ID NO: 324261 - DNA, 25 bp, Homo sapien
caacagcggtgtgggcaaaggccgg

SEQ ID NO: 324262 - DNA, 25 bp, Homo sapien
caatatttgagaagaccttggagtc

SEQ ID NO: 324263 - DNA, 25 bp, Homo sapien
tgaacagcgggctgccagatggaca

SEQ ID NO: 324264 - DNA, 25 bp, Homo sapien
acagacacgaagatggatcgacaga

SEQ ID NO: 324265 - DNA, 25 bp, Homo sapien
ggccagatagctagacaaagaggac

SEQ ID NO: 324266 - DNA, 25 bp, Homo sapien
gatggtcagatagacaatgggacag

SEQ ID NO: 324267 - DNA, 25 bp, Homo sapien
catcctggtgagtatcttgtccctg

SEQ ID NO: 324268 - DNA, 25 bp, Homo sapien
ctcttcctcatcctggtgagtatct

SEQ ID NO: 324269 - DNA, 25 bp, Homo sapien
ggattgcttgtcagccttgtctgcc

SEQ ID NO: 324270 - DNA, 25 bp, Homo sapien
gagcactcagtagccagcaggttcc

SEQ ID NO: 324271 - DNA, 25 bp, Homo sapien
tgggaccccacaccgtgactcagtt

SEQ ID NO: 324272 - DNA, 25 bp, Homo sapien
agagaggacaccaaccattgtccac

SEQ ID NO: 324273 - DNA, 25 bp, Homo sapien
gaaccacacctgtgtggtcacaggc

SEQ ID NO: 324274 - DNA, 25 bp, Homo sapien
ggtggtgccatttcaggccaggtca

SEQ ID NO: 324275 - DNA, 25 bp, Homo sapien
tttctctccactgtcgtgacgttgg

SEQ ID NO: 324276 - DNA, 25 bp, Homo sapien
ggccctcttcacgtcatagccgaac

SEQ ID NO: 324277 - DNA, 25 bp, Homo sapien
acgttgggcagaagcttgttgtgca

SEQ ID NO: 324278 - DNA, 25 bp, Homo sapien
tccacggccctcttcacgtcatagc

SEQ ID NO: 324279 - DNA, 25 bp, Homo sapien
gggagtgtgatcagcgtggcttggg

SEQ ID NO: 324280 - DNA, 25 bp, Homo sapien
ggcatgggagtgtgatcagcgtggc

SEQ ID NO: 324281 - DNA, 25 bp, Homo sapien
ctggggcatgggagtgtgatcagcg

SEQ ID NO: 324282 - DNA, 25 bp, Homo sapien
catgggagtgtgatcagcgtggctt

SEQ ID NO: 324283 - DNA, 25 bp, Homo sapien
ctgtgcagagtgggcagggccaggg

SEQ ID NO: 324284 - DNA, 25 bp, Homo sapien
cagggagaaaaggggtgacacatac

SEQ ID NO: 324285 - DNA, 25 bp, Homo sapien
gcagggccagggagaaaaggggtga

SEQ ID NO: 324286 - DNA, 25 bp, Homo sapien
ggccagggagaaaaggggtgacaca

SEQ ID NO: 324287 - DNA, 25 bp, Homo sapien
accatgatcgtcgggcacatggaca

SEQ ID NO: 324288 - DNA, 25 bp, Homo sapien
atgatcgtcgggcacatggacaaga

SEQ ID NO: 324289 - DNA, 25 bp, Homo sapien
gcagtgtctgtggtgatctgcgtgc

SEQ ID NO: 324290 - DNA, 25 bp, Homo sapien
cagtgcagtgtctgtggtgatctgc

SEQ ID NO: 324291 - DNA, 25 bp, Homo sapien
ctgcggccgatgggagaagacaggg

SEQ ID NO: 324292 - DNA, 25 bp, Homo sapien
gggtgccccaaactcattggtgatg

SEQ ID NO: 324293 - DNA, 25 bp, Homo sapien
tgaggggggtgccccaaactcattg

SEQ ID NO: 324294 - DNA, 25 bp, Homo sapien
ctggctggatgaaattggcaggtga

SEQ ID NO: 324295 - DNA, 25 bp, Homo sapien
tggcaggtgaggggggtgccccaaa

SEQ ID NO: 324296 - DNA, 25 bp, Homo sapien
aggatcccactgaccggggagcaga

SEQ ID NO: 324297 - DNA, 25 bp, Homo sapien
ccattcattattgaacaggatccca

SEQ ID NO: 324298 - DNA, 25 bp, Homo sapien
agtcgtccattcattattgaacagg

SEQ ID NO: 324299 - DNA, 25 bp, Homo sapien
ctgaagtcgtccattcattattgaa

SEQ ID NO: 324300 - DNA, 25 bp, Homo sapien
cctctgcgacgacagacaggtgagc

SEQ ID NO: 324301 - DNA, 25 bp, Homo sapien
tgtggtcagagatctgggaccggag

SEQ ID NO: 324302 - DNA, 25 bp, Homo sapien
cccgtcatccggcgtgtagaactcg

SEQ ID NO: 324303 - DNA, 25 bp, Homo sapien
tagaactcgggcttgtagtaggaga

SEQ ID NO: 324304 - DNA, 25 bp, Homo sapien
cagcgaagaactcagaggtcatgtt

SEQ ID NO: 324305 - DNA, 25 bp, Homo sapien
gaactcagaggtcatgttgcggacc

SEQ ID NO: 324306 - DNA, 25 bp, Homo sapien
ctgggcagcgaagaactcagaggtc

SEQ ID NO: 324307 - DNA, 25 bp, Homo sapien
actcagaggtcatgttgcggaccac

SEQ ID NO: 324308 - DNA, 25 bp, Homo sapien
actgtcagttctgtggggcagaagc

SEQ ID NO: 324309 - DNA, 25 bp, Homo sapien
gtcagttctgtggggcagaagccaa

SEQ ID NO: 324310 - DNA, 25 bp, Homo sapien
gggcagaagccaagactgggggtca

SEQ ID NO: 324311 - DNA, 25 bp, Homo sapien
agaagccaagactgggggtcaccca

SEQ ID NO: 324312 - DNA, 25 bp, Homo sapien
agtccatccgagcacacagtaggcc

SEQ ID NO: 324313 - DNA, 25 bp, Homo sapien
aaagcctctacgatgcggtggtacg

SEQ ID NO: 324314 - DNA, 25 bp, Homo sapien
tctacgatgcggtggtacgtcaggc

SEQ ID NO: 324315 - DNA, 25 bp, Homo sapien
cggtggtacgtcaggcccttctgct

SEQ ID NO: 324316 - DNA, 25 bp, Homo sapien
ggtccccaagcagggtcctcttggc

SEQ ID NO: 324317 - DNA, 25 bp, Homo sapien
ggttgatcagagccaggtgcatgtt

SEQ ID NO: 324318 - DNA, 25 bp, Homo sapien
tggttgatcagagccaggtgcatgt

SEQ ID NO: 324319 - DNA, 25 bp, Homo sapien
gttgatcagagccaggtgcatgttg

SEQ ID NO: 324320 - DNA, 25 bp, Homo sapien
ctggttgatcagagccaggtgcatg

SEQ ID NO: 324321 - DNA, 25 bp, Homo sapien
caacccttgagcattgcccgcttca

SEQ ID NO: 324322 - DNA, 25 bp, Homo sapien
tcctccaacccttgagcattgcccg

SEQ ID NO: 324323 - DNA, 25 bp, Homo sapien
aacccttgagcattgcccgcttcag

SEQ ID NO: 324324 - DNA, 25 bp, Homo sapien
tccaacccttgagcattgcccgctt

SEQ ID NO: 324325 - DNA, 25 bp, Homo sapien
ggatgagggccagcacgggcccgct

SEQ ID NO: 324326 - DNA, 25 bp, Homo sapien
gatgttcagcgggtgctcgatcagc

SEQ ID NO: 324327 - DNA, 25 bp, Homo sapien
agttgttcaggtcctcagctgtcac

SEQ ID NO: 324328 - DNA, 25 bp, Homo sapien
ttcagcgggtgctcgatcagctcag

SEQ ID NO: 324329 - DNA, 25 bp, Homo sapien
caatgggacagcagctcgaatgggc

SEQ ID NO: 324330 - DNA, 25 bp, Homo sapien
cagcagctcgaatgggcgctgggat

SEQ ID NO: 324331 - DNA, 25 bp, Homo sapien
tgggacagcagctcgaatgggcgct

SEQ ID NO: 324332 - DNA, 25 bp, Homo sapien
tgcaatgggacagcagctcgaatgg

SEQ ID NO: 324333 - DNA, 25 bp, Homo sapien
ggcaccctcgatggccagcatctcg

SEQ ID NO: 324334 - DNA, 25 bp, Homo sapien
ctcgatggccagcatctcgtaggtg

SEQ ID NO: 324335 - DNA, 25 bp, Homo sapien
atctcgtaggtgtcagccagccgcg

SEQ ID NO: 324336 - DNA, 25 bp, Homo sapien
accctcgatggccagcatctcgtag

SEQ ID NO: 324337 - DNA, 25 bp, Homo sapien
agctcatagcctcggatctccccag

SEQ ID NO: 324338 - DNA, 25 bp, Homo sapien
catagcctcggatctccccaggcac

SEQ ID NO: 324339 - DNA, 25 bp, Homo sapien
ccagctcatagcctcggatctcccc

SEQ ID NO: 324340 - DNA, 25 bp, Homo sapien
ctcatagcctcggatctccccaggc

SEQ ID NO: 324341 - DNA, 25 bp, Homo sapien
gccacagttagtgaccctgagtggg

SEQ ID NO: 324342 - DNA, 25 bp, Homo sapien
gggacatcgggatctctcgcaggca

SEQ ID NO: 324343 - DNA, 25 bp, Homo sapien
ggatctctcgcaggcagcatcccag

SEQ ID NO: 324344 - DNA, 25 bp, Homo sapien
agagagagccacagttagtgaccct

SEQ ID NO: 324345 - DNA, 25 bp, Homo sapien
ggctcatgcgctcctcctgacttgg

SEQ ID NO: 324346 - DNA, 25 bp, Homo sapien
gggctcatgcgctcctcctgacttg

SEQ ID NO: 324347 - DNA, 25 bp, Homo sapien
ggccacctcgcgggcattgatgacc

SEQ ID NO: 324348 - DNA, 25 bp, Homo sapien
ggactgctccgagctgttgaacatg

SEQ ID NO: 324349 - DNA, 25 bp, Homo sapien
gcgggcattgatgacctcagctttt

SEQ ID NO: 324350 - DNA, 25 bp, Homo sapien
ttctgggactgctccgagctgttga

SEQ ID NO: 324351 - DNA, 25 bp, Homo sapien
agaagaagcaggtaggcaggcccac

SEQ ID NO: 324352 - DNA, 25 bp, Homo sapien
gaagcaggtaggcaggcccacccac

SEQ ID NO: 324353 - DNA, 25 bp, Homo sapien
ctagaagaagcaggtaggcaggccc

SEQ ID NO: 324354 - DNA, 25 bp, Homo sapien
aagaagcaggtaggcaggcccaccc

SEQ ID NO: 324355 - DNA, 25 bp, Homo sapien
tgcccctctccctctccgcttccga

SEQ ID NO: 324356 - DNA, 25 bp, Homo sapien
cccctctccctctccgcttccgagg

SEQ ID NO: 324357 - DNA, 25 bp, Homo sapien
ccctctccctctccgcttccgaggc

SEQ ID NO: 324358 - DNA, 25 bp, Homo sapien
ctctccctctccgcttccgaggcac

SEQ ID NO: 324359 - DNA, 25 bp, Homo sapien
gagtggtgctgttgtagatggtgag

SEQ ID NO: 324360 - DNA, 25 bp, Homo sapien
atggtgaggaagaggccaaccccga

SEQ ID NO: 324361 - DNA, 25 bp, Homo sapien
ccatgctgtgggcattcatgagccc

SEQ ID NO: 324362 - DNA, 25 bp, Homo sapien
ggaagaggccaaccccgatgcccat

SEQ ID NO: 324363 - DNA, 25 bp, Homo sapien
cagggctgcaatggctgcatccact

SEQ ID NO: 324364 - DNA, 25 bp, Homo sapien
actgcagagccaccgtcccgcagtg

SEQ ID NO: 324365 - DNA, 25 bp, Homo sapien
ctgcatccactgcagagccaccgtc

SEQ ID NO: 324366 - DNA, 25 bp, Homo sapien
gcagagccaccgtcccgcagtgtgt

SEQ ID NO: 324367 - DNA, 25 bp, Homo sapien
tgtacacatggttgtcaggttcctt

SEQ ID NO: 324368 - DNA, 25 bp, Homo sapien
ctggtgtacacatggttgtcaggtt

SEQ ID NO: 324369 - DNA, 25 bp, Homo sapien
acatggttgtcaggttccttggagg

SEQ ID NO: 324370 - DNA, 25 bp, Homo sapien
tacacatggttgtcaggttccttgg

SEQ ID NO: 324371 - DNA, 25 bp, Homo sapien
ccacgaaagacaggaggatttggtg

SEQ ID NO: 324372 - DNA, 25 bp, Homo sapien
ttggccacgaaagacaggaggattt

SEQ ID NO: 324373 - DNA, 25 bp, Homo sapien
gggtgttggccacgaaagacaggag

SEQ ID NO: 324374 - DNA, 25 bp, Homo sapien
tgcctggggtgttggccacgaaaga

SEQ ID NO: 324375 - DNA, 25 bp, Homo sapien
gcctgtagccacagaatcttcttca

SEQ ID NO: 324376 - DNA, 25 bp, Homo sapien
cagagactctctgatcaggcagcct

SEQ ID NO: 324377 - DNA, 25 bp, Homo sapien
ttcttcagagactctctgatcaggc

SEQ ID NO: 324378 - DNA, 25 bp, Homo sapien
cttcagagactctctgatcaggcag

SEQ ID NO: 324379 - DNA, 25 bp, Homo sapien
gggactccgtgttacctccctctgc

SEQ ID NO: 324380 - DNA, 25 bp, Homo sapien
ccagacctttctgggggactccgtg

SEQ ID NO: 324381 - DNA, 25 bp, Homo sapien
gactccgtgttacctccctctgcct

SEQ ID NO: 324382 - DNA, 25 bp, Homo sapien
ggactccgtgttacctccctctgcc

SEQ ID NO: 324383 - DNA, 25 bp, Homo sapien
ggatgacggcagcacctcacttgcc

SEQ ID NO: 324384 - DNA, 25 bp, Homo sapien
gatgacggcagcacctcacttgcct

SEQ ID NO: 324385 - DNA, 25 bp, Homo sapien
tggatgacggcagcacctcacttgc

SEQ ID NO: 324386 - DNA, 25 bp, Homo sapien
ctggatgacggcagcacctcacttg

SEQ ID NO: 324387 - DNA, 25 bp, Homo sapien
tgtcccagtgcagagcgtctgacct

SEQ ID NO: 324388 - DNA, 25 bp, Homo sapien
agggaacatccaaatgccatcatgg

SEQ ID NO: 324389 - DNA, 25 bp, Homo sapien
tgattatcatcatggctgcactggg

SEQ ID NO: 324390 - DNA, 25 bp, Homo sapien
acaaagggcggtgtctgccagcaag

SEQ ID NO: 324391 - DNA, 25 bp, Homo sapien
tcatagttccttacgcatggagcca

SEQ ID NO: 324392 - DNA, 25 bp, Homo sapien
caaaggcctatccttccgagaggtt

SEQ ID NO: 324393 - DNA, 25 bp, Homo sapien
ggtctcagagctacccaaaggccta

SEQ ID NO: 324394 - DNA, 25 bp, Homo sapien
caatgtacaaggtctgagcaaggac

SEQ ID NO: 324395 - DNA, 25 bp, Homo sapien
aagaactgagtcaggccagacgctg

SEQ ID NO: 324396 - DNA, 25 bp, Homo sapien
cgctggcaacgtgaagacagcttct

SEQ ID NO: 324397 - DNA, 25 bp, Homo sapien
aaagaactgagtcaggccagacgct

SEQ ID NO: 324398 - DNA, 25 bp, Homo sapien
ccagacgctggcaacgtgaagacag

SEQ ID NO: 324399 - DNA, 25 bp, Homo sapien
accagatagtgatgtgggagccctc

SEQ ID NO: 324400 - DNA, 25 bp, Homo sapien
tgaacggtgacctgccgctgtgctg

SEQ ID NO: 324401 - DNA, 25 bp, Homo sapien
tcccgggcctgaagatctgtgatgt

SEQ ID NO: 324402 - DNA, 25 bp, Homo sapien
tacaagggtccttcctgaacggtga

SEQ ID NO: 324403 - DNA, 25 bp, Homo sapien
acgagggagagaaacacacgcaaca

SEQ ID NO: 324404 - DNA, 25 bp, Homo sapien
ctacgagggagagaaacacacgcaa

SEQ ID NO: 324405 - DNA, 25 bp, Homo sapien
cgagggagagaaacacacgcaacat

SEQ ID NO: 324406 - DNA, 25 bp, Homo sapien
tacgagggagagaaacacacgcaac

SEQ ID NO: 324407 - DNA, 25 bp, Homo sapien
cctgcaggctgctatcgttttaagc

SEQ ID NO: 324408 - DNA, 25 bp, Homo sapien
gggaactaacagtgcccagctaaac

SEQ ID NO: 324409 - DNA, 25 bp, Homo sapien
aatgtgaagggctgaaacagatccc

SEQ ID NO: 324410 - DNA, 25 bp, Homo sapien
aggacagtcaggctacccttgagtt

SEQ ID NO: 324411 - DNA, 25 bp, Homo sapien
tcagatactgttctccacggtcact

SEQ ID NO: 324412 - DNA, 25 bp, Homo sapien
ccttctggctcagatactgttctcc

SEQ ID NO: 324413 - DNA, 25 bp, Homo sapien
tggctcagatactgttctccacggt

SEQ ID NO: 324414 - DNA, 25 bp, Homo sapien
tactgttctccacggtcacttctgc

SEQ ID NO: 324415 - DNA, 25 bp, Homo sapien
ggagtgaattcctaagtcttcgcct

SEQ ID NO: 324416 - DNA, 25 bp, Homo sapien
gcatgggcagtagctgtgagacctt

SEQ ID NO: 324417 - DNA, 25 bp, Homo sapien
gcagcaaacctaaagttcggagtga

SEQ ID NO: 324418 - DNA, 25 bp, Homo sapien
taatcgtcacagtgttatggaagga

SEQ ID NO: 324419 - DNA, 25 bp, Homo sapien
ttcaggaagaggactgctaagccca

SEQ ID NO: 324420 - DNA, 25 bp, Homo sapien
tgctgacaacatgccgggagcgcat

SEQ ID NO: 324421 - DNA, 25 bp, Homo sapien
cagggccctgctgacaacatgccgg

SEQ ID NO: 324422 - DNA, 25 bp, Homo sapien
gccctgctgacaacatgccgggagc

SEQ ID NO: 324423 - DNA, 25 bp, Homo sapien
cagaaagcagtctgactggctggga

SEQ ID NO: 324424 - DNA, 25 bp, Homo sapien
agcagtctgactggctgggagacct

SEQ ID NO: 324425 - DNA, 25 bp, Homo sapien
caggcccccaaagttgtagattttg

SEQ ID NO: 324426 - DNA, 25 bp, Homo sapien
ctgtggttctcagtgcaaattcccc

SEQ ID NO: 324427 - DNA, 25 bp, Homo sapien
gagccaaggacgtgacatacagcat

SEQ ID NO: 324428 - DNA, 25 bp, Homo sapien
agagccaaggacgtgacatacagca

SEQ ID NO: 324429 - DNA, 25 bp, Homo sapien
tttcatgcaaactcgttcttccagg

SEQ ID NO: 324430 - DNA, 25 bp, Homo sapien
cgagctcaggacagttttcatgcaa

SEQ ID NO: 324431 - DNA, 25 bp, Homo sapien
gctctccaatagcatgaagtagaca

SEQ ID NO: 324432 - DNA, 25 bp, Homo sapien
tcaagcacgtcaagaggaaggctgg

SEQ ID NO: 324433 - DNA, 25 bp, Homo sapien
ctaagcttgactcccctgtgcctgt

SEQ ID NO: 324434 - DNA, 25 bp, Homo sapien
caaacattcccggtacgtcttactg

SEQ ID NO: 324435 - DNA, 25 bp, Homo sapien
cggtacgtcttactggattttgcca

SEQ ID NO: 324436 - DNA, 25 bp, Homo sapien
cattcccggtacgtcttactggatt

SEQ ID NO: 324437 - DNA, 25 bp, Homo sapien
ggtacgtcttactggattttgccat

SEQ ID NO: 324438 - DNA, 25 bp, Homo sapien
gtagtatcatcaatcaccggtgctg

SEQ ID NO: 324439 - DNA, 25 bp, Homo sapien
ccctgggataccagctcctgggatg

SEQ ID NO: 324440 - DNA, 25 bp, Homo sapien
gatggttggaactgggcgctccgag

SEQ ID NO: 324441 - DNA, 25 bp, Homo sapien
tcctgccccgaagggtttggctgcc

SEQ ID NO: 324442 - DNA, 25 bp, Homo sapien
agaggcttgaaagctctatctgtgc

SEQ ID NO: 324443 - DNA, 25 bp, Homo sapien
gaggcttgaaagctctatctgtgcc

SEQ ID NO: 324444 - DNA, 25 bp, Homo sapien
aggcttgaaagctctatctgtgcct

SEQ ID NO: 324445 - DNA, 25 bp, Homo sapien
ggcttgaaagctctatctgtgcctg

SEQ ID NO: 324446 - DNA, 25 bp, Homo sapien
cacttaaacagctactgcaggttct

SEQ ID NO: 324447 - DNA, 25 bp, Homo sapien
cacacttaaacagctactgcaggtt

SEQ ID NO: 324448 - DNA, 25 bp, Homo sapien
acttaaacagctactgcaggttctt

SEQ ID NO: 324449 - DNA, 25 bp, Homo sapien
cgcacacttaaacagctactgcagg

SEQ ID NO: 324450 - DNA, 25 bp, Homo sapien
aacagcatcttcctaaaatcttcct

SEQ ID NO: 324451 - DNA, 25 bp, Homo sapien
ctcaaagccatagtggcaaaaagca

SEQ ID NO: 324452 - DNA, 25 bp, Homo sapien
caaagccatagtggcaaaaagcaaa

SEQ ID NO: 324453 - DNA, 25 bp, Homo sapien
tcttcctaaaatcttcctcttccat

SEQ ID NO: 324454 - DNA, 25 bp, Homo sapien
ttagagctggggtaccgggtcactg

SEQ ID NO: 324455 - DNA, 25 bp, Homo sapien
agagctggggtaccgggtcactgtt

SEQ ID NO: 324456 - DNA, 25 bp, Homo sapien
gctggggtaccgggtcactgttgaa

SEQ ID NO: 324457 - DNA, 25 bp, Homo sapien
tggggtaccgggtcactgttgaaga

SEQ ID NO: 324458 - DNA, 25 bp, Homo sapien
aacttcttaatgaaagtgtcggcca

SEQ ID NO: 324459 - DNA, 25 bp, Homo sapien
ttcttaatgaaagtgtcggccacgg

SEQ ID NO: 324460 - DNA, 25 bp, Homo sapien
aggaaacttcttaatgaaagtgtcg

SEQ ID NO: 324461 - DNA, 25 bp, Homo sapien
gaaacttcttaatgaaagtgtcggc

SEQ ID NO: 324462 - DNA, 25 bp, Homo sapien
tcatcccatcattagacagcacaca

SEQ ID NO: 324463 - DNA, 25 bp, Homo sapien
tggaaaagtgtggtcatcccatcat

SEQ ID NO: 324464 - DNA, 25 bp, Homo sapien
ccagtttcaaggtaacagatgcaca

SEQ ID NO: 324465 - DNA, 25 bp, Homo sapien
tggcacagacattgatagactggtt

SEQ ID NO: 324466 - DNA, 25 bp, Homo sapien
ctgggtgctggtgtcatccagggac

SEQ ID NO: 324467 - DNA, 25 bp, Homo sapien
ctgacacacaggggacacccactcc

SEQ ID NO: 324468 - DNA, 25 bp, Homo sapien
ccctgccttgccaggtccacaagca

SEQ ID NO: 324469 - DNA, 25 bp, Homo sapien
gcaggagctgcccactgacacacag

SEQ ID NO: 324470 - DNA, 25 bp, Homo sapien
tctaaaaaagtgatgccatgttcat

SEQ ID NO: 324471 - DNA, 25 bp, Homo sapien
tgatgccatgttcatggggttattt

SEQ ID NO: 324472 - DNA, 25 bp, Homo sapien
aaaagtgatgccatgttcatggggt

SEQ ID NO: 324473 - DNA, 25 bp, Homo sapien
taaaaaagtgatgccatgttcatgg

SEQ ID NO: 324474 - DNA, 25 bp, Homo sapien
tgtctcttggcagatggcctgacac

SEQ ID NO: 324475 - DNA, 25 bp, Homo sapien
caggcctggactccgagatgaactg

SEQ ID NO: 324476 - DNA, 25 bp, Homo sapien
gctttcagacctgggcgggatctgc

SEQ ID NO: 324477 - DNA, 25 bp, Homo sapien
gaaaatcttgattcccactctacag

SEQ ID NO: 324478 - DNA, 25 bp, Homo sapien
gacatcggtggagaacaggatgctc

SEQ ID NO: 324479 - DNA, 25 bp, Homo sapien
ttagacatcggtggagaacaggatg

SEQ ID NO: 324480 - DNA, 25 bp, Homo sapien
acatcggtggagaacaggatgctct

SEQ ID NO: 324481 - DNA, 25 bp, Homo sapien
tagacatcggtggagaacaggatgc

SEQ ID NO: 324482 - DNA, 25 bp, Homo sapien
agcgtggggccaaacaccgtgccaa

SEQ ID NO: 324483 - DNA, 25 bp, Homo sapien
caaacaccgtgccaaggttgtgcag

SEQ ID NO: 324484 - DNA, 25 bp, Homo sapien
ggccaaacaccgtgccaaggttgtg

SEQ ID NO: 324485 - DNA, 25 bp, Homo sapien
caccgtgccaaggttgtgcagggac

SEQ ID NO: 324486 - DNA, 25 bp, Homo sapien
ggtgagcaggttggcctccggcagg

SEQ ID NO: 324487 - DNA, 25 bp, Homo sapien
gagcaggttggcctccggcagggac

SEQ ID NO: 324488 - DNA, 25 bp, Homo sapien
tgagcaggttggcctccggcaggga

SEQ ID NO: 324489 - DNA, 25 bp, Homo sapien
gtgagcaggttggcctccggcaggg

SEQ ID NO: 324490 - DNA, 25 bp, Homo sapien
gaaatacagcttcagcgtgcctgcg

SEQ ID NO: 324491 - DNA, 25 bp, Homo sapien
ctcgggcagctcacggaaatacagc

SEQ ID NO: 324492 - DNA, 25 bp, Homo sapien
cgtgcctgcgatggcgttcacgtcc

SEQ ID NO: 324493 - DNA, 25 bp, Homo sapien
catcatcaccgacacgtccttgtta

SEQ ID NO: 324494 - DNA, 25 bp, Homo sapien
ggccaccccagacatgcggtagatg

SEQ ID NO: 324495 - DNA, 25 bp, Homo sapien
ccaccccagacatgcggtagatgcc

SEQ ID NO: 324496 - DNA, 25 bp, Homo sapien
accccagacatgcggtagatgccca

SEQ ID NO: 324497 - DNA, 25 bp, Homo sapien
gccaccccagacatgcggtagatgc

SEQ ID NO: 324498 - DNA, 25 bp, Homo sapien
gcacatcaaagctgcttcgcaagcc

SEQ ID NO: 324499 - DNA, 25 bp, Homo sapien
aaagctgcttcgcaagccccctcat

SEQ ID NO: 324500 - DNA, 25 bp, Homo sapien
cagcacatcaaagctgcttcgcaag

SEQ ID NO: 324501 - DNA, 25 bp, Homo sapien
agctgcttcgcaagccccctcatca

SEQ ID NO: 324502 - DNA, 25 bp, Homo sapien
aaagagggccctatatctggataac

SEQ ID NO: 324503 - DNA, 25 bp, Homo sapien
gaaactcagtttctgggcgaggcat

SEQ ID NO: 324504 - DNA, 25 bp, Homo sapien
gattgactggctagtggcctggcca

SEQ ID NO: 324505 - DNA, 25 bp, Homo sapien
tatgccacactcttaagacccggtg

SEQ ID NO: 324506 - DNA, 25 bp, Homo sapien
gcaagtgttgccgttcattcactcc

SEQ ID NO: 324507 - DNA, 25 bp, Homo sapien
tgccagcaagtgttgccgttcattc

SEQ ID NO: 324508 - DNA, 25 bp, Homo sapien
ggaacacacaggaccgtgggagtgg

SEQ ID NO: 324509 - DNA, 25 bp, Homo sapien
cttctgccggttgccagcaagtgtt

SEQ ID NO: 324510 - DNA, 25 bp, Homo sapien
taataagtacgctgggaagacaaca

SEQ ID NO: 324511 - DNA, 25 bp, Homo sapien
catcatcggaagtcagaagttgaac

SEQ ID NO: 324512 - DNA, 25 bp, Homo sapien
gcgggcactcagttccactaacgaa

SEQ ID NO: 324513 - DNA, 25 bp, Homo sapien
taaaatcactaaggcggacttccag

SEQ ID NO: 324514 - DNA, 25 bp, Homo sapien
cttgaagcctgggcgcccagtctat

SEQ ID NO: 324515 - DNA, 25 bp, Homo sapien
ttgaagcctgggcgcccagtctatc

SEQ ID NO: 324516 - DNA, 25 bp, Homo sapien
cctttaagccaggagtcaacagtga

SEQ ID NO: 324517 - DNA, 25 bp, Homo sapien
ccctttaagccaggagtcaacagtg

SEQ ID NO: 324518 - DNA, 25 bp, Homo sapien
tacaaatccccatcatcagatatgc

SEQ ID NO: 324519 - DNA, 25 bp, Homo sapien
ccccatcatcagatatgctctccac

SEQ ID NO: 324520 - DNA, 25 bp, Homo sapien
atcatcagatatgctctccacaatc

SEQ ID NO: 324521 - DNA, 25 bp, Homo sapien
ctacaaatccccatcatcagatatg

SEQ ID NO: 324522 - DNA, 25 bp, Homo sapien
gagatggcgctttttcctcaggaag

SEQ ID NO: 324523 - DNA, 25 bp, Homo sapien
cagggtacgtatcattctccagtgt

SEQ ID NO: 324524 - DNA, 25 bp, Homo sapien
gtgagttatttcagggtacgtatca

SEQ ID NO: 324525 - DNA, 25 bp, Homo sapien
ctagagatggcgctttttcctcagg

SEQ ID NO: 324526 - DNA, 25 bp, Homo sapien
ttttacagatgtcttgtacagtgtc

SEQ ID NO: 324527 - DNA, 25 bp, Homo sapien
taagcaatgtcgtctacagcgtcct

SEQ ID NO: 324528 - DNA, 25 bp, Homo sapien
tacagcgtccttattagcgaattcg

SEQ ID NO: 324529 - DNA, 25 bp, Homo sapien
tgtcttgtacggtgtccttataagc

SEQ ID NO: 324530 - DNA, 25 bp, Homo sapien
tacagcgtgctcactagcgatgtct

SEQ ID NO: 324531 - DNA, 25 bp, Homo sapien
gtcgtatacagcgtgctcactagcg

SEQ ID NO: 324532 - DNA, 25 bp, Homo sapien
gtatacagcgtgctcactagcgatg

SEQ ID NO: 324533 - DNA, 25 bp, Homo sapien
gcgtgctcactagcgatgtcttttt

SEQ ID NO: 324534 - DNA, 25 bp, Homo sapien
tgtcgtatacagctcgttggcgatg

SEQ ID NO: 324535 - DNA, 25 bp, Homo sapien
gatgtcgtatacagctcgttggcga

SEQ ID NO: 324536 - DNA, 25 bp, Homo sapien
gtcgtatacagctcgttggcgatgc

SEQ ID NO: 324537 - DNA, 25 bp, Homo sapien
tcgtatacagctcgttggcgatgcc

SEQ ID NO: 324538 - DNA, 25 bp, Homo sapien
gattccagaatacttactagattca

SEQ ID NO: 324539 - DNA, 25 bp, Homo sapien
aagtgattccagaatacttactaga

SEQ ID NO: 324540 - DNA, 25 bp, Homo sapien
ctttcttggcatccagattgttttc

SEQ ID NO: 324541 - DNA, 25 bp, Homo sapien
tcttggcatccagattgttttcttg

SEQ ID NO: 324542 - DNA, 25 bp, Homo sapien
acaaagctttttgaggggtatgtca

SEQ ID NO: 324543 - DNA, 25 bp, Homo sapien
caaagctttttgaggggtatgtcat

SEQ ID NO: 324544 - DNA, 25 bp, Homo sapien
tgtccttgtgaactagagactcctc

SEQ ID NO: 324545 - DNA, 25 bp, Homo sapien
ctgtccttgtgaactagagactcct

SEQ ID NO: 324546 - DNA, 25 bp, Homo sapien
tctttcaaggttgctgaagactgta

SEQ ID NO: 324547 - DNA, 25 bp, Homo sapien
tgggctgaagcttgtccaatctttc

SEQ ID NO: 324548 - DNA, 25 bp, Homo sapien
aggttgctgaagactgtatgatgga

SEQ ID NO: 324549 - DNA, 25 bp, Homo sapien
ccaatctttcaaggttgctgaagac

SEQ ID NO: 324550 - DNA, 25 bp, Homo sapien
cccagtatgacagcttaaaggctgt

SEQ ID NO: 324551 - DNA, 25 bp, Homo sapien
tcctctttcagatccttgacctccc

SEQ ID NO: 324552 - DNA, 25 bp, Homo sapien
tggtgctctggaggaaatgcctgag

SEQ ID NO: 324553 - DNA, 25 bp, Homo sapien
agtatgacagcttaaaggctgtcat

SEQ ID NO: 324554 - DNA, 25 bp, Homo sapien
tctggcccagagagtcactggactg

SEQ ID NO: 324555 - DNA, 25 bp, Homo sapien
taacgacctcttgaagccaattgct

SEQ ID NO: 324556 - DNA, 25 bp, Homo sapien
ggttccagactgacaccaagtagac

SEQ ID NO: 324557 - DNA, 25 bp, Homo sapien
tgtagtccaacaccttatagccagt

SEQ ID NO: 324558 - DNA, 25 bp, Homo sapien
gtgaccgggacagtccacctcgcag

SEQ ID NO: 324559 - DNA, 25 bp, Homo sapien
gatggtgccttagacccaggtcctg

SEQ ID NO: 324560 - DNA, 25 bp, Homo sapien
ctccctctgggaaggccggtgaccg

SEQ ID NO: 324561 - DNA, 25 bp, Homo sapien
cagagaggacgcagacagaccccaa

SEQ ID NO: 324562 - DNA, 25 bp, Homo sapien
gggcccactcgagcgcttgttctgg

SEQ ID NO: 324563 - DNA, 25 bp, Homo sapien
aaaccctaggatagtctcataaagg

SEQ ID NO: 324564 - DNA, 25 bp, Homo sapien
tcacaccttactccaccgggcacat

SEQ ID NO: 324565 - DNA, 25 bp, Homo sapien
tcatctgggacttgctgtcaaaccc

SEQ ID NO: 324566 - DNA, 25 bp, Homo sapien
accctgtctgagccactccctcttt

SEQ ID NO: 324567 - DNA, 25 bp, Homo sapien
tttgttgcccagagctgaccctgtg

SEQ ID NO: 324568 - DNA, 25 bp, Homo sapien
gttgcccagagctgaccctgtgtga

SEQ ID NO: 324569 - DNA, 25 bp, Homo sapien
tctttgttgcccagagctgaccctg

SEQ ID NO: 324570 - DNA, 25 bp, Homo sapien
ggaacagtggtttattgaccaggca

SEQ ID NO: 324571 - DNA, 25 bp, Homo sapien
agaaggtggacaatcctctaggtcc

SEQ ID NO: 324572 - DNA, 25 bp, Homo sapien
taggtccaaggacatgggggtcaca

SEQ ID NO: 324573 - DNA, 25 bp, Homo sapien
aggtggacaatcctctaggtccaag

SEQ ID NO: 324574 - DNA, 25 bp, Homo sapien
agcacctccatcacggggccatagg

SEQ ID NO: 324575 - DNA, 25 bp, Homo sapien
catagggcacgtacttgtacacggg

SEQ ID NO: 324576 - DNA, 25 bp, Homo sapien
taggcagggcgatggaagaggttgc

SEQ ID NO: 324577 - DNA, 25 bp, Homo sapien
ggcgggacaagtagggcagcacctc

SEQ ID NO: 324578 - DNA, 25 bp, Homo sapien
gtccaaagtacacccggtggtcagc

SEQ ID NO: 324579 - DNA, 25 bp, Homo sapien
gctgtccaaagtacacccggtggtc

SEQ ID NO: 324580 - DNA, 25 bp, Homo sapien
aagtacacccggtggtcagcaggat

SEQ ID NO: 324581 - DNA, 25 bp, Homo sapien
aaagtacacccggtggtcagcagga

SEQ ID NO: 324582 - DNA, 25 bp, Homo sapien
ctgcgcagtgcaaagcgcactgtgt

SEQ ID NO: 324583 - DNA, 25 bp, Homo sapien
atcaccttggccttggcgttgtgct

SEQ ID NO: 324584 - DNA, 25 bp, Homo sapien
ggccttggcgttgtgcttcagctcc

SEQ ID NO: 324585 - DNA, 25 bp, Homo sapien
gctcctccaacacgtagtccaggca

SEQ ID NO: 324586 - DNA, 25 bp, Homo sapien
cctcatagccgatctctgccgcacg

SEQ ID NO: 324587 - DNA, 25 bp, Homo sapien
tcatagccgatctctgccgcacggg

SEQ ID NO: 324588 - DNA, 25 bp, Homo sapien
ctcatagccgatctctgccgcacgg

SEQ ID NO: 324589 - DNA, 25 bp, Homo sapien
atagccgatctctgccgcacgggct

SEQ ID NO: 324590 - DNA, 25 bp, Homo sapien
tcagatgagaggagcccctcctgtg

SEQ ID NO: 324591 - DNA, 25 bp, Homo sapien
cagccaaatgccagggagctcagat

SEQ ID NO: 324592 - DNA, 25 bp, Homo sapien
gagctcagatgagaggagcccctcc

SEQ ID NO: 324593 - DNA, 25 bp, Homo sapien
ccaaatgccagggagctcagatgag

SEQ ID NO: 324594 - DNA, 25 bp, Homo sapien
tgttgaagatgagcggcttctccac

SEQ ID NO: 324595 - DNA, 25 bp, Homo sapien
tggtatgtgttgaagatgagcggct

SEQ ID NO: 324596 - DNA, 25 bp, Homo sapien
gtatgtgttgaagatgagcggcttc

SEQ ID NO: 324597 - DNA, 25 bp, Homo sapien
atgtgttgaagatgagcggcttctc

SEQ ID NO: 324598 - DNA, 25 bp, Homo sapien
ggaagtaggtctgctcggcatccac

SEQ ID NO: 324599 - DNA, 25 bp, Homo sapien
attgaacttccgctgcatctccagc

SEQ ID NO: 324600 - DNA, 25 bp, Homo sapien
ttgaacttccgctgcatctccagcg

SEQ ID NO: 324601 - DNA, 25 bp, Homo sapien
ctggaagtaggtctgctcggcatcc

SEQ ID NO: 324602 - DNA, 25 bp, Homo sapien
gcgcagggggtgggagagtgggagc

SEQ ID NO: 324603 - DNA, 25 bp, Homo sapien
gcagggggtgggagagtgggagcaa

SEQ ID NO: 324604 - DNA, 25 bp, Homo sapien
ctgagaggcgcagggggtgggagag

SEQ ID NO: 324605 - DNA, 25 bp, Homo sapien
aggcgcagggggtgggagagtggga

SEQ ID NO: 324606 - DNA, 25 bp, Homo sapien
tcttctccacgagtcccaggtaccc

SEQ ID NO: 324607 - DNA, 25 bp, Homo sapien
ttctccacgagtcccaggtaccctc

SEQ ID NO: 324608 - DNA, 25 bp, Homo sapien
tctccacgagtcccaggtaccctct

SEQ ID NO: 324609 - DNA, 25 bp, Homo sapien
ctcttctccacgagtcccaggtacc

SEQ ID NO: 324610 - DNA, 25 bp, Homo sapien
caggacatccatccgctgtagcatc

SEQ ID NO: 324611 - DNA, 25 bp, Homo sapien
cgttgtgggagagccccctgcaact

SEQ ID NO: 324612 - DNA, 25 bp, Homo sapien
gaacaagtgaacactgatcacccaa

SEQ ID NO: 324613 - DNA, 25 bp, Homo sapien
cgaagtgtgtactccccagttccca

SEQ ID NO: 324614 - DNA, 25 bp, Homo sapien
caagggcgggaaagtgccaccctga

SEQ ID NO: 324615 - DNA, 25 bp, Homo sapien
cttggtcctgctgtcgatgaggctg

SEQ ID NO: 324616 - DNA, 25 bp, Homo sapien
tggtcctgctgtcgatgaggctgct

SEQ ID NO: 324617 - DNA, 25 bp, Homo sapien
gtcctgctgtcgatgaggctgctcc

SEQ ID NO: 324618 - DNA, 25 bp, Homo sapien
cctgctgtcgatgaggctgctccag

SEQ ID NO: 324619 - DNA, 25 bp, Homo sapien
ccacctgtgggtgctagggtcgggt

SEQ ID NO: 324620 - DNA, 25 bp, Homo sapien
ccccacctgtgggtgctagggtcgg

SEQ ID NO: 324621 - DNA, 25 bp, Homo sapien
acctgtgggtgctagggtcgggtgg

SEQ ID NO: 324622 - DNA, 25 bp, Homo sapien
cctgtgggtgctagggtcgggtggg

SEQ ID NO: 324623 - DNA, 25 bp, Homo sapien
ccatggctgatgctcgtgtcctctc

SEQ ID NO: 324624 - DNA, 25 bp, Homo sapien
tctgccgtgaaccagtcctcaatct

SEQ ID NO: 324625 - DNA, 25 bp, Homo sapien
ggtctctgccgtgaaccagtcctca

SEQ ID NO: 324626 - DNA, 25 bp, Homo sapien
tctctgccgtgaaccagtcctcaat

SEQ ID NO: 324627 - DNA, 25 bp, Homo sapien
agggtctctgccgtgaaccagtcct

SEQ ID NO: 324628 - DNA, 25 bp, Homo sapien
gccatttggtgaaagaagcacctcc

SEQ ID NO: 324629 - DNA, 25 bp, Homo sapien
cacagccatttggtgaaagaagcac

SEQ ID NO: 324630 - DNA, 25 bp, Homo sapien
catttggtgaaagaagcacctccac

SEQ ID NO: 324631 - DNA, 25 bp, Homo sapien
tccacagccatttggtgaaagaagc

SEQ ID NO: 324632 - DNA, 25 bp, Homo sapien
cctgtgtttttggtggatgcccaca

SEQ ID NO: 324633 - DNA, 25 bp, Homo sapien
tcaggcctctaaggcatgggcacct

SEQ ID NO: 324634 - DNA, 25 bp, Homo sapien
gcaggtggaaggttctagcacttac

SEQ ID NO: 324635 - DNA, 25 bp, Homo sapien
caaacgcaggcctgaatgccatctg

SEQ ID NO: 324636 - DNA, 25 bp, Homo sapien
ttaatggctatgaagccgtcatcgc

SEQ ID NO: 324637 - DNA, 25 bp, Homo sapien
aatggctatgaagccgtcatcgctg

SEQ ID NO: 324638 - DNA, 25 bp, Homo sapien
tgtgagcttaatggctatgaagccg

SEQ ID NO: 324639 - DNA, 25 bp, Homo sapien
gagcttaatggctatgaagccgtca

SEQ ID NO: 324640 - DNA, 25 bp, Homo sapien
ctcaggaacctctgacgcaagcgca

SEQ ID NO: 324641 - DNA, 25 bp, Homo sapien
catggcgctctagaggccctgtgga

SEQ ID NO: 324642 - DNA, 25 bp, Homo sapien
acaggctgctcacacgtgggtcaca

SEQ ID NO: 324643 - DNA, 25 bp, Homo sapien
gaaacaccgagcgtggctaagacag

SEQ ID NO: 324644 - DNA, 25 bp, Homo sapien
cactgaaggacattgggccttgctg

SEQ ID NO: 324645 - DNA, 25 bp, Homo sapien
gcaggtcggatgtttctaacactga

SEQ ID NO: 324646 - DNA, 25 bp, Homo sapien
ccgctgcccctgacggagggctgct

SEQ ID NO: 324647 - DNA, 25 bp, Homo sapien
tggcttctctatccctggaaacacc

SEQ ID NO: 324648 - DNA, 25 bp, Homo sapien
actgatgacaccattcctgcggtcc

SEQ ID NO: 324649 - DNA, 25 bp, Homo sapien
gaatgtctccatgtggctgtcgcac

SEQ ID NO: 324650 - DNA, 25 bp, Homo sapien
ctgaggcttcgatgcagcgcaagaa

SEQ ID NO: 324651 - DNA, 25 bp, Homo sapien
cctcattggcgtagaagtaggtgcg

SEQ ID NO: 324652 - DNA, 25 bp, Homo sapien
catccctctccgcagctgaggtgca

SEQ ID NO: 324653 - DNA, 25 bp, Homo sapien
tgccatccctctccgcagctgaggt

SEQ ID NO: 324654 - DNA, 25 bp, Homo sapien
ccctctccgcagctgaggtgcagga

SEQ ID NO: 324655 - DNA, 25 bp, Homo sapien
actgccatccctctccgcagctgag

SEQ ID NO: 324656 - DNA, 25 bp, Homo sapien
cagaggaggacaagcacgtgtcccc

SEQ ID NO: 324657 - DNA, 25 bp, Homo sapien
catgatcgcacacatgggcacgacc

SEQ ID NO: 324658 - DNA, 25 bp, Homo sapien
aatgcctccttaaagccaggacctg

SEQ ID NO: 324659 - DNA, 25 bp, Homo sapien
ccagggcatagtctgttgaagggca

SEQ ID NO: 324660 - DNA, 25 bp, Homo sapien
tcctccactccatagtccaggatgg

SEQ ID NO: 324661 - DNA, 25 bp, Homo sapien
cgctgacaccgaaggccctgtagtg

SEQ ID NO: 324662 - DNA, 25 bp, Homo sapien
tccatagtccaggatggcgctgaca

SEQ ID NO: 324663 - DNA, 25 bp, Homo sapien
cgaaggccctgtagtgccgaagcag

SEQ ID NO: 324664 - DNA, 25 bp, Homo sapien
caaaatgcccatagaaggtcatctt

SEQ ID NO: 324665 - DNA, 25 bp, Homo sapien
ttgttgaatagcctctgtcctagaa

SEQ ID NO: 324666 - DNA, 25 bp, Homo sapien
ctacaaaatgcccatagaaggtcat

SEQ ID NO: 324667 - DNA, 25 bp, Homo sapien
ttgaatagcctctgtcctagaagtt

SEQ ID NO: 324668 - DNA, 25 bp, Homo sapien
cccactccatcccggccacaaggtg

SEQ ID NO: 324669 - DNA, 25 bp, Homo sapien
ccttcctagtccccactccatcccg

SEQ ID NO: 324670 - DNA, 25 bp, Homo sapien
ggtgccttcctagtccccactccat

SEQ ID NO: 324671 - DNA, 25 bp, Homo sapien
ccactccatcccggccacaaggtgg

SEQ ID NO: 324672 - DNA, 25 bp, Homo sapien
ggctgcggtacgcctcctgcgcgtt

SEQ ID NO: 324673 - DNA, 25 bp, Homo sapien
ccggctgcggtacgcctcctgcgcg

SEQ ID NO: 324674 - DNA, 25 bp, Homo sapien
tcgccggctgcggtacgcctcctgc

SEQ ID NO: 324675 - DNA, 25 bp, Homo sapien
ttcgccggctgcggtacgcctcctg

SEQ ID NO: 324676 - DNA, 25 bp, Homo sapien
acagcgggacgaagcggggaatgca

SEQ ID NO: 324677 - DNA, 25 bp, Homo sapien
cccgcccgggccgcttaagtgtgcg

SEQ ID NO: 324678 - DNA, 25 bp, Homo sapien
aagggcttagacttcacaagcaccc

SEQ ID NO: 324679 - DNA, 25 bp, Homo sapien
cacaagcaccctggcacttcagctg

SEQ ID NO: 324680 - DNA, 25 bp, Homo sapien
tgctcctgctctccgtgaagacagc

SEQ ID NO: 324681 - DNA, 25 bp, Homo sapien
tatattcctgacaaatgccagacaa

SEQ ID NO: 324682 - DNA, 25 bp, Homo sapien
taggaagggtaatatcattccactt

SEQ ID NO: 324683 - DNA, 25 bp, Homo sapien
caagcaggtaggaagggtaatatca

SEQ ID NO: 324684 - DNA, 25 bp, Homo sapien
cagaacaaggaactttagatctaaa

SEQ ID NO: 324685 - DNA, 25 bp, Homo sapien
cagctttagaaccatttcaaacaga

SEQ ID NO: 324686 - DNA, 25 bp, Homo sapien
gaggcctcaccatccgtccatattt

SEQ ID NO: 324687 - DNA, 25 bp, Homo sapien
tatgggattaattgcagtcacagct

SEQ ID NO: 324688 - DNA, 25 bp, Homo sapien
tgtagcaggagttgcattgcactct

SEQ ID NO: 324689 - DNA, 25 bp, Homo sapien
caccgtattctgctggtgagagcaa

SEQ ID NO: 324690 - DNA, 25 bp, Homo sapien
tacctccggtgttgtgtagggtgct

SEQ ID NO: 324691 - DNA, 25 bp, Homo sapien
tcaggccatgaggtcaacactgtga

SEQ ID NO: 324692 - DNA, 25 bp, Homo sapien
gaacctgtctggtcagggaagaccc

SEQ ID NO: 324693 - DNA, 25 bp, Homo sapien
gcacgtgacccagcgtgactgcaga

SEQ ID NO: 324694 - DNA, 25 bp, Homo sapien
tgaagccacagcacatcaccatgtg

SEQ ID NO: 324695 - DNA, 25 bp, Homo sapien
gggatgaagccacagcacatcacca

SEQ ID NO: 324696 - DNA, 25 bp, Homo sapien
gatgaagccacagcacatcaccatg

SEQ ID NO: 324697 - DNA, 25 bp, Homo sapien
aagccacagcacatcaccatgtgga

SEQ ID NO: 324698 - DNA, 25 bp, Homo sapien
gagcttctggttgtaaaggtgcaaa

SEQ ID NO: 324699 - DNA, 25 bp, Homo sapien
caacttctccctgagcttctggttg

SEQ ID NO: 324700 - DNA, 25 bp, Homo sapien
tggttgtaaaggtgcaaatctgcca

SEQ ID NO: 324701 - DNA, 25 bp, Homo sapien
tctggttgtaaaggtgcaaatctgc

SEQ ID NO: 324702 - DNA, 25 bp, Homo sapien
ttgaacttgtcaaagatgttgacag

SEQ ID NO: 324703 - DNA, 25 bp, Homo sapien
aacttgtcaaagatgttgacagcaa

SEQ ID NO: 324704 - DNA, 25 bp, Homo sapien
gtgaagttgaacttgtcaaagatgt

SEQ ID NO: 324705 - DNA, 25 bp, Homo sapien
gaagttgaacttgtcaaagatgttg

SEQ ID NO: 324706 - DNA, 25 bp, Homo sapien
taatacgtcgatggtgagcgcactg

SEQ ID NO: 324707 - DNA, 25 bp, Homo sapien
gatggagaagcgaaccaagcctgtc

SEQ ID NO: 324708 - DNA, 25 bp, Homo sapien
caagcctgtctgtgtgttctggaac

SEQ ID NO: 324709 - DNA, 25 bp, Homo sapien
catcttcatgtgagggctttgccaa

SEQ ID NO: 324710 - DNA, 25 bp, Homo sapien
tgaaagtccaagaggtactgcatgc

SEQ ID NO: 324711 - DNA, 25 bp, Homo sapien
aagcggtagtaagtctttcagccaa

SEQ ID NO: 324712 - DNA, 25 bp, Homo sapien
cccagaatttgggtggacaggctga

SEQ ID NO: 324713 - DNA, 25 bp, Homo sapien
tcccaacagcaggattcacctatgg

SEQ ID NO: 324714 - DNA, 25 bp, Homo sapien
ggctgtgctgcaagatatcctggaa

SEQ ID NO: 324715 - DNA, 25 bp, Homo sapien
gatatcctggaattcgaagcacaca

SEQ ID NO: 324716 - DNA, 25 bp, Homo sapien
ttgtgggctccaaagggttgactcc

SEQ ID NO: 324717 - DNA, 25 bp, Homo sapien
tcaacacgatcttctctggacacga

SEQ ID NO: 324718 - DNA, 25 bp, Homo sapien
cactcatgtcaagtgtctgggtact

SEQ ID NO: 324719 - DNA, 25 bp, Homo sapien
ggagttgttttgacacaccactcat

SEQ ID NO: 324720 - DNA, 25 bp, Homo sapien
tacttgtaggatggcccgccactcc

SEQ ID NO: 324721 - DNA, 25 bp, Homo sapien
accactcatgtcaagtgtctgggta

SEQ ID NO: 324722 - DNA, 25 bp, Homo sapien
cacaaaggacgcaggaagaacaggt

SEQ ID NO: 324723 - DNA, 25 bp, Homo sapien
tggcaaggtatgcaagcaagtcacc

SEQ ID NO: 324724 - DNA, 25 bp, Homo sapien
ggattagcaccttaacggattagcg

SEQ ID NO: 324725 - DNA, 25 bp, Homo sapien
gaggtgcgcaatacatactggaagg

SEQ ID NO: 324726 - DNA, 25 bp, Homo sapien
gcggatgcgggggccgcctccattc

SEQ ID NO: 324727 - DNA, 25 bp, Homo sapien
cggatgcgggggccgcctccattct

SEQ ID NO: 324728 - DNA, 25 bp, Homo sapien
tgcggatgcgggggccgcctccatt

SEQ ID NO: 324729 - DNA, 25 bp, Homo sapien
tgctttctgacactgccaccgcggg

SEQ ID NO: 324730 - DNA, 25 bp, Homo sapien
atctgcagcaccttcggcatctgcc

SEQ ID NO: 324731 - DNA, 25 bp, Homo sapien
gccagaggggtaacggtgactaatg

SEQ ID NO: 324732 - DNA, 25 bp, Homo sapien
gatgaccttttagctggaatggcca

SEQ ID NO: 324733 - DNA, 25 bp, Homo sapien
ctagaccaagagcagtgatgacctt

SEQ ID NO: 324734 - DNA, 25 bp, Homo sapien
aaactagaagcaccccatttcactg

SEQ ID NO: 324735 - DNA, 25 bp, Homo sapien
tcatgctcatggaaggaattcatag

SEQ ID NO: 324736 - DNA, 25 bp, Homo sapien
ttgacaagtgcatggtaaccaaaac

SEQ ID NO: 324737 - DNA, 25 bp, Homo sapien
tgcccagagcagtctagagattcaa

SEQ ID NO: 324738 - DNA, 25 bp, Homo sapien
ccgcagtgcgcttttgcaccagagt

SEQ ID NO: 324739 - DNA, 25 bp, Homo sapien
gcagtgcgcttttgcaccagagtgc

SEQ ID NO: 324740 - DNA, 25 bp, Homo sapien
cccgcagtgcgcttttgcaccagag

SEQ ID NO: 324741 - DNA, 25 bp, Homo sapien
cgcagtgcgcttttgcaccagagtg

SEQ ID NO: 324742 - DNA, 25 bp, Homo sapien
ccatggaactgtaggagctcacgat

SEQ ID NO: 324743 - DNA, 25 bp, Homo sapien
tttggtgcacgaactcatccaggag

SEQ ID NO: 324744 - DNA, 25 bp, Homo sapien
tctctggttttatccgacttctgac

SEQ ID NO: 324745 - DNA, 25 bp, Homo sapien
ggagctcacgatggcattttgtttg

SEQ ID NO: 324746 - DNA, 25 bp, Homo sapien
gactttaagggattagcatggccag

SEQ ID NO: 324747 - DNA, 25 bp, Homo sapien
gcgggcagtgcacacaagaggtact

SEQ ID NO: 324748 - DNA, 25 bp, Homo sapien
gatcgctgaagattcctgctgaggg

SEQ ID NO: 324749 - DNA, 25 bp, Homo sapien
gatctgcgcaggaagggtgacttta

SEQ ID NO: 324750 - DNA, 25 bp, Homo sapien
acagctttgggattcgcatctgagc

SEQ ID NO: 324751 - DNA, 25 bp, Homo sapien
tccgtgcaactgaccaagagaaacc

SEQ ID NO: 324752 - DNA, 25 bp, Homo sapien
gaagtgcctgggacgcccagatcct

SEQ ID NO: 324753 - DNA, 25 bp, Homo sapien
caggctgggagggacatactttcca

SEQ ID NO: 324754 - DNA, 25 bp, Homo sapien
actttggaaccctctgccacaagtg

SEQ ID NO: 324755 - DNA, 25 bp, Homo sapien
ctttggaaccctctgccacaagtgc

SEQ ID NO: 324756 - DNA, 25 bp, Homo sapien
tcctcctgcaccttccagagagacg

SEQ ID NO: 324757 - DNA, 25 bp, Homo sapien
ctcctgcaccttccagagagacggg

SEQ ID NO: 324758 - DNA, 25 bp, Homo sapien
cctcctgcaccttccagagagacgg

SEQ ID NO: 324759 - DNA, 25 bp, Homo sapien
ctcctcctgcaccttccagagagac

SEQ ID NO: 324760 - DNA, 25 bp, Homo sapien
catggcaagacagccactgacagct

SEQ ID NO: 324761 - DNA, 25 bp, Homo sapien
atgcttagtgccacactcggcccag

SEQ ID NO: 324762 - DNA, 25 bp, Homo sapien
ttcatccactcactccatggcaaga

SEQ ID NO: 324763 - DNA, 25 bp, Homo sapien
tccccagcctcctactgtaaaatgg

SEQ ID NO: 324764 - DNA, 25 bp, Homo sapien
gtgggcccaggcgcgtagtgcgtac

SEQ ID NO: 324765 - DNA, 25 bp, Homo sapien
cgtgggcccaggcgcgtagtgcgta

SEQ ID NO: 324766 - DNA, 25 bp, Homo sapien
agctccgggccgaagcggcttcgcg

SEQ ID NO: 324767 - DNA, 25 bp, Homo sapien
ttcgcggtccgaggtgccgcggctg

SEQ ID NO: 324768 - DNA, 25 bp, Homo sapien
gggccgcaatccaatgggccgggcc

SEQ ID NO: 324769 - DNA, 25 bp, Homo sapien
agagccagcgaggtgctgcggcgcg

SEQ ID NO: 324770 - DNA, 25 bp, Homo sapien
ggagggcctggcggcagtgcgcgag

SEQ ID NO: 324771 - DNA, 25 bp, Homo sapien
gtcctggaggtgagcgagcggcggc

SEQ ID NO: 324772 - DNA, 25 bp, Homo sapien
ctggaggtgagcgagcggcggctgc

SEQ ID NO: 324773 - DNA, 25 bp, Homo sapien
gggcctggcggcagtgcgcgaggag

SEQ ID NO: 324774 - DNA, 25 bp, Homo sapien
ctgcgcgcggagcttcgagcggagc

SEQ ID NO: 324775 - DNA, 25 bp, Homo sapien
gcgcgcggagcttcgagcggagctg

SEQ ID NO: 324776 - DNA, 25 bp, Homo sapien
tgcgcgcggagcttcgagcggagct

SEQ ID NO: 324777 - DNA, 25 bp, Homo sapien
gcgcggagcttcgagcggagctgga

SEQ ID NO: 324778 - DNA, 25 bp, Homo sapien
ggcagcctaggcgaggtgcggaagg

SEQ ID NO: 324779 - DNA, 25 bp, Homo sapien
tgagggcggccgcacaagggcagcc

SEQ ID NO: 324780 - DNA, 25 bp, Homo sapien
gcggccgcacaagggcagcctaggc

SEQ ID NO: 324781 - DNA, 25 bp, Homo sapien
cctaggcgaggtgcggaaggcgtcg

SEQ ID NO: 324782 - DNA, 25 bp, Homo sapien
gggccacgtgcgtctagggagtgca

SEQ ID NO: 324783 - DNA, 25 bp, Homo sapien
cctttggaccttagagctgggcctt

SEQ ID NO: 324784 - DNA, 25 bp, Homo sapien
cagggaacagccgagactcctcttc

SEQ ID NO: 324785 - DNA, 25 bp, Homo sapien
actgagtccggctagagaacagggt

SEQ ID NO: 324786 - DNA, 25 bp, Homo sapien
tccacagggcaccaactggacagag

SEQ ID NO: 324787 - DNA, 25 bp, Homo sapien
cagggcaccaactggacagaggcct

SEQ ID NO: 324788 - DNA, 25 bp, Homo sapien
tagtgtcaaaccacacacaagagca

SEQ ID NO: 324789 - DNA, 25 bp, Homo sapien
ctccacgcactggaatagtgtcaaa

SEQ ID NO: 324790 - DNA, 25 bp, Homo sapien
ccgtgagcggtatggggtgaaagtg

SEQ ID NO: 324791 - DNA, 25 bp, Homo sapien
tacccgtgagcggtatggggtgaaa

SEQ ID NO: 324792 - DNA, 25 bp, Homo sapien
gcggaagttacccgtgagcggtatg

SEQ ID NO: 324793 - DNA, 25 bp, Homo sapien
cggaagttacccgtgagcggtatgg

SEQ ID NO: 324794 - DNA, 25 bp, Homo sapien
acccagcgaagcgacagtagctcga

SEQ ID NO: 324795 - DNA, 25 bp, Homo sapien
gagcaccgtgggctcgcagtcaggc

SEQ ID NO: 324796 - DNA, 25 bp, Homo sapien
agtagctcgaggtgttgggccgcat

SEQ ID NO: 324797 - DNA, 25 bp, Homo sapien
gggtcctcgaagacggtccagagca

SEQ ID NO: 324798 - DNA, 25 bp, Homo sapien
cagaagttggtgttgctacagtcct

SEQ ID NO: 324799 - DNA, 25 bp, Homo sapien
ctcaagcccgacactatggcgcaga

SEQ ID NO: 324800 - DNA, 25 bp, Homo sapien
aagttggtgttgctacagtcctgct

SEQ ID NO: 324801 - DNA, 25 bp, Homo sapien
gacactatggcgcagaagttggtgt

SEQ ID NO: 324802 - DNA, 25 bp, Homo sapien
cagggcctgcactcgagcccatcac

SEQ ID NO: 324803 - DNA, 25 bp, Homo sapien
gcagggcctgcactcgagcccatca

SEQ ID NO: 324804 - DNA, 25 bp, Homo sapien
ttgtgttactgtggaccacgtgcat

SEQ ID NO: 324805 - DNA, 25 bp, Homo sapien
cctccatgctctggtactttgtgtt

SEQ ID NO: 324806 - DNA, 25 bp, Homo sapien
cgtggcgtggtgcctcctccatgct

SEQ ID NO: 324807 - DNA, 25 bp, Homo sapien
gtactttgtgttactgtggaccacg

SEQ ID NO: 324808 - DNA, 25 bp, Homo sapien
cgtgggagcactccggccaccccac

SEQ ID NO: 324809 - DNA, 25 bp, Homo sapien
acctccgtgggagcactccggccac

SEQ ID NO: 324810 - DNA, 25 bp, Homo sapien
tccgtgggagcactccggccacccc

SEQ ID NO: 324811 - DNA, 25 bp, Homo sapien
cctccgtgggagcactccggccacc

SEQ ID NO: 324812 - DNA, 25 bp, Homo sapien
tccatagcctggcgctgcctgtcca

SEQ ID NO: 324813 - DNA, 25 bp, Homo sapien
gtccaggctgtgctccgagtctgct

SEQ ID NO: 324814 - DNA, 25 bp, Homo sapien
tgtgctccgagtctgctcgcctcgg

SEQ ID NO: 324815 - DNA, 25 bp, Homo sapien
cccaccgccggcagttgaagtgcag

SEQ ID NO: 324816 - DNA, 25 bp, Homo sapien
agtgcgcggtagacaggcaacagca

SEQ ID NO: 324817 - DNA, 25 bp, Homo sapien
cagtgcgcggtagacaggcaacagc

SEQ ID NO: 324818 - DNA, 25 bp, Homo sapien
tgcagtgcgcggtagacaggcaaca

SEQ ID NO: 324819 - DNA, 25 bp, Homo sapien
ctgcagtgcgcggtagacaggcaac

SEQ ID NO: 324820 - DNA, 25 bp, Homo sapien
tcatagcctcggaagatgaagggcc

SEQ ID NO: 324821 - DNA, 25 bp, Homo sapien
gaggtgctgagtcatagcctcggaa

SEQ ID NO: 324822 - DNA, 25 bp, Homo sapien
agagttccgccggaccctgtgaaag

SEQ ID NO: 324823 - DNA, 25 bp, Homo sapien
agatgaagggccctagggtagagtt

SEQ ID NO: 324824 - DNA, 25 bp, Homo sapien
tctactggggcagacgactacagac

SEQ ID NO: 324825 - DNA, 25 bp, Homo sapien
accagccttgactgactcgggaccg

SEQ ID NO: 324826 - DNA, 25 bp, Homo sapien
gcacttgcacctgatgcccagtcag

SEQ ID NO: 324827 - DNA, 25 bp, Homo sapien
acacagggggacagtcacgcacttg

SEQ ID NO: 324828 - DNA, 25 bp, Homo sapien
ggacacagactgatctgacacagcc

SEQ ID NO: 324829 - DNA, 25 bp, Homo sapien
cactggcacatgctctggtggtccc

SEQ ID NO: 324830 - DNA, 25 bp, Homo sapien
tgacacagcctcacatgacactctg

SEQ ID NO: 324831 - DNA, 25 bp, Homo sapien
agcctcacatgacactctgtcctca

SEQ ID NO: 324832 - DNA, 25 bp, Homo sapien
tgaggtcctgggagtcatagcacca

SEQ ID NO: 324833 - DNA, 25 bp, Homo sapien
gtcctgggagtcatagcaccaggca

SEQ ID NO: 324834 - DNA, 25 bp, Homo sapien
tacttgaggtcctgggagtcatagc

SEQ ID NO: 324835 - DNA, 25 bp, Homo sapien
catacttgaggtcctgggagtcata

SEQ ID NO: 324836 - DNA, 25 bp, Homo sapien
agagcagggcatgcaatcacacttc

SEQ ID NO: 324837 - DNA, 25 bp, Homo sapien
cctttcctaaccctgactcctctcg

SEQ ID NO: 324838 - DNA, 25 bp, Homo sapien
gacgtccccccagtatacacatctg

SEQ ID NO: 324839 - DNA, 25 bp, Homo sapien
actcctctcgtgtccggccgcagga

SEQ ID NO: 324840 - DNA, 25 bp, Homo sapien
ttctgctgaaaggtgggtacccagc

SEQ ID NO: 324841 - DNA, 25 bp, Homo sapien
tttgatggacgcctgcaagggctgc

SEQ ID NO: 324842 - DNA, 25 bp, Homo sapien
caaaccctaggtgcattctgctgaa

SEQ ID NO: 324843 - DNA, 25 bp, Homo sapien
tgcaggatagctgtaggcagctcag

SEQ ID NO: 324844 - DNA, 25 bp, Homo sapien
aaatgattctcacagcatcttaaga

SEQ ID NO: 324845 - DNA, 25 bp, Homo sapien
tgattctcacagcatcttaagaaaa

SEQ ID NO: 324846 - DNA, 25 bp, Homo sapien
aaaaacaggcatcaagacaatgtac

SEQ ID NO: 324847 - DNA, 25 bp, Homo sapien
aatgattctcacagcatcttaagaa

SEQ ID NO: 324848 - DNA, 25 bp, Homo sapien
agtggcagcggtgttccaggcagcc

SEQ ID NO: 324849 - DNA, 25 bp, Homo sapien
gaaaccgtggcaagctggtcctaga

SEQ ID NO: 324850 - DNA, 25 bp, Homo sapien
gcacaaggttcagcaagggtgaccc

SEQ ID NO: 324851 - DNA, 25 bp, Homo sapien
caagaacagatgagcgagtccagct

SEQ ID NO: 324852 - DNA, 25 bp, Homo sapien
ggcccaacgtgccagtggcctgagt

SEQ ID NO: 324853 - DNA, 25 bp, Homo sapien
caacgtgccagtggcctgagtgctt

SEQ ID NO: 324854 - DNA, 25 bp, Homo sapien
tgcatggtccactttaccccgtttc

SEQ ID NO: 324855 - DNA, 25 bp, Homo sapien
ctggcccaacgtgccagtggcctga

SEQ ID NO: 324856 - DNA, 25 bp, Homo sapien
tgaccggcccctaatgttcctctgg

SEQ ID NO: 324857 - DNA, 25 bp, Homo sapien
gtcccgcacacacagttctgaggcc

SEQ ID NO: 324858 - DNA, 25 bp, Homo sapien
aaggaagcgtcccagtcccacacat

SEQ ID NO: 324859 - DNA, 25 bp, Homo sapien
tcctctggtccccaaaggaagcgtc

SEQ ID NO: 324860 - DNA, 25 bp, Homo sapien
gactttaaggagatagatgcagccc

SEQ ID NO: 324861 - DNA, 25 bp, Homo sapien
gatgcatcgatgaccctggaagagt

SEQ ID NO: 324862 - DNA, 25 bp, Homo sapien
tgtgacaaagtcaagaggctgcctc

SEQ ID NO: 324863 - DNA, 25 bp, Homo sapien
caaaaacgcatcaggtgtggccatg

SEQ ID NO: 324864 - DNA, 25 bp, Homo sapien
ggcgccggagtaatgcaccttcact

SEQ ID NO: 324865 - DNA, 25 bp, Homo sapien
tgctgctgtcggcagagtcttccag

SEQ ID NO: 324866 - DNA, 25 bp, Homo sapien
cagtattgagggagctgcggctgtg

SEQ ID NO: 324867 - DNA, 25 bp, Homo sapien
aggctgacctccacaggctcaaaag

SEQ ID NO: 324868 - DNA, 25 bp, Homo sapien
atgacacctgttgtacctactgccc

SEQ ID NO: 324869 - DNA, 25 bp, Homo sapien
acctggtatatgcaaggtgcagggc

SEQ ID NO: 324870 - DNA, 25 bp, Homo sapien
ccccgggcctcagattttgaaggag

SEQ ID NO: 324871 - DNA, 25 bp, Homo sapien
cctgtcccaccatcggtgtgaggta

SEQ ID NO: 324872 - DNA, 25 bp, Homo sapien
caggactgagacctttaggcacagc

SEQ ID NO: 324873 - DNA, 25 bp, Homo sapien
tgtctctgaaagctaacagcacaag

SEQ ID NO: 324874 - DNA, 25 bp, Homo sapien
gctgtggcagctgactaaacaaacg

SEQ ID NO: 324875 - DNA, 25 bp, Homo sapien
tcttaaaagattgcacactggtgtg

SEQ ID NO: 324876 - DNA, 25 bp, Homo sapien
agccggaaagaagtgaggtccctag

SEQ ID NO: 324877 - DNA, 25 bp, Homo sapien
gggagatcaggaccccttctgcacg

SEQ ID NO: 324878 - DNA, 25 bp, Homo sapien
tctgcacagattgccaagggcggcc

SEQ ID NO: 324879 - DNA, 25 bp, Homo sapien
cagatgacaggtgctcacagaaggc

SEQ ID NO: 324880 - DNA, 25 bp, Homo sapien
tagaacacactgtccgggtggatgg

SEQ ID NO: 324881 - DNA, 25 bp, Homo sapien
tctccgtcgtcagaaagatgcagcg

SEQ ID NO: 324882 - DNA, 25 bp, Homo sapien
gccgtaatcaaagccagggatcctg

SEQ ID NO: 324883 - DNA, 25 bp, Homo sapien
gccgatgtccgggtacttgtatgcc

SEQ ID NO: 324884 - DNA, 25 bp, Homo sapien
gggtcttggcaagaactttcctggc

SEQ ID NO: 324885 - DNA, 25 bp, Homo sapien
ggacacagaccccacaacatgtggc

SEQ ID NO: 324886 - DNA, 25 bp, Homo sapien
tgcaacgggaacagagacaagtcac

SEQ ID NO: 324887 - DNA, 25 bp, Homo sapien
agacccctggtgtgctccgtggcat

SEQ ID NO: 324888 - DNA, 25 bp, Homo sapien
aggaggagatgcagctgacgaccag

SEQ ID NO: 324889 - DNA, 25 bp, Homo sapien
gaccaggcgcatcccgctggccatg

SEQ ID NO: 324890 - DNA, 25 bp, Homo sapien
tcagggactcgatgcgctcccggcg

SEQ ID NO: 324891 - DNA, 25 bp, Homo sapien
cgcagccggtggaccatgaagagca

SEQ ID NO: 324892 - DNA, 25 bp, Homo sapien
tggccgggcacagggaacttgataa

SEQ ID NO: 324893 - DNA, 25 bp, Homo sapien
aacagacatgcaccctatacgagga

SEQ ID NO: 324894 - DNA, 25 bp, Homo sapien
gaatgacaaagcatgcccgtggagt

SEQ ID NO: 324895 - DNA, 25 bp, Homo sapien
ccctggaggcgtaagtttgaagaca

SEQ ID NO: 324896 - DNA, 25 bp, Homo sapien
taggggtgaagtagaacccttcatc

SEQ ID NO: 324897 - DNA, 25 bp, Homo sapien
acatgaacttgcagcactctttggg

SEQ ID NO: 324898 - DNA, 25 bp, Homo sapien
tcaggcatgggtcgtcccccttagg

SEQ ID NO: 324899 - DNA, 25 bp, Homo sapien
cttgcggtactgttggcagccctgg

SEQ ID NO: 324900 - DNA, 25 bp, Homo sapien
cagagtcttcaactggtaggcagac

SEQ ID NO: 324901 - DNA, 25 bp, Homo sapien
tggctaaaaacccagagtcttcaac

SEQ ID NO: 324902 - DNA, 25 bp, Homo sapien
aaaacccagagtcttcaactggtag

SEQ ID NO: 324903 - DNA, 25 bp, Homo sapien
actggtaggcagacgttgcaaatgc

SEQ ID NO: 324904 - DNA, 25 bp, Homo sapien
gatgtccttcaacacttgaggccta

SEQ ID NO: 324905 - DNA, 25 bp, Homo sapien
ctgtatgcggatgttcacggcagtt

SEQ ID NO: 324906 - DNA, 25 bp, Homo sapien
tcacggcagttttcattgtaatagc

SEQ ID NO: 324907 - DNA, 25 bp, Homo sapien
ttcaacacttgaggcctatagtttg

SEQ ID NO: 324908 - DNA, 25 bp, Homo sapien
tcatggagtggagatccggccagca

SEQ ID NO: 324909 - DNA, 25 bp, Homo sapien
tgcaatggatggtcgcgaggaatca

SEQ ID NO: 324910 - DNA, 25 bp, Homo sapien
gagcctgagaacttaaaggctgcag

SEQ ID NO: 324911 - DNA, 25 bp, Homo sapien
cactacaacgagctgattcactgca

SEQ ID NO: 324912 - DNA, 25 bp, Homo sapien
ctgtggaggtcgtggtgccgcaggg

SEQ ID NO: 324913 - DNA, 25 bp, Homo sapien
ttgtcgttctcagacatggccgagg

SEQ ID NO: 324914 - DNA, 25 bp, Homo sapien
gaagacttctcgtagcagctctcgg

SEQ ID NO: 324915 - DNA, 25 bp, Homo sapien
cagctctcggcgtgccagctgtgga

SEQ ID NO: 324916 - DNA, 25 bp, Homo sapien
agaaaggcgccgtcaggcagcattg

SEQ ID NO: 324917 - DNA, 25 bp, Homo sapien
aaggcgccgtcaggcagcattggca

SEQ ID NO: 324918 - DNA, 25 bp, Homo sapien
gagaaaggcgccgtcaggcagcatt

SEQ ID NO: 324919 - DNA, 25 bp, Homo sapien
ggcgccgtcaggcagcattggcact

SEQ ID NO: 324920 - DNA, 25 bp, Homo sapien
gacagaagctacactgctggtgctg

SEQ ID NO: 324921 - DNA, 25 bp, Homo sapien
cagacagaagctacactgctggtgc

SEQ ID NO: 324922 - DNA, 25 bp, Homo sapien
agctacactgctggtgctgacggga

SEQ ID NO: 324923 - DNA, 25 bp, Homo sapien
gaagctacactgctggtgctgacgg

SEQ ID NO: 324924 - DNA, 25 bp, Homo sapien
tgcacgttgagccacacaaataggg

SEQ ID NO: 324925 - DNA, 25 bp, Homo sapien
taaatccgctaacagagttcccgaa

SEQ ID NO: 324926 - DNA, 25 bp, Homo sapien
agtggcacatggtcacctccgtgga

SEQ ID NO: 324927 - DNA, 25 bp, Homo sapien
gacaccataagggttcttgtgccac

SEQ ID NO: 324928 - DNA, 25 bp, Homo sapien
ttccaaggagcggttccggccagtg

SEQ ID NO: 324929 - DNA, 25 bp, Homo sapien
ggttccggccagtgataacatactg

SEQ ID NO: 324930 - DNA, 25 bp, Homo sapien
cccagcgaccttccaaggagcggtt

SEQ ID NO: 324931 - DNA, 25 bp, Homo sapien
agcggttccggccagtgataacata

SEQ ID NO: 324932 - DNA, 25 bp, Homo sapien
caaaacaagaaagttcacagggcag

SEQ ID NO: 324933 - DNA, 25 bp, Homo sapien
gctaaaaccataggacagggcactc

SEQ ID NO: 324934 - DNA, 25 bp, Homo sapien
tttctatgagctaaaccggtaaagc

SEQ ID NO: 324935 - DNA, 25 bp, Homo sapien
gaaaccccatgaatacaactcggtg

SEQ ID NO: 324936 - DNA, 25 bp, Homo sapien
tgctccaggagtttactgagtggtc

SEQ ID NO: 324937 - DNA, 25 bp, Homo sapien
tccaggagtttactgagtggtcaga

SEQ ID NO: 324938 - DNA, 25 bp, Homo sapien
gctcagtagtcatcagactctgact

SEQ ID NO: 324939 - DNA, 25 bp, Homo sapien
ctgtgctccaggagtttactgagtg

SEQ ID NO: 324940 - DNA, 25 bp, Homo sapien
cgctcaggtagacccggtagcagct

SEQ ID NO: 324941 - DNA, 25 bp, Homo sapien
tgcgctggtccttccaaccaaagct

SEQ ID NO: 324942 - DNA, 25 bp, Homo sapien
tctgcgcggcatcccagtagttctc

SEQ ID NO: 324943 - DNA, 25 bp, Homo sapien
cgagagagccattcaggcgctggca

SEQ ID NO: 324944 - DNA, 25 bp, Homo sapien
tcactagtcaagaacggctgctgaa

SEQ ID NO: 324945 - DNA, 25 bp, Homo sapien
tacaagtacattcggtgactcttcc

SEQ ID NO: 324946 - DNA, 25 bp, Homo sapien
tacttacatgagcatttgcagtagg

SEQ ID NO: 324947 - DNA, 25 bp, Homo sapien
tgggttaacaacacagcacaactcc

SEQ ID NO: 324948 - DNA, 25 bp, Homo sapien
aagtgcgaagggtcgcctcctctgg

SEQ ID NO: 324949 - DNA, 25 bp, Homo sapien
tgctgaagcgaacgggctgcgccac

SEQ ID NO: 324950 - DNA, 25 bp, Homo sapien
gctgcgccacgttcaccgcgtggaa

SEQ ID NO: 324951 - DNA, 25 bp, Homo sapien
gcctccttcccatgatgaggacgca

SEQ ID NO: 324952 - DNA, 25 bp, Homo sapien
gatggcccatgaaagagttctctcc

SEQ ID NO: 324953 - DNA, 25 bp, Homo sapien
gctcgcatcaaatgggtcccgtgtg

SEQ ID NO: 324954 - DNA, 25 bp, Homo sapien
caggtctcagtgcatggctagaagg

SEQ ID NO: 324955 - DNA, 25 bp, Homo sapien
cccagtatgaaggagacccacgtgt

SEQ ID NO: 324956 - DNA, 25 bp, Homo sapien
gggctccatgacctgtgcagctcgg

SEQ ID NO: 324957 - DNA, 25 bp, Homo sapien
tgtgcagctcggagcacatgtgccc

SEQ ID NO: 324958 - DNA, 25 bp, Homo sapien
gcaccactagagtgccacgctgctg

SEQ ID NO: 324959 - DNA, 25 bp, Homo sapien
tgcaggggtcactgtagcacccaga

SEQ ID NO: 324960 - DNA, 25 bp, Homo sapien
tgacagactgctaaacttggttaac

SEQ ID NO: 324961 - DNA, 25 bp, Homo sapien
tgagacatccttgcattacatttgg

SEQ ID NO: 324962 - DNA, 25 bp, Homo sapien
gaagccatgtggttcaggacttttc

SEQ ID NO: 324963 - DNA, 25 bp, Homo sapien
tcttcttgattaattactgtgggca

SEQ ID NO: 324964 - DNA, 25 bp, Homo sapien
cttatggtagcagaaagagtcaccc

SEQ ID NO: 324965 - DNA, 25 bp, Homo sapien
tgttgttctcactcaagcaggccca

SEQ ID NO: 324966 - DNA, 25 bp, Homo sapien
taatatagttgtgagcgacctcccc

SEQ ID NO: 324967 - DNA, 25 bp, Homo sapien
aatgcgagtgccaagagaattccac

SEQ ID NO: 324968 - DNA, 25 bp, Homo sapien
caacgtggcgaaacaccgattctac

SEQ ID NO: 324969 - DNA, 25 bp, Homo sapien
ccgattctacgaaaacatgcaatta

SEQ ID NO: 324970 - DNA, 25 bp, Homo sapien
gcaggcagactgcttaaactcgtga

SEQ ID NO: 324971 - DNA, 25 bp, Homo sapien
gcttaaactcgtgagttagagacca

SEQ ID NO: 324972 - DNA, 25 bp, Homo sapien
tccaaaccctcatttggaaaggcaa

SEQ ID NO: 324973 - DNA, 25 bp, Homo sapien
ccctcatttggaaaggcaaacacct

SEQ ID NO: 324974 - DNA, 25 bp, Homo sapien
ttataggtgtgcagcaccacacctg

SEQ ID NO: 324975 - DNA, 25 bp, Homo sapien
cacacctggccaatttttgtatttt

SEQ ID NO: 324976 - DNA, 25 bp, Homo sapien
ggcctaaagcgatccacccacctca

SEQ ID NO: 324977 - DNA, 25 bp, Homo sapien
agcctcccaaagtgttgggttacag

SEQ ID NO: 324978 - DNA, 25 bp, Homo sapien
cctgtgagtgcaaagttccaggtga

SEQ ID NO: 324979 - DNA, 25 bp, Homo sapien
gtgccaaggccagtctaaaagagca

SEQ ID NO: 324980 - DNA, 25 bp, Homo sapien
ggttcacactcaagatcatccaagt

SEQ ID NO: 324981 - DNA, 25 bp, Homo sapien
tttaggagactacataatggccagg

SEQ ID NO: 324982 - DNA, 25 bp, Homo sapien
acagttggcttcgtcgctctcatcc

SEQ ID NO: 324983 - DNA, 25 bp, Homo sapien
aactgcccagggttgcaccgcagct

SEQ ID NO: 324984 - DNA, 25 bp, Homo sapien
tgcactggatggtgccgctgcgaca

SEQ ID NO: 324985 - DNA, 25 bp, Homo sapien
ctggacagttggcttcgtcgctctc

SEQ ID NO: 324986 - DNA, 25 bp, Homo sapien
cccatgactggtactgaagcactat

SEQ ID NO: 324987 - DNA, 25 bp, Homo sapien
tgaatcatggcccacctaacgtgct

SEQ ID NO: 324988 - DNA, 25 bp, Homo sapien
caaaagatactgaccacaaggctaa

SEQ ID NO: 324989 - DNA, 25 bp, Homo sapien
caggcaccctgtgttctaggactag

SEQ ID NO: 324990 - DNA, 25 bp, Homo sapien
tcagaagttctccaatagggaaggt

SEQ ID NO: 324991 - DNA, 25 bp, Homo sapien
tcttgatccatctgtcaagccgggt

SEQ ID NO: 324992 - DNA, 25 bp, Homo sapien
caagccgggtctattctggaagcaa

SEQ ID NO: 324993 - DNA, 25 bp, Homo sapien
taaatgcctaatgaactgcacagct

SEQ ID NO: 324994 - DNA, 25 bp, Homo sapien
tctcccctgaagcccgtctagcccc

SEQ ID NO: 324995 - DNA, 25 bp, Homo sapien
ctcccctgaagcccgtctagcccct

SEQ ID NO: 324996 - DNA, 25 bp, Homo sapien
ttgggaataagaccagggcaggagg

SEQ ID NO: 324997 - DNA, 25 bp, Homo sapien
ggagcgagagctatctcgcatctga

SEQ ID NO: 324998 - DNA, 25 bp, Homo sapien
tgatgtaaacatcagccagcagttt

SEQ ID NO: 324999 - DNA, 25 bp, Homo sapien
gcaccacatttcgatcatagccaca

SEQ ID NO: 325000 - DNA, 25 bp, Homo sapien
gaagtaatacatccacacggttgaa

SEQ ID NO: 325001 - DNA, 25 bp, Homo sapien
ccaactcagtgaaaaggtgcccggt

SEQ ID NO: 325002 - DNA, 25 bp, Homo sapien
aactgtgaacactagcgatgcccaa

SEQ ID NO: 325003 - DNA, 25 bp, Homo sapien
taaaagctaagtgatgccaccaagc

SEQ ID NO: 325004 - DNA, 25 bp, Homo sapien
gcttaccatgctggtctagcaggca

SEQ ID NO: 325005 - DNA, 25 bp, Homo sapien
cactgtcaggagtggccaagaaacc

SEQ ID NO: 325006 - DNA, 25 bp, Homo sapien
catagacagagttctgtaggtaaac

SEQ ID NO: 325007 - DNA, 25 bp, Homo sapien
gcaggcatccttcgcaaatagggta

SEQ ID NO: 325008 - DNA, 25 bp, Homo sapien
ctgtgcaaacaacccagggaaggtc

SEQ ID NO: 325009 - DNA, 25 bp, Homo sapien
ccagcaagtccatcagagaggcagc

SEQ ID NO: 325010 - DNA, 25 bp, Homo sapien
cattaatgagaagccacacttgctc

SEQ ID NO: 325011 - DNA, 25 bp, Homo sapien
agtccagttctcaaagccaggtgcc

SEQ ID NO: 325012 - DNA, 25 bp, Homo sapien
ggcctctgttccacatcaggcactc

SEQ ID NO: 325013 - DNA, 25 bp, Homo sapien
cctggcctctgttccacatcaggca

SEQ ID NO: 325014 - DNA, 25 bp, Homo sapien
acctggcctctgttccacatcaggc

SEQ ID NO: 325015 - DNA, 25 bp, Homo sapien
tggcctctgttccacatcaggcact

SEQ ID NO: 325016 - DNA, 25 bp, Homo sapien
cttaagaacacactagctccgaggg

SEQ ID NO: 325017 - DNA, 25 bp, Homo sapien
ttcatcacatacacgcagcacggct

SEQ ID NO: 325018 - DNA, 25 bp, Homo sapien
tccaggcgaggagtttccaggactg

SEQ ID NO: 325019 - DNA, 25 bp, Homo sapien
tagaaaagggtctcctggttgccac

SEQ ID NO: 325020 - DNA, 25 bp, Homo sapien
tgacagtgagcacgagcaggaagag

SEQ ID NO: 325021 - DNA, 25 bp, Homo sapien
gtgacagtgagcacgagcaggaaga

SEQ ID NO: 325022 - DNA, 25 bp, Homo sapien
ggtgacagtgagcacgagcaggaag

SEQ ID NO: 325023 - DNA, 25 bp, Homo sapien
ggaccgtgccaagcggagggtcagg

SEQ ID NO: 325024 - DNA, 25 bp, Homo sapien
ggaccaggccggactgagggtcagg

SEQ ID NO: 325025 - DNA, 25 bp, Homo sapien
ggctggcgcacactctcggctgcaa

SEQ ID NO: 325026 - DNA, 25 bp, Homo sapien
accgactccagctgcgcgcaagatg

SEQ ID NO: 325027 - DNA, 25 bp, Homo sapien
gcccggaacaagtgctggacacaga

SEQ ID NO: 325028 - DNA, 25 bp, Homo sapien
aatccaaggctaggatagtcatgtg

SEQ ID NO: 325029 - DNA, 25 bp, Homo sapien
gggacccaacccaacatgagtgaca

SEQ ID NO: 325030 - DNA, 25 bp, Homo sapien
caagaatgcacaaaggcctggcagt

SEQ ID NO: 325031 - DNA, 25 bp, Homo sapien
tagttcattgagtgccagggagccc

SEQ ID NO: 325032 - DNA, 25 bp, Homo sapien
ggacatcatgcaccagaacctcaag

SEQ ID NO: 325033 - DNA, 25 bp, Homo sapien
gatgacagtggccaacagagattaa

SEQ ID NO: 325034 - DNA, 25 bp, Homo sapien
gacatggcgtgcaagatgttccacc

SEQ ID NO: 325035 - DNA, 25 bp, Homo sapien
ctagtgagccgtttgtggcccagtg

SEQ ID NO: 325036 - DNA, 25 bp, Homo sapien
tagtgagccgtttgtggcccagtgt

SEQ ID NO: 325037 - DNA, 25 bp, Homo sapien
cagtgtgccagcggcgaatgagatg

SEQ ID NO: 325038 - DNA, 25 bp, Homo sapien
tgccagcggcgaatgagatggagct

SEQ ID NO: 325039 - DNA, 25 bp, Homo sapien
taaatgaggacaatgcctgctggcc

SEQ ID NO: 325040 - DNA, 25 bp, Homo sapien
cattggctgaagtcacccggagaca

SEQ ID NO: 325041 - DNA, 25 bp, Homo sapien
tcagattttgtcgacccgagatggg

SEQ ID NO: 325042 - DNA, 25 bp, Homo sapien
gagacaatgctgagtgttccacccc

SEQ ID NO: 325043 - DNA, 25 bp, Homo sapien
gcaagggttcctacgcaaaagtcaa

SEQ ID NO: 325044 - DNA, 25 bp, Homo sapien
tacatcgtaggcatcaatcttggca

SEQ ID NO: 325045 - DNA, 25 bp, Homo sapien
gacggacggatctacatcatcatgg

SEQ ID NO: 325046 - DNA, 25 bp, Homo sapien
gacgtggcacgcaagatgttccgac

SEQ ID NO: 325047 - DNA, 25 bp, Homo sapien
tgcagtcggccttcacgtaaactaa

SEQ ID NO: 325048 - DNA, 25 bp, Homo sapien
ggaaagcaagcacctagcatgacaa

SEQ ID NO: 325049 - DNA, 25 bp, Homo sapien
ctcaggtacaggcagaatcacagtg

SEQ ID NO: 325050 - DNA, 25 bp, Homo sapien
taaaccacagggtgtgtgcaagcat

SEQ ID NO: 325051 - DNA, 25 bp, Homo sapien
gtacctaggtgttctttaatgacag

SEQ ID NO: 325052 - DNA, 25 bp, Homo sapien
cacgagtgccttgtgccagtctggc

SEQ ID NO: 325053 - DNA, 25 bp, Homo sapien
gtgactcctggtatggtcaacagct

SEQ ID NO: 325054 - DNA, 25 bp, Homo sapien
tctgtgaagcgtctatgagcccagc

SEQ ID NO: 325055 - DNA, 25 bp, Homo sapien
tgtccgtgatggaggccgggtcctg

SEQ ID NO: 325056 - DNA, 25 bp, Homo sapien
gcagggcccggtctgtgtacttgct

SEQ ID NO: 325057 - DNA, 25 bp, Homo sapien
tcctgctcacaaggcgctgtagggc

SEQ ID NO: 325058 - DNA, 25 bp, Homo sapien
taaaagaagtccgaagctttgcgcc

SEQ ID NO: 325059 - DNA, 25 bp, Homo sapien
cagccgctccctgcggcctggctcc

SEQ ID NO: 325060 - DNA, 25 bp, Homo sapien
ccggttcttggcagcggcctcgttg

SEQ ID NO: 325061 - DNA, 25 bp, Homo sapien
gtcactctccgcaaggcttcctgct

SEQ ID NO: 325062 - DNA, 25 bp, Homo sapien
agcggcctcgttggccatcttcaga

SEQ ID NO: 325063 - DNA, 25 bp, Homo sapien
tttatcggcgctctgtatttcgggc

SEQ ID NO: 325064 - DNA, 25 bp, Homo sapien
tgctgctgttactcagaagaccctt

SEQ ID NO: 325065 - DNA, 25 bp, Homo sapien
catgacctctgacaatctctcagga

SEQ ID NO: 325066 - DNA, 25 bp, Homo sapien
ggtgccagcctctctttgttgccta

SEQ ID NO: 325067 - DNA, 25 bp, Homo sapien
ccaggtcatcatcggggactcgttc

SEQ ID NO: 325068 - DNA, 25 bp, Homo sapien
tccgacccttcaactctcaagggtg

SEQ ID NO: 325069 - DNA, 25 bp, Homo sapien
ctgggccgggtgtcctgtccacgta

SEQ ID NO: 325070 - DNA, 25 bp, Homo sapien
tcaagggtgtgttctcaacctcccc

SEQ ID NO: 325071 - DNA, 25 bp, Homo sapien
gagtcccagcagtagacccacttgc

SEQ ID NO: 325072 - DNA, 25 bp, Homo sapien
gcagtagacccacttgccagtgggc

SEQ ID NO: 325073 - DNA, 25 bp, Homo sapien
cagcagtagacccacttgccagtgg

SEQ ID NO: 325074 - DNA, 25 bp, Homo sapien
cccagcagtagacccacttgccagt

SEQ ID NO: 325075 - DNA, 25 bp, Homo sapien
gagtggcaacaaatccaaatccacc

SEQ ID NO: 325076 - DNA, 25 bp, Homo sapien
actcgaggggactcctgggggatca

SEQ ID NO: 325077 - DNA, 25 bp, Homo sapien
aaatccaaatccacccactcgaggg

SEQ ID NO: 325078 - DNA, 25 bp, Homo sapien
gggaaggagtggcaacaaatccaaa

SEQ ID NO: 325079 - DNA, 25 bp, Homo sapien
cttcctctcctcagggcaaggctgg

SEQ ID NO: 325080 - DNA, 25 bp, Homo sapien
tggcatcagggggaccgcagcccac

SEQ ID NO: 325081 - DNA, 25 bp, Homo sapien
ccggtgggcaaacacgtgggaacat

SEQ ID NO: 325082 - DNA, 25 bp, Homo sapien
acgctcgacagctggccggtgggca

SEQ ID NO: 325083 - DNA, 25 bp, Homo sapien
ggcttcttaaacagctgctcctcgt

SEQ ID NO: 325084 - DNA, 25 bp, Homo sapien
gtccctaaggaagcgcgtgttctta

SEQ ID NO: 325085 - DNA, 25 bp, Homo sapien
cctgccggggcttcttaaacagctg

SEQ ID NO: 325086 - DNA, 25 bp, Homo sapien
gtgttcttatgtaccacctgccggg

SEQ ID NO: 325087 - DNA, 25 bp, Homo sapien
tggatagtacatgagggaattcttg

SEQ ID NO: 325088 - DNA, 25 bp, Homo sapien
tctggatagtacatgagggaattct

SEQ ID NO: 325089 - DNA, 25 bp, Homo sapien
tgagggaattcttggccttgtactt

SEQ ID NO: 325090 - DNA, 25 bp, Homo sapien
cctctggatagtacatgagggaatt

SEQ ID NO: 325091 - DNA, 25 bp, Homo sapien
ctgctgacgggagttcgagattatc

SEQ ID NO: 325092 - DNA, 25 bp, Homo sapien
ggagttcgagattatctttctgcct

SEQ ID NO: 325093 - DNA, 25 bp, Homo sapien
tgacgggagttcgagattatctttc

SEQ ID NO: 325094 - DNA, 25 bp, Homo sapien
cgggagttcgagattatctttctgc

SEQ ID NO: 325095 - DNA, 25 bp, Homo sapien
cctcagcctggtagagccaagcgtg

SEQ ID NO: 325096 - DNA, 25 bp, Homo sapien
tcagcctggtagagccaagcgtggc

SEQ ID NO: 325097 - DNA, 25 bp, Homo sapien
attgtcctcactcgtgtagcggctc

SEQ ID NO: 325098 - DNA, 25 bp, Homo sapien
tgtagcggctcaggaagacatctag

SEQ ID NO: 325099 - DNA, 25 bp, Homo sapien
tggtcctggcttctgcccatgaaag

SEQ ID NO: 325100 - DNA, 25 bp, Homo sapien
caacatgcagggctggaatcctctc

SEQ ID NO: 325101 - DNA, 25 bp, Homo sapien
aatcatagcccccaacatgcagggc

SEQ ID NO: 325102 - DNA, 25 bp, Homo sapien
cactgccaaggactccccacggggg

SEQ ID NO: 325103 - DNA, 25 bp, Homo sapien
tgcctgcatgcacctcaggggtttc

SEQ ID NO: 325104 - DNA, 25 bp, Homo sapien
gggcttgttgcccaccactccagtg

SEQ ID NO: 325105 - DNA, 25 bp, Homo sapien
ggcctgggcttgttgcccaccactc

SEQ ID NO: 325106 - DNA, 25 bp, Homo sapien
cagtgcctgcatgcacctcaggggt

SEQ ID NO: 325107 - DNA, 25 bp, Homo sapien
ccgggacatcttgcccaaggcagag

SEQ ID NO: 325108 - DNA, 25 bp, Homo sapien
caaacttgatggcaatctggcgcat

SEQ ID NO: 325109 - DNA, 25 bp, Homo sapien
aatccctttggatgaccgtctggag

SEQ ID NO: 325110 - DNA, 25 bp, Homo sapien
tggagcttctccacatcaggaaaga

SEQ ID NO: 325111 - DNA, 25 bp, Homo sapien
tcacaactgcggtctctttccagga

SEQ ID NO: 325112 - DNA, 25 bp, Homo sapien
acacttgctgccaccgctctttaga

SEQ ID NO: 325113 - DNA, 25 bp, Homo sapien
agacgtcttcctctgccctgtttac

SEQ ID NO: 325114 - DNA, 25 bp, Homo sapien
caggtccactcactcgagatgctgt

SEQ ID NO: 325115 - DNA, 25 bp, Homo sapien
gagacggagtgtcaacacccgagag

SEQ ID NO: 325116 - DNA, 25 bp, Homo sapien
tgtcaacacccgagagagggaacct

SEQ ID NO: 325117 - DNA, 25 bp, Homo sapien
tccacgaggagacggagtgtcaaca

SEQ ID NO: 325118 - DNA, 25 bp, Homo sapien
tcctccacttccacgaggagacgga

SEQ ID NO: 325119 - DNA, 25 bp, Homo sapien
ccaggacccgctgcttgctcgtcgc

SEQ ID NO: 325120 - DNA, 25 bp, Homo sapien
cgctgcttgctcgtcgcagccccag

SEQ ID NO: 325121 - DNA, 25 bp, Homo sapien
gcttgctcgtcgcagccccagcctc

SEQ ID NO: 325122 - DNA, 25 bp, Homo sapien
aggacccgctgcttgctcgtcgcag

SEQ ID NO: 325123 - DNA, 25 bp, Homo sapien
tggacgcggcgggaagcaacaagga

SEQ ID NO: 325124 - DNA, 25 bp, Homo sapien
cgggaagcaacaaggacgacgctga

SEQ ID NO: 325125 - DNA, 25 bp, Homo sapien
gacgacgctgatgcgcccggcgtct

SEQ ID NO: 325126 - DNA, 25 bp, Homo sapien
agcaacaaggacgacgctgatgcgc

SEQ ID NO: 325127 - DNA, 25 bp, Homo sapien
tcaggagagcaacacagccactgag

SEQ ID NO: 325128 - DNA, 25 bp, Homo sapien
tcagcctgggtatagtggatgatca

SEQ ID NO: 325129 - DNA, 25 bp, Homo sapien
gacagctggagataaatacctggct

SEQ ID NO: 325130 - DNA, 25 bp, Homo sapien
tggaaggtggcgctccacaagctct

SEQ ID NO: 325131 - DNA, 25 bp, Homo sapien
gactgaggatcgctgagctgtgctc

SEQ ID NO: 325132 - DNA, 25 bp, Homo sapien
ctaccctaggatggcacagattgct

SEQ ID NO: 325133 - DNA, 25 bp, Homo sapien
attgctgtgagggagtccgagccca

SEQ ID NO: 325134 - DNA, 25 bp, Homo sapien
caggttcacagtagcctagaggcca

SEQ ID NO: 325135 - DNA, 25 bp, Homo sapien
agccgacgcgcgcttctggtgtcgc

SEQ ID NO: 325136 - DNA, 25 bp, Homo sapien
cgggcaggagcctcgcggaagccga

SEQ ID NO: 325137 - DNA, 25 bp, Homo sapien
gtgtcgccatttggcccggcggttc

SEQ ID NO: 325138 - DNA, 25 bp, Homo sapien
gggacttcttgacgccgggcaggag

SEQ ID NO: 325139 - DNA, 25 bp, Homo sapien
tactggttctgcacgaaaagcgcct

SEQ ID NO: 325140 - DNA, 25 bp, Homo sapien
tccggctggcgcacccagagacaag

SEQ ID NO: 325141 - DNA, 25 bp, Homo sapien
aaaagcgcctcgagcgcctgcagct

SEQ ID NO: 325142 - DNA, 25 bp, Homo sapien
gctcgcgcgtactcacgtcaggata

SEQ ID NO: 325143 - DNA, 25 bp, Homo sapien
atgtgctcgatggagaaggggcagg

SEQ ID NO: 325144 - DNA, 25 bp, Homo sapien
ggggctctggcgaccggcgggctgc

SEQ ID NO: 325145 - DNA, 25 bp, Homo sapien
cggggctctggcgaccggcgggctg

SEQ ID NO: 325146 - DNA, 25 bp, Homo sapien
gggctctggcgaccggcgggctgcg

SEQ ID NO: 325147 - DNA, 25 bp, Homo sapien
ctcttggtggtagaatggctgccac

SEQ ID NO: 325148 - DNA, 25 bp, Homo sapien
ttcatctcctcccatggccctttgg

SEQ ID NO: 325149 - DNA, 25 bp, Homo sapien
ctgccacagccccacacttttcatc

SEQ ID NO: 325150 - DNA, 25 bp, Homo sapien
ctcccatggccctttggatggccat

SEQ ID NO: 325151 - DNA, 25 bp, Homo sapien
attgtgcccagcctctttgcttatt

SEQ ID NO: 325152 - DNA, 25 bp, Homo sapien
tgcccagcctctttgcttatttatt

SEQ ID NO: 325153 - DNA, 25 bp, Homo sapien
cgcccgccactacactcagcaaatt

SEQ ID NO: 325154 - DNA, 25 bp, Homo sapien
agagatgggtttcgctaggttggcc

SEQ ID NO: 325155 - DNA, 25 bp, Homo sapien
cagcccaatcaatctcggacgaggg

SEQ ID NO: 325156 - DNA, 25 bp, Homo sapien
cagacgactggacgcgccctcgtga

SEQ ID NO: 325157 - DNA, 25 bp, Homo sapien
gggactcgcgatgaaacccgaagat

SEQ ID NO: 325158 - DNA, 25 bp, Homo sapien
ccagggtctgagcagcgcggctcca

SEQ ID NO: 325159 - DNA, 25 bp, Homo sapien
cccttttccttttctctgaggccat

SEQ ID NO: 325160 - DNA, 25 bp, Homo sapien
tcccttttccttttctctgaggcca

SEQ ID NO: 325161 - DNA, 25 bp, Homo sapien
gctcccttttccttttctctgaggc

SEQ ID NO: 325162 - DNA, 25 bp, Homo sapien
cagctcccttttccttttctctgag

SEQ ID NO: 325163 - DNA, 25 bp, Homo sapien
gcaacaggatccggtttattctgcc

SEQ ID NO: 325164 - DNA, 25 bp, Homo sapien
ttattctgccttggcagggtggtcc

SEQ ID NO: 325165 - DNA, 25 bp, Homo sapien
agggtggtcctgagagtggtgggtg

SEQ ID NO: 325166 - DNA, 25 bp, Homo sapien
ggtggtcctgagagtggtgggtgcc

SEQ ID NO: 325167 - DNA, 25 bp, Homo sapien
gcacagggtcataggccagatgcac

SEQ ID NO: 325168 - DNA, 25 bp, Homo sapien
gggacacatggatttgacagccaca

SEQ ID NO: 325169 - DNA, 25 bp, Homo sapien
caaaggtagcaggacactctggcgg

SEQ ID NO: 325170 - DNA, 25 bp, Homo sapien
gcactactgcactggaatcgtgaga

SEQ ID NO: 325171 - DNA, 25 bp, Homo sapien
gcgggggacagtgcccttgtagaat

SEQ ID NO: 325172 - DNA, 25 bp, Homo sapien
tgacaaacactatggccacatccag

SEQ ID NO: 325173 - DNA, 25 bp, Homo sapien
ttgttgagcagcttcaccacttcat

SEQ ID NO: 325174 - DNA, 25 bp, Homo sapien
ccacttcatcatagatgacaaacac

SEQ ID NO: 325175 - DNA, 25 bp, Homo sapien
ggcaatccccagatactgaagtgag

SEQ ID NO: 325176 - DNA, 25 bp, Homo sapien
ctgcacagggcaatccccagatact

SEQ ID NO: 325177 - DNA, 25 bp, Homo sapien
cagggcaatccccagatactgaagt

SEQ ID NO: 325178 - DNA, 25 bp, Homo sapien
gtgtccctgcacagggcaatcccca

SEQ ID NO: 325179 - DNA, 25 bp, Homo sapien
gcagtcccacgtgttccggtatttg

SEQ ID NO: 325180 - DNA, 25 bp, Homo sapien
atctgcaagccgcagtcccacgtgt

SEQ ID NO: 325181 - DNA, 25 bp, Homo sapien
tgttccggtatttgtgcgcctccag

SEQ ID NO: 325182 - DNA, 25 bp, Homo sapien
cttcttcaggatctgcaagccgcag

SEQ ID NO: 325183 - DNA, 25 bp, Homo sapien
ctcagcagctagctctggcctggtc

SEQ ID NO: 325184 - DNA, 25 bp, Homo sapien
gggctcagcagctagctctggcctg

SEQ ID NO: 325185 - DNA, 25 bp, Homo sapien
ctatgggggacatcagcaggcaggg

SEQ ID NO: 325186 - DNA, 25 bp, Homo sapien
ggcaggggctcagcagctagctctg

SEQ ID NO: 325187 - DNA, 25 bp, Homo sapien
tccgggtcttaatcacatccagagg

SEQ ID NO: 325188 - DNA, 25 bp, Homo sapien
tgcaatagctccgaagaccccagtg

SEQ ID NO: 325189 - DNA, 25 bp, Homo sapien
gacactggctgcgcctgcaatagct

SEQ ID NO: 325190 - DNA, 25 bp, Homo sapien
gaccccagtgatcagagggttcatg

SEQ ID NO: 325191 - DNA, 25 bp, Homo sapien
aggtcatgacgaagaagcggatggc

SEQ ID NO: 325192 - DNA, 25 bp, Homo sapien
tgaggccctggtacgtccccttcag

SEQ ID NO: 325193 - DNA, 25 bp, Homo sapien
accagttgcgcagggaggtcatgac

SEQ ID NO: 325194 - DNA, 25 bp, Homo sapien
tgtgaggccctggtacgtccccttc

SEQ ID NO: 325195 - DNA, 25 bp, Homo sapien
ggtccctgagccctatcaggaaggt

SEQ ID NO: 325196 - DNA, 25 bp, Homo sapien
ggcacggggttaccctgcagcctct

SEQ ID NO: 325197 - DNA, 25 bp, Homo sapien
ctctcaggccccggttgggaattgg

SEQ ID NO: 325198 - DNA, 25 bp, Homo sapien
ttgcacaaagcccaaggcaggatgg

SEQ ID NO: 325199 - DNA, 25 bp, Homo sapien
gtttggggaggtctggtcgtggatg

SEQ ID NO: 325200 - DNA, 25 bp, Homo sapien
agaatcctctgtacttggggtttgg

SEQ ID NO: 325201 - DNA, 25 bp, Homo sapien
ctaaccccgtggaagaatcctctgt

SEQ ID NO: 325202 - DNA, 25 bp, Homo sapien
cgcacaatctccctaaccccgtgga

SEQ ID NO: 325203 - DNA, 25 bp, Homo sapien
agcccacacggaccatgctctggga

SEQ ID NO: 325204 - DNA, 25 bp, Homo sapien
tgggctgcccacacggaccatgccc

SEQ ID NO: 325205 - DNA, 25 bp, Homo sapien
aagcagtgcagccaaggccgccctg

SEQ ID NO: 325206 - DNA, 25 bp, Homo sapien
gaagcaaaggcgcaggttctcggct

SEQ ID NO: 325207 - DNA, 25 bp, Homo sapien
catcccgcatgtggttgctgaggaa

SEQ ID NO: 325208 - DNA, 25 bp, Homo sapien
gctgaggaactcgaacattccaaac

SEQ ID NO: 325209 - DNA, 25 bp, Homo sapien
ctgggcatcccgcatgtggttgctg

SEQ ID NO: 325210 - DNA, 25 bp, Homo sapien
catgtggttgctgaggaactcgaac

SEQ ID NO: 325211 - DNA, 25 bp, Homo sapien
aggcgggtgagaggggctgccgcgg

SEQ ID NO: 325212 - DNA, 25 bp, Homo sapien
ggaggcgggtgagaggggctgccgc

SEQ ID NO: 325213 - DNA, 25 bp, Homo sapien
gaggcgggtgagaggggctgccgcg

SEQ ID NO: 325214 - DNA, 25 bp, Homo sapien
cgccatggctgcgaaccgtctgccg

SEQ ID NO: 325215 - DNA, 25 bp, Homo sapien
aaccgtagagcagggagctaaggcc

SEQ ID NO: 325216 - DNA, 25 bp, Homo sapien
ctgcgaaccgtctgccgcacgcagt

SEQ ID NO: 325217 - DNA, 25 bp, Homo sapien
ctaaggccgcggtacaggcccagga

SEQ ID NO: 325218 - DNA, 25 bp, Homo sapien
gtcaggaccccacggccctcggtgc

SEQ ID NO: 325219 - DNA, 25 bp, Homo sapien
aaggtgatgcagatctcgatgccac

SEQ ID NO: 325220 - DNA, 25 bp, Homo sapien
gaaggtgatgcagatctcgatgcca

SEQ ID NO: 325221 - DNA, 25 bp, Homo sapien
gtgatgcagatctcgatgccacccg

SEQ ID NO: 325222 - DNA, 25 bp, Homo sapien
gcgtcttcacgtactcggtggggaa

SEQ ID NO: 325223 - DNA, 25 bp, Homo sapien
cagtgccgcggggaacataggctgg

SEQ ID NO: 325224 - DNA, 25 bp, Homo sapien
cagggaccgggaacccgctcctgag

SEQ ID NO: 325225 - DNA, 25 bp, Homo sapien
ggacttcggtcggcgcggccgccgc

SEQ ID NO: 325226 - DNA, 25 bp, Homo sapien
ggaacataggctggggccccacgcc

SEQ ID NO: 325227 - DNA, 25 bp, Homo sapien
acgggaggcgggcgagtcccagcgc

SEQ ID NO: 325228 - DNA, 25 bp, Homo sapien
cccgttgtcccggcgaggcgcaggg

SEQ ID NO: 325229 - DNA, 25 bp, Homo sapien
tgacagacgggaggcgggcgagtcc

SEQ ID NO: 325230 - DNA, 25 bp, Homo sapien
cgggcgagtcccagcgcgccgggtg

SEQ ID NO: 325231 - DNA, 25 bp, Homo sapien
tggccttcccggacgcgggcgcggc

SEQ ID NO: 325232 - DNA, 25 bp, Homo sapien
tgccaggatcgccttccccgggtgc

SEQ ID NO: 325233 - DNA, 25 bp, Homo sapien
tccccgggtgcgtcagcttggcctt

SEQ ID NO: 325234 - DNA, 25 bp, Homo sapien
cttccccgggtgcgtcagcttggcc

SEQ ID NO: 325235 - DNA, 25 bp, Homo sapien
ccctgtggcggcttcgggtccgaga

SEQ ID NO: 325236 - DNA, 25 bp, Homo sapien
ggcgccctgtggcggcttcgggtcc

SEQ ID NO: 325237 - DNA, 25 bp, Homo sapien
cgccctgtggcggcttcgggtccga

SEQ ID NO: 325238 - DNA, 25 bp, Homo sapien
gggcgccctgtggcggcttcgggtc

SEQ ID NO: 325239 - DNA, 25 bp, Homo sapien
gaaagaccacaaatgcaagcggctg

SEQ ID NO: 325240 - DNA, 25 bp, Homo sapien
ctctaacgtttcaaacctggaggcg

SEQ ID NO: 325241 - DNA, 25 bp, Homo sapien
tccgagcagtgggtcaaggtgcact

SEQ ID NO: 325242 - DNA, 25 bp, Homo sapien
tagtttctgcgctcagcgaacaagg

SEQ ID NO: 325243 - DNA, 25 bp, Homo sapien
tgtagtcttcaaactggcctggagg

SEQ ID NO: 325244 - DNA, 25 bp, Homo sapien
taaatattgtccaggtgtccctgcc

SEQ ID NO: 325245 - DNA, 25 bp, Homo sapien
taaagctggtcttgcgccgtcagcc

SEQ ID NO: 325246 - DNA, 25 bp, Homo sapien
cagaggttgccgtcattgggtttca

SEQ ID NO: 325247 - DNA, 25 bp, Homo sapien
ctgcagagggggaagcccacaatga

SEQ ID NO: 325248 - DNA, 25 bp, Homo sapien
cccacaatgagcagagctcttcctg

SEQ ID NO: 325249 - DNA, 25 bp, Homo sapien
gggaagcccacaatgagcagagctc

SEQ ID NO: 325250 - DNA, 25 bp, Homo sapien
gaagcccacaatgagcagagctctt

SEQ ID NO: 325251 - DNA, 25 bp, Homo sapien
ctctccaaggcatccagtttgtcca

SEQ ID NO: 325252 - DNA, 25 bp, Homo sapien
cagactctccaaggcatccagtttg

SEQ ID NO: 325253 - DNA, 25 bp, Homo sapien
tctccaaggcatccagtttgtccac

SEQ ID NO: 325254 - DNA, 25 bp, Homo sapien
gactctccaaggcatccagtttgtc

SEQ ID NO: 325255 - DNA, 25 bp, Homo sapien
caagtactgtcacttcgatgaggca

SEQ ID NO: 325256 - DNA, 25 bp, Homo sapien
tcctctggatacagggacactgcca

SEQ ID NO: 325257 - DNA, 25 bp, Homo sapien
tggctaaagctagatcccagcaggg

SEQ ID NO: 325258 - DNA, 25 bp, Homo sapien
ccttgaatggactctgggatggcct

SEQ ID NO: 325259 - DNA, 25 bp, Homo sapien
ccatgtctgggcgaagcaggtcata

SEQ ID NO: 325260 - DNA, 25 bp, Homo sapien
gaagagacaagctgcgaagcactcc

SEQ ID NO: 325261 - DNA, 25 bp, Homo sapien
gatgaagtagggcatggccaagtcc

SEQ ID NO: 325262 - DNA, 25 bp, Homo sapien
aagtccacgaggttgtgcctccagg

SEQ ID NO: 325263 - DNA, 25 bp, Homo sapien
cagccaaggcaaatgcttgcttggg

SEQ ID NO: 325264 - DNA, 25 bp, Homo sapien
caaggcaaatgcttgcttgggcatc

SEQ ID NO: 325265 - DNA, 25 bp, Homo sapien
ctgcagccaaggcaaatgcttgctt

SEQ ID NO: 325266 - DNA, 25 bp, Homo sapien
gccaaggcaaatgcttgcttgggca

SEQ ID NO: 325267 - DNA, 25 bp, Homo sapien
tcaggtccatggagcgtgtgacacc

SEQ ID NO: 325268 - DNA, 25 bp, Homo sapien
caaggacttcctgcgctgtggagca

SEQ ID NO: 325269 - DNA, 25 bp, Homo sapien
cagatgtagtcacttgcccagggcc

SEQ ID NO: 325270 - DNA, 25 bp, Homo sapien
tattttctagctccacagcaggcac

SEQ ID NO: 325271 - DNA, 25 bp, Homo sapien
ctgtgctctccagggataccctgtg

SEQ ID NO: 325272 - DNA, 25 bp, Homo sapien
ctgcatgcctgccatcgcctgcagc

SEQ ID NO: 325273 - DNA, 25 bp, Homo sapien
gggataccctgtggcggtcccagct

SEQ ID NO: 325274 - DNA, 25 bp, Homo sapien
agctctgcatgcctgccatcgcctg

SEQ ID NO: 325275 - DNA, 25 bp, Homo sapien
tgaggacgcccagtgcccacatctg

SEQ ID NO: 325276 - DNA, 25 bp, Homo sapien
gcatgctgctcatcgatcgctgcct

SEQ ID NO: 325277 - DNA, 25 bp, Homo sapien
tgcatggacccgatgtgctgagctg

SEQ ID NO: 325278 - DNA, 25 bp, Homo sapien
gctgagctggctccggaaagaagtc

SEQ ID NO: 325279 - DNA, 25 bp, Homo sapien
tccacatgtgcctaaagtgggccct

SEQ ID NO: 325280 - DNA, 25 bp, Homo sapien
tgcctttgggtctccgctttgagga

SEQ ID NO: 325281 - DNA, 25 bp, Homo sapien
tccagtagaagcagcccccaggaag

SEQ ID NO: 325282 - DNA, 25 bp, Homo sapien
ctttgggtctccgctttgaggacct

SEQ ID NO: 325283 - DNA, 25 bp, Homo sapien
cctgactggacacgctgtgacctgg

SEQ ID NO: 325284 - DNA, 25 bp, Homo sapien
gccactctcagggaggcttcatcct

SEQ ID NO: 325285 - DNA, 25 bp, Homo sapien
gctagctggctttgccctgactgga

SEQ ID NO: 325286 - DNA, 25 bp, Homo sapien
gcagcccctgctcttcactggtggg

SEQ ID NO: 325287 - DNA, 25 bp, Homo sapien
caagggctaggatatgtcacagaac

SEQ ID NO: 325288 - DNA, 25 bp, Homo sapien
gaattggctcagctgcatcacacag

SEQ ID NO: 325289 - DNA, 25 bp, Homo sapien
gatgttcaggccaagcagaggatgt

SEQ ID NO: 325290 - DNA, 25 bp, Homo sapien
gatcacaagcactgtcaccaagggc

SEQ ID NO: 325291 - DNA, 25 bp, Homo sapien
taggtgccaagaagtgaatcttgcc

SEQ ID NO: 325292 - DNA, 25 bp, Homo sapien
tgataggaagtaaagtaggtgccaa

SEQ ID NO: 325293 - DNA, 25 bp, Homo sapien
gctgcgaaaagaatcaactccgtaa

SEQ ID NO: 325294 - DNA, 25 bp, Homo sapien
tggctggtaccacagatgtccatca

SEQ ID NO: 325295 - DNA, 25 bp, Homo sapien
agccaggtctcaggaacaagaggga

SEQ ID NO: 325296 - DNA, 25 bp, Homo sapien
caggtctcaggaacaagagggaagg

SEQ ID NO: 325297 - DNA, 25 bp, Homo sapien
gccaggtctcaggaacaagagggaa

SEQ ID NO: 325298 - DNA, 25 bp, Homo sapien
agagccaggtctcaggaacaagagg

SEQ ID NO: 325299 - DNA, 25 bp, Homo sapien
caaggcaggaaggtgggaggaaacg

SEQ ID NO: 325300 - DNA, 25 bp, Homo sapien
acagataggccgcaatgcacctgaa

SEQ ID NO: 325301 - DNA, 25 bp, Homo sapien
aggccgcaatgcacctgaactccat

SEQ ID NO: 325302 - DNA, 25 bp, Homo sapien
tctgggcccaccagttattgccctt

SEQ ID NO: 325303 - DNA, 25 bp, Homo sapien
tcttgcagagctccacgctctgggc

SEQ ID NO: 325304 - DNA, 25 bp, Homo sapien
gtcaaagttgtcataggcatcgata

SEQ ID NO: 325305 - DNA, 25 bp, Homo sapien
caaagttgtcataggcatcgataga

SEQ ID NO: 325306 - DNA, 25 bp, Homo sapien
taggcatcgatagatgcccttaagc

SEQ ID NO: 325307 - DNA, 25 bp, Homo sapien
gttgtcataggcatcgatagatgcc

SEQ ID NO: 325308 - DNA, 25 bp, Homo sapien
gacatgggctgcctacacatggagc

SEQ ID NO: 325309 - DNA, 25 bp, Homo sapien
cagcctttctgtgagggatgggaca

SEQ ID NO: 325310 - DNA, 25 bp, Homo sapien
caggcaccttgtgttacttgatggc

SEQ ID NO: 325311 - DNA, 25 bp, Homo sapien
catatatccactggtgtcctgtggg

SEQ ID NO: 325312 - DNA, 25 bp, Homo sapien
gctctggactgaccgcaggtaaggc

SEQ ID NO: 325313 - DNA, 25 bp, Homo sapien
actgaccgcaggtaaggcttcacca

SEQ ID NO: 325314 - DNA, 25 bp, Homo sapien
ttgttgtggctctggactgaccgca

SEQ ID NO: 325315 - DNA, 25 bp, Homo sapien
cacactcttgttgttgtggctctgg

SEQ ID NO: 325316 - DNA, 25 bp, Homo sapien
ccagcagcaggtcattgatgagcag

SEQ ID NO: 325317 - DNA, 25 bp, Homo sapien
aaactgactgtccaggtgtggtcca

SEQ ID NO: 325318 - DNA, 25 bp, Homo sapien
tccagccggggtgaaagcaccagca

SEQ ID NO: 325319 - DNA, 25 bp, Homo sapien
gcagtggtttgtaatccaaatagaa

SEQ ID NO: 325320 - DNA, 25 bp, Homo sapien
agggctctgtaacagagctcgacgt

SEQ ID NO: 325321 - DNA, 25 bp, Homo sapien
tctgtaacagagctcgacgttggca

SEQ ID NO: 325322 - DNA, 25 bp, Homo sapien
tgtaacagagctcgacgttggcaac

SEQ ID NO: 325323 - DNA, 25 bp, Homo sapien
ggctctgtaacagagctcgacgttg

SEQ ID NO: 325324 - DNA, 25 bp, Homo sapien
acagcattgtcatactcctcgtact

SEQ ID NO: 325325 - DNA, 25 bp, Homo sapien
cttgtcatagaggaacaccagctca

SEQ ID NO: 325326 - DNA, 25 bp, Homo sapien
cttggtaatgatgtccttgaactga

SEQ ID NO: 325327 - DNA, 25 bp, Homo sapien
gatgtccttgaactgaccctccttc

SEQ ID NO: 325328 - DNA, 25 bp, Homo sapien
gggccgcttccaacagcaagatcag

SEQ ID NO: 325329 - DNA, 25 bp, Homo sapien
cagcaagatcagctcctcaaagtag

SEQ ID NO: 325330 - DNA, 25 bp, Homo sapien
gggatgttgacacgggaccagaaaa

SEQ ID NO: 325331 - DNA, 25 bp, Homo sapien
gccagctcagtgaacatgcccatgt

SEQ ID NO: 325332 - DNA, 25 bp, Homo sapien
gcccctttatgaaactccatccagg

SEQ ID NO: 325333 - DNA, 25 bp, Homo sapien
ccgcccctttatgaaactccatcca

SEQ ID NO: 325334 - DNA, 25 bp, Homo sapien
ccctttatgaaactccatccaggca

SEQ ID NO: 325335 - DNA, 25 bp, Homo sapien
ttgaccgcccctttatgaaactcca

SEQ ID NO: 325336 - DNA, 25 bp, Homo sapien
gaagcggaactcttgtccatccatg

SEQ ID NO: 325337 - DNA, 25 bp, Homo sapien
tgaatgacgatgtgaagaccacaca

SEQ ID NO: 325338 - DNA, 25 bp, Homo sapien
agaccacacagctgtgcgaagcgga

SEQ ID NO: 325339 - DNA, 25 bp, Homo sapien
tcctccagctcatctgcatgaatga

SEQ ID NO: 325340 - DNA, 25 bp, Homo sapien
ctgatactcaccgaggtgaaccaag

SEQ ID NO: 325341 - DNA, 25 bp, Homo sapien
gttagaaacattgctatagagcagc

SEQ ID NO: 325342 - DNA, 25 bp, Homo sapien
tactcaccgaggtgaaccaaggtgg

SEQ ID NO: 325343 - DNA, 25 bp, Homo sapien
gccaggcgggcaaagttagaaacat

SEQ ID NO: 325344 - DNA, 25 bp, Homo sapien
aacatcttatctacatggcggactc

SEQ ID NO: 325345 - DNA, 25 bp, Homo sapien
aaattgcatgcgttcctccaagaag

SEQ ID NO: 325346 - DNA, 25 bp, Homo sapien
tctgcatcacattttccaagggtaa

SEQ ID NO: 325347 - DNA, 25 bp, Homo sapien
tgcccaaacgattctcgcacttcgg

SEQ ID NO: 325348 - DNA, 25 bp, Homo sapien
tattctgatgtgtatagccaagagc

SEQ ID NO: 325349 - DNA, 25 bp, Homo sapien
taaacagaacgcctggatgtaagtc

SEQ ID NO: 325350 - DNA, 25 bp, Homo sapien
tgtaagtcttcacatctcttctagg

SEQ ID NO: 325351 - DNA, 25 bp, Homo sapien
ttccatgggtctcaatttccatacc

SEQ ID NO: 325352 - DNA, 25 bp, Homo sapien
gtggcttgcttctcatgatctttat

SEQ ID NO: 325353 - DNA, 25 bp, Homo sapien
gcttgcttctcatgatctttatctg

SEQ ID NO: 325354 - DNA, 25 bp, Homo sapien
tggcttgcttctcatgatctttatc

SEQ ID NO: 325355 - DNA, 25 bp, Homo sapien
cttgcttctcatgatctttatctgc

SEQ ID NO: 325356 - DNA, 25 bp, Homo sapien
tgccacggaccgctgctggtctgtg

SEQ ID NO: 325357 - DNA, 25 bp, Homo sapien
ccccatgccacggaccgctgctggt

SEQ ID NO: 325358 - DNA, 25 bp, Homo sapien
acccccatgccacggaccgctgctg

SEQ ID NO: 325359 - DNA, 25 bp, Homo sapien
aacccccatgccacggaccgctgct

SEQ ID NO: 325360 - DNA, 25 bp, Homo sapien
cagaaatttaactagatcctcccag

SEQ ID NO: 325361 - DNA, 25 bp, Homo sapien
aacacggctggttttagccaaggca

SEQ ID NO: 325362 - DNA, 25 bp, Homo sapien
gatgtgggcattgttgggtccatta

SEQ ID NO: 325363 - DNA, 25 bp, Homo sapien
tatataggactcacggccctttttc

SEQ ID NO: 325364 - DNA, 25 bp, Homo sapien
tgtctcactgggaactcagactcca

SEQ ID NO: 325365 - DNA, 25 bp, Homo sapien
gctcactaagcagatccatagctca

SEQ ID NO: 325366 - DNA, 25 bp, Homo sapien
acatcagagaggtcggtgccacaat

SEQ ID NO: 325367 - DNA, 25 bp, Homo sapien
ccagataacgtctaggaggtcttga

SEQ ID NO: 325368 - DNA, 25 bp, Homo sapien
agatgtgccctctgatatctctgga

SEQ ID NO: 325369 - DNA, 25 bp, Homo sapien
tcagactcttgtgggaaactttcat

SEQ ID NO: 325370 - DNA, 25 bp, Homo sapien
tctggatacatcatacgtagagatt

SEQ ID NO: 325371 - DNA, 25 bp, Homo sapien
ttgcatcagtgagatgcagagccct

SEQ ID NO: 325372 - DNA, 25 bp, Homo sapien
caggctcattgcatctctccgcaaa

SEQ ID NO: 325373 - DNA, 25 bp, Homo sapien
gactgaacaacttccaggtaagagg

SEQ ID NO: 325374 - DNA, 25 bp, Homo sapien
gaggaagggtcgtcccctctgatat

SEQ ID NO: 325375 - DNA, 25 bp, Homo sapien
caggtttccaatgtgctcgatcagg

SEQ ID NO: 325376 - DNA, 25 bp, Homo sapien
ccagtgcgtcatagttgtccaggcg

SEQ ID NO: 325377 - DNA, 25 bp, Homo sapien
tcatacagtgcgctgctgacagcga

SEQ ID NO: 325378 - DNA, 25 bp, Homo sapien
tgtccaggcggctgatgtactccat

SEQ ID NO: 325379 - DNA, 25 bp, Homo sapien
catgacccgtgtgcggtctgccttg

SEQ ID NO: 325380 - DNA, 25 bp, Homo sapien
aaaataccaatataccaagtgctgc

SEQ ID NO: 325381 - DNA, 25 bp, Homo sapien
tctacggatggtaactgagcacata

SEQ ID NO: 325382 - DNA, 25 bp, Homo sapien
tgctaaagatgaagagtgactggaa

SEQ ID NO: 325383 - DNA, 25 bp, Homo sapien
agccactagggcaatgcaaattgaa

SEQ ID NO: 325384 - DNA, 25 bp, Homo sapien
caatcagttcattaggcaggtcggc

SEQ ID NO: 325385 - DNA, 25 bp, Homo sapien
gacagtgaccgaaatctcttcagga

SEQ ID NO: 325386 - DNA, 25 bp, Homo sapien
tgctcgctgaagacagagttatcca

SEQ ID NO: 325387 - DNA, 25 bp, Homo sapien
gcaggtcggctgtcataaaggcttt

SEQ ID NO: 325388 - DNA, 25 bp, Homo sapien
tcctcaaggacgtgagcccagagct

SEQ ID NO: 325389 - DNA, 25 bp, Homo sapien
gcgggcctcgcttttgaacagagaa

SEQ ID NO: 325390 - DNA, 25 bp, Homo sapien
ttctgcataccaggtagcgggcctc

SEQ ID NO: 325391 - DNA, 25 bp, Homo sapien
tcaattagctgtctcctggatgggt

SEQ ID NO: 325392 - DNA, 25 bp, Homo sapien
ttagccagtgcattgtgagtggcag

SEQ ID NO: 325393 - DNA, 25 bp, Homo sapien
ctgttgttgctgtcgatgtagattt

SEQ ID NO: 325394 - DNA, 25 bp, Homo sapien
ggcccaccacgctgctgtcatagta

SEQ ID NO: 325395 - DNA, 25 bp, Homo sapien
gggtctcgcttctcacagtagcggc

SEQ ID NO: 325396 - DNA, 25 bp, Homo sapien
cctcagaacaatccacatcaagcag

SEQ ID NO: 325397 - DNA, 25 bp, Homo sapien
taagtgtttaatcacttcctcagaa

SEQ ID NO: 325398 - DNA, 25 bp, Homo sapien
acttcctcagaacaatccacatcaa

SEQ ID NO: 325399 - DNA, 25 bp, Homo sapien
agaacaatccacatcaagcagccct

SEQ ID NO: 325400 - DNA, 25 bp, Homo sapien
tgtacctctgcaggttgttgcggta

SEQ ID NO: 325401 - DNA, 25 bp, Homo sapien
ttctgcacgtagatctcaatgtacc

SEQ ID NO: 325402 - DNA, 25 bp, Homo sapien
tgcggtataaatataggacaaggtc

SEQ ID NO: 325403 - DNA, 25 bp, Homo sapien
gccaaaacgatcacacacgatgatg

SEQ ID NO: 325404 - DNA, 25 bp, Homo sapien
gctgaagttcacgattgagcccagg

SEQ ID NO: 325405 - DNA, 25 bp, Homo sapien
cttacaggcagcctgaatgtatttc

SEQ ID NO: 325406 - DNA, 25 bp, Homo sapien
cttgatctgccctgtcttacaggca

SEQ ID NO: 325407 - DNA, 25 bp, Homo sapien
tgctctctcggcatatcctctccac

SEQ ID NO: 325408 - DNA, 25 bp, Homo sapien
caccgataaggagccaaagaaattg

SEQ ID NO: 325409 - DNA, 25 bp, Homo sapien
gcatgcagacactccacagaatcct

SEQ ID NO: 325410 - DNA, 25 bp, Homo sapien
ccagctgctcgtggtacttagaggc

SEQ ID NO: 325411 - DNA, 25 bp, Homo sapien
agctgaaggttctgtctgatgttag

SEQ ID NO: 325412 - DNA, 25 bp, Homo sapien
gccctcttgatgtcatagaggtcgg

SEQ ID NO: 325413 - DNA, 25 bp, Homo sapien
tcggtgtagtgctccagtgcttgct

SEQ ID NO: 325414 - DNA, 25 bp, Homo sapien
aatgtgggcccggtcgtaatgagta

SEQ ID NO: 325415 - DNA, 25 bp, Homo sapien
tgggcccggtcgtaatgagtaaaca

SEQ ID NO: 325416 - DNA, 25 bp, Homo sapien
taatagagacagattagaatggcag

SEQ ID NO: 325417 - DNA, 25 bp, Homo sapien
gaattactgtaggacatgatccagc

SEQ ID NO: 325418 - DNA, 25 bp, Homo sapien
agaaattggaacagctgagcattgc

SEQ ID NO: 325419 - DNA, 25 bp, Homo sapien
gtcatatatacacatggtggactat

SEQ ID NO: 325420 - DNA, 25 bp, Homo sapien
ggcgattattcttcaaggcatccaa

SEQ ID NO: 325421 - DNA, 25 bp, Homo sapien
ccaataagaaggaagtacactgctg

SEQ ID NO: 325422 - DNA, 25 bp, Homo sapien
caataagaaggaagtacactgctga

SEQ ID NO: 325423 - DNA, 25 bp, Homo sapien
caggagtccctcagctgggcgatta

SEQ ID NO: 325424 - DNA, 25 bp, Homo sapien
ggactgatcttcattacacccctca

SEQ ID NO: 325425 - DNA, 25 bp, Homo sapien
cattacacccctcagcagaaagatc

SEQ ID NO: 325426 - DNA, 25 bp, Homo sapien
tgcaggccctgttccggactgatct

SEQ ID NO: 325427 - DNA, 25 bp, Homo sapien
tcctcgtcctgcactagcattcgag

SEQ ID NO: 325428 - DNA, 25 bp, Homo sapien
ttttggcatagagcacaattttctg

SEQ ID NO: 325429 - DNA, 25 bp, Homo sapien
actttgcttggcacatttgcccgaa

SEQ ID NO: 325430 - DNA, 25 bp, Homo sapien
cttggcacatttgcccgaaggtaca

SEQ ID NO: 325431 - DNA, 25 bp, Homo sapien
tttgcttggcacatttgcccgaagg

SEQ ID NO: 325432 - DNA, 25 bp, Homo sapien
gttttgaccaagtctccgagctcct

SEQ ID NO: 325433 - DNA, 25 bp, Homo sapien
ttgaccaagtctccgagctcctctg

SEQ ID NO: 325434 - DNA, 25 bp, Homo sapien
gaccaagtctccgagctcctctgag

SEQ ID NO: 325435 - DNA, 25 bp, Homo sapien
tggttttgaccaagtctccgagctc

SEQ ID NO: 325436 - DNA, 25 bp, Homo sapien
tggaccgtctctctggtacgcagga

SEQ ID NO: 325437 - DNA, 25 bp, Homo sapien
gattccgaagtactgcagcaatgga

SEQ ID NO: 325438 - DNA, 25 bp, Homo sapien
agtttattgagctgaccctggtcga

SEQ ID NO: 325439 - DNA, 25 bp, Homo sapien
tacgcccctgctgaagaaccagatg

SEQ ID NO: 325440 - DNA, 25 bp, Homo sapien
gaagcacgttggttgcataattcac

SEQ ID NO: 325441 - DNA, 25 bp, Homo sapien
tgcagacgctgcaactttggcggct

SEQ ID NO: 325442 - DNA, 25 bp, Homo sapien
acggccaaacgcagaccaaggtctg

SEQ ID NO: 325443 - DNA, 25 bp, Homo sapien
cagccaggttactacgaacggccaa

SEQ ID NO: 325444 - DNA, 25 bp, Homo sapien
tcctgtgttaggaatggtgctgtct

SEQ ID NO: 325445 - DNA, 25 bp, Homo sapien
ttaaacgccagtccctaatgaatgg

SEQ ID NO: 325446 - DNA, 25 bp, Homo sapien
tgttctatacgcaggaaggagctgc

SEQ ID NO: 325447 - DNA, 25 bp, Homo sapien
ccccagttagggtgtgcatggtata

SEQ ID NO: 325448 - DNA, 25 bp, Homo sapien
ttgttgacaccaataattccagagg

SEQ ID NO: 325449 - DNA, 25 bp, Homo sapien
tgcacacgccagactctaggtcgta

SEQ ID NO: 325450 - DNA, 25 bp, Homo sapien
tacggttcatgcagatgcacacgcc

SEQ ID NO: 325451 - DNA, 25 bp, Homo sapien
taggtcgtacagatgaagatagcca

SEQ ID NO: 325452 - DNA, 25 bp, Homo sapien
ttttctgactctgtgcctttgacac

SEQ ID NO: 325453 - DNA, 25 bp, Homo sapien
tatctacagaggaatgttttctgac

SEQ ID NO: 325454 - DNA, 25 bp, Homo sapien
atgttttctgactctgtgcctttga

SEQ ID NO: 325455 - DNA, 25 bp, Homo sapien
ttatctacagaggaatgttttctga

SEQ ID NO: 325456 - DNA, 25 bp, Homo sapien
tctgttttagggaacctcacaagaa

SEQ ID NO: 325457 - DNA, 25 bp, Homo sapien
tttagggaacctcacaagaacttca

SEQ ID NO: 325458 - DNA, 25 bp, Homo sapien
cctcacaagaacttcaggtctcata

SEQ ID NO: 325459 - DNA, 25 bp, Homo sapien
tgtttctgttttagggaacctcaca

SEQ ID NO: 325460 - DNA, 25 bp, Homo sapien
acatgccacatgcaggttcaggtgt

SEQ ID NO: 325461 - DNA, 25 bp, Homo sapien
cacatgcaggttcaggtgttttccc

SEQ ID NO: 325462 - DNA, 25 bp, Homo sapien
tgccacatgcaggttcaggtgtttt

SEQ ID NO: 325463 - DNA, 25 bp, Homo sapien
acatgcaggttcaggtgttttccca

SEQ ID NO: 325464 - DNA, 25 bp, Homo sapien
aaggtgaataattctcccaccaggg

SEQ ID NO: 325465 - DNA, 25 bp, Homo sapien
ggcttgggactacctagtttcacta

SEQ ID NO: 325466 - DNA, 25 bp, Homo sapien
cttgatgtaaaggtgaataattctc

SEQ ID NO: 325467 - DNA, 25 bp, Homo sapien
gcttgggactacctagtttcactag

SEQ ID NO: 325468 - DNA, 25 bp, Homo sapien
aaaggttggtttcccgctgcaggct

SEQ ID NO: 325469 - DNA, 25 bp, Homo sapien
tacaaaaggttggtttcccgctgca

SEQ ID NO: 325470 - DNA, 25 bp, Homo sapien
caaaaggttggtttcccgctgcagg

SEQ ID NO: 325471 - DNA, 25 bp, Homo sapien
aggttggtttcccgctgcaggctgt

SEQ ID NO: 325472 - DNA, 25 bp, Homo sapien
ggctgcctcacttacctttagagtg

SEQ ID NO: 325473 - DNA, 25 bp, Homo sapien
acctggctgcctcacttacctttag

SEQ ID NO: 325474 - DNA, 25 bp, Homo sapien
cttacctttagagtgcatttcagtc

SEQ ID NO: 325475 - DNA, 25 bp, Homo sapien
gtgcatttcagtctagtctgtgtgg

SEQ ID NO: 325476 - DNA, 25 bp, Homo sapien
cctgtgggattacgtacagcaaagc

SEQ ID NO: 325477 - DNA, 25 bp, Homo sapien
gaaaccttcctatccacagagtaga

SEQ ID NO: 325478 - DNA, 25 bp, Homo sapien
tgaactctgcaaaagccgcagcatg

SEQ ID NO: 325479 - DNA, 25 bp, Homo sapien
catggccttctatgggttgtgaaac

SEQ ID NO: 325480 - DNA, 25 bp, Homo sapien
ctggcagcccaccagactggtatgt

SEQ ID NO: 325481 - DNA, 25 bp, Homo sapien
ccatgctccagtggtagaccgcggt

SEQ ID NO: 325482 - DNA, 25 bp, Homo sapien
tctggtactcatcagtccggtagtg

SEQ ID NO: 325483 - DNA, 25 bp, Homo sapien
tctcggtcaccaaggcaacagtgtt

SEQ ID NO: 325484 - DNA, 25 bp, Homo sapien
gaaacatgcacagtgctgttgtgcg

SEQ ID NO: 325485 - DNA, 25 bp, Homo sapien
cattttcttcctctcggtgtgtctg

SEQ ID NO: 325486 - DNA, 25 bp, Homo sapien
tgttgtgcgttcctagtcgcatgaa

SEQ ID NO: 325487 - DNA, 25 bp, Homo sapien
tgtcgtcggatgaccggaagcacca

SEQ ID NO: 325488 - DNA, 25 bp, Homo sapien
gattcctttctaacaatcccatcgg

SEQ ID NO: 325489 - DNA, 25 bp, Homo sapien
taaaatgaggtaagattcctttcta

SEQ ID NO: 325490 - DNA, 25 bp, Homo sapien
attcctttctaacaatcccatcggg

SEQ ID NO: 325491 - DNA, 25 bp, Homo sapien
agcagttaaaatgaggtaagattcc

SEQ ID NO: 325492 - DNA, 25 bp, Homo sapien
gatcggagccattgggtcactcatg

SEQ ID NO: 325493 - DNA, 25 bp, Homo sapien
tggattcatgatggcactctctgca

SEQ ID NO: 325494 - DNA, 25 bp, Homo sapien
cagtgtgctgaatccaatgttagct

SEQ ID NO: 325495 - DNA, 25 bp, Homo sapien
caatgatcgtgacctgtgcctgctc

SEQ ID NO: 325496 - DNA, 25 bp, Homo sapien
agcgaacagggaggatctgcgccat

SEQ ID NO: 325497 - DNA, 25 bp, Homo sapien
aagtgctcctgaaagcgaacaggga

SEQ ID NO: 325498 - DNA, 25 bp, Homo sapien
ctgaaagcgaacagggaggatctgc

SEQ ID NO: 325499 - DNA, 25 bp, Homo sapien
ctcctgaaagcgaacagggaggatc

SEQ ID NO: 325500 - DNA, 25 bp, Homo sapien
ggctggtgcgggacctcggcggcgg

SEQ ID NO: 325501 - DNA, 25 bp, Homo sapien
cggcggcggcggcagcggcaggaat

SEQ ID NO: 325502 - DNA, 25 bp, Homo sapien
ctggtgcgggacctcggcggcggcg

SEQ ID NO: 325503 - DNA, 25 bp, Homo sapien
ggcggcggcggcggcagcggcagga

SEQ ID NO: 325504 - DNA, 25 bp, Homo sapien
gagagagaaagtgcatcagttattt

SEQ ID NO: 325505 - DNA, 25 bp, Homo sapien
tataaacaatagttaacaggaagta

SEQ ID NO: 325506 - DNA, 25 bp, Homo sapien
ggacacaaaccttcaaaccacagaa

SEQ ID NO: 325507 - DNA, 25 bp, Homo sapien
gcgcctggcccgggattaagtttca

SEQ ID NO: 325508 - DNA, 25 bp, Homo sapien
ccataagacccagtagttgccctct

SEQ ID NO: 325509 - DNA, 25 bp, Homo sapien
ttgaaactagccctgatgtcctgag

SEQ ID NO: 325510 - DNA, 25 bp, Homo sapien
gaatggttaaatcaacagtgcagca

SEQ ID NO: 325511 - DNA, 25 bp, Homo sapien
gctggtgagcatgtggaaaaacttg

SEQ ID NO: 325512 - DNA, 25 bp, Homo sapien
ttaagagtcccacttgcagcctggc

SEQ ID NO: 325513 - DNA, 25 bp, Homo sapien
gcatagttgctaagggagctgcctc

SEQ ID NO: 325514 - DNA, 25 bp, Homo sapien
gagatcagtggtcagttaccccggc

SEQ ID NO: 325515 - DNA, 25 bp, Homo sapien
tgagatgacgtgtgcaaggtgacct

SEQ ID NO: 325516 - DNA, 25 bp, Homo sapien
tcatcagcggcgagagtgtggccct

SEQ ID NO: 325517 - DNA, 25 bp, Homo sapien
gctgtaatacctaacgcttccggat

SEQ ID NO: 325518 - DNA, 25 bp, Homo sapien
caaatggctcaatcgtcactgctga

SEQ ID NO: 325519 - DNA, 25 bp, Homo sapien
tacataggtcttaggtcagtctgct

SEQ ID NO: 325520 - DNA, 25 bp, Homo sapien
tgtccctcaggatgtcgagctgttc

SEQ ID NO: 325521 - DNA, 25 bp, Homo sapien
gagctgttcctgacactcggtgaag

SEQ ID NO: 325522 - DNA, 25 bp, Homo sapien
gaggttctgcccgatgactggtagc

SEQ ID NO: 325523 - DNA, 25 bp, Homo sapien
cactcggtgaagaggcgctggaatc

SEQ ID NO: 325524 - DNA, 25 bp, Homo sapien
gaggatgttcggatgctgaccaaac

SEQ ID NO: 325525 - DNA, 25 bp, Homo sapien
gcagtacggctgctccaaagggaaa

SEQ ID NO: 325526 - DNA, 25 bp, Homo sapien
caaatgaggtgccagtatcccctga

SEQ ID NO: 325527 - DNA, 25 bp, Homo sapien
gaatggctgctgttggcgaccaagt

SEQ ID NO: 325528 - DNA, 25 bp, Homo sapien
ttcatgggtatacttggatggtgtc

SEQ ID NO: 325529 - DNA, 25 bp, Homo sapien
tgtctggtaagtctcttagactctg

SEQ ID NO: 325530 - DNA, 25 bp, Homo sapien
tagaactcccattatggattcatgg

SEQ ID NO: 325531 - DNA, 25 bp, Homo sapien
tacccttttgtctattcgagtctgc

SEQ ID NO: 325532 - DNA, 25 bp, Homo sapien
gtcttcaagtattatatcactttgc

SEQ ID NO: 325533 - DNA, 25 bp, Homo sapien
tgctctagggcatataacatacagt

SEQ ID NO: 325534 - DNA, 25 bp, Homo sapien
tatactttcatatccccactcctgg

SEQ ID NO: 325535 - DNA, 25 bp, Homo sapien
cagtatatgcctttacttatcatag

SEQ ID NO: 325536 - DNA, 25 bp, Homo sapien
aactctggtgctctctcaaaagtgc

SEQ ID NO: 325537 - DNA, 25 bp, Homo sapien
gctggaggccaattaactcaggaca

SEQ ID NO: 325538 - DNA, 25 bp, Homo sapien
gaagaggaccttgaaccctaggtga

SEQ ID NO: 325539 - DNA, 25 bp, Homo sapien
ccaggaagaccgaaagaaatcacag

SEQ ID NO: 325540 - DNA, 25 bp, Homo sapien
ctctttcaggatgcgatgtatagct

SEQ ID NO: 325541 - DNA, 25 bp, Homo sapien
ttcaggatgcgatgtatagctcttt

SEQ ID NO: 325542 - DNA, 25 bp, Homo sapien
tttcaggatgcgatgtatagctctt

SEQ ID NO: 325543 - DNA, 25 bp, Homo sapien
ctttcaggatgcgatgtatagctct

SEQ ID NO: 325544 - DNA, 25 bp, Homo sapien
tgccaagaagaaaacgctagctcct

SEQ ID NO: 325545 - DNA, 25 bp, Homo sapien
gaaagcagatccatgaatgcaggga

SEQ ID NO: 325546 - DNA, 25 bp, Homo sapien
gggaggtgccccatcagtaattgct

SEQ ID NO: 325547 - DNA, 25 bp, Homo sapien
tatgcctataacatgcctggccagg

SEQ ID NO: 325548 - DNA, 25 bp, Homo sapien
tggcttccagtggagtagtgaaccg

SEQ ID NO: 325549 - DNA, 25 bp, Homo sapien
gaaccggacccagtaagtccttgca

SEQ ID NO: 325550 - DNA, 25 bp, Homo sapien
tatttctcgaagtcggtattcaaac

SEQ ID NO: 325551 - DNA, 25 bp, Homo sapien
cagtaagtccttgcatatttctcga

SEQ ID NO: 325552 - DNA, 25 bp, Homo sapien
ctgtctttgagaagatgcgctggca

SEQ ID NO: 325553 - DNA, 25 bp, Homo sapien
gttctgtgataaactccttaaggtg

SEQ ID NO: 325554 - DNA, 25 bp, Homo sapien
aggaaaaacgagatatggccagttc

SEQ ID NO: 325555 - DNA, 25 bp, Homo sapien
gatatgggaaattgtgggctggtga

SEQ ID NO: 325556 - DNA, 25 bp, Homo sapien
atggcaaccacatagacctggtggg

SEQ ID NO: 325557 - DNA, 25 bp, Homo sapien
gacctggtgggaagagtaaacatca

SEQ ID NO: 325558 - DNA, 25 bp, Homo sapien
catagacctggtgggaagagtaaac

SEQ ID NO: 325559 - DNA, 25 bp, Homo sapien
caaccacatagacctggtgggaaga

SEQ ID NO: 325560 - DNA, 25 bp, Homo sapien
ccaatggcggtactcgtggctggac

SEQ ID NO: 325561 - DNA, 25 bp, Homo sapien
ccacatgaggcacggagaagagccg

SEQ ID NO: 325562 - DNA, 25 bp, Homo sapien
tcgtttacgaggtaccgtgcgtaga

SEQ ID NO: 325563 - DNA, 25 bp, Homo sapien
gctgccacctggttctctaggtagg

SEQ ID NO: 325564 - DNA, 25 bp, Homo sapien
tatggctaacggtcctgagcacagc

SEQ ID NO: 325565 - DNA, 25 bp, Homo sapien
tgctcctaaagtctgcacactgagc

SEQ ID NO: 325566 - DNA, 25 bp, Homo sapien
aggtgcggccctggattatggctaa

SEQ ID NO: 325567 - DNA, 25 bp, Homo sapien
ggtcctgagcacagcatggcgtcct

SEQ ID NO: 325568 - DNA, 25 bp, Homo sapien
gaaaagtacagaccatcatgcctgg

SEQ ID NO: 325569 - DNA, 25 bp, Homo sapien
cctgagtggacagaggaaaagtaca

SEQ ID NO: 325570 - DNA, 25 bp, Homo sapien
tggctggaacacaacgtacataatt

SEQ ID NO: 325571 - DNA, 25 bp, Homo sapien
taattcacgtgtctgggttaagagc

SEQ ID NO: 325572 - DNA, 25 bp, Homo sapien
cagcaagatctgtgataccgtcata

SEQ ID NO: 325573 - DNA, 25 bp, Homo sapien
aagtgacggattaaagcagtacgcc

SEQ ID NO: 325574 - DNA, 25 bp, Homo sapien
agtacgccttcccatcggacaggtt

SEQ ID NO: 325575 - DNA, 25 bp, Homo sapien
tactgggattccatgctgcgtcagc

SEQ ID NO: 325576 - DNA, 25 bp, Homo sapien
cagacatgaacttgggcccccaaaa

SEQ ID NO: 325577 - DNA, 25 bp, Homo sapien
ccccaaaagagtagggacagcctgt

SEQ ID NO: 325578 - DNA, 25 bp, Homo sapien
tggctctctgagcggggcccttctg

SEQ ID NO: 325579 - DNA, 25 bp, Homo sapien
ttctgcagcatcagacatgaacttg

SEQ ID NO: 325580 - DNA, 25 bp, Homo sapien
ctttcaccacaaccacctgtctgtg

SEQ ID NO: 325581 - DNA, 25 bp, Homo sapien
ttcaccacaaccacctgtctgtgaa

SEQ ID NO: 325582 - DNA, 25 bp, Homo sapien
accacaaccacctgtctgtgaacat

SEQ ID NO: 325583 - DNA, 25 bp, Homo sapien
caccacaaccacctgtctgtgaaca

SEQ ID NO: 325584 - DNA, 25 bp, Homo sapien
gacgtaggagcctgtgcaatgcaaa

SEQ ID NO: 325585 - DNA, 25 bp, Homo sapien
gcatccttttttcacaggcgacaca

SEQ ID NO: 325586 - DNA, 25 bp, Homo sapien
ctgcagcggtgagcgccatgacgta

SEQ ID NO: 325587 - DNA, 25 bp, Homo sapien
atgggagagaggagacggcgaccac

SEQ ID NO: 325588 - DNA, 25 bp, Homo sapien
tgtacatggaaggatcggagctgac

SEQ ID NO: 325589 - DNA, 25 bp, Homo sapien
gcacttcaggcggctcagcttcacg

SEQ ID NO: 325590 - DNA, 25 bp, Homo sapien
cctcaatgtacatggaaggatcgga

SEQ ID NO: 325591 - DNA, 25 bp, Homo sapien
aggatccggctggtgagtaccgtct

SEQ ID NO: 325592 - DNA, 25 bp, Homo sapien
ggcctccttctctgcggttagggca

SEQ ID NO: 325593 - DNA, 25 bp, Homo sapien
tggcagcttcagtgcaagtgctggt

SEQ ID NO: 325594 - DNA, 25 bp, Homo sapien
agtgcaagtgctggtgcagacagac

SEQ ID NO: 325595 - DNA, 25 bp, Homo sapien
cttctctgcggttagggcagctgga

SEQ ID NO: 325596 - DNA, 25 bp, Homo sapien
caagctcaagttttcgcttggacag

SEQ ID NO: 325597 - DNA, 25 bp, Homo sapien
tgaggaagccttagccaaagggact

SEQ ID NO: 325598 - DNA, 25 bp, Homo sapien
gacacaggcatgagacgagagtcct

SEQ ID NO: 325599 - DNA, 25 bp, Homo sapien
gggactttctcatcgctgtcactgc

SEQ ID NO: 325600 - DNA, 25 bp, Homo sapien
gctaggaagtgccagtcaggttgca

SEQ ID NO: 325601 - DNA, 25 bp, Homo sapien
cacctgaggctcttggctaggaagt

SEQ ID NO: 325602 - DNA, 25 bp, Homo sapien
gctgacatgtgctgctcaccgtgag

SEQ ID NO: 325603 - DNA, 25 bp, Homo sapien
caagatacggctttacaggcctaag

SEQ ID NO: 325604 - DNA, 25 bp, Homo sapien
tcagggtcctgcagctaccacctac

SEQ ID NO: 325605 - DNA, 25 bp, Homo sapien
ttcagggtcctgcagctaccaccta

SEQ ID NO: 325606 - DNA, 25 bp, Homo sapien
tgcctggtccttcagggtcctgcag

SEQ ID NO: 325607 - DNA, 25 bp, Homo sapien
tgcaccctgcctggtccttcagggt

SEQ ID NO: 325608 - DNA, 25 bp, Homo sapien
tttccacagctgtcggagtcatgct

SEQ ID NO: 325609 - DNA, 25 bp, Homo sapien
tctgtgaaccgggagtcaaacgctt

SEQ ID NO: 325610 - DNA, 25 bp, Homo sapien
tttcatgggttcgatcttggacggg

SEQ ID NO: 325611 - DNA, 25 bp, Homo sapien
tgtggctttggaccgctctgtgaac

SEQ ID NO: 325612 - DNA, 25 bp, Homo sapien
aataaaattctctgtcctcaaaact

SEQ ID NO: 325613 - DNA, 25 bp, Homo sapien
attctctgtcctcaaaactatgtgc

SEQ ID NO: 325614 - DNA, 25 bp, Homo sapien
ggaacaagccttggcacccactaac

SEQ ID NO: 325615 - DNA, 25 bp, Homo sapien
atgtgcaaacctgaactttccccag

SEQ ID NO: 325616 - DNA, 25 bp, Homo sapien
agtagctgtggactgctatgagaag

SEQ ID NO: 325617 - DNA, 25 bp, Homo sapien
ctctgtgcaaggcttcgaggcgccg

SEQ ID NO: 325618 - DNA, 25 bp, Homo sapien
tattgacagaatcgcctgcaggtct

SEQ ID NO: 325619 - DNA, 25 bp, Homo sapien
tgctgttaaagaatgccgtggagaa

SEQ ID NO: 325620 - DNA, 25 bp, Homo sapien
ttaaagccacttaatatactatatt

SEQ ID NO: 325621 - DNA, 25 bp, Homo sapien
tttctaggtccaaaggcagtatgtt

SEQ ID NO: 325622 - DNA, 25 bp, Homo sapien
tcagccttgaaagtcaggtgccaca

SEQ ID NO: 325623 - DNA, 25 bp, Homo sapien
ccacatccagtactttatacattca

SEQ ID NO: 325624 - DNA, 25 bp, Homo sapien
ctaaagcagttggtgtaggacactc

SEQ ID NO: 325625 - DNA, 25 bp, Homo sapien
gacactcttagaacacacattggct

SEQ ID NO: 325626 - DNA, 25 bp, Homo sapien
tctactgagggaccacaagactgtc

SEQ ID NO: 325627 - DNA, 25 bp, Homo sapien
gcatgccactagatgggtgtgccat

SEQ ID NO: 325628 - DNA, 25 bp, Homo sapien
gattcaggtgtgcacaagggctcca

SEQ ID NO: 325629 - DNA, 25 bp, Homo sapien
caacagcaagtggtgaatgagtctc

SEQ ID NO: 325630 - DNA, 25 bp, Homo sapien
taccagtcaggttgtgaaggacccg

SEQ ID NO: 325631 - DNA, 25 bp, Homo sapien
tcagatagcaaacacctcagaggac

SEQ ID NO: 325632 - DNA, 25 bp, Homo sapien
gctgtccgagtctcaacttgtttct

SEQ ID NO: 325633 - DNA, 25 bp, Homo sapien
gaggcgtgattcttctccggccatc

SEQ ID NO: 325634 - DNA, 25 bp, Homo sapien
gtccgagtctcaacttgtttcttca

SEQ ID NO: 325635 - DNA, 25 bp, Homo sapien
tccagctgtgctatgcagagaggcg

SEQ ID NO: 325636 - DNA, 25 bp, Homo sapien
ggcaaagcagagttacataaatgaa

SEQ ID NO: 325637 - DNA, 25 bp, Homo sapien
tggcaaagcagagttacataaatga

SEQ ID NO: 325638 - DNA, 25 bp, Homo sapien
ctggcaaagcagagttacataaatg

SEQ ID NO: 325639 - DNA, 25 bp, Homo sapien
gtccatgtctttagcgccaccaggc

SEQ ID NO: 325640 - DNA, 25 bp, Homo sapien
atgtccatgtctttagcgccaccag

SEQ ID NO: 325641 - DNA, 25 bp, Homo sapien
ccatgtctttagcgccaccaggcag

SEQ ID NO: 325642 - DNA, 25 bp, Homo sapien
tatgtccatgtctttagcgccacca

SEQ ID NO: 325643 - DNA, 25 bp, Homo sapien
ccttcgctggtacttgagcatctca

SEQ ID NO: 325644 - DNA, 25 bp, Homo sapien
gatatcttcaagactctccccgttg

SEQ ID NO: 325645 - DNA, 25 bp, Homo sapien
cgttgacaacgcctgcgactgaggt

SEQ ID NO: 325646 - DNA, 25 bp, Homo sapien
cagggttctcaatgacggctgtgga

SEQ ID NO: 325647 - DNA, 25 bp, Homo sapien
gggatcgccaagctcatcctgggag

SEQ ID NO: 325648 - DNA, 25 bp, Homo sapien
ccacagagccgtccatagagcatac

SEQ ID NO: 325649 - DNA, 25 bp, Homo sapien
catagagcataccaagatgcccagc

SEQ ID NO: 325650 - DNA, 25 bp, Homo sapien
cctgggagaagtcgaggaatgccac

SEQ ID NO: 325651 - DNA, 25 bp, Homo sapien
atgtgccgcagtagctggcctgtga

SEQ ID NO: 325652 - DNA, 25 bp, Homo sapien
gcagacacatgtgccgcagtagctg

SEQ ID NO: 325653 - DNA, 25 bp, Homo sapien
aggcagacacatgtgccgcagtagc

SEQ ID NO: 325654 - DNA, 25 bp, Homo sapien
acacatgtgccgcagtagctggcct

SEQ ID NO: 325655 - DNA, 25 bp, Homo sapien
caggaaatatccatgatggatttgt

SEQ ID NO: 325656 - DNA, 25 bp, Homo sapien
ccaccagcggccgtttcagacatgt

SEQ ID NO: 325657 - DNA, 25 bp, Homo sapien
ttgtcaaacagttcatggatgacca

SEQ ID NO: 325658 - DNA, 25 bp, Homo sapien
ccagcggccgtttcagacatgtgag

SEQ ID NO: 325659 - DNA, 25 bp, Homo sapien
gcagtacgggcagctaggcttcgca

SEQ ID NO: 325660 - DNA, 25 bp, Homo sapien
taggcttcgcagaactcccattctt

SEQ ID NO: 325661 - DNA, 25 bp, Homo sapien
gggcagctaggcttcgcagaactcc

SEQ ID NO: 325662 - DNA, 25 bp, Homo sapien
agaaagcgagcggtccttgctgcca

SEQ ID NO: 325663 - DNA, 25 bp, Homo sapien
acagtcacagctttccggtgcccaa

SEQ ID NO: 325664 - DNA, 25 bp, Homo sapien
caaagtccatgttggtcttccatcc

SEQ ID NO: 325665 - DNA, 25 bp, Homo sapien
catccctcccgttcgatgatctggg

SEQ ID NO: 325666 - DNA, 25 bp, Homo sapien
cagacaccaggtaatgcccatcagg

SEQ ID NO: 325667 - DNA, 25 bp, Homo sapien
cagaatgacctctcagagtagctag

SEQ ID NO: 325668 - DNA, 25 bp, Homo sapien
tcaaccctttgaccaagccagaatg

SEQ ID NO: 325669 - DNA, 25 bp, Homo sapien
cacacctttaggctgcggtcatcag

SEQ ID NO: 325670 - DNA, 25 bp, Homo sapien
gctatgtatttaccaacagggtccc

SEQ ID NO: 325671 - DNA, 25 bp, Homo sapien
tacagcattccagatgacgacagtg

SEQ ID NO: 325672 - DNA, 25 bp, Homo sapien
gacagtgttatccacgctgcatgag

SEQ ID NO: 325673 - DNA, 25 bp, Homo sapien
tgcatgaggctagccaggcatcgtg

SEQ ID NO: 325674 - DNA, 25 bp, Homo sapien
tcgtggggagaccatgctacatcca

SEQ ID NO: 325675 - DNA, 25 bp, Homo sapien
caggagtaccccttcactatggagc

SEQ ID NO: 325676 - DNA, 25 bp, Homo sapien
taaactgctgcaacaccatgccagg

SEQ ID NO: 325677 - DNA, 25 bp, Homo sapien
tgaggccctcgtctggttcatggac

SEQ ID NO: 325678 - DNA, 25 bp, Homo sapien
tcataacagggccttcctccgagag

SEQ ID NO: 325679 - DNA, 25 bp, Homo sapien
ggtgaagggcgcagtcttagttatt

SEQ ID NO: 325680 - DNA, 25 bp, Homo sapien
cagtgctaggtatacagaagaatga

SEQ ID NO: 325681 - DNA, 25 bp, Homo sapien
cgcctggtgcagtgctaggtataca

SEQ ID NO: 325682 - DNA, 25 bp, Homo sapien
tcagcgcctggtgcagtgctaggta

SEQ ID NO: 325683 - DNA, 25 bp, Homo sapien
cataccctagagtgggaatcctggg

SEQ ID NO: 325684 - DNA, 25 bp, Homo sapien
tattactctgagacgcataccctag

SEQ ID NO: 325685 - DNA, 25 bp, Homo sapien
tgggcccgtgtgtatttgtcactct

SEQ ID NO: 325686 - DNA, 25 bp, Homo sapien
tgccctgcattctatgtggttgaga

SEQ ID NO: 325687 - DNA, 25 bp, Homo sapien
tgattctgttcagcaggacaaacag

SEQ ID NO: 325688 - DNA, 25 bp, Homo sapien
ggacttagtgatccgctgatgaagg

SEQ ID NO: 325689 - DNA, 25 bp, Homo sapien
tccgctgatgaaggtactgattctg

SEQ ID NO: 325690 - DNA, 25 bp, Homo sapien
gaaggtactgattctgttcagcagg

SEQ ID NO: 325691 - DNA, 25 bp, Homo sapien
ccacattggcaagcttaccactgga

SEQ ID NO: 325692 - DNA, 25 bp, Homo sapien
aggatagagacacaccgccactgct

SEQ ID NO: 325693 - DNA, 25 bp, Homo sapien
ccactggagccgaacacggtgctgg

SEQ ID NO: 325694 - DNA, 25 bp, Homo sapien
gcctgaatgattccggaggatagag

SEQ ID NO: 325695 - DNA, 25 bp, Homo sapien
atacatcccactgtttgaccaccgc

SEQ ID NO: 325696 - DNA, 25 bp, Homo sapien
gcccgcttccacaccataatcagtt

SEQ ID NO: 325697 - DNA, 25 bp, Homo sapien
cactgtttgaccaccgcacacagtt

SEQ ID NO: 325698 - DNA, 25 bp, Homo sapien
gtagcccgcttccacaccataatca

SEQ ID NO: 325699 - DNA, 25 bp, Homo sapien
tgagtaacatgctccaggtctgaag

SEQ ID NO: 325700 - DNA, 25 bp, Homo sapien
tatcaaagttgtagcccccacatgg

SEQ ID NO: 325701 - DNA, 25 bp, Homo sapien
cccacatggcccgtgagtaacatgc

SEQ ID NO: 325702 - DNA, 25 bp, Homo sapien
aagatggctatcaaagttgtagccc

SEQ ID NO: 325703 - DNA, 25 bp, Homo sapien
catggaatcaggcagtaacgactca

SEQ ID NO: 325704 - DNA, 25 bp, Homo sapien
ccagaggtacctgcagactgtccaa

SEQ ID NO: 325705 - DNA, 25 bp, Homo sapien
gactgtccaaagatggttctgtggg

SEQ ID NO: 325706 - DNA, 25 bp, Homo sapien
tgagcaggaaatcaccagaggtacc

SEQ ID NO: 325707 - DNA, 25 bp, Homo sapien
ccaggtgtgcagccaacatctgtgc

SEQ ID NO: 325708 - DNA, 25 bp, Homo sapien
caggccgaggggagttaccgccgca

SEQ ID NO: 325709 - DNA, 25 bp, Homo sapien
cagacagcaggccgaggggagttac

SEQ ID NO: 325710 - DNA, 25 bp, Homo sapien
gcaggccgaggggagttaccgccgc

SEQ ID NO: 325711 - DNA, 25 bp, Homo sapien
acagcaggccgaggggagttaccgc

SEQ ID NO: 325712 - DNA, 25 bp, Homo sapien
ggcactctgccaacacgcaaagcct

SEQ ID NO: 325713 - DNA, 25 bp, Homo sapien
gccaacacgcaaagcctgcaaaggg

SEQ ID NO: 325714 - DNA, 25 bp, Homo sapien
tctgccaacacgcaaagcctgcaaa

SEQ ID NO: 325715 - DNA, 25 bp, Homo sapien
actctgccaacacgcaaagcctgca

SEQ ID NO: 325716 - DNA, 25 bp, Homo sapien
tattccagatcacaaccttcccaga

SEQ ID NO: 325717 - DNA, 25 bp, Homo sapien
atccttctcgtcatcctcctggagg

SEQ ID NO: 325718 - DNA, 25 bp, Homo sapien
tcctggaggactggagacatattcc

SEQ ID NO: 325719 - DNA, 25 bp, Homo sapien
tgtccatctggcaaagcatcttggg

SEQ ID NO: 325720 - DNA, 25 bp, Homo sapien
cttgttatccaccctttgcagttac

SEQ ID NO: 325721 - DNA, 25 bp, Homo sapien
gcaagtattccctctacagctaaat

SEQ ID NO: 325722 - DNA, 25 bp, Homo sapien
ggtggcagggctgttaagctttccc

SEQ ID NO: 325723 - DNA, 25 bp, Homo sapien
cattcagataacacattataactgt

SEQ ID NO: 325724 - DNA, 25 bp, Homo sapien
cgttgcatccatcctgaaaaatagc

SEQ ID NO: 325725 - DNA, 25 bp, Homo sapien
tcccgtcagggtgaatatcaactga

SEQ ID NO: 325726 - DNA, 25 bp, Homo sapien
cttgtcctccagttgcgaacttggt

SEQ ID NO: 325727 - DNA, 25 bp, Homo sapien
gaacttggtcccgtcagggtgaata

SEQ ID NO: 325728 - DNA, 25 bp, Homo sapien
cagttgcgaacttggtcccgtcagg

SEQ ID NO: 325729 - DNA, 25 bp, Homo sapien
actgctagaagattctccaaacatc

SEQ ID NO: 325730 - DNA, 25 bp, Homo sapien
ctcaacagattcagttaaagtctaa

SEQ ID NO: 325731 - DNA, 25 bp, Homo sapien
tacagtatctaaattggcttttatt

SEQ ID NO: 325732 - DNA, 25 bp, Homo sapien
tagaagattctccaaacatcagaca

SEQ ID NO: 325733 - DNA, 25 bp, Homo sapien
tgggctgttgccaagagtctcttaa

SEQ ID NO: 325734 - DNA, 25 bp, Homo sapien
tacccagtgtacagtagcgcagtaa

SEQ ID NO: 325735 - DNA, 25 bp, Homo sapien
gctcccatgcaagtgtgaaaattaa

SEQ ID NO: 325736 - DNA, 25 bp, Homo sapien
caattgctgatatagatgggctgtt

SEQ ID NO: 325737 - DNA, 25 bp, Homo sapien
cccaggtcggcttcaggagcttcat

SEQ ID NO: 325738 - DNA, 25 bp, Homo sapien
acccaggtcggcttcaggagcttca

SEQ ID NO: 325739 - DNA, 25 bp, Homo sapien
cctcagcgcgcccgggccatggagc

SEQ ID NO: 325740 - DNA, 25 bp, Homo sapien
gaggcgagcgccgggtccctcagcg

SEQ ID NO: 325741 - DNA, 25 bp, Homo sapien
tccctcagcgcgcccgggccatgga

SEQ ID NO: 325742 - DNA, 25 bp, Homo sapien
ctgaggcgagcgccgggtccctcag

SEQ ID NO: 325743 - DNA, 25 bp, Homo sapien
gggcctgcagttgcaacccgggccg

SEQ ID NO: 325744 - DNA, 25 bp, Homo sapien
gcaacgccggaagtcacggcgcgca

SEQ ID NO: 325745 - DNA, 25 bp, Homo sapien
ggttcgcctggacggcggacagcga

SEQ ID NO: 325746 - DNA, 25 bp, Homo sapien
cgccccagaaagggcggttcgcctg

SEQ ID NO: 325747 - DNA, 25 bp, Homo sapien
catcctaacagtagaaaacccttgg

SEQ ID NO: 325748 - DNA, 25 bp, Homo sapien
tagtcattggtcagtaggcttgagc

SEQ ID NO: 325749 - DNA, 25 bp, Homo sapien
actgtgtgcagggttaacagctcct

SEQ ID NO: 325750 - DNA, 25 bp, Homo sapien
ccttctctagggatgaagtcctcag

SEQ ID NO: 325751 - DNA, 25 bp, Homo sapien
ccctgaaggcaggtacaatgacatc

SEQ ID NO: 325752 - DNA, 25 bp, Homo sapien
taagagatagacttgcaggctgcta

SEQ ID NO: 325753 - DNA, 25 bp, Homo sapien
gctatccttaacatgctgcccctga

SEQ ID NO: 325754 - DNA, 25 bp, Homo sapien
gacatcaccaaggtgtacacacaag

SEQ ID NO: 325755 - DNA, 25 bp, Homo sapien
gcacagcatcaggacgcagaaattg

SEQ ID NO: 325756 - DNA, 25 bp, Homo sapien
tgtgtaaccaccagtcaggctgaca

SEQ ID NO: 325757 - DNA, 25 bp, Homo sapien
cattggtacagtctacagaacatac

SEQ ID NO: 325758 - DNA, 25 bp, Homo sapien
taacttcatgtatagccctgtgtaa

SEQ ID NO: 325759 - DNA, 25 bp, Homo sapien
ccctcactgggtggaaatgctcatt

SEQ ID NO: 325760 - DNA, 25 bp, Homo sapien
catgatagtcacactacagaggcag

SEQ ID NO: 325761 - DNA, 25 bp, Homo sapien
tgcttcctaacagagcatgcagccg

SEQ ID NO: 325762 - DNA, 25 bp, Homo sapien
gcagactgcaaattcagatgccccg

SEQ ID NO: 325763 - DNA, 25 bp, Homo sapien
ggatttcttcagctgagtccacaaa

SEQ ID NO: 325764 - DNA, 25 bp, Homo sapien
gcttttgatacattaaccaccaggg

SEQ ID NO: 325765 - DNA, 25 bp, Homo sapien
taacgtgatagattattctgcccca

SEQ ID NO: 325766 - DNA, 25 bp, Homo sapien
cacaacagggccaccataggatgag

SEQ ID NO: 325767 - DNA, 25 bp, Homo sapien
aatgctcaccaaacctgggacgtgg

SEQ ID NO: 325768 - DNA, 25 bp, Homo sapien
cctgggagcctaagaagtgaagcct

SEQ ID NO: 325769 - DNA, 25 bp, Homo sapien
gaacatcgcagtgtcagggtatcct

SEQ ID NO: 325770 - DNA, 25 bp, Homo sapien
gctctaaagcggtgcaattgtcctg

SEQ ID NO: 325771 - DNA, 25 bp, Homo sapien
agctgcacaggccaatggcagggat

SEQ ID NO: 325772 - DNA, 25 bp, Homo sapien
gcacaggccaatggcagggatgctt

SEQ ID NO: 325773 - DNA, 25 bp, Homo sapien
cagggacccaccagactgtgtaggc

SEQ ID NO: 325774 - DNA, 25 bp, Homo sapien
ggacccaccagactgtgtaggctgg

SEQ ID NO: 325775 - DNA, 25 bp, Homo sapien
gtgcttccgtgcagcccggactcgt

SEQ ID NO: 325776 - DNA, 25 bp, Homo sapien
gactcgtgcccgctcgctctcacag

SEQ ID NO: 325777 - DNA, 25 bp, Homo sapien
tgcccgctcgctctcacagagggat

SEQ ID NO: 325778 - DNA, 25 bp, Homo sapien
tgcttccgtgcagcccggactcgtg

SEQ ID NO: 325779 - DNA, 25 bp, Homo sapien
ggtatcaggtgctatgtgagcctct

SEQ ID NO: 325780 - DNA, 25 bp, Homo sapien
tttccatacccagggagatgaccga

SEQ ID NO: 325781 - DNA, 25 bp, Homo sapien
caaatgtccattcccaatgcggcag

SEQ ID NO: 325782 - DNA, 25 bp, Homo sapien
aatgcggcagttaacagcttccctg

SEQ ID NO: 325783 - DNA, 25 bp, Homo sapien
tttgctggacgaaaaaacaactaga

SEQ ID NO: 325784 - DNA, 25 bp, Homo sapien
ttatcactcgtgcatccccaagagc

SEQ ID NO: 325785 - DNA, 25 bp, Homo sapien
gggtccaccgtagcactgtattcta

SEQ ID NO: 325786 - DNA, 25 bp, Homo sapien
catgagcctcgcacctttcggctgg

SEQ ID NO: 325787 - DNA, 25 bp, Homo sapien
aagtgcctggcgctgcggcagagct

SEQ ID NO: 325788 - DNA, 25 bp, Homo sapien
aggtcgcgctgccactgttcgcagg

SEQ ID NO: 325789 - DNA, 25 bp, Homo sapien
cgtagtagtggtgtaggaagtgcct

SEQ ID NO: 325790 - DNA, 25 bp, Homo sapien
ggccgctcgccgtggacgtagtagt

SEQ ID NO: 325791 - DNA, 25 bp, Homo sapien
gttcccggctccgacccagcacact

SEQ ID NO: 325792 - DNA, 25 bp, Homo sapien
cccggctccgacccagcacactcac

SEQ ID NO: 325793 - DNA, 25 bp, Homo sapien
ttcccggctccgacccagcacactc

SEQ ID NO: 325794 - DNA, 25 bp, Homo sapien
ggttcccggctccgacccagcacac

SEQ ID NO: 325795 - DNA, 25 bp, Homo sapien
aaccaatagcaaccgagggcggctg

SEQ ID NO: 325796 - DNA, 25 bp, Homo sapien
tactgagcatcaaggtggtgcagcg

SEQ ID NO: 325797 - DNA, 25 bp, Homo sapien
gaagaactaatgagcaccgacacat

SEQ ID NO: 325798 - DNA, 25 bp, Homo sapien
gaaaacggcacctcgtgatcgactg

SEQ ID NO: 325799 - DNA, 25 bp, Homo sapien
gatctagggttgaatgacctcccca

SEQ ID NO: 325800 - DNA, 25 bp, Homo sapien
tgcaatccgagtacagccataggcc

SEQ ID NO: 325801 - DNA, 25 bp, Homo sapien
cagcagtcttgcttgagcgtccact

SEQ ID NO: 325802 - DNA, 25 bp, Homo sapien
taactgagattggttgggcatgaca

SEQ ID NO: 325803 - DNA, 25 bp, Homo sapien
gattataggcggagcgccagtgcct

SEQ ID NO: 325804 - DNA, 25 bp, Homo sapien
cactgtgtcattaaaaggctctgca

SEQ ID NO: 325805 - DNA, 25 bp, Homo sapien
gaaacgccctgcagtacctatgctg

SEQ ID NO: 325806 - DNA, 25 bp, Homo sapien
gaccaggcgtttcactgcatacaca

SEQ ID NO: 325807 - DNA, 25 bp, Homo sapien
tgggacagccactacttatagaaca

SEQ ID NO: 325808 - DNA, 25 bp, Homo sapien
tcccctcaagctgaaagcgtgaaga

SEQ ID NO: 325809 - DNA, 25 bp, Homo sapien
taaattgcagccacagtagtgggac

SEQ ID NO: 325810 - DNA, 25 bp, Homo sapien
tgatgaggctcgtccctgtcagtgc

SEQ ID NO: 325811 - DNA, 25 bp, Homo sapien
ttttccaatcagccaacagtcctca

SEQ ID NO: 325812 - DNA, 25 bp, Homo sapien
tttccaatcagccaacagtcctcac

SEQ ID NO: 325813 - DNA, 25 bp, Homo sapien
ccagagaaagcgacgaatctgcctc

SEQ ID NO: 325814 - DNA, 25 bp, Homo sapien
agaaagcgacgaatctgcctccagc

SEQ ID NO: 325815 - DNA, 25 bp, Homo sapien
ttcttccctttttacgcaatgactg

SEQ ID NO: 325816 - DNA, 25 bp, Homo sapien
cctttttacgcaatgactgtccttc

SEQ ID NO: 325817 - DNA, 25 bp, Homo sapien
tttaacatatagagaccaaccagcc

SEQ ID NO: 325818 - DNA, 25 bp, Homo sapien
ctattttcagaaactccctggaggt

SEQ ID NO: 325819 - DNA, 25 bp, Homo sapien
ccatgatgtaggagggccagttttc

SEQ ID NO: 325820 - DNA, 25 bp, Homo sapien
gtctagtatactcccaaggctacag

SEQ ID NO: 325821 - DNA, 25 bp, Homo sapien
cgtacatgttagtgggggctcctta

SEQ ID NO: 325822 - DNA, 25 bp, Homo sapien
gactggcctttctctaggtgccgta

SEQ ID NO: 325823 - DNA, 25 bp, Homo sapien
ggcctttctctaggtgccgtacatg

SEQ ID NO: 325824 - DNA, 25 bp, Homo sapien
tctaggtgccgtacatgttagtggg

SEQ ID NO: 325825 - DNA, 25 bp, Homo sapien
atgcatgaggattatcttcttgtga

SEQ ID NO: 325826 - DNA, 25 bp, Homo sapien
gatgcatgaggattatcttcttgtg

SEQ ID NO: 325827 - DNA, 25 bp, Homo sapien
agatgcatgaggattatcttcttgt

SEQ ID NO: 325828 - DNA, 25 bp, Homo sapien
tgcatgaggattatcttcttgtgag

SEQ ID NO: 325829 - DNA, 25 bp, Homo sapien
ctaaggtcttaggtcggagtcaggc

SEQ ID NO: 325830 - DNA, 25 bp, Homo sapien
tctagagacctactggagtcgagcc

SEQ ID NO: 325831 - DNA, 25 bp, Homo sapien
tctctgttggaagacgaagcccacc

SEQ ID NO: 325832 - DNA, 25 bp, Homo sapien
tgaaaggtcccaatgcccaatgctg

SEQ ID NO: 325833 - DNA, 25 bp, Homo sapien
tttgacaaggggacgtgaatttctg

SEQ ID NO: 325834 - DNA, 25 bp, Homo sapien
gaatttctgatgaaagttatcttac

SEQ ID NO: 325835 - DNA, 25 bp, Homo sapien
cgtgaatttctgatgaaagttatct

SEQ ID NO: 325836 - DNA, 25 bp, Homo sapien
gggacgtgaatttctgatgaaagtt

SEQ ID NO: 325837 - DNA, 25 bp, Homo sapien
caagtttaaattcataattgggaat

SEQ ID NO: 325838 - DNA, 25 bp, Homo sapien
ggtcatctgaaggattgggaagccc

SEQ ID NO: 325839 - DNA, 25 bp, Homo sapien
cagactcgcatcttaggaaagccag

SEQ ID NO: 325840 - DNA, 25 bp, Homo sapien
gatcaccaaatagggaccagaaagg

SEQ ID NO: 325841 - DNA, 25 bp, Homo sapien
tatcaatattgggtatagggccagg

SEQ ID NO: 325842 - DNA, 25 bp, Homo sapien
catccagtctattgccagatccaga

SEQ ID NO: 325843 - DNA, 25 bp, Homo sapien
gtctattgccagatccagagaaagc

SEQ ID NO: 325844 - DNA, 25 bp, Homo sapien
ccatccagtctattgccagatccag

SEQ ID NO: 325845 - DNA, 25 bp, Homo sapien
ccagtctattgccagatccagagaa

SEQ ID NO: 325846 - DNA, 25 bp, Homo sapien
agctctccagcatagccactgtggt

SEQ ID NO: 325847 - DNA, 25 bp, Homo sapien
ctctccagcatagccactgtggtcg

SEQ ID NO: 325848 - DNA, 25 bp, Homo sapien
cagcatagccactgtggtcggcttc

SEQ ID NO: 325849 - DNA, 25 bp, Homo sapien
tccagcatagccactgtggtcggct

SEQ ID NO: 325850 - DNA, 25 bp, Homo sapien
tgtctttcgggttctttgtagccca

SEQ ID NO: 325851 - DNA, 25 bp, Homo sapien
ctggacttgtctttcgggttctttg

SEQ ID NO: 325852 - DNA, 25 bp, Homo sapien
atggacactgccttgtcgggtttgg

SEQ ID NO: 325853 - DNA, 25 bp, Homo sapien
tggtctccatcacacgcagttcgta

SEQ ID NO: 325854 - DNA, 25 bp, Homo sapien
gttcatgtcacactcaatgatggac

SEQ ID NO: 325855 - DNA, 25 bp, Homo sapien
tgccttgtcgggtttggtctccatc

SEQ ID NO: 325856 - DNA, 25 bp, Homo sapien
ctcctgaatagctgtaactaggcac

SEQ ID NO: 325857 - DNA, 25 bp, Homo sapien
ctgagcagaatgttcatccatgtgg

SEQ ID NO: 325858 - DNA, 25 bp, Homo sapien
tagtcaatatcccagattccgcaac

SEQ ID NO: 325859 - DNA, 25 bp, Homo sapien
aagtactcatgtaagcggaatgtag

SEQ ID NO: 325860 - DNA, 25 bp, Homo sapien
caaacttcaattacacttttctcta

SEQ ID NO: 325861 - DNA, 25 bp, Homo sapien
ttatcaatgtcaaataagttggctc

SEQ ID NO: 325862 - DNA, 25 bp, Homo sapien
aaacttcaattacacttttctctag

SEQ ID NO: 325863 - DNA, 25 bp, Homo sapien
atttatcaatgtcaaataagttggc

SEQ ID NO: 325864 - DNA, 25 bp, Homo sapien
tagccttttgttgctcgctattata

SEQ ID NO: 325865 - DNA, 25 bp, Homo sapien
aatgctgatttccttagggatctaa

SEQ ID NO: 325866 - DNA, 25 bp, Homo sapien
catttgtatctagaaattctaatgc

SEQ ID NO: 325867 - DNA, 25 bp, Homo sapien
tcattaactcttttatagctgttgt

SEQ ID NO: 325868 - DNA, 25 bp, Homo sapien
acaggcaaagttcctaagtgcgttt

SEQ ID NO: 325869 - DNA, 25 bp, Homo sapien
ttcattatagttgatggcaatcaca

SEQ ID NO: 325870 - DNA, 25 bp, Homo sapien
atcacatccccggtggtcagacagg

SEQ ID NO: 325871 - DNA, 25 bp, Homo sapien
gcaaagttcctaagtgcgttttcta

SEQ ID NO: 325872 - DNA, 25 bp, Homo sapien
tcaaggcaacatggcaagatggata

SEQ ID NO: 325873 - DNA, 25 bp, Homo sapien
caaggcaacatggcaagatggatac

SEQ ID NO: 325874 - DNA, 25 bp, Homo sapien
tgtcaaggcaacatggcaagatgga

SEQ ID NO: 325875 - DNA, 25 bp, Homo sapien
ctgtcaaggcaacatggcaagatgg

SEQ ID NO: 325876 - DNA, 25 bp, Homo sapien
gaaaacatgcggagagagcgctact

SEQ ID NO: 325877 - DNA, 25 bp, Homo sapien
gatcgtaacaggaaaaatcagggcc

SEQ ID NO: 325878 - DNA, 25 bp, Homo sapien
tgaagtgccacggtacgaagtgccc

SEQ ID NO: 325879 - DNA, 25 bp, Homo sapien
caacaaggccatcgtgtccagaaca

SEQ ID NO: 325880 - DNA, 25 bp, Homo sapien
cctttgtctagaagaactccgctta

SEQ ID NO: 325881 - DNA, 25 bp, Homo sapien
agaactccgcttatttgaaaaagat

SEQ ID NO: 325882 - DNA, 25 bp, Homo sapien
tctagaagaactccgcttatttgaa

SEQ ID NO: 325883 - DNA, 25 bp, Homo sapien
tgtctagaagaactccgcttatttg

SEQ ID NO: 325884 - DNA, 25 bp, Homo sapien
tggaatttggagtaggtggccactt

SEQ ID NO: 325885 - DNA, 25 bp, Homo sapien
atttggagtaggtggccacttgaag

SEQ ID NO: 325886 - DNA, 25 bp, Homo sapien
gaatttggagtaggtggccacttga

SEQ ID NO: 325887 - DNA, 25 bp, Homo sapien
ggagtaggtggccacttgaaggttg

SEQ ID NO: 325888 - DNA, 25 bp, Homo sapien
tttgaacagcatgggataggtaatg

SEQ ID NO: 325889 - DNA, 25 bp, Homo sapien
cagcatgggataggtaatgttaagt

SEQ ID NO: 325890 - DNA, 25 bp, Homo sapien
agtttgaacagcatgggataggtaa

SEQ ID NO: 325891 - DNA, 25 bp, Homo sapien
gaacagcatgggataggtaatgtta

SEQ ID NO: 325892 - DNA, 25 bp, Homo sapien
cacaagtggtgagcacacaagacct

SEQ ID NO: 325893 - DNA, 25 bp, Homo sapien
cacagcacacaagtggtgatgccag

SEQ ID NO: 325894 - DNA, 25 bp, Homo sapien
cattttgtgacttagaggctcccag

SEQ ID NO: 325895 - DNA, 25 bp, Homo sapien
tccagggattcaaccatcaaagcag

SEQ ID NO: 325896 - DNA, 25 bp, Homo sapien
tccagggccgagggtggcataatta

SEQ ID NO: 325897 - DNA, 25 bp, Homo sapien
ggtccagggccgagggtggcataat

SEQ ID NO: 325898 - DNA, 25 bp, Homo sapien
ttggtccagggccgagggtggcata

SEQ ID NO: 325899 - DNA, 25 bp, Homo sapien
tgagttggtccagggccgagggtgg

SEQ ID NO: 325900 - DNA, 25 bp, Homo sapien
cttccctcctttctccacatctgac

SEQ ID NO: 325901 - DNA, 25 bp, Homo sapien
tcttccctcctttctccacatctga

SEQ ID NO: 325902 - DNA, 25 bp, Homo sapien
ccctgggaatagggtggtcgaacat

SEQ ID NO: 325903 - DNA, 25 bp, Homo sapien
tcttggccagaaccataacacagga

SEQ ID NO: 325904 - DNA, 25 bp, Homo sapien
taagccagggtttgacagtgacaca

SEQ ID NO: 325905 - DNA, 25 bp, Homo sapien
aataccgtagagtgctttgcagcca

SEQ ID NO: 325906 - DNA, 25 bp, Homo sapien
tagcgtttctgggtgaacaaggcca

SEQ ID NO: 325907 - DNA, 25 bp, Homo sapien
tctttcgtcaaggagggcaagtccg

SEQ ID NO: 325908 - DNA, 25 bp, Homo sapien
tcaagggtcctgcttgtgcccggtg

SEQ ID NO: 325909 - DNA, 25 bp, Homo sapien
caagtccggctgagacagaatgcga

SEQ ID NO: 325910 - DNA, 25 bp, Homo sapien
agaatgcgagccacgttcaggaccg

SEQ ID NO: 325911 - DNA, 25 bp, Homo sapien
ctcaccggaagtgccggacccgaga

SEQ ID NO: 325912 - DNA, 25 bp, Homo sapien
gagaaaaggccaggcgaagacgcta

SEQ ID NO: 325913 - DNA, 25 bp, Homo sapien
ccgggacaaagcgtcggctgcaaaa

SEQ ID NO: 325914 - DNA, 25 bp, Homo sapien
aggcaatgcaacgaagaaaccccgc

SEQ ID NO: 325915 - DNA, 25 bp, Homo sapien
cataatttctgcataccacgtatgg

SEQ ID NO: 325916 - DNA, 25 bp, Homo sapien
cgtatggtgtaactctggtgcctca

SEQ ID NO: 325917 - DNA, 25 bp, Homo sapien
acttaagtagactagatggttctca

SEQ ID NO: 325918 - DNA, 25 bp, Homo sapien
tgtatgacgtaagaggatgctgtgt

SEQ ID NO: 325919 - DNA, 25 bp, Homo sapien
tatagttttccgtagaaagaggaga

SEQ ID NO: 325920 - DNA, 25 bp, Homo sapien
gaaactgagtcagcttattaggaaa

SEQ ID NO: 325921 - DNA, 25 bp, Homo sapien
taggtagctatttgtatgaacagga

SEQ ID NO: 325922 - DNA, 25 bp, Homo sapien
taggaaatgataagattctgcagaa

SEQ ID NO: 325923 - DNA, 25 bp, Homo sapien
tgaagttcccgcctatgaagacatc

SEQ ID NO: 325924 - DNA, 25 bp, Homo sapien
ggaacttgcactcccagaggtcgga

SEQ ID NO: 325925 - DNA, 25 bp, Homo sapien
gccttctgagaagcgcacacggtta

SEQ ID NO: 325926 - DNA, 25 bp, Homo sapien
tcggaggtcatcctgaagcctgcca

SEQ ID NO: 325927 - DNA, 25 bp, Homo sapien
tcatgactgtaggtggtctcagcta

SEQ ID NO: 325928 - DNA, 25 bp, Homo sapien
gatcatgactgtaggtggtctcagc

SEQ ID NO: 325929 - DNA, 25 bp, Homo sapien
tggatcatgactgtaggtggtctca

SEQ ID NO: 325930 - DNA, 25 bp, Homo sapien
atcatgactgtaggtggtctcagct

SEQ ID NO: 325931 - DNA, 25 bp, Homo sapien
tataatatcacggtcaggatgggag

SEQ ID NO: 325932 - DNA, 25 bp, Homo sapien
aatatagagagatcacttatatact

SEQ ID NO: 325933 - DNA, 25 bp, Homo sapien
atatcacggtcaggatgggaggcta

SEQ ID NO: 325934 - DNA, 25 bp, Homo sapien
tgtagtataatatcacggtcaggat

SEQ ID NO: 325935 - DNA, 25 bp, Homo sapien
caggctcccttgctgtttaacagga

SEQ ID NO: 325936 - DNA, 25 bp, Homo sapien
aaactctcagtttgggccgctgctc

SEQ ID NO: 325937 - DNA, 25 bp, Homo sapien
tgctcttgcatagggcaaaactctc

SEQ ID NO: 325938 - DNA, 25 bp, Homo sapien
aacaggaccccttgctcattaccag

SEQ ID NO: 325939 - DNA, 25 bp, Homo sapien
agagaggaggaaggtactaggctct

SEQ ID NO: 325940 - DNA, 25 bp, Homo sapien
acaaccgtcacgggaactaatagag

SEQ ID NO: 325941 - DNA, 25 bp, Homo sapien
agaggaggaaggtactaggctcttt

SEQ ID NO: 325942 - DNA, 25 bp, Homo sapien
gcagggcactccagatgtcatgctg

SEQ ID NO: 325943 - DNA, 25 bp, Homo sapien
tgctctctcatggaggtcaggcttc

SEQ ID NO: 325944 - DNA, 25 bp, Homo sapien
caggagtaacctggacaagctgtac

SEQ ID NO: 325945 - DNA, 25 bp, Homo sapien
ggctgttgaccagctgcaaggtcta

SEQ ID NO: 325946 - DNA, 25 bp, Homo sapien
gaccgggaggtccaggccaagtcac

SEQ ID NO: 325947 - DNA, 25 bp, Homo sapien
gagtaaagaccagctgtacacatct

SEQ ID NO: 325948 - DNA, 25 bp, Homo sapien
cgggccctgccgatggagtaaagac

SEQ ID NO: 325949 - DNA, 25 bp, Homo sapien
taagcagattcttagccttcccact

SEQ ID NO: 325950 - DNA, 25 bp, Homo sapien
gaagcgaaatcctcagtctgacacc

SEQ ID NO: 325951 - DNA, 25 bp, Homo sapien
aggcttatccaacgcctcgcaggcg

SEQ ID NO: 325952 - DNA, 25 bp, Homo sapien
cattccgtctgttaagggcagggcc

SEQ ID NO: 325953 - DNA, 25 bp, Homo sapien
ctgacacccgctctgcctatggaaa

SEQ ID NO: 325954 - DNA, 25 bp, Homo sapien
gcagcccgcaaaacaggtagagcac

SEQ ID NO: 325955 - DNA, 25 bp, Homo sapien
gcacagacgggtcgtaaaactcgcg

SEQ ID NO: 325956 - DNA, 25 bp, Homo sapien
tgttggcgaaccagcagagtggcac

SEQ ID NO: 325957 - DNA, 25 bp, Homo sapien
aaactcgcggacgacaatgttggcg

SEQ ID NO: 325958 - DNA, 25 bp, Homo sapien
ccgcacgccaggatcagaccccccc

SEQ ID NO: 325959 - DNA, 25 bp, Homo sapien
tggtctgcgccgtcacgatgttgtg

SEQ ID NO: 325960 - DNA, 25 bp, Homo sapien
gtggtctgcgccgtcacgatgttgt

SEQ ID NO: 325961 - DNA, 25 bp, Homo sapien
acgccaggatcagacccccccagcc

SEQ ID NO: 325962 - DNA, 25 bp, Homo sapien
ggctagaggcgagacgcgcacccga

SEQ ID NO: 325963 - DNA, 25 bp, Homo sapien
cgcgcacccgaaggcccgcagaacc

SEQ ID NO: 325964 - DNA, 25 bp, Homo sapien
agacgcgcacccgaaggcccgcaga

SEQ ID NO: 325965 - DNA, 25 bp, Homo sapien
gctagaggcgagacgcgcacccgaa

SEQ ID NO: 325966 - DNA, 25 bp, Homo sapien
tcatcgtgccgcagccaatcacaga

SEQ ID NO: 325967 - DNA, 25 bp, Homo sapien
cgaagcagccaatccgtgcgcgggt

SEQ ID NO: 325968 - DNA, 25 bp, Homo sapien
ggctcttggccccagtccgtttgcc

SEQ ID NO: 325969 - DNA, 25 bp, Homo sapien
tttgccccgcgggtctgtcgcacct

SEQ ID NO: 325970 - DNA, 25 bp, Homo sapien
ccagtgacccagcacactgggtgta

SEQ ID NO: 325971 - DNA, 25 bp, Homo sapien
gtactgcccgcaccccatccttggg

SEQ ID NO: 325972 - DNA, 25 bp, Homo sapien
catccttgggggcccagttcaggtg

SEQ ID NO: 325973 - DNA, 25 bp, Homo sapien
gacccagcacactgggtgtagcacc

SEQ ID NO: 325974 - DNA, 25 bp, Homo sapien
cctgatctctggtaaagggcccttg

SEQ ID NO: 325975 - DNA, 25 bp, Homo sapien
caggaataacctccacagggtggct

SEQ ID NO: 325976 - DNA, 25 bp, Homo sapien
cagaagcggccttgtgtccacagtg

SEQ ID NO: 325977 - DNA, 25 bp, Homo sapien
aatagccagtgcaagatcccagagg

SEQ ID NO: 325978 - DNA, 25 bp, Homo sapien
gcagcaaactggctccgccgtgcag

SEQ ID NO: 325979 - DNA, 25 bp, Homo sapien
tcagggcatagttaagggcacccag

SEQ ID NO: 325980 - DNA, 25 bp, Homo sapien
gggcatagttaagggcacccaggca

SEQ ID NO: 325981 - DNA, 25 bp, Homo sapien
ctggctccgccgtgcagctttgggc

SEQ ID NO: 325982 - DNA, 25 bp, Homo sapien
caaatctgttggcagttattctcca

SEQ ID NO: 325983 - DNA, 25 bp, Homo sapien
gcatcgccacggtgtaattccagaa

SEQ ID NO: 325984 - DNA, 25 bp, Homo sapien
cactatgctgtacatgcatcgccac

SEQ ID NO: 325985 - DNA, 25 bp, Homo sapien
gtgtctggcgtctttctctccatgg

SEQ ID NO: 325986 - DNA, 25 bp, Homo sapien
tcaacacctcattatctgtgacgct

SEQ ID NO: 325987 - DNA, 25 bp, Homo sapien
ttctaacattgttcttgtccaagac

SEQ ID NO: 325988 - DNA, 25 bp, Homo sapien
ggttcatccgcgctgtagcctcatt

SEQ ID NO: 325989 - DNA, 25 bp, Homo sapien
ccgcacctggtcgattactatagtt

SEQ ID NO: 325990 - DNA, 25 bp, Homo sapien
tggggaaggctttcacatgacgcag

SEQ ID NO: 325991 - DNA, 25 bp, Homo sapien
ggaaggctttcacatgacgcagcac

SEQ ID NO: 325992 - DNA, 25 bp, Homo sapien
cagggcaggccatgatagtggggaa

SEQ ID NO: 325993 - DNA, 25 bp, Homo sapien
tagtggggaaggctttcacatgacg

SEQ ID NO: 325994 - DNA, 25 bp, Homo sapien
tccatgacaatgtgaccagtcatct

SEQ ID NO: 325995 - DNA, 25 bp, Homo sapien
gagactcctaattccagtgcatatt

SEQ ID NO: 325996 - DNA, 25 bp, Homo sapien
caggggccagtaaagtgcgagactc

SEQ ID NO: 325997 - DNA, 25 bp, Homo sapien
tgacaatgtgaccagtcatctctgc

SEQ ID NO: 325998 - DNA, 25 bp, Homo sapien
gtgtccagtgatggctcgctctctg

SEQ ID NO: 325999 - DNA, 25 bp, Homo sapien
gtccagtgatggctcgctctctgct

SEQ ID NO: 326000 - DNA, 25 bp, Homo sapien
ggtgtccagtgatggctcgctctct

SEQ ID NO: 326001 - DNA, 25 bp, Homo sapien
tgtccagtgatggctcgctctctgc

SEQ ID NO: 326002 - DNA, 25 bp, Homo sapien
attaaacgtcccgttacacacagct

SEQ ID NO: 326003 - DNA, 25 bp, Homo sapien
aaacgtcccgttacacacagctcta

SEQ ID NO: 326004 - DNA, 25 bp, Homo sapien
ggctcattaaacgtcccgttacaca

SEQ ID NO: 326005 - DNA, 25 bp, Homo sapien
cagggtaacaggaaaaggctcatta

SEQ ID NO: 326006 - DNA, 25 bp, Homo sapien
cacactgcgagatcatggcggtgga

SEQ ID NO: 326007 - DNA, 25 bp, Homo sapien
tttggaataacgaagtcagcggtca

SEQ ID NO: 326008 - DNA, 25 bp, Homo sapien
gagacatagaggaggtaaactgccc

SEQ ID NO: 326009 - DNA, 25 bp, Homo sapien
tctaggctaggtggccacgagttgc

SEQ ID NO: 326010 - DNA, 25 bp, Homo sapien
tgactgattcgggggactcggagac

SEQ ID NO: 326011 - DNA, 25 bp, Homo sapien
actgattcgggggactcggagacac

SEQ ID NO: 326012 - DNA, 25 bp, Homo sapien
aggtgactgattcgggggactcgga

SEQ ID NO: 326013 - DNA, 25 bp, Homo sapien
acaggtgactgattcgggggactcg

SEQ ID NO: 326014 - DNA, 25 bp, Homo sapien
catactgcctgcagagtcgtggctg

SEQ ID NO: 326015 - DNA, 25 bp, Homo sapien
tagtataccatgagcccatactgcc

SEQ ID NO: 326016 - DNA, 25 bp, Homo sapien
tggctgccaaaattaacagctgtgg

SEQ ID NO: 326017 - DNA, 25 bp, Homo sapien
aacaggatctttgtccgaggtgaca

SEQ ID NO: 326018 - DNA, 25 bp, Homo sapien
gctgcagcgagctggggctgaggca

SEQ ID NO: 326019 - DNA, 25 bp, Homo sapien
tgggtctccgtagaagctgcagcga

SEQ ID NO: 326020 - DNA, 25 bp, Homo sapien
ctgggtctccgtagaagctgcagcg

SEQ ID NO: 326021 - DNA, 25 bp, Homo sapien
cgagctggggctgaggcagacaagc

SEQ ID NO: 326022 - DNA, 25 bp, Homo sapien
tgtcccaagggctggattgttccag

SEQ ID NO: 326023 - DNA, 25 bp, Homo sapien
cagagagtggattgcatgaacatgg

SEQ ID NO: 326024 - DNA, 25 bp, Homo sapien
tgaacatggctaccatgcagttggt

SEQ ID NO: 326025 - DNA, 25 bp, Homo sapien
tggattcccaaagcaagttcacttg

SEQ ID NO: 326026 - DNA, 25 bp, Homo sapien
ttcacatttcgcagtaggatgatcc

SEQ ID NO: 326027 - DNA, 25 bp, Homo sapien
catttcgcagtaggatgatccctgg

SEQ ID NO: 326028 - DNA, 25 bp, Homo sapien
tggttcacatttcgcagtaggatga

SEQ ID NO: 326029 - DNA, 25 bp, Homo sapien
tgtggttcacatttcgcagtaggat

SEQ ID NO: 326030 - DNA, 25 bp, Homo sapien
gatgtgggacacttcccagatcaca

SEQ ID NO: 326031 - DNA, 25 bp, Homo sapien
caacgagagcttccatggagaggga

SEQ ID NO: 326032 - DNA, 25 bp, Homo sapien
atcggcccacggctgtcgggatgca

SEQ ID NO: 326033 - DNA, 25 bp, Homo sapien
gtgccacgtcctgaacaatcggccc

SEQ ID NO: 326034 - DNA, 25 bp, Homo sapien
gcagcccgtgaagacgggcgctctt

SEQ ID NO: 326035 - DNA, 25 bp, Homo sapien
agcgccagggcagcccgtgaagacg

SEQ ID NO: 326036 - DNA, 25 bp, Homo sapien
tgaagacgggcgctcttcctccgtg

SEQ ID NO: 326037 - DNA, 25 bp, Homo sapien
ggcgctcttcctccgtgactctggg

SEQ ID NO: 326038 - DNA, 25 bp, Homo sapien
gcaggaggaagcccggcttgaggcc

SEQ ID NO: 326039 - DNA, 25 bp, Homo sapien
gcttggcaggatgcacctcccagca

SEQ ID NO: 326040 - DNA, 25 bp, Homo sapien
tcagtagtgtatggaggcggcagca

SEQ ID NO: 326041 - DNA, 25 bp, Homo sapien
ttcaggccaggaccctaccagcaac

SEQ ID NO: 326042 - DNA, 25 bp, Homo sapien
tcccagcaacggtgtgctcacttct

SEQ ID NO: 326043 - DNA, 25 bp, Homo sapien
agatattttaggctgacggtgctca

SEQ ID NO: 326044 - DNA, 25 bp, Homo sapien
tatattatgaaaggcctctagacca

SEQ ID NO: 326045 - DNA, 25 bp, Homo sapien
tcagaacatttgctgcgactcaggt

SEQ ID NO: 326046 - DNA, 25 bp, Homo sapien
gtgttccctcgatgtcccagcagtt

SEQ ID NO: 326047 - DNA, 25 bp, Homo sapien
taagaagtccaaagacccggtgaca

SEQ ID NO: 326048 - DNA, 25 bp, Homo sapien
ggacatcatgctgtggttcccattc

SEQ ID NO: 326049 - DNA, 25 bp, Homo sapien
cttaaatgtgaccagaaaggtggac

SEQ ID NO: 326050 - DNA, 25 bp, Homo sapien
tagtgacggcaaacggagactcatg

SEQ ID NO: 326051 - DNA, 25 bp, Homo sapien
attggtggtctttgggctgcaccag

SEQ ID NO: 326052 - DNA, 25 bp, Homo sapien
gccctccgtctctggagagctgagt

SEQ ID NO: 326053 - DNA, 25 bp, Homo sapien
gtctctggagagctgagtcctgaca

SEQ ID NO: 326054 - DNA, 25 bp, Homo sapien
caggcaattggtgacggtgctgcac

SEQ ID NO: 326055 - DNA, 25 bp, Homo sapien
gtataggcttggctgcccatggcag

SEQ ID NO: 326056 - DNA, 25 bp, Homo sapien
ggcccctgactctttggacccatga

SEQ ID NO: 326057 - DNA, 25 bp, Homo sapien
ggacccatgacgacatcaagagtat

SEQ ID NO: 326058 - DNA, 25 bp, Homo sapien
gtatcttcgtatctgtgctctgcca

SEQ ID NO: 326059 - DNA, 25 bp, Homo sapien
tatggtgtttctggttccccggcca

SEQ ID NO: 326060 - DNA, 25 bp, Homo sapien
tgggctttgctagacctgtggagca

SEQ ID NO: 326061 - DNA, 25 bp, Homo sapien
tccctttagcctgcgaagatccagt

SEQ ID NO: 326062 - DNA, 25 bp, Homo sapien
gacctcaatgtcagcagaccctgtg

SEQ ID NO: 326063 - DNA, 25 bp, Homo sapien
tgagccaagatggcgccttcctcac

SEQ ID NO: 326064 - DNA, 25 bp, Homo sapien
agccaagatggcgccttcctcacag

SEQ ID NO: 326065 - DNA, 25 bp, Homo sapien
ccaggctctgcctgagccaagatgg

SEQ ID NO: 326066 - DNA, 25 bp, Homo sapien
cctgagccaagatggcgccttcctc

SEQ ID NO: 326067 - DNA, 25 bp, Homo sapien
tcatctgtggcctggtattcacctg

SEQ ID NO: 326068 - DNA, 25 bp, Homo sapien
gagtcaacctggtgcctgatagcca

SEQ ID NO: 326069 - DNA, 25 bp, Homo sapien
tcacttgaagcctggtgtcctcctg

SEQ ID NO: 326070 - DNA, 25 bp, Homo sapien
tgatagccacctggggcctacatag

SEQ ID NO: 326071 - DNA, 25 bp, Homo sapien
aggttccatggtaccaaggtttcat

SEQ ID NO: 326072 - DNA, 25 bp, Homo sapien
tacttccatatttcagttgctccaa

SEQ ID NO: 326073 - DNA, 25 bp, Homo sapien
ccatggctccaaggttccatgtttc

SEQ ID NO: 326074 - DNA, 25 bp, Homo sapien
gattacatggttccaaggttccaag

SEQ ID NO: 326075 - DNA, 25 bp, Homo sapien
ctgtttccttgaaggctccccagag

SEQ ID NO: 326076 - DNA, 25 bp, Homo sapien
cagccccgggcctgtttccttgaag

SEQ ID NO: 326077 - DNA, 25 bp, Homo sapien
gtttccttgaaggctccccagagcc

SEQ ID NO: 326078 - DNA, 25 bp, Homo sapien
ccacagccccgggcctgtttccttg

SEQ ID NO: 326079 - DNA, 25 bp, Homo sapien
aatggtgcagtcaccagtcagacgg

SEQ ID NO: 326080 - DNA, 25 bp, Homo sapien
gggtgtgatgcctaccagacattca

SEQ ID NO: 326081 - DNA, 25 bp, Homo sapien
gcctccattggtggcacacccaggt

SEQ ID NO: 326082 - DNA, 25 bp, Homo sapien
caggtgcatccatgaagggtgtgat

SEQ ID NO: 326083 - DNA, 25 bp, Homo sapien
aagttgggcgggacttcagagatcc

SEQ ID NO: 326084 - DNA, 25 bp, Homo sapien
tgggtctgttccctgccccagtgct

SEQ ID NO: 326085 - DNA, 25 bp, Homo sapien
cagaagaggattcccaggatcctgg

SEQ ID NO: 326086 - DNA, 25 bp, Homo sapien
acggtcacagcacccaaaccgcagg

SEQ ID NO: 326087 - DNA, 25 bp, Homo sapien
caccgctgtggtgtgccgggatcct

SEQ ID NO: 326088 - DNA, 25 bp, Homo sapien
tcttccgttgtgaatgccgcgtcct

SEQ ID NO: 326089 - DNA, 25 bp, Homo sapien
ctccagacataaggaggccagaggc

SEQ ID NO: 326090 - DNA, 25 bp, Homo sapien
cctggtgacaggagaacaatgttgg

SEQ ID NO: 326091 - DNA, 25 bp, Homo sapien
ttgggctgctgcacgcgttgctgct

SEQ ID NO: 326092 - DNA, 25 bp, Homo sapien
gtgctgaccggcaacaacctgacgg

SEQ ID NO: 326093 - DNA, 25 bp, Homo sapien
cctatctggccgaggacgagctgcg

SEQ ID NO: 326094 - DNA, 25 bp, Homo sapien
ctgtcgacacaaccgagctggtgct

SEQ ID NO: 326095 - DNA, 25 bp, Homo sapien
gaacccgcacttccaggcttgggag

SEQ ID NO: 326096 - DNA, 25 bp, Homo sapien
aacacgggcctgcaaactcgacagg

SEQ ID NO: 326097 - DNA, 25 bp, Homo sapien
agaccacgtgggacagaactcctgc

SEQ ID NO: 326098 - DNA, 25 bp, Homo sapien
cctgaggagagaaccggtgcgtcct

SEQ ID NO: 326099 - DNA, 25 bp, Homo sapien
aacgtgggggccagtgaggacgttg

SEQ ID NO: 326100 - DNA, 25 bp, Homo sapien
taagtgataacgtgggggccagtga

SEQ ID NO: 326101 - DNA, 25 bp, Homo sapien
gccagtgaggacgttgtggggacac

SEQ ID NO: 326102 - DNA, 25 bp, Homo sapien
ctaagtgataacgtgggggccagtg

SEQ ID NO: 326103 - DNA, 25 bp, Homo sapien
tggacactgacgacgctggaggtaa

SEQ ID NO: 326104 - DNA, 25 bp, Homo sapien
gtgaggacgctgtggacgctgtcgg

SEQ ID NO: 326105 - DNA, 25 bp, Homo sapien
tagacaggacgctgtggaggcggtg

SEQ ID NO: 326106 - DNA, 25 bp, Homo sapien
ctgcggacgttgaggacgctgtggg

SEQ ID NO: 326107 - DNA, 25 bp, Homo sapien
ggtgaggacgctgtggacgcggtga

SEQ ID NO: 326108 - DNA, 25 bp, Homo sapien
ggacgctgtggacgcggtgaggacg

SEQ ID NO: 326109 - DNA, 25 bp, Homo sapien
tgaggacgctgtggacgcggtgagg

SEQ ID NO: 326110 - DNA, 25 bp, Homo sapien
gaggacgctgtggacgcggtgagga

SEQ ID NO: 326111 - DNA, 25 bp, Homo sapien
tgcagatgttgacgctgtggatgct

SEQ ID NO: 326112 - DNA, 25 bp, Homo sapien
tgaggacgctgcagatgttgacgct

SEQ ID NO: 326113 - DNA, 25 bp, Homo sapien
gctgtggacgcggtgaggacactgt

SEQ ID NO: 326114 - DNA, 25 bp, Homo sapien
acagtgaggacgctgtggacgccgt

SEQ ID NO: 326115 - DNA, 25 bp, Homo sapien
tgtggttgtccatccggccttatca

SEQ ID NO: 326116 - DNA, 25 bp, Homo sapien
gatgctatctcgaggctgccagtca

SEQ ID NO: 326117 - DNA, 25 bp, Homo sapien
tgggacaagacagatggccctcctg

SEQ ID NO: 326118 - DNA, 25 bp, Homo sapien
ggccttatcaccacatcgaggacag

SEQ ID NO: 326119 - DNA, 25 bp, Homo sapien
ctgcctgggagcccccagtccccat

SEQ ID NO: 326120 - DNA, 25 bp, Homo sapien
tggctgcctgggagcccccagtccc

SEQ ID NO: 326121 - DNA, 25 bp, Homo sapien
ttccttggctgcctgggagccccca

SEQ ID NO: 326122 - DNA, 25 bp, Homo sapien
cttccttggctgcctgggagccccc

SEQ ID NO: 326123 - DNA, 25 bp, Homo sapien
tcagaaatgacccagcaggagagga

SEQ ID NO: 326124 - DNA, 25 bp, Homo sapien
tgagagtctcttccagtaccaatgt

SEQ ID NO: 326125 - DNA, 25 bp, Homo sapien
agtgataagcctgcacatgtgtgcg

SEQ ID NO: 326126 - DNA, 25 bp, Homo sapien
cattcgccaccaagcaagattcagg

SEQ ID NO: 326127 - DNA, 25 bp, Homo sapien
gccccttgggctatcgaagtatccg

SEQ ID NO: 326128 - DNA, 25 bp, Homo sapien
gctcctacgactattgccccagata

SEQ ID NO: 326129 - DNA, 25 bp, Homo sapien
caaagcgcccggtcggaggcggaag

SEQ ID NO: 326130 - DNA, 25 bp, Homo sapien
atttattgttctccccgagaccgcg

SEQ ID NO: 326131 - DNA, 25 bp, Homo sapien
tgttgctgctgagggcactcccacg

SEQ ID NO: 326132 - DNA, 25 bp, Homo sapien
ggattcattaaacattcaggtcctc

SEQ ID NO: 326133 - DNA, 25 bp, Homo sapien
tcggccacacgtcctaatgaactag

SEQ ID NO: 326134 - DNA, 25 bp, Homo sapien
gccgcgggtcaccacactgctgctg

SEQ ID NO: 326135 - DNA, 25 bp, Homo sapien
ggctggtagccgacgtccatgccag

SEQ ID NO: 326136 - DNA, 25 bp, Homo sapien
gcaacctggatgagtcttgacttta

SEQ ID NO: 326137 - DNA, 25 bp, Homo sapien
gactttatctcacggagggaaggaa

SEQ ID NO: 326138 - DNA, 25 bp, Homo sapien
caatgagtggatgaaaagcagcgac

SEQ ID NO: 326139 - DNA, 25 bp, Homo sapien
caacacccgcttttaggaggagacg

SEQ ID NO: 326140 - DNA, 25 bp, Homo sapien
tctgttgacacaaaggccgacctgt

SEQ ID NO: 326141 - DNA, 25 bp, Homo sapien
tatgtaagacatcagcaggcagtgc

SEQ ID NO: 326142 - DNA, 25 bp, Homo sapien
tgctggccgaacctaccttgtaaag

SEQ ID NO: 326143 - DNA, 25 bp, Homo sapien
aaggaaataccaacctcatgaagac

SEQ ID NO: 326144 - DNA, 25 bp, Homo sapien
tataaaataccctcagctggcaaca

SEQ ID NO: 326145 - DNA, 25 bp, Homo sapien
gtgatgaggcactccacaaaaggaa

SEQ ID NO: 326146 - DNA, 25 bp, Homo sapien
cagagtcaccgtcctgtgatgaggc

SEQ ID NO: 326147 - DNA, 25 bp, Homo sapien
tgcccgccctcctcgtctcccggga

SEQ ID NO: 326148 - DNA, 25 bp, Homo sapien
cttgaggtttcaggccaaggctggg

SEQ ID NO: 326149 - DNA, 25 bp, Homo sapien
ctcctcgtctcccgggaagggagtg

SEQ ID NO: 326150 - DNA, 25 bp, Homo sapien
caaggctggggcctgatgcccacct

SEQ ID NO: 326151 - DNA, 25 bp, Homo sapien
tagagtgaccagaggctgatccgct

SEQ ID NO: 326152 - DNA, 25 bp, Homo sapien
gattggtgagttcatgagtcccacg

SEQ ID NO: 326153 - DNA, 25 bp, Homo sapien
gatctggccggatcgtgacctcggc

SEQ ID NO: 326154 - DNA, 25 bp, Homo sapien
tgcggtggccaggatcttgcgatct

SEQ ID NO: 326155 - DNA, 25 bp, Homo sapien
agctgacgagggtgagaaatacaaa

SEQ ID NO: 326156 - DNA, 25 bp, Homo sapien
gctgacgagggtgagaaatacaaac

SEQ ID NO: 326157 - DNA, 25 bp, Homo sapien
aaagctgacgagggtgagaaataca

SEQ ID NO: 326158 - DNA, 25 bp, Homo sapien
ctgacgagggtgagaaatacaaact

SEQ ID NO: 326159 - DNA, 25 bp, Homo sapien
ggaaatgaggatgatgcgggaagcc

SEQ ID NO: 326160 - DNA, 25 bp, Homo sapien
aaggaccagcttcccgcaggaaatg

SEQ ID NO: 326161 - DNA, 25 bp, Homo sapien
aggatgatgcgggaagcctggtggg

SEQ ID NO: 326162 - DNA, 25 bp, Homo sapien
tggagaaagactagggcctgctcca

SEQ ID NO: 326163 - DNA, 25 bp, Homo sapien
gtggcaagaacgctctcaggcagct

SEQ ID NO: 326164 - DNA, 25 bp, Homo sapien
tggttccgattacccatgctctgct

SEQ ID NO: 326165 - DNA, 25 bp, Homo sapien
tctcgtagcgcatgacctcaggtgc

SEQ ID NO: 326166 - DNA, 25 bp, Homo sapien
caccttgcttgctcccgggtggcaa

SEQ ID NO: 326167 - DNA, 25 bp, Homo sapien
ctgcagagaagagccctccgggggc

SEQ ID NO: 326168 - DNA, 25 bp, Homo sapien
gtctgggtcttcagcgctttgctgt

SEQ ID NO: 326169 - DNA, 25 bp, Homo sapien
gaaactgcagagaagagccctccgg

SEQ ID NO: 326170 - DNA, 25 bp, Homo sapien
tctgggtcttcagcgctttgctgtc

SEQ ID NO: 326171 - DNA, 25 bp, Homo sapien
attcctggactctgcgtgcctttct

SEQ ID NO: 326172 - DNA, 25 bp, Homo sapien
cacaaaggggtttgagtattcctgg

SEQ ID NO: 326173 - DNA, 25 bp, Homo sapien
gtattcctggactctgcgtgccttt

SEQ ID NO: 326174 - DNA, 25 bp, Homo sapien
ctctgagttttcacaaaggggtttg

SEQ ID NO: 326175 - DNA, 25 bp, Homo sapien
ccgcctccaagtgattaattagcca

SEQ ID NO: 326176 - DNA, 25 bp, Homo sapien
gtctgggcgaaacccaaaccatgtg

SEQ ID NO: 326177 - DNA, 25 bp, Homo sapien
catgaacccgaggtctgggcgaaac

SEQ ID NO: 326178 - DNA, 25 bp, Homo sapien
gacaagatgtgacggcatgaacccg

SEQ ID NO: 326179 - DNA, 25 bp, Homo sapien
gggagtcaaagtcaaggtccatgac

SEQ ID NO: 326180 - DNA, 25 bp, Homo sapien
ttctgggagtcaaagtcaaggtcca

SEQ ID NO: 326181 - DNA, 25 bp, Homo sapien
gccttccccgcggagcctgagatgc

SEQ ID NO: 326182 - DNA, 25 bp, Homo sapien
tctgggagtcaaagtcaaggtccat

SEQ ID NO: 326183 - DNA, 25 bp, Homo sapien
tctgctcagagacgtcccacaggac

SEQ ID NO: 326184 - DNA, 25 bp, Homo sapien
ctcatggcaggcgatgcggctgcac

SEQ ID NO: 326185 - DNA, 25 bp, Homo sapien
aggaccaccgatccatcctcatagc

SEQ ID NO: 326186 - DNA, 25 bp, Homo sapien
gcggctgcacaccttctgctcagag

SEQ ID NO: 326187 - DNA, 25 bp, Homo sapien
taataacagagttcacacagacaaa

SEQ ID NO: 326188 - DNA, 25 bp, Homo sapien
caggatgtgggcatgtgaacccgag

SEQ ID NO: 326189 - DNA, 25 bp, Homo sapien
aaccactgggttctaataacagagt

SEQ ID NO: 326190 - DNA, 25 bp, Homo sapien
atgtgggcatgtgaacccgaggcca

SEQ ID NO: 326191 - DNA, 25 bp, Homo sapien
ccctggacatgagcggccccgagga

SEQ ID NO: 326192 - DNA, 25 bp, Homo sapien
caagtgaatgcacgggatcacttgc

SEQ ID NO: 326193 - DNA, 25 bp, Homo sapien
agccctggacatgagcggccccgag

SEQ ID NO: 326194 - DNA, 25 bp, Homo sapien
gggctgaggggctctttgcaagtga

SEQ ID NO: 326195 - DNA, 25 bp, Homo sapien
accacgagctgcggggtgagcccac

SEQ ID NO: 326196 - DNA, 25 bp, Homo sapien
tcactggagggcaccacgagctgcg

SEQ ID NO: 326197 - DNA, 25 bp, Homo sapien
agggcaccacgagctgcggggtgag

SEQ ID NO: 326198 - DNA, 25 bp, Homo sapien
gcaccacgagctgcggggtgagccc

SEQ ID NO: 326199 - DNA, 25 bp, Homo sapien
gagcttgcaaaggacgaggacctgc

SEQ ID NO: 326200 - DNA, 25 bp, Homo sapien
cggagcttgcaaaggacgaggacct

SEQ ID NO: 326201 - DNA, 25 bp, Homo sapien
gcttgcaaaggacgaggacctgctg

SEQ ID NO: 326202 - DNA, 25 bp, Homo sapien
cttgcaaaggacgaggacctgctgc

SEQ ID NO: 326203 - DNA, 25 bp, Homo sapien
gagtggctcgacgataaatcagatc

SEQ ID NO: 326204 - DNA, 25 bp, Homo sapien
tgcctgagtggctcgacgataaatc

SEQ ID NO: 326205 - DNA, 25 bp, Homo sapien
gtgttgcctgagtggctcgacgata

SEQ ID NO: 326206 - DNA, 25 bp, Homo sapien
gcctgagtggctcgacgataaatca

SEQ ID NO: 326207 - DNA, 25 bp, Homo sapien
gcgcacactgacgtcttggagggca

SEQ ID NO: 326208 - DNA, 25 bp, Homo sapien
atctgccttcggcttcagggcgcac

SEQ ID NO: 326209 - DNA, 25 bp, Homo sapien
gcttcagggcgcacactgacgtctt

SEQ ID NO: 326210 - DNA, 25 bp, Homo sapien
tgacgtcttggagggcatctccaga

SEQ ID NO: 326211 - DNA, 25 bp, Homo sapien
accaggagcttagcctctgacagca

SEQ ID NO: 326212 - DNA, 25 bp, Homo sapien
tcagcaccaggagcttagcctctga

SEQ ID NO: 326213 - DNA, 25 bp, Homo sapien
tccagtacgcggaccagggccacgg

SEQ ID NO: 326214 - DNA, 25 bp, Homo sapien
ggaccagggccacggcgcttcttgt

SEQ ID NO: 326215 - DNA, 25 bp, Homo sapien
ggatgctgctccggcagaagcccac

SEQ ID NO: 326216 - DNA, 25 bp, Homo sapien
acggcaagcgtccagcgtggctggc

SEQ ID NO: 326217 - DNA, 25 bp, Homo sapien
tccaagcacacggagtccacgacag

SEQ ID NO: 326218 - DNA, 25 bp, Homo sapien
gccctccgcgaggtcccacaggcac

SEQ ID NO: 326219 - DNA, 25 bp, Homo sapien
aggctccagatgtgtaccaggccac

SEQ ID NO: 326220 - DNA, 25 bp, Homo sapien
ggtaaccgctctccgcgtctgcagg

SEQ ID NO: 326221 - DNA, 25 bp, Homo sapien
gggtggtaaccgctctccgcgtctg

SEQ ID NO: 326222 - DNA, 25 bp, Homo sapien
ggctccagatgtgtaccaggccact

SEQ ID NO: 326223 - DNA, 25 bp, Homo sapien
ctgagaagaggagcgggcgcccctg

SEQ ID NO: 326224 - DNA, 25 bp, Homo sapien
gcctgggctccttcgcagaagtgca

SEQ ID NO: 326225 - DNA, 25 bp, Homo sapien
gactgggtgcctcggaggacaaact

SEQ ID NO: 326226 - DNA, 25 bp, Homo sapien
gaagtgcagcgcatgcaccggtgac

SEQ ID NO: 326227 - DNA, 25 bp, Homo sapien
caaatggacgacaacagcatctgcc

SEQ ID NO: 326228 - DNA, 25 bp, Homo sapien
tcctccctacagatgaagcagggct

SEQ ID NO: 326229 - DNA, 25 bp, Homo sapien
caatttgtgcaactctaacagccct

SEQ ID NO: 326230 - DNA, 25 bp, Homo sapien
tccaggtgtcaaagtgagccacatt

SEQ ID NO: 326231 - DNA, 25 bp, Homo sapien
cagccgttctagcatgaagatgttg

SEQ ID NO: 326232 - DNA, 25 bp, Homo sapien
gccgttctagcatgaagatgttgaa

SEQ ID NO: 326233 - DNA, 25 bp, Homo sapien
agtagcacagccgttctagcatgaa

SEQ ID NO: 326234 - DNA, 25 bp, Homo sapien
gcacagccgttctagcatgaagatg

SEQ ID NO: 326235 - DNA, 25 bp, Homo sapien
cctcgctgagtgattgaagcgtcta

SEQ ID NO: 326236 - DNA, 25 bp, Homo sapien
aaatcccgtgcattgtcaggccctg

SEQ ID NO: 326237 - DNA, 25 bp, Homo sapien
tgttcccctttgaagcctcgctgag

SEQ ID NO: 326238 - DNA, 25 bp, Homo sapien
tttggcgattcggagtcaaaggcgc

SEQ ID NO: 326239 - DNA, 25 bp, Homo sapien
gggcagatagcaccgggctggtaat

SEQ ID NO: 326240 - DNA, 25 bp, Homo sapien
gcagatagcaccgggctggtaatct

SEQ ID NO: 326241 - DNA, 25 bp, Homo sapien
atagcaccgggctggtaatctgact

SEQ ID NO: 326242 - DNA, 25 bp, Homo sapien
tgaggggcagatagcaccgggctgg

SEQ ID NO: 326243 - DNA, 25 bp, Homo sapien
ccacatccacagacatgcgaatgag

SEQ ID NO: 326244 - DNA, 25 bp, Homo sapien
acagacatgcgaatgaggacagagg

SEQ ID NO: 326245 - DNA, 25 bp, Homo sapien
tatgcatgccagcaatgtgcttgcc

SEQ ID NO: 326246 - DNA, 25 bp, Homo sapien
catgccagcaatgtgcttgcccaca

SEQ ID NO: 326247 - DNA, 25 bp, Homo sapien
agccagactgtgagttgctgcagcc

SEQ ID NO: 326248 - DNA, 25 bp, Homo sapien
gccagactgtgagttgctgcagcca

SEQ ID NO: 326249 - DNA, 25 bp, Homo sapien
cagccagactgtgagttgctgcagc

SEQ ID NO: 326250 - DNA, 25 bp, Homo sapien
gccccagcagacaaacaggtatgtt

SEQ ID NO: 326251 - DNA, 25 bp, Homo sapien
taagcagtgccaactgtagccgctg

SEQ ID NO: 326252 - DNA, 25 bp, Homo sapien
tattacatgtgcatcgcggtcggca

SEQ ID NO: 326253 - DNA, 25 bp, Homo sapien
caccgctgtgggcagaactatgtcc

SEQ ID NO: 326254 - DNA, 25 bp, Homo sapien
ggtaaggaccctcagctcatgcggg

SEQ ID NO: 326255 - DNA, 25 bp, Homo sapien
caccaacagtatgagaaggtccact

SEQ ID NO: 326256 - DNA, 25 bp, Homo sapien
gagccttcatgcacctagcaagtag

SEQ ID NO: 326257 - DNA, 25 bp, Homo sapien
catgtagtggtaccgaaccatgacc

SEQ ID NO: 326258 - DNA, 25 bp, Homo sapien
tttcataattgtaacattgaaatct

SEQ ID NO: 326259 - DNA, 25 bp, Homo sapien
ttgaaatctttaatctggaatatgt

SEQ ID NO: 326260 - DNA, 25 bp, Homo sapien
tgaaatctttaatctggaatatgta

SEQ ID NO: 326261 - DNA, 25 bp, Homo sapien
cataattgtaacattgaaatcttta

SEQ ID NO: 326262 - DNA, 25 bp, Homo sapien
gctttactattttccagagggccaa

SEQ ID NO: 326263 - DNA, 25 bp, Homo sapien
ggcaacaaagccactctgaaaggag

SEQ ID NO: 326264 - DNA, 25 bp, Homo sapien
ttctactgccagacccacaggtgag

SEQ ID NO: 326265 - DNA, 25 bp, Homo sapien
tcatctgtctgaaagcaggtgctgc

SEQ ID NO: 326266 - DNA, 25 bp, Homo sapien
tgttaacacacaaagggcgaatgcc

SEQ ID NO: 326267 - DNA, 25 bp, Homo sapien
aagaggagcctgcttcagaacacca

SEQ ID NO: 326268 - DNA, 25 bp, Homo sapien
gaacaccaggcacgattagagctac

SEQ ID NO: 326269 - DNA, 25 bp, Homo sapien
taagtgctgaatccgcaatgcatgc

SEQ ID NO: 326270 - DNA, 25 bp, Homo sapien
aacatcattctttgccaagatgcta

SEQ ID NO: 326271 - DNA, 25 bp, Homo sapien
tcatcccccagaatcaaagtggcca

SEQ ID NO: 326272 - DNA, 25 bp, Homo sapien
caggaaacatcattctttgccaaga

SEQ ID NO: 326273 - DNA, 25 bp, Homo sapien
gcccagaactgctggtaatcccaca

SEQ ID NO: 326274 - DNA, 25 bp, Homo sapien
tgggtgagacggcactcccagaaga

SEQ ID NO: 326275 - DNA, 25 bp, Homo sapien
gagagttgatctacaaaacgacccc

SEQ ID NO: 326276 - DNA, 25 bp, Homo sapien
cccagccagtgtggaagacaccaag

SEQ ID NO: 326277 - DNA, 25 bp, Homo sapien
acagaaaccccatacaggaacgagg

SEQ ID NO: 326278 - DNA, 25 bp, Homo sapien
aaagtggtggctctcctggggtctc

SEQ ID NO: 326279 - DNA, 25 bp, Homo sapien
cccaggagaaagtggtggctctcct

SEQ ID NO: 326280 - DNA, 25 bp, Homo sapien
tcagaacccaggagaaagtggtggc

SEQ ID NO: 326281 - DNA, 25 bp, Homo sapien
tctcctggggtctccggggcctcca

SEQ ID NO: 326282 - DNA, 25 bp, Homo sapien
ggaagaggctggttccacaggacca

SEQ ID NO: 326283 - DNA, 25 bp, Homo sapien
tctgggcaggaggattagctgactc

SEQ ID NO: 326284 - DNA, 25 bp, Homo sapien
gcagtacccatgtcgagtgccaggc

SEQ ID NO: 326285 - DNA, 25 bp, Homo sapien
tagctgactccgacagtctagggac

SEQ ID NO: 326286 - DNA, 25 bp, Homo sapien
acaacttccttgagatcctggcaga

SEQ ID NO: 326287 - DNA, 25 bp, Homo sapien
cagaagagctcgtaatcgtcaggca

SEQ ID NO: 326288 - DNA, 25 bp, Homo sapien
gaaggacatgtaatcgcccagctgg

SEQ ID NO: 326289 - DNA, 25 bp, Homo sapien
tgaggatctcgcagacacggctgat

SEQ ID NO: 326290 - DNA, 25 bp, Homo sapien
atgggaatgcgagggccctgctgac

SEQ ID NO: 326291 - DNA, 25 bp, Homo sapien
taattggcggctgcccagatgggaa

SEQ ID NO: 326292 - DNA, 25 bp, Homo sapien
gctgccatggatgtgcgttggcata

SEQ ID NO: 326293 - DNA, 25 bp, Homo sapien
gccgctcaatccagggatccacaag

SEQ ID NO: 326294 - DNA, 25 bp, Homo sapien
gaagagctgagagactgtcagtcgc

SEQ ID NO: 326295 - DNA, 25 bp, Homo sapien
gtcgcaggccatcatccgaggcaat

SEQ ID NO: 326296 - DNA, 25 bp, Homo sapien
gtggcttgcacgacacaacaggaca

SEQ ID NO: 326297 - DNA, 25 bp, Homo sapien
agggcgtggcagacccgcactggtc

SEQ ID NO: 326298 - DNA, 25 bp, Homo sapien
cacagaccgtgggacgggcctccct

SEQ ID NO: 326299 - DNA, 25 bp, Homo sapien
cgaatcgcccgcgaagagggtcctg

SEQ ID NO: 326300 - DNA, 25 bp, Homo sapien
agggtcctgggatccgtagccacag

SEQ ID NO: 326301 - DNA, 25 bp, Homo sapien
ctgaggctacgcgaatcgcccgcga

SEQ ID NO: 326302 - DNA, 25 bp, Homo sapien
gcgcggcttcccgagactgcgagaa

SEQ ID NO: 326303 - DNA, 25 bp, Homo sapien
gagaacggcccaaatgtctccaggt

SEQ ID NO: 326304 - DNA, 25 bp, Homo sapien
aaagtggagaacgagatcggccgcc

SEQ ID NO: 326305 - DNA, 25 bp, Homo sapien
ctagaaagtggagaacgagatcggc

SEQ ID NO: 326306 - DNA, 25 bp, Homo sapien
gtgcacggagttcaagccggccgcc

SEQ ID NO: 326307 - DNA, 25 bp, Homo sapien
cgaaggcactgcgacccaggctggg

SEQ ID NO: 326308 - DNA, 25 bp, Homo sapien
tccgagtgcccctctgcggatcaga

SEQ ID NO: 326309 - DNA, 25 bp, Homo sapien
tctgcggatcagaagtcgggaaaag

SEQ ID NO: 326310 - DNA, 25 bp, Homo sapien
tgtatgccgtgtggccgctacctcg

SEQ ID NO: 326311 - DNA, 25 bp, Homo sapien
ggaacgcctgctcctaggagcgccg

SEQ ID NO: 326312 - DNA, 25 bp, Homo sapien
ctcttgccggagtcgggaacgcctg

SEQ ID NO: 326313 - DNA, 25 bp, Homo sapien
gcgcagcgtccagagaccgattaca

SEQ ID NO: 326314 - DNA, 25 bp, Homo sapien
tgccctggcgtcagccagacactgg

SEQ ID NO: 326315 - DNA, 25 bp, Homo sapien
ttagggcccggttcgacgtagctgc

SEQ ID NO: 326316 - DNA, 25 bp, Homo sapien
ctgggcctcgtgagcgccctggaac

SEQ ID NO: 326317 - DNA, 25 bp, Homo sapien
gagtgcctctcatcactcattgcca

SEQ ID NO: 326318 - DNA, 25 bp, Homo sapien
ctgggcctccttgttgtggatataa

SEQ ID NO: 326319 - DNA, 25 bp, Homo sapien
ggcctccttgttgtggatataattg

SEQ ID NO: 326320 - DNA, 25 bp, Homo sapien
tctgggcctccttgttgtggatata

SEQ ID NO: 326321 - DNA, 25 bp, Homo sapien
tgggcctccttgttgtggatataat

SEQ ID NO: 326322 - DNA, 25 bp, Homo sapien
tgaactcctaggcttggcaaaatat

SEQ ID NO: 326323 - DNA, 25 bp, Homo sapien
cccagactagagtttagtagcctga

SEQ ID NO: 326324 - DNA, 25 bp, Homo sapien
taggattgcattgcctctgatgacc

SEQ ID NO: 326325 - DNA, 25 bp, Homo sapien
tgaacaaccgaacctggcctgtgat

SEQ ID NO: 326326 - DNA, 25 bp, Homo sapien
ccatgtctggctaactttttaaatt

SEQ ID NO: 326327 - DNA, 25 bp, Homo sapien
accatgtctggctaactttttaaat

SEQ ID NO: 326328 - DNA, 25 bp, Homo sapien
tgagcaccgtacaccatgtcagggc

SEQ ID NO: 326329 - DNA, 25 bp, Homo sapien
caggctcgggcctaagatgctttgc

SEQ ID NO: 326330 - DNA, 25 bp, Homo sapien
agggaaggctctgggaacgccagct

SEQ ID NO: 326331 - DNA, 25 bp, Homo sapien
ctctgggaacgccagcttgggtttt

SEQ ID NO: 326332 - DNA, 25 bp, Homo sapien
gggggaccatcagggacaccgcagg

SEQ ID NO: 326333 - DNA, 25 bp, Homo sapien
gggaccatcagggacaccgcaggca

SEQ ID NO: 326334 - DNA, 25 bp, Homo sapien
gaccatcagggacaccgcaggcaga

SEQ ID NO: 326335 - DNA, 25 bp, Homo sapien
ctgggggaccatcagggacaccgca

SEQ ID NO: 326336 - DNA, 25 bp, Homo sapien
cattgcagaaatgccagggggctcg

SEQ ID NO: 326337 - DNA, 25 bp, Homo sapien
tcggacatgggtgcccacagggtag

SEQ ID NO: 326338 - DNA, 25 bp, Homo sapien
ttccacccaggtcgtcatcatctgg

SEQ ID NO: 326339 - DNA, 25 bp, Homo sapien
taggtttccacccaggtcgtcatca

SEQ ID NO: 326340 - DNA, 25 bp, Homo sapien
ccatccctgtggggcacacgggcca

SEQ ID NO: 326341 - DNA, 25 bp, Homo sapien
caggggtgaggtggacagtcccctg

SEQ ID NO: 326342 - DNA, 25 bp, Homo sapien
catccctgtggggcacacgggccac

SEQ ID NO: 326343 - DNA, 25 bp, Homo sapien
aggggtgaggtggacagtcccctga

SEQ ID NO: 326344 - DNA, 25 bp, Homo sapien
ccagcacttgcgctccacgctgacc

SEQ ID NO: 326345 - DNA, 25 bp, Homo sapien
agcacttgcgctccacgctgaccat

SEQ ID NO: 326346 - DNA, 25 bp, Homo sapien
tccacgctgaccatctcacaggcgc

SEQ ID NO: 326347 - DNA, 25 bp, Homo sapien
ctgtccagcacttgcgctccacgct

SEQ ID NO: 326348 - DNA, 25 bp, Homo sapien
tgcactattagaccacgaggcgagg

SEQ ID NO: 326349 - DNA, 25 bp, Homo sapien
gataggctgctaaggatgagccccg

SEQ ID NO: 326350 - DNA, 25 bp, Homo sapien
ttgtttatccctatcgagcgcggcc

SEQ ID NO: 326351 - DNA, 25 bp, Homo sapien
tccccagaagaggtcacgatgaaca

SEQ ID NO: 326352 - DNA, 25 bp, Homo sapien
gctggcggcgggcgcaccgtgtgcc

SEQ ID NO: 326353 - DNA, 25 bp, Homo sapien
tgggtctggcctccgaggagctggc

SEQ ID NO: 326354 - DNA, 25 bp, Homo sapien
ggagctggcggcgggcgcaccgtgt

SEQ ID NO: 326355 - DNA, 25 bp, Homo sapien
gcggcgggcgcaccgtgtgccctgg

SEQ ID NO: 326356 - DNA, 25 bp, Homo sapien
catgtgggatggatacccacggtcc

SEQ ID NO: 326357 - DNA, 25 bp, Homo sapien
ggatggatacccacggtccgcatca

SEQ ID NO: 326358 - DNA, 25 bp, Homo sapien
ttgactacctcctcagagcatgtgg

SEQ ID NO: 326359 - DNA, 25 bp, Homo sapien
cctgagcgcttggagatgcgcagct

SEQ ID NO: 326360 - DNA, 25 bp, Homo sapien
agagcaaatccttgagtaacttcgc

SEQ ID NO: 326361 - DNA, 25 bp, Homo sapien
cttgagtaacttcgcctgcgttggg

SEQ ID NO: 326362 - DNA, 25 bp, Homo sapien
aaatccttgagtaacttcgcctgcg

SEQ ID NO: 326363 - DNA, 25 bp, Homo sapien
gcaaatccttgagtaacttcgcctg

SEQ ID NO: 326364 - DNA, 25 bp, Homo sapien
tgaaagccgcacatctcagccacca

SEQ ID NO: 326365 - DNA, 25 bp, Homo sapien
agggggctgggttgcgtccaccctg

SEQ ID NO: 326366 - DNA, 25 bp, Homo sapien
gggggctgggttgcgtccaccctgc

SEQ ID NO: 326367 - DNA, 25 bp, Homo sapien
ctgaaagccgcacatctcagccacc

SEQ ID NO: 326368 - DNA, 25 bp, Homo sapien
cactgggatgcatctcgtccagcca

SEQ ID NO: 326369 - DNA, 25 bp, Homo sapien
gtccagccaccgtgaactccagtgg

SEQ ID NO: 326370 - DNA, 25 bp, Homo sapien
ctttacataacactgggatgcatct

SEQ ID NO: 326371 - DNA, 25 bp, Homo sapien
cagtggtttataatgggcgtgatag

SEQ ID NO: 326372 - DNA, 25 bp, Homo sapien
gtgcaggccctctcacgtgcaggca

SEQ ID NO: 326373 - DNA, 25 bp, Homo sapien
gccctctcacgtgcaggcagccagt

SEQ ID NO: 326374 - DNA, 25 bp, Homo sapien
gggtcatggcgggcaggaaccatcc

SEQ ID NO: 326375 - DNA, 25 bp, Homo sapien
ggtcatggcgggcaggaaccatcca

SEQ ID NO: 326376 - DNA, 25 bp, Homo sapien
caacaaatggtggaggcaagaatgg

SEQ ID NO: 326377 - DNA, 25 bp, Homo sapien
ccggagctgttggacaaaggctttc

SEQ ID NO: 326378 - DNA, 25 bp, Homo sapien
ttggccctcactggagcaaggccgc

SEQ ID NO: 326379 - DNA, 25 bp, Homo sapien
caccctggtgtttgcttggccctca

SEQ ID NO: 326380 - DNA, 25 bp, Homo sapien
gctcgatgaaaacccctttcctcaa

SEQ ID NO: 326381 - DNA, 25 bp, Homo sapien
ccctttcctcaagggtgagtgcctg

SEQ ID NO: 326382 - DNA, 25 bp, Homo sapien
agcaggcttgctcgatgaaaacccc

SEQ ID NO: 326383 - DNA, 25 bp, Homo sapien
ccccaaagcaggcttgctcgatgaa

SEQ ID NO: 326384 - DNA, 25 bp, Homo sapien
ccccacacagccatactccagcggg

SEQ ID NO: 326385 - DNA, 25 bp, Homo sapien
ccagcggggtgaagacggtcgtggg

SEQ ID NO: 326386 - DNA, 25 bp, Homo sapien
cagccatactccagcggggtgaaga

SEQ ID NO: 326387 - DNA, 25 bp, Homo sapien
gctcctgcccgtggcgagccactgc

SEQ ID NO: 326388 - DNA, 25 bp, Homo sapien
agcctcccggccatgatcgctatgg

SEQ ID NO: 326389 - DNA, 25 bp, Homo sapien
catgatcgctatgggtgtcagctca

SEQ ID NO: 326390 - DNA, 25 bp, Homo sapien
attgtcgtagtccatcagatctgag

SEQ ID NO: 326391 - DNA, 25 bp, Homo sapien
tgaggacccgccgaagagccgctgc

SEQ ID NO: 326392 - DNA, 25 bp, Homo sapien
gagtgggcatctccctttagaaaat

SEQ ID NO: 326393 - DNA, 25 bp, Homo sapien
gggccacgtcagcaccatgtccggg

SEQ ID NO: 326394 - DNA, 25 bp, Homo sapien
cactggcaccgagcatggtgacgta

SEQ ID NO: 326395 - DNA, 25 bp, Homo sapien
gccatcaccctttgccctccgagtg

SEQ ID NO: 326396 - DNA, 25 bp, Homo sapien
cccctagagctcgtcctcctgaggg

SEQ ID NO: 326397 - DNA, 25 bp, Homo sapien
gcatcccaaggacctaggtaggttg

SEQ ID NO: 326398 - DNA, 25 bp, Homo sapien
gacctaggtaggttgctcattctcc

SEQ ID NO: 326399 - DNA, 25 bp, Homo sapien
gtaggttgctcattctcctgtttgc

SEQ ID NO: 326400 - DNA, 25 bp, Homo sapien
ggccgtgccaccctcacatgctcaa

SEQ ID NO: 326401 - DNA, 25 bp, Homo sapien
gtgccaccctcacatgctcaagcct

SEQ ID NO: 326402 - DNA, 25 bp, Homo sapien
gctgatgaggctggccgtgccaccc

SEQ ID NO: 326403 - DNA, 25 bp, Homo sapien
tctccaaaccccttctgcacattgc

SEQ ID NO: 326404 - DNA, 25 bp, Homo sapien
tgaccaagctcaaaagagcccctgc

SEQ ID NO: 326405 - DNA, 25 bp, Homo sapien
atgaccaagctcaaaagagcccctg

SEQ ID NO: 326406 - DNA, 25 bp, Homo sapien
gaccaagctcaaaagagcccctgct

SEQ ID NO: 326407 - DNA, 25 bp, Homo sapien
ccaagctcaaaagagcccctgctac

SEQ ID NO: 326408 - DNA, 25 bp, Homo sapien
cattccagaaatgcatagagatccg

SEQ ID NO: 326409 - DNA, 25 bp, Homo sapien
catgtgctcctgacgtgcagcttga

SEQ ID NO: 326410 - DNA, 25 bp, Homo sapien
aagggaccccaaagcgttccatgtg

SEQ ID NO: 326411 - DNA, 25 bp, Homo sapien
gaatgtcgctgtgctggagatccct

SEQ ID NO: 326412 - DNA, 25 bp, Homo sapien
cagaggctgcgcttgcagaaatcac

SEQ ID NO: 326413 - DNA, 25 bp, Homo sapien
ggagcctgggagctacacacttgca

SEQ ID NO: 326414 - DNA, 25 bp, Homo sapien
cacacttgcagagggaaaactcaga

SEQ ID NO: 326415 - DNA, 25 bp, Homo sapien
gtgcagcgcccacaggattcaacag

SEQ ID NO: 326416 - DNA, 25 bp, Homo sapien
gctacaaagaagctctcagcgaccc

SEQ ID NO: 326417 - DNA, 25 bp, Homo sapien
gctgccagggtgcagtatcccaaga

SEQ ID NO: 326418 - DNA, 25 bp, Homo sapien
tggtgatttggtaccacagccccag

SEQ ID NO: 326419 - DNA, 25 bp, Homo sapien
gacactgacaggtctcgctacaaag

SEQ ID NO: 326420 - DNA, 25 bp, Homo sapien
tgagtgtcggggctagtatctaccc

SEQ ID NO: 326421 - DNA, 25 bp, Homo sapien
gggctagtatctaccccagccttct

SEQ ID NO: 326422 - DNA, 25 bp, Homo sapien
ttcccgggagtccaccaggatcttc

SEQ ID NO: 326423 - DNA, 25 bp, Homo sapien
caccaatggcgtagatgtggggcac

SEQ ID NO: 326424 - DNA, 25 bp, Homo sapien
tgacatcaaagagtgctaagcgcgg

SEQ ID NO: 326425 - DNA, 25 bp, Homo sapien
caccggtggaaactggagtcggcct

SEQ ID NO: 326426 - DNA, 25 bp, Homo sapien
gaatgtccacttagaactggccaaa

SEQ ID NO: 326427 - DNA, 25 bp, Homo sapien
gaatgtccacttagagaccgggtgc

SEQ ID NO: 326428 - DNA, 25 bp, Homo sapien
tcctctgcacgcttgcctggctggt

SEQ ID NO: 326429 - DNA, 25 bp, Homo sapien
ctcagccgtctggtccctctccaac

SEQ ID NO: 326430 - DNA, 25 bp, Homo sapien
acactctcctctgcacgcttgcctg

SEQ ID NO: 326431 - DNA, 25 bp, Homo sapien
gctccgtgccggaacagaacatctg

SEQ ID NO: 326432 - DNA, 25 bp, Homo sapien
cacaccagtttaagcagcagacaga

SEQ ID NO: 326433 - DNA, 25 bp, Homo sapien
cacgggccaatttctgtttgtgtac

SEQ ID NO: 326434 - DNA, 25 bp, Homo sapien
agagggcccagctggacgtcggcag

SEQ ID NO: 326435 - DNA, 25 bp, Homo sapien
ttgtgtactgtagcaagagggccca

SEQ ID NO: 326436 - DNA, 25 bp, Homo sapien
gtatggccgcaagccccaaggaacg

SEQ ID NO: 326437 - DNA, 25 bp, Homo sapien
ggtggccgaactgaccagccatcct

SEQ ID NO: 326438 - DNA, 25 bp, Homo sapien
tgaccatggtgcagagtatggccgc

SEQ ID NO: 326439 - DNA, 25 bp, Homo sapien
ggaacgtcccttcagagatggcaac

SEQ ID NO: 326440 - DNA, 25 bp, Homo sapien
tatgatgtgtaagaccccacagtca

SEQ ID NO: 326441 - DNA, 25 bp, Homo sapien
ggtcccatcgagacgccatgttagt

SEQ ID NO: 326442 - DNA, 25 bp, Homo sapien
ggatgtctcatacccagggcggctc

SEQ ID NO: 326443 - DNA, 25 bp, Homo sapien
tcccctcaggcagcataagggcctt

SEQ ID NO: 326444 - DNA, 25 bp, Homo sapien
aactagccctcaagccaagcgtggg

SEQ ID NO: 326445 - DNA, 25 bp, Homo sapien
agcaccaccatgagctagggctgag

SEQ ID NO: 326446 - DNA, 25 bp, Homo sapien
taacaagacccagttggacaaccat

SEQ ID NO: 326447 - DNA, 25 bp, Homo sapien
gacaaccatgtatgcaggtgccggc

SEQ ID NO: 326448 - DNA, 25 bp, Homo sapien
cttgtgtagctgagtctgcggtgta

SEQ ID NO: 326449 - DNA, 25 bp, Homo sapien
aacagagggacaatccgcagggact

SEQ ID NO: 326450 - DNA, 25 bp, Homo sapien
gcaaagacagttgcctgccgtgtac

SEQ ID NO: 326451 - DNA, 25 bp, Homo sapien
ccatcagccgagcacagctgagcaa

SEQ ID NO: 326452 - DNA, 25 bp, Homo sapien
aaaacgctcgcagttgctgacctgg

SEQ ID NO: 326453 - DNA, 25 bp, Homo sapien
taaaggcttatcgtacaaaccagca

SEQ ID NO: 326454 - DNA, 25 bp, Homo sapien
cctgaatgtttacaaaacctggctc

SEQ ID NO: 326455 - DNA, 25 bp, Homo sapien
cagcagcgaagtcagcacatgcccg

SEQ ID NO: 326456 - DNA, 25 bp, Homo sapien
gctcttgctgactgatcacctccgg

SEQ ID NO: 326457 - DNA, 25 bp, Homo sapien
gatgagaaccatcagtacactccag

SEQ ID NO: 326458 - DNA, 25 bp, Homo sapien
tgcgtgcgctcaggcatctcaggtc

SEQ ID NO: 326459 - DNA, 25 bp, Homo sapien
tacttttacaacgtggctgagaaca

SEQ ID NO: 326460 - DNA, 25 bp, Homo sapien
ttgcggcggcccatctgcaatggcc

SEQ ID NO: 326461 - DNA, 25 bp, Homo sapien
cttgcggcggcccatctgcaatggc

SEQ ID NO: 326462 - DNA, 25 bp, Homo sapien
ccttgcggcggcccatctgcaatgg

SEQ ID NO: 326463 - DNA, 25 bp, Homo sapien
gaagtccctcgaggagtcagatcca

SEQ ID NO: 326464 - DNA, 25 bp, Homo sapien
aactctaacaaatgctgcaacatgg

SEQ ID NO: 326465 - DNA, 25 bp, Homo sapien
gaaatgctggcacatgctacacaaa

SEQ ID NO: 326466 - DNA, 25 bp, Homo sapien
gacacacagtgaagggtgagtgccc

SEQ ID NO: 326467 - DNA, 25 bp, Homo sapien
gattgcctagttgatcctcgatgag

SEQ ID NO: 326468 - DNA, 25 bp, Homo sapien
gagaccctgtttcacacgcaaaaaa

SEQ ID NO: 326469 - DNA, 25 bp, Homo sapien
aacaacaaactagcttggctgggca

SEQ ID NO: 326470 - DNA, 25 bp, Homo sapien
gatggatggtcatgctgcttgtaca

SEQ ID NO: 326471 - DNA, 25 bp, Homo sapien
catgtcccacggtggtggggagaca

SEQ ID NO: 326472 - DNA, 25 bp, Homo sapien
ccagcatgtcccacggtggtgggga

SEQ ID NO: 326473 - DNA, 25 bp, Homo sapien
gcatgtcccacggtggtggggagac

SEQ ID NO: 326474 - DNA, 25 bp, Homo sapien
agcatgtcccacggtggtggggaga

SEQ ID NO: 326475 - DNA, 25 bp, Homo sapien
cctagtgtgagtgccgccccacagg

SEQ ID NO: 326476 - DNA, 25 bp, Homo sapien
cacaggccttcacggttgctctcga

SEQ ID NO: 326477 - DNA, 25 bp, Homo sapien
aagatgggcacagcctagtgtgagt

SEQ ID NO: 326478 - DNA, 25 bp, Homo sapien
cacggttgctctcgaggtgcactgg

SEQ ID NO: 326479 - DNA, 25 bp, Homo sapien
acctcggggagaccagagacagagc

SEQ ID NO: 326480 - DNA, 25 bp, Homo sapien
aagattctccatgcacctcggggag

SEQ ID NO: 326481 - DNA, 25 bp, Homo sapien
agcgtgtggctcgacgtgcccttac

SEQ ID NO: 326482 - DNA, 25 bp, Homo sapien
gagacagagcgtgtggctcgacgtg

SEQ ID NO: 326483 - DNA, 25 bp, Homo sapien
catgtgctctatgaccatggaggac

SEQ ID NO: 326484 - DNA, 25 bp, Homo sapien
ggaaccgggtgccatgagatgccat

SEQ ID NO: 326485 - DNA, 25 bp, Homo sapien
ccacaggacggtgtcaaaggtgccc

SEQ ID NO: 326486 - DNA, 25 bp, Homo sapien
ggcacagcccctcaggaaccgggtg

SEQ ID NO: 326487 - DNA, 25 bp, Homo sapien
tgagggagaaccatggagcctgtcc

SEQ ID NO: 326488 - DNA, 25 bp, Homo sapien
cagcctggctgcctagactgtgcat

SEQ ID NO: 326489 - DNA, 25 bp, Homo sapien
gacttgcacggaccagcagtgaagc

SEQ ID NO: 326490 - DNA, 25 bp, Homo sapien
taaaaccaatggcagagaagcgtgc

SEQ ID NO: 326491 - DNA, 25 bp, Homo sapien
ctggtcgaagccgcggagggggatg

SEQ ID NO: 326492 - DNA, 25 bp, Homo sapien
tggtcgaagccgcggagggggatgc

SEQ ID NO: 326493 - DNA, 25 bp, Homo sapien
ggtcgaagccgcggagggggatgct

SEQ ID NO: 326494 - DNA, 25 bp, Homo sapien
gtccagcccaatcccggtgaggaag

SEQ ID NO: 326495 - DNA, 25 bp, Homo sapien
cagcccaatcccggtgaggaagcca

SEQ ID NO: 326496 - DNA, 25 bp, Homo sapien
tccagcccaatcccggtgaggaagc

SEQ ID NO: 326497 - DNA, 25 bp, Homo sapien
agcccaatcccggtgaggaagccag

SEQ ID NO: 326498 - DNA, 25 bp, Homo sapien
ctaaggagcactgtagatcccaatt

SEQ ID NO: 326499 - DNA, 25 bp, Homo sapien
aaatgatgggacaacaccccagggc

SEQ ID NO: 326500 - DNA, 25 bp, Homo sapien
ggagcactgtagatcccaattttgg

SEQ ID NO: 326501 - DNA, 25 bp, Homo sapien
cccaattttggaaatgatgggacaa

SEQ ID NO: 326502 - DNA, 25 bp, Homo sapien
ggcctctgctcccatgtgctgtcca

SEQ ID NO: 326503 - DNA, 25 bp, Homo sapien
gcctctgctcccatgtgctgtccat

SEQ ID NO: 326504 - DNA, 25 bp, Homo sapien
taaggacggataagcccaatgtcat

SEQ ID NO: 326505 - DNA, 25 bp, Homo sapien
tttgaacaagaggaggtgatgtaag

SEQ ID NO: 326506 - DNA, 25 bp, Homo sapien
aggtgatgtaaggacggataagccc

SEQ ID NO: 326507 - DNA, 25 bp, Homo sapien
gatgtaaggacggataagcccaatg

SEQ ID NO: 326508 - DNA, 25 bp, Homo sapien
ccttgaccctatgtgttcggctgaa

SEQ ID NO: 326509 - DNA, 25 bp, Homo sapien
caagggccaccttcaaagtcacagg

SEQ ID NO: 326510 - DNA, 25 bp, Homo sapien
cagtgggcatattcccgagtgggca

SEQ ID NO: 326511 - DNA, 25 bp, Homo sapien
aaagctcacgtctcgctcgtgtgga

SEQ ID NO: 326512 - DNA, 25 bp, Homo sapien
gacagctggtctccctattgctgaa

SEQ ID NO: 326513 - DNA, 25 bp, Homo sapien
tgcagtctggtaacaagccccagga

SEQ ID NO: 326514 - DNA, 25 bp, Homo sapien
ttgctgaacacaaggacatcccatc

SEQ ID NO: 326515 - DNA, 25 bp, Homo sapien
caccagcggaatgtgccacttaaat

SEQ ID NO: 326516 - DNA, 25 bp, Homo sapien
ttgggccattgcaattcagtttggg

SEQ ID NO: 326517 - DNA, 25 bp, Homo sapien
ttgcaattcagtttgggggacagag

SEQ ID NO: 326518 - DNA, 25 bp, Homo sapien
tgcaattcagtttgggggacagagt

SEQ ID NO: 326519 - DNA, 25 bp, Homo sapien
aagattgggccattgcaattcagtt

SEQ ID NO: 326520 - DNA, 25 bp, Homo sapien
gaggaccccaccaagcacgcgcagg

SEQ ID NO: 326521 - DNA, 25 bp, Homo sapien
cacaggctctaagggtccagtgctc

SEQ ID NO: 326522 - DNA, 25 bp, Homo sapien
gcacaggctctaagggtccagtgct

SEQ ID NO: 326523 - DNA, 25 bp, Homo sapien
aaaagaggaccccaccaagcacgcg

SEQ ID NO: 326524 - DNA, 25 bp, Homo sapien
ccaggggattccttcagccagaaga

SEQ ID NO: 326525 - DNA, 25 bp, Homo sapien
gggattccttcagccagaagatgtc

SEQ ID NO: 326526 - DNA, 25 bp, Homo sapien
caggggattccttcagccagaagat

SEQ ID NO: 326527 - DNA, 25 bp, Homo sapien
gaagatgtcatcacttgtgattcca

SEQ ID NO: 326528 - DNA, 25 bp, Homo sapien
tagcggccatgagaacaagatgtgc

SEQ ID NO: 326529 - DNA, 25 bp, Homo sapien
tcaaggaaaaccgaaaggtctggca

SEQ ID NO: 326530 - DNA, 25 bp, Homo sapien
tctggcaatcaaagggactaaaacg

SEQ ID NO: 326531 - DNA, 25 bp, Homo sapien
ctggatcccctgtgagcccaaagag

SEQ ID NO: 326532 - DNA, 25 bp, Homo sapien
tgaagaaacaagaaaccatgaccct

SEQ ID NO: 326533 - DNA, 25 bp, Homo sapien
tgtaaaacacagtcattgtggaaaa

SEQ ID NO: 326534 - DNA, 25 bp, Homo sapien
cccttacaccccactggaaggaatg

SEQ ID NO: 326535 - DNA, 25 bp, Homo sapien
tggtttccaaagttatcgcattaaa

SEQ ID NO: 326536 - DNA, 25 bp, Homo sapien
catttcagcagtgtggattcaagag

SEQ ID NO: 326537 - DNA, 25 bp, Homo sapien
tatccctcaaagaggccgggaatgg

SEQ ID NO: 326538 - DNA, 25 bp, Homo sapien
gagacttaggaagcaggatcctggt

SEQ ID NO: 326539 - DNA, 25 bp, Homo sapien
gagagcagaacgagagctgtcctga

SEQ ID NO: 326540 - DNA, 25 bp, Homo sapien
ggccgccctccagtagcaatgatga

SEQ ID NO: 326541 - DNA, 25 bp, Homo sapien
gtgcgtggggtatctcggccgccct

SEQ ID NO: 326542 - DNA, 25 bp, Homo sapien
cgtggggtatctcggccgccctcca

SEQ ID NO: 326543 - DNA, 25 bp, Homo sapien
cggccgccctccagtagcaatgatg

SEQ ID NO: 326544 - DNA, 25 bp, Homo sapien
ttggcaacgccgcaaaccgtgtgct

SEQ ID NO: 326545 - DNA, 25 bp, Homo sapien
caacaaagctggctttgatgttaaa

SEQ ID NO: 326546 - DNA, 25 bp, Homo sapien
caaaccgtgtgctcgtcaacaaagc

SEQ ID NO: 326547 - DNA, 25 bp, Homo sapien
gctggctttgatgttaaagtacttg

SEQ ID NO: 326548 - DNA, 25 bp, Homo sapien
caactggatcaatagggaacactgg

SEQ ID NO: 326549 - DNA, 25 bp, Homo sapien
tggtaacaccaagagaacgggcatg

SEQ ID NO: 326550 - DNA, 25 bp, Homo sapien
taagcggcaaccatgctgagaagca

SEQ ID NO: 326551 - DNA, 25 bp, Homo sapien
tcagatggaccaagaggtaagcggc

SEQ ID NO: 326552 - DNA, 25 bp, Homo sapien
cgtgattttgaacagcttctgccat

SEQ ID NO: 326553 - DNA, 25 bp, Homo sapien
tttcacgtgattttgaacagcttct

SEQ ID NO: 326554 - DNA, 25 bp, Homo sapien
gccccagttcaaggatttcacgtga

SEQ ID NO: 326555 - DNA, 25 bp, Homo sapien
cggtggccccagttcaaggatttca

SEQ ID NO: 326556 - DNA, 25 bp, Homo sapien
catagttgggggcatcttggatcag

SEQ ID NO: 326557 - DNA, 25 bp, Homo sapien
tgggggcatcttggatcaggcctcc

SEQ ID NO: 326558 - DNA, 25 bp, Homo sapien
cagtcatgcggcacgggctgggcca

SEQ ID NO: 326559 - DNA, 25 bp, Homo sapien
cacctcccagccatagttgggggca

SEQ ID NO: 326560 - DNA, 25 bp, Homo sapien
cttggggatgcagcccacgttgacg

SEQ ID NO: 326561 - DNA, 25 bp, Homo sapien
ttcttggggatgcagcccacgttga

SEQ ID NO: 326562 - DNA, 25 bp, Homo sapien
ggatgcagcccacgttgacgcaggt

SEQ ID NO: 326563 - DNA, 25 bp, Homo sapien
tgcagcccacgttgacgcaggtgcc

SEQ ID NO: 326564 - DNA, 25 bp, Homo sapien
gagaaggttccacgtagtccaccac

SEQ ID NO: 326565 - DNA, 25 bp, Homo sapien
agaaggttccacgtagtccaccacg

SEQ ID NO: 326566 - DNA, 25 bp, Homo sapien
gcaaacagggcgttcatcttcatcc

SEQ ID NO: 326567 - DNA, 25 bp, Homo sapien
tcatcctttatagccacatagccac

SEQ ID NO: 326568 - DNA, 25 bp, Homo sapien
ggttttgatggattagtgtatcccc

SEQ ID NO: 326569 - DNA, 25 bp, Homo sapien
taaccttgatccaagcgaggctgaa

SEQ ID NO: 326570 - DNA, 25 bp, Homo sapien
accaggagatcatagtcccgctgac

SEQ ID NO: 326571 - DNA, 25 bp, Homo sapien
aggccaccagatcccccgccgacca

SEQ ID NO: 326572 - DNA, 25 bp, Homo sapien
ccgccgaccaccaggagatcatagt

SEQ ID NO: 326573 - DNA, 25 bp, Homo sapien
cttggcacaagccaggccaccagat

SEQ ID NO: 326574 - DNA, 25 bp, Homo sapien
gatggtcaggggtgacaagacacca

SEQ ID NO: 326575 - DNA, 25 bp, Homo sapien
gtgatggtcaggggtgacaagacac

SEQ ID NO: 326576 - DNA, 25 bp, Homo sapien
ggtcaggggtgacaagacaccacac

SEQ ID NO: 326577 - DNA, 25 bp, Homo sapien
tggtcaggggtgacaagacaccaca

SEQ ID NO: 326578 - DNA, 25 bp, Homo sapien
gaagattgtagtccactgccctgct

SEQ ID NO: 326579 - DNA, 25 bp, Homo sapien
ggtgagaaggaacacggtcagcaca

SEQ ID NO: 326580 - DNA, 25 bp, Homo sapien
tccagagaccaagccatatggtggt

SEQ ID NO: 326581 - DNA, 25 bp, Homo sapien
caccaaggtggactaaaacattctc

SEQ ID NO: 326582 - DNA, 25 bp, Homo sapien
ggctcactgcacatagtgccactct

SEQ ID NO: 326583 - DNA, 25 bp, Homo sapien
tctgcaagctactggcgaggaaggc

SEQ ID NO: 326584 - DNA, 25 bp, Homo sapien
ggtgtcatcgtgtctactctgcaag

SEQ ID NO: 326585 - DNA, 25 bp, Homo sapien
ttttagcctgcaaaaggtgtcatcg

SEQ ID NO: 326586 - DNA, 25 bp, Homo sapien
ccttcttgttgccatagcagggccc

SEQ ID NO: 326587 - DNA, 25 bp, Homo sapien
tagcagggcccttgttaggtcatcc

SEQ ID NO: 326588 - DNA, 25 bp, Homo sapien
gcccttgttaggtcatcctgccctg

SEQ ID NO: 326589 - DNA, 25 bp, Homo sapien
tgttgccatagcagggcccttgtta

SEQ ID NO: 326590 - DNA, 25 bp, Homo sapien
ctttgcctttaattgtccccatggg

SEQ ID NO: 326591 - DNA, 25 bp, Homo sapien
cagggcggtcgatctctgtagtacc

SEQ ID NO: 326592 - DNA, 25 bp, Homo sapien
agccaatccagatgggtcccagcct

SEQ ID NO: 326593 - DNA, 25 bp, Homo sapien
gtacaatgcttgtctacctccacag

SEQ ID NO: 326594 - DNA, 25 bp, Homo sapien
gccaccggaagcgccctcctaatcc

SEQ ID NO: 326595 - DNA, 25 bp, Homo sapien
gccacggcctgcgtccgccaccgga

SEQ ID NO: 326596 - DNA, 25 bp, Homo sapien
cacggcctgcgtccgccaccggaag

SEQ ID NO: 326597 - DNA, 25 bp, Homo sapien
aagcgccctcctaatccccgcagcg

SEQ ID NO: 326598 - DNA, 25 bp, Homo sapien
gggcttctggggcagctagggctgc

SEQ ID NO: 326599 - DNA, 25 bp, Homo sapien
cgggcgggccgtcgcgggagaggtg

SEQ ID NO: 326600 - DNA, 25 bp, Homo sapien
tagaccggggccgaatgcggccgga

SEQ ID NO: 326601 - DNA, 25 bp, Homo sapien
aggtgagagcgctggctagaccggg

SEQ ID NO: 326602 - DNA, 25 bp, Homo sapien
tcgtcctgcgaaactgggcagtggc

SEQ ID NO: 326603 - DNA, 25 bp, Homo sapien
tagcacaggtgggtttctacgtggc

SEQ ID NO: 326604 - DNA, 25 bp, Homo sapien
gattctcggcttttcaggacccgcc

SEQ ID NO: 326605 - DNA, 25 bp, Homo sapien
aaagtcaattggatgtggtcccgcg

SEQ ID NO: 326606 - DNA, 25 bp, Homo sapien
ggagagtaaacaaaatggcccatta

SEQ ID NO: 326607 - DNA, 25 bp, Homo sapien
ttcaggtctgcatggtccctctcca

SEQ ID NO: 326608 - DNA, 25 bp, Homo sapien
tatctgaccacacaaatactagtag

SEQ ID NO: 326609 - DNA, 25 bp, Homo sapien
caggctgtgtcataggaaatcccca

SEQ ID NO: 326610 - DNA, 25 bp, Homo sapien
gctccacacaggactgccagaggca

SEQ ID NO: 326611 - DNA, 25 bp, Homo sapien
tctgtctacccgagggcaccagagg

SEQ ID NO: 326612 - DNA, 25 bp, Homo sapien
tacccctgggtgtcctctaagccag

SEQ ID NO: 326613 - DNA, 25 bp, Homo sapien
gacaacagcctgagtccgtgtctgc

SEQ ID NO: 326614 - DNA, 25 bp, Homo sapien
ggctccgggctgtgtcctaaatgca

SEQ ID NO: 326615 - DNA, 25 bp, Homo sapien
tagacagaccagtgagcccaagtgg

SEQ ID NO: 326616 - DNA, 25 bp, Homo sapien
tgacaacgtgatctgcccaggtgcg

SEQ ID NO: 326617 - DNA, 25 bp, Homo sapien
gaagaggagtcagccagcattcaca

SEQ ID NO: 326618 - DNA, 25 bp, Homo sapien
agccactgccgaaggtcagtcccgg

SEQ ID NO: 326619 - DNA, 25 bp, Homo sapien
ccactgccgaaggtcagtcccggag

SEQ ID NO: 326620 - DNA, 25 bp, Homo sapien
actgccgaaggtcagtcccggaggt

SEQ ID NO: 326621 - DNA, 25 bp, Homo sapien
ttctgagtcacgaacagcaggcact

SEQ ID NO: 326622 - DNA, 25 bp, Homo sapien
tgtcagtaaacagctaactcaggcc

SEQ ID NO: 326623 - DNA, 25 bp, Homo sapien
gggtggcccttcttccacgatccaa

SEQ ID NO: 326624 - DNA, 25 bp, Homo sapien
gatccaagccctaagaacaagaggc

SEQ ID NO: 326625 - DNA, 25 bp, Homo sapien
cagggagaccctccgcctttagaag

SEQ ID NO: 326626 - DNA, 25 bp, Homo sapien
tgaccccaagggtcttggcaccagg

SEQ ID NO: 326627 - DNA, 25 bp, Homo sapien
gtatggtgcccatccctactctggt

SEQ ID NO: 326628 - DNA, 25 bp, Homo sapien
tccacaggctacatggatggagatg

SEQ ID NO: 326629 - DNA, 25 bp, Homo sapien
caggaccacgtgtaacctcagggca

SEQ ID NO: 326630 - DNA, 25 bp, Homo sapien
ctggtctttccgggaatgggccact

SEQ ID NO: 326631 - DNA, 25 bp, Homo sapien
ctttccgggaatgggccactgggct

SEQ ID NO: 326632 - DNA, 25 bp, Homo sapien
ctctgcctggtctttccgggaatgg

SEQ ID NO: 326633 - DNA, 25 bp, Homo sapien
ggctgctggactggaggccaaagtc

SEQ ID NO: 326634 - DNA, 25 bp, Homo sapien
aggaacaggtggacgaacaaccaga

SEQ ID NO: 326635 - DNA, 25 bp, Homo sapien
cgaacaaccagatgagagaacgtac

SEQ ID NO: 326636 - DNA, 25 bp, Homo sapien
agcagagcgtgcaggcagcggagac

SEQ ID NO: 326637 - DNA, 25 bp, Homo sapien
cggagactaacaagaagccctggcc

SEQ ID NO: 326638 - DNA, 25 bp, Homo sapien
atcaacgggctgaggcttagcgtcc

SEQ ID NO: 326639 - DNA, 25 bp, Homo sapien
agacccaggaatcaacgggctgagg

SEQ ID NO: 326640 - DNA, 25 bp, Homo sapien
tacggcgtccaccagcctgaccgcg

SEQ ID NO: 326641 - DNA, 25 bp, Homo sapien
ctgaggcttagcgtcccctacggcg

SEQ ID NO: 326642 - DNA, 25 bp, Homo sapien
gaagccaggggattggcacacagca

SEQ ID NO: 326643 - DNA, 25 bp, Homo sapien
gaccctggtgggctctcacacgcac

SEQ ID NO: 326644 - DNA, 25 bp, Homo sapien
ctgccatcgctggtggaccctggtg

SEQ ID NO: 326645 - DNA, 25 bp, Homo sapien
ggcagcaggtcctgccatcgctggt

SEQ ID NO: 326646 - DNA, 25 bp, Homo sapien
ctccggtccaccgtggagtatccgt

SEQ ID NO: 326647 - DNA, 25 bp, Homo sapien
cgctccctccggtccaccgtggagt

SEQ ID NO: 326648 - DNA, 25 bp, Homo sapien
gctccctccggtccaccgtggagta

SEQ ID NO: 326649 - DNA, 25 bp, Homo sapien
tccctccggtccaccgtggagtatc

SEQ ID NO: 326650 - DNA, 25 bp, Homo sapien
cagcgcatccatggggatcacatcc

SEQ ID NO: 326651 - DNA, 25 bp, Homo sapien
tgggcccagcgcatccatggggatc

SEQ ID NO: 326652 - DNA, 25 bp, Homo sapien
atcacatcccggctgccagttttct

SEQ ID NO: 326653 - DNA, 25 bp, Homo sapien
tccatggggatcacatcccggctgc

SEQ ID NO: 326654 - DNA, 25 bp, Homo sapien
aggctcttgtccaccagtggcagcg

SEQ ID NO: 326655 - DNA, 25 bp, Homo sapien
aaggctcttgtccaccagtggcagc

SEQ ID NO: 326656 - DNA, 25 bp, Homo sapien
ggctcttgtccaccagtggcagcgt

SEQ ID NO: 326657 - DNA, 25 bp, Homo sapien
gctcccttaggccccttggcagtag

SEQ ID NO: 326658 - DNA, 25 bp, Homo sapien
agtgctcccttaggccccttggcag

SEQ ID NO: 326659 - DNA, 25 bp, Homo sapien
cagtgctcccttaggccccttggca

SEQ ID NO: 326660 - DNA, 25 bp, Homo sapien
cccttaggccccttggcagtagcag

SEQ ID NO: 326661 - DNA, 25 bp, Homo sapien
acgcagctccttgtagctccacact

SEQ ID NO: 326662 - DNA, 25 bp, Homo sapien
tttctgcaaggtaccacgcagctcc

SEQ ID NO: 326663 - DNA, 25 bp, Homo sapien
ctggaagcgcgccttggtccaacca

SEQ ID NO: 326664 - DNA, 25 bp, Homo sapien
tgtgacgccgccttcgcttcgcgta

SEQ ID NO: 326665 - DNA, 25 bp, Homo sapien
cggcggagcctgtgcattgcgcaca

SEQ ID NO: 326666 - DNA, 25 bp, Homo sapien
cacaagctcagccatggcgtagctc

SEQ ID NO: 326667 - DNA, 25 bp, Homo sapien
tggatggtgttgagcaccgccacca

SEQ ID NO: 326668 - DNA, 25 bp, Homo sapien
gcgttatccaggctgtcggacacga

SEQ ID NO: 326669 - DNA, 25 bp, Homo sapien
tgaggtctttgttgcgccggtccag

SEQ ID NO: 326670 - DNA, 25 bp, Homo sapien
gcaccaccttgtcggtctcagactg

SEQ ID NO: 326671 - DNA, 25 bp, Homo sapien
cgctctttgcgcactgtggcgcgga

SEQ ID NO: 326672 - DNA, 25 bp, Homo sapien
gaggttgcgcagagcgatggcgacg

SEQ ID NO: 326673 - DNA, 25 bp, Homo sapien
ccgaggcaggagctgcaccagtgag

SEQ ID NO: 326674 - DNA, 25 bp, Homo sapien
cgaggcaggagctgcaccagtgagg

SEQ ID NO: 326675 - DNA, 25 bp, Homo sapien
aggcaggagctgcaccagtgaggtg

SEQ ID NO: 326676 - DNA, 25 bp, Homo sapien
caggagctgcaccagtgaggtgcct

SEQ ID NO: 326677 - DNA, 25 bp, Homo sapien
agagacgtaccacctcgggctggta

SEQ ID NO: 326678 - DNA, 25 bp, Homo sapien
ttgaagttccggctctccgtgagga

SEQ ID NO: 326679 - DNA, 25 bp, Homo sapien
tccagttgccggcactgaggttctg

SEQ ID NO: 326680 - DNA, 25 bp, Homo sapien
cagcctccagggtgttgaagttccg

SEQ ID NO: 326681 - DNA, 25 bp, Homo sapien
acggtcacccagaatctgctctcat

SEQ ID NO: 326682 - DNA, 25 bp, Homo sapien
tgtggatgagtcacgtaatatttac

SEQ ID NO: 326683 - DNA, 25 bp, Homo sapien
ctaggtgcagggcaaccgccaccca

SEQ ID NO: 326684 - DNA, 25 bp, Homo sapien
atatagtcacccaaggggaaaagcg

SEQ ID NO: 326685 - DNA, 25 bp, Homo sapien
ctttggcggcctcagttcgcttggg

SEQ ID NO: 326686 - DNA, 25 bp, Homo sapien
tctagcgtgtcaaagttccggtcca

SEQ ID NO: 326687 - DNA, 25 bp, Homo sapien
tcaaagttccggtccatctcaccat

SEQ ID NO: 326688 - DNA, 25 bp, Homo sapien
gcttgggcaggtctagcgtgtcaaa

SEQ ID NO: 326689 - DNA, 25 bp, Homo sapien
gtacccactgcacacgccaggcctg

SEQ ID NO: 326690 - DNA, 25 bp, Homo sapien
cactgtcataaagatggcagcccga

SEQ ID NO: 326691 - DNA, 25 bp, Homo sapien
tggggctggaacgtgctcgcctctt

SEQ ID NO: 326692 - DNA, 25 bp, Homo sapien
gatggcagcccgagtgatgaagcca

SEQ ID NO: 326693 - DNA, 25 bp, Homo sapien
ccggaggaagcagaggagagaggag

SEQ ID NO: 326694 - DNA, 25 bp, Homo sapien
cggaggaagcagaggagagaggaga

SEQ ID NO: 326695 - DNA, 25 bp, Homo sapien
ggttccgcatgatgcacacgcagtt

SEQ ID NO: 326696 - DNA, 25 bp, Homo sapien
ggacaggttccgcatgatgcacacg

SEQ ID NO: 326697 - DNA, 25 bp, Homo sapien
tccggcgctgggagcctacagcact

SEQ ID NO: 326698 - DNA, 25 bp, Homo sapien
cgcctccggcgctgggagcctacag

SEQ ID NO: 326699 - DNA, 25 bp, Homo sapien
aggagcgcgtccaccagcccttcac

SEQ ID NO: 326700 - DNA, 25 bp, Homo sapien
ccacagccgactgcagggcatgcag

SEQ ID NO: 326701 - DNA, 25 bp, Homo sapien
cggagtcgccgccgggcctcagcac

SEQ ID NO: 326702 - DNA, 25 bp, Homo sapien
agcccttcacactcccggagtcgcc

SEQ ID NO: 326703 - DNA, 25 bp, Homo sapien
ttggagtcctcgttgggctcacgct

SEQ ID NO: 326704 - DNA, 25 bp, Homo sapien
tctgcaggccatggtcaatgatgac

SEQ ID NO: 326705 - DNA, 25 bp, Homo sapien
gcagcccgacgtgttcttgaagaca

SEQ ID NO: 326706 - DNA, 25 bp, Homo sapien
gaagacagttgtccactcggcgtcc

SEQ ID NO: 326707 - DNA, 25 bp, Homo sapien
gattggccaatctgtgctgaccata

SEQ ID NO: 326708 - DNA, 25 bp, Homo sapien
ggtgcgattggccaatctgtgctga

SEQ ID NO: 326709 - DNA, 25 bp, Homo sapien
tgtgctgaccatatgcaccgcctgc

SEQ ID NO: 326710 - DNA, 25 bp, Homo sapien
caatctgtgctgaccatatgcaccg

SEQ ID NO: 326711 - DNA, 25 bp, Homo sapien
ccagctcatgcagaacagtaggaag

SEQ ID NO: 326712 - DNA, 25 bp, Homo sapien
taggaagtaacaaaagccgtgagtg

SEQ ID NO: 326713 - DNA, 25 bp, Homo sapien
aggtggccacgctcaggacctgtcc

SEQ ID NO: 326714 - DNA, 25 bp, Homo sapien
catgtcccagctcatgcagaacagt

SEQ ID NO: 326715 - DNA, 25 bp, Homo sapien
gtccctcagctctcacaaggcacaa

SEQ ID NO: 326716 - DNA, 25 bp, Homo sapien
acggtgaccctacctgtccctcagc

SEQ ID NO: 326717 - DNA, 25 bp, Homo sapien
agggcctcacagagacacggtgacc

SEQ ID NO: 326718 - DNA, 25 bp, Homo sapien
catgtggcaggtggcactaacactc

SEQ ID NO: 326719 - DNA, 25 bp, Homo sapien
agcctccctgctatggtagagactg

SEQ ID NO: 326720 - DNA, 25 bp, Homo sapien
cagcctccctgctatggtagagact

SEQ ID NO: 326721 - DNA, 25 bp, Homo sapien
gcctccctgctatggtagagactgg

SEQ ID NO: 326722 - DNA, 25 bp, Homo sapien
cctccctgctatggtagagactggg

SEQ ID NO: 326723 - DNA, 25 bp, Homo sapien
tcctgcctaccgggtgctttcccag

SEQ ID NO: 326724 - DNA, 25 bp, Homo sapien
tcccgggttgagcctcacactcttc

SEQ ID NO: 326725 - DNA, 25 bp, Homo sapien
gtgagcatggccaggtcccactcac

SEQ ID NO: 326726 - DNA, 25 bp, Homo sapien
ctcttctcttcccaggggatgtgag

SEQ ID NO: 326727 - DNA, 25 bp, Homo sapien
cgggttgagcctcacactcttctct

SEQ ID NO: 326728 - DNA, 25 bp, Homo sapien
cagtgacaagctcacggacctcgtt

SEQ ID NO: 326729 - DNA, 25 bp, Homo sapien
cgttctcaaagcacagatgctgcag

SEQ ID NO: 326730 - DNA, 25 bp, Homo sapien
tgttgtcagtgtcgcggccatagga

SEQ ID NO: 326731 - DNA, 25 bp, Homo sapien
tccttgcgggcgctatccactgagg

SEQ ID NO: 326732 - DNA, 25 bp, Homo sapien
ttctgtccctgacgagagccaaggc

SEQ ID NO: 326733 - DNA, 25 bp, Homo sapien
agtaaatggccctctccgcatgaag

SEQ ID NO: 326734 - DNA, 25 bp, Homo sapien
tagccctgtgggttgctgtcatcaa

SEQ ID NO: 326735 - DNA, 25 bp, Homo sapien
gagagcacctgtatcttggcccgga

SEQ ID NO: 326736 - DNA, 25 bp, Homo sapien
ccaagccatacggctctgcctggaa

SEQ ID NO: 326737 - DNA, 25 bp, Homo sapien
tcatcagcggccaggctgcgcgtgt

SEQ ID NO: 326738 - DNA, 25 bp, Homo sapien
tccttgtggccgtgccatagtcagg

SEQ ID NO: 326739 - DNA, 25 bp, Homo sapien
tgcctggaagcgctcgggcagggag

SEQ ID NO: 326740 - DNA, 25 bp, Homo sapien
gccctcgggacaggctgccatagct

SEQ ID NO: 326741 - DNA, 25 bp, Homo sapien
cacgcagcaggaaatgccggtccag

SEQ ID NO: 326742 - DNA, 25 bp, Homo sapien
taggctcgagagagtgtggccactg

SEQ ID NO: 326743 - DNA, 25 bp, Homo sapien
cactgctgaggtaggctcgagagag

SEQ ID NO: 326744 - DNA, 25 bp, Homo sapien
cgggcacctggcgtactgtccgagt

SEQ ID NO: 326745 - DNA, 25 bp, Homo sapien
tactgtccgagtggtcaccgtcttg

SEQ ID NO: 326746 - DNA, 25 bp, Homo sapien
tggtcaccgtcttgacagtcttggt

SEQ ID NO: 326747 - DNA, 25 bp, Homo sapien
cctggcgtactgtccgagtggtcac

SEQ ID NO: 326748 - DNA, 25 bp, Homo sapien
agcacatcaggtgcctccggcatcg

SEQ ID NO: 326749 - DNA, 25 bp, Homo sapien
tgcctccggcatcgtggccagtgag

SEQ ID NO: 326750 - DNA, 25 bp, Homo sapien
tcggtgcgccgggttgtgccatctt

SEQ ID NO: 326751 - DNA, 25 bp, Homo sapien
gccatcttcggatgtgacaatagac

SEQ ID NO: 326752 - DNA, 25 bp, Homo sapien
ctagaacttcacagtccaagtggga

SEQ ID NO: 326753 - DNA, 25 bp, Homo sapien
gtccaagtgggatttcaagcacccc

SEQ ID NO: 326754 - DNA, 25 bp, Homo sapien
cacagtccaagtgggatttcaagca

SEQ ID NO: 326755 - DNA, 25 bp, Homo sapien
gggatttcaagcacccccagagaag

SEQ ID NO: 326756 - DNA, 25 bp, Homo sapien
cacttttgtggcaaaatgcaaggaa

SEQ ID NO: 326757 - DNA, 25 bp, Homo sapien
gacttcacagatgcaccacggtctg

SEQ ID NO: 326758 - DNA, 25 bp, Homo sapien
gggccctggtcccatattacttatc

SEQ ID NO: 326759 - DNA, 25 bp, Homo sapien
gcacacacagagaatgagttaaggt

SEQ ID NO: 326760 - DNA, 25 bp, Homo sapien
gcttccctcttcagacttcagcctc

SEQ ID NO: 326761 - DNA, 25 bp, Homo sapien
gggcttccctcttcagacttcagcc

SEQ ID NO: 326762 - DNA, 25 bp, Homo sapien
ccctcttcagacttcagcctccttc

SEQ ID NO: 326763 - DNA, 25 bp, Homo sapien
ccgggcttccctcttcagacttcag

SEQ ID NO: 326764 - DNA, 25 bp, Homo sapien
ctgtctgagttcggccggcatcggg

SEQ ID NO: 326765 - DNA, 25 bp, Homo sapien
gggactcggggggcgctggccagca

SEQ ID NO: 326766 - DNA, 25 bp, Homo sapien
ttcggccggcatcgggccgggactc

SEQ ID NO: 326767 - DNA, 25 bp, Homo sapien
aggctcggcggactcgctccccgcg

SEQ ID NO: 326768 - DNA, 25 bp, Homo sapien
tgcccactgcccatgccaccactga

SEQ ID NO: 326769 - DNA, 25 bp, Homo sapien
ccagctgttgccaggccattggcag

SEQ ID NO: 326770 - DNA, 25 bp, Homo sapien
gtagggcaacatggcgccgctcctg

SEQ ID NO: 326771 - DNA, 25 bp, Homo sapien
gtcagcctctcgaagcgggcctcct

SEQ ID NO: 326772 - DNA, 25 bp, Homo sapien
ggctgctgggcacgctccagctgta

SEQ ID NO: 326773 - DNA, 25 bp, Homo sapien
atgctggcggccgagtgcacattgc

SEQ ID NO: 326774 - DNA, 25 bp, Homo sapien
ggcagggcatagccacgaggccaca

SEQ ID NO: 326775 - DNA, 25 bp, Homo sapien
ggcatagccacgaggccacactgcc

SEQ ID NO: 326776 - DNA, 25 bp, Homo sapien
acactgcccggagcacagtgagcat

SEQ ID NO: 326777 - DNA, 25 bp, Homo sapien
agggcatagccacgaggccacactg

SEQ ID NO: 326778 - DNA, 25 bp, Homo sapien
cctaaatcagtggaaagatatccca

SEQ ID NO: 326779 - DNA, 25 bp, Homo sapien
gctgggaagatttaccactgtcaca

SEQ ID NO: 326780 - DNA, 25 bp, Homo sapien
gatactactgaaagggatctacaga

SEQ ID NO: 326781 - DNA, 25 bp, Homo sapien
tcgatctttaaggagcccaaagagc

SEQ ID NO: 326782 - DNA, 25 bp, Homo sapien
catcgtggcaaaactctggcagcgt

SEQ ID NO: 326783 - DNA, 25 bp, Homo sapien
tattcaggccagtaacaaacccaag

SEQ ID NO: 326784 - DNA, 25 bp, Homo sapien
gagcagtgacattctcggccagacg

SEQ ID NO: 326785 - DNA, 25 bp, Homo sapien
tgtggatctcctcaaccaggctggg

SEQ ID NO: 326786 - DNA, 25 bp, Homo sapien
catgtcccgacacccaccctgcagg

SEQ ID NO: 326787 - DNA, 25 bp, Homo sapien
ctgtcttgagggaagatcagcatgt

SEQ ID NO: 326788 - DNA, 25 bp, Homo sapien
tcagcatgtcccgacacccaccctg

SEQ ID NO: 326789 - DNA, 25 bp, Homo sapien
gtcttgagggaagatcagcatgtcc

SEQ ID NO: 326790 - DNA, 25 bp, Homo sapien
ggtcaatccagctgggtaggtccct

SEQ ID NO: 326791 - DNA, 25 bp, Homo sapien
tccctgccggataaaggtacacaag

SEQ ID NO: 326792 - DNA, 25 bp, Homo sapien
gaaggtcatcccgtggtgctcctga

SEQ ID NO: 326793 - DNA, 25 bp, Homo sapien
cacggttccttgtcagcatgtctaa

SEQ ID NO: 326794 - DNA, 25 bp, Homo sapien
ctggagcgcagcgtgggcggccccg

SEQ ID NO: 326795 - DNA, 25 bp, Homo sapien
agcgcggcctcggaccccagaaggg

SEQ ID NO: 326796 - DNA, 25 bp, Homo sapien
acgcggccgcaactcggaccggtgc

SEQ ID NO: 326797 - DNA, 25 bp, Homo sapien
tcacgcggcccgtgcgcaaagcgga

SEQ ID NO: 326798 - DNA, 25 bp, Homo sapien
tgctacttaggtcgtaagttaaata

SEQ ID NO: 326799 - DNA, 25 bp, Homo sapien
tgcctgctacttaggtcgtaagtta

SEQ ID NO: 326800 - DNA, 25 bp, Homo sapien
caaaatacagcaagacaagccccca

SEQ ID NO: 326801 - DNA, 25 bp, Homo sapien
aaaatacagcaagacaagcccccaa

SEQ ID NO: 326802 - DNA, 25 bp, Homo sapien
gagtgaacagaactctaaagaatgt

SEQ ID NO: 326803 - DNA, 25 bp, Homo sapien
ctctaaagaatgtaggggctggccg

SEQ ID NO: 326804 - DNA, 25 bp, Homo sapien
tagtgagtgaacagaactctaaaga

SEQ ID NO: 326805 - DNA, 25 bp, Homo sapien
tggctagtgagtgaacagaactcta

SEQ ID NO: 326806 - DNA, 25 bp, Homo sapien
gaaactagcacgctgaggagagcca

SEQ ID NO: 326807 - DNA, 25 bp, Homo sapien
tccaatgctgcgagacaatagtgtc

SEQ ID NO: 326808 - DNA, 25 bp, Homo sapien
gaagcagtcgtctgcataccgagaa

SEQ ID NO: 326809 - DNA, 25 bp, Homo sapien
tctgtatgcgtttcagggctgcctc

SEQ ID NO: 326810 - DNA, 25 bp, Homo sapien
gacaagctgttactccatgggacag

SEQ ID NO: 326811 - DNA, 25 bp, Homo sapien
ggatctcaggccagagtacctccta

SEQ ID NO: 326812 - DNA, 25 bp, Homo sapien
caccactgagggtttgatcactgga

SEQ ID NO: 326813 - DNA, 25 bp, Homo sapien
gtttacagccccacgtgatgccact

SEQ ID NO: 326814 - DNA, 25 bp, Homo sapien
tggttgttttatgcaggagggtaaa

SEQ ID NO: 326815 - DNA, 25 bp, Homo sapien
tgatagcttatggtgagcagaattt

SEQ ID NO: 326816 - DNA, 25 bp, Homo sapien
tgcttgggcaatttggaagttttgt

SEQ ID NO: 326817 - DNA, 25 bp, Homo sapien
taaatctggtccttgttgcttgggc

SEQ ID NO: 326818 - DNA, 25 bp, Homo sapien
cagctattctcatgctcgttggcca

SEQ ID NO: 326819 - DNA, 25 bp, Homo sapien
aactgtttgccaaagcagccgcagc

SEQ ID NO: 326820 - DNA, 25 bp, Homo sapien
tatggctctcatgtgaatacgtagg

SEQ ID NO: 326821 - DNA, 25 bp, Homo sapien
cagtgtatgcgggttgcagcttctc

SEQ ID NO: 326822 - DNA, 25 bp, Homo sapien
aggtcatgaagctttccccaatact

SEQ ID NO: 326823 - DNA, 25 bp, Homo sapien
cgatgctagctacaatggctggctt

SEQ ID NO: 326824 - DNA, 25 bp, Homo sapien
tggagccccgatgctagctacaatg

SEQ ID NO: 326825 - DNA, 25 bp, Homo sapien
ctgacggctggagccccgatgctag

SEQ ID NO: 326826 - DNA, 25 bp, Homo sapien
ccagctgacggctggagccccgatg

SEQ ID NO: 326827 - DNA, 25 bp, Homo sapien
aggtgcacacacacgatgccgaaca

SEQ ID NO: 326828 - DNA, 25 bp, Homo sapien
gccatatacatggacaccgacacag

SEQ ID NO: 326829 - DNA, 25 bp, Homo sapien
ccatatacatggacaccgacacagg

SEQ ID NO: 326830 - DNA, 25 bp, Homo sapien
aacaaggcagaagggcgactctcac

SEQ ID NO: 326831 - DNA, 25 bp, Homo sapien
tggccacagaacacaggcgtgcttg

SEQ ID NO: 326832 - DNA, 25 bp, Homo sapien
tctggtccaacgacaggagtaggct

SEQ ID NO: 326833 - DNA, 25 bp, Homo sapien
gagtaggcttgtatttaaaagcggc

SEQ ID NO: 326834 - DNA, 25 bp, Homo sapien
tggactcttgacaagcagacctgct

SEQ ID NO: 326835 - DNA, 25 bp, Homo sapien
tgggcaccgagaagacctgagaaaa

SEQ ID NO: 326836 - DNA, 25 bp, Homo sapien
gcagaggagacagccacatttggaa

SEQ ID NO: 326837 - DNA, 25 bp, Homo sapien
tttggaattgggcaccgagaagacc

SEQ ID NO: 326838 - DNA, 25 bp, Homo sapien
agaggagacagccacatttggaatt

SEQ ID NO: 326839 - DNA, 25 bp, Homo sapien
gccagacaccctggacgaggccctt

SEQ ID NO: 326840 - DNA, 25 bp, Homo sapien
tgagcgcatttcgaggcctttccct

SEQ ID NO: 326841 - DNA, 25 bp, Homo sapien
ctttggtgagcgcatttcgaggcct

SEQ ID NO: 326842 - DNA, 25 bp, Homo sapien
tcccttgtatgcagggtgccagtgg

SEQ ID NO: 326843 - DNA, 25 bp, Homo sapien
cctttgtgaggcaacatggccgcgg

SEQ ID NO: 326844 - DNA, 25 bp, Homo sapien
cgaccggagagcctggacaggcttt

SEQ ID NO: 326845 - DNA, 25 bp, Homo sapien
tctcgtcgctgtccgcccgggtaaa

SEQ ID NO: 326846 - DNA, 25 bp, Homo sapien
caggcgttgccgactctcgtcgctg

SEQ ID NO: 326847 - DNA, 25 bp, Homo sapien
cacaaaagggagtgaatggccagcc

SEQ ID NO: 326848 - DNA, 25 bp, Homo sapien
ccagtgttgcctctaagtgcgggat

SEQ ID NO: 326849 - DNA, 25 bp, Homo sapien
gctgtcgactgttcgaggccaacca

SEQ ID NO: 326850 - DNA, 25 bp, Homo sapien
cctgtctggtgtcaaccgatggact

SEQ ID NO: 326851 - DNA, 25 bp, Homo sapien
cagcccttggctatggcaactccga

SEQ ID NO: 326852 - DNA, 25 bp, Homo sapien
tccctatgtgctggaacccacttcc

SEQ ID NO: 326853 - DNA, 25 bp, Homo sapien
gccctatagacagcttggctccatg

SEQ ID NO: 326854 - DNA, 25 bp, Homo sapien
catgtcttgccagcactgatagctc

SEQ ID NO: 326855 - DNA, 25 bp, Homo sapien
tgttcctagtatccccatatgaccc

SEQ ID NO: 326856 - DNA, 25 bp, Homo sapien
gattatttcaattgccctgtcttca

SEQ ID NO: 326857 - DNA, 25 bp, Homo sapien
cacttgatgatacatcacaggtctc

SEQ ID NO: 326858 - DNA, 25 bp, Homo sapien
tatatggttgtgatggtcccttgct

SEQ ID NO: 326859 - DNA, 25 bp, Homo sapien
agtcctgtggctggcccgtgatgcc

SEQ ID NO: 326860 - DNA, 25 bp, Homo sapien
tgctacagggacctggtcaggaggt

SEQ ID NO: 326861 - DNA, 25 bp, Homo sapien
gaaggcgagccttgattgtctgaac

SEQ ID NO: 326862 - DNA, 25 bp, Homo sapien
gatgcgcctgtgaaccaaagcttcg

SEQ ID NO: 326863 - DNA, 25 bp, Homo sapien
tggtgcgccatctgaagcaagagtc

SEQ ID NO: 326864 - DNA, 25 bp, Homo sapien
caagcatgggtatgaatcgtgcaca

SEQ ID NO: 326865 - DNA, 25 bp, Homo sapien
ttggttgatgccctctctgctgggc

SEQ ID NO: 326866 - DNA, 25 bp, Homo sapien
tggaccctgcctttgtaacagctga

SEQ ID NO: 326867 - DNA, 25 bp, Homo sapien
ttaaagtaagctctgccctgactcc

SEQ ID NO: 326868 - DNA, 25 bp, Homo sapien
tgtggacccttgactggccagatcc

SEQ ID NO: 326869 - DNA, 25 bp, Homo sapien
tggctgcctacctctgaatatcctg

SEQ ID NO: 326870 - DNA, 25 bp, Homo sapien
ccttggctagtccacaaaggccctg

SEQ ID NO: 326871 - DNA, 25 bp, Homo sapien
ggatgggcaacaggctacaggaacc

SEQ ID NO: 326872 - DNA, 25 bp, Homo sapien
ctagcagcaggccaatcctggtggg

SEQ ID NO: 326873 - DNA, 25 bp, Homo sapien
tgtagggtgttatctgggggtcctg

SEQ ID NO: 326874 - DNA, 25 bp, Homo sapien
tgggggtcctggtgtgggttgagct

SEQ ID NO: 326875 - DNA, 25 bp, Homo sapien
caagacccctgtgccattggggtgc

SEQ ID NO: 326876 - DNA, 25 bp, Homo sapien
tcttgtagggtgttatctgggggtc

SEQ ID NO: 326877 - DNA, 25 bp, Homo sapien
agcatctcacagtgcggggtctgcg

SEQ ID NO: 326878 - DNA, 25 bp, Homo sapien
gggtctgcgggaacaggtccactgc

SEQ ID NO: 326879 - DNA, 25 bp, Homo sapien
gatgagcatctcacagtgcggggtc

SEQ ID NO: 326880 - DNA, 25 bp, Homo sapien
gtctgcgggaacaggtccactgcca

SEQ ID NO: 326881 - DNA, 25 bp, Homo sapien
ccgataggctaatcaggggctcctg

SEQ ID NO: 326882 - DNA, 25 bp, Homo sapien
gagctgggggcttggtagcaggcct

SEQ ID NO: 326883 - DNA, 25 bp, Homo sapien
ggcttggtagcaggcctagccccca

SEQ ID NO: 326884 - DNA, 25 bp, Homo sapien
ctaaggtcagccgataggctaatca

SEQ ID NO: 326885 - DNA, 25 bp, Homo sapien
tggctgcccgggggttgcatgagac

SEQ ID NO: 326886 - DNA, 25 bp, Homo sapien
tgcccgggggttgcatgagacgtac

SEQ ID NO: 326887 - DNA, 25 bp, Homo sapien
gctgcccgggggttgcatgagacgt

SEQ ID NO: 326888 - DNA, 25 bp, Homo sapien
ccatggctgcccgggggttgcatga

SEQ ID NO: 326889 - DNA, 25 bp, Homo sapien
ggttcttagctctccggatggccag

SEQ ID NO: 326890 - DNA, 25 bp, Homo sapien
agcagccgcctgaggttcttagctc

SEQ ID NO: 326891 - DNA, 25 bp, Homo sapien
ttagctctccggatggccaggatca

SEQ ID NO: 326892 - DNA, 25 bp, Homo sapien
gcagccgcctgaggttcttagctct

SEQ ID NO: 326893 - DNA, 25 bp, Homo sapien
gttcccgtgccacctccttaagcaa

SEQ ID NO: 326894 - DNA, 25 bp, Homo sapien
gtgagccaccccatgtgtcctcgtt

SEQ ID NO: 326895 - DNA, 25 bp, Homo sapien
tgcataacatggtgagccaccccat

SEQ ID NO: 326896 - DNA, 25 bp, Homo sapien
gagagtgcataacatggtgagccac

SEQ ID NO: 326897 - DNA, 25 bp, Homo sapien
agccagcacggggtgggtccaggat

SEQ ID NO: 326898 - DNA, 25 bp, Homo sapien
ccaggatggccacgaggtgctggga

SEQ ID NO: 326899 - DNA, 25 bp, Homo sapien
tgggtccaggatggccacgaggtgc

SEQ ID NO: 326900 - DNA, 25 bp, Homo sapien
gggtgggtccaggatggccacgagg

SEQ ID NO: 326901 - DNA, 25 bp, Homo sapien
ggcaccgtggcctgtcagagggcca

SEQ ID NO: 326902 - DNA, 25 bp, Homo sapien
agagggccacatgccctcccagcag

SEQ ID NO: 326903 - DNA, 25 bp, Homo sapien
ctggggaacccctagccaaagagct

SEQ ID NO: 326904 - DNA, 25 bp, Homo sapien
ctgaagagatggcaccgtggcctgt

SEQ ID NO: 326905 - DNA, 25 bp, Homo sapien
agctcgaccccaatgaccctcttta

SEQ ID NO: 326906 - DNA, 25 bp, Homo sapien
acagcctctgggcatagctcgaccc

SEQ ID NO: 326907 - DNA, 25 bp, Homo sapien
gggcatagctcgaccccaatgaccc

SEQ ID NO: 326908 - DNA, 25 bp, Homo sapien
gcgttcacccgggcgtcctccacag

SEQ ID NO: 326909 - DNA, 25 bp, Homo sapien
aacaggaaagcgtggtgtcgcccca

SEQ ID NO: 326910 - DNA, 25 bp, Homo sapien
aaagcgtggtgtcgccccacccagg

SEQ ID NO: 326911 - DNA, 25 bp, Homo sapien
ctgaaacaggaaagcgtggtgtcgc

SEQ ID NO: 326912 - DNA, 25 bp, Homo sapien
ggaaagcgtggtgtcgccccaccca

SEQ ID NO: 326913 - DNA, 25 bp, Homo sapien
ggccaggccaatggtgccggtgcca

SEQ ID NO: 326914 - DNA, 25 bp, Homo sapien
agcacctcggctgcgggtgtgttca

SEQ ID NO: 326915 - DNA, 25 bp, Homo sapien
gcatccaattgggcccagtcctgga

SEQ ID NO: 326916 - DNA, 25 bp, Homo sapien
cagcaccatgctccccgcatccaat

SEQ ID NO: 326917 - DNA, 25 bp, Homo sapien
cactggtgccccgacgcccacattc

SEQ ID NO: 326918 - DNA, 25 bp, Homo sapien
tggtgccactggtgccccgacgccc

SEQ ID NO: 326919 - DNA, 25 bp, Homo sapien
ggtgccactggtgccccgacgccca

SEQ ID NO: 326920 - DNA, 25 bp, Homo sapien
gtgccccgacgcccacattcctggt

SEQ ID NO: 326921 - DNA, 25 bp, Homo sapien
tcagccctagcaggtcctcgtggat

SEQ ID NO: 326922 - DNA, 25 bp, Homo sapien
tggagagatccggaaggtcagccct

SEQ ID NO: 326923 - DNA, 25 bp, Homo sapien
tggaagaaggcgtgtggagagatcc

SEQ ID NO: 326924 - DNA, 25 bp, Homo sapien
aggtcctcgtggatgcaccggtccc

SEQ ID NO: 326925 - DNA, 25 bp, Homo sapien
ggtccttcagtgtcacagtccctgc

SEQ ID NO: 326926 - DNA, 25 bp, Homo sapien
ggtgcaggtccttcagtgtcacagt

SEQ ID NO: 326927 - DNA, 25 bp, Homo sapien
ctgtgggcgaaggtgcaggtccttc

SEQ ID NO: 326928 - DNA, 25 bp, Homo sapien
gcgaaggtgcaggtccttcagtgtc

SEQ ID NO: 326929 - DNA, 25 bp, Homo sapien
ccacgaagtagaggcaggtcactcc

SEQ ID NO: 326930 - DNA, 25 bp, Homo sapien
cctccacgaagtagaggcaggtcac

SEQ ID NO: 326931 - DNA, 25 bp, Homo sapien
ccctgctgtgaagtgctgcgctagg

SEQ ID NO: 326932 - DNA, 25 bp, Homo sapien
cgctagggaggtcttcagctctgcc

SEQ ID NO: 326933 - DNA, 25 bp, Homo sapien
gctgaggcccacctaggctaggcac

SEQ ID NO: 326934 - DNA, 25 bp, Homo sapien
tgctgaggcccacctaggctaggca

SEQ ID NO: 326935 - DNA, 25 bp, Homo sapien
ctgaggcccacctaggctaggcacc

SEQ ID NO: 326936 - DNA, 25 bp, Homo sapien
cggctggtgcgcacagtcagctgct

SEQ ID NO: 326937 - DNA, 25 bp, Homo sapien
gcttccagtggcctgtgtacgtctc

SEQ ID NO: 326938 - DNA, 25 bp, Homo sapien
tgtgtacgtctctgggtcgtatgcc

SEQ ID NO: 326939 - DNA, 25 bp, Homo sapien
ctctgggtcgtatgccgagtatgga

SEQ ID NO: 326940 - DNA, 25 bp, Homo sapien
gaattcccggggcaggatcaccacc

SEQ ID NO: 326941 - DNA, 25 bp, Homo sapien
tctgctcccacaccgcataggactt

SEQ ID NO: 326942 - DNA, 25 bp, Homo sapien
acaccgcataggacttcccgggagc

SEQ ID NO: 326943 - DNA, 25 bp, Homo sapien
tgggaatcacgagctggcccaagtg

SEQ ID NO: 326944 - DNA, 25 bp, Homo sapien
gacgccaaccagaaactcacactta

SEQ ID NO: 326945 - DNA, 25 bp, Homo sapien
gcccttgtacttgccgagccgacag

SEQ ID NO: 326946 - DNA, 25 bp, Homo sapien
gagccgacagcccacggtgttatcc

SEQ ID NO: 326947 - DNA, 25 bp, Homo sapien
cttcggggatgtgcacggtgtcaaa

SEQ ID NO: 326948 - DNA, 25 bp, Homo sapien
tgcccagcgcttgggcctggaaacc

SEQ ID NO: 326949 - DNA, 25 bp, Homo sapien
gcgcttgggcctggaaaccctgatt

SEQ ID NO: 326950 - DNA, 25 bp, Homo sapien
cagcgcttgggcctggaaaccctga

SEQ ID NO: 326951 - DNA, 25 bp, Homo sapien
gcttgggcctggaaaccctgatttc

SEQ ID NO: 326952 - DNA, 25 bp, Homo sapien
caggataggggtttgtggccaccga

SEQ ID NO: 326953 - DNA, 25 bp, Homo sapien
ccaggataggggtttgtggccaccg

SEQ ID NO: 326954 - DNA, 25 bp, Homo sapien
tttgtggccaccgaagtctagtctg

SEQ ID NO: 326955 - DNA, 25 bp, Homo sapien
tgtggccaccgaagtctagtctgac

SEQ ID NO: 326956 - DNA, 25 bp, Homo sapien
tggggtgatggcctgaccccctcca

SEQ ID NO: 326957 - DNA, 25 bp, Homo sapien
aggcacggttggtgctcccgatttc

SEQ ID NO: 326958 - DNA, 25 bp, Homo sapien
ggccttgttgtgcttgtgcctctgc

SEQ ID NO: 326959 - DNA, 25 bp, Homo sapien
gcaggccttgttgtgcttgtgcctc

SEQ ID NO: 326960 - DNA, 25 bp, Homo sapien
ggcctttccagagggcaccatgcaa

SEQ ID NO: 326961 - DNA, 25 bp, Homo sapien
tcagcatagggcactgtccatagag

SEQ ID NO: 326962 - DNA, 25 bp, Homo sapien
tcacaaaggcgcagggtggttgccc

SEQ ID NO: 326963 - DNA, 25 bp, Homo sapien
tgcagcgctgcggaatgtcacaaag

SEQ ID NO: 326964 - DNA, 25 bp, Homo sapien
caccgagacggtagggcagctcagg

SEQ ID NO: 326965 - DNA, 25 bp, Homo sapien
ctgtagccgccccagcgccctcttt

SEQ ID NO: 326966 - DNA, 25 bp, Homo sapien
tgtagccgccccagcgccctctttc

SEQ ID NO: 326967 - DNA, 25 bp, Homo sapien
ggggcaccgagacggtagggcagct

SEQ ID NO: 326968 - DNA, 25 bp, Homo sapien
ggtgctagggtgaggactaggccct

SEQ ID NO: 326969 - DNA, 25 bp, Homo sapien
cacctattctctggcaggtttcctg

SEQ ID NO: 326970 - DNA, 25 bp, Homo sapien
gacctccgtcggtgcactctgcact

SEQ ID NO: 326971 - DNA, 25 bp, Homo sapien
aagcttccttatgggacacccagac

SEQ ID NO: 326972 - DNA, 25 bp, Homo sapien
gcggttctccgcctagaccagggac

SEQ ID NO: 326973 - DNA, 25 bp, Homo sapien
ggcggttctccgcctagaccaggga

SEQ ID NO: 326974 - DNA, 25 bp, Homo sapien
acgccatgggggccgcctggccacc

SEQ ID NO: 326975 - DNA, 25 bp, Homo sapien
ggttctccgcctagaccagggacgc

SEQ ID NO: 326976 - DNA, 25 bp, Homo sapien
ggcctgtcacaagggaagtgctcag

SEQ ID NO: 326977 - DNA, 25 bp, Homo sapien
tcacagagccggtgcaacgccgcga

SEQ ID NO: 326978 - DNA, 25 bp, Homo sapien
tggcctgtcacaagggaagtgctca

SEQ ID NO: 326979 - DNA, 25 bp, Homo sapien
gggaggtgctcacagagccggtgca

SEQ ID NO: 326980 - DNA, 25 bp, Homo sapien
cactttagccagctctagaggcgcg

SEQ ID NO: 326981 - DNA, 25 bp, Homo sapien
gaggccgagcgtctctatgatcctg

SEQ ID NO: 326982 - DNA, 25 bp, Homo sapien
ggcttctggcaacgtcatcgtcacg

SEQ ID NO: 326983 - DNA, 25 bp, Homo sapien
tactggttttgaatcgcggcgcgtt

SEQ ID NO: 326984 - DNA, 25 bp, Homo sapien
tcagactgaggctgcttaaagaaag

SEQ ID NO: 326985 - DNA, 25 bp, Homo sapien
cagcatagacttctttggcatcgtg

SEQ ID NO: 326986 - DNA, 25 bp, Homo sapien
taaaatgtaagtaggctgatgtccc

SEQ ID NO: 326987 - DNA, 25 bp, Homo sapien
ctgcagccagttgcatgaagggcat

SEQ ID NO: 326988 - DNA, 25 bp, Homo sapien
agcgaggcactggtgacgtcaagct

SEQ ID NO: 326989 - DNA, 25 bp, Homo sapien
ggtgacgtcaagctcctgaagcaca

SEQ ID NO: 326990 - DNA, 25 bp, Homo sapien
gaggcactggtgacgtcaagctcct

SEQ ID NO: 326991 - DNA, 25 bp, Homo sapien
cactggtgacgtcaagctcctgaag

SEQ ID NO: 326992 - DNA, 25 bp, Homo sapien
atggagctgaagcccaacgcaggta

SEQ ID NO: 326993 - DNA, 25 bp, Homo sapien
gatggagctgaagcccaacgcaggt

SEQ ID NO: 326994 - DNA, 25 bp, Homo sapien
ggagctgaagcccaacgcaggtagc

SEQ ID NO: 326995 - DNA, 25 bp, Homo sapien
atgatggagctgaagcccaacgcag

SEQ ID NO: 326996 - DNA, 25 bp, Homo sapien
tgaccatggtctaggcagtgcttga

SEQ ID NO: 326997 - DNA, 25 bp, Homo sapien
gatggtcctcggtttgtctctcaga

SEQ ID NO: 326998 - DNA, 25 bp, Homo sapien
cgtatccagagtgatgcagctccct

SEQ ID NO: 326999 - DNA, 25 bp, Homo sapien
tctgactatacttccaggcgggtgc

SEQ ID NO: 327000 - DNA, 25 bp, Homo sapien
gcggaaaagctagaagctctctcgg

SEQ ID NO: 327001 - DNA, 25 bp, Homo sapien
gctagaagctctctcggtgaaggag

SEQ ID NO: 327002 - DNA, 25 bp, Homo sapien
atgccgaaaaagtggcggaaaagct

SEQ ID NO: 327003 - DNA, 25 bp, Homo sapien
tctctcggtgaaggaggagaccaag

SEQ ID NO: 327004 - DNA, 25 bp, Homo sapien
cctgtccgcagcacaggtgggtgct

SEQ ID NO: 327005 - DNA, 25 bp, Homo sapien
catgtatcttgctgtgggccttgaa

SEQ ID NO: 327006 - DNA, 25 bp, Homo sapien
tgcacctcacggtagcctgggttcc

SEQ ID NO: 327007 - DNA, 25 bp, Homo sapien
taagcctcccgggtgtatgtccagg

SEQ ID NO: 327008 - DNA, 25 bp, Homo sapien
aaggctgtgccgactcctcatggtt

SEQ ID NO: 327009 - DNA, 25 bp, Homo sapien
tggtaatgaactatggaaatggtcc

SEQ ID NO: 327010 - DNA, 25 bp, Homo sapien
ggtaatgaactatggaaatggtccc

SEQ ID NO: 327011 - DNA, 25 bp, Homo sapien
gggtctggcttggttccttactctg

SEQ ID NO: 327012 - DNA, 25 bp, Homo sapien
tgcagtggccacctagcaaggctaa

SEQ ID NO: 327013 - DNA, 25 bp, Homo sapien
tctgctgaactcctccgagactgct

SEQ ID NO: 327014 - DNA, 25 bp, Homo sapien
gatgccatgtgtccctgtagcagga

SEQ ID NO: 327015 - DNA, 25 bp, Homo sapien
cagctgtgctgattctgggtaggca

SEQ ID NO: 327016 - DNA, 25 bp, Homo sapien
gatcgccaagggtcttgggaccagc

SEQ ID NO: 327017 - DNA, 25 bp, Homo sapien
gggaccagcaggacattcacacatc

SEQ ID NO: 327018 - DNA, 25 bp, Homo sapien
ttcacacatctctctaggagggtct

SEQ ID NO: 327019 - DNA, 25 bp, Homo sapien
gcatggaaggatgcccagttgtgaa

SEQ ID NO: 327020 - DNA, 25 bp, Homo sapien
tcctctgtccccgtgttcgtgtgtt

SEQ ID NO: 327021 - DNA, 25 bp, Homo sapien
ttcgtgtgttcaccgtgtgcatgtg

SEQ ID NO: 327022 - DNA, 25 bp, Homo sapien
acaactcggctgcactagtccacgt

SEQ ID NO: 327023 - DNA, 25 bp, Homo sapien
tgcttgttttgatgcagggaccacc

SEQ ID NO: 327024 - DNA, 25 bp, Homo sapien
cttcccttggtgtcagggacctgag

SEQ ID NO: 327025 - DNA, 25 bp, Homo sapien
catgacagcgtctgcttgcgttgtg

SEQ ID NO: 327026 - DNA, 25 bp, Homo sapien
ctttatgctcttgtgggaggcgacg

SEQ ID NO: 327027 - DNA, 25 bp, Homo sapien
tgctcgcgccgtgggaaagcacact

SEQ ID NO: 327028 - DNA, 25 bp, Homo sapien
acaggggactctcaggaacccgaga

SEQ ID NO: 327029 - DNA, 25 bp, Homo sapien
ccgacttgggctgagtcagaggctt

SEQ ID NO: 327030 - DNA, 25 bp, Homo sapien
aaggccagggctattgctgcaggat

SEQ ID NO: 327031 - DNA, 25 bp, Homo sapien
tctcgccttgggtctgtgtcagttc

SEQ ID NO: 327032 - DNA, 25 bp, Homo sapien
cccagccctcaggacagaccccacc

SEQ ID NO: 327033 - DNA, 25 bp, Homo sapien
ggcagtgctggtcgcctggcctcct

SEQ ID NO: 327034 - DNA, 25 bp, Homo sapien
ctggcacggccactgggcatccggg

SEQ ID NO: 327035 - DNA, 25 bp, Homo sapien
gcttctggcaaggatggtgcacagt

SEQ ID NO: 327036 - DNA, 25 bp, Homo sapien
ggcaggaagccgtccactttgaggc

SEQ ID NO: 327037 - DNA, 25 bp, Homo sapien
acgtaggcagcggtccagaccagca

SEQ ID NO: 327038 - DNA, 25 bp, Homo sapien
ttcaccacgtacacgtaggcagcgg

SEQ ID NO: 327039 - DNA, 25 bp, Homo sapien
caccagcccctcgaaaggtgtgggg

SEQ ID NO: 327040 - DNA, 25 bp, Homo sapien
gcctgccaggcccttggagcttccc

SEQ ID NO: 327041 - DNA, 25 bp, Homo sapien
ccaggcccttggagcttcccagctt

SEQ ID NO: 327042 - DNA, 25 bp, Homo sapien
ctgccaggcccttggagcttcccag

SEQ ID NO: 327043 - DNA, 25 bp, Homo sapien
caggcccttggagcttcccagcttt

SEQ ID NO: 327044 - DNA, 25 bp, Homo sapien
cctggctcgagtgcggcactgggcc

SEQ ID NO: 327045 - DNA, 25 bp, Homo sapien
tccttcctggctcgagtgcggcact

SEQ ID NO: 327046 - DNA, 25 bp, Homo sapien
tctccttcctggctcgagtgcggca

SEQ ID NO: 327047 - DNA, 25 bp, Homo sapien
cttcctggctcgagtgcggcactgg

SEQ ID NO: 327048 - DNA, 25 bp, Homo sapien
ctgagaatctccagctggatgtcct

SEQ ID NO: 327049 - DNA, 25 bp, Homo sapien
cgccccggatgtccttcttgaggtt

SEQ ID NO: 327050 - DNA, 25 bp, Homo sapien
ccagctggatgtcctccatctggtc

SEQ ID NO: 327051 - DNA, 25 bp, Homo sapien
atctggtccagcacgccccggatgt

SEQ ID NO: 327052 - DNA, 25 bp, Homo sapien
gtgcatctcagccacgttgtcccac

SEQ ID NO: 327053 - DNA, 25 bp, Homo sapien
tctcaaagcacaggcggatctgctg

SEQ ID NO: 327054 - DNA, 25 bp, Homo sapien
ctctcaaagcacaggcggatctgct

SEQ ID NO: 327055 - DNA, 25 bp, Homo sapien
cagcagggtggccagtacctccccg

SEQ ID NO: 327056 - DNA, 25 bp, Homo sapien
ggcccactggcctactgcacgaaga

SEQ ID NO: 327057 - DNA, 25 bp, Homo sapien
tgcacgaagacctccctccctaatg

SEQ ID NO: 327058 - DNA, 25 bp, Homo sapien
agggtggccagtacctccccgctgg

SEQ ID NO: 327059 - DNA, 25 bp, Homo sapien
ctgggactgttgcacgaaagcctct

SEQ ID NO: 327060 - DNA, 25 bp, Homo sapien
tgcagcttgagtgttcgggacacag

SEQ ID NO: 327061 - DNA, 25 bp, Homo sapien
cagagcagtgcagcttgagtgttcg

SEQ ID NO: 327062 - DNA, 25 bp, Homo sapien
cagtgcagcttgagtgttcgggaca

SEQ ID NO: 327063 - DNA, 25 bp, Homo sapien
ccagagcagtgcagcttgagtgttc

SEQ ID NO: 327064 - DNA, 25 bp, Homo sapien
tgctccagctgcaggaaggactgtt

SEQ ID NO: 327065 - DNA, 25 bp, Homo sapien
caggctgtggttctcctgctccagc

SEQ ID NO: 327066 - DNA, 25 bp, Homo sapien
ctcctgctccagctgcaggaaggac

SEQ ID NO: 327067 - DNA, 25 bp, Homo sapien
cctgctccagctgcaggaaggactg

SEQ ID NO: 327068 - DNA, 25 bp, Homo sapien
ctgggacagggctaccctgggcgag

SEQ ID NO: 327069 - DNA, 25 bp, Homo sapien
gacagggctaccctgggcgaggcca

SEQ ID NO: 327070 - DNA, 25 bp, Homo sapien
tgggacagggctaccctgggcgagg

SEQ ID NO: 327071 - DNA, 25 bp, Homo sapien
gggacagggctaccctgggcgaggc

SEQ ID NO: 327072 - DNA, 25 bp, Homo sapien
tggtccctgagccaatggatccccc

SEQ ID NO: 327073 - DNA, 25 bp, Homo sapien
tttgggtggcggaagagaactcatc

SEQ ID NO: 327074 - DNA, 25 bp, Homo sapien
aactcatccgacagtagggccagat

SEQ ID NO: 327075 - DNA, 25 bp, Homo sapien
ccacgctgttaacggtcggaccaga

SEQ ID NO: 327076 - DNA, 25 bp, Homo sapien
gaagccctttagtcacttgccgaag

SEQ ID NO: 327077 - DNA, 25 bp, Homo sapien
tctggagtgcggacagtaccagctc

SEQ ID NO: 327078 - DNA, 25 bp, Homo sapien
tcttggagcttcacatgagactcag

SEQ ID NO: 327079 - DNA, 25 bp, Homo sapien
gactcagtgctcaaatgtctggctt

SEQ ID NO: 327080 - DNA, 25 bp, Homo sapien
ttaacttgaggaagccggacagcca

SEQ ID NO: 327081 - DNA, 25 bp, Homo sapien
gacaggtggctcctgtaataaggaa

SEQ ID NO: 327082 - DNA, 25 bp, Homo sapien
tccttaggtcccactgtaggtgccc

SEQ ID NO: 327083 - DNA, 25 bp, Homo sapien
tgtggtccttgccaatcgccctgag

SEQ ID NO: 327084 - DNA, 25 bp, Homo sapien
gggaaggatactgctgctccgtcag

SEQ ID NO: 327085 - DNA, 25 bp, Homo sapien
gaaagtgtggccagcgcagcgtgct

SEQ ID NO: 327086 - DNA, 25 bp, Homo sapien
gcctggttcagaggggccgccctat

SEQ ID NO: 327087 - DNA, 25 bp, Homo sapien
gcgtccagatggcctcgaggagcct

SEQ ID NO: 327088 - DNA, 25 bp, Homo sapien
tgcccatgttgccagggcgtccaga

SEQ ID NO: 327089 - DNA, 25 bp, Homo sapien
tggggggacagcgtggcagagtgcc

SEQ ID NO: 327090 - DNA, 25 bp, Homo sapien
tccaaagtccttgctggggccaaga

SEQ ID NO: 327091 - DNA, 25 bp, Homo sapien
cctgatggtcggtgacaaagtcatc

SEQ ID NO: 327092 - DNA, 25 bp, Homo sapien
cagagtgcctgatggtcggtgacaa

SEQ ID NO: 327093 - DNA, 25 bp, Homo sapien
acagcaccatgctgacaagcccaca

SEQ ID NO: 327094 - DNA, 25 bp, Homo sapien
atcctcactactgtcatcagcactg

SEQ ID NO: 327095 - DNA, 25 bp, Homo sapien
tgtgactgagcccatcctcactact

SEQ ID NO: 327096 - DNA, 25 bp, Homo sapien
catcactatggtcgctgtgactgag

SEQ ID NO: 327097 - DNA, 25 bp, Homo sapien
cccagtgcctgcggcaccacccctg

SEQ ID NO: 327098 - DNA, 25 bp, Homo sapien
tcccagtgcctgcggcaccacccct

SEQ ID NO: 327099 - DNA, 25 bp, Homo sapien
ctcccagtgcctgcggcaccacccc

SEQ ID NO: 327100 - DNA, 25 bp, Homo sapien
ggaggtttattgatgtcggctgatt

SEQ ID NO: 327101 - DNA, 25 bp, Homo sapien
gtttattgatgtcggctgatttccc

SEQ ID NO: 327102 - DNA, 25 bp, Homo sapien
attgatgtcggctgatttccctggg

SEQ ID NO: 327103 - DNA, 25 bp, Homo sapien
cggagggaggtttattgatgtcggc

SEQ ID NO: 327104 - DNA, 25 bp, Homo sapien
tctatccgtgctccctgaagaggcg

SEQ ID NO: 327105 - DNA, 25 bp, Homo sapien
tctgctctgagtgggatgttggctc

SEQ ID NO: 327106 - DNA, 25 bp, Homo sapien
ggagcagtggctaatccagtggtca

SEQ ID NO: 327107 - DNA, 25 bp, Homo sapien
acagagaagcatggccacagaagga

SEQ ID NO: 327108 - DNA, 25 bp, Homo sapien
cgtttgtgaagcaggctgcggccat

SEQ ID NO: 327109 - DNA, 25 bp, Homo sapien
tggcgtttgtgaagcaggctgcggc

SEQ ID NO: 327110 - DNA, 25 bp, Homo sapien
caagggcctggcgtttgtgaagcag

SEQ ID NO: 327111 - DNA, 25 bp, Homo sapien
gcctggcgtttgtgaagcaggctgc

SEQ ID NO: 327112 - DNA, 25 bp, Homo sapien
accccaggacggccttacccagatg

SEQ ID NO: 327113 - DNA, 25 bp, Homo sapien
gagccttggttggattgaaggggct

SEQ ID NO: 327114 - DNA, 25 bp, Homo sapien
cccaggacggccttacccagatggg

SEQ ID NO: 327115 - DNA, 25 bp, Homo sapien
gccttacccagatggggagccttgg

SEQ ID NO: 327116 - DNA, 25 bp, Homo sapien
aggtcaacactgtagattcctccct

SEQ ID NO: 327117 - DNA, 25 bp, Homo sapien
acagcttggaaatgccggtatctcc

SEQ ID NO: 327118 - DNA, 25 bp, Homo sapien
cagcttggaaatgccggtatctcct

SEQ ID NO: 327119 - DNA, 25 bp, Homo sapien
cccaggtcaacactgtagattcctc

SEQ ID NO: 327120 - DNA, 25 bp, Homo sapien
ccttggccttgagaattcctctctg

SEQ ID NO: 327121 - DNA, 25 bp, Homo sapien
cctctctgggaatgcgtgtttctct

SEQ ID NO: 327122 - DNA, 25 bp, Homo sapien
tgctgtcggtccttggccttgagaa

SEQ ID NO: 327123 - DNA, 25 bp, Homo sapien
acaggcctccttagcctcatcagag

SEQ ID NO: 327124 - DNA, 25 bp, Homo sapien
tgtccgaggcacaggagtgagcagg

SEQ ID NO: 327125 - DNA, 25 bp, Homo sapien
ttgtccacacctgggtgggctgtcc

SEQ ID NO: 327126 - DNA, 25 bp, Homo sapien
gcaggacactcggtgtccgaggcac

SEQ ID NO: 327127 - DNA, 25 bp, Homo sapien
ggtctcctgggcaccggtgacctcc

SEQ ID NO: 327128 - DNA, 25 bp, Homo sapien
gggctggtccttctgcatactaaac

SEQ ID NO: 327129 - DNA, 25 bp, Homo sapien
atggccgtggctcctacagctgggc

SEQ ID NO: 327130 - DNA, 25 bp, Homo sapien
catctagagccaaccatggccgtgg

SEQ ID NO: 327131 - DNA, 25 bp, Homo sapien
tcaatatatatagccagcagcatct

SEQ ID NO: 327132 - DNA, 25 bp, Homo sapien
taagcatctcatgacttgggacacc

SEQ ID NO: 327133 - DNA, 25 bp, Homo sapien
taagtaaaggagaacctcatggccg

SEQ ID NO: 327134 - DNA, 25 bp, Homo sapien
taattaagaggatgccctatggccg

SEQ ID NO: 327135 - DNA, 25 bp, Homo sapien
gtccgatgacaaaaacctggccctg

SEQ ID NO: 327136 - DNA, 25 bp, Homo sapien
caagtgcctcgctgagggtgaaggg

SEQ ID NO: 327137 - DNA, 25 bp, Homo sapien
gtccaactgctcagttttcattggg

SEQ ID NO: 327138 - DNA, 25 bp, Homo sapien
ctctggagctgccttggtggcagat

SEQ ID NO: 327139 - DNA, 25 bp, Homo sapien
tggaccctccaagacatcagattgt

SEQ ID NO: 327140 - DNA, 25 bp, Homo sapien
tgtcttgccccgcagaagctgtgtg

SEQ ID NO: 327141 - DNA, 25 bp, Homo sapien
tctcccctgtgagtagagtcgggct

SEQ ID NO: 327142 - DNA, 25 bp, Homo sapien
catgatcctccggagcagcgccagg

SEQ ID NO: 327143 - DNA, 25 bp, Homo sapien
tcttgccccgcagaagctgtgtggt

SEQ ID NO: 327144 - DNA, 25 bp, Homo sapien
ccttgtaactctctccctggtggca

SEQ ID NO: 327145 - DNA, 25 bp, Homo sapien
gctgcgttgccgctgaattatggat

SEQ ID NO: 327146 - DNA, 25 bp, Homo sapien
gccaggtccacggaagtggtccttg

SEQ ID NO: 327147 - DNA, 25 bp, Homo sapien
cagcctctggtgcattccggcaggg

SEQ ID NO: 327148 - DNA, 25 bp, Homo sapien
catgagtgacacaggctcggcctgc

SEQ ID NO: 327149 - DNA, 25 bp, Homo sapien
cctttccgtatcaacaggaggccag

SEQ ID NO: 327150 - DNA, 25 bp, Homo sapien
gactccaggtgacctcgtgtcggca

SEQ ID NO: 327151 - DNA, 25 bp, Homo sapien
tggagtcaggcaacattctcgggat

SEQ ID NO: 327152 - DNA, 25 bp, Homo sapien
gctcccaccgtccacatccctctat

SEQ ID NO: 327153 - DNA, 25 bp, Homo sapien
tcccaccgtccacatccctctatct

SEQ ID NO: 327154 - DNA, 25 bp, Homo sapien
accgtccacatccctctatctgccc

SEQ ID NO: 327155 - DNA, 25 bp, Homo sapien
cccaccgtccacatccctctatctg

SEQ ID NO: 327156 - DNA, 25 bp, Homo sapien
gggcagaccctccttagccggcaac

SEQ ID NO: 327157 - DNA, 25 bp, Homo sapien
cgtctcctaaaaggccagcaggtcc

SEQ ID NO: 327158 - DNA, 25 bp, Homo sapien
caacaaccagcacagtgcagtgtgg

SEQ ID NO: 327159 - DNA, 25 bp, Homo sapien
tagccggcaaccactgcagattcct

SEQ ID NO: 327160 - DNA, 25 bp, Homo sapien
tgctgagacatagggctccacgggt

SEQ ID NO: 327161 - DNA, 25 bp, Homo sapien
gaggggcagtcatcgtgttgggttt

SEQ ID NO: 327162 - DNA, 25 bp, Homo sapien
cttgcctgctgagacatagggctcc

SEQ ID NO: 327163 - DNA, 25 bp, Homo sapien
gcctgctgagacatagggctccacg

SEQ ID NO: 327164 - DNA, 25 bp, Homo sapien
cagggtggtcatacctgtggagcct

SEQ ID NO: 327165 - DNA, 25 bp, Homo sapien
ctctgttctgtggtttgatcgccat

SEQ ID NO: 327166 - DNA, 25 bp, Homo sapien
tgctctgcggccaactggatggccc

SEQ ID NO: 327167 - DNA, 25 bp, Homo sapien
ccaagcggactgagttgggcagggt

SEQ ID NO: 327168 - DNA, 25 bp, Homo sapien
gcctccgcccgccaaagtccaccat

SEQ ID NO: 327169 - DNA, 25 bp, Homo sapien
ccctgctttgccaatcctggatcct

SEQ ID NO: 327170 - DNA, 25 bp, Homo sapien
ccgccaaagtccaccattggccaca

SEQ ID NO: 327171 - DNA, 25 bp, Homo sapien
tccgcccgccaaagtccaccattgg

SEQ ID NO: 327172 - DNA, 25 bp, Homo sapien
cctgcactgtgcagctcgcccacct

SEQ ID NO: 327173 - DNA, 25 bp, Homo sapien
gggcgggtgcgggaagccggatgca

SEQ ID NO: 327174 - DNA, 25 bp, Homo sapien
tgctttttccaactcggatagcccc

SEQ ID NO: 327175 - DNA, 25 bp, Homo sapien
aagccggatgcagccagtaccgttg

SEQ ID NO: 327176 - DNA, 25 bp, Homo sapien
ggagacacagggggccagtccacac

SEQ ID NO: 327177 - DNA, 25 bp, Homo sapien
aggagacacagggggccagtccaca

SEQ ID NO: 327178 - DNA, 25 bp, Homo sapien
caggagacacagggggccagtccac

SEQ ID NO: 327179 - DNA, 25 bp, Homo sapien
cttccgcagtcgggcctggggaatg

SEQ ID NO: 327180 - DNA, 25 bp, Homo sapien
ttccgcagtcgggcctggggaatgg

SEQ ID NO: 327181 - DNA, 25 bp, Homo sapien
ccttccgcagtcgggcctggggaat

SEQ ID NO: 327182 - DNA, 25 bp, Homo sapien
gcctggggaatgggttgggtactga

SEQ ID NO: 327183 - DNA, 25 bp, Homo sapien
agggcccgcccccaccttgcagtgg

SEQ ID NO: 327184 - DNA, 25 bp, Homo sapien
cccaccttgcagtggttcctgggac

SEQ ID NO: 327185 - DNA, 25 bp, Homo sapien
cgcccccaccttgcagtggttcctg

SEQ ID NO: 327186 - DNA, 25 bp, Homo sapien
aggggggctaccagcccccagctct

SEQ ID NO: 327187 - DNA, 25 bp, Homo sapien
ttcagcagcagccttgaattgtaat

SEQ ID NO: 327188 - DNA, 25 bp, Homo sapien
ctccagacacgttctgcagctcgag

SEQ ID NO: 327189 - DNA, 25 bp, Homo sapien
ttctgcagctcgaggaaggaactgc

SEQ ID NO: 327190 - DNA, 25 bp, Homo sapien
ttgcagctgggatctgcccgagttt

SEQ ID NO: 327191 - DNA, 25 bp, Homo sapien
cccgactttgcaagtcaaattccgc

SEQ ID NO: 327192 - DNA, 25 bp, Homo sapien
gactttgcaagtcaaattccgcatt

SEQ ID NO: 327193 - DNA, 25 bp, Homo sapien
ttgcaagtcaaattccgcattactg

SEQ ID NO: 327194 - DNA, 25 bp, Homo sapien
agtcaaattccgcattactgcgctc

SEQ ID NO: 327195 - DNA, 25 bp, Homo sapien
cagaaggttttcacggtccactggg

SEQ ID NO: 327196 - DNA, 25 bp, Homo sapien
tccactgggcattcgcgggcctttg

SEQ ID NO: 327197 - DNA, 25 bp, Homo sapien
cgagggcctgcctttgattagcaca

SEQ ID NO: 327198 - DNA, 25 bp, Homo sapien
cttgagaattgaggccggcttcggc

SEQ ID NO: 327199 - DNA, 25 bp, Homo sapien
gatggtctgttgaaggagtcggtga

SEQ ID NO: 327200 - DNA, 25 bp, Homo sapien
agtcggtgaacggagaggcatgcag

SEQ ID NO: 327201 - DNA, 25 bp, Homo sapien
agggcgggtgctcagaccctacagt

SEQ ID NO: 327202 - DNA, 25 bp, Homo sapien
cagggatggatatggacagggcggg

SEQ ID NO: 327203 - DNA, 25 bp, Homo sapien
agggacgggcgccccgtgccggctg

SEQ ID NO: 327204 - DNA, 25 bp, Homo sapien
tcagggacgggcgccccgtgccggc

SEQ ID NO: 327205 - DNA, 25 bp, Homo sapien
gggacgggcgccccgtgccggctgc

SEQ ID NO: 327206 - DNA, 25 bp, Homo sapien
ctcagggacgggcgccccgtgccgg

SEQ ID NO: 327207 - DNA, 25 bp, Homo sapien
gcgttctggaacaaacgctgccgcc

SEQ ID NO: 327208 - DNA, 25 bp, Homo sapien
tgccgccgaaccctgtaaacatgat

SEQ ID NO: 327209 - DNA, 25 bp, Homo sapien
tctatataccgcgatctgggtggga

SEQ ID NO: 327210 - DNA, 25 bp, Homo sapien
gagctctttattccacgtcgtccga

SEQ ID NO: 327211 - DNA, 25 bp, Homo sapien
ccgcccggctggcttggcggcgtgg

SEQ ID NO: 327212 - DNA, 25 bp, Homo sapien
gagagagaccccgtatgtacacaca

SEQ ID NO: 327213 - DNA, 25 bp, Homo sapien
tgagcacgctcttgtgtccgctggg

SEQ ID NO: 327214 - DNA, 25 bp, Homo sapien
tggcgggcggcaggcgtccatcagg

SEQ ID NO: 327215 - DNA, 25 bp, Homo sapien
gcaggtgaggctgggtagggcacct

SEQ ID NO: 327216 - DNA, 25 bp, Homo sapien
tagggcacctgagccttctgagtca

SEQ ID NO: 327217 - DNA, 25 bp, Homo sapien
gctgggtagggcacctgagccttct

SEQ ID NO: 327218 - DNA, 25 bp, Homo sapien
agcagggcccaagcactgtccacag

SEQ ID NO: 327219 - DNA, 25 bp, Homo sapien
tcacggaaggcatgcgggtgcacat

SEQ ID NO: 327220 - DNA, 25 bp, Homo sapien
cattggcagctaggcgtttgaggtc

SEQ ID NO: 327221 - DNA, 25 bp, Homo sapien
acagatagagtgtcatgaggcggcc

SEQ ID NO: 327222 - DNA, 25 bp, Homo sapien
tgagtcattgatgtgccgtgggcca

SEQ ID NO: 327223 - DNA, 25 bp, Homo sapien
cattgtagcatacgcaggcacctgg

SEQ ID NO: 327224 - DNA, 25 bp, Homo sapien
caattcgggccagcacattcgagtg

SEQ ID NO: 327225 - DNA, 25 bp, Homo sapien
tgaaggcagccgcatcaattcgggc

SEQ ID NO: 327226 - DNA, 25 bp, Homo sapien
gaccggagctgtgcattatcgctga

SEQ ID NO: 327227 - DNA, 25 bp, Homo sapien
acacagagcccgcattgcaggagtc

SEQ ID NO: 327228 - DNA, 25 bp, Homo sapien
aaaaacgggcgcctggatgcccgag

SEQ ID NO: 327229 - DNA, 25 bp, Homo sapien
gcttaggaggagtcgcgtcccacaa

SEQ ID NO: 327230 - DNA, 25 bp, Homo sapien
gtccctctgggcacgtctatctcaa

SEQ ID NO: 327231 - DNA, 25 bp, Homo sapien
gttgacagctaacaccttccacggc

SEQ ID NO: 327232 - DNA, 25 bp, Homo sapien
tgacagctaacaccttccacggcag

SEQ ID NO: 327233 - DNA, 25 bp, Homo sapien
agctaacaccttccacggcagctgg

SEQ ID NO: 327234 - DNA, 25 bp, Homo sapien
ctgcgttgacagctaacaccttcca

SEQ ID NO: 327235 - DNA, 25 bp, Homo sapien
ggtattgggcgcaaagacacggctc

SEQ ID NO: 327236 - DNA, 25 bp, Homo sapien
gttcctgccgagacaactgcttttc

SEQ ID NO: 327237 - DNA, 25 bp, Homo sapien
actgcttttcgtaaaccaacttctg

SEQ ID NO: 327238 - DNA, 25 bp, Homo sapien
gccatggtaattggctccagcctgg

SEQ ID NO: 327239 - DNA, 25 bp, Homo sapien
cgagccgagcagggatggccttctt

SEQ ID NO: 327240 - DNA, 25 bp, Homo sapien
tgagccgagccgagcagggatggcc

SEQ ID NO: 327241 - DNA, 25 bp, Homo sapien
gccgagcagggatggccttcttcat

SEQ ID NO: 327242 - DNA, 25 bp, Homo sapien
gccgagccgagcagggatggccttc

SEQ ID NO: 327243 - DNA, 25 bp, Homo sapien
tgggatcaccggagggtcccatcac

SEQ ID NO: 327244 - DNA, 25 bp, Homo sapien
tctgcccagcgatgccaggaggcag

SEQ ID NO: 327245 - DNA, 25 bp, Homo sapien
cgtgccctcccaagcttgggctgaa

SEQ ID NO: 327246 - DNA, 25 bp, Homo sapien
ggctttcatccacgcacagcttggt

SEQ ID NO: 327247 - DNA, 25 bp, Homo sapien
cgccatccatcctcaggcccacaga

SEQ ID NO: 327248 - DNA, 25 bp, Homo sapien
gagtctcctagggaagtgagtacca

SEQ ID NO: 327249 - DNA, 25 bp, Homo sapien
tgcggcaggagattggcagcagctt

SEQ ID NO: 327250 - DNA, 25 bp, Homo sapien
tcctagggaagtgagtaccagcccc

SEQ ID NO: 327251 - DNA, 25 bp, Homo sapien
ccatacaagaccaggccgaggagcc

SEQ ID NO: 327252 - DNA, 25 bp, Homo sapien
tgctgtgctgagtgccgcccataca

SEQ ID NO: 327253 - DNA, 25 bp, Homo sapien
gagtgccgcccatacaagaccaggc

SEQ ID NO: 327254 - DNA, 25 bp, Homo sapien
cacgggcagccaccctgctgcatgg

SEQ ID NO: 327255 - DNA, 25 bp, Homo sapien
agggccgtccgtgccacaaagcatg

SEQ ID NO: 327256 - DNA, 25 bp, Homo sapien
gcacagggccgtccgtgccacaaag

SEQ ID NO: 327257 - DNA, 25 bp, Homo sapien
cctggtgttgcaccggctgcacagg

SEQ ID NO: 327258 - DNA, 25 bp, Homo sapien
ctcctggtgttgcaccggctgcaca

SEQ ID NO: 327259 - DNA, 25 bp, Homo sapien
acgggaggttctgagcccagaccgt

SEQ ID NO: 327260 - DNA, 25 bp, Homo sapien
aggttctgagcccagaccgtgaggc

SEQ ID NO: 327261 - DNA, 25 bp, Homo sapien
gaaacgggaggttctgagcccagac

SEQ ID NO: 327262 - DNA, 25 bp, Homo sapien
ctcggagaaacgggaggttctgagc

SEQ ID NO: 327263 - DNA, 25 bp, Homo sapien
caggccgggccgcaggaggcgctca

SEQ ID NO: 327264 - DNA, 25 bp, Homo sapien
gccgcgggacgaggctcggcgcgct

SEQ ID NO: 327265 - DNA, 25 bp, Homo sapien
ccgcaggaggcgctcagcccgcccg

SEQ ID NO: 327266 - DNA, 25 bp, Homo sapien
gcccggccgcgggacgaggctcggc

SEQ ID NO: 327267 - DNA, 25 bp, Homo sapien
cgatgagctcctaagtgcatcccgg

SEQ ID NO: 327268 - DNA, 25 bp, Homo sapien
tgcatcccggggtcttcagacaact

SEQ ID NO: 327269 - DNA, 25 bp, Homo sapien
ggggtcttcagacaactgccaggct

SEQ ID NO: 327270 - DNA, 25 bp, Homo sapien
gatgagctcctaagtgcatcccggg

SEQ ID NO: 327271 - DNA, 25 bp, Homo sapien
ttgctctgcgctgggacctgggcct

SEQ ID NO: 327272 - DNA, 25 bp, Homo sapien
cccggttgctctgcgctgggacctg

SEQ ID NO: 327273 - DNA, 25 bp, Homo sapien
ctgggtgctagctgggatggttagg

SEQ ID NO: 327274 - DNA, 25 bp, Homo sapien
ctgggatggttaggcgtcggccagc

SEQ ID NO: 327275 - DNA, 25 bp, Homo sapien
ctggatcccttgtggcccatctcca

SEQ ID NO: 327276 - DNA, 25 bp, Homo sapien
gggaccgtcaatgggacgtatgcat

SEQ ID NO: 327277 - DNA, 25 bp, Homo sapien
tcaatgggacgtatgcattgcacag

SEQ ID NO: 327278 - DNA, 25 bp, Homo sapien
agtgatggcccttacctctgcgtcc

SEQ ID NO: 327279 - DNA, 25 bp, Homo sapien
ctggcagtgacagctaaattgggag

SEQ ID NO: 327280 - DNA, 25 bp, Homo sapien
gctaaattgggagccgctgttcaca

SEQ ID NO: 327281 - DNA, 25 bp, Homo sapien
ccagcgggcagtcaaaaccgggtcg

SEQ ID NO: 327282 - DNA, 25 bp, Homo sapien
acaccaggagcccagcgggcagtca

SEQ ID NO: 327283 - DNA, 25 bp, Homo sapien
cagggcctaagtttcctcctgtgtc

SEQ ID NO: 327284 - DNA, 25 bp, Homo sapien
ctcctgtgtccgcaggccttattgc

SEQ ID NO: 327285 - DNA, 25 bp, Homo sapien
ggcctaagtttcctcctgtgtccgc

SEQ ID NO: 327286 - DNA, 25 bp, Homo sapien
tggcacagggcctaagtttcctcct

SEQ ID NO: 327287 - DNA, 25 bp, Homo sapien
tggcccatccagccaggcgaggggc

SEQ ID NO: 327288 - DNA, 25 bp, Homo sapien
ggccaccatctttgcagccggtgaa

SEQ ID NO: 327289 - DNA, 25 bp, Homo sapien
atatttctttatgttccacgcgcct

SEQ ID NO: 327290 - DNA, 25 bp, Homo sapien
accatctttgcagccggtgaaggga

SEQ ID NO: 327291 - DNA, 25 bp, Homo sapien
ctttatgttccacgcgccttgcctg

SEQ ID NO: 327292 - DNA, 25 bp, Homo sapien
ctttgaatcgcccatctccatggca

SEQ ID NO: 327293 - DNA, 25 bp, Homo sapien
ccaggcctttgaatcgcccatctcc

SEQ ID NO: 327294 - DNA, 25 bp, Homo sapien
aggcctttgaatcgcccatctccat

SEQ ID NO: 327295 - DNA, 25 bp, Homo sapien
gcctttgaatcgcccatctccatgg

SEQ ID NO: 327296 - DNA, 25 bp, Homo sapien
ccccggtgatgctttcatccctctc

SEQ ID NO: 327297 - DNA, 25 bp, Homo sapien
cccggtgatgctttcatccctctcc

SEQ ID NO: 327298 - DNA, 25 bp, Homo sapien
cagcagccctcatccgcaggggctg

SEQ ID NO: 327299 - DNA, 25 bp, Homo sapien
gcagccctcatccgcaggggctgct

SEQ ID NO: 327300 - DNA, 25 bp, Homo sapien
ctggccagcagccctcatccgcagg

SEQ ID NO: 327301 - DNA, 25 bp, Homo sapien
gccagcagccctcatccgcaggggc

SEQ ID NO: 327302 - DNA, 25 bp, Homo sapien
gctggggccttcagtcagcaggacc

SEQ ID NO: 327303 - DNA, 25 bp, Homo sapien
cgtcatgcaggtgctggggccttca

SEQ ID NO: 327304 - DNA, 25 bp, Homo sapien
gcaggaccaggcagcccatgtcctg

SEQ ID NO: 327305 - DNA, 25 bp, Homo sapien
caggtgctggggccttcagtcagca

SEQ ID NO: 327306 - DNA, 25 bp, Homo sapien
agggagccaattatccctgaggcaa

SEQ ID NO: 327307 - DNA, 25 bp, Homo sapien
ccacgcctgattgggagccccatgt

SEQ ID NO: 327308 - DNA, 25 bp, Homo sapien
gctggctgcagataattgggaagac

SEQ ID NO: 327309 - DNA, 25 bp, Homo sapien
gacttgaggatccagaggtctgcca

SEQ ID NO: 327310 - DNA, 25 bp, Homo sapien
cccgatcggcgtgttctgcctcggc

SEQ ID NO: 327311 - DNA, 25 bp, Homo sapien
gcctcggccagctgtcagccacctg

SEQ ID NO: 327312 - DNA, 25 bp, Homo sapien
tgttctgcctcggccagctgtcagc

SEQ ID NO: 327313 - DNA, 25 bp, Homo sapien
cagccccgatcggcgtgttctgcct

SEQ ID NO: 327314 - DNA, 25 bp, Homo sapien
ccagcaacgttgcactgccaagaca

SEQ ID NO: 327315 - DNA, 25 bp, Homo sapien
gatgcttccagcaacgttgcactgc

SEQ ID NO: 327316 - DNA, 25 bp, Homo sapien
tgccaagacagaggccgtccacctg

SEQ ID NO: 327317 - DNA, 25 bp, Homo sapien
tggaggatgcttccagcaacgttgc

SEQ ID NO: 327318 - DNA, 25 bp, Homo sapien
agatggatggatgcgtgggcctgct

SEQ ID NO: 327319 - DNA, 25 bp, Homo sapien
gaacagatggatggatgcgtgggcc

SEQ ID NO: 327320 - DNA, 25 bp, Homo sapien
gatgcgtgggcctgctgcgtgcagg

SEQ ID NO: 327321 - DNA, 25 bp, Homo sapien
ggatgcgtgggcctgctgcgtgcag

SEQ ID NO: 327322 - DNA, 25 bp, Homo sapien
cctgttgctgccgcttgtcctgggt

SEQ ID NO: 327323 - DNA, 25 bp, Homo sapien
ctgttgctgccgcttgtcctgggtc

SEQ ID NO: 327324 - DNA, 25 bp, Homo sapien
gttgctgccgcttgtcctgggtcat

SEQ ID NO: 327325 - DNA, 25 bp, Homo sapien
tgttgctgccgcttgtcctgggtca

SEQ ID NO: 327326 - DNA, 25 bp, Homo sapien
ctggtgcccgccgtggacttcggca

SEQ ID NO: 327327 - DNA, 25 bp, Homo sapien
gccgtgccaggacgtgggtcggcca

SEQ ID NO: 327328 - DNA, 25 bp, Homo sapien
ttcgcgccgctgtccacggcgccgg

SEQ ID NO: 327329 - DNA, 25 bp, Homo sapien
taggaggcgtactgcagctggcgaa

SEQ ID NO: 327330 - DNA, 25 bp, Homo sapien
ccacttgtgggaatacagagttatc

SEQ ID NO: 327331 - DNA, 25 bp, Homo sapien
ggagtattcttcatgttgacacaag

SEQ ID NO: 327332 - DNA, 25 bp, Homo sapien
tatttacgatatataccacttgtgg

SEQ ID NO: 327333 - DNA, 25 bp, Homo sapien
tgtagggctcatagcctggaacccc

SEQ ID NO: 327334 - DNA, 25 bp, Homo sapien
gggggtcagagtggccagctgaatg

SEQ ID NO: 327335 - DNA, 25 bp, Homo sapien
gggtcagagtggccagctgaatgct

SEQ ID NO: 327336 - DNA, 25 bp, Homo sapien
agtggccagctgaatgctgggccat

SEQ ID NO: 327337 - DNA, 25 bp, Homo sapien
tcagagtggccagctgaatgctggg

SEQ ID NO: 327338 - DNA, 25 bp, Homo sapien
gggatcgcccatcagctgttctgca

SEQ ID NO: 327339 - DNA, 25 bp, Homo sapien
tgcagacacttagatccagagatgt

SEQ ID NO: 327340 - DNA, 25 bp, Homo sapien
tcacacagtgggatcgcccatcagc

SEQ ID NO: 327341 - DNA, 25 bp, Homo sapien
tctgcacctgcttttactgctctag

SEQ ID NO: 327342 - DNA, 25 bp, Homo sapien
atggctctttgcagttacgttggtt

SEQ ID NO: 327343 - DNA, 25 bp, Homo sapien
aatggctctttgcagttacgttggt

SEQ ID NO: 327344 - DNA, 25 bp, Homo sapien
aaatttcatcagggtattcggatgg

SEQ ID NO: 327345 - DNA, 25 bp, Homo sapien
aatttcatcagggtattcggatggc

SEQ ID NO: 327346 - DNA, 25 bp, Homo sapien
tttcatcagggtattcggatggctc

SEQ ID NO: 327347 - DNA, 25 bp, Homo sapien
atttcatcagggtattcggatggct

SEQ ID NO: 327348 - DNA, 25 bp, Homo sapien
agagcagccgccttccgaggactcg

SEQ ID NO: 327349 - DNA, 25 bp, Homo sapien
caggggccggagaccagtcatacca

SEQ ID NO: 327350 - DNA, 25 bp, Homo sapien
agcaatgcggcatcgtgcatttttc

SEQ ID NO: 327351 - DNA, 25 bp, Homo sapien
acatttgcaacacatctcgattcag

SEQ ID NO: 327352 - DNA, 25 bp, Homo sapien
caagggagcggctgagaccagaaca

SEQ ID NO: 327353 - DNA, 25 bp, Homo sapien
ggtcaagaagatgaactctgcccag

SEQ ID NO: 327354 - DNA, 25 bp, Homo sapien
gatgtgcccggtggagtaaggtgtg

SEQ ID NO: 327355 - DNA, 25 bp, Homo sapien
ctatcctagggtttgacagcaagtc

SEQ ID NO: 327356 - DNA, 25 bp, Homo sapien
aggcgactgccagggacctcccagt

SEQ ID NO: 327357 - DNA, 25 bp, Homo sapien
gcagcaggcgactgccagggacctc

SEQ ID NO: 327358 - DNA, 25 bp, Homo sapien
tgcagctttcggatgagttccagca

SEQ ID NO: 327359 - DNA, 25 bp, Homo sapien
ctctgctgcagctttcggatgagtt

SEQ ID NO: 327360 - DNA, 25 bp, Homo sapien
tgtgctctgctggtcagccaccttc

SEQ ID NO: 327361 - DNA, 25 bp, Homo sapien
ttggtggtcacgtagaagccagcca

SEQ ID NO: 327362 - DNA, 25 bp, Homo sapien
gatcttctggtccatcgcccgctgc

SEQ ID NO: 327363 - DNA, 25 bp, Homo sapien
ccatcgcccgctgctcctcacggat

SEQ ID NO: 327364 - DNA, 25 bp, Homo sapien
ctctagttctcgctgctgagccgcc

SEQ ID NO: 327365 - DNA, 25 bp, Homo sapien
cagccaggccaaaggggtgtctgca

SEQ ID NO: 327366 - DNA, 25 bp, Homo sapien
cagtggggaggatgccagcctcctc

SEQ ID NO: 327367 - DNA, 25 bp, Homo sapien
gagcagccaggccaaaggggtgtct

SEQ ID NO: 327368 - DNA, 25 bp, Homo sapien
gtctgcagtggggaggatgccagcc

SEQ ID NO: 327369 - DNA, 25 bp, Homo sapien
gatgtgtgcaaactgtctggtctga

SEQ ID NO: 327370 - DNA, 25 bp, Homo sapien
cagctggcgccagtgaccagtaagt

SEQ ID NO: 327371 - DNA, 25 bp, Homo sapien
tcagccatcaagtaaagctccacgg

SEQ ID NO: 327372 - DNA, 25 bp, Homo sapien
tacagaggaagcgatcatgggacat

SEQ ID NO: 327373 - DNA, 25 bp, Homo sapien
taggtaccatgatgtggccgtgcac

SEQ ID NO: 327374 - DNA, 25 bp, Homo sapien
tgctcccaatccaaggccaaggttg

SEQ ID NO: 327375 - DNA, 25 bp, Homo sapien
ttctaccagcagtccagtgtacagg

SEQ ID NO: 327376 - DNA, 25 bp, Homo sapien
tcatctcaagagctgccgaaaaggg

SEQ ID NO: 327377 - DNA, 25 bp, Homo sapien
gcccgttgattttgtcaatcttaga

SEQ ID NO: 327378 - DNA, 25 bp, Homo sapien
tctctgcgcccgttgattttgtcaa

SEQ ID NO: 327379 - DNA, 25 bp, Homo sapien
gttgattttgtcaatcttagagacc

SEQ ID NO: 327380 - DNA, 25 bp, Homo sapien
tctgcgcccgttgattttgtcaatc

SEQ ID NO: 327381 - DNA, 25 bp, Homo sapien
tggttgtacaggctcttttcggtga

SEQ ID NO: 327382 - DNA, 25 bp, Homo sapien
tcggtgaggtgctggatctccagta

SEQ ID NO: 327383 - DNA, 25 bp, Homo sapien
gctcgttctgtaggcgcaggcgctg

SEQ ID NO: 327384 - DNA, 25 bp, Homo sapien
agtagcccctgcacgatttcgaaca

SEQ ID NO: 327385 - DNA, 25 bp, Homo sapien
accaggctctgtagcgccgacagca

SEQ ID NO: 327386 - DNA, 25 bp, Homo sapien
caactggtagtgtcgctcctgctgc

SEQ ID NO: 327387 - DNA, 25 bp, Homo sapien
tgtagcgccgacagcaactggtagt

SEQ ID NO: 327388 - DNA, 25 bp, Homo sapien
gacagcaactggtagtgtcgctcct

SEQ ID NO: 327389 - DNA, 25 bp, Homo sapien
ctccaaggcggccgcgtagcgctcc

SEQ ID NO: 327390 - DNA, 25 bp, Homo sapien
ccaaggcggccgcgtagcgctccat

SEQ ID NO: 327391 - DNA, 25 bp, Homo sapien
tcctccaaggcggccgcgtagcgct

SEQ ID NO: 327392 - DNA, 25 bp, Homo sapien
ctcctccaaggcggccgcgtagcgc

SEQ ID NO: 327393 - DNA, 25 bp, Homo sapien
ccccagcttcacgacatcccgagcg

SEQ ID NO: 327394 - DNA, 25 bp, Homo sapien
agcttcacgacatcccgagcgcggc

SEQ ID NO: 327395 - DNA, 25 bp, Homo sapien
acgagctcccccagcttcacgacat

SEQ ID NO: 327396 - DNA, 25 bp, Homo sapien
ggcggcgacgagctcccccagcttc

SEQ ID NO: 327397 - DNA, 25 bp, Homo sapien
cagtagtgatggtccaatggcgccc

SEQ ID NO: 327398 - DNA, 25 bp, Homo sapien
gataataatgctgcggtgccgacag

SEQ ID NO: 327399 - DNA, 25 bp, Homo sapien
tcacggtggcagcttcaaggacagt

SEQ ID NO: 327400 - DNA, 25 bp, Homo sapien
cagcagcagtattgcgggatcccca

SEQ ID NO: 327401 - DNA, 25 bp, Homo sapien
gatgtagtacactagaatactgtcc

SEQ ID NO: 327402 - DNA, 25 bp, Homo sapien
tcaataaatgatgatcttcataaca

SEQ ID NO: 327403 - DNA, 25 bp, Homo sapien
cagcaaagggttgcttaaagtcacg

SEQ ID NO: 327404 - DNA, 25 bp, Homo sapien
actgtccctagtattgaatcttgtc

SEQ ID NO: 327405 - DNA, 25 bp, Homo sapien
agcctttaagctgtcatactgggag

SEQ ID NO: 327406 - DNA, 25 bp, Homo sapien
tcgggaggcaagcagtccctggtcc

SEQ ID NO: 327407 - DNA, 25 bp, Homo sapien
aatcattttgcggtgtcggaaggtc

SEQ ID NO: 327408 - DNA, 25 bp, Homo sapien
gacagtagcttgcacattcaggttt

SEQ ID NO: 327409 - DNA, 25 bp, Homo sapien
tagaggtgttgagtgctcactgaac

SEQ ID NO: 327410 - DNA, 25 bp, Homo sapien
ccaactttgattcagtgggctctgc

SEQ ID NO: 327411 - DNA, 25 bp, Homo sapien
tgaactccgtgatcttcctgaaacc

SEQ ID NO: 327412 - DNA, 25 bp, Homo sapien
aaggcactgcccacgcagtctgtct

SEQ ID NO: 327413 - DNA, 25 bp, Homo sapien
gcagctaacaagactggcatctggg

SEQ ID NO: 327414 - DNA, 25 bp, Homo sapien
tcagcccactcttgaaggtaaagga

SEQ ID NO: 327415 - DNA, 25 bp, Homo sapien
tactgagatgggtcagcaatgcatg

SEQ ID NO: 327416 - DNA, 25 bp, Homo sapien
tcagcaaccttgaaagattggacaa

SEQ ID NO: 327417 - DNA, 25 bp, Homo sapien
taaactgtcgtatgttggctggcct

SEQ ID NO: 327418 - DNA, 25 bp, Homo sapien
ttggctggcctgaacaagcgtagat

SEQ ID NO: 327419 - DNA, 25 bp, Homo sapien
gcgtagatattctccatcctcaatt

SEQ ID NO: 327420 - DNA, 25 bp, Homo sapien
ttgaagtaaactgtcgtatgttggc

SEQ ID NO: 327421 - DNA, 25 bp, Homo sapien
cccagaggcgctagtgactgtgcgt

SEQ ID NO: 327422 - DNA, 25 bp, Homo sapien
gcgctagtgactgtgcgtggctttc

SEQ ID NO: 327423 - DNA, 25 bp, Homo sapien
attctccccccagaggcgctagtga

SEQ ID NO: 327424 - DNA, 25 bp, Homo sapien
gctagtgactgtgcgtggctttcca

SEQ ID NO: 327425 - DNA, 25 bp, Homo sapien
aaatctcttagaagactccgtagat

SEQ ID NO: 327426 - DNA, 25 bp, Homo sapien
gacagcgtgtcaatctctgaaggtt

SEQ ID NO: 327427 - DNA, 25 bp, Homo sapien
gaaaatgacagcgtgtcaatctctg

SEQ ID NO: 327428 - DNA, 25 bp, Homo sapien
cgtagatccaggaacggaaatggaa

SEQ ID NO: 327429 - DNA, 25 bp, Homo sapien
tgtaaaccagaagatatgcagtttc

SEQ ID NO: 327430 - DNA, 25 bp, Homo sapien
atgtaaaccagaagatatgcagttt

SEQ ID NO: 327431 - DNA, 25 bp, Homo sapien
taaaccagaagatatgcagtttcct

SEQ ID NO: 327432 - DNA, 25 bp, Homo sapien
gtaaaccagaagatatgcagtttcc

SEQ ID NO: 327433 - DNA, 25 bp, Homo sapien
ccagggctgctggtcgaggtccggc

SEQ ID NO: 327434 - DNA, 25 bp, Homo sapien
ggccagggctgctggtcgaggtccg

SEQ ID NO: 327435 - DNA, 25 bp, Homo sapien
agggctgctggtcgaggtccggccc

SEQ ID NO: 327436 - DNA, 25 bp, Homo sapien
gctgctggtcgaggtccggccccat

SEQ ID NO: 327437 - DNA, 25 bp, Homo sapien
acttcgagtttaagtgggtgtcgca

SEQ ID NO: 327438 - DNA, 25 bp, Homo sapien
ttcgagtttaagtgggtgtcgcatc

SEQ ID NO: 327439 - DNA, 25 bp, Homo sapien
tctttgcaacttcgagtttaagtgg

SEQ ID NO: 327440 - DNA, 25 bp, Homo sapien
tgcaacttcgagtttaagtgggtgt

SEQ ID NO: 327441 - DNA, 25 bp, Homo sapien
ctggggagactaagcagtccccagc

SEQ ID NO: 327442 - DNA, 25 bp, Homo sapien
gggagactaagcagtccccagcccc

SEQ ID NO: 327443 - DNA, 25 bp, Homo sapien
tggggagactaagcagtccccagcc

SEQ ID NO: 327444 - DNA, 25 bp, Homo sapien
ggggagactaagcagtccccagccc

SEQ ID NO: 327445 - DNA, 25 bp, Homo sapien
gcaacagcggcgtgggcaaaggccg

SEQ ID NO: 327446 - DNA, 25 bp, Homo sapien
aatatttgagaagaccttggagtca

SEQ ID NO: 327447 - DNA, 25 bp, Homo sapien
cgtacaatatttgagaagaccttgg

SEQ ID NO: 327448 - DNA, 25 bp, Homo sapien
acaatatttgagaagaccttggagt

SEQ ID NO: 327449 - DNA, 25 bp, Homo sapien
cccagtgcccctggtgatatccagg

SEQ ID NO: 327450 - DNA, 25 bp, Homo sapien
ggccccagtgcccctggtgatatcc

SEQ ID NO: 327451 - DNA, 25 bp, Homo sapien
ggtgctgggctgtgatcaccgcctc

SEQ ID NO: 327452 - DNA, 25 bp, Homo sapien
gtgctgggctgtgatcaccgcctcc

SEQ ID NO: 327453 - DNA, 25 bp, Homo sapien
ggattgcttgtcagccttgtctgcc

SEQ ID NO: 327454 - DNA, 25 bp, Homo sapien
cctggcacagtggcctcatttatta

SEQ ID NO: 327455 - DNA, 25 bp, Homo sapien
catcctggtgagtatcttgtccctg

SEQ ID NO: 327456 - DNA, 25 bp, Homo sapien
tcctcatcctggtgagtatcttgtc

SEQ ID NO: 327457 - DNA, 25 bp, Homo sapien
cccgcctttcctggagtccgaggca

SEQ ID NO: 327458 - DNA, 25 bp, Homo sapien
ccgcctttcctggagtccgaggcag

SEQ ID NO: 327459 - DNA, 25 bp, Homo sapien
agcaggttccccgcctttcctggag

SEQ ID NO: 327460 - DNA, 25 bp, Homo sapien
tcagtagccagcaggttccccgcct

SEQ ID NO: 327461 - DNA, 25 bp, Homo sapien
caccacagcgatgaaggtggatgcg

SEQ ID NO: 327462 - DNA, 25 bp, Homo sapien
gcaccacagcgatgaaggtggatgc

SEQ ID NO: 327463 - DNA, 25 bp, Homo sapien
ccacagcgatgaaggtggatgcgat

SEQ ID NO: 327464 - DNA, 25 bp, Homo sapien
acagcgatgaaggtggatgcgatct

SEQ ID NO: 327465 - DNA, 25 bp, Homo sapien
gtcatagccgaaccagaggttgtag

SEQ ID NO: 327466 - DNA, 25 bp, Homo sapien
ggggcatgggagtgtgatcagcgtg

SEQ ID NO: 327467 - DNA, 25 bp, Homo sapien
ggcatgggagtgtgatcagcgtggc

SEQ ID NO: 327468 - DNA, 25 bp, Homo sapien
catgggagtgtgatcagcgtggctt

SEQ ID NO: 327469 - DNA, 25 bp, Homo sapien
ctggggcatgggagtgtgatcagcg

SEQ ID NO: 327470 - DNA, 25 bp, Homo sapien
cagggagaaaaggggtgacacatac

SEQ ID NO: 327471 - DNA, 25 bp, Homo sapien
gcagggccagggagaaaaggggtga

SEQ ID NO: 327472 - DNA, 25 bp, Homo sapien
ctgtgcagagtgggcagggccaggg

SEQ ID NO: 327473 - DNA, 25 bp, Homo sapien
ggccagggagaaaaggggtgacaca

SEQ ID NO: 327474 - DNA, 25 bp, Homo sapien
atgatcgtcgggcacatggacaaga

SEQ ID NO: 327475 - DNA, 25 bp, Homo sapien
gcagtgtctgtggtgatctgcgtgc

SEQ ID NO: 327476 - DNA, 25 bp, Homo sapien
cagtgcagtgtctgtggtgatctgc

SEQ ID NO: 327477 - DNA, 25 bp, Homo sapien
tggcccaccatgatcgtcgggcaca

SEQ ID NO: 327478 - DNA, 25 bp, Homo sapien
ctcattggtgaatgctgggagagct

SEQ ID NO: 327479 - DNA, 25 bp, Homo sapien
gggtgccccaaactcattggtgaat

SEQ ID NO: 327480 - DNA, 25 bp, Homo sapien
ccattcattattgaacaggatccca

SEQ ID NO: 327481 - DNA, 25 bp, Homo sapien
ccccaaactcattggtgaatgctgg

SEQ ID NO: 327482 - DNA, 25 bp, Homo sapien
cggggagcagaccttggagccaaag

SEQ ID NO: 327483 - DNA, 25 bp, Homo sapien
accggggagcagaccttggagccaa

SEQ ID NO: 327484 - DNA, 25 bp, Homo sapien
tgaccggggagcagaccttggagcc

SEQ ID NO: 327485 - DNA, 25 bp, Homo sapien
ctgaccggggagcagaccttggagc

SEQ ID NO: 327486 - DNA, 25 bp, Homo sapien
ggtcagagatctgggaccggagctg

SEQ ID NO: 327487 - DNA, 25 bp, Homo sapien
accggagctgggcagcgaagaactc

SEQ ID NO: 327488 - DNA, 25 bp, Homo sapien
cccgtcatccggcgtgtagaactcg

SEQ ID NO: 327489 - DNA, 25 bp, Homo sapien
ggtcatgttgcggaccacctgctga

SEQ ID NO: 327490 - DNA, 25 bp, Homo sapien
agcgccgtgaggtcctgttgagcca

SEQ ID NO: 327491 - DNA, 25 bp, Homo sapien
ccgtgaggtcctgttgagccaccca

SEQ ID NO: 327492 - DNA, 25 bp, Homo sapien
caggccagcgccgtgaggtcctgtt

SEQ ID NO: 327493 - DNA, 25 bp, Homo sapien
tgaggtcctgttgagccacccacct

SEQ ID NO: 327494 - DNA, 25 bp, Homo sapien
tttaggttgtaaggactgaacacgc

SEQ ID NO: 327495 - DNA, 25 bp, Homo sapien
cttcgggtgtgaatccaagggtggt

SEQ ID NO: 327496 - DNA, 25 bp, Homo sapien
aacacgctcacagaagtcgtgtgca

SEQ ID NO: 327497 - DNA, 25 bp, Homo sapien
tggagcttcaggacacatgcaccct

SEQ ID NO: 327498 - DNA, 25 bp, Homo sapien
gggaccaattataacatgagatggc

SEQ ID NO: 327499 - DNA, 25 bp, Homo sapien
ccaattataacatgagatggcaaga

SEQ ID NO: 327500 - DNA, 25 bp, Homo sapien
aatagctcatgtaaagccaccccac

SEQ ID NO: 327501 - DNA, 25 bp, Homo sapien
gagatggcaagaatagctcatgtaa

SEQ ID NO: 327502 - DNA, 25 bp, Homo sapien
tccttacagctcatggatttagagc

SEQ ID NO: 327503 - DNA, 25 bp, Homo sapien
gctcgtgggttcgtcgtctgtctcc

SEQ ID NO: 327504 - DNA, 25 bp, Homo sapien
ggttgcctaataaactcaagggatg

SEQ ID NO: 327505 - DNA, 25 bp, Homo sapien
ctgagagtgtagaccaaggttgcct

SEQ ID NO: 327506 - DNA, 25 bp, Homo sapien
cctccactgcatgtggcggcagggc

SEQ ID NO: 327507 - DNA, 25 bp, Homo sapien
tccagtgcaaacagaggactcacac

SEQ ID NO: 327508 - DNA, 25 bp, Homo sapien
caggtagggaatatgtccagtgcaa

SEQ ID NO: 327509 - DNA, 25 bp, Homo sapien
tcacacctgtgcatagacagcacca

SEQ ID NO: 327510 - DNA, 25 bp, Homo sapien
tgatagtactggatcatgttgtagg

SEQ ID NO: 327511 - DNA, 25 bp, Homo sapien
atagtactggatcatgttgtaggtc

SEQ ID NO: 327512 - DNA, 25 bp, Homo sapien
gatagtactggatcatgttgtaggt

SEQ ID NO: 327513 - DNA, 25 bp, Homo sapien
ctcgcgctcagtcatgttggggcta

SEQ ID NO: 327514 - DNA, 25 bp, Homo sapien
cagcctcgcgctcagtcatgttggg

SEQ ID NO: 327515 - DNA, 25 bp, Homo sapien
gcgctcagtcatgttggggctaaac

SEQ ID NO: 327516 - DNA, 25 bp, Homo sapien
gcagcctcgcgctcagtcatgttgg

SEQ ID NO: 327517 - DNA, 25 bp, Homo sapien
acggacttcagctgagagccatgcc

SEQ ID NO: 327518 - DNA, 25 bp, Homo sapien
gacggacttcagctgagagccatgc

SEQ ID NO: 327519 - DNA, 25 bp, Homo sapien
gcctgcgtgtccaccaaggaaccta

SEQ ID NO: 327520 - DNA, 25 bp, Homo sapien
aatggacaactgtcccccagatggc

SEQ ID NO: 327521 - DNA, 25 bp, Homo sapien
cttggatggagcctcagctaatgga

SEQ ID NO: 327522 - DNA, 25 bp, Homo sapien
ggagcctcagctaatggacaactgt

SEQ ID NO: 327523 - DNA, 25 bp, Homo sapien
gcccgtgtccaacatgatagtgacc

SEQ ID NO: 327524 - DNA, 25 bp, Homo sapien
gatagtgaccagggagacgaccaca

SEQ ID NO: 327525 - DNA, 25 bp, Homo sapien
ggcccgtgtccaacatgatagtgac

SEQ ID NO: 327526 - DNA, 25 bp, Homo sapien
tagtgaccagggagacgaccacatc

SEQ ID NO: 327527 - DNA, 25 bp, Homo sapien
gtggccctgcctgtagtcctgtgga

SEQ ID NO: 327528 - DNA, 25 bp, Homo sapien
aggagggagcggtgggcagaggcca

SEQ ID NO: 327529 - DNA, 25 bp, Homo sapien
cagaggccagcctaggtggtggccc

SEQ ID NO: 327530 - DNA, 25 bp, Homo sapien
gtggactggctgatgccaacagcct

SEQ ID NO: 327531 - DNA, 25 bp, Homo sapien
ggcaactttcgatctgctgcactcg

SEQ ID NO: 327532 - DNA, 25 bp, Homo sapien
gcaactttcgatctgctgcactcgg

SEQ ID NO: 327533 - DNA, 25 bp, Homo sapien
aggcaactttcgatctgctgcactc

SEQ ID NO: 327534 - DNA, 25 bp, Homo sapien
caactttcgatctgctgcactcggt

SEQ ID NO: 327535 - DNA, 25 bp, Homo sapien
ccaaaggacaggtgtaggtcagcag

SEQ ID NO: 327536 - DNA, 25 bp, Homo sapien
ccatctttggcacgtagcctgtggg

SEQ ID NO: 327537 - DNA, 25 bp, Homo sapien
tgaacccaggttggactgtggcctt

SEQ ID NO: 327538 - DNA, 25 bp, Homo sapien
tgtatatgaaactgggacaaagccc

SEQ ID NO: 327539 - DNA, 25 bp, Homo sapien
cgcacagccaggtagcctggacaca

SEQ ID NO: 327540 - DNA, 25 bp, Homo sapien
gcacagccaggtagcctggacacac

SEQ ID NO: 327541 - DNA, 25 bp, Homo sapien
cacttgaagggtgtggcctccatct

SEQ ID NO: 327542 - DNA, 25 bp, Homo sapien
tcaccatctcatccgtcagcttgat

SEQ ID NO: 327543 - DNA, 25 bp, Homo sapien
cgtcagcttgatgtcgggttcccag

SEQ ID NO: 327544 - DNA, 25 bp, Homo sapien
ttgccgcccggcgagctttcaaaca

SEQ ID NO: 327545 - DNA, 25 bp, Homo sapien
gctgcctgtgactgggtaggagcca

SEQ ID NO: 327546 - DNA, 25 bp, Homo sapien
tgactgggtaggagccagggcgggc

SEQ ID NO: 327547 - DNA, 25 bp, Homo sapien
gccagggcgggcaaggacgagtggt

SEQ ID NO: 327548 - DNA, 25 bp, Homo sapien
ccaaagagctgcctgtgactgggta

SEQ ID NO: 327549 - DNA, 25 bp, Homo sapien
aggcaccctctacagcagaacagct

SEQ ID NO: 327550 - DNA, 25 bp, Homo sapien
gaacagcttggtggccgacagttcg

SEQ ID NO: 327551 - DNA, 25 bp, Homo sapien
gccgacagttcggacctcagagctg

SEQ ID NO: 327552 - DNA, 25 bp, Homo sapien
cttctgactcagagcaatggcggct

SEQ ID NO: 327553 - DNA, 25 bp, Homo sapien
cttcttgtccagcataatgttgccg

SEQ ID NO: 327554 - DNA, 25 bp, Homo sapien
cataatgttgccgttgtgtctgtcc

SEQ ID NO: 327555 - DNA, 25 bp, Homo sapien
aatgttgccgttgtgtctgtccttg

SEQ ID NO: 327556 - DNA, 25 bp, Homo sapien
tgtccagcataatgttgccgttgtg

SEQ ID NO: 327557 - DNA, 25 bp, Homo sapien
cagcaagtcagtcttcggcagcagg

SEQ ID NO: 327558 - DNA, 25 bp, Homo sapien
aaagtggcttacagatgccctggtg

SEQ ID NO: 327559 - DNA, 25 bp, Homo sapien
aggcagagcccgaatcagcaagtca

SEQ ID NO: 327560 - DNA, 25 bp, Homo sapien
cagaacttaactttcttctaaggag

SEQ ID NO: 327561 - DNA, 25 bp, Homo sapien
ggagagcagggtgtgggtagaggct

SEQ ID NO: 327562 - DNA, 25 bp, Homo sapien
gggtagggtggagcgcacacgactt

SEQ ID NO: 327563 - DNA, 25 bp, Homo sapien
aacccttaacaaaggatgactgagg

SEQ ID NO: 327564 - DNA, 25 bp, Homo sapien
gtggagcgcacacgactttccccgg

SEQ ID NO: 327565 - DNA, 25 bp, Homo sapien
ggcgtgtgaagtagtcgtacatgcc

SEQ ID NO: 327566 - DNA, 25 bp, Homo sapien
ccccgtactggcgtgtgaagtagtc

SEQ ID NO: 327567 - DNA, 25 bp, Homo sapien
gactcatccccgtactggcgtgtga

SEQ ID NO: 327568 - DNA, 25 bp, Homo sapien
agtggactcatccccgtactggcgt

SEQ ID NO: 327569 - DNA, 25 bp, Homo sapien
tccaggccgaccagctggaagatgt

SEQ ID NO: 327570 - DNA, 25 bp, Homo sapien
gtccaggccgaccagctggaagatg

SEQ ID NO: 327571 - DNA, 25 bp, Homo sapien
ccaggccgaccagctggaagatgtt

SEQ ID NO: 327572 - DNA, 25 bp, Homo sapien
ggtccaggccgaccagctggaagat

SEQ ID NO: 327573 - DNA, 25 bp, Homo sapien
tggctcatgcagggcaaaagccgag

SEQ ID NO: 327574 - DNA, 25 bp, Homo sapien
tctggctcatgcagggcaaaagccg

SEQ ID NO: 327575 - DNA, 25 bp, Homo sapien
tcagttggcgtccttgcaccccagt

SEQ ID NO: 327576 - DNA, 25 bp, Homo sapien
ctggacagttccctcaggtgggcac

SEQ ID NO: 327577 - DNA, 25 bp, Homo sapien
ggtggggtgtgtgagataaggcacc

SEQ ID NO: 327578 - DNA, 25 bp, Homo sapien
gggtgtgtgagataaggcacccaac

SEQ ID NO: 327579 - DNA, 25 bp, Homo sapien
ggacagttccctcaggtgggcactg

SEQ ID NO: 327580 - DNA, 25 bp, Homo sapien
aggagatcttctggccgtcggcctc

SEQ ID NO: 327581 - DNA, 25 bp, Homo sapien
gctgcctgccaggagatcttctggc

SEQ ID NO: 327582 - DNA, 25 bp, Homo sapien
tgccaggagatcttctggccgtcgg

SEQ ID NO: 327583 - DNA, 25 bp, Homo sapien
tgcctgccaggagatcttctggccg

SEQ ID NO: 327584 - DNA, 25 bp, Homo sapien
gccactgttagcctgtaggcagtga

SEQ ID NO: 327585 - DNA, 25 bp, Homo sapien
tgagatcgtccgtacagtagcccca

SEQ ID NO: 327586 - DNA, 25 bp, Homo sapien
ggagagaggccactgttagcctgta

SEQ ID NO: 327587 - DNA, 25 bp, Homo sapien
tcgtccgtacagtagccccaggaaa

SEQ ID NO: 327588 - DNA, 25 bp, Homo sapien
cttgaacttggccagatatggggct

SEQ ID NO: 327589 - DNA, 25 bp, Homo sapien
aagttcactaactccacatcgcttc

SEQ ID NO: 327590 - DNA, 25 bp, Homo sapien
actaactccacatcgcttcaccttg

SEQ ID NO: 327591 - DNA, 25 bp, Homo sapien
accttgaacttggccagatatgggg

SEQ ID NO: 327592 - DNA, 25 bp, Homo sapien
gacgtccagcacaatggcttcaggg

SEQ ID NO: 327593 - DNA, 25 bp, Homo sapien
ttgtagtcgacgtccagcacaatgg

SEQ ID NO: 327594 - DNA, 25 bp, Homo sapien
tagtcgacgtccagcacaatggctt

SEQ ID NO: 327595 - DNA, 25 bp, Homo sapien
tcgacgtccagcacaatggcttcag

SEQ ID NO: 327596 - DNA, 25 bp, Homo sapien
ctctgggaagccgtgctgttgtgtg

SEQ ID NO: 327597 - DNA, 25 bp, Homo sapien
gctgttgtgtgagctcaatacaatg

SEQ ID NO: 327598 - DNA, 25 bp, Homo sapien
tgcagggcactcaaggaccagccgc

SEQ ID NO: 327599 - DNA, 25 bp, Homo sapien
cactcaaggaccagccgctgtgaac

SEQ ID NO: 327600 - DNA, 25 bp, Homo sapien
gccgacagacaagccttctttctct

SEQ ID NO: 327601 - DNA, 25 bp, Homo sapien
agacagggccgacagacaagccttc

SEQ ID NO: 327602 - DNA, 25 bp, Homo sapien
cagggccgacagacaagccttcttt

SEQ ID NO: 327603 - DNA, 25 bp, Homo sapien
tcacttcagacagggccgacagaca

SEQ ID NO: 327604 - DNA, 25 bp, Homo sapien
aaagtccttcgctgggcccgacaag

SEQ ID NO: 327605 - DNA, 25 bp, Homo sapien
taaaagtccttcgctgggcccgaca

SEQ ID NO: 327606 - DNA, 25 bp, Homo sapien
aagtccttcgctgggcccgacaagg

SEQ ID NO: 327607 - DNA, 25 bp, Homo sapien
aacaagctggctggcggtcaggtac

SEQ ID NO: 327608 - DNA, 25 bp, Homo sapien
tcttatctgagaacatggcggtcca

SEQ ID NO: 327609 - DNA, 25 bp, Homo sapien
cggtccaaaatttaatcatgatgct

SEQ ID NO: 327610 - DNA, 25 bp, Homo sapien
tgatgcttatgtcttcacgcagccg

SEQ ID NO: 327611 - DNA, 25 bp, Homo sapien
aacaaccataagaggacaacggctg

SEQ ID NO: 327612 - DNA, 25 bp, Homo sapien
ttcaaacaaccataagaggacaacg

SEQ ID NO: 327613 - DNA, 25 bp, Homo sapien
caaccataagaggacaacggctgag

SEQ ID NO: 327614 - DNA, 25 bp, Homo sapien
cataagaggacaacggctgagtgtc

SEQ ID NO: 327615 - DNA, 25 bp, Homo sapien
catttggaaccacatcggcatgcag

SEQ ID NO: 327616 - DNA, 25 bp, Homo sapien
gatcttctcgcgaagcacattgcgg

SEQ ID NO: 327617 - DNA, 25 bp, Homo sapien
gtcaaaggcagtggagtagatcttc

SEQ ID NO: 327618 - DNA, 25 bp, Homo sapien
gcacattgcggatggttgcatttgg

SEQ ID NO: 327619 - DNA, 25 bp, Homo sapien
gagctgcagtacttggcgatctcaa

SEQ ID NO: 327620 - DNA, 25 bp, Homo sapien
tgccggttcatgctccccttggccc

SEQ ID NO: 327621 - DNA, 25 bp, Homo sapien
tccacttggtcagagctgcagtact

SEQ ID NO: 327622 - DNA, 25 bp, Homo sapien
ggcgatctcaaaccgctgcaccagg

SEQ ID NO: 327623 - DNA, 25 bp, Homo sapien
ttctgggctgactggccgagcttgc

SEQ ID NO: 327624 - DNA, 25 bp, Homo sapien
gccgaaggccttgggctcggctacc

SEQ ID NO: 327625 - DNA, 25 bp, Homo sapien
ccgagcttgccgaaggccttgggct

SEQ ID NO: 327626 - DNA, 25 bp, Homo sapien
ctgactggccgagcttgccgaaggc

SEQ ID NO: 327627 - DNA, 25 bp, Homo sapien
cctttatctcagcagaaaacaggcc

SEQ ID NO: 327628 - DNA, 25 bp, Homo sapien
ccagggggtctgcttcctttatctc

SEQ ID NO: 327629 - DNA, 25 bp, Homo sapien
tgggttgacttgcttccgaggcagc

SEQ ID NO: 327630 - DNA, 25 bp, Homo sapien
tccagatgtagtggggggtcacttc

SEQ ID NO: 327631 - DNA, 25 bp, Homo sapien
ccagcccctgccatctcccgcatga

SEQ ID NO: 327632 - DNA, 25 bp, Homo sapien
cagcccctgccatctcccgcatgaa

SEQ ID NO: 327633 - DNA, 25 bp, Homo sapien
gtgccagcccctgccatctcccgca

SEQ ID NO: 327634 - DNA, 25 bp, Homo sapien
gccagcccctgccatctcccgcatg

SEQ ID NO: 327635 - DNA, 25 bp, Homo sapien
aggtacagaaggaatgttagctcct

SEQ ID NO: 327636 - DNA, 25 bp, Homo sapien
ctacaggtacagaaggaatgttagc

SEQ ID NO: 327637 - DNA, 25 bp, Homo sapien
caggtacagaaggaatgttagctcc

SEQ ID NO: 327638 - DNA, 25 bp, Homo sapien
tacaggtacagaaggaatgttagct

SEQ ID NO: 327639 - DNA, 25 bp, Homo sapien
aaaaaaggaacacgtgctcactgaa

SEQ ID NO: 327640 - DNA, 25 bp, Homo sapien
aaggaacacgtgctcactgaataag

SEQ ID NO: 327641 - DNA, 25 bp, Homo sapien
cacaaaaaggggctactgtcaagtt

SEQ ID NO: 327642 - DNA, 25 bp, Homo sapien
ggaacacgtgctcactgaataagat

SEQ ID NO: 327643 - DNA, 25 bp, Homo sapien
gcaagggcagaagagggttctggat

SEQ ID NO: 327644 - DNA, 25 bp, Homo sapien
cctctccaccccacacagaccctac

SEQ ID NO: 327645 - DNA, 25 bp, Homo sapien
ggcagaagagggttctggatccagg

SEQ ID NO: 327646 - DNA, 25 bp, Homo sapien
agaagagggttctggatccagggcc

SEQ ID NO: 327647 - DNA, 25 bp, Homo sapien
tcatcccgctaaccagattaggaag

SEQ ID NO: 327648 - DNA, 25 bp, Homo sapien
catcccgctaaccagattaggaagg

SEQ ID NO: 327649 - DNA, 25 bp, Homo sapien
tctggccaaagaggattctatccct

SEQ ID NO: 327650 - DNA, 25 bp, Homo sapien
caccagcttctacaagggctccaag

SEQ ID NO: 327651 - DNA, 25 bp, Homo sapien
tggaaagcccccatgatttctgggt

SEQ ID NO: 327652 - DNA, 25 bp, Homo sapien
tacaagggctccaagcgcctgtgca

SEQ ID NO: 327653 - DNA, 25 bp, Homo sapien
cttcctcatgaggtggatcagggtg

SEQ ID NO: 327654 - DNA, 25 bp, Homo sapien
tcttcctcatgaggtggatcagggt

SEQ ID NO: 327655 - DNA, 25 bp, Homo sapien
gagccagggagagtgaactgggcaa

SEQ ID NO: 327656 - DNA, 25 bp, Homo sapien
ccagggagagtgaactgggcaaggc

SEQ ID NO: 327657 - DNA, 25 bp, Homo sapien
agccagggagagtgaactgggcaag

SEQ ID NO: 327658 - DNA, 25 bp, Homo sapien
gccagggagagtgaactgggcaagg

SEQ ID NO: 327659 - DNA, 25 bp, Homo sapien
tggcttgcgccaaccgcatgtggag

SEQ ID NO: 327660 - DNA, 25 bp, Homo sapien
cagtgggatgtgcataagagggagt

SEQ ID NO: 327661 - DNA, 25 bp, Homo sapien
gacttgtcagatcctggataaacct

SEQ ID NO: 327662 - DNA, 25 bp, Homo sapien
ctgggacttgtcagatcctggataa

SEQ ID NO: 327663 - DNA, 25 bp, Homo sapien
acgggagggacctcgctcacatcta

SEQ ID NO: 327664 - DNA, 25 bp, Homo sapien
gtgacgggagggacctcgctcacat

SEQ ID NO: 327665 - DNA, 25 bp, Homo sapien
agtgacgggagggacctcgctcaca

SEQ ID NO: 327666 - DNA, 25 bp, Homo sapien
gacgggagggacctcgctcacatct

SEQ ID NO: 327667 - DNA, 25 bp, Homo sapien
agcagttaggctcccaaaacagctg

SEQ ID NO: 327668 - DNA, 25 bp, Homo sapien
gccctgagctcaagaaggtcccttt

SEQ ID NO: 327669 - DNA, 25 bp, Homo sapien
ctggaggatgaaagggctacaaaaa

SEQ ID NO: 327670 - DNA, 25 bp, Homo sapien
cacctggactaggagtgactgggct

SEQ ID NO: 327671 - DNA, 25 bp, Homo sapien
cacaatttgtggtgaaaccagggct

SEQ ID NO: 327672 - DNA, 25 bp, Homo sapien
tgtgtgcacacaaaggaccacgggt

SEQ ID NO: 327673 - DNA, 25 bp, Homo sapien
agaaaacatcagtgccggctctgcc

SEQ ID NO: 327674 - DNA, 25 bp, Homo sapien
cacgggtcagacagatagaggccga

SEQ ID NO: 327675 - DNA, 25 bp, Homo sapien
ggggcctcctgagcccgtggccttc

SEQ ID NO: 327676 - DNA, 25 bp, Homo sapien
cagacaccatgtgagcagcagccag

SEQ ID NO: 327677 - DNA, 25 bp, Homo sapien
gagcagcagccagcggggcgggggg

SEQ ID NO: 327678 - DNA, 25 bp, Homo sapien
agagtgccaagggcccagacaccat

SEQ ID NO: 327679 - DNA, 25 bp, Homo sapien
tgggggtgcatcaatgcctggtcac

SEQ ID NO: 327680 - DNA, 25 bp, Homo sapien
ctgggggtgcatcaatgcctggtca

SEQ ID NO: 327681 - DNA, 25 bp, Homo sapien
cagacagccatcagcgaagaaggga

SEQ ID NO: 327682 - DNA, 25 bp, Homo sapien
ggaagagaagacgaacacagtcacc

SEQ ID NO: 327683 - DNA, 25 bp, Homo sapien
ccagcgaacaggtctagggagttcg

SEQ ID NO: 327684 - DNA, 25 bp, Homo sapien
gaagagtaaggaccagcgaacaggt

SEQ ID NO: 327685 - DNA, 25 bp, Homo sapien
gtctagggagttcggtgggtgcaat

SEQ ID NO: 327686 - DNA, 25 bp, Homo sapien
gacagccaggaagagtaaggaccag

SEQ ID NO: 327687 - DNA, 25 bp, Homo sapien
tctaacacaggacattaaggacacc

SEQ ID NO: 327688 - DNA, 25 bp, Homo sapien
caggacattaaggacacccaggggc

SEQ ID NO: 327689 - DNA, 25 bp, Homo sapien
acacaggacattaaggacacccagg

SEQ ID NO: 327690 - DNA, 25 bp, Homo sapien
ctaacacaggacattaaggacaccc

SEQ ID NO: 327691 - DNA, 25 bp, Homo sapien
tgggctttcaataccggcccaccaa

SEQ ID NO: 327692 - DNA, 25 bp, Homo sapien
gaggccaggccagctactggatgcc

SEQ ID NO: 327693 - DNA, 25 bp, Homo sapien
aggccagctactggatgccgcgcag

SEQ ID NO: 327694 - DNA, 25 bp, Homo sapien
ccagctactggatgccgcgcaggga

SEQ ID NO: 327695 - DNA, 25 bp, Homo sapien
gccaggccagctactggatgccgcg

SEQ ID NO: 327696 - DNA, 25 bp, Homo sapien
gctctctctgcggaatcctgaaggt

SEQ ID NO: 327697 - DNA, 25 bp, Homo sapien
ccctgtaggtggactggccccagct

SEQ ID NO: 327698 - DNA, 25 bp, Homo sapien
tatctcccaagttaggatccctcag

SEQ ID NO: 327699 - DNA, 25 bp, Homo sapien
gcagacacacggccctgtttacgga

SEQ ID NO: 327700 - DNA, 25 bp, Homo sapien
tctgcaaggcccagtcagagcctac

SEQ ID NO: 327701 - DNA, 25 bp, Homo sapien
ctctgcaaggcccagtcagagccta

SEQ ID NO: 327702 - DNA, 25 bp, Homo sapien
cagtcagagcctacccggcccagca

SEQ ID NO: 327703 - DNA, 25 bp, Homo sapien
agcctacccggcccagcaagtccat

SEQ ID NO: 327704 - DNA, 25 bp, Homo sapien
ggagtgccatggcgatctgggctca

SEQ ID NO: 327705 - DNA, 25 bp, Homo sapien
tgcaaactctgcctcccaggttcat

SEQ ID NO: 327706 - DNA, 25 bp, Homo sapien
gagtgccatggcgatctgggctcac

SEQ ID NO: 327707 - DNA, 25 bp, Homo sapien
gagcctgtgcgttctgtccatgtga

SEQ ID NO: 327708 - DNA, 25 bp, Homo sapien
catgtgatcaggtgggctcctctca

SEQ ID NO: 327709 - DNA, 25 bp, Homo sapien
gaagctcagcacgataccctggaaa

SEQ ID NO: 327710 - DNA, 25 bp, Homo sapien
tgttgtatgcccgaccatgtgctat

SEQ ID NO: 327711 - DNA, 25 bp, Homo sapien
gggtaaaaggctcgctgacagccac

SEQ ID NO: 327712 - DNA, 25 bp, Homo sapien
agcccacgcaagaccaccagaggat

SEQ ID NO: 327713 - DNA, 25 bp, Homo sapien
gcatggggtaaaaggctcgctgaca

SEQ ID NO: 327714 - DNA, 25 bp, Homo sapien
cacagagcaggagcccacgcaagac

SEQ ID NO: 327715 - DNA, 25 bp, Homo sapien
ccaggtggaagggactatcgtgatc

SEQ ID NO: 327716 - DNA, 25 bp, Homo sapien
cgtgatcatctctctcaccctaggg

SEQ ID NO: 327717 - DNA, 25 bp, Homo sapien
gatcatctctctcaccctagggaca

SEQ ID NO: 327718 - DNA, 25 bp, Homo sapien
gggactatcgtgatcatctctctca

SEQ ID NO: 327719 - DNA, 25 bp, Homo sapien
gctttggagggctcagttcccacaa

SEQ ID NO: 327720 - DNA, 25 bp, Homo sapien
caccctgtcctaatcatacaaagca

SEQ ID NO: 327721 - DNA, 25 bp, Homo sapien
cacacttgggcagctatgacaacaa

SEQ ID NO: 327722 - DNA, 25 bp, Homo sapien
taaagctgaggtgcactcacagagc

SEQ ID NO: 327723 - DNA, 25 bp, Homo sapien
ccaattcagagtccaataaccctga

SEQ ID NO: 327724 - DNA, 25 bp, Homo sapien
caataaccctgagttatctttctca

SEQ ID NO: 327725 - DNA, 25 bp, Homo sapien
cctccaattcagagtccaataaccc

SEQ ID NO: 327726 - DNA, 25 bp, Homo sapien
tccaattcagagtccaataaccctg

SEQ ID NO: 327727 - DNA, 25 bp, Homo sapien
tggggtctcccaagcgggcttcaca

SEQ ID NO: 327728 - DNA, 25 bp, Homo sapien
agctcacacagtacccgtgggtccg

SEQ ID NO: 327729 - DNA, 25 bp, Homo sapien
gggtctcccaagcgggcttcacagc

SEQ ID NO: 327730 - DNA, 25 bp, Homo sapien
cttcacagctcacacagtacccgtg

SEQ ID NO: 327731 - DNA, 25 bp, Homo sapien
ggccctaccagcggcccttgtcctc

SEQ ID NO: 327732 - DNA, 25 bp, Homo sapien
gccctaccagcggcccttgtcctca

SEQ ID NO: 327733 - DNA, 25 bp, Homo sapien
ggctcggctccccgcctagcgcgcc

SEQ ID NO: 327734 - DNA, 25 bp, Homo sapien
ggtgcagggtggagtaagacagtct

SEQ ID NO: 327735 - DNA, 25 bp, Homo sapien
attcctgggtgcgttttgggattat

SEQ ID NO: 327736 - DNA, 25 bp, Homo sapien
tgcctaagggctgtccgagcacgtg

SEQ ID NO: 327737 - DNA, 25 bp, Homo sapien
ttgggattatgcctaagggctgtcc

SEQ ID NO: 327738 - DNA, 25 bp, Homo sapien
ctcttccattgagcacacagcttct

SEQ ID NO: 327739 - DNA, 25 bp, Homo sapien
tcttccattgagcacacagcttctg

SEQ ID NO: 327740 - DNA, 25 bp, Homo sapien
actgaagaccgatcgtcctctatcg

SEQ ID NO: 327741 - DNA, 25 bp, Homo sapien
cttatactcttgactgaagaccgat

SEQ ID NO: 327742 - DNA, 25 bp, Homo sapien
gactaccatcagtttaacacagtgg

SEQ ID NO: 327743 - DNA, 25 bp, Homo sapien
gagactttcgtacaaggcaatggac

SEQ ID NO: 327744 - DNA, 25 bp, Homo sapien
aaaaaggcgcttctccgtatacctg

SEQ ID NO: 327745 - DNA, 25 bp, Homo sapien
cagaggccactacctgggcaaggat

SEQ ID NO: 327746 - DNA, 25 bp, Homo sapien
cacttgcctgttgcactcgctgagg

SEQ ID NO: 327747 - DNA, 25 bp, Homo sapien
tgagcccctgaaagtcctcgaggtg

SEQ ID NO: 327748 - DNA, 25 bp, Homo sapien
tccttggtcatccatgggcccgtaa

SEQ ID NO: 327749 - DNA, 25 bp, Homo sapien
ccaggatcatagtccagagctgcta

SEQ ID NO: 327750 - DNA, 25 bp, Homo sapien
ccttctgagcccaggttggacactg

SEQ ID NO: 327751 - DNA, 25 bp, Homo sapien
actttggcggatggagctggacaca

SEQ ID NO: 327752 - DNA, 25 bp, Homo sapien
tttgccgaagtaccctctcaagggc

SEQ ID NO: 327753 - DNA, 25 bp, Homo sapien
ggcccacactcggtgcgtagatgga

SEQ ID NO: 327754 - DNA, 25 bp, Homo sapien
ggatgggtcgccacaagtgtagcta

SEQ ID NO: 327755 - DNA, 25 bp, Homo sapien
ggagtctctggccatcggtgacaca

SEQ ID NO: 327756 - DNA, 25 bp, Homo sapien
tcagggcatgctctcggtcatcaag

SEQ ID NO: 327757 - DNA, 25 bp, Homo sapien
gacggtggaggacatagttccccaa

SEQ ID NO: 327758 - DNA, 25 bp, Homo sapien
cagataataagctgtcttcctccag

SEQ ID NO: 327759 - DNA, 25 bp, Homo sapien
gctggcaggcttccgtcttggtatc

SEQ ID NO: 327760 - DNA, 25 bp, Homo sapien
cagcctgggatgtagctgtccggaa

SEQ ID NO: 327761 - DNA, 25 bp, Homo sapien
tcttggtatccaggatctctgttgc

SEQ ID NO: 327762 - DNA, 25 bp, Homo sapien
tccatgtccccgaagatatatatgt

SEQ ID NO: 327763 - DNA, 25 bp, Homo sapien
atcattgggcccctcaaatgggttg

SEQ ID NO: 327764 - DNA, 25 bp, Homo sapien
gatatatatgtagtccccagctgtg

SEQ ID NO: 327765 - DNA, 25 bp, Homo sapien
atgggttgtagttatactgagccat

SEQ ID NO: 327766 - DNA, 25 bp, Homo sapien
acatcgacccctcagaggaggagtt

SEQ ID NO: 327767 - DNA, 25 bp, Homo sapien
tcgacccctcagaggaggagtttga

SEQ ID NO: 327768 - DNA, 25 bp, Homo sapien
catcgacccctcagaggaggagttt

SEQ ID NO: 327769 - DNA, 25 bp, Homo sapien
caggtcatccacctcactggctgtg

SEQ ID NO: 327770 - DNA, 25 bp, Homo sapien
taacttgggactccggcatttgact

SEQ ID NO: 327771 - DNA, 25 bp, Homo sapien
tcttcaggccgtgcgtggaacttgg

SEQ ID NO: 327772 - DNA, 25 bp, Homo sapien
tctctgttgggctgtgacactgcgt

SEQ ID NO: 327773 - DNA, 25 bp, Homo sapien
tttcttggacagaggttggctggca

SEQ ID NO: 327774 - DNA, 25 bp, Homo sapien
gctttatcagctcgtggtggcccag

SEQ ID NO: 327775 - DNA, 25 bp, Homo sapien
tctctgacgttgagccactgggtgc

SEQ ID NO: 327776 - DNA, 25 bp, Homo sapien
tgcagcagctgttcggcgatcaagc

SEQ ID NO: 327777 - DNA, 25 bp, Homo sapien
gccagccaggcgtttttgagcagcg

SEQ ID NO: 327778 - DNA, 25 bp, Homo sapien
gggtgctgtcaagcgagcgggaaca

SEQ ID NO: 327779 - DNA, 25 bp, Homo sapien
aggctccgggtgctgtcaagcgagc

SEQ ID NO: 327780 - DNA, 25 bp, Homo sapien
ggcgatggtggcggcgagagcctcc

SEQ ID NO: 327781 - DNA, 25 bp, Homo sapien
tgaggagggccgctcctcggatttg

SEQ ID NO: 327782 - DNA, 25 bp, Homo sapien
agctggagcacgcagaggacaccag

SEQ ID NO: 327783 - DNA, 25 bp, Homo sapien
caggtgcgaagcaatcaagggagct

SEQ ID NO: 327784 - DNA, 25 bp, Homo sapien
cagaggacaccaggcctagcgagcg

SEQ ID NO: 327785 - DNA, 25 bp, Homo sapien
agctggcgtgcgtggagagcaggcc

SEQ ID NO: 327786 - DNA, 25 bp, Homo sapien
caggctgtctagagatccgagttgg

SEQ ID NO: 327787 - DNA, 25 bp, Homo sapien
aagtgcgccaggatgtacttgagga

SEQ ID NO: 327788 - DNA, 25 bp, Homo sapien
tgcgctgtgcctcccacttggagcg

SEQ ID NO: 327789 - DNA, 25 bp, Homo sapien
cggtgatcccgacaaagccgggtgc

SEQ ID NO: 327790 - DNA, 25 bp, Homo sapien
tcctgccgcggatgtctggcccagg

SEQ ID NO: 327791 - DNA, 25 bp, Homo sapien
actggcccatgtcccttccaggatg

SEQ ID NO: 327792 - DNA, 25 bp, Homo sapien
tacacttttcctgcttctagcacca

SEQ ID NO: 327793 - DNA, 25 bp, Homo sapien
tgggcatacctggtcgtgggttcag

SEQ ID NO: 327794 - DNA, 25 bp, Homo sapien
tgccttctccaggttcaactttctc

SEQ ID NO: 327795 - DNA, 25 bp, Homo sapien
gccttctccaggttcaactttctca

SEQ ID NO: 327796 - DNA, 25 bp, Homo sapien
gctgccttctccaggttcaactttc

SEQ ID NO: 327797 - DNA, 25 bp, Homo sapien
ctgctgccttctccaggttcaactt

SEQ ID NO: 327798 - DNA, 25 bp, Homo sapien
caagctcctaccctctcccggtcca

SEQ ID NO: 327799 - DNA, 25 bp, Homo sapien
caccaagctcctaccctctcccggt

SEQ ID NO: 327800 - DNA, 25 bp, Homo sapien
tcaccaagctcctaccctctcccgg

SEQ ID NO: 327801 - DNA, 25 bp, Homo sapien
actttgcagtccactcctgtgagta

SEQ ID NO: 327802 - DNA, 25 bp, Homo sapien
catctctggtagctgggaggagcag

SEQ ID NO: 327803 - DNA, 25 bp, Homo sapien
gaccactttgcagtccactcctgtg

SEQ ID NO: 327804 - DNA, 25 bp, Homo sapien
tttgcagtccactcctgtgagtagg

SEQ ID NO: 327805 - DNA, 25 bp, Homo sapien
gtctgtgtgggcagcgcctcaacgt

SEQ ID NO: 327806 - DNA, 25 bp, Homo sapien
tcctcatagccccacagcttgatgg

SEQ ID NO: 327807 - DNA, 25 bp, Homo sapien
tctgtgtgggcagcgcctcaacgtg

SEQ ID NO: 327808 - DNA, 25 bp, Homo sapien
ccacagcttgatggtgtctgtgtgg

SEQ ID NO: 327809 - DNA, 25 bp, Homo sapien
tgccaatgcatctcgttcatcaact

SEQ ID NO: 327810 - DNA, 25 bp, Homo sapien
gcatctcgttcatcaactcactctt

SEQ ID NO: 327811 - DNA, 25 bp, Homo sapien
agtattgccaatgcatctcgttcat

SEQ ID NO: 327812 - DNA, 25 bp, Homo sapien
caatgcatctcgttcatcaactcac

SEQ ID NO: 327813 - DNA, 25 bp, Homo sapien
ggcgacacgaagtgcacttgcccgg

SEQ ID NO: 327814 - DNA, 25 bp, Homo sapien
agtggccatcgtccagtgagatggt

SEQ ID NO: 327815 - DNA, 25 bp, Homo sapien
tggccatcgtccagtgagatggtga

SEQ ID NO: 327816 - DNA, 25 bp, Homo sapien
agcaggggcgacacgaagtgcactt

SEQ ID NO: 327817 - DNA, 25 bp, Homo sapien
caggctgagcatctcgacagtctgg

SEQ ID NO: 327818 - DNA, 25 bp, Homo sapien
gctgagcatctcgacagtctgggcc

SEQ ID NO: 327819 - DNA, 25 bp, Homo sapien
ggctgagcatctcgacagtctgggc

SEQ ID NO: 327820 - DNA, 25 bp, Homo sapien
tgagcatctcgacagtctgggcccc

SEQ ID NO: 327821 - DNA, 25 bp, Homo sapien
gggctggacatcttgaagtgccgca

SEQ ID NO: 327822 - DNA, 25 bp, Homo sapien
ctgtggggctggacatcttgaagtg

SEQ ID NO: 327823 - DNA, 25 bp, Homo sapien
ggctggacatcttgaagtgccgcac

SEQ ID NO: 327824 - DNA, 25 bp, Homo sapien
ggtgtctgtggggctggacatcttg

SEQ ID NO: 327825 - DNA, 25 bp, Homo sapien
ctgagtagggcaatatctccaggca

SEQ ID NO: 327826 - DNA, 25 bp, Homo sapien
caaggccggagcacgtcgggtggca

SEQ ID NO: 327827 - DNA, 25 bp, Homo sapien
gaacatggcctgtccagggcgccac

SEQ ID NO: 327828 - DNA, 25 bp, Homo sapien
tgtccagggcgccacagcgcatgga

SEQ ID NO: 327829 - DNA, 25 bp, Homo sapien
aaatccaagcagcaggtaccaaggc

SEQ ID NO: 327830 - DNA, 25 bp, Homo sapien
agggtacctctgcaggtgagtgtcc

SEQ ID NO: 327831 - DNA, 25 bp, Homo sapien
tcctgtaagtggatgctcaggcgct

SEQ ID NO: 327832 - DNA, 25 bp, Homo sapien
ttcagcttctcaggactgtttccag

SEQ ID NO: 327833 - DNA, 25 bp, Homo sapien
ccttaacccacaacggtgctcaggg

SEQ ID NO: 327834 - DNA, 25 bp, Homo sapien
agccggtggcttcccacaggcacag

SEQ ID NO: 327835 - DNA, 25 bp, Homo sapien
gcctgcacgtctgcatgcacagagc

SEQ ID NO: 327836 - DNA, 25 bp, Homo sapien
cagcctgcacgtctgcatgcacaga

SEQ ID NO: 327837 - DNA, 25 bp, Homo sapien
gagccggtggcttcccacaggcaca

SEQ ID NO: 327838 - DNA, 25 bp, Homo sapien
cctcctgcaccttccagggagacga

SEQ ID NO: 327839 - DNA, 25 bp, Homo sapien
tcctcctgcaccttccagggagacg

SEQ ID NO: 327840 - DNA, 25 bp, Homo sapien
ctcctcctgcaccttccagggagac

SEQ ID NO: 327841 - DNA, 25 bp, Homo sapien
ctcctgcaccttccagggagacgag

SEQ ID NO: 327842 - DNA, 25 bp, Homo sapien
gaacatgactagagggacccagtct

SEQ ID NO: 327843 - DNA, 25 bp, Homo sapien
gagtgattgagtggatgaacatgac

SEQ ID NO: 327844 - DNA, 25 bp, Homo sapien
agctgcttgaggacagtattagcgg

SEQ ID NO: 327845 - DNA, 25 bp, Homo sapien
acagtattagcggtcccctcaatcc

SEQ ID NO: 327846 - DNA, 25 bp, Homo sapien
tgagaaggagtagggtgcagtagtg

SEQ ID NO: 327847 - DNA, 25 bp, Homo sapien
tgagggctccacagagggtggaagg

SEQ ID NO: 327848 - DNA, 25 bp, Homo sapien
agcactgcttatgcagaggcactgg

SEQ ID NO: 327849 - DNA, 25 bp, Homo sapien
gcactgcttatgcagaggcactggg

SEQ ID NO: 327850 - DNA, 25 bp, Homo sapien
cacaacgtcgttgttcccgcagggt

SEQ ID NO: 327851 - DNA, 25 bp, Homo sapien
cccagcgatggctaggctgcagcct

SEQ ID NO: 327852 - DNA, 25 bp, Homo sapien
tgggccccagcgatggctaggctgc

SEQ ID NO: 327853 - DNA, 25 bp, Homo sapien
tccacggtgcgtcgcctgggcccca

SEQ ID NO: 327854 - DNA, 25 bp, Homo sapien
ctgcgcgcggagcttcgagcggagc

SEQ ID NO: 327855 - DNA, 25 bp, Homo sapien
gcgcgcggagcttcgagcggagctg

SEQ ID NO: 327856 - DNA, 25 bp, Homo sapien
tgcgcgcggagcttcgagcggagct

SEQ ID NO: 327857 - DNA, 25 bp, Homo sapien
gcgcggagcttcgagcggagctgga

SEQ ID NO: 327858 - DNA, 25 bp, Homo sapien
accgtgagcgccctggtcgccgcct

SEQ ID NO: 327859 - DNA, 25 bp, Homo sapien
acggcccagcagaatgcggagcgca

SEQ ID NO: 327860 - DNA, 25 bp, Homo sapien
ctgctgcggacgctcggcaccgtga

SEQ ID NO: 327861 - DNA, 25 bp, Homo sapien
aggcccgcagacgacgccccggacg

SEQ ID NO: 327862 - DNA, 25 bp, Homo sapien
tggctactctggtacccccaggacg

SEQ ID NO: 327863 - DNA, 25 bp, Homo sapien
ggtgccgccagttagggctccggta

SEQ ID NO: 327864 - DNA, 25 bp, Homo sapien
aagtgagcagatcggtccccctcgt

SEQ ID NO: 327865 - DNA, 25 bp, Homo sapien
cctaggcgaggtgcggaaggcgtcg

SEQ ID NO: 327866 - DNA, 25 bp, Homo sapien
gtcatcatttagcagagcacggtgt

SEQ ID NO: 327867 - DNA, 25 bp, Homo sapien
gagtcatcatttagcagagcacggt

SEQ ID NO: 327868 - DNA, 25 bp, Homo sapien
gcctcgggaaatgtagctggagtca

SEQ ID NO: 327869 - DNA, 25 bp, Homo sapien
tcgggaaatgtagctggagtcatca

SEQ ID NO: 327870 - DNA, 25 bp, Homo sapien
ccgtgagcggtatggggtgaaagtg

SEQ ID NO: 327871 - DNA, 25 bp, Homo sapien
cgtgagcggtatggggtgaaagtgg

SEQ ID NO: 327872 - DNA, 25 bp, Homo sapien
gagcaccgtgggctcgcagtcaggc

SEQ ID NO: 327873 - DNA, 25 bp, Homo sapien
gggtcctcgaagacggtccagagca

SEQ ID NO: 327874 - DNA, 25 bp, Homo sapien
acccagcgaagcgacagtagctcga

SEQ ID NO: 327875 - DNA, 25 bp, Homo sapien
agtagctcgaggtgttgggccgcat

SEQ ID NO: 327876 - DNA, 25 bp, Homo sapien
cagaagttggtgttgctacagtcct

SEQ ID NO: 327877 - DNA, 25 bp, Homo sapien
aagttggtgttgctacagtcctgct

SEQ ID NO: 327878 - DNA, 25 bp, Homo sapien
ctcaagcccgacactatggcgcaga

SEQ ID NO: 327879 - DNA, 25 bp, Homo sapien
gacactatggcgcagaagttggtgt

SEQ ID NO: 327880 - DNA, 25 bp, Homo sapien
ttgtgttactgtggaccacatgcat

SEQ ID NO: 327881 - DNA, 25 bp, Homo sapien
tggtactttgtgttactgtggacca

SEQ ID NO: 327882 - DNA, 25 bp, Homo sapien
cgtggcgtggtgcctcctccatgct

SEQ ID NO: 327883 - DNA, 25 bp, Homo sapien
cctccatgctctggtactttgtgtt

SEQ ID NO: 327884 - DNA, 25 bp, Homo sapien
cagatgtgggagatacccagctgcc

SEQ ID NO: 327885 - DNA, 25 bp, Homo sapien
gatgtgggagatacccagctgcccc

SEQ ID NO: 327886 - DNA, 25 bp, Homo sapien
acagatgtgggagatacccagctgc

SEQ ID NO: 327887 - DNA, 25 bp, Homo sapien
agatgtgggagatacccagctgccc

SEQ ID NO: 327888 - DNA, 25 bp, Homo sapien
ctctgagcccagctgtgtgtggtca

SEQ ID NO: 327889 - DNA, 25 bp, Homo sapien
ccagcatggcatggaagaaggcaga

SEQ ID NO: 327890 - DNA, 25 bp, Homo sapien
cagagggcagccctcctggggtggg

SEQ ID NO: 327891 - DNA, 25 bp, Homo sapien
cctcctggggtggggctctgagccc

SEQ ID NO: 327892 - DNA, 25 bp, Homo sapien
tcatagcctcggaagatgaagggcc

SEQ ID NO: 327893 - DNA, 25 bp, Homo sapien
gaggtgctgagtcatagcctcggaa

SEQ ID NO: 327894 - DNA, 25 bp, Homo sapien
agagttccgccggaccctgtgaaag

SEQ ID NO: 327895 - DNA, 25 bp, Homo sapien
agatgaagggccctagggtagagtt

SEQ ID NO: 327896 - DNA, 25 bp, Homo sapien
gtgggggtggggtcagggaggcagc

SEQ ID NO: 327897 - DNA, 25 bp, Homo sapien
gggctggccacagtaacaggcacac

SEQ ID NO: 327898 - DNA, 25 bp, Homo sapien
tgggctggccacagtaacaggcaca

SEQ ID NO: 327899 - DNA, 25 bp, Homo sapien
ttgggctggccacagtaacaggcac

SEQ ID NO: 327900 - DNA, 25 bp, Homo sapien
gcacttgcacctgatgcccagtcag

SEQ ID NO: 327901 - DNA, 25 bp, Homo sapien
tctactggggcagacgactacagac

SEQ ID NO: 327902 - DNA, 25 bp, Homo sapien
cagccttgactgactcgggaccggc

SEQ ID NO: 327903 - DNA, 25 bp, Homo sapien
acacagggggacagtcacgcacttg

SEQ ID NO: 327904 - DNA, 25 bp, Homo sapien
gggtcctgggagtcgtagcaccagg

SEQ ID NO: 327905 - DNA, 25 bp, Homo sapien
gtcctgggagtcgtagcaccaggca

SEQ ID NO: 327906 - DNA, 25 bp, Homo sapien
cacacttggggtcctgggagtcgta

SEQ ID NO: 327907 - DNA, 25 bp, Homo sapien
ttggggtcctgggagtcgtagcacc

SEQ ID NO: 327908 - DNA, 25 bp, Homo sapien
ctgtgtttggccgtgtatagcgcac

SEQ ID NO: 327909 - DNA, 25 bp, Homo sapien
tgtttggccgtgtatagcgcacgtg

SEQ ID NO: 327910 - DNA, 25 bp, Homo sapien
tggccgtgtatagcgcacgtggcac

SEQ ID NO: 327911 - DNA, 25 bp, Homo sapien
ccactgtgtttggccgtgtatagcg

SEQ ID NO: 327912 - DNA, 25 bp, Homo sapien
atcctttcctccgagccagagctct

SEQ ID NO: 327913 - DNA, 25 bp, Homo sapien
tcctttcctccgagccagagctctt

SEQ ID NO: 327914 - DNA, 25 bp, Homo sapien
cttggccggtgatcgcagtccttct

SEQ ID NO: 327915 - DNA, 25 bp, Homo sapien
ggccggtgatcgcagtccttcttcg

SEQ ID NO: 327916 - DNA, 25 bp, Homo sapien
cctgcttggccggtgatcgcagtcc

SEQ ID NO: 327917 - DNA, 25 bp, Homo sapien
ggtgatcgcagtccttcttcgccag

SEQ ID NO: 327918 - DNA, 25 bp, Homo sapien
gggctgaagaggccggtctccctgc

SEQ ID NO: 327919 - DNA, 25 bp, Homo sapien
ggctgaagaggccggtctccctgcc

SEQ ID NO: 327920 - DNA, 25 bp, Homo sapien
caaagtcactccagggcggggcgcg

SEQ ID NO: 327921 - DNA, 25 bp, Homo sapien
ggggcgcggttggcctgggctccag

SEQ ID NO: 327922 - DNA, 25 bp, Homo sapien
tccacgtgaaaggtccccctggctc

SEQ ID NO: 327923 - DNA, 25 bp, Homo sapien
tcctgcaaggtacctctggcctggc

SEQ ID NO: 327924 - DNA, 25 bp, Homo sapien
cctgcaaggtacctctggcctggct

SEQ ID NO: 327925 - DNA, 25 bp, Homo sapien
cttcctaatctccagttcgatgcta

SEQ ID NO: 327926 - DNA, 25 bp, Homo sapien
tctccagttcgatgctatcgtcgct

SEQ ID NO: 327927 - DNA, 25 bp, Homo sapien
ccagttcgatgctatcgtcgctgtc

SEQ ID NO: 327928 - DNA, 25 bp, Homo sapien
cctaatctccagttcgatgctatcg

SEQ ID NO: 327929 - DNA, 25 bp, Homo sapien
ctgttgtcagacaaggagccagggc

SEQ ID NO: 327930 - DNA, 25 bp, Homo sapien
tgttgtcagacaaggagccagggct

SEQ ID NO: 327931 - DNA, 25 bp, Homo sapien
agccagggctgggagctgggccctg

SEQ ID NO: 327932 - DNA, 25 bp, Homo sapien
gctgggagctgggccctgggactct

SEQ ID NO: 327933 - DNA, 25 bp, Homo sapien
ccggggcttcgtcctctcggccctg

SEQ ID NO: 327934 - DNA, 25 bp, Homo sapien
gggcttcgtcctctcggccctgctg

SEQ ID NO: 327935 - DNA, 25 bp, Homo sapien
ctggagccctcgcagctgtctctct

SEQ ID NO: 327936 - DNA, 25 bp, Homo sapien
caggaaggccggggcttcgtcctct

SEQ ID NO: 327937 - DNA, 25 bp, Homo sapien
tgacgtgcgagtgtcaccgggcacc

SEQ ID NO: 327938 - DNA, 25 bp, Homo sapien
gccctgtgacgtgcgagtgtcaccg

SEQ ID NO: 327939 - DNA, 25 bp, Homo sapien
agtgtcaccgggcaccctagcggcg

SEQ ID NO: 327940 - DNA, 25 bp, Homo sapien
gtgcgagtgtcaccgggcaccctag

SEQ ID NO: 327941 - DNA, 25 bp, Homo sapien
ctctggccagcaaacttctagactg

SEQ ID NO: 327942 - DNA, 25 bp, Homo sapien
tctggccagcaaacttctagactgc

SEQ ID NO: 327943 - DNA, 25 bp, Homo sapien
ctggccagcaaacttctagactgca

SEQ ID NO: 327944 - DNA, 25 bp, Homo sapien
tggccagcaaacttctagactgcac

SEQ ID NO: 327945 - DNA, 25 bp, Homo sapien
aacgtccagatttcctgctcaatgc

SEQ ID NO: 327946 - DNA, 25 bp, Homo sapien
tgagggccaaaaacgtccagatttc

SEQ ID NO: 327947 - DNA, 25 bp, Homo sapien
caaaaacgtccagatttcctgctca

SEQ ID NO: 327948 - DNA, 25 bp, Homo sapien
cttgagggccaaaaacgtccagatt

SEQ ID NO: 327949 - DNA, 25 bp, Homo sapien
ctcagcggaggtgtctgcctggcaa

SEQ ID NO: 327950 - DNA, 25 bp, Homo sapien
ctacacacatcagctcagcggaggt

SEQ ID NO: 327951 - DNA, 25 bp, Homo sapien
cagctcagcggaggtgtctgcctgg

SEQ ID NO: 327952 - DNA, 25 bp, Homo sapien
atcagctcagcggaggtgtctgcct

SEQ ID NO: 327953 - DNA, 25 bp, Homo sapien
atggtcagcgtccagatcccctgga

SEQ ID NO: 327954 - DNA, 25 bp, Homo sapien
ggaatggtcagcgtccagatcccct

SEQ ID NO: 327955 - DNA, 25 bp, Homo sapien
aatggtcagcgtccagatcccctgg

SEQ ID NO: 327956 - DNA, 25 bp, Homo sapien
tggtcagcgtccagatcccctggac

SEQ ID NO: 327957 - DNA, 25 bp, Homo sapien
ggtccgtggtcttggtgggcactgg

SEQ ID NO: 327958 - DNA, 25 bp, Homo sapien
tcaatgccgtcgtcgctgctggagt

SEQ ID NO: 327959 - DNA, 25 bp, Homo sapien
tcgtcgctgctggagtcggacgcct

SEQ ID NO: 327960 - DNA, 25 bp, Homo sapien
tggcctcctcaatgccgtcgtcgct

SEQ ID NO: 327961 - DNA, 25 bp, Homo sapien
tgctggagtcggacgcctcgggcgc

SEQ ID NO: 327962 - DNA, 25 bp, Homo sapien
cgccgaattttcatgtgtgtctggt

SEQ ID NO: 327963 - DNA, 25 bp, Homo sapien
gtgggatttcgagagtgacttcgcc

SEQ ID NO: 327964 - DNA, 25 bp, Homo sapien
tgtacggcgctcgtgactcgctttc

SEQ ID NO: 327965 - DNA, 25 bp, Homo sapien
cgagagtgacttcgccgaattttca

SEQ ID NO: 327966 - DNA, 25 bp, Homo sapien
tgctctgctcatgctgactggggag

SEQ ID NO: 327967 - DNA, 25 bp, Homo sapien
ctgctctgctcatgctgactgggga

SEQ ID NO: 327968 - DNA, 25 bp, Homo sapien
agccagttccggcttacatctactg

SEQ ID NO: 327969 - DNA, 25 bp, Homo sapien
tgctgtgagccagttccggcttaca

SEQ ID NO: 327970 - DNA, 25 bp, Homo sapien
ggcactgctgtgagccagttccggc

SEQ ID NO: 327971 - DNA, 25 bp, Homo sapien
tgggcactgctgtgagccagttccg

SEQ ID NO: 327972 - DNA, 25 bp, Homo sapien
ctgcagccctggaaggctgtgcatg

SEQ ID NO: 327973 - DNA, 25 bp, Homo sapien
ggctgtgcatggctgggccccgctg

SEQ ID NO: 327974 - DNA, 25 bp, Homo sapien
ctggccccgggctgtgcggctccac

SEQ ID NO: 327975 - DNA, 25 bp, Homo sapien
gctggccccgggctgtgcggctcca

SEQ ID NO: 327976 - DNA, 25 bp, Homo sapien
aatgtcccggtccacggaatcgtca

SEQ ID NO: 327977 - DNA, 25 bp, Homo sapien
tggcctcctcaatgtcccggtccac

SEQ ID NO: 327978 - DNA, 25 bp, Homo sapien
tggatggcctcctcaatgtcccggt

SEQ ID NO: 327979 - DNA, 25 bp, Homo sapien
tcctcaatgtcccggtccacggaat

SEQ ID NO: 327980 - DNA, 25 bp, Homo sapien
aggcagccaacgcaggcagctcctt

SEQ ID NO: 327981 - DNA, 25 bp, Homo sapien
tctgaatctagcaccaatgggccaa

SEQ ID NO: 327982 - DNA, 25 bp, Homo sapien
gtcaaagtcagcaacaagaccacag

SEQ ID NO: 327983 - DNA, 25 bp, Homo sapien
caacgcaggcagctccttgtgcatg

SEQ ID NO: 327984 - DNA, 25 bp, Homo sapien
ggccacccatttgcgctggagagca

SEQ ID NO: 327985 - DNA, 25 bp, Homo sapien
cctaaagctccctggtgggacagag

SEQ ID NO: 327986 - DNA, 25 bp, Homo sapien
gaacctaaagctccctggtgggaca

SEQ ID NO: 327987 - DNA, 25 bp, Homo sapien
acagaggccacccatttgcgctgga

SEQ ID NO: 327988 - DNA, 25 bp, Homo sapien
taacagaaacgcatggtctcccaga

SEQ ID NO: 327989 - DNA, 25 bp, Homo sapien
ccttccttggagcttgaccttgtca

SEQ ID NO: 327990 - DNA, 25 bp, Homo sapien
tcagacaggtatagatgagtgttcc

SEQ ID NO: 327991 - DNA, 25 bp, Homo sapien
tgatcagccatgcaagaataaatga

SEQ ID NO: 327992 - DNA, 25 bp, Homo sapien
gagaaattttcatgaaggaagaaag

SEQ ID NO: 327993 - DNA, 25 bp, Homo sapien
taataagtacgctgggaagacaaca

SEQ ID NO: 327994 - DNA, 25 bp, Homo sapien
gcgggcactcagttccactaacgaa

SEQ ID NO: 327995 - DNA, 25 bp, Homo sapien
taaaatcactaaggcggacttccag

SEQ ID NO: 327996 - DNA, 25 bp, Homo sapien
catcatcggaagtcagaagttgaac

SEQ ID NO: 327997 - DNA, 25 bp, Homo sapien
gaatcaggtttctgtaccctagaga

SEQ ID NO: 327998 - DNA, 25 bp, Homo sapien
gataagtcattagagagaggcccac

SEQ ID NO: 327999 - DNA, 25 bp, Homo sapien
gcctgtgagagagttgtgtccctca

SEQ ID NO: 328000 - DNA, 25 bp, Homo sapien
catggtgcttcgcacaggatcccct

SEQ ID NO: 328001 - DNA, 25 bp, Homo sapien
tcccccaaaactggcacggaagaca

SEQ ID NO: 328002 - DNA, 25 bp, Homo sapien
cattagcgatgccatatacagcgtc

SEQ ID NO: 328003 - DNA, 25 bp, Homo sapien
tacagcgtccttattagcgaattcg

SEQ ID NO: 328004 - DNA, 25 bp, Homo sapien
taagcaatgtcgtctacagcgtcct

SEQ ID NO: 328005 - DNA, 25 bp, Homo sapien
gcgaattcgtatacagcatcctcat

SEQ ID NO: 328006 - DNA, 25 bp, Homo sapien
gttgtgtacagcgtcctcgttagca

SEQ ID NO: 328007 - DNA, 25 bp, Homo sapien
gtgatatcgtgtgaggcatcctcgt

SEQ ID NO: 328008 - DNA, 25 bp, Homo sapien
tatcgtgtgaggcatcctcgttagt

SEQ ID NO: 328009 - DNA, 25 bp, Homo sapien
cctcgttagtgatatcgtgtgaggc

SEQ ID NO: 328010 - DNA, 25 bp, Homo sapien
gttagtgatatcgtgtgaggcatcc

SEQ ID NO: 328011 - DNA, 25 bp, Homo sapien
tcttggcatccagattgttttcttg

SEQ ID NO: 328012 - DNA, 25 bp, Homo sapien
tttcttggcatccagattgttttct

SEQ ID NO: 328013 - DNA, 25 bp, Homo sapien
ttcttggcatccagattgttttctt

SEQ ID NO: 328014 - DNA, 25 bp, Homo sapien
ctttcttggcatccagattgttttc

SEQ ID NO: 328015 - DNA, 25 bp, Homo sapien
tagattcacgcctcagaggggccac

SEQ ID NO: 328016 - DNA, 25 bp, Homo sapien
gcctcagaggggccacctgcaccac

SEQ ID NO: 328017 - DNA, 25 bp, Homo sapien
acgcctcagaggggccacctgcacc

SEQ ID NO: 328018 - DNA, 25 bp, Homo sapien
tcacgcctcagaggggccacctgca

SEQ ID NO: 328019 - DNA, 25 bp, Homo sapien
tgtccttgtgaactagagactcctc

SEQ ID NO: 328020 - DNA, 25 bp, Homo sapien
ctgtccttgtgaactagagactcct

SEQ ID NO: 328021 - DNA, 25 bp, Homo sapien
aaatcctccctcgtggaaagacagg

SEQ ID NO: 328022 - DNA, 25 bp, Homo sapien
gcttgagctcctgctagaaaatcct

SEQ ID NO: 328023 - DNA, 25 bp, Homo sapien
gaaagacaggcaagaacgaggagct

SEQ ID NO: 328024 - DNA, 25 bp, Homo sapien
tatagtttgatgagagtcccactgc

SEQ ID NO: 328025 - DNA, 25 bp, Homo sapien
tctttcaaggttgctgaagactgta

SEQ ID NO: 328026 - DNA, 25 bp, Homo sapien
tgggctgaagcttgtccaatctttc

SEQ ID NO: 328027 - DNA, 25 bp, Homo sapien
aggttgctgaagactgtatgatgga

SEQ ID NO: 328028 - DNA, 25 bp, Homo sapien
ccaatctttcaaggttgctgaagac

SEQ ID NO: 328029 - DNA, 25 bp, Homo sapien
actggttggtgtgcacagcatatct

SEQ ID NO: 328030 - DNA, 25 bp, Homo sapien
cattgaatgtgctccctgaagtcac

SEQ ID NO: 328031 - DNA, 25 bp, Homo sapien
gagtagggcttccttttcacacgct

SEQ ID NO: 328032 - DNA, 25 bp, Homo sapien
tttcacacgctttttggaaggcttc

SEQ ID NO: 328033 - DNA, 25 bp, Homo sapien
cttggtagtagagtagggcttcctt

SEQ ID NO: 328034 - DNA, 25 bp, Homo sapien
cgctttttggaaggcttcttcgagt

SEQ ID NO: 328035 - DNA, 25 bp, Homo sapien
ttgaatgcagccacacaggttcccc

SEQ ID NO: 328036 - DNA, 25 bp, Homo sapien
gaatgcagccacacaggttccccat

SEQ ID NO: 328037 - DNA, 25 bp, Homo sapien
tgaatgcagccacacaggttcccca

SEQ ID NO: 328038 - DNA, 25 bp, Homo sapien
cttgaatgcagccacacaggttccc

SEQ ID NO: 328039 - DNA, 25 bp, Homo sapien
tggcacttacgaccaagggcaggag

SEQ ID NO: 328040 - DNA, 25 bp, Homo sapien
gacctttgaaaaactcagcacaggt

SEQ ID NO: 328041 - DNA, 25 bp, Homo sapien
gtagtggcacttacgaccaagggca

SEQ ID NO: 328042 - DNA, 25 bp, Homo sapien
ttgaaaaactcagcacaggtagtgg

SEQ ID NO: 328043 - DNA, 25 bp, Homo sapien
cttgaatgcagccacacaggttccc

SEQ ID NO: 328044 - DNA, 25 bp, Homo sapien
gaatgcagccacacaggttccccat

SEQ ID NO: 328045 - DNA, 25 bp, Homo sapien
tgaatgcagccacacaggttcccca

SEQ ID NO: 328046 - DNA, 25 bp, Homo sapien
ttgaatgcagccacacaggttcccc

SEQ ID NO: 328047 - DNA, 25 bp, Homo sapien
gggtcctgggagtcgtagcaccagg

SEQ ID NO: 328048 - DNA, 25 bp, Homo sapien
cacacttggggtcctgggagtcgta

SEQ ID NO: 328049 - DNA, 25 bp, Homo sapien
gtcctgggagtcgtagcaccaggca

SEQ ID NO: 328050 - DNA, 25 bp, Homo sapien
ttggggtcctgggagtcgtagcacc

SEQ ID NO: 328051 - DNA, 25 bp, Homo sapien
catttgtttgaattctcaggcatgg

SEQ ID NO: 328052 - DNA, 25 bp, Homo sapien
tctcaggcatggtttggcagtgcaa

SEQ ID NO: 328053 - DNA, 25 bp, Homo sapien
ggcatggtttggcagtgcaagaact

SEQ ID NO: 328054 - DNA, 25 bp, Homo sapien
tgaattctcaggcatggtttggcag

SEQ ID NO: 328055 - DNA, 25 bp, Homo sapien
tcctttcctccgagccagagctctt

SEQ ID NO: 328056 - DNA, 25 bp, Homo sapien
atcctttcctccgagccagagctct

SEQ ID NO: 328057 - DNA, 25 bp, Homo sapien
cttggccggtgatcgcagtccttct

SEQ ID NO: 328058 - DNA, 25 bp, Homo sapien
ggcttccaaagacaaggctgggcct

SEQ ID NO: 328059 - DNA, 25 bp, Homo sapien
cctgcttggccggtgatcgcagtcc

SEQ ID NO: 328060 - DNA, 25 bp, Homo sapien
ggtgatcgcagtccttcttcgccag

SEQ ID NO: 328061 - DNA, 25 bp, Homo sapien
gggctgaagaggccggtctccctgc

SEQ ID NO: 328062 - DNA, 25 bp, Homo sapien
ggctgaagaggccggtctccctgcc

SEQ ID NO: 328063 - DNA, 25 bp, Homo sapien
caaagtcactccagggcggggcgcg

SEQ ID NO: 328064 - DNA, 25 bp, Homo sapien
ggggcgcggttggcctgggctccag

SEQ ID NO: 328065 - DNA, 25 bp, Homo sapien
tccacgtgaaaggtccccctggctc

SEQ ID NO: 328066 - DNA, 25 bp, Homo sapien
tcctgcaaggtacctctggcctggc

SEQ ID NO: 328067 - DNA, 25 bp, Homo sapien
cctgcaaggtacctctggcctggct

SEQ ID NO: 328068 - DNA, 25 bp, Homo sapien
cttcctaatctccagttcgatgcta

SEQ ID NO: 328069 - DNA, 25 bp, Homo sapien
tctccagttcgatgctatcgtcgct

SEQ ID NO: 328070 - DNA, 25 bp, Homo sapien
ccagttcgatgctatcgtcgctgtc

SEQ ID NO: 328071 - DNA, 25 bp, Homo sapien
cctaatctccagttcgatgctatcg

SEQ ID NO: 328072 - DNA, 25 bp, Homo sapien
agccagggctgggagctgggccctg

SEQ ID NO: 328073 - DNA, 25 bp, Homo sapien
ctgttgtcagacaaggagccagggc

SEQ ID NO: 328074 - DNA, 25 bp, Homo sapien
tgttgtcagacaaggagccagggct

SEQ ID NO: 328075 - DNA, 25 bp, Homo sapien
gctgggagctgggccctgggactct

SEQ ID NO: 328076 - DNA, 25 bp, Homo sapien
cttcttcttgtctaggtgccttgcc

SEQ ID NO: 328077 - DNA, 25 bp, Homo sapien
ttcttcttgtctaggtgccttgcct

SEQ ID NO: 328078 - DNA, 25 bp, Homo sapien
tcttcttgtctaggtgccttgcctc

SEQ ID NO: 328079 - DNA, 25 bp, Homo sapien
tgacgtgcgagtgtcaccgggcacc

SEQ ID NO: 328080 - DNA, 25 bp, Homo sapien
ctgtgacgtgcgagtgtcaccgggc

SEQ ID NO: 328081 - DNA, 25 bp, Homo sapien
agtgtcaccgggcaccctagcggcg

SEQ ID NO: 328082 - DNA, 25 bp, Homo sapien
gtgcgagtgtcaccgggcaccctag

SEQ ID NO: 328083 - DNA, 25 bp, Homo sapien
gccaggagtgggtccagtgttttag

SEQ ID NO: 328084 - DNA, 25 bp, Homo sapien
agccaggagtgggtccagtgtttta

SEQ ID NO: 328085 - DNA, 25 bp, Homo sapien
ccaggagtgggtccagtgttttaga

SEQ ID NO: 328086 - DNA, 25 bp, Homo sapien
tgagggccaaaaacgtccagatttc

SEQ ID NO: 328087 - DNA, 25 bp, Homo sapien
aacgtccagatttcctgctcaatgc

SEQ ID NO: 328088 - DNA, 25 bp, Homo sapien
caaaaacgtccagatttcctgctca

SEQ ID NO: 328089 - DNA, 25 bp, Homo sapien
cttgagggccaaaaacgtccagatt

SEQ ID NO: 328090 - DNA, 25 bp, Homo sapien
aaaatgtccaggactgcttctacac

SEQ ID NO: 328091 - DNA, 25 bp, Homo sapien
cttgaaaatgtccaggactgcttct

SEQ ID NO: 328092 - DNA, 25 bp, Homo sapien
tgaaaatgtccaggactgcttctac

SEQ ID NO: 328093 - DNA, 25 bp, Homo sapien
aatgtccaggactgcttctacacac

SEQ ID NO: 328094 - DNA, 25 bp, Homo sapien
tctgcctggcaagaggaccattcca

SEQ ID NO: 328095 - DNA, 25 bp, Homo sapien
ggaatggtcagcgtccagatcccct

SEQ ID NO: 328096 - DNA, 25 bp, Homo sapien
gtctgcctggcaagaggaccattcc

SEQ ID NO: 328097 - DNA, 25 bp, Homo sapien
tggtcagcgtccagatcccctggac

SEQ ID NO: 328098 - DNA, 25 bp, Homo sapien
ggtccgtggtcttggtgggcactgg

SEQ ID NO: 328099 - DNA, 25 bp, Homo sapien
tcaatgccgtcgtcgctgctggagt

SEQ ID NO: 328100 - DNA, 25 bp, Homo sapien
tcgtcgctgctggagtcggacgcct

SEQ ID NO: 328101 - DNA, 25 bp, Homo sapien
tgctggagtcggacgcctcgggagc

SEQ ID NO: 328102 - DNA, 25 bp, Homo sapien
tggcctcctcaatgccgtcgtcgct

SEQ ID NO: 328103 - DNA, 25 bp, Homo sapien
ctgtacggcgctcgtgactcgcttt

SEQ ID NO: 328104 - DNA, 25 bp, Homo sapien
tgtacggcgctcgtgactcgctttc

SEQ ID NO: 328105 - DNA, 25 bp, Homo sapien
gtacggcgctcgtgactcgctttcc

SEQ ID NO: 328106 - DNA, 25 bp, Homo sapien
cgagagtgacttcgccgaattttca

SEQ ID NO: 328107 - DNA, 25 bp, Homo sapien
cgccgaattttcatgtgtgtctggt

SEQ ID NO: 328108 - DNA, 25 bp, Homo sapien
ctttgctaaccgggggaggtctgca

SEQ ID NO: 328109 - DNA, 25 bp, Homo sapien
gtgggatttcgagagtgacttcgcc

SEQ ID NO: 328110 - DNA, 25 bp, Homo sapien
tgctctgctcatgctgactggggag

SEQ ID NO: 328111 - DNA, 25 bp, Homo sapien
ctgctctgctcatgctgactgggga

SEQ ID NO: 328112 - DNA, 25 bp, Homo sapien
ggcactgctgtgagccagttcccgc

SEQ ID NO: 328113 - DNA, 25 bp, Homo sapien
tgtgagccagttcccgcttacatct

SEQ ID NO: 328114 - DNA, 25 bp, Homo sapien
ggctgtgcatggctgggccccgctg

SEQ ID NO: 328115 - DNA, 25 bp, Homo sapien
cttacatctactgcctccgcccgca

SEQ ID NO: 328116 - DNA, 25 bp, Homo sapien
aatgtcccggtccacggaatcgtca

SEQ ID NO: 328117 - DNA, 25 bp, Homo sapien
tggcctcctcaatgtcccggtccac

SEQ ID NO: 328118 - DNA, 25 bp, Homo sapien
tcctcaatgtcccggtccacggaat

SEQ ID NO: 328119 - DNA, 25 bp, Homo sapien
tggatggcctcctcaatgtcccggt

SEQ ID NO: 328120 - DNA, 25 bp, Homo sapien
tctgaatctagcaccaatgggccaa

SEQ ID NO: 328121 - DNA, 25 bp, Homo sapien
aggcagccaacgcaggcagctcctt

SEQ ID NO: 328122 - DNA, 25 bp, Homo sapien
agccaacgcaggcagctccttgtgc

SEQ ID NO: 328123 - DNA, 25 bp, Homo sapien
gtcaaagtcagcaacaagaccacag

SEQ ID NO: 328124 - DNA, 25 bp, Homo sapien
cagtagtgatggtccaatggcgccc

SEQ ID NO: 328125 - DNA, 25 bp, Homo sapien
tcacggtggcagcttcaaggacagt

SEQ ID NO: 328126 - DNA, 25 bp, Homo sapien
gataataatgctgcggtgccgacag

SEQ ID NO: 328127 - DNA, 25 bp, Homo sapien
cagcagcagtattgcgggatcccca

SEQ ID NO: 328128 - DNA, 25 bp, Homo sapien
taattctgggctatccccaaactta

SEQ ID NO: 328129 - DNA, 25 bp, Homo sapien
tataattctgggctatccccaaact

SEQ ID NO: 328130 - DNA, 25 bp, Homo sapien
catatataattctgggctatcccca

SEQ ID NO: 328131 - DNA, 25 bp, Homo sapien
atccatatataattctgggctatcc

SEQ ID NO: 328132 - DNA, 25 bp, Homo sapien
tatatatgatacagattatatacaa

SEQ ID NO: 328133 - DNA, 25 bp, Homo sapien
tgatatatcatacctgatatagatg

SEQ ID NO: 328134 - DNA, 25 bp, Homo sapien
tatcatacctgatatagatgataaa

SEQ ID NO: 328135 - DNA, 25 bp, Homo sapien
tagatgatatatcgtatatatgaca

SEQ ID NO: 328136 - DNA, 25 bp, Homo sapien
cgatatatcgcatatatgatataga

SEQ ID NO: 328137 - DNA, 25 bp, Homo sapien
gaaaactatgaccaatatgaccaat

SEQ ID NO: 328138 - DNA, 25 bp, Homo sapien
agtttcttattgaaatccgagcaga

SEQ ID NO: 328139 - DNA, 25 bp, Homo sapien
tatacccactgaagacatgaatgaa

SEQ ID NO: 328140 - DNA, 25 bp, Homo sapien
ggactctaccatatagatccctaga

SEQ ID NO: 328141 - DNA, 25 bp, Homo sapien
ttagaggacacacaccttgcatgag

SEQ ID NO: 328142 - DNA, 25 bp, Homo sapien
aagttatctgggtttagagcgtgaa

SEQ ID NO: 328143 - DNA, 25 bp, Homo sapien
tatctgggtttagagcgtgaaactt

SEQ ID NO: 328144 - DNA, 25 bp, Homo sapien
cgtgaaactttgttagaggacacac

SEQ ID NO: 328145 - DNA, 25 bp, Homo sapien
tgtatgaaatcctcggcagttgacc

SEQ ID NO: 328146 - DNA, 25 bp, Homo sapien
caactgtttgcgctgcagagttaaa

SEQ ID NO: 328147 - DNA, 25 bp, Homo sapien
taatgactaatgatcctgagcagct

SEQ ID NO: 328148 - DNA, 25 bp, Homo sapien
aaatcctgcaagctacatgtaaggc

SEQ ID NO: 328149 - DNA, 25 bp, Homo sapien
gaggacagtcgcaattttgctggac

SEQ ID NO: 328150 - DNA, 25 bp, Homo sapien
aacaggcaaatgcagaagcagtgtg

SEQ ID NO: 328151 - DNA, 25 bp, Homo sapien
gcagtgtggtctcgcaagttgtaaa

SEQ ID NO: 328152 - DNA, 25 bp, Homo sapien
caagttgtaaagaggacagtcgcaa

SEQ ID NO: 328153 - DNA, 25 bp, Homo sapien
cacccagggcatcgttaatgaggac

SEQ ID NO: 328154 - DNA, 25 bp, Homo sapien
cgacatcgctaatgaggacgctgta

SEQ ID NO: 328155 - DNA, 25 bp, Homo sapien
tatgaggacactgtacacgacatcg

SEQ ID NO: 328156 - DNA, 25 bp, Homo sapien
tatatgacattgctactgaggacgc

SEQ ID NO: 328157 - DNA, 25 bp, Homo sapien
tccacagcatcgctatcgaggacac

SEQ ID NO: 328158 - DNA, 25 bp, Homo sapien
cgcccatggcatcgctaacgaggtc

SEQ ID NO: 328159 - DNA, 25 bp, Homo sapien
cagggcatcgctaacgaggtcgcca

SEQ ID NO: 328160 - DNA, 25 bp, Homo sapien
ccacggcgtcgtcgctaacgaggat

SEQ ID NO: 328161 - DNA, 25 bp, Homo sapien
catagcacatgaggatgccgtccag

SEQ ID NO: 328162 - DNA, 25 bp, Homo sapien
ggcatagcacatgaggatgccgtcc

SEQ ID NO: 328163 - DNA, 25 bp, Homo sapien
ggcgtcgctaacgaggtcgaagtcc

SEQ ID NO: 328164 - DNA, 25 bp, Homo sapien
ccagggcatagcacatgaggatgcc

SEQ ID NO: 328165 - DNA, 25 bp, Homo sapien
ggtcaccgcccacggcgtcactaac

SEQ ID NO: 328166 - DNA, 25 bp, Homo sapien
aaagaggtcaccgcccacggcgtca

SEQ ID NO: 328167 - DNA, 25 bp, Homo sapien
ctaaagaggtcaccgcccacggcgt

SEQ ID NO: 328168 - DNA, 25 bp, Homo sapien
agaggtcaccgcccacggcgtcact

SEQ ID NO: 328169 - DNA, 25 bp, Homo sapien
gaggacgccgtccagggcgtcgtta

SEQ ID NO: 328170 - DNA, 25 bp, Homo sapien
aggatgccgcccaagcgatcgctaa

SEQ ID NO: 328171 - DNA, 25 bp, Homo sapien
aggtcgccgcccagggcatcgctaa

SEQ ID NO: 328172 - DNA, 25 bp, Homo sapien
cccatggcatcgctaacgaggtcgc

SEQ ID NO: 328173 - DNA, 25 bp, Homo sapien
aacgaggtcgccgtccacagcatcg

SEQ ID NO: 328174 - DNA, 25 bp, Homo sapien
tgtcgccgacggcatcgctgaggac

SEQ ID NO: 328175 - DNA, 25 bp, Homo sapien
ggccatcgctaagcaggatgccgcc

SEQ ID NO: 328176 - DNA, 25 bp, Homo sapien
cagcatcactaacgaggatgccgtc

SEQ ID NO: 328177 - DNA, 25 bp, Homo sapien
cgcccacagcatcactaacgaggat

SEQ ID NO: 328178 - DNA, 25 bp, Homo sapien
agggcatcgctaaggaggaccccat

SEQ ID NO: 328179 - DNA, 25 bp, Homo sapien
ggatttccgtaggtacactggatgt

SEQ ID NO: 328180 - DNA, 25 bp, Homo sapien
agttaggatttccgtaggtacactg

SEQ ID NO: 328181 - DNA, 25 bp, Homo sapien
cagtggtagttaggatttccgtagg

SEQ ID NO: 328182 - DNA, 25 bp, Homo sapien
taggatttccgtaggtacactggat

SEQ ID NO: 328183 - DNA, 25 bp, Homo sapien
tattggagtcattgaagcagaacca

SEQ ID NO: 328184 - DNA, 25 bp, Homo sapien
cacagcattccggatgtagacacag

SEQ ID NO: 328185 - DNA, 25 bp, Homo sapien
gtaatgaccggagtctgccattccc

SEQ ID NO: 328186 - DNA, 25 bp, Homo sapien
cgtgcgcaatcacagcaaaaagctc

SEQ ID NO: 328187 - DNA, 25 bp, Homo sapien
ctttatgattatcctcaaagtgggc

SEQ ID NO: 328188 - DNA, 25 bp, Homo sapien
cagccttttgaggtgtgggatcaca

SEQ ID NO: 328189 - DNA, 25 bp, Homo sapien
gattaaatgtggtccagtcaactgg

SEQ ID NO: 328190 - DNA, 25 bp, Homo sapien
taagttattatctcaggacaagtga

SEQ ID NO: 328191 - DNA, 25 bp, Homo sapien
tcacaagactctcgcttcattggaa

SEQ ID NO: 328192 - DNA, 25 bp, Homo sapien
tcgcttcattggaaggatctggctg

SEQ ID NO: 328193 - DNA, 25 bp, Homo sapien
tcagcatcacaagactctcgcttca

SEQ ID NO: 328194 - DNA, 25 bp, Homo sapien
caagactctcgcttcattggaagga

SEQ ID NO: 328195 - DNA, 25 bp, Homo sapien
ggggcaaatgggtcagcttcaagac

SEQ ID NO: 328196 - DNA, 25 bp, Homo sapien
tctcgtctgtgaattcctgatggag

SEQ ID NO: 328197 - DNA, 25 bp, Homo sapien
aagtacagggagtggcagatctttc

SEQ ID NO: 328198 - DNA, 25 bp, Homo sapien
agaatcgcatgaggtggattgtcag

SEQ ID NO: 328199 - DNA, 25 bp, Homo sapien
tgcacaaccgcatagatgagggact

SEQ ID NO: 328200 - DNA, 25 bp, Homo sapien
gcaaccccagactagtgaaggacag

SEQ ID NO: 328201 - DNA, 25 bp, Homo sapien
tatgggtccgcttatacacaaattg

SEQ ID NO: 328202 - DNA, 25 bp, Homo sapien
tcagtgatgcgacatgagaagccac

SEQ ID NO: 328203 - DNA, 25 bp, Homo sapien
ttgataactccctgggctggaagaa

SEQ ID NO: 328204 - DNA, 25 bp, Homo sapien
ttgcttttgcttgataactccctgg

SEQ ID NO: 328205 - DNA, 25 bp, Homo sapien
cacagttctcacagaagcatttgct

SEQ ID NO: 328206 - DNA, 25 bp, Homo sapien
ggaagaagcagtgcagggcgtcctc

SEQ ID NO: 328207 - DNA, 25 bp, Homo sapien
acagggaaaaagcagcgttggtatt

SEQ ID NO: 328208 - DNA, 25 bp, Homo sapien
gaacagggaaaaagcagcgttggta

SEQ ID NO: 328209 - DNA, 25 bp, Homo sapien
gaaaaagcagcgttggtatttccca

SEQ ID NO: 328210 - DNA, 25 bp, Homo sapien
agaacagggaaaaagcagcgttggt

SEQ ID NO: 328211 - DNA, 25 bp, Homo sapien
cttcatccggatcatatacagggcc

SEQ ID NO: 328212 - DNA, 25 bp, Homo sapien
gggctttgagtccacatcaaaaaaa

SEQ ID NO: 328213 - DNA, 25 bp, Homo sapien
aaagtcggagggtgagcatgctgct

SEQ ID NO: 328214 - DNA, 25 bp, Homo sapien
tccatggcacagtcaaggcaaatca

SEQ ID NO: 328215 - DNA, 25 bp, Homo sapien
gatctggtccttaatcaggttccag

SEQ ID NO: 328216 - DNA, 25 bp, Homo sapien
tggtccttaatcaggttccagagtt

SEQ ID NO: 328217 - DNA, 25 bp, Homo sapien
gtccttaatcaggttccagagtttg

SEQ ID NO: 328218 - DNA, 25 bp, Homo sapien
tctggtccttaatcaggttccagag

SEQ ID NO: 328219 - DNA, 25 bp, Homo sapien
gctgctgggtcacctagctctggga

SEQ ID NO: 328220 - DNA, 25 bp, Homo sapien
ctgtgaggaaggaatccctactccc

SEQ ID NO: 328221 - DNA, 25 bp, Homo sapien
tcacctagctctgggagcagacatg

SEQ ID NO: 328222 - DNA, 25 bp, Homo sapien
gaaggaatccctactcccagctttc

SEQ ID NO: 328223 - DNA, 25 bp, Homo sapien
tggaaagggacgcttctcctctgct

SEQ ID NO: 328224 - DNA, 25 bp, Homo sapien
ctggaaagggacgcttctcctctgc

SEQ ID NO: 328225 - DNA, 25 bp, Homo sapien
caggtctgtccaatgttgtgtaaac

SEQ ID NO: 328226 - DNA, 25 bp, Homo sapien
tgaaagtcctaaggagcgagtggca

SEQ ID NO: 328227 - DNA, 25 bp, Homo sapien
atgaaagtcctaaggagcgagtggc

SEQ ID NO: 328228 - DNA, 25 bp, Homo sapien
caatgggtgtagcaatgccgaagcc

SEQ ID NO: 328229 - DNA, 25 bp, Homo sapien
cacaatgggtgtagcaatgccgaag

SEQ ID NO: 328230 - DNA, 25 bp, Homo sapien
aatgggtgtagcaatgccgaagcca

SEQ ID NO: 328231 - DNA, 25 bp, Homo sapien
tgcacaatgggtgtagcaatgccga

SEQ ID NO: 328232 - DNA, 25 bp, Homo sapien
gaacaagacgccgtccatagtcact

SEQ ID NO: 328233 - DNA, 25 bp, Homo sapien
acaagacgccgtccatagtcactgg

SEQ ID NO: 328234 - DNA, 25 bp, Homo sapien
gtccatagtcactggcgtaaggcat

SEQ ID NO: 328235 - DNA, 25 bp, Homo sapien
gacgccgtccatagtcactggcgta

SEQ ID NO: 328236 - DNA, 25 bp, Homo sapien
tcctttcaaggatcaaagcaagtct

SEQ ID NO: 328237 - DNA, 25 bp, Homo sapien
taattggagtgtttaaactattcgc

SEQ ID NO: 328238 - DNA, 25 bp, Homo sapien
gaattcagtttgacaatctccacct

SEQ ID NO: 328239 - DNA, 25 bp, Homo sapien
ccggccttgctattagttttctatg

SEQ ID NO: 328240 - DNA, 25 bp, Homo sapien
ccggagtctggctaccacactggcc

SEQ ID NO: 328241 - DNA, 25 bp, Homo sapien
cggagtctggctaccacactggcca

SEQ ID NO: 328242 - DNA, 25 bp, Homo sapien
ggagtctggctaccacactggccat

SEQ ID NO: 328243 - DNA, 25 bp, Homo sapien
gccggagtctggctaccacactggc

SEQ ID NO: 328244 - DNA, 25 bp, Homo sapien
gccaagtgagccagaaaagttcccc

SEQ ID NO: 328245 - DNA, 25 bp, Homo sapien
caagtgcgatgaatgcggcaaggcc

SEQ ID NO: 328246 - DNA, 25 bp, Homo sapien
ttgctggacacacgcaagaacgtcc

SEQ ID NO: 328247 - DNA, 25 bp, Homo sapien
cctacaagtgcagcgcctgcgagaa

SEQ ID NO: 328248 - DNA, 25 bp, Homo sapien
aaagaagggatatcgttgggtgcca

SEQ ID NO: 328249 - DNA, 25 bp, Homo sapien
agatgtggcggcatgtccctgtggt

SEQ ID NO: 328250 - DNA, 25 bp, Homo sapien
agggatatcgttgggtgccatggct

SEQ ID NO: 328251 - DNA, 25 bp, Homo sapien
ccagatgtggcggcatgtccctgtg

SEQ ID NO: 328252 - DNA, 25 bp, Homo sapien
atttgaatatgccctttgtccctct

SEQ ID NO: 328253 - DNA, 25 bp, Homo sapien
aatatttgaatatgccctttgtccc

SEQ ID NO: 328254 - DNA, 25 bp, Homo sapien
tgtccctctttatattggagtcttg

SEQ ID NO: 328255 - DNA, 25 bp, Homo sapien
gtccctctttatattggagtcttga

SEQ ID NO: 328256 - DNA, 25 bp, Homo sapien
atattttcagacataattggccaca

SEQ ID NO: 328257 - DNA, 25 bp, Homo sapien
tattttcagacataattggccacat

SEQ ID NO: 328258 - DNA, 25 bp, Homo sapien
tttaacattttatgataagcatttt

SEQ ID NO: 328259 - DNA, 25 bp, Homo sapien
attttcagacataattggccacatc

SEQ ID NO: 328260 - DNA, 25 bp, Homo sapien
acatttgcgtgtcacccttgggcag

SEQ ID NO: 328261 - DNA, 25 bp, Homo sapien
cacatttgcgtgtcacccttgggca

SEQ ID NO: 328262 - DNA, 25 bp, Homo sapien
catttgcgtgtcacccttgggcaga

SEQ ID NO: 328263 - DNA, 25 bp, Homo sapien
caacggaggttccagcagccgcggt

SEQ ID NO: 328264 - DNA, 25 bp, Homo sapien
tggcaacggaggttccagcagccgc

SEQ ID NO: 328265 - DNA, 25 bp, Homo sapien
cccatggcaacggaggttccagcag

SEQ ID NO: 328266 - DNA, 25 bp, Homo sapien
atggcaacggaggttccagcagccg

SEQ ID NO: 328267 - DNA, 25 bp, Homo sapien
tgccagcgtgagaccaatgagtgct

SEQ ID NO: 328268 - DNA, 25 bp, Homo sapien
ggacgcagtctccactcagatggct

SEQ ID NO: 328269 - DNA, 25 bp, Homo sapien
gccgtagggcacagatggtcacaga

SEQ ID NO: 328270 - DNA, 25 bp, Homo sapien
tgagatgggtgacccctctaagatg

SEQ ID NO: 328271 - DNA, 25 bp, Homo sapien
gggtcaaccagatgcccgggagcct

SEQ ID NO: 328272 - DNA, 25 bp, Homo sapien
cagtgggaggccatcaaaaccagct

SEQ ID NO: 328273 - DNA, 25 bp, Homo sapien
cccgggctctattgggacggccaag

SEQ ID NO: 328274 - DNA, 25 bp, Homo sapien
ggccactagagtcgcccctggaggt

SEQ ID NO: 328275 - DNA, 25 bp, Homo sapien
aggcagcccgggcagaagtgcctct

SEQ ID NO: 328276 - DNA, 25 bp, Homo sapien
agtgcctctggctgcaaccaatgag

SEQ ID NO: 328277 - DNA, 25 bp, Homo sapien
gcaccaggccctagcgggggagagg

SEQ ID NO: 328278 - DNA, 25 bp, Homo sapien
gggagaggcagcccgggcagaagtg

SEQ ID NO: 328279 - DNA, 25 bp, Homo sapien
tgctccaatccaggagcggctgcag

SEQ ID NO: 328280 - DNA, 25 bp, Homo sapien
aagtccactcctggccagtaagagg

SEQ ID NO: 328281 - DNA, 25 bp, Homo sapien
tgtcaggcctcgaccaacgggatgg

SEQ ID NO: 328282 - DNA, 25 bp, Homo sapien
tggtcggagcgctccataactcggc

SEQ ID NO: 328283 - DNA, 25 bp, Homo sapien
cggggggtctcaggcgcgggcaagt

SEQ ID NO: 328284 - DNA, 25 bp, Homo sapien
ccgcctcccggctcttcttgcgcgg

SEQ ID NO: 328285 - DNA, 25 bp, Homo sapien
gggcaagtcggtcgccgccttctca

SEQ ID NO: 328286 - DNA, 25 bp, Homo sapien
tcttcttgcgcggcggcttctggat

SEQ ID NO: 328287 - DNA, 25 bp, Homo sapien
cgcgggcgggcgaggctggcggcac

SEQ ID NO: 328288 - DNA, 25 bp, Homo sapien
cgcgcgggcgggcgaggctggcggc

SEQ ID NO: 328289 - DNA, 25 bp, Homo sapien
ggcgcgcgggcgggcgaggctggcg

SEQ ID NO: 328290 - DNA, 25 bp, Homo sapien
gggcgcgcgggcgggcgaggctggc

SEQ ID NO: 328291 - DNA, 25 bp, Homo sapien
tgccgcgcacgtcagcggccaacat

SEQ ID NO: 328292 - DNA, 25 bp, Homo sapien
caggctgcgagtcttgccgcgcacg

SEQ ID NO: 328293 - DNA, 25 bp, Homo sapien
gctgcgagtcttgccgcgcacgtca

SEQ ID NO: 328294 - DNA, 25 bp, Homo sapien
gcggcccaggctgcgagtcttgccg

SEQ ID NO: 328295 - DNA, 25 bp, Homo sapien
cgtccgtgggctccaagaggccggg

SEQ ID NO: 328296 - DNA, 25 bp, Homo sapien
gccggcgtccgtgggctccaagagg

SEQ ID NO: 328297 - DNA, 25 bp, Homo sapien
ggcgcagcgagggctgtcgcctcct

SEQ ID NO: 328298 - DNA, 25 bp, Homo sapien
gggcgcagcgagggctgtcgcctcc

SEQ ID NO: 328299 - DNA, 25 bp, Homo sapien
tgggcgtccgtttcctcttgctggg

SEQ ID NO: 328300 - DNA, 25 bp, Homo sapien
tgtgcttgccgtggatccaggacac

SEQ ID NO: 328301 - DNA, 25 bp, Homo sapien
cgtatgcgccgatttgtcgctgggc

SEQ ID NO: 328302 - DNA, 25 bp, Homo sapien
cggcgctgtgcttgccgtggatcca

SEQ ID NO: 328303 - DNA, 25 bp, Homo sapien
ttggtggcggggtcaggtggcggcg

SEQ ID NO: 328304 - DNA, 25 bp, Homo sapien
atggcgacagcgacaggcccccaat

SEQ ID NO: 328305 - DNA, 25 bp, Homo sapien
gggcgatggcgacagcgacaggccc

SEQ ID NO: 328306 - DNA, 25 bp, Homo sapien
ctgcgctcgggcgatggcgacagcg

SEQ ID NO: 328307 - DNA, 25 bp, Homo sapien
cgctcgggcgatggcgacagcgaca

SEQ ID NO: 328308 - DNA, 25 bp, Homo sapien
gccggccgggcctcgcgtcgggcca

SEQ ID NO: 328309 - DNA, 25 bp, Homo sapien
cggaggctggcgtggtcaagggcac

SEQ ID NO: 328310 - DNA, 25 bp, Homo sapien
accgctcgctgtcggaggacgcggg

SEQ ID NO: 328311 - DNA, 25 bp, Homo sapien
gggtcccggctctccgctggtgcct

SEQ ID NO: 328312 - DNA, 25 bp, Homo sapien
ggtatcgcctcctcggcggaggctg

SEQ ID NO: 328313 - DNA, 25 bp, Homo sapien
gtggtgtcaaacgaggagaaggagg

SEQ ID NO: 328314 - DNA, 25 bp, Homo sapien
cctcatggggtacacagtacacagg

SEQ ID NO: 328315 - DNA, 25 bp, Homo sapien
cagtggtgtcaaacgaggagaagga

SEQ ID NO: 328316 - DNA, 25 bp, Homo sapien
atcagtggtgtcaaacgaggagaag

SEQ ID NO: 328317 - DNA, 25 bp, Homo sapien
tgtgttatccaggtcgtggtgggcc

SEQ ID NO: 328318 - DNA, 25 bp, Homo sapien
cgcatagtcggtgcggcgccttctt

SEQ ID NO: 328319 - DNA, 25 bp, Homo sapien
tttctgcctccggagcgggatccgg

SEQ ID NO: 328320 - DNA, 25 bp, Homo sapien
tacgactttgggtagtttctgcctc

SEQ ID NO: 328321 - DNA, 25 bp, Homo sapien
tcatgctgatgcgactgaagcgccc

SEQ ID NO: 328322 - DNA, 25 bp, Homo sapien
ggttggatctgggtccggtggcacc

SEQ ID NO: 328323 - DNA, 25 bp, Homo sapien
cggcctgaacccaggcgaaagcggg

SEQ ID NO: 328324 - DNA, 25 bp, Homo sapien
gcacccagagggtgcggcctgaacc

SEQ ID NO: 328325 - DNA, 25 bp, Homo sapien
ggcgattagatctcggccggagcca

SEQ ID NO: 328326 - DNA, 25 bp, Homo sapien
agcaggcagacgagcaggacgagca

SEQ ID NO: 328327 - DNA, 25 bp, Homo sapien
cttgccgcggcaagcgcagcagcag

SEQ ID NO: 328328 - DNA, 25 bp, Homo sapien
gcccatcacgcccttgcgctggttg

SEQ ID NO: 328329 - DNA, 25 bp, Homo sapien
cggcgcgtagggtccttgccgcggc

SEQ ID NO: 328330 - DNA, 25 bp, Homo sapien
cacgtgtcctcgtggcagctgcagg

SEQ ID NO: 328331 - DNA, 25 bp, Homo sapien
tccgggcgggcacgtcacgttacag

SEQ ID NO: 328332 - DNA, 25 bp, Homo sapien
cctgagcacagtccgcgccgtggag

SEQ ID NO: 328333 - DNA, 25 bp, Homo sapien
accagtgaccgggtcgcacgtgtcc

SEQ ID NO: 328334 - DNA, 25 bp, Homo sapien
atagggtcaaggcatgccacagccg

SEQ ID NO: 328335 - DNA, 25 bp, Homo sapien
ggacatagggtcaaggcatgccaca

SEQ ID NO: 328336 - DNA, 25 bp, Homo sapien
ctgccgggacatagggtcaaggcat

SEQ ID NO: 328337 - DNA, 25 bp, Homo sapien
cagccgcccccctaggatgccccct

SEQ ID NO: 328338 - DNA, 25 bp, Homo sapien
cagtcggcgcacacgaaggcgcagt

SEQ ID NO: 328339 - DNA, 25 bp, Homo sapien
gccattgctacacttggtctcgcac

SEQ ID NO: 328340 - DNA, 25 bp, Homo sapien
gtcctcgccgtaagtgccattgcta

SEQ ID NO: 328341 - DNA, 25 bp, Homo sapien
gactggaagtcgcagtgtccgctgc

SEQ ID NO: 328342 - DNA, 25 bp, Homo sapien
caaggctggtcgcacttggttccgt

SEQ ID NO: 328343 - DNA, 25 bp, Homo sapien
gatccagcccgcgttgcagcgcgta

SEQ ID NO: 328344 - DNA, 25 bp, Homo sapien
ccatagaaaccggtggcgcaaggct

SEQ ID NO: 328345 - DNA, 25 bp, Homo sapien
tacacttgccggtgacatggttaca

SEQ ID NO: 328346 - DNA, 25 bp, Homo sapien
aagcactggcagtagcgatcgcagc

SEQ ID NO: 328347 - DNA, 25 bp, Homo sapien
agctacacagctccttgcagtcggg

SEQ ID NO: 328348 - DNA, 25 bp, Homo sapien
tctgctgctcgcagggagacgagtt

SEQ ID NO: 328349 - DNA, 25 bp, Homo sapien
gcgcgtgacaagtacactggcctgt

SEQ ID NO: 328350 - DNA, 25 bp, Homo sapien
agtaggtgcccccagccagccggaa

SEQ ID NO: 328351 - DNA, 25 bp, Homo sapien
cactccagccgccacctctggggac

SEQ ID NO: 328352 - DNA, 25 bp, Homo sapien
aggccccggtgcttgagtaggtgcc

SEQ ID NO: 328353 - DNA, 25 bp, Homo sapien
caataccggcccgaccccacgctca

SEQ ID NO: 328354 - DNA, 25 bp, Homo sapien
accgaagtagccgtggcggcagcgg

SEQ ID NO: 328355 - DNA, 25 bp, Homo sapien
agcggcactcgccaggcctcacgca

SEQ ID NO: 328356 - DNA, 25 bp, Homo sapien
gttggcaccgaagtagccgtggcgg

SEQ ID NO: 328357 - DNA, 25 bp, Homo sapien
gcggcagcggcactcgccaggcctc

SEQ ID NO: 328358 - DNA, 25 bp, Homo sapien
ctgagcacgtggagttgccttcgca

SEQ ID NO: 328359 - DNA, 25 bp, Homo sapien
agcacgtggagttgccttcgcacac

SEQ ID NO: 328360 - DNA, 25 bp, Homo sapien
gagcacgtggagttgccttcgcaca

SEQ ID NO: 328361 - DNA, 25 bp, Homo sapien
cacgtggagttgccttcgcacaccg

SEQ ID NO: 328362 - DNA, 25 bp, Homo sapien
aatcccacactcgtccccttgctgc

SEQ ID NO: 328363 - DNA, 25 bp, Homo sapien
atcccacactcgtccccttgctgcc

SEQ ID NO: 328364 - DNA, 25 bp, Homo sapien
tcccacactcgtccccttgctgcct

SEQ ID NO: 328365 - DNA, 25 bp, Homo sapien
caatcccacactcgtccccttgctg

SEQ ID NO: 328366 - DNA, 25 bp, Homo sapien
catgtgatgtgacatgatgaggacg

SEQ ID NO: 328367 - DNA, 25 bp, Homo sapien
gcctaatgggtgtcatggatccaga

SEQ ID NO: 328368 - DNA, 25 bp, Homo sapien
cactaggactagctgggccacaggg

SEQ ID NO: 328369 - DNA, 25 bp, Homo sapien
caaatgtgagggtctagggcatccc

SEQ ID NO: 328370 - DNA, 25 bp, Homo sapien
cacacgttgcggccgcgagggttca

SEQ ID NO: 328371 - DNA, 25 bp, Homo sapien
ccgggagcacggcacacgttgcggc

SEQ ID NO: 328372 - DNA, 25 bp, Homo sapien
cgttgcggccgcgagggttcagttc

SEQ ID NO: 328373 - DNA, 25 bp, Homo sapien
agcacggcacacgttgcggccgcga

SEQ ID NO: 328374 - DNA, 25 bp, Homo sapien
acggtgtccggcagcatccagagca

SEQ ID NO: 328375 - DNA, 25 bp, Homo sapien
gccacggtgtccggcagcatccaga

SEQ ID NO: 328376 - DNA, 25 bp, Homo sapien
tgaggcgccacggtgtccggcagca

SEQ ID NO: 328377 - DNA, 25 bp, Homo sapien
aggcgccacggtgtccggcagcatc

SEQ ID NO: 328378 - DNA, 25 bp, Homo sapien
cgggtgcggccgcagcgagagcggc

SEQ ID NO: 328379 - DNA, 25 bp, Homo sapien
tgcggccgcagcgagagcggccgga

SEQ ID NO: 328380 - DNA, 25 bp, Homo sapien
gccgcagcgagagcggccggaagcg

SEQ ID NO: 328381 - DNA, 25 bp, Homo sapien
ccggaagcggagtgcgaggccgggc

SEQ ID NO: 328382 - DNA, 25 bp, Homo sapien
ccgtagggacggatgggagagatac

SEQ ID NO: 328383 - DNA, 25 bp, Homo sapien
accgagcaggatgcttgaggcctgt

SEQ ID NO: 328384 - DNA, 25 bp, Homo sapien
agactcggtccggaccagaggcctg

SEQ ID NO: 328385 - DNA, 25 bp, Homo sapien
gatacagaggaagtagaatggccag

SEQ ID NO: 328386 - DNA, 25 bp, Homo sapien
tcccttgcagtagatggcaactttg

SEQ ID NO: 328387 - DNA, 25 bp, Homo sapien
atacatcccttgcagtagatggcaa

SEQ ID NO: 328388 - DNA, 25 bp, Homo sapien
tcacgacccggtacatacatccctt

SEQ ID NO: 328389 - DNA, 25 bp, Homo sapien
atggcaactttgggtgtcatgggca

SEQ ID NO: 328390 - DNA, 25 bp, Homo sapien
cagcgggaggggtctttttatcaca

SEQ ID NO: 328391 - DNA, 25 bp, Homo sapien
aacatggggtctgaaaacccagcgg

SEQ ID NO: 328392 - DNA, 25 bp, Homo sapien
ttatttcattgaccaacaacatggg

SEQ ID NO: 328393 - DNA, 25 bp, Homo sapien
cccaggcgagctgatgcatctctgc

SEQ ID NO: 328394 - DNA, 25 bp, Homo sapien
acagaaagagggctaccacgtgcct

SEQ ID NO: 328395 - DNA, 25 bp, Homo sapien
aatccacagcctgggatctgcatgg

SEQ ID NO: 328396 - DNA, 25 bp, Homo sapien
gcagttcctgcagtgacgtaatcca

SEQ ID NO: 328397 - DNA, 25 bp, Homo sapien
gagtaaagtgctctggcctaggctg

SEQ ID NO: 328398 - DNA, 25 bp, Homo sapien
agttgtcaaactcctcccagtcaga

SEQ ID NO: 328399 - DNA, 25 bp, Homo sapien
caaactcctcccagtcagacacact

SEQ ID NO: 328400 - DNA, 25 bp, Homo sapien
tcctcccagtcagacacactcatca

SEQ ID NO: 328401 - DNA, 25 bp, Homo sapien
tggagttgtcaaactcctcccagtc

SEQ ID NO: 328402 - DNA, 25 bp, Homo sapien
taaatgtgcacgtagcctgtgcggc

SEQ ID NO: 328403 - DNA, 25 bp, Homo sapien
tgtccagacgtgcagctgtagcagg

SEQ ID NO: 328404 - DNA, 25 bp, Homo sapien
tcagaggcaaagtccgggtcggcct

SEQ ID NO: 328405 - DNA, 25 bp, Homo sapien
tgagcggccacctaacacatagatc

SEQ ID NO: 328406 - DNA, 25 bp, Homo sapien
caaagggtgcagtgagccaagagca

SEQ ID NO: 328407 - DNA, 25 bp, Homo sapien
ggcaaagggtgcagtgagccaagag

SEQ ID NO: 328408 - DNA, 25 bp, Homo sapien
aaagggtgcagtgagccaagagcac

SEQ ID NO: 328409 - DNA, 25 bp, Homo sapien
agggtgcagtgagccaagagcacca

SEQ ID NO: 328410 - DNA, 25 bp, Homo sapien
gtccaaacctatagaatgtgccaag

SEQ ID NO: 328411 - DNA, 25 bp, Homo sapien
tccacccctctggagcgagaggtct

SEQ ID NO: 328412 - DNA, 25 bp, Homo sapien
tgccaagagtgaacactgtggactc

SEQ ID NO: 328413 - DNA, 25 bp, Homo sapien
caataacaactgagaggcttgggaa

SEQ ID NO: 328414 - DNA, 25 bp, Homo sapien
tccctcctgtatccggcatcgttgt

SEQ ID NO: 328415 - DNA, 25 bp, Homo sapien
tggtgcacgtccctcctgtatccgg

SEQ ID NO: 328416 - DNA, 25 bp, Homo sapien
ctggtgcacgtccctcctgtatccg

SEQ ID NO: 328417 - DNA, 25 bp, Homo sapien
acgtccctcctgtatccggcatcgt

SEQ ID NO: 328418 - DNA, 25 bp, Homo sapien
agcgtcgcgcctgcgtgggcataca

SEQ ID NO: 328419 - DNA, 25 bp, Homo sapien
ccagtgtgtgccaagtgttgctgcc

SEQ ID NO: 328420 - DNA, 25 bp, Homo sapien
tctgcggccgcaggtgatatacatc

SEQ ID NO: 328421 - DNA, 25 bp, Homo sapien
tggatcgtagcagtgtgtctctttc

SEQ ID NO: 328422 - DNA, 25 bp, Homo sapien
acacctgcctgacaacgctgtgagg

SEQ ID NO: 328423 - DNA, 25 bp, Homo sapien
ggctgggtactctgtcaaggccaat

SEQ ID NO: 328424 - DNA, 25 bp, Homo sapien
cctcgattctcatgggacatactgt

SEQ ID NO: 328425 - DNA, 25 bp, Homo sapien
catacagacaagaatcctccctcga

SEQ ID NO: 328426 - DNA, 25 bp, Homo sapien
ggatacatctatagactcagaaatg

SEQ ID NO: 328427 - DNA, 25 bp, Homo sapien
ctctaacctcttcccaatagcggat

SEQ ID NO: 328428 - DNA, 25 bp, Homo sapien
taacatctgcatgggggaactccaa

SEQ ID NO: 328429 - DNA, 25 bp, Homo sapien
tcccactggacatgcaatcctccgg

SEQ ID NO: 328430 - DNA, 25 bp, Homo sapien
tgtgtcactatatcacagggtcacc

SEQ ID NO: 328431 - DNA, 25 bp, Homo sapien
accaggatgctgacgtggacacagc

SEQ ID NO: 328432 - DNA, 25 bp, Homo sapien
agaactgtcctatcaccaccaggat

SEQ ID NO: 328433 - DNA, 25 bp, Homo sapien
taaaaatacagaggtctcacgtgcc

SEQ ID NO: 328434 - DNA, 25 bp, Homo sapien
tattccatgggtatctaccacagct

SEQ ID NO: 328435 - DNA, 25 bp, Homo sapien
acttttggataagaaatgctgaacc

SEQ ID NO: 328436 - DNA, 25 bp, Homo sapien
gcctggctaacgtatacagagtagt

SEQ ID NO: 328437 - DNA, 25 bp, Homo sapien
cccaggttctaccaggttgttgcat

SEQ ID NO: 328438 - DNA, 25 bp, Homo sapien
caaacattgaccagaggagcatgct

SEQ ID NO: 328439 - DNA, 25 bp, Homo sapien
tacaacattcgcactgattcccgga

SEQ ID NO: 328440 - DNA, 25 bp, Homo sapien
ggagtagccctgctgaatgaccgta

SEQ ID NO: 328441 - DNA, 25 bp, Homo sapien
tgttacaccaatggccaccaagcgt

SEQ ID NO: 328442 - DNA, 25 bp, Homo sapien
gggcagactcctcccatcttatcgt

SEQ ID NO: 328443 - DNA, 25 bp, Homo sapien
ttttgccgacgcatgtctaattgct

SEQ ID NO: 328444 - DNA, 25 bp, Homo sapien
tgggcatatttactcaggtctgtgg

SEQ ID NO: 328445 - DNA, 25 bp, Homo sapien
catgtgtaacatgactgggcatatt

SEQ ID NO: 328446 - DNA, 25 bp, Homo sapien
acatctgatccatcagcaagcctga

SEQ ID NO: 328447 - DNA, 25 bp, Homo sapien
gtcttcagcccagaccacgcaatga

SEQ ID NO: 328448 - DNA, 25 bp, Homo sapien
agcacaggctactgctgtcttcagc

SEQ ID NO: 328449 - DNA, 25 bp, Homo sapien
aagcctgatcagtttacctccacgc

SEQ ID NO: 328450 - DNA, 25 bp, Homo sapien
cacgatgcagctggttgaaagccaa

SEQ ID NO: 328451 - DNA, 25 bp, Homo sapien
tgaatgcgtgcatgaaggaacaccg

SEQ ID NO: 328452 - DNA, 25 bp, Homo sapien
caaggctgtaaacaccatggagtgg

SEQ ID NO: 328453 - DNA, 25 bp, Homo sapien
tacatggtgcttagtagttgcggaa

SEQ ID NO: 328454 - DNA, 25 bp, Homo sapien
ttgacacctaggcctctcactcttt

SEQ ID NO: 328455 - DNA, 25 bp, Homo sapien
tgggacaggccttgacacctaggcc

SEQ ID NO: 328456 - DNA, 25 bp, Homo sapien
gacaggccttgacacctaggcctct

SEQ ID NO: 328457 - DNA, 25 bp, Homo sapien
tgacacctaggcctctcactctttg

SEQ ID NO: 328458 - DNA, 25 bp, Homo sapien
tgtacctgcctacaacacacacgga

SEQ ID NO: 328459 - DNA, 25 bp, Homo sapien
gatctggaaccagcggttgtgccgt

SEQ ID NO: 328460 - DNA, 25 bp, Homo sapien
gcccgccacagcgtagatgtacctg

SEQ ID NO: 328461 - DNA, 25 bp, Homo sapien
tcaggtcattgtggtagtcacggcc

SEQ ID NO: 328462 - DNA, 25 bp, Homo sapien
caggctgttacacacctgagcacag

SEQ ID NO: 328463 - DNA, 25 bp, Homo sapien
gcaggcttgcacctcttgttctggt

SEQ ID NO: 328464 - DNA, 25 bp, Homo sapien
agcacagcactgactaggcagggag

SEQ ID NO: 328465 - DNA, 25 bp, Homo sapien
cacagcatggaaggaatggccagga

SEQ ID NO: 328466 - DNA, 25 bp, Homo sapien
gacacctgggatatggacttaggca

SEQ ID NO: 328467 - DNA, 25 bp, Homo sapien
tcaggagtggtcttctcaggcacgc

SEQ ID NO: 328468 - DNA, 25 bp, Homo sapien
catggcctgcaatgtggagcagaga

SEQ ID NO: 328469 - DNA, 25 bp, Homo sapien
gaaaaggcactagactggttgcggc

SEQ ID NO: 328470 - DNA, 25 bp, Homo sapien
tcacctagacttcattccacaatgg

SEQ ID NO: 328471 - DNA, 25 bp, Homo sapien
cctgaagacaaagggaccagctagc

SEQ ID NO: 328472 - DNA, 25 bp, Homo sapien
gacatgcaggaaagaaggcgatcca

SEQ ID NO: 328473 - DNA, 25 bp, Homo sapien
tccacaatggcaagtgatgctcatg

SEQ ID NO: 328474 - DNA, 25 bp, Homo sapien
ggaaaccgcactgtctcaaggagct

SEQ ID NO: 328475 - DNA, 25 bp, Homo sapien
tatacgaagttgttgagcaccgcga

SEQ ID NO: 328476 - DNA, 25 bp, Homo sapien
cttgtcagtccgagagaaggccaca

SEQ ID NO: 328477 - DNA, 25 bp, Homo sapien
gaatgttctcttcgtccacccagga

SEQ ID NO: 328478 - DNA, 25 bp, Homo sapien
tgcagagagaatgacacccattcaa

SEQ ID NO: 328479 - DNA, 25 bp, Homo sapien
gcagagagaatgacacccattcaag

SEQ ID NO: 328480 - DNA, 25 bp, Homo sapien
tctgccttgctagatgagacatgcc

SEQ ID NO: 328481 - DNA, 25 bp, Homo sapien
ctgccttgctagatgagacatgcct

SEQ ID NO: 328482 - DNA, 25 bp, Homo sapien
acaccgtggatcaggacctcttcct

SEQ ID NO: 328483 - DNA, 25 bp, Homo sapien
tttggcacatagcattgtaggacac

SEQ ID NO: 328484 - DNA, 25 bp, Homo sapien
ggtgtatatgaaatgtaggatttgg

SEQ ID NO: 328485 - DNA, 25 bp, Homo sapien
catagcattgtaggacacaccgtgg

SEQ ID NO: 328486 - DNA, 25 bp, Homo sapien
tgaaaaagtagaacctggagttgga

SEQ ID NO: 328487 - DNA, 25 bp, Homo sapien
aactccaggactgaactgatctgcc

SEQ ID NO: 328488 - DNA, 25 bp, Homo sapien
tcaaactccaggactgaactgatct

SEQ ID NO: 328489 - DNA, 25 bp, Homo sapien
aaactccaggactgaactgatctgc

SEQ ID NO: 328490 - DNA, 25 bp, Homo sapien
ctccaggactgaactgatctgccca

SEQ ID NO: 328491 - DNA, 25 bp, Homo sapien
agtgtggataccctgttggcatggc

SEQ ID NO: 328492 - DNA, 25 bp, Homo sapien
ctctttttaggcaaccctgctccag

SEQ ID NO: 328493 - DNA, 25 bp, Homo sapien
ggataccctgttggcatggcacact

SEQ ID NO: 328494 - DNA, 25 bp, Homo sapien
ctttttaggcaaccctgctccagga

SEQ ID NO: 328495 - DNA, 25 bp, Homo sapien
cggcagtaggtggtgatcttagcct

SEQ ID NO: 328496 - DNA, 25 bp, Homo sapien
gccatccattatctggcaggtggtg

SEQ ID NO: 328497 - DNA, 25 bp, Homo sapien
catccattatctggcaggtggtggt

SEQ ID NO: 328498 - DNA, 25 bp, Homo sapien
tttgccatccattatctggcaggtg

SEQ ID NO: 328499 - DNA, 25 bp, Homo sapien
tgcccggatttgtgccacctctgac

SEQ ID NO: 328500 - DNA, 25 bp, Homo sapien
tctgcccggatttgtgccacctctg

SEQ ID NO: 328501 - DNA, 25 bp, Homo sapien
ctctgcccggatttgtgccacctct

SEQ ID NO: 328502 - DNA, 25 bp, Homo sapien
cccggatttgtgccacctctgactc

SEQ ID NO: 328503 - DNA, 25 bp, Homo sapien
cgtgattgtcatctcagcagttcca

SEQ ID NO: 328504 - DNA, 25 bp, Homo sapien
gtgattgtcatctcagcagttccaa

SEQ ID NO: 328505 - DNA, 25 bp, Homo sapien
ctccgtgattgtcatctcagcagtt

SEQ ID NO: 328506 - DNA, 25 bp, Homo sapien
gtctcaactccgtgattgtcatctc

SEQ ID NO: 328507 - DNA, 25 bp, Homo sapien
ctcagtggactgcatggtgaccact

SEQ ID NO: 328508 - DNA, 25 bp, Homo sapien
gctctcctcaatctgctgagaccag

SEQ ID NO: 328509 - DNA, 25 bp, Homo sapien
gtggtgctctcctcaatctgctgag

SEQ ID NO: 328510 - DNA, 25 bp, Homo sapien
ctcctcaatctgctgagaccagtac

SEQ ID NO: 328511 - DNA, 25 bp, Homo sapien
gtccagctcctgtcgtttcttccga

SEQ ID NO: 328512 - DNA, 25 bp, Homo sapien
cagctcatcatattgagcctggatg

SEQ ID NO: 328513 - DNA, 25 bp, Homo sapien
gctcatcatattgagcctggatgtc

SEQ ID NO: 328514 - DNA, 25 bp, Homo sapien
gctcctgtcgtttcttccgagccag

SEQ ID NO: 328515 - DNA, 25 bp, Homo sapien
gcaatctggtcttgtaggcctttta

SEQ ID NO: 328516 - DNA, 25 bp, Homo sapien
tgagagcttcgatctctgtctccag

SEQ ID NO: 328517 - DNA, 25 bp, Homo sapien
tccttgagagcttcgatctctgtct

SEQ ID NO: 328518 - DNA, 25 bp, Homo sapien
ctcctccttgagagcttcgatctct

SEQ ID NO: 328519 - DNA, 25 bp, Homo sapien
tttgcgaagcccatgtatgtcgctc

SEQ ID NO: 328520 - DNA, 25 bp, Homo sapien
ctccaagtgcttctggattttgctc

SEQ ID NO: 328521 - DNA, 25 bp, Homo sapien
tcccttcttctccaagtgcttctgg

SEQ ID NO: 328522 - DNA, 25 bp, Homo sapien
aatgcctccagtctctgatctgggt

SEQ ID NO: 328523 - DNA, 25 bp, Homo sapien
tgcctccagtctctgatctgggtcc

SEQ ID NO: 328524 - DNA, 25 bp, Homo sapien
caggcggtcattcaggctttgtatg

SEQ ID NO: 328525 - DNA, 25 bp, Homo sapien
gccaggcggtcattcaggctttgta

SEQ ID NO: 328526 - DNA, 25 bp, Homo sapien
tgccagatccccagccatccccgcg

SEQ ID NO: 328527 - DNA, 25 bp, Homo sapien
ggcggtcattcaggctttgtatggt

SEQ ID NO: 328528 - DNA, 25 bp, Homo sapien
cccatgcagccctggaagctggtgg

SEQ ID NO: 328529 - DNA, 25 bp, Homo sapien
cagccctggaagctggtggagcggg

SEQ ID NO: 328530 - DNA, 25 bp, Homo sapien
tgcagccctggaagctggtggagcg

SEQ ID NO: 328531 - DNA, 25 bp, Homo sapien
gccctggaagctggtggagcgggac

SEQ ID NO: 328532 - DNA, 25 bp, Homo sapien
cgaagatccaggaaccagagccctc

SEQ ID NO: 328533 - DNA, 25 bp, Homo sapien
caggaaccagagccctcggtgcctg

SEQ ID NO: 328534 - DNA, 25 bp, Homo sapien
atccaggaaccagagccctcggtgc

SEQ ID NO: 328535 - DNA, 25 bp, Homo sapien
agatccaggaaccagagccctcggt

SEQ ID NO: 328536 - DNA, 25 bp, Homo sapien
ttggtggagaaggtagagcgagtgg

SEQ ID NO: 328537 - DNA, 25 bp, Homo sapien
gagcccagggaccagtagttggtgg

SEQ ID NO: 328538 - DNA, 25 bp, Homo sapien
agccaggcgccatagctgggagcct

SEQ ID NO: 328539 - DNA, 25 bp, Homo sapien
cagccaggcgccatagctgggagcc

SEQ ID NO: 328540 - DNA, 25 bp, Homo sapien
ctgaagtaatcgcaggacgcagcca

SEQ ID NO: 328541 - DNA, 25 bp, Homo sapien
caccagcacaacatcgaagaggatt

SEQ ID NO: 328542 - DNA, 25 bp, Homo sapien
aagaggattccgctgtcccggagag

SEQ ID NO: 328543 - DNA, 25 bp, Homo sapien
caggcaacttgcagagctgggtgaa

SEQ ID NO: 328544 - DNA, 25 bp, Homo sapien
ccacaagatcccttacaactgtggc

SEQ ID NO: 328545 - DNA, 25 bp, Homo sapien
gacagccacaagatcccttacaact

SEQ ID NO: 328546 - DNA, 25 bp, Homo sapien
cagccacaagatcccttacaactgt

SEQ ID NO: 328547 - DNA, 25 bp, Homo sapien
ctgacagccacaagatcccttacaa

SEQ ID NO: 328548 - DNA, 25 bp, Homo sapien
tgggtgccaagggggtggcatttcc

SEQ ID NO: 328549 - DNA, 25 bp, Homo sapien
ctgagtagtggtcaggagacacaca

SEQ ID NO: 328550 - DNA, 25 bp, Homo sapien
gtggcatttccagggcctactttcc

SEQ ID NO: 328551 - DNA, 25 bp, Homo sapien
tagtggtcaggagacacacagccag

SEQ ID NO: 328552 - DNA, 25 bp, Homo sapien
gatgcatggggccagacatgtggga

SEQ ID NO: 328553 - DNA, 25 bp, Homo sapien
tgcatggggccagacatgtgggaag

SEQ ID NO: 328554 - DNA, 25 bp, Homo sapien
caaaaaggcatcactctggaaagtc

SEQ ID NO: 328555 - DNA, 25 bp, Homo sapien
tatgggaccaccatccttcatgtgg

SEQ ID NO: 328556 - DNA, 25 bp, Homo sapien
tgtctcccctctccggaggttgaga

SEQ ID NO: 328557 - DNA, 25 bp, Homo sapien
tggtctggtctgtcattgacggaaa

SEQ ID NO: 328558 - DNA, 25 bp, Homo sapien
aaaatgcgcaaagtggccgggcgca

SEQ ID NO: 328559 - DNA, 25 bp, Homo sapien
gtggctcacgcctgtaatcccaaca

SEQ ID NO: 328560 - DNA, 25 bp, Homo sapien
gccgggcatggtggtaggtgcctat

SEQ ID NO: 328561 - DNA, 25 bp, Homo sapien
gctgaggcggatgaatcacgaggtc

SEQ ID NO: 328562 - DNA, 25 bp, Homo sapien
gctcggcccgcaccggatctaaaat

SEQ ID NO: 328563 - DNA, 25 bp, Homo sapien
ctgcccgccccagatccactcggct

SEQ ID NO: 328564 - DNA, 25 bp, Homo sapien
cggcccgcaccggatctaaaatggt

SEQ ID NO: 328565 - DNA, 25 bp, Homo sapien
agatccactcggctcggcccgcacc

SEQ ID NO: 328566 - DNA, 25 bp, Homo sapien
ttttgcactgacagcgcgatctccg

SEQ ID NO: 328567 - DNA, 25 bp, Homo sapien
tttgcactgacagcgcgatctccgg

SEQ ID NO: 328568 - DNA, 25 bp, Homo sapien
ccgggcccgatcgagggaactgagg

SEQ ID NO: 328569 - DNA, 25 bp, Homo sapien
aaatcgcccgcctgttgcaaggccg

SEQ ID NO: 328570 - DNA, 25 bp, Homo sapien
tgaggctcgtcaggccggccccaaa

SEQ ID NO: 328571 - DNA, 25 bp, Homo sapien
ccaggaaggccgcattcggacctgc

SEQ ID NO: 328572 - DNA, 25 bp, Homo sapien
ccagccgaggccgcactcgcagctg

SEQ ID NO: 328573 - DNA, 25 bp, Homo sapien
gccgccagccgaggccgcactcgca

SEQ ID NO: 328574 - DNA, 25 bp, Homo sapien
cgccagccgaggccgcactcgcagc

SEQ ID NO: 328575 - DNA, 25 bp, Homo sapien
cgccgccagccgaggccgcactcgc

SEQ ID NO: 328576 - DNA, 25 bp, Homo sapien
ttctttgggaaacttgcaatctccc

SEQ ID NO: 328577 - DNA, 25 bp, Homo sapien
gcttctttgggaaacttgcaatctc

SEQ ID NO: 328578 - DNA, 25 bp, Homo sapien
tccctgccctctatcggctctgcct

SEQ ID NO: 328579 - DNA, 25 bp, Homo sapien
tattgccatgatttttgctaaggat

SEQ ID NO: 328580 - DNA, 25 bp, Homo sapien
cattagggctccctgccctaaaggg

SEQ ID NO: 328581 - DNA, 25 bp, Homo sapien
tcctttgatacgtccccattcaggc

SEQ ID NO: 328582 - DNA, 25 bp, Homo sapien
gccaccttcgatattttctccagtt

SEQ ID NO: 328583 - DNA, 25 bp, Homo sapien
ccctccatccaacctgccagaactt

SEQ ID NO: 328584 - DNA, 25 bp, Homo sapien
gagagacgtgagctccaagtaagac

SEQ ID NO: 328585 - DNA, 25 bp, Homo sapien
actagtgctgcacctgtcatacagg

SEQ ID NO: 328586 - DNA, 25 bp, Homo sapien
cctgtctctgggctataggctctca

SEQ ID NO: 328587 - DNA, 25 bp, Homo sapien
gaacaagagtgcatctgcaatgact

SEQ ID NO: 328588 - DNA, 25 bp, Homo sapien
tggctttggtcatgtcttctggtaa

SEQ ID NO: 328589 - DNA, 25 bp, Homo sapien
tatatgcacttaattctctgggctg

SEQ ID NO: 328590 - DNA, 25 bp, Homo sapien
tgttggctacatgaaggcaacccca

SEQ ID NO: 328591 - DNA, 25 bp, Homo sapien
ggtgttagttccagatgttggctac

SEQ ID NO: 328592 - DNA, 25 bp, Homo sapien
gatgaaacctgtctgcctaggtggg

SEQ ID NO: 328593 - DNA, 25 bp, Homo sapien
tccattccggataacattgtagaag

SEQ ID NO: 328594 - DNA, 25 bp, Homo sapien
ttttggtcagtaccttcaggacttg

SEQ ID NO: 328595 - DNA, 25 bp, Homo sapien
caggacttgtgggtgtagtacttcg

SEQ ID NO: 328596 - DNA, 25 bp, Homo sapien
gaactagcttagacaacagtacaca

SEQ ID NO: 328597 - DNA, 25 bp, Homo sapien
aatgggacactttcaggcgagacct

SEQ ID NO: 328598 - DNA, 25 bp, Homo sapien
gacagagatctcgaggcctttccaa

SEQ ID NO: 328599 - DNA, 25 bp, Homo sapien
tatgtgaaggaagctcgtgtattct

SEQ ID NO: 328600 - DNA, 25 bp, Homo sapien
gtacccttaatttatctctttcatg

SEQ ID NO: 328601 - DNA, 25 bp, Homo sapien
taatttatctctttcatgttgcttt

SEQ ID NO: 328602 - DNA, 25 bp, Homo sapien
ttgtacccttaatttatctctttca

SEQ ID NO: 328603 - DNA, 25 bp, Homo sapien
cttaatttatctctttcatgttgct

SEQ ID NO: 328604 - DNA, 25 bp, Homo sapien
acacgcacatcagctttcctatcag

SEQ ID NO: 328605 - DNA, 25 bp, Homo sapien
aagctgggcgtgttgacagaactgc

SEQ ID NO: 328606 - DNA, 25 bp, Homo sapien
tgttgtcctgtgctaattccccgag

SEQ ID NO: 328607 - DNA, 25 bp, Homo sapien
aggcctcgctgcttatcccagcttt

SEQ ID NO: 328608 - DNA, 25 bp, Homo sapien
actccagagcctggtaggttttgct

SEQ ID NO: 328609 - DNA, 25 bp, Homo sapien
agcaaagtgaacttcactgatctca

SEQ ID NO: 328610 - DNA, 25 bp, Homo sapien
cagctgtaccttcagtgtgttgctg

SEQ ID NO: 328611 - DNA, 25 bp, Homo sapien
aagggagacattgagcactccagag

SEQ ID NO: 328612 - DNA, 25 bp, Homo sapien
ttgctgtgaagtccacactgttgtg

SEQ ID NO: 328613 - DNA, 25 bp, Homo sapien
ttgtggcattgctcactgagctgct

SEQ ID NO: 328614 - DNA, 25 bp, Homo sapien
ccttggttgtggcattgctcactga

SEQ ID NO: 328615 - DNA, 25 bp, Homo sapien
gaagtccacactgttgtgacaatgg

SEQ ID NO: 328616 - DNA, 25 bp, Homo sapien
tgaccgtcaccgtgaggctcatgcc

SEQ ID NO: 328617 - DNA, 25 bp, Homo sapien
caagcagaccttgaccgtcaccgtg

SEQ ID NO: 328618 - DNA, 25 bp, Homo sapien
gcatctgcagccacacttttccttc

SEQ ID NO: 328619 - DNA, 25 bp, Homo sapien
ttctctggatcttggcacccctctc

SEQ ID NO: 328620 - DNA, 25 bp, Homo sapien
gacccagcctttggtgtcacaggcg

SEQ ID NO: 328621 - DNA, 25 bp, Homo sapien
ccctggacaaatgttgtatacccaa

SEQ ID NO: 328622 - DNA, 25 bp, Homo sapien
atgttgtatacccaaccaccactga

SEQ ID NO: 328623 - DNA, 25 bp, Homo sapien
gtcacaggcgcaagctctccctgga

SEQ ID NO: 328624 - DNA, 25 bp, Homo sapien
tgagcttctggtcggcgtctgccat

SEQ ID NO: 328625 - DNA, 25 bp, Homo sapien
ggaacgagtgccgttgagccctgct

SEQ ID NO: 328626 - DNA, 25 bp, Homo sapien
ctgcaggaggaacgagtgagcttct

SEQ ID NO: 328627 - DNA, 25 bp, Homo sapien
ggagctctgttactggcacctgtcg

SEQ ID NO: 328628 - DNA, 25 bp, Homo sapien
cagttccttgatagataccaggacc

SEQ ID NO: 328629 - DNA, 25 bp, Homo sapien
accagttccttgatagataccagga

SEQ ID NO: 328630 - DNA, 25 bp, Homo sapien
ttccttgatagataccaggaccatc

SEQ ID NO: 328631 - DNA, 25 bp, Homo sapien
agttccttgatagataccaggacca

SEQ ID NO: 328632 - DNA, 25 bp, Homo sapien
caggcactgagtttctttgttgcga

SEQ ID NO: 328633 - DNA, 25 bp, Homo sapien
cactgagtttctttgttgcgatcac

SEQ ID NO: 328634 - DNA, 25 bp, Homo sapien
ggcactgagtttctttgttgcgatc

SEQ ID NO: 328635 - DNA, 25 bp, Homo sapien
gcactgagtttctttgttgcgatca

SEQ ID NO: 328636 - DNA, 25 bp, Homo sapien
caaggtgggatgcacataagagccc

SEQ ID NO: 328637 - DNA, 25 bp, Homo sapien
aagctccatccctttgggcagacag

SEQ ID NO: 328638 - DNA, 25 bp, Homo sapien
ttgtccctctgtcctcaaagatgat

SEQ ID NO: 328639 - DNA, 25 bp, Homo sapien
tcacggaagccttggcccaaggtgg

SEQ ID NO: 328640 - DNA, 25 bp, Homo sapien
tctcagcagcgtgagggtgcactca

SEQ ID NO: 328641 - DNA, 25 bp, Homo sapien
taaaacacacatgggattctctggt

SEQ ID NO: 328642 - DNA, 25 bp, Homo sapien
gggcgttggccgacttcttagagaa

SEQ ID NO: 328643 - DNA, 25 bp, Homo sapien
cctgtacagaactgggataggcgca

SEQ ID NO: 328644 - DNA, 25 bp, Homo sapien
ctccatgaatctgggctcgctgtcc

SEQ ID NO: 328645 - DNA, 25 bp, Homo sapien
tccatgaatctgggctcgctgtcct

SEQ ID NO: 328646 - DNA, 25 bp, Homo sapien
tgtttgtcagttgttcatcactgtg

SEQ ID NO: 328647 - DNA, 25 bp, Homo sapien
gtttgtcagttgttcatcactgtgt

SEQ ID NO: 328648 - DNA, 25 bp, Homo sapien
ggggcctgcggtggcaccaggctgc

SEQ ID NO: 328649 - DNA, 25 bp, Homo sapien
tggggcctgcggtggcaccaggctg

SEQ ID NO: 328650 - DNA, 25 bp, Homo sapien
gtggggcctgcggtggcaccaggct

SEQ ID NO: 328651 - DNA, 25 bp, Homo sapien
ggtggggcctgcggtggcaccaggc

SEQ ID NO: 328652 - DNA, 25 bp, Homo sapien
gaaagccctggcgttagaggcctct

SEQ ID NO: 328653 - DNA, 25 bp, Homo sapien
gaaagtcattacagtagccagaaat

SEQ ID NO: 328654 - DNA, 25 bp, Homo sapien
tggatgaccacttacactgctgaag

SEQ ID NO: 328655 - DNA, 25 bp, Homo sapien
cagctggtggatgaccacttacact

SEQ ID NO: 328656 - DNA, 25 bp, Homo sapien
tgttgtgaagcagtggctcctcctc

SEQ ID NO: 328657 - DNA, 25 bp, Homo sapien
ctgttgtgaagcagtggctcctcct

SEQ ID NO: 328658 - DNA, 25 bp, Homo sapien
gttgtgaagcagtggctcctcctca

SEQ ID NO: 328659 - DNA, 25 bp, Homo sapien
tcaggcacgaaagggcccaagtctc

SEQ ID NO: 328660 - DNA, 25 bp, Homo sapien
ttcccatcaggcacgaaagggccca

SEQ ID NO: 328661 - DNA, 25 bp, Homo sapien
aggagcttcccatcaggcacgaaag

SEQ ID NO: 328662 - DNA, 25 bp, Homo sapien
catcgtccagccatggctaggggca

SEQ ID NO: 328663 - DNA, 25 bp, Homo sapien
tcattcattatgagcttgtaatggg

SEQ ID NO: 328664 - DNA, 25 bp, Homo sapien
ctttctcctgtgactcattcattat

SEQ ID NO: 328665 - DNA, 25 bp, Homo sapien
ttcattatgagcttgtaatggggat

SEQ ID NO: 328666 - DNA, 25 bp, Homo sapien
tcctgtgactcattcattatgagct

SEQ ID NO: 328667 - DNA, 25 bp, Homo sapien
aagcagcttgggctgtccactaccc

SEQ ID NO: 328668 - DNA, 25 bp, Homo sapien
tgctgaaccccgagagtcctggctc

SEQ ID NO: 328669 - DNA, 25 bp, Homo sapien
gaaatcaagcgcatgctcttctcat

SEQ ID NO: 328670 - DNA, 25 bp, Homo sapien
aagccacagccattctaagagaagc

SEQ ID NO: 328671 - DNA, 25 bp, Homo sapien
gttcatgtgctgcgtttctgctctg

SEQ ID NO: 328672 - DNA, 25 bp, Homo sapien
gcagggtcagcgtttgaaatgatgc

SEQ ID NO: 328673 - DNA, 25 bp, Homo sapien
aggacctagcgtgggcttgctgccc

SEQ ID NO: 328674 - DNA, 25 bp, Homo sapien
cgggcctaggcgggtctccgtcctg

SEQ ID NO: 328675 - DNA, 25 bp, Homo sapien
ctgcctctgctggtcgatctggaca

SEQ ID NO: 328676 - DNA, 25 bp, Homo sapien
tgctggtcgatctggacacccacag

SEQ ID NO: 328677 - DNA, 25 bp, Homo sapien
aaggactgctgctgtaggaactgca

SEQ ID NO: 328678 - DNA, 25 bp, Homo sapien
ctccaaggactgctgctgtaggaac

SEQ ID NO: 328679 - DNA, 25 bp, Homo sapien
acaggtaggtggcaccacacctagc

SEQ ID NO: 328680 - DNA, 25 bp, Homo sapien
ctccaatgccatcagggctggtgca

SEQ ID NO: 328681 - DNA, 25 bp, Homo sapien
tccaatgccatcagggctggtgcag

SEQ ID NO: 328682 - DNA, 25 bp, Homo sapien
tcccacctccaatgccatcagggct

SEQ ID NO: 328683 - DNA, 25 bp, Homo sapien
cacctccaatgccatcagggctggt

SEQ ID NO: 328684 - DNA, 25 bp, Homo sapien
ccaaggagtagagggcgtagcccag

SEQ ID NO: 328685 - DNA, 25 bp, Homo sapien
ctggtcagcaacatcatggccaagg

SEQ ID NO: 328686 - DNA, 25 bp, Homo sapien
acagcagtgcacaggtgaggggcct

SEQ ID NO: 328687 - DNA, 25 bp, Homo sapien
ccagggtgaacagcagtgcacaggt

SEQ ID NO: 328688 - DNA, 25 bp, Homo sapien
tcaggtagctgcctaggaagtgcag

SEQ ID NO: 328689 - DNA, 25 bp, Homo sapien
gcagtgtcaggtagctgcctaggaa

SEQ ID NO: 328690 - DNA, 25 bp, Homo sapien
tgtcaggtagctgcctaggaagtgc

SEQ ID NO: 328691 - DNA, 25 bp, Homo sapien
agggcagtgtcaggtagctgcctag

SEQ ID NO: 328692 - DNA, 25 bp, Homo sapien
caagctggtaatctcataactccag

SEQ ID NO: 328693 - DNA, 25 bp, Homo sapien
tggtaatctcataactccagagggg

SEQ ID NO: 328694 - DNA, 25 bp, Homo sapien
aagctggtaatctcataactccaga

SEQ ID NO: 328695 - DNA, 25 bp, Homo sapien
ggccgtggaacaggccccattgctc

SEQ ID NO: 328696 - DNA, 25 bp, Homo sapien
cgtggaacaggccccattgctcata

SEQ ID NO: 328697 - DNA, 25 bp, Homo sapien
gtggaacaggccccattgctcatac

SEQ ID NO: 328698 - DNA, 25 bp, Homo sapien
ccgtggaacaggccccattgctcat

SEQ ID NO: 328699 - DNA, 25 bp, Homo sapien
actcgtccatcttctggacgctgtc

SEQ ID NO: 328700 - DNA, 25 bp, Homo sapien
tctggcgcaggtacgccagggcctc

SEQ ID NO: 328701 - DNA, 25 bp, Homo sapien
tcggaatatctggcgcaggtacgcc

SEQ ID NO: 328702 - DNA, 25 bp, Homo sapien
caggcactcgtccatcttctggacg

SEQ ID NO: 328703 - DNA, 25 bp, Homo sapien
ctgccccatctcgcccaggtcatgg

SEQ ID NO: 328704 - DNA, 25 bp, Homo sapien
gagccgttggtgtctgtggggccaa

SEQ ID NO: 328705 - DNA, 25 bp, Homo sapien
ccgttggtgtctgtggggccaaagc

SEQ ID NO: 328706 - DNA, 25 bp, Homo sapien
gccgttggtgtctgtggggccaaag

SEQ ID NO: 328707 - DNA, 25 bp, Homo sapien
agccgttggtgtctgtggggccaaa

SEQ ID NO: 328708 - DNA, 25 bp, Homo sapien
aaggagtggccagctggagtctcca

SEQ ID NO: 328709 - DNA, 25 bp, Homo sapien
ggagtggccagctggagtctccaca

SEQ ID NO: 328710 - DNA, 25 bp, Homo sapien
gtggccagctggagtctccacacac

SEQ ID NO: 328711 - DNA, 25 bp, Homo sapien
cacaacaggaaggagtggccagctg

SEQ ID NO: 328712 - DNA, 25 bp, Homo sapien
gagatggacctggccgtgtgcttgg

SEQ ID NO: 328713 - DNA, 25 bp, Homo sapien
cgagatggacctggccgtgtgcttg

SEQ ID NO: 328714 - DNA, 25 bp, Homo sapien
ccgagatggacctggccgtgtgctt

SEQ ID NO: 328715 - DNA, 25 bp, Homo sapien
gcctcgggcccgaacatcgggtgta

SEQ ID NO: 328716 - DNA, 25 bp, Homo sapien
gtgtaagcctcgggcccgaacatcg

SEQ ID NO: 328717 - DNA, 25 bp, Homo sapien
cgggcccgaacatcgggtgtacttg

SEQ ID NO: 328718 - DNA, 25 bp, Homo sapien
aagcctcgggcccgaacatcgggtg

SEQ ID NO: 328719 - DNA, 25 bp, Homo sapien
agagaacctggttgctgcccacagg

SEQ ID NO: 328720 - DNA, 25 bp, Homo sapien
acaggttttcaggatgcctccgagg

SEQ ID NO: 328721 - DNA, 25 bp, Homo sapien
gagacgaacctagcgcccacttccg

SEQ ID NO: 328722 - DNA, 25 bp, Homo sapien
gctggcgaatgtgcaggctgtgaag

SEQ ID NO: 328723 - DNA, 25 bp, Homo sapien
tgctggcagcctgcttgtcagctgc

SEQ ID NO: 328724 - DNA, 25 bp, Homo sapien
agcctgcttgtcagctgcataccac

SEQ ID NO: 328725 - DNA, 25 bp, Homo sapien
ccaccatggctgcaggtagctcagc

SEQ ID NO: 328726 - DNA, 25 bp, Homo sapien
tgcttgtcagctgcataccaccatg

SEQ ID NO: 328727 - DNA, 25 bp, Homo sapien
caaagcaatgccgcaggaagaggta

SEQ ID NO: 328728 - DNA, 25 bp, Homo sapien
ggccaaagcaatgccgcaggaagag

SEQ ID NO: 328729 - DNA, 25 bp, Homo sapien
gtggccaaagcaatgccgcaggaag

SEQ ID NO: 328730 - DNA, 25 bp, Homo sapien
aagcaatgccgcaggaagaggtaga

SEQ ID NO: 328731 - DNA, 25 bp, Homo sapien
cagccgcttgcacagtaaggtggcc

SEQ ID NO: 328732 - DNA, 25 bp, Homo sapien
tgtgggagtggacgaaaggtgagac

SEQ ID NO: 328733 - DNA, 25 bp, Homo sapien
ggtgtgggagtggacgaaaggtgag

SEQ ID NO: 328734 - DNA, 25 bp, Homo sapien
gtgtgggagtggacgaaaggtgaga

SEQ ID NO: 328735 - DNA, 25 bp, Homo sapien
gtgccccttggtgggcatgaacgac

SEQ ID NO: 328736 - DNA, 25 bp, Homo sapien
gcttcagtggcaggcgcaccaccag

SEQ ID NO: 328737 - DNA, 25 bp, Homo sapien
cagcatgtgccccttggtgggcatg

SEQ ID NO: 328738 - DNA, 25 bp, Homo sapien
agtggcaggcgcaccaccagcatgt

SEQ ID NO: 328739 - DNA, 25 bp, Homo sapien
gtcacctgtcctgccatgggggttg

SEQ ID NO: 328740 - DNA, 25 bp, Homo sapien
tggtcacctgtcctgccatgggggt

SEQ ID NO: 328741 - DNA, 25 bp, Homo sapien
ctgtcctgccatgggggttgctaga

SEQ ID NO: 328742 - DNA, 25 bp, Homo sapien
cacctgtcctgccatgggggttgct

SEQ ID NO: 328743 - DNA, 25 bp, Homo sapien
ctgtcgtccccgaaatcccccatgg

SEQ ID NO: 328744 - DNA, 25 bp, Homo sapien
ccatccatacgcttgtcatttgtgc

SEQ ID NO: 328745 - DNA, 25 bp, Homo sapien
caaatccatccatacgcttgtcatt

SEQ ID NO: 328746 - DNA, 25 bp, Homo sapien
gcttcactgacctcaaatccatcca

SEQ ID NO: 328747 - DNA, 25 bp, Homo sapien
tggaacctccaagctggatgacagt

SEQ ID NO: 328748 - DNA, 25 bp, Homo sapien
acagttctgaacagggcagcaccca

SEQ ID NO: 328749 - DNA, 25 bp, Homo sapien
cacagtctgggtcatggaacctcca

SEQ ID NO: 328750 - DNA, 25 bp, Homo sapien
gggcagcacccacattaccgtaagt

SEQ ID NO: 328751 - DNA, 25 bp, Homo sapien
ctggaggttgggctgccgggggctg

SEQ ID NO: 328752 - DNA, 25 bp, Homo sapien
acacagagtcggtagtgcagcacct

SEQ ID NO: 328753 - DNA, 25 bp, Homo sapien
cactggagacacagagtcggtagtg

SEQ ID NO: 328754 - DNA, 25 bp, Homo sapien
gctgtggtgggcactggagacacag

SEQ ID NO: 328755 - DNA, 25 bp, Homo sapien
ggaactttgtcagcaataaaggcaa

SEQ ID NO: 328756 - DNA, 25 bp, Homo sapien
taaaggcaaagtctcccatgcatag

SEQ ID NO: 328757 - DNA, 25 bp, Homo sapien
tctccagaaccggaggaaaagtgac

SEQ ID NO: 328758 - DNA, 25 bp, Homo sapien
cacgggcaccggactacaggatgtg

SEQ ID NO: 328759 - DNA, 25 bp, Homo sapien
atgagtatggcggcttgctcatgct

SEQ ID NO: 328760 - DNA, 25 bp, Homo sapien
catgagtatggcggcttgctcatgc

SEQ ID NO: 328761 - DNA, 25 bp, Homo sapien
caaaagtgccacaacctcatctgtt

SEQ ID NO: 328762 - DNA, 25 bp, Homo sapien
aaaagtgccacaacctcatctgttc

SEQ ID NO: 328763 - DNA, 25 bp, Homo sapien
agcaaaagtgccacaacctcatctg

SEQ ID NO: 328764 - DNA, 25 bp, Homo sapien
gcaaaagtgccacaacctcatctgt

SEQ ID NO: 328765 - DNA, 25 bp, Homo sapien
tccagagaatagtgttgaagccaca

SEQ ID NO: 328766 - DNA, 25 bp, Homo sapien
ccagagaatagtgttgaagccacat

SEQ ID NO: 328767 - DNA, 25 bp, Homo sapien
tgaaacagacgttgagaccagctca

SEQ ID NO: 328768 - DNA, 25 bp, Homo sapien
ttcttttgaaacagacgttgagacc

SEQ ID NO: 328769 - DNA, 25 bp, Homo sapien
agtggaagatggctgaccagtttct

SEQ ID NO: 328770 - DNA, 25 bp, Homo sapien
tgacccatatagtggaagatggctg

SEQ ID NO: 328771 - DNA, 25 bp, Homo sapien
acctccagatctcctgggaggcggg

SEQ ID NO: 328772 - DNA, 25 bp, Homo sapien
agtgtcgcttcagggggctagtgtg

SEQ ID NO: 328773 - DNA, 25 bp, Homo sapien
acagacatctgatgagagaagtgtc

SEQ ID NO: 328774 - DNA, 25 bp, Homo sapien
tgatgagagaagtgtcgcttcaggg

SEQ ID NO: 328775 - DNA, 25 bp, Homo sapien
ctggaggctacaggaagcaaagggc

SEQ ID NO: 328776 - DNA, 25 bp, Homo sapien
ggaggctacaggaagcaaagggcat

SEQ ID NO: 328777 - DNA, 25 bp, Homo sapien
tggaggctacaggaagcaaagggca

SEQ ID NO: 328778 - DNA, 25 bp, Homo sapien
tggcaggctgcctttggtgggcagg

SEQ ID NO: 328779 - DNA, 25 bp, Homo sapien
tggtggcaggctgcctttggtgggc

SEQ ID NO: 328780 - DNA, 25 bp, Homo sapien
ggctgcctttggtgggcaggaacca

SEQ ID NO: 328781 - DNA, 25 bp, Homo sapien
caggctgcctttggtgggcaggaac

SEQ ID NO: 328782 - DNA, 25 bp, Homo sapien
gtctgaaatatggacatggagagac

SEQ ID NO: 328783 - DNA, 25 bp, Homo sapien
agtctgaaatatggacatggagaga

SEQ ID NO: 328784 - DNA, 25 bp, Homo sapien
aggaggaaataggtacagtctgaaa

SEQ ID NO: 328785 - DNA, 25 bp, Homo sapien
cagtctgaaatatggacatggagag

SEQ ID NO: 328786 - DNA, 25 bp, Homo sapien
ctttagtgtgttgaggctcaaggca

SEQ ID NO: 328787 - DNA, 25 bp, Homo sapien
aagaagcatatgtaatactcgaacg

SEQ ID NO: 328788 - DNA, 25 bp, Homo sapien
gaagcatatgtaatactcgaacgga

SEQ ID NO: 328789 - DNA, 25 bp, Homo sapien
gcaaagaagcatatgtaatactcga

SEQ ID NO: 328790 - DNA, 25 bp, Homo sapien
ggactgtcaaggacgcactcctgga

SEQ ID NO: 328791 - DNA, 25 bp, Homo sapien
cttagttgggcggaactggatcttg

SEQ ID NO: 328792 - DNA, 25 bp, Homo sapien
ccaggttcaggccaaggcccttagt

SEQ ID NO: 328793 - DNA, 25 bp, Homo sapien
tcctggatggatgccttcacgagac

SEQ ID NO: 328794 - DNA, 25 bp, Homo sapien
agtgcctcaacaagagtctttgctc

SEQ ID NO: 328795 - DNA, 25 bp, Homo sapien
caacaagagtctttgctcagaactt

SEQ ID NO: 328796 - DNA, 25 bp, Homo sapien
aaagctgcagacaggccaggtatgg

SEQ ID NO: 328797 - DNA, 25 bp, Homo sapien
tctttgctcagaacttccaccatct

SEQ ID NO: 328798 - DNA, 25 bp, Homo sapien
agcgcaggttccagcccacaaggac

SEQ ID NO: 328799 - DNA, 25 bp, Homo sapien
ttcccagggtcgagaaattccatca

SEQ ID NO: 328800 - DNA, 25 bp, Homo sapien
tcacgcgcctctgtaagcagcgcag

SEQ ID NO: 328801 - DNA, 25 bp, Homo sapien
cttcacaggattcacgcgcctctgt

SEQ ID NO: 328802 - DNA, 25 bp, Homo sapien
atgctaccagccatggggagatggc

SEQ ID NO: 328803 - DNA, 25 bp, Homo sapien
tgccgaaaatgctaccagccatggg

SEQ ID NO: 328804 - DNA, 25 bp, Homo sapien
aaaatgctaccagccatggggagat

SEQ ID NO: 328805 - DNA, 25 bp, Homo sapien
ctgccgaaaatgctaccagccatgg

SEQ ID NO: 328806 - DNA, 25 bp, Homo sapien
gtctctgatattgccaagtgtcccc

SEQ ID NO: 328807 - DNA, 25 bp, Homo sapien
tcagggttcctcaacgttgatgcta

SEQ ID NO: 328808 - DNA, 25 bp, Homo sapien
tgtggttaagaactcctgatctgca

SEQ ID NO: 328809 - DNA, 25 bp, Homo sapien
ttcccagagtgaagcccttaaaatc

SEQ ID NO: 328810 - DNA, 25 bp, Homo sapien
gccgctgcaggtgagggaacgccat

SEQ ID NO: 328811 - DNA, 25 bp, Homo sapien
cagtagaaagctgggccgctgcagg

SEQ ID NO: 328812 - DNA, 25 bp, Homo sapien
tgggccgctgcaggtgagggaacgc

SEQ ID NO: 328813 - DNA, 25 bp, Homo sapien
ctgggccgctgcaggtgagggaacg

SEQ ID NO: 328814 - DNA, 25 bp, Homo sapien
ggagagttgaaaatggccttcttag

SEQ ID NO: 328815 - DNA, 25 bp, Homo sapien
tgaaaatggccttcttagcaaacca

SEQ ID NO: 328816 - DNA, 25 bp, Homo sapien
aagcctccagtggagagttgaaaat

SEQ ID NO: 328817 - DNA, 25 bp, Homo sapien
aaaagcctccagtggagagttgaaa

SEQ ID NO: 328818 - DNA, 25 bp, Homo sapien
caggttcatcagagctggtcccaaa

SEQ ID NO: 328819 - DNA, 25 bp, Homo sapien
catcacttgcaactcagtgtacaca

SEQ ID NO: 328820 - DNA, 25 bp, Homo sapien
tcagtgtacacaggttcatcagagc

SEQ ID NO: 328821 - DNA, 25 bp, Homo sapien
agagctggtcccaaaagcaagtcca

SEQ ID NO: 328822 - DNA, 25 bp, Homo sapien
gagcacgttttcaccgagctgagta

SEQ ID NO: 328823 - DNA, 25 bp, Homo sapien
tctcctacagggcaggcttggtact

SEQ ID NO: 328824 - DNA, 25 bp, Homo sapien
ccacctcggatggagaaaaacttca

SEQ ID NO: 328825 - DNA, 25 bp, Homo sapien
ggcgcagttgctcaaccagcagaga

SEQ ID NO: 328826 - DNA, 25 bp, Homo sapien
cttgaggtaaccagcagaagggccc

SEQ ID NO: 328827 - DNA, 25 bp, Homo sapien
taggcaaggtcagagttccttcacc

SEQ ID NO: 328828 - DNA, 25 bp, Homo sapien
tctttcagggcaggcacccgaggtg

SEQ ID NO: 328829 - DNA, 25 bp, Homo sapien
tggcacactgcagtagcatcagaga

SEQ ID NO: 328830 - DNA, 25 bp, Homo sapien
gcacagcagattgggccactagatt

SEQ ID NO: 328831 - DNA, 25 bp, Homo sapien
tcttgatacactcaaccagctcaac

SEQ ID NO: 328832 - DNA, 25 bp, Homo sapien
cagttaaactgtgctacatccatct

SEQ ID NO: 328833 - DNA, 25 bp, Homo sapien
gaatagcactcagccatccaaagga

SEQ ID NO: 328834 - DNA, 25 bp, Homo sapien
caccttgtgcaggagtgatacaaac

SEQ ID NO: 328835 - DNA, 25 bp, Homo sapien
caaacaagtcatcttgagtccccac

SEQ ID NO: 328836 - DNA, 25 bp, Homo sapien
gaggaggagatcttcaatttgcata

SEQ ID NO: 328837 - DNA, 25 bp, Homo sapien
agttgtgggtcttggaactctcaag

SEQ ID NO: 328838 - DNA, 25 bp, Homo sapien
cacagggcaagtccagagacatgat

SEQ ID NO: 328839 - DNA, 25 bp, Homo sapien
tatcctgaaggtattgctcccagat

SEQ ID NO: 328840 - DNA, 25 bp, Homo sapien
catgtaattgaccagggatgacaag

SEQ ID NO: 328841 - DNA, 25 bp, Homo sapien
gacaagtgggtcctctcagtggaca

SEQ ID NO: 328842 - DNA, 25 bp, Homo sapien
gaggatctggtacttcatattgtca

SEQ ID NO: 328843 - DNA, 25 bp, Homo sapien
ggatctggtacttcatattgtcaca

SEQ ID NO: 328844 - DNA, 25 bp, Homo sapien
aggatctggtacttcatattgtcac

SEQ ID NO: 328845 - DNA, 25 bp, Homo sapien
ctgggggctccaacagataggcaga

SEQ ID NO: 328846 - DNA, 25 bp, Homo sapien
tctgggggctccaacagataggcag

SEQ ID NO: 328847 - DNA, 25 bp, Homo sapien
aatctgggggctccaacagataggc

SEQ ID NO: 328848 - DNA, 25 bp, Homo sapien
caaaatctgggggctccaacagata

SEQ ID NO: 328849 - DNA, 25 bp, Homo sapien
gacattggctgtctgatgcagggac

SEQ ID NO: 328850 - DNA, 25 bp, Homo sapien
gatgcagggacatccctggcacggc

SEQ ID NO: 328851 - DNA, 25 bp, Homo sapien
caaggtcaagacattggctgtctga

SEQ ID NO: 328852 - DNA, 25 bp, Homo sapien
cacttcaaggtcaagacattggctg

SEQ ID NO: 328853 - DNA, 25 bp, Homo sapien
gctgggcaccgaacatcagggtatg

SEQ ID NO: 328854 - DNA, 25 bp, Homo sapien
tagctctgttgactgtgtacatcgt

SEQ ID NO: 328855 - DNA, 25 bp, Homo sapien
tgcgtagctctgttgactgtgtaca

SEQ ID NO: 328856 - DNA, 25 bp, Homo sapien
tctgttgactgtgtacatcgtccac

SEQ ID NO: 328857 - DNA, 25 bp, Homo sapien
ctgttgactgtgtacatcgtccaca

SEQ ID NO: 328858 - DNA, 25 bp, Homo sapien
gtgtgagaagtcgatcacctcgtcc

SEQ ID NO: 328859 - DNA, 25 bp, Homo sapien
gtcgatcacctcgtcctccatgccg

SEQ ID NO: 328860 - DNA, 25 bp, Homo sapien
tgagaagtcgatcacctcgtcctcc

SEQ ID NO: 328861 - DNA, 25 bp, Homo sapien
ctcgtcctccatgccgtggatgatg

SEQ ID NO: 328862 - DNA, 25 bp, Homo sapien
ctcgatgttagggaaggcgtcgaag

SEQ ID NO: 328863 - DNA, 25 bp, Homo sapien
cgaagcagtaggtcttggtgtcggg

SEQ ID NO: 328864 - DNA, 25 bp, Homo sapien
cagtaggtcttggtgtcggggaagg

SEQ ID NO: 328865 - DNA, 25 bp, Homo sapien
cgtcgaagcagtaggtcttggtgtc

SEQ ID NO: 328866 - DNA, 25 bp, Homo sapien
gcaccaccgcggcacactcgtagcg

SEQ ID NO: 328867 - DNA, 25 bp, Homo sapien
accaccgcggcacactcgtagcgcg

SEQ ID NO: 328868 - DNA, 25 bp, Homo sapien
accgcggcacactcgtagcgcgagg

SEQ ID NO: 328869 - DNA, 25 bp, Homo sapien
gcgcatgcccgaggtgagcggcgag

SEQ ID NO: 328870 - DNA, 25 bp, Homo sapien
tcagctaagtcagtgggtcagaccc

SEQ ID NO: 328871 - DNA, 25 bp, Homo sapien
tgtgtgccccctacattctgaatgc

SEQ ID NO: 328872 - DNA, 25 bp, Homo sapien
gcagggaccgcctgcaatatcacca

SEQ ID NO: 328873 - DNA, 25 bp, Homo sapien
aggaacgggacacatccccagtgga

SEQ ID NO: 328874 - DNA, 25 bp, Homo sapien
tcgcgctggctgtactggaagtcgg

SEQ ID NO: 328875 - DNA, 25 bp, Homo sapien
cgcagcgaacatacatgcaggagac

SEQ ID NO: 328876 - DNA, 25 bp, Homo sapien
atggtgtccagctcgcgctggctgt

SEQ ID NO: 328877 - DNA, 25 bp, Homo sapien
cacgcagcgaacatacatgcaggag

SEQ ID NO: 328878 - DNA, 25 bp, Homo sapien
cttccagcgcccgaggaggcccgca

SEQ ID NO: 328879 - DNA, 25 bp, Homo sapien
tccagcgcccgaggaggcccgcagg

SEQ ID NO: 328880 - DNA, 25 bp, Homo sapien
cagcgcccgaggaggcccgcagggt

SEQ ID NO: 328881 - DNA, 25 bp, Homo sapien
agcgcccgaggaggcccgcagggtc

SEQ ID NO: 328882 - DNA, 25 bp, Homo sapien
ggccccaccaggcccgggctcaggc

SEQ ID NO: 328883 - DNA, 25 bp, Homo sapien
gccccaccaggcccgggctcaggca

SEQ ID NO: 328884 - DNA, 25 bp, Homo sapien
ccccaccaggcccgggctcaggcac

SEQ ID NO: 328885 - DNA, 25 bp, Homo sapien
ccggccccaccaggcccgggctcag

SEQ ID NO: 328886 - DNA, 25 bp, Homo sapien
cttggcagcgatgcggccggggcag

SEQ ID NO: 328887 - DNA, 25 bp, Homo sapien
gagcttggcagcgatgcggccgggg

SEQ ID NO: 328888 - DNA, 25 bp, Homo sapien
gcgagcttggcagcgatgcggccgg

SEQ ID NO: 328889 - DNA, 25 bp, Homo sapien
gcttggcagcgatgcggccggggca

SEQ ID NO: 328890 - DNA, 25 bp, Homo sapien
gcccagccccatcgcggtccaagcc

SEQ ID NO: 328891 - DNA, 25 bp, Homo sapien
gccccagggagcctcgcaaccacag

SEQ ID NO: 328892 - DNA, 25 bp, Homo sapien
agggagcctcgcaaccacaggtctc

SEQ ID NO: 328893 - DNA, 25 bp, Homo sapien
ggggtgctccgagtcgcgggcaggg

SEQ ID NO: 328894 - DNA, 25 bp, Homo sapien
cgctggcagggctgatctgaagact

SEQ ID NO: 328895 - DNA, 25 bp, Homo sapien
ttttatactccactctgcaagcgcc

SEQ ID NO: 328896 - DNA, 25 bp, Homo sapien
tgcaagcgccagtctttatgcagag

SEQ ID NO: 328897 - DNA, 25 bp, Homo sapien
tcactgagctagcaaggccatcaaa

SEQ ID NO: 328898 - DNA, 25 bp, Homo sapien
tcctggagaacgctgcgttccccag

SEQ ID NO: 328899 - DNA, 25 bp, Homo sapien
gtaagacgtagctgtagacccaaag

SEQ ID NO: 328900 - DNA, 25 bp, Homo sapien
agtctggaagccacgccttgtggga

SEQ ID NO: 328901 - DNA, 25 bp, Homo sapien
gtcacactggcatctaggccttcgc

SEQ ID NO: 328902 - DNA, 25 bp, Homo sapien
atggggtagcgaatggtcctgtgcc

SEQ ID NO: 328903 - DNA, 25 bp, Homo sapien
cctccacgtatcctgttctccagag

SEQ ID NO: 328904 - DNA, 25 bp, Homo sapien
gaacagcggagccaggcgcttagag

SEQ ID NO: 328905 - DNA, 25 bp, Homo sapien
agccaggcgcttagaggaagaccaa

SEQ ID NO: 328906 - DNA, 25 bp, Homo sapien
gacatcggtggagaacaggatgctc

SEQ ID NO: 328907 - DNA, 25 bp, Homo sapien
ttagacatcggtggagaacaggatg

SEQ ID NO: 328908 - DNA, 25 bp, Homo sapien
acatcggtggagaacaggatgctct

SEQ ID NO: 328909 - DNA, 25 bp, Homo sapien
tagacatcggtggagaacaggatgc

SEQ ID NO: 328910 - DNA, 25 bp, Homo sapien
ccggagcagcatggggccaaagaca

SEQ ID NO: 328911 - DNA, 25 bp, Homo sapien
gggccaaagacagtggcaaggttgt

SEQ ID NO: 328912 - DNA, 25 bp, Homo sapien
aagacagtggcaaggttgtgcaggg

SEQ ID NO: 328913 - DNA, 25 bp, Homo sapien
caaagacagtggcaaggttgtgcag

SEQ ID NO: 328914 - DNA, 25 bp, Homo sapien
ttttttctcgtttgctgttcgtcac

SEQ ID NO: 328915 - DNA, 25 bp, Homo sapien
cgtttgctgttcgtcacatatactt

SEQ ID NO: 328916 - DNA, 25 bp, Homo sapien
tctcgtttgctgttcgtcacatata

SEQ ID NO: 328917 - DNA, 25 bp, Homo sapien
tgctgttcgtcacatatactttcaa

SEQ ID NO: 328918 - DNA, 25 bp, Homo sapien
tgcagctagcttcgattgttccact

SEQ ID NO: 328919 - DNA, 25 bp, Homo sapien
gacgagtttacctacagtctcacca

SEQ ID NO: 328920 - DNA, 25 bp, Homo sapien
cataatagctctaggcataccacat

SEQ ID NO: 328921 - DNA, 25 bp, Homo sapien
caccaagcaatgaaagagcttatct

SEQ ID NO: 328922 - DNA, 25 bp, Homo sapien
ctgcatttggtattagtatttcatt

SEQ ID NO: 328923 - DNA, 25 bp, Homo sapien
gtatttcattaacctttcattgatc

SEQ ID NO: 328924 - DNA, 25 bp, Homo sapien
ttagtatttcattaacctttcattg

SEQ ID NO: 328925 - DNA, 25 bp, Homo sapien
atttcattaacctttcattgatcta

SEQ ID NO: 328926 - DNA, 25 bp, Homo sapien
gggtcttcccgtgttgcttatgctg

SEQ ID NO: 328927 - DNA, 25 bp, Homo sapien
cacactgcatgtttggtcatttcac

SEQ ID NO: 328928 - DNA, 25 bp, Homo sapien
ggtctttattcctatctgcttcaga

SEQ ID NO: 328929 - DNA, 25 bp, Homo sapien
ctgggattaggagccaccccgcttg

SEQ ID NO: 328930 - DNA, 25 bp, Homo sapien
tgtttgttaagccacaacccgtgct

SEQ ID NO: 328931 - DNA, 25 bp, Homo sapien
gggtctagtcacacaaagattttgg

SEQ ID NO: 328932 - DNA, 25 bp, Homo sapien
ggagttccagagcacagcacttcaa

SEQ ID NO: 328933 - DNA, 25 bp, Homo sapien
cctatgagtgcagccaacactgggc

SEQ ID NO: 328934 - DNA, 25 bp, Homo sapien
catggcgttaccaaggctgcgccac

SEQ ID NO: 328935 - DNA, 25 bp, Homo sapien
gctgcagtccatggcgttaccaagg

SEQ ID NO: 328936 - DNA, 25 bp, Homo sapien
agtccatggcgttaccaaggctgcg

SEQ ID NO: 328937 - DNA, 25 bp, Homo sapien
ggacagctttgagggcacatggggc

SEQ ID NO: 328938 - DNA, 25 bp, Homo sapien
attctgatagtactggatcatgtcg

SEQ ID NO: 328939 - DNA, 25 bp, Homo sapien
tgatagtactggatcatgtcgtagg

SEQ ID NO: 328940 - DNA, 25 bp, Homo sapien
atagtactggatcatgtcgtaggtc

SEQ ID NO: 328941 - DNA, 25 bp, Homo sapien
tctgatagtactggatcatgtcgta

SEQ ID NO: 328942 - DNA, 25 bp, Homo sapien
agcagaatcctcatcgcctggtgca

SEQ ID NO: 328943 - DNA, 25 bp, Homo sapien
ggatggctcacttgctgggatcgcc

SEQ ID NO: 328944 - DNA, 25 bp, Homo sapien
agccaaaccgcttccatccgtggga

SEQ ID NO: 328945 - DNA, 25 bp, Homo sapien
gaaggtacaaatgtcccaggcgtgc

SEQ ID NO: 328946 - DNA, 25 bp, Homo sapien
ctcgcgctcagtcatgttggggcta

SEQ ID NO: 328947 - DNA, 25 bp, Homo sapien
cagcctcgcgctcagtcatgttggg

SEQ ID NO: 328948 - DNA, 25 bp, Homo sapien
gcgctcagtcatgttggggctaaac

SEQ ID NO: 328949 - DNA, 25 bp, Homo sapien
gcagcctcgcgctcagtcatgttgg

SEQ ID NO: 328950 - DNA, 25 bp, Homo sapien
ggctgccatgggcagggccgtgctg

SEQ ID NO: 328951 - DNA, 25 bp, Homo sapien
acggacttcagctgagagccacgcc

SEQ ID NO: 328952 - DNA, 25 bp, Homo sapien
gggacggacttcagctgagagccac

SEQ ID NO: 328953 - DNA, 25 bp, Homo sapien
gcccagtgggaggagggtcttccat

SEQ ID NO: 328954 - DNA, 25 bp, Homo sapien
tgcagccccagaccttagggtggag

SEQ ID NO: 328955 - DNA, 25 bp, Homo sapien
tgctgtgaaggccacgcctggccta

SEQ ID NO: 328956 - DNA, 25 bp, Homo sapien
gggcccctcacagttgtggtctagg

SEQ ID NO: 328957 - DNA, 25 bp, Homo sapien
tgggttgggcgtagcatccttgaca

SEQ ID NO: 328958 - DNA, 25 bp, Homo sapien
ctggccgcgaaaacagggcaggccc

SEQ ID NO: 328959 - DNA, 25 bp, Homo sapien
tgattgtctggccgcgaaaacaggg

SEQ ID NO: 328960 - DNA, 25 bp, Homo sapien
cttgattgtctggccgcgaaaacag

SEQ ID NO: 328961 - DNA, 25 bp, Homo sapien
ttgtctggccgcgaaaacagggcag

SEQ ID NO: 328962 - DNA, 25 bp, Homo sapien
cacttggtaacccataccgcccagg

SEQ ID NO: 328963 - DNA, 25 bp, Homo sapien
tgcacttggtaacccataccgccca

SEQ ID NO: 328964 - DNA, 25 bp, Homo sapien
cttggtaacccataccgcccaggca

SEQ ID NO: 328965 - DNA, 25 bp, Homo sapien
tggtaacccataccgcccaggcaag

SEQ ID NO: 328966 - DNA, 25 bp, Homo sapien
tcaccatctcatccgtcagcttgat

SEQ ID NO: 328967 - DNA, 25 bp, Homo sapien
cgtcagcttgatgtcgggttcccag

SEQ ID NO: 328968 - DNA, 25 bp, Homo sapien
ttgccgcccggcgagctttcaaaca

SEQ ID NO: 328969 - DNA, 25 bp, Homo sapien
cacttgaagggtgtggcctccatct

SEQ ID NO: 328970 - DNA, 25 bp, Homo sapien
gctgcctgtgactgggtaggagcca

SEQ ID NO: 328971 - DNA, 25 bp, Homo sapien
gccagggcgggcaaggacaagtggt

SEQ ID NO: 328972 - DNA, 25 bp, Homo sapien
tgactgggtaggagccagggcgggc

SEQ ID NO: 328973 - DNA, 25 bp, Homo sapien
ccaaagagctgcctgtgactgggta

SEQ ID NO: 328974 - DNA, 25 bp, Homo sapien
gaacagcttggtggccgacagttcg

SEQ ID NO: 328975 - DNA, 25 bp, Homo sapien
gccgacagttcggacctcagagctg

SEQ ID NO: 328976 - DNA, 25 bp, Homo sapien
cttctgactcagagcaatggcggct

SEQ ID NO: 328977 - DNA, 25 bp, Homo sapien
aggcaccctctacagcagaacagct

SEQ ID NO: 328978 - DNA, 25 bp, Homo sapien
cttcttgtccagcataatgttgccg

SEQ ID NO: 328979 - DNA, 25 bp, Homo sapien
cataatgttgccgttgtgtctgtcc

SEQ ID NO: 328980 - DNA, 25 bp, Homo sapien
aatgttgccgttgtgtctgtccttg

SEQ ID NO: 328981 - DNA, 25 bp, Homo sapien
tgtccagcataatgttgccgttgtg

SEQ ID NO: 328982 - DNA, 25 bp, Homo sapien
ggaacagcaggaggctgtaggcggc

SEQ ID NO: 328983 - DNA, 25 bp, Homo sapien
cagcaggaacagcaggaggctgtag

SEQ ID NO: 328984 - DNA, 25 bp, Homo sapien
gcaggaacagcaggaggctgtaggc

SEQ ID NO: 328985 - DNA, 25 bp, Homo sapien
caggaacagcaggaggctgtaggcg

SEQ ID NO: 328986 - DNA, 25 bp, Homo sapien
actgcgcccggccaggtgccctggt

SEQ ID NO: 328987 - DNA, 25 bp, Homo sapien
ctgcgcccggccaggtgccctggtt

SEQ ID NO: 328988 - DNA, 25 bp, Homo sapien
aacccttaacaaaggatgactgagg

SEQ ID NO: 328989 - DNA, 25 bp, Homo sapien
ttaacccttaacaaaggatgactga

SEQ ID NO: 328990 - DNA, 25 bp, Homo sapien
taacccttaacaaaggatgactgag

SEQ ID NO: 328991 - DNA, 25 bp, Homo sapien
gcgtgtgaagtagtcgtacatgccg

SEQ ID NO: 328992 - DNA, 25 bp, Homo sapien
tgaagtagtcgtacatgccgaagtc

SEQ ID NO: 328993 - DNA, 25 bp, Homo sapien
aagtagtcgtacatgccgaagtctg

SEQ ID NO: 328994 - DNA, 25 bp, Homo sapien
tgtgaagtagtcgtacatgccgaag

SEQ ID NO: 328995 - DNA, 25 bp, Homo sapien
ggcccgctgggtgcgaggtgcccag

SEQ ID NO: 328996 - DNA, 25 bp, Homo sapien
gccagttctgaggcccgctgggtgc

SEQ ID NO: 328997 - DNA, 25 bp, Homo sapien
ttctgaggcccgctgggtgcgaggt

SEQ ID NO: 328998 - DNA, 25 bp, Homo sapien
aggcccgctgggtgcgaggtgccca

SEQ ID NO: 328999 - DNA, 25 bp, Homo sapien
tccaggccgaccagctggaagatgt

SEQ ID NO: 329000 - DNA, 25 bp, Homo sapien
gtccaggccgaccagctggaagatg

SEQ ID NO: 329001 - DNA, 25 bp, Homo sapien
ccaggccgaccagctggaagatgtt

SEQ ID NO: 329002 - DNA, 25 bp, Homo sapien
ggtccaggccgaccagctggaagat

SEQ ID NO: 329003 - DNA, 25 bp, Homo sapien
caggatgcggtcagttggcgtcctt

SEQ ID NO: 329004 - DNA, 25 bp, Homo sapien
tggacagttccctcaggtgggcact

SEQ ID NO: 329005 - DNA, 25 bp, Homo sapien
cgagcaagagtctggaaggccttcc

SEQ ID NO: 329006 - DNA, 25 bp, Homo sapien
gggtgtgtgagataaggcacccaac

SEQ ID NO: 329007 - DNA, 25 bp, Homo sapien
aggagatcttctggccgtcggcctc

SEQ ID NO: 329008 - DNA, 25 bp, Homo sapien
gctgcctgccaggagatcttctggc

SEQ ID NO: 329009 - DNA, 25 bp, Homo sapien
tgcctgccaggagatcttctggccg

SEQ ID NO: 329010 - DNA, 25 bp, Homo sapien
tgccaggagatcttctggccgtcgg

SEQ ID NO: 329011 - DNA, 25 bp, Homo sapien
cttgaacttggccagatatggggct

SEQ ID NO: 329012 - DNA, 25 bp, Homo sapien
aagttcactaactccacatcgcttc

SEQ ID NO: 329013 - DNA, 25 bp, Homo sapien
actaactccacatcgcttcaccttg

SEQ ID NO: 329014 - DNA, 25 bp, Homo sapien
accttgaacttggccagatatgggg

SEQ ID NO: 329015 - DNA, 25 bp, Homo sapien
tcagggttgctgggcaggtagcagc

SEQ ID NO: 329016 - DNA, 25 bp, Homo sapien
tgtagtcgatgtccagcacaatggc

SEQ ID NO: 329017 - DNA, 25 bp, Homo sapien
tcccagacttgtagtcgatgtccag

SEQ ID NO: 329018 - DNA, 25 bp, Homo sapien
cgatgtccagcacaatggcctcagg

SEQ ID NO: 329019 - DNA, 25 bp, Homo sapien
taacagctacaatacctaatgtcat

SEQ ID NO: 329020 - DNA, 25 bp, Homo sapien
tttttaacagctacaatacctaatg

SEQ ID NO: 329021 - DNA, 25 bp, Homo sapien
gctacaatacctaatgtcatgcctt

SEQ ID NO: 329022 - DNA, 25 bp, Homo sapien
caatacctaatgtcatgccttttct

SEQ ID NO: 329023 - DNA, 25 bp, Homo sapien
tgtgtgacctgctcctgtaatgctg

SEQ ID NO: 329024 - DNA, 25 bp, Homo sapien
tcccgctcactagcggcagattctg

SEQ ID NO: 329025 - DNA, 25 bp, Homo sapien
atgaagggcacccactgacgagcag

SEQ ID NO: 329026 - DNA, 25 bp, Homo sapien
accaggcaccgtgggcccaagcagg

SEQ ID NO: 329027 - DNA, 25 bp, Homo sapien
gccgacagacaagccttctttctct

SEQ ID NO: 329028 - DNA, 25 bp, Homo sapien
agacagggccgacagacaagccttc

SEQ ID NO: 329029 - DNA, 25 bp, Homo sapien
cagggccgacagacaagccttcttt

SEQ ID NO: 329030 - DNA, 25 bp, Homo sapien
tcacttcagacagggccgacagaca

SEQ ID NO: 329031 - DNA, 25 bp, Homo sapien
gagaaacaggaaagaaattcttgct

SEQ ID NO: 329032 - DNA, 25 bp, Homo sapien
acaggaaagaaattcttgctttgtc

SEQ ID NO: 329033 - DNA, 25 bp, Homo sapien
ggaaagaaattcttgctttgtctcc

SEQ ID NO: 329034 - DNA, 25 bp, Homo sapien
cttgctttgtctcctggaggaactg

SEQ ID NO: 329035 - DNA, 25 bp, Homo sapien
cgctggtaaaagtccttcgctgggc

SEQ ID NO: 329036 - DNA, 25 bp, Homo sapien
cccgctggtaaaagtccttcgctgg

SEQ ID NO: 329037 - DNA, 25 bp, Homo sapien
ccgctggtaaaagtccttcgctggg

SEQ ID NO: 329038 - DNA, 25 bp, Homo sapien
ggtggcatcggacagcaagttagca

SEQ ID NO: 329039 - DNA, 25 bp, Homo sapien
tctcactcgcacttgggagtgcagg

SEQ ID NO: 329040 - DNA, 25 bp, Homo sapien
actggagcagaagggtctcactcgc

SEQ ID NO: 329041 - DNA, 25 bp, Homo sapien
gcaagttagcaaaggtgtcatgaag

SEQ ID NO: 329042 - DNA, 25 bp, Homo sapien
agtgccccagcaaagggtgggagtg

SEQ ID NO: 329043 - DNA, 25 bp, Homo sapien
ctgaagacagtaagtgaggcctgtg

SEQ ID NO: 329044 - DNA, 25 bp, Homo sapien
ctgaaaggtgagaagtgccccagca

SEQ ID NO: 329045 - DNA, 25 bp, Homo sapien
actgaagacagtaagtgaggcctgt

SEQ ID NO: 329046 - DNA, 25 bp, Homo sapien
tagacgctgcccacagaatatactc

SEQ ID NO: 329047 - DNA, 25 bp, Homo sapien
cacagaatatactcccgcacatagc

SEQ ID NO: 329048 - DNA, 25 bp, Homo sapien
gataaatgttagtcttcatgttcca

SEQ ID NO: 329049 - DNA, 25 bp, Homo sapien
agaagctgggatttagacgctgccc

SEQ ID NO: 329050 - DNA, 25 bp, Homo sapien
tgtcaagtacgagaaaaagcaggct

SEQ ID NO: 329051 - DNA, 25 bp, Homo sapien
gactcccggcatttggtagaccagg

SEQ ID NO: 329052 - DNA, 25 bp, Homo sapien
gttccaaagtgacagacaggttcca

SEQ ID NO: 329053 - DNA, 25 bp, Homo sapien
ccaggattgatgttgagtccagcca

SEQ ID NO: 329054 - DNA, 25 bp, Homo sapien
tgtatatacatttgtattgccatag

SEQ ID NO: 329055 - DNA, 25 bp, Homo sapien
tgccatagtgatataaattttttta

SEQ ID NO: 329056 - DNA, 25 bp, Homo sapien
tggggaaacctcatgtctattaaat

SEQ ID NO: 329057 - DNA, 25 bp, Homo sapien
ggaaacctcatgtctattaaataca

SEQ ID NO: 329058 - DNA, 25 bp, Homo sapien
tatgtccatggatactgttacgggc

SEQ ID NO: 329059 - DNA, 25 bp, Homo sapien
tcaggcggcctttctctggtagcca

SEQ ID NO: 329060 - DNA, 25 bp, Homo sapien
gagaaggtgcctcatgacaatcctg

SEQ ID NO: 329061 - DNA, 25 bp, Homo sapien
ttctgtgccatgacctgtgctgagc

SEQ ID NO: 329062 - DNA, 25 bp, Homo sapien
ctgtgagtgaagaggacggccatgc

SEQ ID NO: 329063 - DNA, 25 bp, Homo sapien
cacaagctggtgtggaacacactct

SEQ ID NO: 329064 - DNA, 25 bp, Homo sapien
accgggcacaagctggtgtggaaca

SEQ ID NO: 329065 - DNA, 25 bp, Homo sapien
gacagaccgggcacaagctggtgtg

SEQ ID NO: 329066 - DNA, 25 bp, Homo sapien
ctgagggcctgcacaatctggggga

SEQ ID NO: 329067 - DNA, 25 bp, Homo sapien
gagggcctgcacaatctgggggatg

SEQ ID NO: 329068 - DNA, 25 bp, Homo sapien
gggcctgcacaatctgggggatgta

SEQ ID NO: 329069 - DNA, 25 bp, Homo sapien
cctgcacaatctgggggatgtagaa

SEQ ID NO: 329070 - DNA, 25 bp, Homo sapien
tgagctctggagcatcggcgtcgat

SEQ ID NO: 329071 - DNA, 25 bp, Homo sapien
tgcggcgggtacatgctggagaagt

SEQ ID NO: 329072 - DNA, 25 bp, Homo sapien
gtactgcgccgtgagagggtgcggc

SEQ ID NO: 329073 - DNA, 25 bp, Homo sapien
gcaggactttcaccccgtactgcgc

SEQ ID NO: 329074 - DNA, 25 bp, Homo sapien
tagcactgaagttgccaagcggctg

SEQ ID NO: 329075 - DNA, 25 bp, Homo sapien
gttgccaagcggctgtttttgtctc

SEQ ID NO: 329076 - DNA, 25 bp, Homo sapien
ctgaagttgccaagcggctgttttt

SEQ ID NO: 329077 - DNA, 25 bp, Homo sapien
ttgccaagcggctgtttttgtctca

SEQ ID NO: 329078 - DNA, 25 bp, Homo sapien
caaccgaacgagacgggtcacttcg

SEQ ID NO: 329079 - DNA, 25 bp, Homo sapien
ggcacatcactaacggctcccgggt

SEQ ID NO: 329080 - DNA, 25 bp, Homo sapien
tgcttcaggcacatcactaacggct

SEQ ID NO: 329081 - DNA, 25 bp, Homo sapien
ttcgttcccaatggcttctgtgttc

SEQ ID NO: 329082 - DNA, 25 bp, Homo sapien
gctccaggcgaggttcacgttgtcc

SEQ ID NO: 329083 - DNA, 25 bp, Homo sapien
gatgtacttagatctccagttggcc

SEQ ID NO: 329084 - DNA, 25 bp, Homo sapien
tctccggcctggtctagttccagtt

SEQ ID NO: 329085 - DNA, 25 bp, Homo sapien
taccatgtgatgagacgctcgatct

SEQ ID NO: 329086 - DNA, 25 bp, Homo sapien
cagcagcagcgtcctgcgcttcatg

SEQ ID NO: 329087 - DNA, 25 bp, Homo sapien
gcgtcctgcgcttcatgtagtattt

SEQ ID NO: 329088 - DNA, 25 bp, Homo sapien
cctgcgcttcatgtagtatttgtgc

SEQ ID NO: 329089 - DNA, 25 bp, Homo sapien
cagcagcgtcctgcgcttcatgtag

SEQ ID NO: 329090 - DNA, 25 bp, Homo sapien
agccttgggtggcttgttgccgaga

SEQ ID NO: 329091 - DNA, 25 bp, Homo sapien
gccgacagttatgtccaggttgctc

SEQ ID NO: 329092 - DNA, 25 bp, Homo sapien
agatggtggacatgccgctggacag

SEQ ID NO: 329093 - DNA, 25 bp, Homo sapien
ttgccgagagccgacagttatgtcc

SEQ ID NO: 329094 - DNA, 25 bp, Homo sapien
aacaagctggctggcggtcaggtac

SEQ ID NO: 329095 - DNA, 25 bp, Homo sapien
tcttatctgagaacatggcggtcca

SEQ ID NO: 329096 - DNA, 25 bp, Homo sapien
cggtccaaaatttaatcatgatgct

SEQ ID NO: 329097 - DNA, 25 bp, Homo sapien
tgatgcttatgtcttcacgcagccg

SEQ ID NO: 329098 - DNA, 25 bp, Homo sapien
catttggaaccacatcggcatgcag

SEQ ID NO: 329099 - DNA, 25 bp, Homo sapien
gatcttctcgcgaagcacattgcgg

SEQ ID NO: 329100 - DNA, 25 bp, Homo sapien
gtcaaaggcagtggagtagatcttc

SEQ ID NO: 329101 - DNA, 25 bp, Homo sapien
gcacattgcggatggttgcatttgg

SEQ ID NO: 329102 - DNA, 25 bp, Homo sapien
gagctgcagtacttggcgatctcaa

SEQ ID NO: 329103 - DNA, 25 bp, Homo sapien
tgccggttcatgctccccttggccc

SEQ ID NO: 329104 - DNA, 25 bp, Homo sapien
tccacttggtcagagctgcagtact

SEQ ID NO: 329105 - DNA, 25 bp, Homo sapien
ggcgatctcaaaccgctgcaccagg

SEQ ID NO: 329106 - DNA, 25 bp, Homo sapien
gccgaaggccttgggctcggctacc

SEQ ID NO: 329107 - DNA, 25 bp, Homo sapien
ccgagcttgccgaaggccttgggct

SEQ ID NO: 329108 - DNA, 25 bp, Homo sapien
ctgactggccgagcttgccgaaggc

SEQ ID NO: 329109 - DNA, 25 bp, Homo sapien
ttctgggctgactggccgagcttgc

SEQ ID NO: 329110 - DNA, 25 bp, Homo sapien
cctttatctcagcagaaaacaggcc

SEQ ID NO: 329111 - DNA, 25 bp, Homo sapien
ccagggggtctgcttcctttatctc

SEQ ID NO: 329112 - DNA, 25 bp, Homo sapien
tgggttgacttgcttccgaggcagc

SEQ ID NO: 329113 - DNA, 25 bp, Homo sapien
tccagatgtagtggggggtcacttc

SEQ ID NO: 329114 - DNA, 25 bp, Homo sapien
tgttcaacccggttcaccgtgtgga

SEQ ID NO: 329115 - DNA, 25 bp, Homo sapien
ctgtgagcgggaagacccctctgtg

SEQ ID NO: 329116 - DNA, 25 bp, Homo sapien
tataaccctgataaccctctgtggc

SEQ ID NO: 329117 - DNA, 25 bp, Homo sapien
ggcagcacccgggatgtacctgatg

SEQ ID NO: 329118 - DNA, 25 bp, Homo sapien
tacaagggctccaagcgcctgtgca

SEQ ID NO: 329119 - DNA, 25 bp, Homo sapien
tctggccaaagaggattctatccct

SEQ ID NO: 329120 - DNA, 25 bp, Homo sapien
tggaaagcccccatgatttctgggt

SEQ ID NO: 329121 - DNA, 25 bp, Homo sapien
caccagcttctacaagggctccaag

SEQ ID NO: 329122 - DNA, 25 bp, Homo sapien
atgagagggacctcgctgacatcta

SEQ ID NO: 329123 - DNA, 25 bp, Homo sapien
agtgatgagagggacctcgctgaca

SEQ ID NO: 329124 - DNA, 25 bp, Homo sapien
tgatgagagggacctcgctgacatc

SEQ ID NO: 329125 - DNA, 25 bp, Homo sapien
acagtgatgagagggacctcgctga

SEQ ID NO: 329126 - DNA, 25 bp, Homo sapien
cagttactagtgcagcccacatgca

SEQ ID NO: 329127 - DNA, 25 bp, Homo sapien
tcagtgaaatgaaggtcccagaccc

SEQ ID NO: 329128 - DNA, 25 bp, Homo sapien
tgaggacctgaatgaccacgtgctg

SEQ ID NO: 329129 - DNA, 25 bp, Homo sapien
cagcaggaccagagcaagttatcag

SEQ ID NO: 329130 - DNA, 25 bp, Homo sapien
gccccgcccaggaatcagagccctg

SEQ ID NO: 329131 - DNA, 25 bp, Homo sapien
gcaggctgaagcgtgacttccacag

SEQ ID NO: 329132 - DNA, 25 bp, Homo sapien
ggctgaagcgtgacttccacaggcc

SEQ ID NO: 329133 - DNA, 25 bp, Homo sapien
gctcttgtaatgatgtccaccatgc

SEQ ID NO: 329134 - DNA, 25 bp, Homo sapien
cagctgaaacgtgagtataaacttc

SEQ ID NO: 329135 - DNA, 25 bp, Homo sapien
ggctgatcccaagattaggtcaaga

SEQ ID NO: 329136 - DNA, 25 bp, Homo sapien
gttaacaggtgttcaaaaagctgga

SEQ ID NO: 329137 - DNA, 25 bp, Homo sapien
gggagataacggcttctaggcacca

SEQ ID NO: 329138 - DNA, 25 bp, Homo sapien
ctcactgccaacccgaggtcagggt

SEQ ID NO: 329139 - DNA, 25 bp, Homo sapien
tcactgccaacccgaggtcagggtc

SEQ ID NO: 329140 - DNA, 25 bp, Homo sapien
cactgccaacccgaggtcagggtcc

SEQ ID NO: 329141 - DNA, 25 bp, Homo sapien
gccatgctcattgaacatccggagg

SEQ ID NO: 329142 - DNA, 25 bp, Homo sapien
gggaccccagcacagatgatgaagg

SEQ ID NO: 329143 - DNA, 25 bp, Homo sapien
ctcattgaacatccggaggggaccc

SEQ ID NO: 329144 - DNA, 25 bp, Homo sapien
aggccagggccgtctccatgccatg

SEQ ID NO: 329145 - DNA, 25 bp, Homo sapien
taaagctgaatgtagatcctggacc

SEQ ID NO: 329146 - DNA, 25 bp, Homo sapien
cagcttgaacatggcctgcgtgtag

SEQ ID NO: 329147 - DNA, 25 bp, Homo sapien
tactgctaatgagcattgcggtcag

SEQ ID NO: 329148 - DNA, 25 bp, Homo sapien
aggatgactgcggtctaaagctgaa

SEQ ID NO: 329149 - DNA, 25 bp, Homo sapien
aatgcatgttggcagtgccaccact

SEQ ID NO: 329150 - DNA, 25 bp, Homo sapien
cactgcagatgttccccaagggtgg

SEQ ID NO: 329151 - DNA, 25 bp, Homo sapien
gactcaaacaacaatatcagcctca

SEQ ID NO: 329152 - DNA, 25 bp, Homo sapien
ggactgcatgaatgtgagctggata

SEQ ID NO: 329153 - DNA, 25 bp, Homo sapien
agaaatggtatagattagcttctga

SEQ ID NO: 329154 - DNA, 25 bp, Homo sapien
aaaagaaatggtatagattagcttc

SEQ ID NO: 329155 - DNA, 25 bp, Homo sapien
caaacaaaaagaaatggtatagatt

SEQ ID NO: 329156 - DNA, 25 bp, Homo sapien
aacaaaaagaaatggtatagattag

SEQ ID NO: 329157 - DNA, 25 bp, Homo sapien
ccgggcgctcgctcagctgagttgc

SEQ ID NO: 329158 - DNA, 25 bp, Homo sapien
ccgcgtagcggttgcgcagattcag

SEQ ID NO: 329159 - DNA, 25 bp, Homo sapien
acaggccgggcgctcgctcagctga

SEQ ID NO: 329160 - DNA, 25 bp, Homo sapien
ctcgcccgcgtagcggttgcgcaga

SEQ ID NO: 329161 - DNA, 25 bp, Homo sapien
cacgttcaacgtaatgacacacaca

SEQ ID NO: 329162 - DNA, 25 bp, Homo sapien
gagcttggctctgatactaatcagc

SEQ ID NO: 329163 - DNA, 25 bp, Homo sapien
taaagtgggcataaccctctcacaa

SEQ ID NO: 329164 - DNA, 25 bp, Homo sapien
gaaacaatgcggtctttggcaccaa

SEQ ID NO: 329165 - DNA, 25 bp, Homo sapien
cctatggtctaaggggtcactgctc

SEQ ID NO: 329166 - DNA, 25 bp, Homo sapien
tgcactgtggctcctatggtctaag

SEQ ID NO: 329167 - DNA, 25 bp, Homo sapien
gccgagctctaagccttcccctgca

SEQ ID NO: 329168 - DNA, 25 bp, Homo sapien
agccgagctctaagccttcccctgc

SEQ ID NO: 329169 - DNA, 25 bp, Homo sapien
cccaagagttgtgttctgcttgttg

SEQ ID NO: 329170 - DNA, 25 bp, Homo sapien
tgctgggacagtcccgatacccagt

SEQ ID NO: 329171 - DNA, 25 bp, Homo sapien
tctgcttgttgtagccagcaaagtg

SEQ ID NO: 329172 - DNA, 25 bp, Homo sapien
aaagtgaaggatgctctcagtggcc

SEQ ID NO: 329173 - DNA, 25 bp, Homo sapien
acagcgtgcagcgaagtccttcaca

SEQ ID NO: 329174 - DNA, 25 bp, Homo sapien
gcgtgcagcgaagtccttcacaatg

SEQ ID NO: 329175 - DNA, 25 bp, Homo sapien
ctgcaggtgggacttggtgacggta

SEQ ID NO: 329176 - DNA, 25 bp, Homo sapien
ggtgacggtaggtgcccacttcatg

SEQ ID NO: 329177 - DNA, 25 bp, Homo sapien
ctcacgggcttcgtacgtgtcagga

SEQ ID NO: 329178 - DNA, 25 bp, Homo sapien
tacgtgtcaggaaccgtgatccggt

SEQ ID NO: 329179 - DNA, 25 bp, Homo sapien
gggatgtcatagtaaggctgatcct

SEQ ID NO: 329180 - DNA, 25 bp, Homo sapien
gatgtcatagtaaggctgatccttg

SEQ ID NO: 329181 - DNA, 25 bp, Homo sapien
acagtcccgctccagagcaagtggg

SEQ ID NO: 329182 - DNA, 25 bp, Homo sapien
cttcagcacagtcccgctccagagc

SEQ ID NO: 329183 - DNA, 25 bp, Homo sapien
cagcacagtcccgctccagagcaag

SEQ ID NO: 329184 - DNA, 25 bp, Homo sapien
agcacagtcccgctccagagcaagt

SEQ ID NO: 329185 - DNA, 25 bp, Homo sapien
tggatgtggttgaagttcaccaaca

SEQ ID NO: 329186 - DNA, 25 bp, Homo sapien
cctccttatcctcttgtggatgtgg

SEQ ID NO: 329187 - DNA, 25 bp, Homo sapien
cttgtggatgtggttgaagttcacc

SEQ ID NO: 329188 - DNA, 25 bp, Homo sapien
ttgtctgccaccctccttatcctct

SEQ ID NO: 329189 - DNA, 25 bp, Homo sapien
gaaggcatcgaatactttgtccgcg

SEQ ID NO: 329190 - DNA, 25 bp, Homo sapien
tttgtccgcgactgcaatcacacac

SEQ ID NO: 329191 - DNA, 25 bp, Homo sapien
tgttcaggaaggcatcgaatacttt

SEQ ID NO: 329192 - DNA, 25 bp, Homo sapien
tcgaatactttgtccgcgactgcaa

SEQ ID NO: 329193 - DNA, 25 bp, Homo sapien
caccggatatgctcattgttacaga

SEQ ID NO: 329194 - DNA, 25 bp, Homo sapien
cagaggtgccaagtaggctgtaaaa

SEQ ID NO: 329195 - DNA, 25 bp, Homo sapien
caagatctgagcaccggatatgctc

SEQ ID NO: 329196 - DNA, 25 bp, Homo sapien
tatgctcattgttacagaggtgcca

SEQ ID NO: 329197 - DNA, 25 bp, Homo sapien
tatctgttataagggtaagtgggac

SEQ ID NO: 329198 - DNA, 25 bp, Homo sapien
gacagagcgacacactgtcacataa

SEQ ID NO: 329199 - DNA, 25 bp, Homo sapien
taagtgggaccgcagcaatttgaaa

SEQ ID NO: 329200 - DNA, 25 bp, Homo sapien
caaggcaggtgctatcagcttggca

SEQ ID NO: 329201 - DNA, 25 bp, Homo sapien
gattactggtgaactgactcacagg

SEQ ID NO: 329202 - DNA, 25 bp, Homo sapien
aacctccgacgggttgcattcccag

SEQ ID NO: 329203 - DNA, 25 bp, Homo sapien
ggctcatcttatacctgcagagagg

SEQ ID NO: 329204 - DNA, 25 bp, Homo sapien
tcatataccctctcctcctggtagg

SEQ ID NO: 329205 - DNA, 25 bp, Homo sapien
gctggcaaaatctgctaggttctcc

SEQ ID NO: 329206 - DNA, 25 bp, Homo sapien
tatgaatattctctagaaggctggc

SEQ ID NO: 329207 - DNA, 25 bp, Homo sapien
cttgtctgaataatgtgctaggtgc

SEQ ID NO: 329208 - DNA, 25 bp, Homo sapien
tcttctagaggttggcagtttcaat

SEQ ID NO: 329209 - DNA, 25 bp, Homo sapien
gacacccctggtctagcacaaaact

SEQ ID NO: 329210 - DNA, 25 bp, Homo sapien
cacccctggtctagcacaaaactta

SEQ ID NO: 329211 - DNA, 25 bp, Homo sapien
acccctggtctagcacaaaacttag

SEQ ID NO: 329212 - DNA, 25 bp, Homo sapien
tggacacccctggtctagcacaaaa

SEQ ID NO: 329213 - DNA, 25 bp, Homo sapien
tacccaaacaatctagaggacactt

SEQ ID NO: 329214 - DNA, 25 bp, Homo sapien
gccaaaaagtgcttatacgcagcat

SEQ ID NO: 329215 - DNA, 25 bp, Homo sapien
taacaactgtacacactcacgggac

SEQ ID NO: 329216 - DNA, 25 bp, Homo sapien
caaaggcttctggtgcggaaaggac

SEQ ID NO: 329217 - DNA, 25 bp, Homo sapien
tttctgaatagctttatcctcaaag

SEQ ID NO: 329218 - DNA, 25 bp, Homo sapien
tcctcaaagtagcagaacattacct

SEQ ID NO: 329219 - DNA, 25 bp, Homo sapien
gaacattacctggaagcgatcagga

SEQ ID NO: 329220 - DNA, 25 bp, Homo sapien
cctggaagcgatcaggatctgttga

SEQ ID NO: 329221 - DNA, 25 bp, Homo sapien
gaaaaagcgcatgcacttgtcccat

SEQ ID NO: 329222 - DNA, 25 bp, Homo sapien
taacagagtgctctcaagggcctgg

SEQ ID NO: 329223 - DNA, 25 bp, Homo sapien
tctgccagttaagagcccgtcctga

SEQ ID NO: 329224 - DNA, 25 bp, Homo sapien
gactttcagcacacgcattcgagtg

SEQ ID NO: 329225 - DNA, 25 bp, Homo sapien
catgcaggactgttttggagccggc

SEQ ID NO: 329226 - DNA, 25 bp, Homo sapien
tgcatccctcccgacttaagctgag

SEQ ID NO: 329227 - DNA, 25 bp, Homo sapien
taccactgttaggactgctgtggcc

SEQ ID NO: 329228 - DNA, 25 bp, Homo sapien
cacatttggctgtgtgtggagcccc

SEQ ID NO: 329229 - DNA, 25 bp, Homo sapien
tctcatgcttacgagggcacaaaaa

SEQ ID NO: 329230 - DNA, 25 bp, Homo sapien
agttgaaaaaagtctcatgcttacg

SEQ ID NO: 329231 - DNA, 25 bp, Homo sapien
gcatgtcttgggagaagttgaaaaa

SEQ ID NO: 329232 - DNA, 25 bp, Homo sapien
tttcagaaagtttgcatgtcttggg

SEQ ID NO: 329233 - DNA, 25 bp, Homo sapien
catggcgaagtccagcttgttgatg

SEQ ID NO: 329234 - DNA, 25 bp, Homo sapien
tccagccggtacacagagaggaggt

SEQ ID NO: 329235 - DNA, 25 bp, Homo sapien
gatagtgctgcggagctcactcagc

SEQ ID NO: 329236 - DNA, 25 bp, Homo sapien
ttgttgatgagtgcggacacctcgg

SEQ ID NO: 329237 - DNA, 25 bp, Homo sapien
catggctgagttatactggaggacg

SEQ ID NO: 329238 - DNA, 25 bp, Homo sapien
tagtggctatttcacagaccccctc

SEQ ID NO: 329239 - DNA, 25 bp, Homo sapien
aggacggaccgcagtggctccttgc

SEQ ID NO: 329240 - DNA, 25 bp, Homo sapien
ggtgaccgtgtcattcttcatggct

SEQ ID NO: 329241 - DNA, 25 bp, Homo sapien
gaagagcttctgtaaccgaggctta

SEQ ID NO: 329242 - DNA, 25 bp, Homo sapien
ccgaggcttagcttctttgatgggt

SEQ ID NO: 329243 - DNA, 25 bp, Homo sapien
tcagaacggaatacagccagaagtc

SEQ ID NO: 329244 - DNA, 25 bp, Homo sapien
tgatgggtggcagtcgtcgggtgag

SEQ ID NO: 329245 - DNA, 25 bp, Homo sapien
tctgaataccgggataaaacatgca

SEQ ID NO: 329246 - DNA, 25 bp, Homo sapien
aaacatgcatgtctttactctgcca

SEQ ID NO: 329247 - DNA, 25 bp, Homo sapien
tatcagataatgtgggaacagggta

SEQ ID NO: 329248 - DNA, 25 bp, Homo sapien
ggatttaatcacaacctagtgatag

SEQ ID NO: 329249 - DNA, 25 bp, Homo sapien
gacccaaggaatgggactggcactg

SEQ ID NO: 329250 - DNA, 25 bp, Homo sapien
gacgacgactatctggacctggaga

SEQ ID NO: 329251 - DNA, 25 bp, Homo sapien
tatgagtcccacatcaaaggttggg

SEQ ID NO: 329252 - DNA, 25 bp, Homo sapien
ttcctcatcataacatctgcgtggg

SEQ ID NO: 329253 - DNA, 25 bp, Homo sapien
ttaagaactaatgctgtgagggcct

SEQ ID NO: 329254 - DNA, 25 bp, Homo sapien
aattcgaggcccatatgagaggagc

SEQ ID NO: 329255 - DNA, 25 bp, Homo sapien
tctgctgttacctagagggtctcac

SEQ ID NO: 329256 - DNA, 25 bp, Homo sapien
tgctgtaagctcatagaagtcactg

SEQ ID NO: 329257 - DNA, 25 bp, Homo sapien
tacgctaccaatctgaattcgaggc

SEQ ID NO: 329258 - DNA, 25 bp, Homo sapien
cacctgaggaatatgtttctggatc

SEQ ID NO: 329259 - DNA, 25 bp, Homo sapien
tcctgcagtgggtctggtttgacag

SEQ ID NO: 329260 - DNA, 25 bp, Homo sapien
cctgaggaatatgtttctggatcct

SEQ ID NO: 329261 - DNA, 25 bp, Homo sapien
tggtttgacagagcagatgacacct

SEQ ID NO: 329262 - DNA, 25 bp, Homo sapien
ctgctacagccggtgtggagtcctc

SEQ ID NO: 329263 - DNA, 25 bp, Homo sapien
tgaccccatgagaccaataccagta

SEQ ID NO: 329264 - DNA, 25 bp, Homo sapien
tggagtcctccacactcttgagcat

SEQ ID NO: 329265 - DNA, 25 bp, Homo sapien
catgtctgtcccatacccagaaagg

SEQ ID NO: 329266 - DNA, 25 bp, Homo sapien
tgcattagggccaaaacccaggctt

SEQ ID NO: 329267 - DNA, 25 bp, Homo sapien
gattgtatgacccagcttcctagca

SEQ ID NO: 329268 - DNA, 25 bp, Homo sapien
caaagatcaccaaatctagccagga

SEQ ID NO: 329269 - DNA, 25 bp, Homo sapien
cacaaagttgcggtacaaagatcac

SEQ ID NO: 329270 - DNA, 25 bp, Homo sapien
ggaatgagtactcccaagttccctg

SEQ ID NO: 329271 - DNA, 25 bp, Homo sapien
caggaatgagtactcccaagttccc

SEQ ID NO: 329272 - DNA, 25 bp, Homo sapien
aatgagtactcccaagttccctgca

SEQ ID NO: 329273 - DNA, 25 bp, Homo sapien
tacaggaatgagtactcccaagttc

SEQ ID NO: 329274 - DNA, 25 bp, Homo sapien
cgatgttggccagggcattaatcac

SEQ ID NO: 329275 - DNA, 25 bp, Homo sapien
gtcttggatgttggccgcgatgttg

SEQ ID NO: 329276 - DNA, 25 bp, Homo sapien
agccccagctgcacaaacaactcca

SEQ ID NO: 329277 - DNA, 25 bp, Homo sapien
ggcagggcccttctcgcttgccctc

SEQ ID NO: 329278 - DNA, 25 bp, Homo sapien
agtaagttaaatactgtcatgataa

SEQ ID NO: 329279 - DNA, 25 bp, Homo sapien
gtaagttaaatactgtcatgataaa

SEQ ID NO: 329280 - DNA, 25 bp, Homo sapien
ttggtggctgagtatacaacggagc

SEQ ID NO: 329281 - DNA, 25 bp, Homo sapien
ggttccacacttcctgatagatgta

SEQ ID NO: 329282 - DNA, 25 bp, Homo sapien
ctatagccgtggtccttgtaatctt

SEQ ID NO: 329283 - DNA, 25 bp, Homo sapien
acggagctggccttcacactgatct

SEQ ID NO: 329284 - DNA, 25 bp, Homo sapien
tatagtcaagagtttaacgtagctt

SEQ ID NO: 329285 - DNA, 25 bp, Homo sapien
aacgtagcttgcacagggttagtgg

SEQ ID NO: 329286 - DNA, 25 bp, Homo sapien
gagtttaacgtagcttgcacagggt

SEQ ID NO: 329287 - DNA, 25 bp, Homo sapien
ttgtacatcccttatagtcaagagt

SEQ ID NO: 329288 - DNA, 25 bp, Homo sapien
gtccctcaaggccaccgcaatgtgt

SEQ ID NO: 329289 - DNA, 25 bp, Homo sapien
tttccggtgataaccaggcagccca

SEQ ID NO: 329290 - DNA, 25 bp, Homo sapien
tggtcaataatcagcacatcgaggg

SEQ ID NO: 329291 - DNA, 25 bp, Homo sapien
caatgtgtcccaaggctcggattgt

SEQ ID NO: 329292 - DNA, 25 bp, Homo sapien
ggctggccaagaacgcctccacaat

SEQ ID NO: 329293 - DNA, 25 bp, Homo sapien
aatcactgggtccaccgtcaatcca

SEQ ID NO: 329294 - DNA, 25 bp, Homo sapien
ggacaggctggccaagaacgcctcc

SEQ ID NO: 329295 - DNA, 25 bp, Homo sapien
tcgctctcctgagagatgtagagcc

SEQ ID NO: 329296 - DNA, 25 bp, Homo sapien
ggctggctcttcttacccgacatga

SEQ ID NO: 329297 - DNA, 25 bp, Homo sapien
cgttcagggttgactcggaatgctc

SEQ ID NO: 329298 - DNA, 25 bp, Homo sapien
gatgttgtcaatagcgatgtctcgg

SEQ ID NO: 329299 - DNA, 25 bp, Homo sapien
tctcggagctgctcgtacatggagg

SEQ ID NO: 329300 - DNA, 25 bp, Homo sapien
tggtacttgtagagcttcaccagaa

SEQ ID NO: 329301 - DNA, 25 bp, Homo sapien
ctgtgtggtactgactgtggtactt

SEQ ID NO: 329302 - DNA, 25 bp, Homo sapien
accagaactggggacgggatgacca

SEQ ID NO: 329303 - DNA, 25 bp, Homo sapien
gactgtggtacttgtagagcttcac

SEQ ID NO: 329304 - DNA, 25 bp, Homo sapien
accaccaccgggaacctctcgcaca

SEQ ID NO: 329305 - DNA, 25 bp, Homo sapien
tgcaccaccaccgggaacctctcgc

SEQ ID NO: 329306 - DNA, 25 bp, Homo sapien
ctcgcaaggacggtgtcacagagtg

SEQ ID NO: 329307 - DNA, 25 bp, Homo sapien
ccaccgggaacctctcgcacaggcg

SEQ ID NO: 329308 - DNA, 25 bp, Homo sapien
gcagcttctcagatagcttgatgca

SEQ ID NO: 329309 - DNA, 25 bp, Homo sapien
tctcagatagcttgatgcaaaggtt

SEQ ID NO: 329310 - DNA, 25 bp, Homo sapien
atgactttgctggacgtcttggact

SEQ ID NO: 329311 - DNA, 25 bp, Homo sapien
tttgctggacgtcttggactgcagc

SEQ ID NO: 329312 - DNA, 25 bp, Homo sapien
gtctgcgtcatgtagaatcttctgg

SEQ ID NO: 329313 - DNA, 25 bp, Homo sapien
gatctccttcacaaaagaggtcggg

SEQ ID NO: 329314 - DNA, 25 bp, Homo sapien
cattcgcctgacagcgcagtttgag

SEQ ID NO: 329315 - DNA, 25 bp, Homo sapien
ctcattgtggatccggtctgcgtca

SEQ ID NO: 329316 - DNA, 25 bp, Homo sapien
tacagagtgtcacgcagcatcttga

SEQ ID NO: 329317 - DNA, 25 bp, Homo sapien
cttcatgtagtacagagtgtcacgc

SEQ ID NO: 329318 - DNA, 25 bp, Homo sapien
agcatcttgaacatggtcaggtaga

SEQ ID NO: 329319 - DNA, 25 bp, Homo sapien
gaaggaagtgtagtagagatcagca

SEQ ID NO: 329320 - DNA, 25 bp, Homo sapien
gaaactgccctggttcaatgagaag

SEQ ID NO: 329321 - DNA, 25 bp, Homo sapien
tcacatctgcaatagctcgttggca

SEQ ID NO: 329322 - DNA, 25 bp, Homo sapien
gccaatgggcagaacgacaacctga

SEQ ID NO: 329323 - DNA, 25 bp, Homo sapien
gagagagttaaagctcaggccaatg

SEQ ID NO: 329324 - DNA, 25 bp, Homo sapien
tggcatccaaagatttgagaacagc

SEQ ID NO: 329325 - DNA, 25 bp, Homo sapien
acactggctacaatggcatccaaag

SEQ ID NO: 329326 - DNA, 25 bp, Homo sapien
caatggcatccaaagatttgagaac

SEQ ID NO: 329327 - DNA, 25 bp, Homo sapien
gcatccaaagatttgagaacagcct

SEQ ID NO: 329328 - DNA, 25 bp, Homo sapien
caggtttaagagttcccgaagcatt

SEQ ID NO: 329329 - DNA, 25 bp, Homo sapien
actccttatatgtgacaccgttgaa

SEQ ID NO: 329330 - DNA, 25 bp, Homo sapien
gagttcccgaagcatttccaatgga

SEQ ID NO: 329331 - DNA, 25 bp, Homo sapien
tccaatggaatgttaaactccttat

SEQ ID NO: 329332 - DNA, 25 bp, Homo sapien
agtgtcacgatgtctgctcaccgca

SEQ ID NO: 329333 - DNA, 25 bp, Homo sapien
cagtgtcacgatgtctgctcaccgc

SEQ ID NO: 329334 - DNA, 25 bp, Homo sapien
tgcagtgtcacgatgtctgctcacc

SEQ ID NO: 329335 - DNA, 25 bp, Homo sapien
tgtcacgatgtctgctcaccgcaac

SEQ ID NO: 329336 - DNA, 25 bp, Homo sapien
ggggcatgccgcgttcagggctgac

SEQ ID NO: 329337 - DNA, 25 bp, Homo sapien
tgggagggggcatgccgcgttcagg

SEQ ID NO: 329338 - DNA, 25 bp, Homo sapien
ttcaaagtagtgaaaggcagatcct

SEQ ID NO: 329339 - DNA, 25 bp, Homo sapien
cttcaaagtagtgaaaggcagatcc

SEQ ID NO: 329340 - DNA, 25 bp, Homo sapien
tgtaacgcccaaatgctcgcgagat

SEQ ID NO: 329341 - DNA, 25 bp, Homo sapien
agggtaccctcctgacagacagtca

SEQ ID NO: 329342 - DNA, 25 bp, Homo sapien
caggcatgggatagcatacttgcaa

SEQ ID NO: 329343 - DNA, 25 bp, Homo sapien
tcgcgagattcctatcaggcatggg

SEQ ID NO: 329344 - DNA, 25 bp, Homo sapien
gcaaaacctgcaaaagcacctctaa

SEQ ID NO: 329345 - DNA, 25 bp, Homo sapien
tccccaagaggacatgcaaaacctg

SEQ ID NO: 329346 - DNA, 25 bp, Homo sapien
ctggcacatccccaagaggacatgc

SEQ ID NO: 329347 - DNA, 25 bp, Homo sapien
gaggacatgcaaaacctgcaaaagc

SEQ ID NO: 329348 - DNA, 25 bp, Homo sapien
gaaggatccctataggccacatcag

SEQ ID NO: 329349 - DNA, 25 bp, Homo sapien
aagctctctgcaaccgggagggcac

SEQ ID NO: 329350 - DNA, 25 bp, Homo sapien
gttaccaagcagaagctgaagctct

SEQ ID NO: 329351 - DNA, 25 bp, Homo sapien
agtgaaggatccctataggccacat

SEQ ID NO: 329352 - DNA, 25 bp, Homo sapien
attgctgttgggtctccaacctcca

SEQ ID NO: 329353 - DNA, 25 bp, Homo sapien
catctcaccctttttgagcagcagc

SEQ ID NO: 329354 - DNA, 25 bp, Homo sapien
taaattctaagggtaacagtgactg

SEQ ID NO: 329355 - DNA, 25 bp, Homo sapien
cactccaggagtgagcctataaatt

SEQ ID NO: 329356 - DNA, 25 bp, Homo sapien
gctgtgctttcttctacccaataca

SEQ ID NO: 329357 - DNA, 25 bp, Homo sapien
tctacccaatacacttttggaagac

SEQ ID NO: 329358 - DNA, 25 bp, Homo sapien
tccgagctgtgctttcttctaccca

SEQ ID NO: 329359 - DNA, 25 bp, Homo sapien
ctctgcctttccgagctgtgctttc

SEQ ID NO: 329360 - DNA, 25 bp, Homo sapien
ttgagaagtcgaagaaggtaaggaa

SEQ ID NO: 329361 - DNA, 25 bp, Homo sapien
ctttgagaagtcgaagaaggtaagg

SEQ ID NO: 329362 - DNA, 25 bp, Homo sapien
tttgagaagtcgaagaaggtaagga

SEQ ID NO: 329363 - DNA, 25 bp, Homo sapien
tgagaagtcgaagaaggtaaggaac

SEQ ID NO: 329364 - DNA, 25 bp, Homo sapien
tgctgggacctgaaggaggtcaatg

SEQ ID NO: 329365 - DNA, 25 bp, Homo sapien
gggacctgaaggaggtcaatgcaca

SEQ ID NO: 329366 - DNA, 25 bp, Homo sapien
tgggacctgaaggaggtcaatgcac

SEQ ID NO: 329367 - DNA, 25 bp, Homo sapien
ctgggacctgaaggaggtcaatgca

SEQ ID NO: 329368 - DNA, 25 bp, Homo sapien
tgcccaatgcaatcactgcatctct

SEQ ID NO: 329369 - DNA, 25 bp, Homo sapien
tgcatctctccgtctttcatctaac

SEQ ID NO: 329370 - DNA, 25 bp, Homo sapien
tcccatggaaatccactggacacat

SEQ ID NO: 329371 - DNA, 25 bp, Homo sapien
tcagattcaatcagaaaaatgccca

SEQ ID NO: 329372 - DNA, 25 bp, Homo sapien
cacaactgtggcatgtagagagaca

SEQ ID NO: 329373 - DNA, 25 bp, Homo sapien
gtgtcactaaaaccatgtcagggct

SEQ ID NO: 329374 - DNA, 25 bp, Homo sapien
taaagtccacagagcagtaataggc

SEQ ID NO: 329375 - DNA, 25 bp, Homo sapien
ggctgcctgagttaccaatgtctga

SEQ ID NO: 329376 - DNA, 25 bp, Homo sapien
caggaccgtgttgaaatagaagccc

SEQ ID NO: 329377 - DNA, 25 bp, Homo sapien
gttgaaatagaagccccgcgaggcg

SEQ ID NO: 329378 - DNA, 25 bp, Homo sapien
ggccagtgacaggaccgtgttgaaa

SEQ ID NO: 329379 - DNA, 25 bp, Homo sapien
agggagcgggccagtgacaggaccg

SEQ ID NO: 329380 - DNA, 25 bp, Homo sapien
tgagtgacactatccagaaaacatc

SEQ ID NO: 329381 - DNA, 25 bp, Homo sapien
tattccagagaagaccgcagtgtgg

SEQ ID NO: 329382 - DNA, 25 bp, Homo sapien
cagacatctcttgtgaactagtgaa

SEQ ID NO: 329383 - DNA, 25 bp, Homo sapien
gaaaactagcccttgcaagatttgc

SEQ ID NO: 329384 - DNA, 25 bp, Homo sapien
tcagtgccatgaagggatccaacaa

SEQ ID NO: 329385 - DNA, 25 bp, Homo sapien
tgtgaccccactactttgaaagaga

SEQ ID NO: 329386 - DNA, 25 bp, Homo sapien
tgagctgtaatggtgcactccaacc

SEQ ID NO: 329387 - DNA, 25 bp, Homo sapien
agactttcagtccacgtcagtgcca

SEQ ID NO: 329388 - DNA, 25 bp, Homo sapien
tgacctgggtcaccctgtcagtctc

SEQ ID NO: 329389 - DNA, 25 bp, Homo sapien
aataataaaatcctcccctgctgta

SEQ ID NO: 329390 - DNA, 25 bp, Homo sapien
cccctgttaggagttggcaaagtgt

SEQ ID NO: 329391 - DNA, 25 bp, Homo sapien
gctgtaaaggtatctagtggaaggc

SEQ ID NO: 329392 - DNA, 25 bp, Homo sapien
tcgtctgacatattagagggcctcg

SEQ ID NO: 329393 - DNA, 25 bp, Homo sapien
tccgtaagctacaggacagcgagct

SEQ ID NO: 329394 - DNA, 25 bp, Homo sapien
gaaggaagacgtaacatggctccag

SEQ ID NO: 329395 - DNA, 25 bp, Homo sapien
tcatggagacaagcaaaatggtgcc

SEQ ID NO: 329396 - DNA, 25 bp, Homo sapien
ggcgcgacgctccttcgagttcggt

SEQ ID NO: 329397 - DNA, 25 bp, Homo sapien
tattgggaacaagctgggcaaaagc

SEQ ID NO: 329398 - DNA, 25 bp, Homo sapien
tcctcgaggtgtgcgagaggccctt

SEQ ID NO: 329399 - DNA, 25 bp, Homo sapien
tccgctgcggctcgggtttgcctgc

SEQ ID NO: 329400 - DNA, 25 bp, Homo sapien
gcgcctggcccataacagtttcatg

SEQ ID NO: 329401 - DNA, 25 bp, Homo sapien
gctgacaagtcttgtgttctggctc

SEQ ID NO: 329402 - DNA, 25 bp, Homo sapien
cagtttcatgaggtggtctgtctca

SEQ ID NO: 329403 - DNA, 25 bp, Homo sapien
tctcatgttgtatggctgtggtagc

SEQ ID NO: 329404 - DNA, 25 bp, Homo sapien
gccagtagtaccttgttttgccatg

SEQ ID NO: 329405 - DNA, 25 bp, Homo sapien
tgaaaagaacaaccctgaagcagag

SEQ ID NO: 329406 - DNA, 25 bp, Homo sapien
gatagtgcaaggaatgactcatgcc

SEQ ID NO: 329407 - DNA, 25 bp, Homo sapien
gaagctgctgtaactaaaggaatct

SEQ ID NO: 329408 - DNA, 25 bp, Homo sapien
gagcagtgcacatctgacccagagg

SEQ ID NO: 329409 - DNA, 25 bp, Homo sapien
gccttgttcaaggagggcacgaccc

SEQ ID NO: 329410 - DNA, 25 bp, Homo sapien
tgggaaccctgtgcaattcagtctg

SEQ ID NO: 329411 - DNA, 25 bp, Homo sapien
aagacgatgtgttgaccggctgccg

SEQ ID NO: 329412 - DNA, 25 bp, Homo sapien
caggatcgttgtccctacaggagga

SEQ ID NO: 329413 - DNA, 25 bp, Homo sapien
cctagtaactgctgtcggtgtggac

SEQ ID NO: 329414 - DNA, 25 bp, Homo sapien
tctaaaggagcagaaggacaggtct

SEQ ID NO: 329415 - DNA, 25 bp, Homo sapien
gaacagtggccttgcttcttagacg

SEQ ID NO: 329416 - DNA, 25 bp, Homo sapien
tataaaattaacagtattaaatgac

SEQ ID NO: 329417 - DNA, 25 bp, Homo sapien
tattttgtgctataaaattaacagt

SEQ ID NO: 329418 - DNA, 25 bp, Homo sapien
tttttggggatcatagcttgtttta

SEQ ID NO: 329419 - DNA, 25 bp, Homo sapien
atattcttagaatacatcgagtgtc

SEQ ID NO: 329420 - DNA, 25 bp, Homo sapien
taaaacttgcatcagccggtggtgg

SEQ ID NO: 329421 - DNA, 25 bp, Homo sapien
gagcatgaggcaatagttcccacag

SEQ ID NO: 329422 - DNA, 25 bp, Homo sapien
gagacccttagtgctgctgctgacc

SEQ ID NO: 329423 - DNA, 25 bp, Homo sapien
ggttgcaccaccacagagaacttgg

SEQ ID NO: 329424 - DNA, 25 bp, Homo sapien
gaactgtagcccatgtaccgcgtga

SEQ ID NO: 329425 - DNA, 25 bp, Homo sapien
aaagaactgggtgatctcgaccctc

SEQ ID NO: 329426 - DNA, 25 bp, Homo sapien
tgcaacgaagttgggaaccactacc

SEQ ID NO: 329427 - DNA, 25 bp, Homo sapien
gatctgattgcataggactgggcac

SEQ ID NO: 329428 - DNA, 25 bp, Homo sapien
gactggcgacatgtcctggcttacg

SEQ ID NO: 329429 - DNA, 25 bp, Homo sapien
caggactggcgacatgtcctggctt

SEQ ID NO: 329430 - DNA, 25 bp, Homo sapien
ctggcgacatgtcctggcttacggg

SEQ ID NO: 329431 - DNA, 25 bp, Homo sapien
cctgcaggactggcgacatgtcctg

SEQ ID NO: 329432 - DNA, 25 bp, Homo sapien
taattgggccaataggcacaggacc

SEQ ID NO: 329433 - DNA, 25 bp, Homo sapien
cgggctgcctctcagtcagtaagaa

SEQ ID NO: 329434 - DNA, 25 bp, Homo sapien
tctcaatccccatgtcggaggtgaa

SEQ ID NO: 329435 - DNA, 25 bp, Homo sapien
gtagcaactaattctgcgccccaag

SEQ ID NO: 329436 - DNA, 25 bp, Homo sapien
ggctaggcctccctctgaacgtgaa

SEQ ID NO: 329437 - DNA, 25 bp, Homo sapien
ggcaggtccccaggatatggctaca

SEQ ID NO: 329438 - DNA, 25 bp, Homo sapien
cgtgaatagcttggtcagtgccacc

SEQ ID NO: 329439 - DNA, 25 bp, Homo sapien
tgcaaacagcaggaggttacagccc

SEQ ID NO: 329440 - DNA, 25 bp, Homo sapien
tgctcagcgcaggtgtctaggccct

SEQ ID NO: 329441 - DNA, 25 bp, Homo sapien
ggtggacacgcatcccaactgaaca

SEQ ID NO: 329442 - DNA, 25 bp, Homo sapien
gcattgattcactgttgtgtacccc

SEQ ID NO: 329443 - DNA, 25 bp, Homo sapien
ctgggctagtcaccgtaagggatgc

SEQ ID NO: 329444 - DNA, 25 bp, Homo sapien
ccgctttattatggcacctggtggg

SEQ ID NO: 329445 - DNA, 25 bp, Homo sapien
gaatccgctttattatggcacctgg

SEQ ID NO: 329446 - DNA, 25 bp, Homo sapien
ctagaatccgctttattatggcacc

SEQ ID NO: 329447 - DNA, 25 bp, Homo sapien
tccgctttattatggcacctggtgg

SEQ ID NO: 329448 - DNA, 25 bp, Homo sapien
ctgggcagcccctcggtcagtccag

SEQ ID NO: 329449 - DNA, 25 bp, Homo sapien
ggcagcccctcggtcagtccagcag

SEQ ID NO: 329450 - DNA, 25 bp, Homo sapien
gcccctcggtcagtccagcagcccc

SEQ ID NO: 329451 - DNA, 25 bp, Homo sapien
gctgcagcttggtcagtctcaaccg

SEQ ID NO: 329452 - DNA, 25 bp, Homo sapien
tgctcagctgcatggcaaagtcctg

SEQ ID NO: 329453 - DNA, 25 bp, Homo sapien
gccgcttccagagtaaggcgctgcc

SEQ ID NO: 329454 - DNA, 25 bp, Homo sapien
ggcatcaagggctgcctcggctcgc

SEQ ID NO: 329455 - DNA, 25 bp, Homo sapien
gccaggtgggtaactgtgtcctttg

SEQ ID NO: 329456 - DNA, 25 bp, Homo sapien
gactcaaatatggtggggactgccc

SEQ ID NO: 329457 - DNA, 25 bp, Homo sapien
cctttggtcttggttgtccggcgca

SEQ ID NO: 329458 - DNA, 25 bp, Homo sapien
tgcatcgtctgagccggctgacttc

SEQ ID NO: 329459 - DNA, 25 bp, Homo sapien
tgcggggaaaagcaacccagatgag

SEQ ID NO: 329460 - DNA, 25 bp, Homo sapien
ctgcggggaaaagcaacccagatga

SEQ ID NO: 329461 - DNA, 25 bp, Homo sapien
tcctcacagtccaggtgtgtggaaa

SEQ ID NO: 329462 - DNA, 25 bp, Homo sapien
gggaacgccaagttacagctacacc

SEQ ID NO: 329463 - DNA, 25 bp, Homo sapien
acgcaggctgctcaagggacttcca

SEQ ID NO: 329464 - DNA, 25 bp, Homo sapien
ggcatcgtgcaaacaatacgtctgg

SEQ ID NO: 329465 - DNA, 25 bp, Homo sapien
tcgcctcgggttgtccttcttggga

SEQ ID NO: 329466 - DNA, 25 bp, Homo sapien
agccacaagcctcgcctcgggttgt

SEQ ID NO: 329467 - DNA, 25 bp, Homo sapien
agtcctcctcaaagtgtttggagca

SEQ ID NO: 329468 - DNA, 25 bp, Homo sapien
tcctcctcaaagtgtttggagcaga

SEQ ID NO: 329469 - DNA, 25 bp, Homo sapien
gagccacaaacccgtgagcaccagg

SEQ ID NO: 329470 - DNA, 25 bp, Homo sapien
tggagccacaaacccgtgagcacca

SEQ ID NO: 329471 - DNA, 25 bp, Homo sapien
ggagccacaaacccgtgagcaccag

SEQ ID NO: 329472 - DNA, 25 bp, Homo sapien
gccacgagacctccctgcgaccccg

SEQ ID NO: 329473 - DNA, 25 bp, Homo sapien
acgcgccgccacgagacctccctgc

SEQ ID NO: 329474 - DNA, 25 bp, Homo sapien
gggaaacgcagacccaacacgcgcc

SEQ ID NO: 329475 - DNA, 25 bp, Homo sapien
gcagacccaacacgcgccgccacga

SEQ ID NO: 329476 - DNA, 25 bp, Homo sapien
ggcgggtccaagccggctagacttc

SEQ ID NO: 329477 - DNA, 25 bp, Homo sapien
gcacagacgaggcaacggaggcctc

SEQ ID NO: 329478 - DNA, 25 bp, Homo sapien
tcagcgtcatctggcaggtaacaga

SEQ ID NO: 329479 - DNA, 25 bp, Homo sapien
tgcattcagtcccgccgggaccgtt

SEQ ID NO: 329480 - DNA, 25 bp, Homo sapien
ccgaggcgagcaacaactagcgcat

SEQ ID NO: 329481 - DNA, 25 bp, Homo sapien
gaagcctctacgcagttgcgacccg

SEQ ID NO: 329482 - DNA, 25 bp, Homo sapien
caactagcgcatgcgcacgtgagcc

SEQ ID NO: 329483 - DNA, 25 bp, Homo sapien
cctcagtatctgagaaaggcgcgaa

SEQ ID NO: 329484 - DNA, 25 bp, Homo sapien
agatgccgcggttgcgcgtctcgcg

SEQ ID NO: 329485 - DNA, 25 bp, Homo sapien
gtggaaggagatgccgcggttgcgc

SEQ ID NO: 329486 - DNA, 25 bp, Homo sapien
tgcgcgtctcgcgcgtgtcccgtgt

SEQ ID NO: 329487 - DNA, 25 bp, Homo sapien
cgcggttgcgcgtctcgcgcgtgtc

SEQ ID NO: 329488 - DNA, 25 bp, Homo sapien
agttaagtcgcaagcggctctccgg

SEQ ID NO: 329489 - DNA, 25 bp, Homo sapien
gctctccgggcatccggaggagcct

SEQ ID NO: 329490 - DNA, 25 bp, Homo sapien
tcttgacttctgtcagcggcactca

SEQ ID NO: 329491 - DNA, 25 bp, Homo sapien
tcccagccgattctcttgacttctg

SEQ ID NO: 329492 - DNA, 25 bp, Homo sapien
ttagctctcctagcgttatggtggg

SEQ ID NO: 329493 - DNA, 25 bp, Homo sapien
cagagggatggttgcctgccgcacc

SEQ ID NO: 329494 - DNA, 25 bp, Homo sapien
ccggctaatttgcaatacggaaatt

SEQ ID NO: 329495 - DNA, 25 bp, Homo sapien
taataggtaattagctctcctagcg

SEQ ID NO: 329496 - DNA, 25 bp, Homo sapien
tgcactaaggcgcacttggccgaac

SEQ ID NO: 329497 - DNA, 25 bp, Homo sapien
taaggcgcacttggccgaacttatg

SEQ ID NO: 329498 - DNA, 25 bp, Homo sapien
cgcacttggccgaacttatggtcca

SEQ ID NO: 329499 - DNA, 25 bp, Homo sapien
cagtgcactaaggcgcacttggccg

SEQ ID NO: 329500 - DNA, 25 bp, Homo sapien
tttggccaggtctcccacagggacc

SEQ ID NO: 329501 - DNA, 25 bp, Homo sapien
actttggccaggtctcccacaggga

SEQ ID NO: 329502 - DNA, 25 bp, Homo sapien
cactttggccaggtctcccacaggg

SEQ ID NO: 329503 - DNA, 25 bp, Homo sapien
tgcactttggccaggtctcccacag

SEQ ID NO: 329504 - DNA, 25 bp, Homo sapien
aaaaatcagagctgtggaccagttc

SEQ ID NO: 329505 - DNA, 25 bp, Homo sapien
tcagagatgggcagcatagaatgaa

SEQ ID NO: 329506 - DNA, 25 bp, Homo sapien
ttggcattatctgttatctatcgac

SEQ ID NO: 329507 - DNA, 25 bp, Homo sapien
cctcagaaatgggagctcattaaaa

SEQ ID NO: 329508 - DNA, 25 bp, Homo sapien
tcgcccaggttagagtgaagtacaa

SEQ ID NO: 329509 - DNA, 25 bp, Homo sapien
gagccactgaccgcacccagctttt

SEQ ID NO: 329510 - DNA, 25 bp, Homo sapien
gccactgaccgcacccagctttttt

SEQ ID NO: 329511 - DNA, 25 bp, Homo sapien
gcccaggttagagtgaagtacaatg

SEQ ID NO: 329512 - DNA, 25 bp, Homo sapien
aacatcttacatctaaggtctgtaa

SEQ ID NO: 329513 - DNA, 25 bp, Homo sapien
acatcttacatctaaggtctgtaat

SEQ ID NO: 329514 - DNA, 25 bp, Homo sapien
cttacatctaaggtctgtaatcctc

SEQ ID NO: 329515 - DNA, 25 bp, Homo sapien
tgagcctggccgattttaccctgtt

SEQ ID NO: 329516 - DNA, 25 bp, Homo sapien
taaaggagcaccaaatcatcagtct

SEQ ID NO: 329517 - DNA, 25 bp, Homo sapien
taaccatagggcacaaagttgacca

SEQ ID NO: 329518 - DNA, 25 bp, Homo sapien
caagaagttgtgtgcgttcagaggc

SEQ ID NO: 329519 - DNA, 25 bp, Homo sapien
tctaaagtgtaagatactggtaata

SEQ ID NO: 329520 - DNA, 25 bp, Homo sapien
tagtggttaaggtatgagggaacat

SEQ ID NO: 329521 - DNA, 25 bp, Homo sapien
ttattatccttgcaacctagctgac

SEQ ID NO: 329522 - DNA, 25 bp, Homo sapien
aatattgccccatgaactttaaagg

SEQ ID NO: 329523 - DNA, 25 bp, Homo sapien
ccttcaggggcagcattattctgca

SEQ ID NO: 329524 - DNA, 25 bp, Homo sapien
ctccataaaggatgcgggccttcag

SEQ ID NO: 329525 - DNA, 25 bp, Homo sapien
caggggcagcattattctgcaggtc

SEQ ID NO: 329526 - DNA, 25 bp, Homo sapien
tgtctccataaaggatgcgggcctt

SEQ ID NO: 329527 - DNA, 25 bp, Homo sapien
aatccaatcggacaccagtccacaa

SEQ ID NO: 329528 - DNA, 25 bp, Homo sapien
cttaaatccaatcggacaccagtcc

SEQ ID NO: 329529 - DNA, 25 bp, Homo sapien
ccagtccacaaactggttggtgtgc

SEQ ID NO: 329530 - DNA, 25 bp, Homo sapien
ccacaaactggttggtgtgcttgct

SEQ ID NO: 329531 - DNA, 25 bp, Homo sapien
ggcgacagccgcactgacatctttc

SEQ ID NO: 329532 - DNA, 25 bp, Homo sapien
tggcgacagccgcactgacatcttt

SEQ ID NO: 329533 - DNA, 25 bp, Homo sapien
ggtggcgacagccgcactgacatct

SEQ ID NO: 329534 - DNA, 25 bp, Homo sapien
gatggtggcgacagccgcactgaca

SEQ ID NO: 329535 - DNA, 25 bp, Homo sapien
actggcgatcttggccacggacagc

SEQ ID NO: 329536 - DNA, 25 bp, Homo sapien
ctcgaagcgggcactggcgatcttg

SEQ ID NO: 329537 - DNA, 25 bp, Homo sapien
tggctggctcgaagcgggcactggc

SEQ ID NO: 329538 - DNA, 25 bp, Homo sapien
tggccacggacagctgctcatggta

SEQ ID NO: 329539 - DNA, 25 bp, Homo sapien
tggatgtgggggtatggcaccaagt

SEQ ID NO: 329540 - DNA, 25 bp, Homo sapien
gtggatgtgggggtatggcaccaag

SEQ ID NO: 329541 - DNA, 25 bp, Homo sapien
gatgtgggggtatggcaccaagttg

SEQ ID NO: 329542 - DNA, 25 bp, Homo sapien
tgtgggggtatggcaccaagttggt

SEQ ID NO: 329543 - DNA, 25 bp, Homo sapien
ctgtcaagtacacattcagggcccc

SEQ ID NO: 329544 - DNA, 25 bp, Homo sapien
agtacacattcagggccccatcgaa

SEQ ID NO: 329545 - DNA, 25 bp, Homo sapien
gtcaagtacacattcagggccccat

SEQ ID NO: 329546 - DNA, 25 bp, Homo sapien
aagtacacattcagggccccatcga

SEQ ID NO: 329547 - DNA, 25 bp, Homo sapien
cgatctgcccagacgactgaggttg

SEQ ID NO: 329548 - DNA, 25 bp, Homo sapien
tctgcccagacgactgaggttggtg

SEQ ID NO: 329549 - DNA, 25 bp, Homo sapien
gcccagacgactgaggttggtgtac

SEQ ID NO: 329550 - DNA, 25 bp, Homo sapien
acacgatctgcccagacgactgagg

SEQ ID NO: 329551 - DNA, 25 bp, Homo sapien
gttgtgctgacatgtcataggtggc

SEQ ID NO: 329552 - DNA, 25 bp, Homo sapien
ccaggttgtgctgacatgtcatagg

SEQ ID NO: 329553 - DNA, 25 bp, Homo sapien
aggttgtgctgacatgtcataggtg

SEQ ID NO: 329554 - DNA, 25 bp, Homo sapien
tgtgctgacatgtcataggtggctt

SEQ ID NO: 329555 - DNA, 25 bp, Homo sapien
ctccgtcatggccatggagacctgg

SEQ ID NO: 329556 - DNA, 25 bp, Homo sapien
gagttgtagggctccgtcatggcca

SEQ ID NO: 329557 - DNA, 25 bp, Homo sapien
aagccaatgcccgtgggagccacac

SEQ ID NO: 329558 - DNA, 25 bp, Homo sapien
tgagagaaaccagacaacgtaagcc

SEQ ID NO: 329559 - DNA, 25 bp, Homo sapien
cagacaacgtaagccaatgcccgtg

SEQ ID NO: 329560 - DNA, 25 bp, Homo sapien
caacctccaccaagccggggccact

SEQ ID NO: 329561 - DNA, 25 bp, Homo sapien
accttcatagcaccttagcttccag

SEQ ID NO: 329562 - DNA, 25 bp, Homo sapien
gtgtctgtttgtgaaaccttcatag

SEQ ID NO: 329563 - DNA, 25 bp, Homo sapien
tgtttgtgaaaccttcatagcacct

SEQ ID NO: 329564 - DNA, 25 bp, Homo sapien
tgtgaaaccttcatagcaccttagc

SEQ ID NO: 329565 - DNA, 25 bp, Homo sapien
ggccagcaggagttcggcaaggtgc

SEQ ID NO: 329566 - DNA, 25 bp, Homo sapien
tcggcaaggtgctgggccgcctgct

SEQ ID NO: 329567 - DNA, 25 bp, Homo sapien
gacttcaggtctgtgtgggccagca

SEQ ID NO: 329568 - DNA, 25 bp, Homo sapien
gtcattcagctggttgtagctcagg

SEQ ID NO: 329569 - DNA, 25 bp, Homo sapien
actcccagctggttctccaacaggt

SEQ ID NO: 329570 - DNA, 25 bp, Homo sapien
ggcctggttcactgtgagggcggca

SEQ ID NO: 329571 - DNA, 25 bp, Homo sapien
cctggttcactgtgagggcggcaca

SEQ ID NO: 329572 - DNA, 25 bp, Homo sapien
agctggttctccaacaggtccacat

SEQ ID NO: 329573 - DNA, 25 bp, Homo sapien
agttcagccacttgacatatggatt

SEQ ID NO: 329574 - DNA, 25 bp, Homo sapien
cactgtcccaaaagttcagccactt

SEQ ID NO: 329575 - DNA, 25 bp, Homo sapien
tctgtacctgccccatagagcccac

SEQ ID NO: 329576 - DNA, 25 bp, Homo sapien
gagcccactgtcccaaaagttcagc

SEQ ID NO: 329577 - DNA, 25 bp, Homo sapien
aatgctatggatccagcaagacctc

SEQ ID NO: 329578 - DNA, 25 bp, Homo sapien
gatgggcacaatgctatggatccag

SEQ ID NO: 329579 - DNA, 25 bp, Homo sapien
gaagatgggcacaatgctatggatc

SEQ ID NO: 329580 - DNA, 25 bp, Homo sapien
ggcacaatgctatggatccagcaag

SEQ ID NO: 329581 - DNA, 25 bp, Homo sapien
ccttctcatggtaaagttcctgatg

SEQ ID NO: 329582 - DNA, 25 bp, Homo sapien
taacctccttctagaagcgccttct

SEQ ID NO: 329583 - DNA, 25 bp, Homo sapien
ttgcatttcagggcgggacagcctt

SEQ ID NO: 329584 - DNA, 25 bp, Homo sapien
agagggctacgtgccctgctggaca

SEQ ID NO: 329585 - DNA, 25 bp, Homo sapien
ttcggggacccctgcaagacgtcca

SEQ ID NO: 329586 - DNA, 25 bp, Homo sapien
tggcaggaaccgctcatcgttacgc

SEQ ID NO: 329587 - DNA, 25 bp, Homo sapien
cttccgtctctaggtcggagtctga

SEQ ID NO: 329588 - DNA, 25 bp, Homo sapien
cggagtctgaatcggccttgggacc

SEQ ID NO: 329589 - DNA, 25 bp, Homo sapien
gcggctgcgctgaccaatcgagtgt

SEQ ID NO: 329590 - DNA, 25 bp, Homo sapien
tgcgctgaccaatcgagtgtggcgt

SEQ ID NO: 329591 - DNA, 25 bp, Homo sapien
ctgaccaatcgagtgtggcgtccat

SEQ ID NO: 329592 - DNA, 25 bp, Homo sapien
ggatgtgggcggagtctgcggctgc

SEQ ID NO: 329593 - DNA, 25 bp, Homo sapien
gcctggcaggagctaaacttgatta

SEQ ID NO: 329594 - DNA, 25 bp, Homo sapien
cagaagagagccacacgtgggctca

SEQ ID NO: 329595 - DNA, 25 bp, Homo sapien
gcaatccgcctactttggactctca

SEQ ID NO: 329596 - DNA, 25 bp, Homo sapien
aagagagccacacgtgggctcagag

SEQ ID NO: 329597 - DNA, 25 bp, Homo sapien
agcacccgtccgtcccactggctaa

SEQ ID NO: 329598 - DNA, 25 bp, Homo sapien
ccgtcccactggctaactgctgggt

SEQ ID NO: 329599 - DNA, 25 bp, Homo sapien
actggctaactgctgggtcgacgag

SEQ ID NO: 329600 - DNA, 25 bp, Homo sapien
acccgtccgtcccactggctaactg

SEQ ID NO: 329601 - DNA, 25 bp, Homo sapien
actgcccaggtagctggagctgatc

SEQ ID NO: 329602 - DNA, 25 bp, Homo sapien
gatgaaggtcctaaggtcctgagga

SEQ ID NO: 329603 - DNA, 25 bp, Homo sapien
tctcggcttgtctggcctctctggc

SEQ ID NO: 329604 - DNA, 25 bp, Homo sapien
tatggatcccttgggctgtgggcct

SEQ ID NO: 329605 - DNA, 25 bp, Homo sapien
ctactccatatggccagggtcctgt

SEQ ID NO: 329606 - DNA, 25 bp, Homo sapien
gccatagccgaaatacactgcaagt

SEQ ID NO: 329607 - DNA, 25 bp, Homo sapien
ccttgctatgccggatgccatagcc

SEQ ID NO: 329608 - DNA, 25 bp, Homo sapien
cacgtagtgtgtggagttcagccct

SEQ ID NO: 329609 - DNA, 25 bp, Homo sapien
ctcctcctgaccccggtcccagcct

SEQ ID NO: 329610 - DNA, 25 bp, Homo sapien
tgaggtacaggttccagcccttcct

SEQ ID NO: 329611 - DNA, 25 bp, Homo sapien
ggaggcagggcatgagcctgaggta

SEQ ID NO: 329612 - DNA, 25 bp, Homo sapien
gcatgagcctgaggtacaggttcca

SEQ ID NO: 329613 - DNA, 25 bp, Homo sapien
taagtttcagcatgaggcagatgtt

SEQ ID NO: 329614 - DNA, 25 bp, Homo sapien
tcagcagccagatggagaagcgcac

SEQ ID NO: 329615 - DNA, 25 bp, Homo sapien
agcgcacccaggtcagatagctaag

SEQ ID NO: 329616 - DNA, 25 bp, Homo sapien
aggcagatgttgaggacgatgctca

SEQ ID NO: 329617 - DNA, 25 bp, Homo sapien
gcacaatgatactggtggccacgaa

SEQ ID NO: 329618 - DNA, 25 bp, Homo sapien
taagtcttcccgatactgttgctgg

SEQ ID NO: 329619 - DNA, 25 bp, Homo sapien
tgtgccaagggacaggaactgaacc

SEQ ID NO: 329620 - DNA, 25 bp, Homo sapien
caaagacaagcacgcagcctatggt

SEQ ID NO: 329621 - DNA, 25 bp, Homo sapien
ttgctcttttccctgccaccctgcc

SEQ ID NO: 329622 - DNA, 25 bp, Homo sapien
cccttgctcttttccctgccaccct

SEQ ID NO: 329623 - DNA, 25 bp, Homo sapien
aatctgaggacaaggtcccccttgc

SEQ ID NO: 329624 - DNA, 25 bp, Homo sapien
ctgaggacaaggtcccccttgctct

SEQ ID NO: 329625 - DNA, 25 bp, Homo sapien
aaggcatctgcaagcgctgagtcgg

SEQ ID NO: 329626 - DNA, 25 bp, Homo sapien
tgtattcgaggagaacattccagcc

SEQ ID NO: 329627 - DNA, 25 bp, Homo sapien
tagccccgctggtagaaggcatctg

SEQ ID NO: 329628 - DNA, 25 bp, Homo sapien
cacagctcgcccatggatacgtagg

SEQ ID NO: 329629 - DNA, 25 bp, Homo sapien
ggcaggtggccgagaagagcaccga

SEQ ID NO: 329630 - DNA, 25 bp, Homo sapien
aggtggccgagaagagcaccgagcc

SEQ ID NO: 329631 - DNA, 25 bp, Homo sapien
gtggccgagaagagcaccgagccag

SEQ ID NO: 329632 - DNA, 25 bp, Homo sapien
gcaggtggccgagaagagcaccgag

SEQ ID NO: 329633 - DNA, 25 bp, Homo sapien
gtgactgtgactcagtcacagatgg

SEQ ID NO: 329634 - DNA, 25 bp, Homo sapien
cgccggctgactgactagcctaggt

SEQ ID NO: 329635 - DNA, 25 bp, Homo sapien
acagatggagaaggtcagaccgccg

SEQ ID NO: 329636 - DNA, 25 bp, Homo sapien
gggtctagggaagccctgtgactgt

SEQ ID NO: 329637 - DNA, 25 bp, Homo sapien
aaatagactttattagctgggaatg

SEQ ID NO: 329638 - DNA, 25 bp, Homo sapien
aatagactttattagctgggaatgg

SEQ ID NO: 329639 - DNA, 25 bp, Homo sapien
tcaccaagaagaacacgttctctcc

SEQ ID NO: 329640 - DNA, 25 bp, Homo sapien
gctggcgtcacaaggaagttggtca

SEQ ID NO: 329641 - DNA, 25 bp, Homo sapien
ttggtcaccaagaagaacacgttct

SEQ ID NO: 329642 - DNA, 25 bp, Homo sapien
cttgggctggcgtcacaaggaagtt

SEQ ID NO: 329643 - DNA, 25 bp, Homo sapien
ctaggaggcaagtctcaaagttggc

SEQ ID NO: 329644 - DNA, 25 bp, Homo sapien
taggaggcaagtctcaaagttggcc

SEQ ID NO: 329645 - DNA, 25 bp, Homo sapien
gcaagtctcaaagttggcctggctg

SEQ ID NO: 329646 - DNA, 25 bp, Homo sapien
gaggcaagtctcaaagttggcctgg

SEQ ID NO: 329647 - DNA, 25 bp, Homo sapien
ctgtgctctgggcaggtgttcactg

SEQ ID NO: 329648 - DNA, 25 bp, Homo sapien
gggcaggtgttcactggggctacat

SEQ ID NO: 329649 - DNA, 25 bp, Homo sapien
tgtgctctgggcaggtgttcactgg

SEQ ID NO: 329650 - DNA, 25 bp, Homo sapien
caggtgttcactggggctacataca

SEQ ID NO: 329651 - DNA, 25 bp, Homo sapien
gcccccgtcagcaacatcagggccc

SEQ ID NO: 329652 - DNA, 25 bp, Homo sapien
ggaaaggacttgcgcccccgtcagc

SEQ ID NO: 329653 - DNA, 25 bp, Homo sapien
cccgtcagcaacatcagggccccca

SEQ ID NO: 329654 - DNA, 25 bp, Homo sapien
aaaggacttgcgcccccgtcagcaa

SEQ ID NO: 329655 - DNA, 25 bp, Homo sapien
ggccacatcccacagccggtttcca

SEQ ID NO: 329656 - DNA, 25 bp, Homo sapien
tggcttcacgaagtcggccacatcc

SEQ ID NO: 329657 - DNA, 25 bp, Homo sapien
ctgaggtggcttcacgaagtcggcc

SEQ ID NO: 329658 - DNA, 25 bp, Homo sapien
agccggtttccaagctccttgatct

SEQ ID NO: 329659 - DNA, 25 bp, Homo sapien
atagacgacgatcccaaactgcagc

SEQ ID NO: 329660 - DNA, 25 bp, Homo sapien
ccacatagacgacgatcccaaactg

SEQ ID NO: 329661 - DNA, 25 bp, Homo sapien
agacgacgatcccaaactgcagcag

SEQ ID NO: 329662 - DNA, 25 bp, Homo sapien
ctaccacatagacgacgatcccaaa

SEQ ID NO: 329663 - DNA, 25 bp, Homo sapien
catcacatacttctccgttttataa

SEQ ID NO: 329664 - DNA, 25 bp, Homo sapien
cgttttataatccagaagcccctag

SEQ ID NO: 329665 - DNA, 25 bp, Homo sapien
caccagttcctggtcatcacatact

SEQ ID NO: 329666 - DNA, 25 bp, Homo sapien
tacttctccgttttataatccagaa

SEQ ID NO: 329667 - DNA, 25 bp, Homo sapien
aaaatgcaaaatcccgccagacagt

SEQ ID NO: 329668 - DNA, 25 bp, Homo sapien
taaaatgcaaaatcccgccagacag

SEQ ID NO: 329669 - DNA, 25 bp, Homo sapien
gataaaatgcaaaatcccgccagac

SEQ ID NO: 329670 - DNA, 25 bp, Homo sapien
aatgcaaaatcccgccagacagtgc

SEQ ID NO: 329671 - DNA, 25 bp, Homo sapien
ctcagtcgtctgattgggcagatcg

SEQ ID NO: 329672 - DNA, 25 bp, Homo sapien
cacggcctccctgtgattcgttggg

SEQ ID NO: 329673 - DNA, 25 bp, Homo sapien
agatcgtgtcctccatcacggcctc

SEQ ID NO: 329674 - DNA, 25 bp, Homo sapien
cgtctgattgggcagatcgtgtcct

SEQ ID NO: 329675 - DNA, 25 bp, Homo sapien
gctggatcctttgcggccgctgcat

SEQ ID NO: 329676 - DNA, 25 bp, Homo sapien
gcactctcccgagggaggtgctgtc

SEQ ID NO: 329677 - DNA, 25 bp, Homo sapien
tgcattccaacagggccggcactct

SEQ ID NO: 329678 - DNA, 25 bp, Homo sapien
ggctggatcctttgcggccgctgca

SEQ ID NO: 329679 - DNA, 25 bp, Homo sapien
cagcttggcaccatctgagcttcct

SEQ ID NO: 329680 - DNA, 25 bp, Homo sapien
ctcttcccctcagtaatgactcggt

SEQ ID NO: 329681 - DNA, 25 bp, Homo sapien
tcccctcagtaatgactcggtccct

SEQ ID NO: 329682 - DNA, 25 bp, Homo sapien
ccttcagcttggcaccatctgagct

SEQ ID NO: 329683 - DNA, 25 bp, Homo sapien
tcccttgggcctgagctctggttgg

SEQ ID NO: 329684 - DNA, 25 bp, Homo sapien
gcctgagctctggttggcagtgagg

SEQ ID NO: 329685 - DNA, 25 bp, Homo sapien
gggcctgagctctggttggcagtga

SEQ ID NO: 329686 - DNA, 25 bp, Homo sapien
ctgagctctggttggcagtgaggtg

SEQ ID NO: 329687 - DNA, 25 bp, Homo sapien
ggagagcaccaaccaccagagataa

SEQ ID NO: 329688 - DNA, 25 bp, Homo sapien
cctggggccgggcactttccatgga

SEQ ID NO: 329689 - DNA, 25 bp, Homo sapien
caaccaccagagataagccaataac

SEQ ID NO: 329690 - DNA, 25 bp, Homo sapien
ggccgggcactttccatggaaacaa

SEQ ID NO: 329691 - DNA, 25 bp, Homo sapien
gccacgggggccacgttcaacttca

SEQ ID NO: 329692 - DNA, 25 bp, Homo sapien
ccgctgtgggctgcatgagaatggt

SEQ ID NO: 329693 - DNA, 25 bp, Homo sapien
ttcgggcacgctcgtcgtgtgcaga

SEQ ID NO: 329694 - DNA, 25 bp, Homo sapien
gggccacgttcaacttcacctggct

SEQ ID NO: 329695 - DNA, 25 bp, Homo sapien
tgcatccacatagctatagtaggag

SEQ ID NO: 329696 - DNA, 25 bp, Homo sapien
taggagccaccatatttgcgcaaca

SEQ ID NO: 329697 - DNA, 25 bp, Homo sapien
cctttactttctgcatccacatagc

SEQ ID NO: 329698 - DNA, 25 bp, Homo sapien
cacatagctatagtaggagccacca

SEQ ID NO: 329699 - DNA, 25 bp, Homo sapien
cccgaccttgtgatctgcttgcctt

SEQ ID NO: 329700 - DNA, 25 bp, Homo sapien
aagatagggtttcactatgtcagcc

SEQ ID NO: 329701 - DNA, 25 bp, Homo sapien
tttagcaaagatagggtttcactat

SEQ ID NO: 329702 - DNA, 25 bp, Homo sapien
ccgaccttgtgatctgcttgccttg

SEQ ID NO: 329703 - DNA, 25 bp, Homo sapien
agaaccaccgggtcttaagagtgtg

SEQ ID NO: 329704 - DNA, 25 bp, Homo sapien
ccagtcaatcagaagcaaaatctcc

SEQ ID NO: 329705 - DNA, 25 bp, Homo sapien
aagcaaaatctccttggatgggacc

SEQ ID NO: 329706 - DNA, 25 bp, Homo sapien
gaacatccctgattaagaaccaccg

SEQ ID NO: 329707 - DNA, 25 bp, Homo sapien
tattatttatggcatccagatttgc

SEQ ID NO: 329708 - DNA, 25 bp, Homo sapien
cataagatggactgggtcaatggcc

SEQ ID NO: 329709 - DNA, 25 bp, Homo sapien
tcagtttcctaaagagccaaatcac

SEQ ID NO: 329710 - DNA, 25 bp, Homo sapien
ggtcaatggccatgccctttataaa

SEQ ID NO: 329711 - DNA, 25 bp, Homo sapien
tctcctctcacacagcacgtgggtg

SEQ ID NO: 329712 - DNA, 25 bp, Homo sapien
ggcaacccttcattcattcgtcgga

SEQ ID NO: 329713 - DNA, 25 bp, Homo sapien
ttcgtcggatgtgtgttaaggccca

SEQ ID NO: 329714 - DNA, 25 bp, Homo sapien
aagcacttagcatcgcaggacttgg

SEQ ID NO: 329715 - DNA, 25 bp, Homo sapien
gaccaaaactgagcctatcctggaa

SEQ ID NO: 329716 - DNA, 25 bp, Homo sapien
gggaccaaaactgagcctatcctgg

SEQ ID NO: 329717 - DNA, 25 bp, Homo sapien
agcaggggaccaaaactgagcctat

SEQ ID NO: 329718 - DNA, 25 bp, Homo sapien
caaaactgagcctatcctggaaggc

SEQ ID NO: 329719 - DNA, 25 bp, Homo sapien
ttggcacggtgtttggccccacgct

SEQ ID NO: 329720 - DNA, 25 bp, Homo sapien
cggtcctctacaggatggcagagaa

SEQ ID NO: 329721 - DNA, 25 bp, Homo sapien
tctgcttcggtcctctacaggatgg

SEQ ID NO: 329722 - DNA, 25 bp, Homo sapien
ctgcacaaccttggcacggtgtttg

SEQ ID NO: 329723 - DNA, 25 bp, Homo sapien
cctggacaatccgtgtcctggcagc

SEQ ID NO: 329724 - DNA, 25 bp, Homo sapien
ttccatctctgtctcagcaaccatt

SEQ ID NO: 329725 - DNA, 25 bp, Homo sapien
ccatctctgtctcagcaaccattca

SEQ ID NO: 329726 - DNA, 25 bp, Homo sapien
ggcttccatctctgtctcagcaacc

SEQ ID NO: 329727 - DNA, 25 bp, Homo sapien
atctctgtctcagcaaccattcagc

SEQ ID NO: 329728 - DNA, 25 bp, Homo sapien
gctgtctaatgatgggatgaccaca

SEQ ID NO: 329729 - DNA, 25 bp, Homo sapien
tgtgctgtctaatgatgggatgacc

SEQ ID NO: 329730 - DNA, 25 bp, Homo sapien
tttatgtaggatgtgtgctgtctaa

SEQ ID NO: 329731 - DNA, 25 bp, Homo sapien
taggatgtgtgctgtctaatgatgg

SEQ ID NO: 329732 - DNA, 25 bp, Homo sapien
ccaccgtggccgacactttcattaa

SEQ ID NO: 329733 - DNA, 25 bp, Homo sapien
gagacgacttgcgtgcatgttgact

SEQ ID NO: 329734 - DNA, 25 bp, Homo sapien
gttgacttcatgatcagcgccgctg

SEQ ID NO: 329735 - DNA, 25 bp, Homo sapien
aagtttcctgagacgacttgcgtgc

SEQ ID NO: 329736 - DNA, 25 bp, Homo sapien
ctgccacacagcctgggcccgggtt

SEQ ID NO: 329737 - DNA, 25 bp, Homo sapien
atggaggattcctgccacacagcct

SEQ ID NO: 329738 - DNA, 25 bp, Homo sapien
gccacacagcctgggcccgggttct

SEQ ID NO: 329739 - DNA, 25 bp, Homo sapien
cacacagcctgggcccgggttctta

SEQ ID NO: 329740 - DNA, 25 bp, Homo sapien
cttggcttcagtagctcacccagct

SEQ ID NO: 329741 - DNA, 25 bp, Homo sapien
ttcagtagctcacccagcttacagg

SEQ ID NO: 329742 - DNA, 25 bp, Homo sapien
gcttcagtagctcacccagcttaca

SEQ ID NO: 329743 - DNA, 25 bp, Homo sapien
tggcttcagtagctcacccagctta

SEQ ID NO: 329744 - DNA, 25 bp, Homo sapien
gagcaaggctcacacgacaaaggct

SEQ ID NO: 329745 - DNA, 25 bp, Homo sapien
gagccatggcgtcacttaaatgtag

SEQ ID NO: 329746 - DNA, 25 bp, Homo sapien
gaaaatcaagcccatgctcacaggc

SEQ ID NO: 329747 - DNA, 25 bp, Homo sapien
gaagggttgacactgggttctgccc

SEQ ID NO: 329748 - DNA, 25 bp, Homo sapien
gggtctgcagtactaaatggccttg

SEQ ID NO: 329749 - DNA, 25 bp, Homo sapien
ctcctgatgcgctggaaagccgcct

SEQ ID NO: 329750 - DNA, 25 bp, Homo sapien
gtctgcagtactaaatggccttgtc

SEQ ID NO: 329751 - DNA, 25 bp, Homo sapien
gcactcctgatgcgctggaaagccg

SEQ ID NO: 329752 - DNA, 25 bp, Homo sapien
acttgcatctacagggcctagaggc

SEQ ID NO: 329753 - DNA, 25 bp, Homo sapien
gggaaacttgcatctacagggccta

SEQ ID NO: 329754 - DNA, 25 bp, Homo sapien
gaaacttgcatctacagggcctaga

SEQ ID NO: 329755 - DNA, 25 bp, Homo sapien
aggggaaacttgcatctacagggcc

SEQ ID NO: 329756 - DNA, 25 bp, Homo sapien
actccagtagtgaccccaacgtggg

SEQ ID NO: 329757 - DNA, 25 bp, Homo sapien
agcggtaggggctcgagatggcatt

SEQ ID NO: 329758 - DNA, 25 bp, Homo sapien
ccgtagagcggtaggggctcgagat

SEQ ID NO: 329759 - DNA, 25 bp, Homo sapien
gcctcccgtagagcggtaggggctc

SEQ ID NO: 329760 - DNA, 25 bp, Homo sapien
gcgagcttaacggattaataagcgc

SEQ ID NO: 329761 - DNA, 25 bp, Homo sapien
cgcccgtgacagagcgagcttaacg

SEQ ID NO: 329762 - DNA, 25 bp, Homo sapien
ggcgcccgtgacagagcgagcttaa

SEQ ID NO: 329763 - DNA, 25 bp, Homo sapien
gcgcccgtgacagagcgagcttaac

SEQ ID NO: 329764 - DNA, 25 bp, Homo sapien
catgatgccgctactgagaacgaga

SEQ ID NO: 329765 - DNA, 25 bp, Homo sapien
ctggagagagggcaaggtacaactt

SEQ ID NO: 329766 - DNA, 25 bp, Homo sapien
gaagatattcccaaaaaactcagtg

SEQ ID NO: 329767 - DNA, 25 bp, Homo sapien
caaagacactactggccatgatgcc

SEQ ID NO: 329768 - DNA, 25 bp, Homo sapien
gataggtccgttggtgctccttatg

SEQ ID NO: 329769 - DNA, 25 bp, Homo sapien
acatcgataggtccgttggtgctcc

SEQ ID NO: 329770 - DNA, 25 bp, Homo sapien
ggtccgttggtgctccttatgtgca

SEQ ID NO: 329771 - DNA, 25 bp, Homo sapien
aaatagacatcgataggtccgttgg

SEQ ID NO: 329772 - DNA, 25 bp, Homo sapien
tgggagctggaacatccaatctggt

SEQ ID NO: 329773 - DNA, 25 bp, Homo sapien
gacgatctgttcatggaaggcctga

SEQ ID NO: 329774 - DNA, 25 bp, Homo sapien
gaaggcctgaatgctatgaatgtct

SEQ ID NO: 329775 - DNA, 25 bp, Homo sapien
tggagctttaactgcaatgacgatc

SEQ ID NO: 329776 - DNA, 25 bp, Homo sapien
aacgaggtcgattccatctaagaca

SEQ ID NO: 329777 - DNA, 25 bp, Homo sapien
cttggatttcttttcaacgaggtcg

SEQ ID NO: 329778 - DNA, 25 bp, Homo sapien
gatgtcatacactctccgctttcgg

SEQ ID NO: 329779 - DNA, 25 bp, Homo sapien
gctccaaaattgctaagatcagatc

SEQ ID NO: 329780 - DNA, 25 bp, Homo sapien
aagtcaagaatacccccgggagcag

SEQ ID NO: 329781 - DNA, 25 bp, Homo sapien
taagtcaagaatacccccgggagca

SEQ ID NO: 329782 - DNA, 25 bp, Homo sapien
gagggtagcccctgttttagcagaa

SEQ ID NO: 329783 - DNA, 25 bp, Homo sapien
ttcaacaaataaccgagtgccttct

SEQ ID NO: 329784 - DNA, 25 bp, Homo sapien
gttatctccggtgccacagaattca

SEQ ID NO: 329785 - DNA, 25 bp, Homo sapien
ccttctacaagcactcattgttctg

SEQ ID NO: 329786 - DNA, 25 bp, Homo sapien
agaggagactcgtatggggggtggt

SEQ ID NO: 329787 - DNA, 25 bp, Homo sapien
cagaggagactcgtatggggggtgg

SEQ ID NO: 329788 - DNA, 25 bp, Homo sapien
tccagctctgcgttttggcacctct

SEQ ID NO: 329789 - DNA, 25 bp, Homo sapien
tctgtggctgggcatccctctgaac

SEQ ID NO: 329790 - DNA, 25 bp, Homo sapien
ggagcaggtgattggttccagctct

SEQ ID NO: 329791 - DNA, 25 bp, Homo sapien
tgggcatccctctgaactgtgcact

SEQ ID NO: 329792 - DNA, 25 bp, Homo sapien
gccaagtgccttgcagaggagaatg

SEQ ID NO: 329793 - DNA, 25 bp, Homo sapien
ggtggagcgtctcaattatctggct

SEQ ID NO: 329794 - DNA, 25 bp, Homo sapien
ggtggctgatgtccagtggtgacca

SEQ ID NO: 329795 - DNA, 25 bp, Homo sapien
tggtgaccaggtggagcgtctcaat

SEQ ID NO: 329796 - DNA, 25 bp, Homo sapien
gaagaacctgcaataactttaaata

SEQ ID NO: 329797 - DNA, 25 bp, Homo sapien
cactgcagaaagtgttctgagccac

SEQ ID NO: 329798 - DNA, 25 bp, Homo sapien
tagcttcactagtgcaggtccacct

SEQ ID NO: 329799 - DNA, 25 bp, Homo sapien
taatgcatacctgaacctggaaact

SEQ ID NO: 329800 - DNA, 25 bp, Homo sapien
cacttgcactcatggaaggcttttc

SEQ ID NO: 329801 - DNA, 25 bp, Homo sapien
catatggaattaatgttggttctca

SEQ ID NO: 329802 - DNA, 25 bp, Homo sapien
cagtatacaagtctggtcacagcag

SEQ ID NO: 329803 - DNA, 25 bp, Homo sapien
gttcccacaggctcataactaaagg

SEQ ID NO: 329804 - DNA, 25 bp, Homo sapien
tatcacactatcttatggagaagag

SEQ ID NO: 329805 - DNA, 25 bp, Homo sapien
ggagtaagcttgcagggcggctggg

SEQ ID NO: 329806 - DNA, 25 bp, Homo sapien
agaaagggagtaagcttgcagggcg

SEQ ID NO: 329807 - DNA, 25 bp, Homo sapien
catggatcagctctgagaccccgag

SEQ ID NO: 329808 - DNA, 25 bp, Homo sapien
ggacaagatcccaggatctcagcct

SEQ ID NO: 329809 - DNA, 25 bp, Homo sapien
accaggtcacccatggctccgtagt

SEQ ID NO: 329810 - DNA, 25 bp, Homo sapien
ccaggtcacccatggctccgtagtc

SEQ ID NO: 329811 - DNA, 25 bp, Homo sapien
gaccaggtcacccatggctccgtag

SEQ ID NO: 329812 - DNA, 25 bp, Homo sapien
tctgcctggagcaatcagtagccag

SEQ ID NO: 329813 - DNA, 25 bp, Homo sapien
caatcagtagccagcaggttccccg

SEQ ID NO: 329814 - DNA, 25 bp, Homo sapien
cctcatcctggtgagtatcttgtcc

SEQ ID NO: 329815 - DNA, 25 bp, Homo sapien
gccttgtctgcctggagcaatcagt

SEQ ID NO: 329816 - DNA, 25 bp, Homo sapien
gtcatagccgaaccagaggttgtag

SEQ ID NO: 329817 - DNA, 25 bp, Homo sapien
catgggagtgtgatcagggtggctt

SEQ ID NO: 329818 - DNA, 25 bp, Homo sapien
ctggggcatgggagtgtgatcaggg

SEQ ID NO: 329819 - DNA, 25 bp, Homo sapien
gggcatgggagtgtgatcagggtgg

SEQ ID NO: 329820 - DNA, 25 bp, Homo sapien
gcatgggagtgtgatcagggtggct

SEQ ID NO: 329821 - DNA, 25 bp, Homo sapien
cagtgcagtgtctgtggtgatctgc

SEQ ID NO: 329822 - DNA, 25 bp, Homo sapien
tggcccaccatgatcgtcaggcaca

SEQ ID NO: 329823 - DNA, 25 bp, Homo sapien
tcaggcacatggacaagagcggctg

SEQ ID NO: 329824 - DNA, 25 bp, Homo sapien
atgatcgtcaggcacatggacaaga

SEQ ID NO: 329825 - DNA, 25 bp, Homo sapien
ctcattggtgaatgctgggagagct

SEQ ID NO: 329826 - DNA, 25 bp, Homo sapien
ccccaaactcattggtgaatgctgg

SEQ ID NO: 329827 - DNA, 25 bp, Homo sapien
gggtgccccaaactcattggtgaat

SEQ ID NO: 329828 - DNA, 25 bp, Homo sapien
ccattcattattgaacaggatccca

SEQ ID NO: 329829 - DNA, 25 bp, Homo sapien
accggggagcagaccttggagccaa

SEQ ID NO: 329830 - DNA, 25 bp, Homo sapien
tgaccggggagcagaccttggagcc

SEQ ID NO: 329831 - DNA, 25 bp, Homo sapien
ctgaccggggagcagaccttggagc

SEQ ID NO: 329832 - DNA, 25 bp, Homo sapien
cggggagcagaccttggagccaaag

SEQ ID NO: 329833 - DNA, 25 bp, Homo sapien
ggtcagagatctgggaccggagctg

SEQ ID NO: 329834 - DNA, 25 bp, Homo sapien
cagcgaagaactcagaggtcatgtt

SEQ ID NO: 329835 - DNA, 25 bp, Homo sapien
accggagctgggcagcgaagaactc

SEQ ID NO: 329836 - DNA, 25 bp, Homo sapien
cccgtcatccggcgtgtagaactcg

SEQ ID NO: 329837 - DNA, 25 bp, Homo sapien
agtccatccgagcacacagtaggcc

SEQ ID NO: 329838 - DNA, 25 bp, Homo sapien
aaagcctctacgatgcggtggtacg

SEQ ID NO: 329839 - DNA, 25 bp, Homo sapien
tctacgatgcggtggtacgtcaggc

SEQ ID NO: 329840 - DNA, 25 bp, Homo sapien
cggtggtacgtcaggcccttctgct

SEQ ID NO: 329841 - DNA, 25 bp, Homo sapien
ggtccccaagcagggtcctcttggc

SEQ ID NO: 329842 - DNA, 25 bp, Homo sapien
ggatgagggccagcacgggcccgct

SEQ ID NO: 329843 - DNA, 25 bp, Homo sapien
gatgttcagcgggtgctcgatcagc

SEQ ID NO: 329844 - DNA, 25 bp, Homo sapien
agttgttcaggtcctcagctgtcac

SEQ ID NO: 329845 - DNA, 25 bp, Homo sapien
ttcagcgggtgctcgatcagctcag

SEQ ID NO: 329846 - DNA, 25 bp, Homo sapien
agcagctcgaatgggtgctgggatg

SEQ ID NO: 329847 - DNA, 25 bp, Homo sapien
tgcaatgggacagcagctcgaatgg

SEQ ID NO: 329848 - DNA, 25 bp, Homo sapien
gacagcagctcgaatgggtgctggg

SEQ ID NO: 329849 - DNA, 25 bp, Homo sapien
tgggacagcagctcgaatgggtgct

SEQ ID NO: 329850 - DNA, 25 bp, Homo sapien
cagccgcctggatgtccttcacaat

SEQ ID NO: 329851 - DNA, 25 bp, Homo sapien
tgggcaccctcgatggccagcatct

SEQ ID NO: 329852 - DNA, 25 bp, Homo sapien
atctcataggtgtcagccagccgcg

SEQ ID NO: 329853 - DNA, 25 bp, Homo sapien
gccagccgcggcagggtcagtctct

SEQ ID NO: 329854 - DNA, 25 bp, Homo sapien
agctcatagcctcggatctccccag

SEQ ID NO: 329855 - DNA, 25 bp, Homo sapien
catagcctcggatctccccaggcac

SEQ ID NO: 329856 - DNA, 25 bp, Homo sapien
ccagctcatagcctcggatctcccc

SEQ ID NO: 329857 - DNA, 25 bp, Homo sapien
ctcatagcctcggatctccccaggc

SEQ ID NO: 329858 - DNA, 25 bp, Homo sapien
ttgaaaaggcaggatatagacagcc

SEQ ID NO: 329859 - DNA, 25 bp, Homo sapien
cagacagtggcttcctggatggaca

SEQ ID NO: 329860 - DNA, 25 bp, Homo sapien
ggcgtgagttgttgagaccctccca

SEQ ID NO: 329861 - DNA, 25 bp, Homo sapien
tggatggacagtggcttcccctcag

SEQ ID NO: 329862 - DNA, 25 bp, Homo sapien
ggccacctcgcgggcattgatgacc

SEQ ID NO: 329863 - DNA, 25 bp, Homo sapien
ggactgctccgagctgttgaacatg

SEQ ID NO: 329864 - DNA, 25 bp, Homo sapien
gcgggcattgatgacctcagctttt

SEQ ID NO: 329865 - DNA, 25 bp, Homo sapien
ttctgggactgctccgagctgttga

SEQ ID NO: 329866 - DNA, 25 bp, Homo sapien
agaagaagcaggtaggcaggcccac

SEQ ID NO: 329867 - DNA, 25 bp, Homo sapien
gaagcaggtaggcaggcccacccac

SEQ ID NO: 329868 - DNA, 25 bp, Homo sapien
ctagaagaagcaggtaggcaggccc

SEQ ID NO: 329869 - DNA, 25 bp, Homo sapien
aagaagcaggtaggcaggcccaccc

SEQ ID NO: 329870 - DNA, 25 bp, Homo sapien
ccctctccctctcctcttctgaggc

SEQ ID NO: 329871 - DNA, 25 bp, Homo sapien
ccccctgcccctctccctctcctct

SEQ ID NO: 329872 - DNA, 25 bp, Homo sapien
ctctccctctcctcttctgaggcac

SEQ ID NO: 329873 - DNA, 25 bp, Homo sapien
gcccctctccctctcctcttctgag

SEQ ID NO: 329874 - DNA, 25 bp, Homo sapien
cattcatgagccccacacacaacag

SEQ ID NO: 329875 - DNA, 25 bp, Homo sapien
gcattcatgagccccacacacaaca

SEQ ID NO: 329876 - DNA, 25 bp, Homo sapien
tacacatggttgtcaggttccttgg

SEQ ID NO: 329877 - DNA, 25 bp, Homo sapien
tgtacacatggttgtcaggttcctt

SEQ ID NO: 329878 - DNA, 25 bp, Homo sapien
ctggtgtacacatggttgtcaggtt

SEQ ID NO: 329879 - DNA, 25 bp, Homo sapien
acatggttgtcaggttccttggagg

SEQ ID NO: 329880 - DNA, 25 bp, Homo sapien
ttggccacgaaagacaggaggattt

SEQ ID NO: 329881 - DNA, 25 bp, Homo sapien
ccacgaaagacaggaggatttggtg

SEQ ID NO: 329882 - DNA, 25 bp, Homo sapien
tgcctggggtgttggccacgaaaga

SEQ ID NO: 329883 - DNA, 25 bp, Homo sapien
gggtgttggccacgaaagacaggag

SEQ ID NO: 329884 - DNA, 25 bp, Homo sapien
ggatgacggcagcacctcacttgcc

SEQ ID NO: 329885 - DNA, 25 bp, Homo sapien
tggatgacggcagcacctcacttgc

SEQ ID NO: 329886 - DNA, 25 bp, Homo sapien
gatgacggcagcacctcacttgcct

SEQ ID NO: 329887 - DNA, 25 bp, Homo sapien
ctggatgacggcagcacctcacttg

SEQ ID NO: 329888 - DNA, 25 bp, Homo sapien
tggaggtccaaagagcctcaggagc

SEQ ID NO: 329889 - DNA, 25 bp, Homo sapien
tcttccagaaagcagctagagggct

SEQ ID NO: 329890 - DNA, 25 bp, Homo sapien
tctgtctgtccaactgcagaacagg

SEQ ID NO: 329891 - DNA, 25 bp, Homo sapien
tagagacaccgattcctggaggtcc

SEQ ID NO: 329892 - DNA, 25 bp, Homo sapien
tcatagttccttacgcatggagcca

SEQ ID NO: 329893 - DNA, 25 bp, Homo sapien
ggtctcagagctacccaaaggccta

SEQ ID NO: 329894 - DNA, 25 bp, Homo sapien
caatgtacaaggtctgagcaaggac

SEQ ID NO: 329895 - DNA, 25 bp, Homo sapien
caaaggcctatccttccgagaggtt

SEQ ID NO: 329896 - DNA, 25 bp, Homo sapien
cactaggttcatctttgcactgtta

SEQ ID NO: 329897 - DNA, 25 bp, Homo sapien
ctaggttcatctttgcactgttaac

SEQ ID NO: 329898 - DNA, 25 bp, Homo sapien
ccactaggttcatctttgcactgtt

SEQ ID NO: 329899 - DNA, 25 bp, Homo sapien
actaggttcatctttgcactgttaa

SEQ ID NO: 329900 - DNA, 25 bp, Homo sapien
tcccgggcctgaagatctgtgatgt

SEQ ID NO: 329901 - DNA, 25 bp, Homo sapien
tacaagggtccttcctgaacggtga

SEQ ID NO: 329902 - DNA, 25 bp, Homo sapien
tgaacggtgacctgccgctgtgctg

SEQ ID NO: 329903 - DNA, 25 bp, Homo sapien
accagatagtgatgtgggagccctc

SEQ ID NO: 329904 - DNA, 25 bp, Homo sapien
acgagggagagaaacacacgcaaca

SEQ ID NO: 329905 - DNA, 25 bp, Homo sapien
ctacgagggagagaaacacacgcaa

SEQ ID NO: 329906 - DNA, 25 bp, Homo sapien
tacgagggagagaaacacacgcaac

SEQ ID NO: 329907 - DNA, 25 bp, Homo sapien
cgagggagagaaacacacgcaacat

SEQ ID NO: 329908 - DNA, 25 bp, Homo sapien
ggagtgaattcctaagtcttcgcct

SEQ ID NO: 329909 - DNA, 25 bp, Homo sapien
gcagcaaacctaaagttcggagtga

SEQ ID NO: 329910 - DNA, 25 bp, Homo sapien
gcatgggcagtagctgtgagacctt

SEQ ID NO: 329911 - DNA, 25 bp, Homo sapien
taatcgtcacagtgttatggaagga

SEQ ID NO: 329912 - DNA, 25 bp, Homo sapien
agagccaaggacgtgacatacagca

SEQ ID NO: 329913 - DNA, 25 bp, Homo sapien
gagccaaggacgtgacatacagcat

SEQ ID NO: 329914 - DNA, 25 bp, Homo sapien
agaggcttgaaagctctatctgtgc

SEQ ID NO: 329915 - DNA, 25 bp, Homo sapien
gaggcttgaaagctctatctgtgcc

SEQ ID NO: 329916 - DNA, 25 bp, Homo sapien
aggcttgaaagctctatctgtgcct

SEQ ID NO: 329917 - DNA, 25 bp, Homo sapien
ggcttgaaagctctatctgtgcctg

SEQ ID NO: 329918 - DNA, 25 bp, Homo sapien
accttcagggaggtactctgccagc

SEQ ID NO: 329919 - DNA, 25 bp, Homo sapien
cagcgatgccacaggtgtacccagt

SEQ ID NO: 329920 - DNA, 25 bp, Homo sapien
ggcaccagcgatgccacaggtgtac

SEQ ID NO: 329921 - DNA, 25 bp, Homo sapien
catggcaccagcgatgccacaggtg

SEQ ID NO: 329922 - DNA, 25 bp, Homo sapien
atgccatggcaccagcgatgccaca

SEQ ID NO: 329923 - DNA, 25 bp, Homo sapien
gtgtcctcccgtccatttgcaaatt

SEQ ID NO: 329924 - DNA, 25 bp, Homo sapien
tccatttgcaaattgattgactgtt

SEQ ID NO: 329925 - DNA, 25 bp, Homo sapien
tgcaaattgattgactgtttcattg

SEQ ID NO: 329926 - DNA, 25 bp, Homo sapien
cagtgtcctcccgtccatttgcaaa

SEQ ID NO: 329927 - DNA, 25 bp, Homo sapien
agagctggggtaccgggtcactgtt

SEQ ID NO: 329928 - DNA, 25 bp, Homo sapien
gctggggtaccgggtcactgttgaa

SEQ ID NO: 329929 - DNA, 25 bp, Homo sapien
tggggtaccgggtcactgttgaaga

SEQ ID NO: 329930 - DNA, 25 bp, Homo sapien
ttagagctggggtaccgggtcactg

SEQ ID NO: 329931 - DNA, 25 bp, Homo sapien
cccacgttggggtcactactggagt

SEQ ID NO: 329932 - DNA, 25 bp, Homo sapien
ctggagtggatggaggcccttcaca

SEQ ID NO: 329933 - DNA, 25 bp, Homo sapien
cagaggtcagaaccagagatcccag

SEQ ID NO: 329934 - DNA, 25 bp, Homo sapien
gagcccctaccgctctacgggaggc

SEQ ID NO: 329935 - DNA, 25 bp, Homo sapien
aacttcttaatgaaagtgtcggcca

SEQ ID NO: 329936 - DNA, 25 bp, Homo sapien
ttcttaatgaaagtgtcggccacgg

SEQ ID NO: 329937 - DNA, 25 bp, Homo sapien
aggaaacttcttaatgaaagtgtcg

SEQ ID NO: 329938 - DNA, 25 bp, Homo sapien
gaaacttcttaatgaaagtgtcggc

SEQ ID NO: 329939 - DNA, 25 bp, Homo sapien
cagacgcagacagaaagccttcaag

SEQ ID NO: 329940 - DNA, 25 bp, Homo sapien
tcttgaaaatacttggcggcctcca

SEQ ID NO: 329941 - DNA, 25 bp, Homo sapien
cgggcccagataggtacagagagca

SEQ ID NO: 329942 - DNA, 25 bp, Homo sapien
caccgggcccagataggtacagaga

SEQ ID NO: 329943 - DNA, 25 bp, Homo sapien
ggattacattccagcatcttattag

SEQ ID NO: 329944 - DNA, 25 bp, Homo sapien
gacacggattgtccagggattacat

SEQ ID NO: 329945 - DNA, 25 bp, Homo sapien
ccagcatcttattaggtatctggat

SEQ ID NO: 329946 - DNA, 25 bp, Homo sapien
gctgccaggacacggattgtccagg

SEQ ID NO: 329947 - DNA, 25 bp, Homo sapien
gaaaatcttgattcccactctacag

SEQ ID NO: 329948 - DNA, 25 bp, Homo sapien
tgtctcttggcagatggcctgacac

SEQ ID NO: 329949 - DNA, 25 bp, Homo sapien
caggcctggactccgagatgaactg

SEQ ID NO: 329950 - DNA, 25 bp, Homo sapien
gctttcagacctgggcgggatctgc

SEQ ID NO: 329951 - DNA, 25 bp, Homo sapien
gacatcggtggagaacaggatgctc

SEQ ID NO: 329952 - DNA, 25 bp, Homo sapien
acatcggtggagaacaggatgctct

SEQ ID NO: 329953 - DNA, 25 bp, Homo sapien
ttagacatcggtggagaacaggatg

SEQ ID NO: 329954 - DNA, 25 bp, Homo sapien
tagacatcggtggagaacaggatgc

SEQ ID NO: 329955 - DNA, 25 bp, Homo sapien
agcgtggggccaaacaccgtgccaa

SEQ ID NO: 329956 - DNA, 25 bp, Homo sapien
caaacaccgtgccaaggttgtgcag

SEQ ID NO: 329957 - DNA, 25 bp, Homo sapien
ggccaaacaccgtgccaaggttgtg

SEQ ID NO: 329958 - DNA, 25 bp, Homo sapien
aacaccgtgccaaggttgtgcaggg

SEQ ID NO: 329959 - DNA, 25 bp, Homo sapien
gctgtgccgtgctagagtcctcagg

SEQ ID NO: 329960 - DNA, 25 bp, Homo sapien
gggctgtgccgtgctagagtcctca

SEQ ID NO: 329961 - DNA, 25 bp, Homo sapien
ggggctgtgccgtgctagagtcctc

SEQ ID NO: 329962 - DNA, 25 bp, Homo sapien
ggctgtgccgtgctagagtcctcag

SEQ ID NO: 329963 - DNA, 25 bp, Homo sapien
ggtgagcaggttggcctccggcagg

SEQ ID NO: 329964 - DNA, 25 bp, Homo sapien
gagcaggttggcctccggcagggac

SEQ ID NO: 329965 - DNA, 25 bp, Homo sapien
tgagcaggttggcctccggcaggga

SEQ ID NO: 329966 - DNA, 25 bp, Homo sapien
gtgagcaggttggcctccggcaggg

SEQ ID NO: 329967 - DNA, 25 bp, Homo sapien
cactcccctgggttacgacaagccg

SEQ ID NO: 329968 - DNA, 25 bp, Homo sapien
gggacacgagtccttgcgcagttta

SEQ ID NO: 329969 - DNA, 25 bp, Homo sapien
cttgcgcagtttaggcttgtcatca

SEQ ID NO: 329970 - DNA, 25 bp, Homo sapien
tgggttacgacaagccggagacctc

SEQ ID NO: 329971 - DNA, 25 bp, Homo sapien
cgtccatctcgctcatcatcactga

SEQ ID NO: 329972 - DNA, 25 bp, Homo sapien
catgcctgcgatggcgttcacgtcc

SEQ ID NO: 329973 - DNA, 25 bp, Homo sapien
catcatcactgacacgtccttgtta

SEQ ID NO: 329974 - DNA, 25 bp, Homo sapien
gcagctcacggaagtacagcttcag

SEQ ID NO: 329975 - DNA, 25 bp, Homo sapien
ggccaccccagacatgcggtagatg

SEQ ID NO: 329976 - DNA, 25 bp, Homo sapien
accccagacatgcggtagatgccca

SEQ ID NO: 329977 - DNA, 25 bp, Homo sapien
ccaccccagacatgcggtagatgcc

SEQ ID NO: 329978 - DNA, 25 bp, Homo sapien
gccaccccagacatgcggtagatgc

SEQ ID NO: 329979 - DNA, 25 bp, Homo sapien
tgaggacggtgacgaaggtacccag

SEQ ID NO: 329980 - DNA, 25 bp, Homo sapien
cgaaggtacccaggtctggggctgc

SEQ ID NO: 329981 - DNA, 25 bp, Homo sapien
gtgaggacggtgacgaaggtaccca

SEQ ID NO: 329982 - DNA, 25 bp, Homo sapien
gcaagtgttgccgttcattcactcc

SEQ ID NO: 329983 - DNA, 25 bp, Homo sapien
tgccagcaagtgttgccgttcattc

SEQ ID NO: 329984 - DNA, 25 bp, Homo sapien
ggaacacacaggaccgtgggagtgg

SEQ ID NO: 329985 - DNA, 25 bp, Homo sapien
cttctgccggttgccagcaagtgtt

SEQ ID NO: 329986 - DNA, 25 bp, Homo sapien
cttgaagcctgggcgcccagtctat

SEQ ID NO: 329987 - DNA, 25 bp, Homo sapien
ttgaagcctgggcgcccagtctatc

SEQ ID NO: 329988 - DNA, 25 bp, Homo sapien
tgggcctaccaactgggggagggca

SEQ ID NO: 329989 - DNA, 25 bp, Homo sapien
cctttaagccaggagtcaacagtga

SEQ ID NO: 329990 - DNA, 25 bp, Homo sapien
ccctttaagccaggagtcaacagtg

SEQ ID NO: 329991 - DNA, 25 bp, Homo sapien
tacaaatccccatcatcagatatgc

SEQ ID NO: 329992 - DNA, 25 bp, Homo sapien
ccccatcatcagatatgctctccac

SEQ ID NO: 329993 - DNA, 25 bp, Homo sapien
atcatcagatatgctctccacaatc

SEQ ID NO: 329994 - DNA, 25 bp, Homo sapien
ctacaaatccccatcatcagatatg

SEQ ID NO: 329995 - DNA, 25 bp, Homo sapien
gaagtgagttatttcagggtacgta

SEQ ID NO: 329996 - DNA, 25 bp, Homo sapien
gagatggcgctttttcctcaggaag

SEQ ID NO: 329997 - DNA, 25 bp, Homo sapien
cagggtacgtatcattctccagtgt

SEQ ID NO: 329998 - DNA, 25 bp, Homo sapien
ctagagatggcgctttttcctcagg

SEQ ID NO: 329999 - DNA, 25 bp, Homo sapien
gataatgcacactggcagatgttca

SEQ ID NO: 330000 - DNA, 25 bp, Homo sapien
tacatctgattggaaagaagccagg

SEQ ID NO: 330001 - DNA, 25 bp, Homo sapien
tacatttgattaaactgcagatgac

SEQ ID NO: 330002 - DNA, 25 bp, Homo sapien
gtcataaatagtccacattggcaga

SEQ ID NO: 330003 - DNA, 25 bp, Homo sapien
cattagcgatgccatatacagcgtc

SEQ ID NO: 330004 - DNA, 25 bp, Homo sapien
gcgaattcgtatacagcatcctcat

SEQ ID NO: 330005 - DNA, 25 bp, Homo sapien
taagcaatgtcgtctacagcgtcct

SEQ ID NO: 330006 - DNA, 25 bp, Homo sapien
tacagcgtccttattagcgaattcg

SEQ ID NO: 330007 - DNA, 25 bp, Homo sapien
gtcgtatacagcgtcataattagcg

SEQ ID NO: 330008 - DNA, 25 bp, Homo sapien
tcgtatacagcgtcataattagcga

SEQ ID NO: 330009 - DNA, 25 bp, Homo sapien
tagcaatgtcgtgtacagcgtccac

SEQ ID NO: 330010 - DNA, 25 bp, Homo sapien
ttagcaatgtcgtgtacagcgtcca

SEQ ID NO: 330011 - DNA, 25 bp, Homo sapien
aatgtcgtgtacagcgtccacgtta

SEQ ID NO: 330012 - DNA, 25 bp, Homo sapien
gcaatgtcgtgtacagcgtccacgt

SEQ ID NO: 330013 - DNA, 25 bp, Homo sapien
tgtcgtatacagctcgttggcgatg

SEQ ID NO: 330014 - DNA, 25 bp, Homo sapien
gatgtcgtatacagctcgttggcga

SEQ ID NO: 330015 - DNA, 25 bp, Homo sapien
tcgtatacagctcgttggcgatgcc

SEQ ID NO: 330016 - DNA, 25 bp, Homo sapien
gtcgtatacagctcgttggcgatgc

SEQ ID NO: 330017 - DNA, 25 bp, Homo sapien
ctagaaaaacacagagttaaggtca

SEQ ID NO: 330018 - DNA, 25 bp, Homo sapien
tagaaaaacacagagttaaggtcag

SEQ ID NO: 330019 - DNA, 25 bp, Homo sapien
aaaacacagagttaaggtcagtgcc

SEQ ID NO: 330020 - DNA, 25 bp, Homo sapien
gaaaaacacagagttaaggtcagtg

SEQ ID NO: 330021 - DNA, 25 bp, Homo sapien
tcttggcatccagattgttttcttg

SEQ ID NO: 330022 - DNA, 25 bp, Homo sapien
ttcttggcatccagattgttttctt

SEQ ID NO: 330023 - DNA, 25 bp, Homo sapien
tttcttggcatccagattgttttct

SEQ ID NO: 330024 - DNA, 25 bp, Homo sapien
ctttcttggcatccagattgttttc

SEQ ID NO: 330025 - DNA, 25 bp, Homo sapien
tcaagcctcagaggggccacctgca

SEQ ID NO: 330026 - DNA, 25 bp, Homo sapien
gcctcagaggggccacctgcaccac

SEQ ID NO: 330027 - DNA, 25 bp, Homo sapien
aagcctcagaggggccacctgcacc

SEQ ID NO: 330028 - DNA, 25 bp, Homo sapien
tagattcaagcctcagaggggccac

SEQ ID NO: 330029 - DNA, 25 bp, Homo sapien
tgtccttgtgaactagagactcctc

SEQ ID NO: 330030 - DNA, 25 bp, Homo sapien
ctgtccttgtgaactagagactcct

SEQ ID NO: 330031 - DNA, 25 bp, Homo sapien
tgggctgaagcttgtccaatctttc

SEQ ID NO: 330032 - DNA, 25 bp, Homo sapien
tctttcaaggttgctgaagactgta

SEQ ID NO: 330033 - DNA, 25 bp, Homo sapien
aggttgctgaagactgtatgatgga

SEQ ID NO: 330034 - DNA, 25 bp, Homo sapien
ccaatctttcaaggttgctgaagac

SEQ ID NO: 330035 - DNA, 25 bp, Homo sapien
actggttggtgtgcacagcatatct

SEQ ID NO: 330036 - DNA, 25 bp, Homo sapien
acattcacaagcaaatcatgcagac

SEQ ID NO: 330037 - DNA, 25 bp, Homo sapien
cacaagcaaatcatgcagacttgca

SEQ ID NO: 330038 - DNA, 25 bp, Homo sapien
atcatgcagacttgcacacagacca

SEQ ID NO: 330039 - DNA, 25 bp, Homo sapien
catacccacacacaacctaatgtga

SEQ ID NO: 330040 - DNA, 25 bp, Homo sapien
cattgaatgtgctccctgaagtcac

SEQ ID NO: 330041 - DNA, 25 bp, Homo sapien
acatgctttttggaaggcttcttcg

SEQ ID NO: 330042 - DNA, 25 bp, Homo sapien
cttggtagtagagtagggcttcctt

SEQ ID NO: 330043 - DNA, 25 bp, Homo sapien
gagtagggcttccttttcacatgct

SEQ ID NO: 330044 - DNA, 25 bp, Homo sapien
ttcacatgctttttggaaggcttct

SEQ ID NO: 330045 - DNA, 25 bp, Homo sapien
agcatggctgtcagttcattggcag

SEQ ID NO: 330046 - DNA, 25 bp, Homo sapien
tcattggcagtgctactcatgaatg

SEQ ID NO: 330047 - DNA, 25 bp, Homo sapien
cagttcattggcagtgctactcatg

SEQ ID NO: 330048 - DNA, 25 bp, Homo sapien
gctgtcagttcattggcagtgctac

SEQ ID NO: 330049 - DNA, 25 bp, Homo sapien
atccacactgtgaggtccaactgct

SEQ ID NO: 330050 - DNA, 25 bp, Homo sapien
gaccaagggcaggagatccctaatc

SEQ ID NO: 330051 - DNA, 25 bp, Homo sapien
cacaatccacactgtgaggtccaac

SEQ ID NO: 330052 - DNA, 25 bp, Homo sapien
gagatccctaatcccatcaccatgg

SEQ ID NO: 330053 - DNA, 25 bp, Homo sapien
atgaaaccacaaaggttcaatctgc

SEQ ID NO: 330054 - DNA, 25 bp, Homo sapien
aaatgaaaccacaaaggttcaatct

SEQ ID NO: 330055 - DNA, 25 bp, Homo sapien
ccacaaaggttcaatctgctctgac

SEQ ID NO: 330056 - DNA, 25 bp, Homo sapien
aaccacaaaggttcaatctgctctg

SEQ ID NO: 330057 - DNA, 25 bp, Homo sapien
gaattggatacttcagagatctccc

SEQ ID NO: 330058 - DNA, 25 bp, Homo sapien
ggatacttcagagatctcccttacc

SEQ ID NO: 330059 - DNA, 25 bp, Homo sapien
attggatacttcagagatctccctt

SEQ ID NO: 330060 - DNA, 25 bp, Homo sapien
ctgaattggatacttcagagatctc

SEQ ID NO: 330061 - DNA, 25 bp, Homo sapien
cagtggcagatgatccaaggcgtca

SEQ ID NO: 330062 - DNA, 25 bp, Homo sapien
tgtgcatttctaggtctgggcgcca

SEQ ID NO: 330063 - DNA, 25 bp, Homo sapien
aaatgttgaccagagatcagtggca

SEQ ID NO: 330064 - DNA, 25 bp, Homo sapien
caaggcgtcagctgtccaagctcag

SEQ ID NO: 330065 - DNA, 25 bp, Homo sapien
tgacaagggcgtggagagcatgtcg

SEQ ID NO: 330066 - DNA, 25 bp, Homo sapien
ctgacaagggcgtggagagcatgtc

SEQ ID NO: 330067 - DNA, 25 bp, Homo sapien
catgtcggtgagcacccgggtgcag

SEQ ID NO: 330068 - DNA, 25 bp, Homo sapien
gagagcatgtcggtgagcacccggg

SEQ ID NO: 330069 - DNA, 25 bp, Homo sapien
ttacataacacctccacttactcat

SEQ ID NO: 330070 - DNA, 25 bp, Homo sapien
gcctttacataacacctccacttac

SEQ ID NO: 330071 - DNA, 25 bp, Homo sapien
cctttacataacacctccacttact

SEQ ID NO: 330072 - DNA, 25 bp, Homo sapien
tttacataacacctccacttactca

SEQ ID NO: 330073 - DNA, 25 bp, Homo sapien
gatgactccagctacatttcccgag

SEQ ID NO: 330074 - DNA, 25 bp, Homo sapien
cgtgctctgctaaatgatgactcca

SEQ ID NO: 330075 - DNA, 25 bp, Homo sapien
tacatttcccgaggccaagagatga

SEQ ID NO: 330076 - DNA, 25 bp, Homo sapien
aacccagggacaccgtgctctgcta

SEQ ID NO: 330077 - DNA, 25 bp, Homo sapien
gaagaggagtctcggctgttcccct

SEQ ID NO: 330078 - DNA, 25 bp, Homo sapien
gccggactcagtctctcgcaaggac

SEQ ID NO: 330079 - DNA, 25 bp, Homo sapien
tccagtaccggagccctaactggcg

SEQ ID NO: 330080 - DNA, 25 bp, Homo sapien
aacctgcagtcaccccaaggaagag

SEQ ID NO: 330081 - DNA, 25 bp, Homo sapien
tcctgggggtaccagagtagccagc

SEQ ID NO: 330082 - DNA, 25 bp, Homo sapien
gggctcggtgcgctccgcattctgc

SEQ ID NO: 330083 - DNA, 25 bp, Homo sapien
cggtgcgctccgcattctgctgggc

SEQ ID NO: 330084 - DNA, 25 bp, Homo sapien
tgcgctccgcattctgctgggccgt

SEQ ID NO: 330085 - DNA, 25 bp, Homo sapien
tccgcattctgctgggccgtccggg

SEQ ID NO: 330086 - DNA, 25 bp, Homo sapien
gcatactgagcacacggagccgcgg

SEQ ID NO: 330087 - DNA, 25 bp, Homo sapien
agccgccgctcgctgacctccagga

SEQ ID NO: 330088 - DNA, 25 bp, Homo sapien
ggagccgcggctgtgcgcgccggtc

SEQ ID NO: 330089 - DNA, 25 bp, Homo sapien
gtgcgcgccggtcctctcgcccgcg

SEQ ID NO: 330090 - DNA, 25 bp, Homo sapien
agacaagctggtggtttcctgctcc

SEQ ID NO: 330091 - DNA, 25 bp, Homo sapien
ccaggaagtcaccaatttatgccaa

SEQ ID NO: 330092 - DNA, 25 bp, Homo sapien
atcagtatagtacattacaatccag

SEQ ID NO: 330093 - DNA, 25 bp, Homo sapien
cagacaccccatcagtatagtacat

SEQ ID NO: 330094 - DNA, 25 bp, Homo sapien
gtgcggtggccacgtcatcattggc

SEQ ID NO: 330095 - DNA, 25 bp, Homo sapien
ggctgcagtctattcccagaacaca

SEQ ID NO: 330096 - DNA, 25 bp, Homo sapien
gctgcagtctattcccagaacacat

SEQ ID NO: 330097 - DNA, 25 bp, Homo sapien
ccagaactcagattgtgcggtggcc

SEQ ID NO: 330098 - DNA, 25 bp, Homo sapien
caaggggagttgatccggaggtcaa

SEQ ID NO: 330099 - DNA, 25 bp, Homo sapien
gaggccaaggggagttgatccggag

SEQ ID NO: 330100 - DNA, 25 bp, Homo sapien
gggagttgatccggaggtcaagaga

SEQ ID NO: 330101 - DNA, 25 bp, Homo sapien
gagttgatccggaggtcaagagatt

SEQ ID NO: 330102 - DNA, 25 bp, Homo sapien
ttccaagatggttcatattcacaca

SEQ ID NO: 330103 - DNA, 25 bp, Homo sapien
cgcgggaagactggccacggcaggg

SEQ ID NO: 330104 - DNA, 25 bp, Homo sapien
ctgaggggccccagcttgtcactct

SEQ ID NO: 330105 - DNA, 25 bp, Homo sapien
tctcctgtaggcagccgcttggcag

SEQ ID NO: 330106 - DNA, 25 bp, Homo sapien
tctagtaggagttgccaagcacatc

SEQ ID NO: 330107 - DNA, 25 bp, Homo sapien
ggaagccacccctctgacatatgtg

SEQ ID NO: 330108 - DNA, 25 bp, Homo sapien
gggctgtcctccaaggatccaggat

SEQ ID NO: 330109 - DNA, 25 bp, Homo sapien
tctcttgtgctgtcggagagctggc

SEQ ID NO: 330110 - DNA, 25 bp, Homo sapien
gaacagggccgggagtctgatactt

SEQ ID NO: 330111 - DNA, 25 bp, Homo sapien
cacaggacgagcagtagacttggaa

SEQ ID NO: 330112 - DNA, 25 bp, Homo sapien
ttagtgggctctgaacaccaagaac

SEQ ID NO: 330113 - DNA, 25 bp, Homo sapien
gaacgttccgtcttgtgccattgag

SEQ ID NO: 330114 - DNA, 25 bp, Homo sapien
acaggtaggcacgatcccatcctcg

SEQ ID NO: 330115 - DNA, 25 bp, Homo sapien
ggacaggtaggcacgatcccatcct

SEQ ID NO: 330116 - DNA, 25 bp, Homo sapien
ggtaggcacgatcccatcctcgatc

SEQ ID NO: 330117 - DNA, 25 bp, Homo sapien
aggtaggcacgatcccatcctcgat

SEQ ID NO: 330118 - DNA, 25 bp, Homo sapien
tctcactaactgctttactccgagg

SEQ ID NO: 330119 - DNA, 25 bp, Homo sapien
tcactaactgctttactccgagggc

SEQ ID NO: 330120 - DNA, 25 bp, Homo sapien
ctcactaactgctttactccgaggg

SEQ ID NO: 330121 - DNA, 25 bp, Homo sapien
tgtctggtatgtgggaatcttctgc

SEQ ID NO: 330122 - DNA, 25 bp, Homo sapien
tgtgcctttgccgaacacctccagg

SEQ ID NO: 330123 - DNA, 25 bp, Homo sapien
tgggaatcttctgccccacggcagc

SEQ ID NO: 330124 - DNA, 25 bp, Homo sapien
gcctttgccgaacacctccaggaga

SEQ ID NO: 330125 - DNA, 25 bp, Homo sapien
aatctgcttcaccgtcgcccttgat

SEQ ID NO: 330126 - DNA, 25 bp, Homo sapien
ggcttttgactgccctctggagatg

SEQ ID NO: 330127 - DNA, 25 bp, Homo sapien
gagggataggaacctgttcccactg

SEQ ID NO: 330128 - DNA, 25 bp, Homo sapien
tgagcgagtagagggatccagagtg

SEQ ID NO: 330129 - DNA, 25 bp, Homo sapien
cacttgctgtttcatgtccagcggt

SEQ ID NO: 330130 - DNA, 25 bp, Homo sapien
tccaggataggcacttgctgtttca

SEQ ID NO: 330131 - DNA, 25 bp, Homo sapien
tgtccagcggtgagcgggtagggca

SEQ ID NO: 330132 - DNA, 25 bp, Homo sapien
gcggagccctccaggataggcactt

SEQ ID NO: 330133 - DNA, 25 bp, Homo sapien
agagacccccaggtgcgtcccttca

SEQ ID NO: 330134 - DNA, 25 bp, Homo sapien
gagacccccaggtgcgtcccttcat

SEQ ID NO: 330135 - DNA, 25 bp, Homo sapien
ttaagagcctcacaaggaaactggg

SEQ ID NO: 330136 - DNA, 25 bp, Homo sapien
cagctgtaaggccagtccagggaac

SEQ ID NO: 330137 - DNA, 25 bp, Homo sapien
aaacccttctgagttggccctggag

SEQ ID NO: 330138 - DNA, 25 bp, Homo sapien
ggcgggattaacacaacatttggct

SEQ ID NO: 330139 - DNA, 25 bp, Homo sapien
gctctgtcgactctggtgggtcccc

SEQ ID NO: 330140 - DNA, 25 bp, Homo sapien
tgggtctggtccttaccaacataga

SEQ ID NO: 330141 - DNA, 25 bp, Homo sapien
gagggtcccactcaagccaaaaagc

SEQ ID NO: 330142 - DNA, 25 bp, Homo sapien
aaaaagccgggacctttgcgcagct

SEQ ID NO: 330143 - DNA, 25 bp, Homo sapien
catttctcgcaaatacctcgaaggg

SEQ ID NO: 330144 - DNA, 25 bp, Homo sapien
gaaaagcaattcaccaacgactgat

SEQ ID NO: 330145 - DNA, 25 bp, Homo sapien
cgggatcgcactcctgtactggcca

SEQ ID NO: 330146 - DNA, 25 bp, Homo sapien
agttcatgtcccttgagagtttgta

SEQ ID NO: 330147 - DNA, 25 bp, Homo sapien
cccaattggtgacgctgcaggtgct

SEQ ID NO: 330148 - DNA, 25 bp, Homo sapien
tggactaagtgtgatccggcctgac

SEQ ID NO: 330149 - DNA, 25 bp, Homo sapien
aaggataaccgagatggtcgccagc

SEQ ID NO: 330150 - DNA, 25 bp, Homo sapien
ggtgcttcgcagagtaccaggctga

SEQ ID NO: 330151 - DNA, 25 bp, Homo sapien
tccagtgcaaacagaggactcacac

SEQ ID NO: 330152 - DNA, 25 bp, Homo sapien
caggtagggaatatgtccagtgcaa

SEQ ID NO: 330153 - DNA, 25 bp, Homo sapien
cactgattgtcgctgcagtccacgg

SEQ ID NO: 330154 - DNA, 25 bp, Homo sapien
taggtcgcagggctccatgattgtg

SEQ ID NO: 330155 - DNA, 25 bp, Homo sapien
tactggatcatgttgtaggtccggc

SEQ ID NO: 330156 - DNA, 25 bp, Homo sapien
tagtactggatcatgttgtaggtcc

SEQ ID NO: 330157 - DNA, 25 bp, Homo sapien
tgatagtactggatcatgttgtagg

SEQ ID NO: 330158 - DNA, 25 bp, Homo sapien
ctggatcatgttgtaggtccggctc

SEQ ID NO: 330159 - DNA, 25 bp, Homo sapien
cagcctcgcgctcagtcatgttggg

SEQ ID NO: 330160 - DNA, 25 bp, Homo sapien
gcgctcagtcatgttggggctaaac

SEQ ID NO: 330161 - DNA, 25 bp, Homo sapien
gcagcctcgcgctcagtcatgttgg

SEQ ID NO: 330162 - DNA, 25 bp, Homo sapien
ctcgcgctcagtcatgttggggcta

SEQ ID NO: 330163 - DNA, 25 bp, Homo sapien
ggctgccatgggcagggccgtgctg

SEQ ID NO: 330164 - DNA, 25 bp, Homo sapien
gacggacttcagctgagagccatgc

SEQ ID NO: 330165 - DNA, 25 bp, Homo sapien
agggctgccatgggcagggccgtgc

SEQ ID NO: 330166 - DNA, 25 bp, Homo sapien
acggacttcagctgagagccatgcc

SEQ ID NO: 330167 - DNA, 25 bp, Homo sapien
gtagagcctcacctaggaaccctgt

SEQ ID NO: 330168 - DNA, 25 bp, Homo sapien
ttacacgaaagatacctatcttgga

SEQ ID NO: 330169 - DNA, 25 bp, Homo sapien
ggtctaggggtagagcctcacctag

SEQ ID NO: 330170 - DNA, 25 bp, Homo sapien
aattacacgaaagatacctatcttg

SEQ ID NO: 330171 - DNA, 25 bp, Homo sapien
agagcttgattgtctggccgcgaaa

SEQ ID NO: 330172 - DNA, 25 bp, Homo sapien
tctggccgcgaaaacagggcaggcc

SEQ ID NO: 330173 - DNA, 25 bp, Homo sapien
ccagggagacgaccacatccatgta

SEQ ID NO: 330174 - DNA, 25 bp, Homo sapien
ggcccgtgtccaacatgatagtgac

SEQ ID NO: 330175 - DNA, 25 bp, Homo sapien
gcaactttcgatctgctgcactcgg

SEQ ID NO: 330176 - DNA, 25 bp, Homo sapien
ccaaaggacaggtgtaggtcagcag

SEQ ID NO: 330177 - DNA, 25 bp, Homo sapien
tgtatatgaaactgggacaaagccc

SEQ ID NO: 330178 - DNA, 25 bp, Homo sapien
tgaacccaggttggactgtggcctt

SEQ ID NO: 330179 - DNA, 25 bp, Homo sapien
cgcacagccaggtagcctggacaca

SEQ ID NO: 330180 - DNA, 25 bp, Homo sapien
gcacagccaggtagcctggacacac

SEQ ID NO: 330181 - DNA, 25 bp, Homo sapien
cacttgaagggtgtggcctccatct

SEQ ID NO: 330182 - DNA, 25 bp, Homo sapien
tcaccatctcatccgtcagcttgat

SEQ ID NO: 330183 - DNA, 25 bp, Homo sapien
cgtcagcttgatgtcgggttcccag

SEQ ID NO: 330184 - DNA, 25 bp, Homo sapien
ttgccgcccggcgagctttcaaaca

SEQ ID NO: 330185 - DNA, 25 bp, Homo sapien
gctgcctgtgactgggtaggagcca

SEQ ID NO: 330186 - DNA, 25 bp, Homo sapien
tgactgggtaggagccagggcgggc

SEQ ID NO: 330187 - DNA, 25 bp, Homo sapien
gccagggcgggcaaggacgagtggt

SEQ ID NO: 330188 - DNA, 25 bp, Homo sapien
ccaaagagctgcctgtgactgggta

SEQ ID NO: 330189 - DNA, 25 bp, Homo sapien
gaacagcttggtggccgacagttcg

SEQ ID NO: 330190 - DNA, 25 bp, Homo sapien
gccgacagttcggacctcagagctg

SEQ ID NO: 330191 - DNA, 25 bp, Homo sapien
cttctgactcagagcaatggcggct

SEQ ID NO: 330192 - DNA, 25 bp, Homo sapien
aggcaccctctacagcagaacagct

SEQ ID NO: 330193 - DNA, 25 bp, Homo sapien
cttcttgtccagcataatgttgccg

SEQ ID NO: 330194 - DNA, 25 bp, Homo sapien
cataatgttgccgttgtgtctgtcc

SEQ ID NO: 330195 - DNA, 25 bp, Homo sapien
aatgttgccgttgtgtctgtccttg

SEQ ID NO: 330196 - DNA, 25 bp, Homo sapien
tgtccagcataatgttgccgttgtg

SEQ ID NO: 330197 - DNA, 25 bp, Homo sapien
cagggtgtgggtagaggctgggtat

SEQ ID NO: 330198 - DNA, 25 bp, Homo sapien
aacccttaacaaaggatgactgagg

SEQ ID NO: 330199 - DNA, 25 bp, Homo sapien
gggtagggtggagcgcacacgactt

SEQ ID NO: 330200 - DNA, 25 bp, Homo sapien
gtggagcgcacacgactttccccgg

SEQ ID NO: 330201 - DNA, 25 bp, Homo sapien
gactcatccccgtactggcgtgtga

SEQ ID NO: 330202 - DNA, 25 bp, Homo sapien
tactggcgtgtgaagtagtcgtaca

SEQ ID NO: 330203 - DNA, 25 bp, Homo sapien
gaagtagtcgtacatgccgaagtct

SEQ ID NO: 330204 - DNA, 25 bp, Homo sapien
cgaagtctgtctggcggcccagctg

SEQ ID NO: 330205 - DNA, 25 bp, Homo sapien
tccaggccgaccagctggaagatgt

SEQ ID NO: 330206 - DNA, 25 bp, Homo sapien
gtccaggccgaccagctggaagatg

SEQ ID NO: 330207 - DNA, 25 bp, Homo sapien
ccaggccgaccagctggaagatgtt

SEQ ID NO: 330208 - DNA, 25 bp, Homo sapien
ggtccaggccgaccagctggaagat

SEQ ID NO: 330209 - DNA, 25 bp, Homo sapien
cacctgaaccatgtaagagaaggaa

SEQ ID NO: 330210 - DNA, 25 bp, Homo sapien
tgcagaagccctaatttaccccgtg

SEQ ID NO: 330211 - DNA, 25 bp, Homo sapien
tatgagattggactctggtgggcct

SEQ ID NO: 330212 - DNA, 25 bp, Homo sapien
ttcacatttctgcatatgagattgg

SEQ ID NO: 330213 - DNA, 25 bp, Homo sapien
ctgccggcagtcgtctcccagtttg

SEQ ID NO: 330214 - DNA, 25 bp, Homo sapien
aggagatcttctggccgtcggcctc

SEQ ID NO: 330215 - DNA, 25 bp, Homo sapien
gctgcctgccaggagatcttctggc

SEQ ID NO: 330216 - DNA, 25 bp, Homo sapien
cagtcgtctcccagtttgaagatgg

SEQ ID NO: 330217 - DNA, 25 bp, Homo sapien
gagatcgtccgtacggtagccctgg

SEQ ID NO: 330218 - DNA, 25 bp, Homo sapien
agatcgtccgtacggtagccctggg

SEQ ID NO: 330219 - DNA, 25 bp, Homo sapien
tgagatcgtccgtacggtagccctg

SEQ ID NO: 330220 - DNA, 25 bp, Homo sapien
cttgaacttggccagatatggggct

SEQ ID NO: 330221 - DNA, 25 bp, Homo sapien
aagttcactaactccacatcgcttc

SEQ ID NO: 330222 - DNA, 25 bp, Homo sapien
actaactccacatcgcttcaccttg

SEQ ID NO: 330223 - DNA, 25 bp, Homo sapien
accttgaacttggccagatatgggg

SEQ ID NO: 330224 - DNA, 25 bp, Homo sapien
tctgcatcggggtcccagacttgta

SEQ ID NO: 330225 - DNA, 25 bp, Homo sapien
tagtcgacgtccagcacaatggctt

SEQ ID NO: 330226 - DNA, 25 bp, Homo sapien
gacttgtagtcgacgtccagcacaa

SEQ ID NO: 330227 - DNA, 25 bp, Homo sapien
tcccagacttgtagtcgacgtccag

SEQ ID NO: 330228 - DNA, 25 bp, Homo sapien
tacccatttgaacactactctctca

SEQ ID NO: 330229 - DNA, 25 bp, Homo sapien
tccttacccatttgaacactactct

SEQ ID NO: 330230 - DNA, 25 bp, Homo sapien
cttacccatttgaacactactctct

SEQ ID NO: 330231 - DNA, 25 bp, Homo sapien
cttccttacccatttgaacactact

SEQ ID NO: 330232 - DNA, 25 bp, Homo sapien
tctctcgtcgcctttagggtagggc

SEQ ID NO: 330233 - DNA, 25 bp, Homo sapien
gtcacttcagacagggccgacagac

SEQ ID NO: 330234 - DNA, 25 bp, Homo sapien
tggctgcaccgtcacttcagacagg

SEQ ID NO: 330235 - DNA, 25 bp, Homo sapien
gggccgacagacaagccttctttct

SEQ ID NO: 330236 - DNA, 25 bp, Homo sapien
cgctggtaaaagtccttcgctgggc

SEQ ID NO: 330237 - DNA, 25 bp, Homo sapien
taaaagtccttcgctgggcccgaca

SEQ ID NO: 330238 - DNA, 25 bp, Homo sapien
cccgctggtaaaagtccttcgctgg

SEQ ID NO: 330239 - DNA, 25 bp, Homo sapien
aagtccttcgctgggcccgacaagg

SEQ ID NO: 330240 - DNA, 25 bp, Homo sapien
aacaagctggctggcggtcaggtac

SEQ ID NO: 330241 - DNA, 25 bp, Homo sapien
tcttatctgagaacatggcggtcca

SEQ ID NO: 330242 - DNA, 25 bp, Homo sapien
gatgcttatgtcttcacgcagccgc

SEQ ID NO: 330243 - DNA, 25 bp, Homo sapien
ctctccttgagtaggaaactttggg

SEQ ID NO: 330244 - DNA, 25 bp, Homo sapien
ttcaaacaaccataagaggacaacg

SEQ ID NO: 330245 - DNA, 25 bp, Homo sapien
aacaaccataagaggacaacggctg

SEQ ID NO: 330246 - DNA, 25 bp, Homo sapien
caaccataagaggacaacggctgag

SEQ ID NO: 330247 - DNA, 25 bp, Homo sapien
cataagaggacaacggctgagtgtc

SEQ ID NO: 330248 - DNA, 25 bp, Homo sapien
gatcttctcgcgaagcacattgcgg

SEQ ID NO: 330249 - DNA, 25 bp, Homo sapien
gtcaaaggcagtggagtagatcttc

SEQ ID NO: 330250 - DNA, 25 bp, Homo sapien
gcacattgcggatggttgcatttgg

SEQ ID NO: 330251 - DNA, 25 bp, Homo sapien
catttggaaccacatcggcatgcag

SEQ ID NO: 330252 - DNA, 25 bp, Homo sapien
gtgatacacagacgccccatgacac

SEQ ID NO: 330253 - DNA, 25 bp, Homo sapien
gggccaagttcaccttatggactct

SEQ ID NO: 330254 - DNA, 25 bp, Homo sapien
ttccccgtctacagaagtaccgtga

SEQ ID NO: 330255 - DNA, 25 bp, Homo sapien
ccatgacacactgtacacaccaggg

SEQ ID NO: 330256 - DNA, 25 bp, Homo sapien
gagctgcagtacttggcgatctcaa

SEQ ID NO: 330257 - DNA, 25 bp, Homo sapien
acgtgccggttcatgctccccttgg

SEQ ID NO: 330258 - DNA, 25 bp, Homo sapien
tccacttggtcagagctgcagtact

SEQ ID NO: 330259 - DNA, 25 bp, Homo sapien
ggcgatctcaaaccgctgcaccagg

SEQ ID NO: 330260 - DNA, 25 bp, Homo sapien
ctgagcgaaaagaggaagacgctgt

SEQ ID NO: 330261 - DNA, 25 bp, Homo sapien
acgctgtggtggtggggctgagccg

SEQ ID NO: 330262 - DNA, 25 bp, Homo sapien
tgagcgaaaagaggaagacgctgtg

SEQ ID NO: 330263 - DNA, 25 bp, Homo sapien
ggtggtggggctgagccgggctaac

SEQ ID NO: 330264 - DNA, 25 bp, Homo sapien
ttctgggctgactggccgagcttgc

SEQ ID NO: 330265 - DNA, 25 bp, Homo sapien
gccgaaggccttgggctcggctacc

SEQ ID NO: 330266 - DNA, 25 bp, Homo sapien
ccgagcttgccgaaggccttgggct

SEQ ID NO: 330267 - DNA, 25 bp, Homo sapien
ctgactggccgagcttgccgaaggc

SEQ ID NO: 330268 - DNA, 25 bp, Homo sapien
cctttatctcagcagaaaacaggcc

SEQ ID NO: 330269 - DNA, 25 bp, Homo sapien
ccagggggtctgcttcctttatctc

SEQ ID NO: 330270 - DNA, 25 bp, Homo sapien
tgggttgacttgcttccgaggcagc

SEQ ID NO: 330271 - DNA, 25 bp, Homo sapien
tccagatgtagtggggggtcacttc

SEQ ID NO: 330272 - DNA, 25 bp, Homo sapien
ccagcccctgccatctcccgcatga

SEQ ID NO: 330273 - DNA, 25 bp, Homo sapien
cagcccctgccatctcccgcatgaa

SEQ ID NO: 330274 - DNA, 25 bp, Homo sapien
gtgccagcccctgccatctcccgca

SEQ ID NO: 330275 - DNA, 25 bp, Homo sapien
gccagcccctgccatctcccgcatg

SEQ ID NO: 330276 - DNA, 25 bp, Homo sapien
aggtacagaaggaatgttagctcct

SEQ ID NO: 330277 - DNA, 25 bp, Homo sapien
ctacaggtacagaaggaatgttagc

SEQ ID NO: 330278 - DNA, 25 bp, Homo sapien
tacaggtacagaaggaatgttagct

SEQ ID NO: 330279 - DNA, 25 bp, Homo sapien
caggtacagaaggaatgttagctcc

SEQ ID NO: 330280 - DNA, 25 bp, Homo sapien
tataaccctgataaccctctgtggc

SEQ ID NO: 330281 - DNA, 25 bp, Homo sapien
aaaaaaggaacacgtgctcactgaa

SEQ ID NO: 330282 - DNA, 25 bp, Homo sapien
tgttcaacccggttcaccgtgtgga

SEQ ID NO: 330283 - DNA, 25 bp, Homo sapien
ggcagcacccgggatgtacctgatg

SEQ ID NO: 330284 - DNA, 25 bp, Homo sapien
tctggccaaagaggattctatccct

SEQ ID NO: 330285 - DNA, 25 bp, Homo sapien
ttctacaagggctccaagcgcctgt

SEQ ID NO: 330286 - DNA, 25 bp, Homo sapien
tggaaagcccccatgatttctgggt

SEQ ID NO: 330287 - DNA, 25 bp, Homo sapien
cgctaaccagattaggaaggcccat

SEQ ID NO: 330288 - DNA, 25 bp, Homo sapien
tcttcctcatgaggtggatcagggt

SEQ ID NO: 330289 - DNA, 25 bp, Homo sapien
cttcctcatgaggtggatcagggtg

SEQ ID NO: 330290 - DNA, 25 bp, Homo sapien
tgccacggacaagaagccatcgaag

SEQ ID NO: 330291 - DNA, 25 bp, Homo sapien
catgacgcagcctatggtgggagca

SEQ ID NO: 330292 - DNA, 25 bp, Homo sapien
tgttaaacaaccacatcctggtggc

SEQ ID NO: 330293 - DNA, 25 bp, Homo sapien
taatcagttcaccatgcaggccatg

SEQ ID NO: 330294 - DNA, 25 bp, Homo sapien
cctggctgagcagcccctactctta

SEQ ID NO: 330295 - DNA, 25 bp, Homo sapien
ctactcttaaggcccaccgaggtct

SEQ ID NO: 330296 - DNA, 25 bp, Homo sapien
tactcttaaggcccaccgaggtctg

SEQ ID NO: 330297 - DNA, 25 bp, Homo sapien
gctgagcagcccctactcttaaggc

SEQ ID NO: 330298 - DNA, 25 bp, Homo sapien
ctcctgagcgcgtggccttcctggg

SEQ ID NO: 330299 - DNA, 25 bp, Homo sapien
gcgggggggcctcctgagcgcgtgg

SEQ ID NO: 330300 - DNA, 25 bp, Homo sapien
ccttcctgggggtgcatcaatgcct

SEQ ID NO: 330301 - DNA, 25 bp, Homo sapien
agagtgccaagggcccagacaccat

SEQ ID NO: 330302 - DNA, 25 bp, Homo sapien
ccagcgaacaggtctagggagttcg

SEQ ID NO: 330303 - DNA, 25 bp, Homo sapien
gaagagtaaggaccagcgaacaggt

SEQ ID NO: 330304 - DNA, 25 bp, Homo sapien
gtctagggagttcggtgggtgcaat

SEQ ID NO: 330305 - DNA, 25 bp, Homo sapien
gacagccaggaagagtaaggaccag

SEQ ID NO: 330306 - DNA, 25 bp, Homo sapien
tgggctttcaataccggcccaccaa

SEQ ID NO: 330307 - DNA, 25 bp, Homo sapien
tatctcccaagttaggatccctcag

SEQ ID NO: 330308 - DNA, 25 bp, Homo sapien
gctctctctgcggaatcctgaaggt

SEQ ID NO: 330309 - DNA, 25 bp, Homo sapien
ccctgtaggtggactggccccagct

SEQ ID NO: 330310 - DNA, 25 bp, Homo sapien
gcagacacacggccctgtttacgga

SEQ ID NO: 330311 - DNA, 25 bp, Homo sapien
tctgcaaggcccagtcagagcctac

SEQ ID NO: 330312 - DNA, 25 bp, Homo sapien
cagtcagagcctacccggcccagca

SEQ ID NO: 330313 - DNA, 25 bp, Homo sapien
ctctgcaaggcccagtcagagccta

SEQ ID NO: 330314 - DNA, 25 bp, Homo sapien
agcctacccggcccagcaagtccat

SEQ ID NO: 330315 - DNA, 25 bp, Homo sapien
gatcaaagtgatccctgctgaggca

SEQ ID NO: 330316 - DNA, 25 bp, Homo sapien
acttcagtctaaggtcagcatcggc

SEQ ID NO: 330317 - DNA, 25 bp, Homo sapien
ttcttctaagcacccagcaaagggc

SEQ ID NO: 330318 - DNA, 25 bp, Homo sapien
gatacccaccttgcctagaaccttg

SEQ ID NO: 330319 - DNA, 25 bp, Homo sapien
ccaggtggaagggactatcgtgatc

SEQ ID NO: 330320 - DNA, 25 bp, Homo sapien
cgtgatcatctctctcaccctaggg

SEQ ID NO: 330321 - DNA, 25 bp, Homo sapien
gggactatcgtgatcatctctctca

SEQ ID NO: 330322 - DNA, 25 bp, Homo sapien
gatcatctctctcaccctagggaca

SEQ ID NO: 330323 - DNA, 25 bp, Homo sapien
gctttggagggctcagttcccacaa

SEQ ID NO: 330324 - DNA, 25 bp, Homo sapien
cacacttgggcagctatgacaacaa

SEQ ID NO: 330325 - DNA, 25 bp, Homo sapien
caccctgtcctaatcatacaaagca

SEQ ID NO: 330326 - DNA, 25 bp, Homo sapien
taaagctgaggtgcactcacagagc

SEQ ID NO: 330327 - DNA, 25 bp, Homo sapien
aaagttgctatgtaggccaggtacg

SEQ ID NO: 330328 - DNA, 25 bp, Homo sapien
cagtctcgctaacgtggtgaaatcc

SEQ ID NO: 330329 - DNA, 25 bp, Homo sapien
gcaagactccgcttcaaggaaaaac

SEQ ID NO: 330330 - DNA, 25 bp, Homo sapien
aacaaagttgctatgtaggctgggc

SEQ ID NO: 330331 - DNA, 25 bp, Homo sapien
ggccctaccagcggcccttgtcctc

SEQ ID NO: 330332 - DNA, 25 bp, Homo sapien
gccctaccagcggcccttgtcctca

SEQ ID NO: 330333 - DNA, 25 bp, Homo sapien
ggctcggctccccgcctagcgcgcc

SEQ ID NO: 330334 - DNA, 25 bp, Homo sapien
gggttggacataagacagaaaaata

SEQ ID NO: 330335 - DNA, 25 bp, Homo sapien
tttaatgaggggttggacataagac

SEQ ID NO: 330336 - DNA, 25 bp, Homo sapien
gaggggttggacataagacagaaaa

SEQ ID NO: 330337 - DNA, 25 bp, Homo sapien
aatgaggggttggacataagacaga

SEQ ID NO: 330338 - DNA, 25 bp, Homo sapien
tccattgagcgcacagcttctggag

SEQ ID NO: 330339 - DNA, 25 bp, Homo sapien
tatactcttgactgaagaccgatcg

SEQ ID NO: 330340 - DNA, 25 bp, Homo sapien
tcttgactgaagaccgatcgtcctc

SEQ ID NO: 330341 - DNA, 25 bp, Homo sapien
tcatcctcttccattgagcgcacag

SEQ ID NO: 330342 - DNA, 25 bp, Homo sapien
gactaccatcagtttaacacagtgg

SEQ ID NO: 330343 - DNA, 25 bp, Homo sapien
gagactttcgtacaaggcaatggac

SEQ ID NO: 330344 - DNA, 25 bp, Homo sapien
aaaaaggcgcttctccgtatacctg

SEQ ID NO: 330345 - DNA, 25 bp, Homo sapien
cagaggccactacctgggcaaggat

SEQ ID NO: 330346 - DNA, 25 bp, Homo sapien
ccaggatcatagtccagagctgcta

SEQ ID NO: 330347 - DNA, 25 bp, Homo sapien
cacttgcctgttgcactcgctgagg

SEQ ID NO: 330348 - DNA, 25 bp, Homo sapien
tgagcccctgaaagtcctcgaggtg

SEQ ID NO: 330349 - DNA, 25 bp, Homo sapien
tccttggtcatccatgggcccgtaa

SEQ ID NO: 330350 - DNA, 25 bp, Homo sapien
actttggcggatggagctggacaca

SEQ ID NO: 330351 - DNA, 25 bp, Homo sapien
tttgccgaagtaccctctcaagggc

SEQ ID NO: 330352 - DNA, 25 bp, Homo sapien
ggcccacactcggtgcgtagatgga

SEQ ID NO: 330353 - DNA, 25 bp, Homo sapien
ccttctgagcccaggttggacactg

SEQ ID NO: 330354 - DNA, 25 bp, Homo sapien
ggatgggtcgccacaagtgtagcta

SEQ ID NO: 330355 - DNA, 25 bp, Homo sapien
ggagtctctggccatcggtgacaca

SEQ ID NO: 330356 - DNA, 25 bp, Homo sapien
tcagggcatgctctcggtcatcaag

SEQ ID NO: 330357 - DNA, 25 bp, Homo sapien
gacggtggaggacatagttccccaa

SEQ ID NO: 330358 - DNA, 25 bp, Homo sapien
gctggcaggcttccgtcttggtatc

SEQ ID NO: 330359 - DNA, 25 bp, Homo sapien
cagcctgggatgtagctgtccggaa

SEQ ID NO: 330360 - DNA, 25 bp, Homo sapien
tcttggtatccaggatctctgttgc

SEQ ID NO: 330361 - DNA, 25 bp, Homo sapien
cagataataagctgtcttcctccag

SEQ ID NO: 330362 - DNA, 25 bp, Homo sapien
caccctcagggtgatcattgggccc

SEQ ID NO: 330363 - DNA, 25 bp, Homo sapien
catcgacccctcagaggaggagttt

SEQ ID NO: 330364 - DNA, 25 bp, Homo sapien
caggtcatccacctcactggctgtg

SEQ ID NO: 330365 - DNA, 25 bp, Homo sapien
gatatatatgtagtccccagctgtg

SEQ ID NO: 330366 - DNA, 25 bp, Homo sapien
taacttgggactccggcatttgact

SEQ ID NO: 330367 - DNA, 25 bp, Homo sapien
tcttcaggccgtgcgtggaacttgg

SEQ ID NO: 330368 - DNA, 25 bp, Homo sapien
tctctgttgggctgtgacactgcgt

SEQ ID NO: 330369 - DNA, 25 bp, Homo sapien
tttcttggacagaggttggctggca

SEQ ID NO: 330370 - DNA, 25 bp, Homo sapien
tgcagcagctgttcggcgatcaagc

SEQ ID NO: 330371 - DNA, 25 bp, Homo sapien
gctttatcagctcgtggtggcccag

SEQ ID NO: 330372 - DNA, 25 bp, Homo sapien
tctctgacgttgagccactgggtgc

SEQ ID NO: 330373 - DNA, 25 bp, Homo sapien
gccagccaggcgtttttgagcagcg

SEQ ID NO: 330374 - DNA, 25 bp, Homo sapien
tggcgtgcgtggagagcaggccgtc

SEQ ID NO: 330375 - DNA, 25 bp, Homo sapien
agctggagcacgcagaggacaccag

SEQ ID NO: 330376 - DNA, 25 bp, Homo sapien
caggtgcgaagcaatcaagggagct

SEQ ID NO: 330377 - DNA, 25 bp, Homo sapien
tgctgtcaagcgagcgggaacacgc

SEQ ID NO: 330378 - DNA, 25 bp, Homo sapien
aagtgcgccaggatgtacttgagga

SEQ ID NO: 330379 - DNA, 25 bp, Homo sapien
caggctgtctagagatccgagttgg

SEQ ID NO: 330380 - DNA, 25 bp, Homo sapien
tcgccgtcagtctgccagcgaagct

SEQ ID NO: 330381 - DNA, 25 bp, Homo sapien
cggtgatcccgacaaagccgggtgc

SEQ ID NO: 330382 - DNA, 25 bp, Homo sapien
cgccatcgcgctcccggtgcagcag

SEQ ID NO: 330383 - DNA, 25 bp, Homo sapien
atcgcgctcccggtgcagcagctgc

SEQ ID NO: 330384 - DNA, 25 bp, Homo sapien
ccatcgcgctcccggtgcagcagct

SEQ ID NO: 330385 - DNA, 25 bp, Homo sapien
cacgccatcgcgctcccggtgcagc

SEQ ID NO: 330386 - DNA, 25 bp, Homo sapien
ttggagcgcagacggtcagccagct

SEQ ID NO: 330387 - DNA, 25 bp, Homo sapien
gcttcttgggcgacgcgcccaaggg

SEQ ID NO: 330388 - DNA, 25 bp, Homo sapien
cgcaactcccggctgcgctgtgcct

SEQ ID NO: 330389 - DNA, 25 bp, Homo sapien
tcggcctcctcacgcagctggcgct

SEQ ID NO: 330390 - DNA, 25 bp, Homo sapien
tcctgccgcggatgtctggcccagg

SEQ ID NO: 330391 - DNA, 25 bp, Homo sapien
actggcccatgtcccttccaggatg

SEQ ID NO: 330392 - DNA, 25 bp, Homo sapien
tacacttttcctgcttctagcacca

SEQ ID NO: 330393 - DNA, 25 bp, Homo sapien
tgggcatacctggtcgtgggttcag

SEQ ID NO: 330394 - DNA, 25 bp, Homo sapien
aaaaaattaacaacaggccagatgt

SEQ ID NO: 330395 - DNA, 25 bp, Homo sapien
caacaggccagatgtgacggctcat

SEQ ID NO: 330396 - DNA, 25 bp, Homo sapien
aaattaacaacaggccagatgtgac

SEQ ID NO: 330397 - DNA, 25 bp, Homo sapien
ttaacaacaggccagatgtgacggc

SEQ ID NO: 330398 - DNA, 25 bp, Homo sapien
cacatactctagaattccagagctg

SEQ ID NO: 330399 - DNA, 25 bp, Homo sapien
gtttctccttctgacccttgctgca

SEQ ID NO: 330400 - DNA, 25 bp, Homo sapien
ttctctttcaaccttgaagcagaaa

SEQ ID NO: 330401 - DNA, 25 bp, Homo sapien
cagaaagttaagaaagttgcttctg

SEQ ID NO: 330402 - DNA, 25 bp, Homo sapien
tgaaagattggaaaaccagttctaa

SEQ ID NO: 330403 - DNA, 25 bp, Homo sapien
gaaggtagtttatgaacattatgaa

SEQ ID NO: 330404 - DNA, 25 bp, Homo sapien
ggcatagaactggtacggtgtcact

SEQ ID NO: 330405 - DNA, 25 bp, Homo sapien
cattggaccccttcatagcatggtg

SEQ ID NO: 330406 - DNA, 25 bp, Homo sapien
gaagagctggtaggcatagtgcaca

SEQ ID NO: 330407 - DNA, 25 bp, Homo sapien
gattcttttggtcaggcaagtccag

SEQ ID NO: 330408 - DNA, 25 bp, Homo sapien
cagcctgtccttagcccagtgaggt

SEQ ID NO: 330409 - DNA, 25 bp, Homo sapien
tatcagagagtgaggtgaaaactcc

SEQ ID NO: 330410 - DNA, 25 bp, Homo sapien
ggaaaagggagcagtctcacaccga

SEQ ID NO: 330411 - DNA, 25 bp, Homo sapien
tgcccctaacgaagtactcagcctg

SEQ ID NO: 330412 - DNA, 25 bp, Homo sapien
agtgtgtgtaactgacctctggcct

SEQ ID NO: 330413 - DNA, 25 bp, Homo sapien
acatcagttaattgggcaagccctg

SEQ ID NO: 330414 - DNA, 25 bp, Homo sapien
gcttttcttagcatgtgtggcactg

SEQ ID NO: 330415 - DNA, 25 bp, Homo sapien
caaaggagaaaagactgccctggcg

SEQ ID NO: 330416 - DNA, 25 bp, Homo sapien
ctataatcacaggtctgtggtggcc

SEQ ID NO: 330417 - DNA, 25 bp, Homo sapien
aggtctgtggtggccccgaaatggg

SEQ ID NO: 330418 - DNA, 25 bp, Homo sapien
acaggtctgtggtggccccgaaatg

SEQ ID NO: 330419 - DNA, 25 bp, Homo sapien
tcacaggtctgtggtggccccgaaa

SEQ ID NO: 330420 - DNA, 25 bp, Homo sapien
tgaatctcgccagaaaggctcctga

SEQ ID NO: 330421 - DNA, 25 bp, Homo sapien
tttgtcctaggtacgccaagggcag

SEQ ID NO: 330422 - DNA, 25 bp, Homo sapien
ggaagccgacgatccaaatgccgtg

SEQ ID NO: 330423 - DNA, 25 bp, Homo sapien
ctaacattgttcaggcgcatggccc

SEQ ID NO: 330424 - DNA, 25 bp, Homo sapien
tcttggaaactgtcccattgcttcg

SEQ ID NO: 330425 - DNA, 25 bp, Homo sapien
gcactctgctcatcacgggaggata

SEQ ID NO: 330426 - DNA, 25 bp, Homo sapien
ttggccccgtcagcagaggcttggc

SEQ ID NO: 330427 - DNA, 25 bp, Homo sapien
gtatttctgccaacgtagctctgcc

SEQ ID NO: 330428 - DNA, 25 bp, Homo sapien
aatgctcatggtcagccggctgctg

SEQ ID NO: 330429 - DNA, 25 bp, Homo sapien
caaatgctcatggtcagccggctgc

SEQ ID NO: 330430 - DNA, 25 bp, Homo sapien
actcaaatgctcatggtcagccggc

SEQ ID NO: 330431 - DNA, 25 bp, Homo sapien
tgctcatggtcagccggctgctgtg

SEQ ID NO: 330432 - DNA, 25 bp, Homo sapien
tgattccagctcacaagcatgggtg

SEQ ID NO: 330433 - DNA, 25 bp, Homo sapien
ccctcaagggagctacgtctgtatc

SEQ ID NO: 330434 - DNA, 25 bp, Homo sapien
gagtccaagtctagtgaaggtcaag

SEQ ID NO: 330435 - DNA, 25 bp, Homo sapien
tgtatccccggctaacttcaggcca

SEQ ID NO: 330436 - DNA, 25 bp, Homo sapien
agtcaacagatcgtgctccaggtcc

SEQ ID NO: 330437 - DNA, 25 bp, Homo sapien
agaaggctgctcaaactctagatgc

SEQ ID NO: 330438 - DNA, 25 bp, Homo sapien
agtgtcctacccagggaagtcaaca

SEQ ID NO: 330439 - DNA, 25 bp, Homo sapien
gggcaccaaatgctctgcgggccct

SEQ ID NO: 330440 - DNA, 25 bp, Homo sapien
gggttccagagtgggctcacagggg

SEQ ID NO: 330441 - DNA, 25 bp, Homo sapien
ggttccagagtgggctcacagggga

SEQ ID NO: 330442 - DNA, 25 bp, Homo sapien
tccaggtcgtcgagggcgcaaagct

SEQ ID NO: 330443 - DNA, 25 bp, Homo sapien
gtgtggcccgctagggtaccttcca

SEQ ID NO: 330444 - DNA, 25 bp, Homo sapien
atgtgccggccgcaagtgctcaggc

SEQ ID NO: 330445 - DNA, 25 bp, Homo sapien
tgcgccatcagctcggctgtcaggg

SEQ ID NO: 330446 - DNA, 25 bp, Homo sapien
gaaacggacacagctagccaggtga

SEQ ID NO: 330447 - DNA, 25 bp, Homo sapien
tagccaggtgaacagccagtgcgga

SEQ ID NO: 330448 - DNA, 25 bp, Homo sapien
tcgcttccgggttgagaaacggaca

SEQ ID NO: 330449 - DNA, 25 bp, Homo sapien
ccatggccaagggctaggtaggcta

SEQ ID NO: 330450 - DNA, 25 bp, Homo sapien
gcgctccagcggcagtcgcgtaaag

SEQ ID NO: 330451 - DNA, 25 bp, Homo sapien
gcctcggcgaacacctggcacacgc

SEQ ID NO: 330452 - DNA, 25 bp, Homo sapien
taaagcgcaccccataggcctgcag

SEQ ID NO: 330453 - DNA, 25 bp, Homo sapien
cggcgcaggcgaaggcacgcgcggg

SEQ ID NO: 330454 - DNA, 25 bp, Homo sapien
ttcacctgggggcatcgaacttccc

SEQ ID NO: 330455 - DNA, 25 bp, Homo sapien
caaactgggatcactaaccacgcac

SEQ ID NO: 330456 - DNA, 25 bp, Homo sapien
cagccccgcctgggagtaacgccct

SEQ ID NO: 330457 - DNA, 25 bp, Homo sapien
tgggggcatcgaacttcccctactc

SEQ ID NO: 330458 - DNA, 25 bp, Homo sapien
tgcacgtgctggtgcccgtccgcgt

SEQ ID NO: 330459 - DNA, 25 bp, Homo sapien
agcacgtgcacgtgctggtgcccgt

SEQ ID NO: 330460 - DNA, 25 bp, Homo sapien
gaagcagcttagttgggcctcgagc

SEQ ID NO: 330461 - DNA, 25 bp, Homo sapien
agctcccggaagcagcttagttggg

SEQ ID NO: 330462 - DNA, 25 bp, Homo sapien
gagtagctgccgaggataccctcct

SEQ ID NO: 330463 - DNA, 25 bp, Homo sapien
tcgtgcttccgtgtgatggctccag

SEQ ID NO: 330464 - DNA, 25 bp, Homo sapien
cagtgtttgaatgcggaagtcatcc

SEQ ID NO: 330465 - DNA, 25 bp, Homo sapien
caccttgagcgaccgggagtagctg

SEQ ID NO: 330466 - DNA, 25 bp, Homo sapien
ctcgcgagcatcctcctgtagctgc

SEQ ID NO: 330467 - DNA, 25 bp, Homo sapien
tgggggtcctcgcgagcatcctcct

SEQ ID NO: 330468 - DNA, 25 bp, Homo sapien
ggtcctcgcgagcatcctcctgtag

SEQ ID NO: 330469 - DNA, 25 bp, Homo sapien
ggggtcctcgcgagcatcctcctgt

SEQ ID NO: 330470 - DNA, 25 bp, Homo sapien
tgaggcaaatccacgtctccggccg

SEQ ID NO: 330471 - DNA, 25 bp, Homo sapien
gggccgagcagcgatgaggcgccac

SEQ ID NO: 330472 - DNA, 25 bp, Homo sapien
caaggaagaagccttccgggccgag

SEQ ID NO: 330473 - DNA, 25 bp, Homo sapien
cggaatcccatcttgccaaggaaga

SEQ ID NO: 330474 - DNA, 25 bp, Homo sapien
gctggagcactagcggccgcggagc

SEQ ID NO: 330475 - DNA, 25 bp, Homo sapien
gagctggagcactagcggccgcgga

SEQ ID NO: 330476 - DNA, 25 bp, Homo sapien
cgcgcgccccaagccgatcgccgcc

SEQ ID NO: 330477 - DNA, 25 bp, Homo sapien
gatcgccgccctgctagaggccctc

SEQ ID NO: 330478 - DNA, 25 bp, Homo sapien
ataccctcatcgcgtcgcgggcagt

SEQ ID NO: 330479 - DNA, 25 bp, Homo sapien
gtccgcggtgaccaccaggcgcatg

SEQ ID NO: 330480 - DNA, 25 bp, Homo sapien
agaaaggcctccacgataccctcat

SEQ ID NO: 330481 - DNA, 25 bp, Homo sapien
gcagtaaccaaagtcgtccgcggtg

SEQ ID NO: 330482 - DNA, 25 bp, Homo sapien
cgcctgggtccaccgctcgcgctcc

SEQ ID NO: 330483 - DNA, 25 bp, Homo sapien
ggccgcctgggtccaccgctcgcgc

SEQ ID NO: 330484 - DNA, 25 bp, Homo sapien
cctgggtccaccgctcgcgctccca

SEQ ID NO: 330485 - DNA, 25 bp, Homo sapien
gccgcctgggtccaccgctcgcgct

SEQ ID NO: 330486 - DNA, 25 bp, Homo sapien
acacgcccaggtgcggctgcacttc

SEQ ID NO: 330487 - DNA, 25 bp, Homo sapien
ccaggtgcggctgcacttcgccttt

SEQ ID NO: 330488 - DNA, 25 bp, Homo sapien
gccccgacgcacacgcccaggtgcg

SEQ ID NO: 330489 - DNA, 25 bp, Homo sapien
gacgcacacgcccaggtgcggctgc

SEQ ID NO: 330490 - DNA, 25 bp, Homo sapien
gaagaacactcaagcccatttacag

SEQ ID NO: 330491 - DNA, 25 bp, Homo sapien
taggtctgtgacttagagccggcac

SEQ ID NO: 330492 - DNA, 25 bp, Homo sapien
tggctttggcttttaggctcccctc

SEQ ID NO: 330493 - DNA, 25 bp, Homo sapien
ttgagtcacattggcaggaaagagc

SEQ ID NO: 330494 - DNA, 25 bp, Homo sapien
aagaccggtgcggagctcgtgacct

SEQ ID NO: 330495 - DNA, 25 bp, Homo sapien
ggctgcactcgcacgacatcaaata

SEQ ID NO: 330496 - DNA, 25 bp, Homo sapien
tgctgctggcgctgttagtgccggg

SEQ ID NO: 330497 - DNA, 25 bp, Homo sapien
cgggtcggtgctgaagctgctcaat

SEQ ID NO: 330498 - DNA, 25 bp, Homo sapien
ttgtacactgggtaagggactcctg

SEQ ID NO: 330499 - DNA, 25 bp, Homo sapien
tagcactttgcactggccttgtaca

SEQ ID NO: 330500 - DNA, 25 bp, Homo sapien
actctgtagcactttgcactggcct

SEQ ID NO: 330501 - DNA, 25 bp, Homo sapien
tgcactggccttgtacactgggtaa

SEQ ID NO: 330502 - DNA, 25 bp, Homo sapien
tgtcggtgtcgctagaaaactcgca

SEQ ID NO: 330503 - DNA, 25 bp, Homo sapien
tgagcgcagcgctatgctaaggagt

SEQ ID NO: 330504 - DNA, 25 bp, Homo sapien
cattgttaaaaccacggagcccgag

SEQ ID NO: 330505 - DNA, 25 bp, Homo sapien
actgtcagcgggttaaagatggagc

SEQ ID NO: 330506 - DNA, 25 bp, Homo sapien
gagcccaagtgtacctgacaagtct

SEQ ID NO: 330507 - DNA, 25 bp, Homo sapien
gattaaacgtctcaggcacactatg

SEQ ID NO: 330508 - DNA, 25 bp, Homo sapien
ggcacactatggatctcagggctga

SEQ ID NO: 330509 - DNA, 25 bp, Homo sapien
tgcctgcactcctagacaagatgat

SEQ ID NO: 330510 - DNA, 25 bp, Homo sapien
tctcctactcttgttgcaggcgaag

SEQ ID NO: 330511 - DNA, 25 bp, Homo sapien
gctgggcgggaactgtcactacccg

SEQ ID NO: 330512 - DNA, 25 bp, Homo sapien
taggatctatcagaaagccgaggct

SEQ ID NO: 330513 - DNA, 25 bp, Homo sapien
ctaggaaagagctccgacgattgga

SEQ ID NO: 330514 - DNA, 25 bp, Homo sapien
tgctcaccttggtgagtgttttgga

SEQ ID NO: 330515 - DNA, 25 bp, Homo sapien
ccacctttccgagagagagagccct

SEQ ID NO: 330516 - DNA, 25 bp, Homo sapien
gaaggcctgtaggtagggctggctc

SEQ ID NO: 330517 - DNA, 25 bp, Homo sapien
tcaccttggtgagtgttttggagtg

SEQ ID NO: 330518 - DNA, 25 bp, Homo sapien
acttgcagggcagtggagggaaggg

SEQ ID NO: 330519 - DNA, 25 bp, Homo sapien
tgcagggcagtggagggaagggacc

SEQ ID NO: 330520 - DNA, 25 bp, Homo sapien
gcagtggagggaagggaccaaagac

SEQ ID NO: 330521 - DNA, 25 bp, Homo sapien
cgacttgcagggcagtggagggaag

SEQ ID NO: 330522 - DNA, 25 bp, Homo sapien
tgcacacatgcgtccgtggaagctg

SEQ ID NO: 330523 - DNA, 25 bp, Homo sapien
gcctggacgacctgagcattttctt

SEQ ID NO: 330524 - DNA, 25 bp, Homo sapien
ggctaatgacctgccctggtgggca

SEQ ID NO: 330525 - DNA, 25 bp, Homo sapien
cataccatctttggacggtaaggga

SEQ ID NO: 330526 - DNA, 25 bp, Homo sapien
catcatgctaagaacaagaactgcg

SEQ ID NO: 330527 - DNA, 25 bp, Homo sapien
tctagagtgacttttgacgccctcc

SEQ ID NO: 330528 - DNA, 25 bp, Homo sapien
cagtaactggcttgtaagaggctca

SEQ ID NO: 330529 - DNA, 25 bp, Homo sapien
caggctgcctgatgaccactagagg

SEQ ID NO: 330530 - DNA, 25 bp, Homo sapien
ggcacagtaggacacagtgactgcc

SEQ ID NO: 330531 - DNA, 25 bp, Homo sapien
aggggcacagtaggacacagtgact

SEQ ID NO: 330532 - DNA, 25 bp, Homo sapien
cagtaggacacagtgactgcccagg

SEQ ID NO: 330533 - DNA, 25 bp, Homo sapien
aggaggggcacagtaggacacagtg

SEQ ID NO: 330534 - DNA, 25 bp, Homo sapien
ctgagccagcgtccagggtacaggt

SEQ ID NO: 330535 - DNA, 25 bp, Homo sapien
gagaagtaggaccaggccatccttg

SEQ ID NO: 330536 - DNA, 25 bp, Homo sapien
gacatggcctcgtccactgagggca

SEQ ID NO: 330537 - DNA, 25 bp, Homo sapien
tgcatcaggacatggcctcgtccac

SEQ ID NO: 330538 - DNA, 25 bp, Homo sapien
ttggctccagagctcgaagacccca

SEQ ID NO: 330539 - DNA, 25 bp, Homo sapien
gaatttttaacgacctgatgagggc

SEQ ID NO: 330540 - DNA, 25 bp, Homo sapien
cttgccaggctgagaactatccggg

SEQ ID NO: 330541 - DNA, 25 bp, Homo sapien
aatagaaggagcagcgaacttgccc

SEQ ID NO: 330542 - DNA, 25 bp, Homo sapien
ggccaggcgtcttcatgcacaaagg

SEQ ID NO: 330543 - DNA, 25 bp, Homo sapien
agcagagcccaactatattgaagac

SEQ ID NO: 330544 - DNA, 25 bp, Homo sapien
aaaaaagcagagcccaactatattg

SEQ ID NO: 330545 - DNA, 25 bp, Homo sapien
aaaagcagagcccaactatattgaa

SEQ ID NO: 330546 - DNA, 25 bp, Homo sapien
gagacgatgtctcacttttgtcccc

SEQ ID NO: 330547 - DNA, 25 bp, Homo sapien
tatgcgcagctagcctttgaggtca

SEQ ID NO: 330548 - DNA, 25 bp, Homo sapien
tgtgtacacgaagaggacagatccg

SEQ ID NO: 330549 - DNA, 25 bp, Homo sapien
ccgagagtgtcaagagctatgcgca

SEQ ID NO: 330550 - DNA, 25 bp, Homo sapien
tacccacagagatggccgagagtgt

SEQ ID NO: 330551 - DNA, 25 bp, Homo sapien
tccttatatttctgactgctctcaa

SEQ ID NO: 330552 - DNA, 25 bp, Homo sapien
ttccttatatttctgactgctctca

SEQ ID NO: 330553 - DNA, 25 bp, Homo sapien
tgaaaaagaagagacaaaggtttca

SEQ ID NO: 330554 - DNA, 25 bp, Homo sapien
gccacatccccttgtggcacgagca

SEQ ID NO: 330555 - DNA, 25 bp, Homo sapien
cacatccccttgtggcacgagcatc

SEQ ID NO: 330556 - DNA, 25 bp, Homo sapien
acatccccttgtggcacgagcatcc

SEQ ID NO: 330557 - DNA, 25 bp, Homo sapien
gtgccacatccccttgtggcacgag

SEQ ID NO: 330558 - DNA, 25 bp, Homo sapien
ccacccgagcgtggtcttgcagttc

SEQ ID NO: 330559 - DNA, 25 bp, Homo sapien
ttctcgcagtagatgtcggcaaccg

SEQ ID NO: 330560 - DNA, 25 bp, Homo sapien
tatttccacccgagcgtggtcttgc

SEQ ID NO: 330561 - DNA, 25 bp, Homo sapien
catgcagcccggtgagaaggaccct

SEQ ID NO: 330562 - DNA, 25 bp, Homo sapien
acggaattgaagaggtaggcgcgtc

SEQ ID NO: 330563 - DNA, 25 bp, Homo sapien
aattgaagaggtaggcgcgtccctg

SEQ ID NO: 330564 - DNA, 25 bp, Homo sapien
ggaattgaagaggtaggcgcgtccc

SEQ ID NO: 330565 - DNA, 25 bp, Homo sapien
agaggtaggcgcgtccctggctccc

SEQ ID NO: 330566 - DNA, 25 bp, Homo sapien
tcccgtgagattggctgcgagtgct

SEQ ID NO: 330567 - DNA, 25 bp, Homo sapien
aagaaggtcccgtgagattggctgc

SEQ ID NO: 330568 - DNA, 25 bp, Homo sapien
aaagaagaaggtcccgtgagattgg

SEQ ID NO: 330569 - DNA, 25 bp, Homo sapien
ctgaaagaagaaggtcccgtgagat

SEQ ID NO: 330570 - DNA, 25 bp, Homo sapien
acgaagcggtgctgcccagaaccag

SEQ ID NO: 330571 - DNA, 25 bp, Homo sapien
aacgaagcggtgctgcccagaacca

SEQ ID NO: 330572 - DNA, 25 bp, Homo sapien
ctggaacgaagcggtgctgcccaga

SEQ ID NO: 330573 - DNA, 25 bp, Homo sapien
ggaacgaagcggtgctgcccagaac

SEQ ID NO: 330574 - DNA, 25 bp, Homo sapien
cgggacgcgtcaccgggagcagaca

SEQ ID NO: 330575 - DNA, 25 bp, Homo sapien
gattctgctgcgtcaacattctgca

SEQ ID NO: 330576 - DNA, 25 bp, Homo sapien
acttctaataacagccacttaacgg

SEQ ID NO: 330577 - DNA, 25 bp, Homo sapien
gccacttaacggagctgcaagctgt

SEQ ID NO: 330578 - DNA, 25 bp, Homo sapien
aggaaacctaagagattcctggctg

SEQ ID NO: 330579 - DNA, 25 bp, Homo sapien
ctgaggatcggtggtcatgacgtat

SEQ ID NO: 330580 - DNA, 25 bp, Homo sapien
aggatgcggggagttcatgacctga

SEQ ID NO: 330581 - DNA, 25 bp, Homo sapien
tgcggggagttcatgacctgaggct

SEQ ID NO: 330582 - DNA, 25 bp, Homo sapien
tggtcatgacgtatgaggatgcggg

SEQ ID NO: 330583 - DNA, 25 bp, Homo sapien
gaacactgtcattccgactgagcat

SEQ ID NO: 330584 - DNA, 25 bp, Homo sapien
tcattccgactgagcatcagctcct

SEQ ID NO: 330585 - DNA, 25 bp, Homo sapien
tgtcattccgactgagcatcagctc

SEQ ID NO: 330586 - DNA, 25 bp, Homo sapien
cactgtcattccgactgagcatcag

SEQ ID NO: 330587 - DNA, 25 bp, Homo sapien
tattcttccactatgtaggtaccac

SEQ ID NO: 330588 - DNA, 25 bp, Homo sapien
gtcatgtgatgcttaaatattcttc

SEQ ID NO: 330589 - DNA, 25 bp, Homo sapien
caatgacagataatcattgtgccat

SEQ ID NO: 330590 - DNA, 25 bp, Homo sapien
caatgctgcctagaaggctctagac

SEQ ID NO: 330591 - DNA, 25 bp, Homo sapien
gagctcgtcatgattggccaggtgt

SEQ ID NO: 330592 - DNA, 25 bp, Homo sapien
cagatacgcttggaaagttttggac

SEQ ID NO: 330593 - DNA, 25 bp, Homo sapien
tgcagtggatacagctgtacgttcg

SEQ ID NO: 330594 - DNA, 25 bp, Homo sapien
tgtacgttcggtgacagttcggcag

SEQ ID NO: 330595 - DNA, 25 bp, Homo sapien
tctcctgggcactcctcactcagct

SEQ ID NO: 330596 - DNA, 25 bp, Homo sapien
ctctcctgggcactcctcactcagc

SEQ ID NO: 330597 - DNA, 25 bp, Homo sapien
tgggcactcctcactcagctcaggg

SEQ ID NO: 330598 - DNA, 25 bp, Homo sapien
gcactcctcactcagctcagggctg

SEQ ID NO: 330599 - DNA, 25 bp, Homo sapien
cgcaagagccgtcgttgtccaggag

SEQ ID NO: 330600 - DNA, 25 bp, Homo sapien
caggagggcgtgtggcactgtccac

SEQ ID NO: 330601 - DNA, 25 bp, Homo sapien
cactggaaaatgcacgcaagagccg

SEQ ID NO: 330602 - DNA, 25 bp, Homo sapien
tgtccacacagctgggacgagagaa

SEQ ID NO: 330603 - DNA, 25 bp, Homo sapien
aggacctatgtatctatattctcta

SEQ ID NO: 330604 - DNA, 25 bp, Homo sapien
aaaggacctatgtatctatattctc

SEQ ID NO: 330605 - DNA, 25 bp, Homo sapien
taaaggacctatgtatctatattct

SEQ ID NO: 330606 - DNA, 25 bp, Homo sapien
ataaaggacctatgtatctatattc

SEQ ID NO: 330607 - DNA, 25 bp, Homo sapien
cccacacggtgcacgaggatgtcat

SEQ ID NO: 330608 - DNA, 25 bp, Homo sapien
catgaaacttgctgacatgccctgg

SEQ ID NO: 330609 - DNA, 25 bp, Homo sapien
gcccggaaacagaccacaggtggat

SEQ ID NO: 330610 - DNA, 25 bp, Homo sapien
caatgtgacatgaaagagagcccgg

SEQ ID NO: 330611 - DNA, 25 bp, Homo sapien
aataagtagtatcagccaggggcgg

SEQ ID NO: 330612 - DNA, 25 bp, Homo sapien
caagtgactcaagtagagagctaca

SEQ ID NO: 330613 - DNA, 25 bp, Homo sapien
tccctgctccaagtgactcaagtag

SEQ ID NO: 330614 - DNA, 25 bp, Homo sapien
aagtagagagctacagaaactgccc

SEQ ID NO: 330615 - DNA, 25 bp, Homo sapien
tagtagtccataaagagaacatggt

SEQ ID NO: 330616 - DNA, 25 bp, Homo sapien
cagcagatctctagggctcgttcat

SEQ ID NO: 330617 - DNA, 25 bp, Homo sapien
tctcggtacaatggacagcagatct

SEQ ID NO: 330618 - DNA, 25 bp, Homo sapien
tgttgttgcctactacagaattccc

SEQ ID NO: 330619 - DNA, 25 bp, Homo sapien
tggacaactgaactgcatagcacat

SEQ ID NO: 330620 - DNA, 25 bp, Homo sapien
tagtgtggacaactgaactgcatag

SEQ ID NO: 330621 - DNA, 25 bp, Homo sapien
tttgttttcaacttaggcctgttca

SEQ ID NO: 330622 - DNA, 25 bp, Homo sapien
ttgttttcaacttaggcctgttcac

SEQ ID NO: 330623 - DNA, 25 bp, Homo sapien
tgccaacaggtttttggtactcagc

SEQ ID NO: 330624 - DNA, 25 bp, Homo sapien
agcatctgtatagcaggtgtaacgt

SEQ ID NO: 330625 - DNA, 25 bp, Homo sapien
tatagcaggtgtaacgtcctggcat

SEQ ID NO: 330626 - DNA, 25 bp, Homo sapien
ggtttttggtactcagcatctgtat

SEQ ID NO: 330627 - DNA, 25 bp, Homo sapien
tgttttggagccgtagcccggccca

SEQ ID NO: 330628 - DNA, 25 bp, Homo sapien
ccgttaacagccttggagcgcggcg

SEQ ID NO: 330629 - DNA, 25 bp, Homo sapien
cgcgggccgcctgccctttgttttg

SEQ ID NO: 330630 - DNA, 25 bp, Homo sapien
ccgttaacgcctaggcagggcgcga

SEQ ID NO: 330631 - DNA, 25 bp, Homo sapien
ccagctaacgtgacatgcaggcaga

SEQ ID NO: 330632 - DNA, 25 bp, Homo sapien
tgagtacaggaagcgacaatggccc

SEQ ID NO: 330633 - DNA, 25 bp, Homo sapien
tgtcatcagcgagcaacaaagggct

SEQ ID NO: 330634 - DNA, 25 bp, Homo sapien
tcctttgaaagtacgcaggctgctg

SEQ ID NO: 330635 - DNA, 25 bp, Homo sapien
taggtaaacctggtgcaaccctgga

SEQ ID NO: 330636 - DNA, 25 bp, Homo sapien
tgccgagcagaggtaaaaaggaccc

SEQ ID NO: 330637 - DNA, 25 bp, Homo sapien
tgtgtggaccttcagacggcagctc

SEQ ID NO: 330638 - DNA, 25 bp, Homo sapien
tctgagcacgcaagtgaaaagcgcg

SEQ ID NO: 330639 - DNA, 25 bp, Homo sapien
ggatagagctccaaacacgagttag

SEQ ID NO: 330640 - DNA, 25 bp, Homo sapien
catttcaatcgtaggcatgtggcac

SEQ ID NO: 330641 - DNA, 25 bp, Homo sapien
taacagtcatgcgagggtacagtaa

SEQ ID NO: 330642 - DNA, 25 bp, Homo sapien
actgggacagaacaccgagtcaact

SEQ ID NO: 330643 - DNA, 25 bp, Homo sapien
ctttattacaaattgttatactgta

SEQ ID NO: 330644 - DNA, 25 bp, Homo sapien
gctttattacaaattgttatactgt

SEQ ID NO: 330645 - DNA, 25 bp, Homo sapien
gctgtagaaggaaaaagaattgtat

SEQ ID NO: 330646 - DNA, 25 bp, Homo sapien
ctgtagaaggaaaaagaattgtata

SEQ ID NO: 330647 - DNA, 25 bp, Homo sapien
tttaaagacgcagtgttcctctctg

SEQ ID NO: 330648 - DNA, 25 bp, Homo sapien
ggcatggaacgtggttactgaaaca

SEQ ID NO: 330649 - DNA, 25 bp, Homo sapien
aatcctcaggcatggaacgtggtta

SEQ ID NO: 330650 - DNA, 25 bp, Homo sapien
tttctcatttaaagacgcagtgttc

SEQ ID NO: 330651 - DNA, 25 bp, Homo sapien
taagtactgcacataacgcttcttg

SEQ ID NO: 330652 - DNA, 25 bp, Homo sapien
caccaaatgtcgagtgaagctgcca

SEQ ID NO: 330653 - DNA, 25 bp, Homo sapien
tagctcaagggcgtatatgcaccag

SEQ ID NO: 330654 - DNA, 25 bp, Homo sapien
tgtggagttccaccctgggacatcc

SEQ ID NO: 330655 - DNA, 25 bp, Homo sapien
tactgccgcaggtcaccaatgggtg

SEQ ID NO: 330656 - DNA, 25 bp, Homo sapien
gaatctctctctggtgcggctgcat

SEQ ID NO: 330657 - DNA, 25 bp, Homo sapien
tcaaagtggataagccaagacgggc

SEQ ID NO: 330658 - DNA, 25 bp, Homo sapien
gaagaacaccgatgtctgagcacgt

SEQ ID NO: 330659 - DNA, 25 bp, Homo sapien
tgaggcttgtcacaggtagtaggca

SEQ ID NO: 330660 - DNA, 25 bp, Homo sapien
gctgggaactcagagacaatgctcc

SEQ ID NO: 330661 - DNA, 25 bp, Homo sapien
tcacagggtaggagactgaggacat

SEQ ID NO: 330662 - DNA, 25 bp, Homo sapien
gaaatgcggttcatgcccctagtga

SEQ ID NO: 330663 - DNA, 25 bp, Homo sapien
gcctcccttgctagagctcactgta

SEQ ID NO: 330664 - DNA, 25 bp, Homo sapien
gcagcgcctcccttgctagagctca

SEQ ID NO: 330665 - DNA, 25 bp, Homo sapien
ctcccttgctagagctcactgtatt

SEQ ID NO: 330666 - DNA, 25 bp, Homo sapien
gcgcctcccttgctagagctcactg

SEQ ID NO: 330667 - DNA, 25 bp, Homo sapien
tccaattccatgtcgaacttgaatg

SEQ ID NO: 330668 - DNA, 25 bp, Homo sapien
tgagcttttccttaggcaagtcatc

SEQ ID NO: 330669 - DNA, 25 bp, Homo sapien
gaacttgaatggtgcttcggcgatg

SEQ ID NO: 330670 - DNA, 25 bp, Homo sapien
tcctggctggaatctagcagtctct

SEQ ID NO: 330671 - DNA, 25 bp, Homo sapien
ttaacagtcaaagttgttatgggta

SEQ ID NO: 330672 - DNA, 25 bp, Homo sapien
aacagtcaaagttgttatgggtaag

SEQ ID NO: 330673 - DNA, 25 bp, Homo sapien
catttaacagtcaaagttgttatgg

SEQ ID NO: 330674 - DNA, 25 bp, Homo sapien
caaagttgttatgggtaaggcagta

SEQ ID NO: 330675 - DNA, 25 bp, Homo sapien
tttctgaacttaccacaaatcccag

SEQ ID NO: 330676 - DNA, 25 bp, Homo sapien
taaggcagtgaatgtcgaaataaga

SEQ ID NO: 330677 - DNA, 25 bp, Homo sapien
caagttctcataaacacttagcctg

SEQ ID NO: 330678 - DNA, 25 bp, Homo sapien
gggtggtggtacgtttatccaatca

SEQ ID NO: 330679 - DNA, 25 bp, Homo sapien
tcgtcactcgggtcgtaatactgct

SEQ ID NO: 330680 - DNA, 25 bp, Homo sapien
tacttcaatcctcttgtgtgggttg

SEQ ID NO: 330681 - DNA, 25 bp, Homo sapien
tactgctccagatatgggtgggcca

SEQ ID NO: 330682 - DNA, 25 bp, Homo sapien
gaatgtcaacattttgtccaataag

SEQ ID NO: 330683 - DNA, 25 bp, Homo sapien
agtagtgagagcagaagtagtcaca

SEQ ID NO: 330684 - DNA, 25 bp, Homo sapien
ccacaaaacaactgagctaagcatg

SEQ ID NO: 330685 - DNA, 25 bp, Homo sapien
cacaaaacaactgagctaagcatga

SEQ ID NO: 330686 - DNA, 25 bp, Homo sapien
acccacaaaacaactgagctaagca

SEQ ID NO: 330687 - DNA, 25 bp, Homo sapien
tgcagaccgcaaacaaaaacactgg

SEQ ID NO: 330688 - DNA, 25 bp, Homo sapien
caaagggtgctgactatatctccaa

SEQ ID NO: 330689 - DNA, 25 bp, Homo sapien
tagggaccgaccatctgacaattgc

SEQ ID NO: 330690 - DNA, 25 bp, Homo sapien
aagcctcccgagactgtgaacatag

SEQ ID NO: 330691 - DNA, 25 bp, Homo sapien
catttagataacatgcttaggtggt

SEQ ID NO: 330692 - DNA, 25 bp, Homo sapien
taccaggcctaatgatgcagctttg

SEQ ID NO: 330693 - DNA, 25 bp, Homo sapien
gcgttgacctcccaatgggctagga

SEQ ID NO: 330694 - DNA, 25 bp, Homo sapien
ggtactactacactcggctgaattt

SEQ ID NO: 330695 - DNA, 25 bp, Homo sapien
agcaaatagttcctagcttttaaat

SEQ ID NO: 330696 - DNA, 25 bp, Homo sapien
gtggttcagctggtcaagataatgc

SEQ ID NO: 330697 - DNA, 25 bp, Homo sapien
cagctggtcaagataatgcttccct

SEQ ID NO: 330698 - DNA, 25 bp, Homo sapien
cctacagaccaaatatcaatggact

SEQ ID NO: 330699 - DNA, 25 bp, Homo sapien
agaatgcagcctacagaccaaatat

SEQ ID NO: 330700 - DNA, 25 bp, Homo sapien
ctgtgtgaagagttttcctctggcc

SEQ ID NO: 330701 - DNA, 25 bp, Homo sapien
gtgaagagttttcctctggccatac

SEQ ID NO: 330702 - DNA, 25 bp, Homo sapien
gaagagttttcctctggccatacca

SEQ ID NO: 330703 - DNA, 25 bp, Homo sapien
gtgtgaagagttttcctctggccat

SEQ ID NO: 330704 - DNA, 25 bp, Homo sapien
gtgctctagcttctcaaaactggga

SEQ ID NO: 330705 - DNA, 25 bp, Homo sapien
caaaactgggacaatatgagtttaa

SEQ ID NO: 330706 - DNA, 25 bp, Homo sapien
tcctgggtctgcaatagtgttttaa

SEQ ID NO: 330707 - DNA, 25 bp, Homo sapien
aaacaaaggtaggatacagaggaag

SEQ ID NO: 330708 - DNA, 25 bp, Homo sapien
taatagctggagaaccaaggacagg

SEQ ID NO: 330709 - DNA, 25 bp, Homo sapien
ctttggtgaccctgcaagtagaagg

SEQ ID NO: 330710 - DNA, 25 bp, Homo sapien
tagtatgccccaaagggtctaggag

SEQ ID NO: 330711 - DNA, 25 bp, Homo sapien
cattctcaggctacaggtatcgcaa

SEQ ID NO: 330712 - DNA, 25 bp, Homo sapien
tcaacataatttctggagccctgta

SEQ ID NO: 330713 - DNA, 25 bp, Homo sapien
ttcaacataatttctggagccctgt

SEQ ID NO: 330714 - DNA, 25 bp, Homo sapien
gtctggatctgcaacacgggccagg

SEQ ID NO: 330715 - DNA, 25 bp, Homo sapien
cacatattctgtcaggaaccctgtg

SEQ ID NO: 330716 - DNA, 25 bp, Homo sapien
catggtctggatctgcaacacgggc

SEQ ID NO: 330717 - DNA, 25 bp, Homo sapien
ggaaccctgtgtgatcatggtctgg

SEQ ID NO: 330718 - DNA, 25 bp, Homo sapien
cattttctccggtctcaagcatcta

SEQ ID NO: 330719 - DNA, 25 bp, Homo sapien
caagcatctactggcctttcatcat

SEQ ID NO: 330720 - DNA, 25 bp, Homo sapien
taatcaatacaatgccaaggctaca

SEQ ID NO: 330721 - DNA, 25 bp, Homo sapien
atcatctggccctccaatatcatgg

SEQ ID NO: 330722 - DNA, 25 bp, Homo sapien
cattgctgaggtgttgtgtcttcaa

SEQ ID NO: 330723 - DNA, 25 bp, Homo sapien
ggtcacggtgcagaacgttagctga

SEQ ID NO: 330724 - DNA, 25 bp, Homo sapien
ttgagatcacaggtggtgttgagca

SEQ ID NO: 330725 - DNA, 25 bp, Homo sapien
tcaagagcttgtaaagatctgtttc

SEQ ID NO: 330726 - DNA, 25 bp, Homo sapien
ttttcatcatcacaacaaaccatcc

SEQ ID NO: 330727 - DNA, 25 bp, Homo sapien
cttttcatcatcacaacaaaccatc

SEQ ID NO: 330728 - DNA, 25 bp, Homo sapien
tttgttgacattatcataagcagag

SEQ ID NO: 330729 - DNA, 25 bp, Homo sapien
tgttctcatgtctgaagcgcagtaa

SEQ ID NO: 330730 - DNA, 25 bp, Homo sapien
tcatttgctcgatggttggtgctcg

SEQ ID NO: 330731 - DNA, 25 bp, Homo sapien
tcttgatagctactcgaactttgtt

SEQ ID NO: 330732 - DNA, 25 bp, Homo sapien
aagtcggaagacagaactcaggagc

SEQ ID NO: 330733 - DNA, 25 bp, Homo sapien
gatgacggttccatccttccagcag

SEQ ID NO: 330734 - DNA, 25 bp, Homo sapien
ccttataaacgtgagaggtgggcct

SEQ ID NO: 330735 - DNA, 25 bp, Homo sapien
cagtgattagcactcctgcagagag

SEQ ID NO: 330736 - DNA, 25 bp, Homo sapien
ttcagcaaagggtaaggctgagctc

SEQ ID NO: 330737 - DNA, 25 bp, Homo sapien
cagcaaagggtaaggctgagctctc

SEQ ID NO: 330738 - DNA, 25 bp, Homo sapien
cttcagcaaagggtaaggctgagct

SEQ ID NO: 330739 - DNA, 25 bp, Homo sapien
ttcttcagcaaagggtaaggctgag

SEQ ID NO: 330740 - DNA, 25 bp, Homo sapien
gggtcccaaagagatagttgtacac

SEQ ID NO: 330741 - DNA, 25 bp, Homo sapien
cactttggaaacagtatgggaggct

SEQ ID NO: 330742 - DNA, 25 bp, Homo sapien
gaactcaggagtttgtggttcctca

SEQ ID NO: 330743 - DNA, 25 bp, Homo sapien
tacctagagcagtcagacttcatag

SEQ ID NO: 330744 - DNA, 25 bp, Homo sapien
aatccttgtggccaaggtgaggcaa

SEQ ID NO: 330745 - DNA, 25 bp, Homo sapien
gatattactctctactttgctagcc

SEQ ID NO: 330746 - DNA, 25 bp, Homo sapien
cagcactgctaaattgaaaagggaa

SEQ ID NO: 330747 - DNA, 25 bp, Homo sapien
atagcagtacactaaacttggttac

SEQ ID NO: 330748 - DNA, 25 bp, Homo sapien
cttgcagtaatatgacaaaggcccc

SEQ ID NO: 330749 - DNA, 25 bp, Homo sapien
gcctctggtcatcaaaaaacctgaa

SEQ ID NO: 330750 - DNA, 25 bp, Homo sapien
gaatatcttatatcatccagtggca

SEQ ID NO: 330751 - DNA, 25 bp, Homo sapien
cggaaacccttcatgactactcaga

SEQ ID NO: 330752 - DNA, 25 bp, Homo sapien
cacagtacctgccacgaagggttca

SEQ ID NO: 330753 - DNA, 25 bp, Homo sapien
ccattttagaaagcctgcgcggaga

SEQ ID NO: 330754 - DNA, 25 bp, Homo sapien
tacagcagtgacagaagtagttccc

SEQ ID NO: 330755 - DNA, 25 bp, Homo sapien
taacaggagtccatagcaattgggc

SEQ ID NO: 330756 - DNA, 25 bp, Homo sapien
agaggttggtgtagcgcggccccac

SEQ ID NO: 330757 - DNA, 25 bp, Homo sapien
acctgcccgcggaccatctccgggc

SEQ ID NO: 330758 - DNA, 25 bp, Homo sapien
ggccccacgtcgaacacctgcccgc

SEQ ID NO: 330759 - DNA, 25 bp, Homo sapien
cgccgatgtacgagaggttggtgta

SEQ ID NO: 330760 - DNA, 25 bp, Homo sapien
agccgccgacgctgaccgggaggag

SEQ ID NO: 330761 - DNA, 25 bp, Homo sapien
aaggaagacgccgagcgggagagct

SEQ ID NO: 330762 - DNA, 25 bp, Homo sapien
tgcctgcctgccagactgacgggcg

SEQ ID NO: 330763 - DNA, 25 bp, Homo sapien
agctgaagagccgacagccactcgg

SEQ ID NO: 330764 - DNA, 25 bp, Homo sapien
aggctcacgtgtggtctgttcacca

SEQ ID NO: 330765 - DNA, 25 bp, Homo sapien
gaggctgtggttttcacttcaggcc

SEQ ID NO: 330766 - DNA, 25 bp, Homo sapien
cacaggctcacgtgtggtctgttca

SEQ ID NO: 330767 - DNA, 25 bp, Homo sapien
actgaaagatcgctaagtaatagat

SEQ ID NO: 330768 - DNA, 25 bp, Homo sapien
ttccaaaccccaattcgatcatcgc

SEQ ID NO: 330769 - DNA, 25 bp, Homo sapien
tctgtcttccaaaccccaattcgat

SEQ ID NO: 330770 - DNA, 25 bp, Homo sapien
caaaccccaattcgatcatcgccat

SEQ ID NO: 330771 - DNA, 25 bp, Homo sapien
attctgtcttccaaaccccaattcg

SEQ ID NO: 330772 - DNA, 25 bp, Homo sapien
aggctctaagttggcatctgctccc

SEQ ID NO: 330773 - DNA, 25 bp, Homo sapien
attggtacgaggctctaagttggca

SEQ ID NO: 330774 - DNA, 25 bp, Homo sapien
ccaagtcacctcatcttttaaagac

SEQ ID NO: 330775 - DNA, 25 bp, Homo sapien
tacgaggctctaagttggcatctgc

SEQ ID NO: 330776 - DNA, 25 bp, Homo sapien
atgctttccagctctgcgcacaatg

SEQ ID NO: 330777 - DNA, 25 bp, Homo sapien
agctctgcgcacaatgccaggcaga

SEQ ID NO: 330778 - DNA, 25 bp, Homo sapien
ggcggtgcgggagccctttcaccag

SEQ ID NO: 330779 - DNA, 25 bp, Homo sapien
gtgcgggagccctttcaccagggca

SEQ ID NO: 330780 - DNA, 25 bp, Homo sapien
tttttgcataagatatgaggcttta

SEQ ID NO: 330781 - DNA, 25 bp, Homo sapien
tctgcctatggaggtccaattgttc

SEQ ID NO: 330782 - DNA, 25 bp, Homo sapien
atgaggctttagattgaggatcatt

SEQ ID NO: 330783 - DNA, 25 bp, Homo sapien
tttctgcctatggaggtccaattgt

SEQ ID NO: 330784 - DNA, 25 bp, Homo sapien
tgtgaattttcctatatcagccctg

SEQ ID NO: 330785 - DNA, 25 bp, Homo sapien
tggcacctggctagctcacagagtt

SEQ ID NO: 330786 - DNA, 25 bp, Homo sapien
taggacccgtaagagtgtatatccc

SEQ ID NO: 330787 - DNA, 25 bp, Homo sapien
tacaggcatgactacaggcattcct

SEQ ID NO: 330788 - DNA, 25 bp, Homo sapien
cttttttctgcactacatgctttct

SEQ ID NO: 330789 - DNA, 25 bp, Homo sapien
ttctcttctcgttgtgtaatttagg

SEQ ID NO: 330790 - DNA, 25 bp, Homo sapien
ctcttctcgttgtgtaatttaggta

SEQ ID NO: 330791 - DNA, 25 bp, Homo sapien
ttttttctgcactacatgctttctc

SEQ ID NO: 330792 - DNA, 25 bp, Homo sapien
cagccgctttaaagcctttgtcaga

SEQ ID NO: 330793 - DNA, 25 bp, Homo sapien
atgtcagcactgacatctgttgatt

SEQ ID NO: 330794 - DNA, 25 bp, Homo sapien
aatgtttgcccttacttactggagc

SEQ ID NO: 330795 - DNA, 25 bp, Homo sapien
tcagttctagttttcacttgcttct

SEQ ID NO: 330796 - DNA, 25 bp, Homo sapien
cttgaggcttgggatttgcacagca

SEQ ID NO: 330797 - DNA, 25 bp, Homo sapien
ttcaactgccagaagcggctcccat

SEQ ID NO: 330798 - DNA, 25 bp, Homo sapien
gaaaggctcagcagggattatttgc

SEQ ID NO: 330799 - DNA, 25 bp, Homo sapien
cactgaagtgacttcaactgccaga

SEQ ID NO: 330800 - DNA, 25 bp, Homo sapien
cactctgtccgcacttattctgccc

SEQ ID NO: 330801 - DNA, 25 bp, Homo sapien
caaggagggtcttaaacacttagca

SEQ ID NO: 330802 - DNA, 25 bp, Homo sapien
cttagcaacgcagccctccactctg

SEQ ID NO: 330803 - DNA, 25 bp, Homo sapien
gcctctctgtggcaattagccttca

SEQ ID NO: 330804 - DNA, 25 bp, Homo sapien
tgcaaagatccagaaacccacacag

SEQ ID NO: 330805 - DNA, 25 bp, Homo sapien
tacaaattgcatagcctgctctgcc

SEQ ID NO: 330806 - DNA, 25 bp, Homo sapien
ccctagagaaactcctgtgcatgga

SEQ ID NO: 330807 - DNA, 25 bp, Homo sapien
gtgcatggaaaccaggagacccgac

SEQ ID NO: 330808 - DNA, 25 bp, Homo sapien
cagaacttgtggtttattgacactt

SEQ ID NO: 330809 - DNA, 25 bp, Homo sapien
tttattgacacttctgcatggtggg

SEQ ID NO: 330810 - DNA, 25 bp, Homo sapien
acttgtggtttattgacacttctgc

SEQ ID NO: 330811 - DNA, 25 bp, Homo sapien
tgtggtttattgacacttctgcatg

SEQ ID NO: 330812 - DNA, 25 bp, Homo sapien
tacactgaggctgcgagatcttcca

SEQ ID NO: 330813 - DNA, 25 bp, Homo sapien
gaaaacctggaatactgcttcggaa

SEQ ID NO: 330814 - DNA, 25 bp, Homo sapien
tcctggtcaagatggaagagcgctc

SEQ ID NO: 330815 - DNA, 25 bp, Homo sapien
ttcgtcaaggttatgcccacgggca

SEQ ID NO: 330816 - DNA, 25 bp, Homo sapien
gactggctgggcatatctgtaaata

SEQ ID NO: 330817 - DNA, 25 bp, Homo sapien
gctctgctgcgctctcctctttggg

SEQ ID NO: 330818 - DNA, 25 bp, Homo sapien
tttgggacactggtgtggccgacca

SEQ ID NO: 330819 - DNA, 25 bp, Homo sapien
tgctacagaacagacccctggctct

SEQ ID NO: 330820 - DNA, 25 bp, Homo sapien
tttggtgaggtctcctaagctgcct

SEQ ID NO: 330821 - DNA, 25 bp, Homo sapien
tgccgttgggcacctatgacctctg

SEQ ID NO: 330822 - DNA, 25 bp, Homo sapien
ctgggagcaagagccggtccatctt

SEQ ID NO: 330823 - DNA, 25 bp, Homo sapien
caccccgggcctaataggagctggg

SEQ ID NO: 330824 - DNA, 25 bp, Homo sapien
agcgcccgggaagctgcatcggcct

SEQ ID NO: 330825 - DNA, 25 bp, Homo sapien
ccatgaccgtgatgttgtcgtggga

SEQ ID NO: 330826 - DNA, 25 bp, Homo sapien
aggtagtcctcggagcccgtcagcg

SEQ ID NO: 330827 - DNA, 25 bp, Homo sapien
tcacaggcaagcagcaggtagtcct

SEQ ID NO: 330828 - DNA, 25 bp, Homo sapien
tgagccagcatgcccagccagaccc

SEQ ID NO: 330829 - DNA, 25 bp, Homo sapien
agccagcatgcccagccagacccat

SEQ ID NO: 330830 - DNA, 25 bp, Homo sapien
gagccagcatgcccagccagaccca

SEQ ID NO: 330831 - DNA, 25 bp, Homo sapien
ttcacactacgagggtatcacccca

SEQ ID NO: 330832 - DNA, 25 bp, Homo sapien
aaaggattgtcagcatgaacgcggg

SEQ ID NO: 330833 - DNA, 25 bp, Homo sapien
tacttccagcccatagggtggtgag

SEQ ID NO: 330834 - DNA, 25 bp, Homo sapien
tgtaacttacactcagacactggtg

SEQ ID NO: 330835 - DNA, 25 bp, Homo sapien
tcccacttgggtcggcctctttggc

SEQ ID NO: 330836 - DNA, 25 bp, Homo sapien
gcctgggcttccgagagaccttctc

SEQ ID NO: 330837 - DNA, 25 bp, Homo sapien
cactcgaggcctgggcttccgagag

SEQ ID NO: 330838 - DNA, 25 bp, Homo sapien
tctcccacttgggtcggcctctttg

SEQ ID NO: 330839 - DNA, 25 bp, Homo sapien
tctccagcagtccatgtgagacaca

SEQ ID NO: 330840 - DNA, 25 bp, Homo sapien
gagacggccagggtcccgttgactc

SEQ ID NO: 330841 - DNA, 25 bp, Homo sapien
caaagccacccaatgcttcaatgcg

SEQ ID NO: 330842 - DNA, 25 bp, Homo sapien
caatgcttcaatgcgcgccttctca

SEQ ID NO: 330843 - DNA, 25 bp, Homo sapien
aggacagaggcttggtccacccaca

SEQ ID NO: 330844 - DNA, 25 bp, Homo sapien
catccctgacagagtgacggaggca

SEQ ID NO: 330845 - DNA, 25 bp, Homo sapien
tgaggcacctcccaagtctactggg

SEQ ID NO: 330846 - DNA, 25 bp, Homo sapien
gagggcatcccttaccggtttatca

SEQ ID NO: 330847 - DNA, 25 bp, Homo sapien
ttgcaactgcctgagatgcggctcc

SEQ ID NO: 330848 - DNA, 25 bp, Homo sapien
ggactaacatatccccaggctaagg

SEQ ID NO: 330849 - DNA, 25 bp, Homo sapien
tagtgagtccttacagagttcctcc

SEQ ID NO: 330850 - DNA, 25 bp, Homo sapien
caggctcagtctggtccgggactaa

SEQ ID NO: 330851 - DNA, 25 bp, Homo sapien
aagcctacagagcatggcggcagga

SEQ ID NO: 330852 - DNA, 25 bp, Homo sapien
tgtgggagaaccttggcctggatct

SEQ ID NO: 330853 - DNA, 25 bp, Homo sapien
tgaagctcgccaagttgaggccagt

SEQ ID NO: 330854 - DNA, 25 bp, Homo sapien
cactgcctcaacaaagtatcttgtg

SEQ ID NO: 330855 - DNA, 25 bp, Homo sapien
ccttcttgggaatgtagtgccagcc

SEQ ID NO: 330856 - DNA, 25 bp, Homo sapien
gacaggcttcttacctgacaggaag

SEQ ID NO: 330857 - DNA, 25 bp, Homo sapien
tgggcccagcacgaatcctgacttg

SEQ ID NO: 330858 - DNA, 25 bp, Homo sapien
acccctgtgtgatggacttggaagc

SEQ ID NO: 330859 - DNA, 25 bp, Homo sapien
cacctgtccctgctgtaccaaaatg

SEQ ID NO: 330860 - DNA, 25 bp, Homo sapien
acctgtccctgctgtaccaaaatga

SEQ ID NO: 330861 - DNA, 25 bp, Homo sapien
cctgtccctgctgtaccaaaatgac

SEQ ID NO: 330862 - DNA, 25 bp, Homo sapien
gtcgctcctgcaatgagcgcacaca

SEQ ID NO: 330863 - DNA, 25 bp, Homo sapien
ctgggaatccccgagccaggcgacg

SEQ ID NO: 330864 - DNA, 25 bp, Homo sapien
gcgacgtgcagggtcgctcctgcaa

SEQ ID NO: 330865 - DNA, 25 bp, Homo sapien
atccccgagccaggcgacgtgcagg

SEQ ID NO: 330866 - DNA, 25 bp, Homo sapien
caaacacagcaaagtaggcgcggtt

SEQ ID NO: 330867 - DNA, 25 bp, Homo sapien
tggacagcggcgtacctcgcagcat

SEQ ID NO: 330868 - DNA, 25 bp, Homo sapien
tctcgcttggctttcctgagaaaca

SEQ ID NO: 330869 - DNA, 25 bp, Homo sapien
aacatctggtcggtgcgccggaagg

SEQ ID NO: 330870 - DNA, 25 bp, Homo sapien
ccagggtctggacgggagcactcac

SEQ ID NO: 330871 - DNA, 25 bp, Homo sapien
cagctcttctcggtacctggggggc

SEQ ID NO: 330872 - DNA, 25 bp, Homo sapien
gctgacgggtgtctctcctgtctca

SEQ ID NO: 330873 - DNA, 25 bp, Homo sapien
tcgccccggtcctccgaagctgtcc

SEQ ID NO: 330874 - DNA, 25 bp, Homo sapien
ccatcttgcggcgagtgttccggat

SEQ ID NO: 330875 - DNA, 25 bp, Homo sapien
ttccggatggcgtggatggagacca

SEQ ID NO: 330876 - DNA, 25 bp, Homo sapien
ggagggacacgtgccggtcctccat

SEQ ID NO: 330877 - DNA, 25 bp, Homo sapien
atggcgtggatggagaccagccact

SEQ ID NO: 330878 - DNA, 25 bp, Homo sapien
agagcatgatcaaggccgctaggca

SEQ ID NO: 330879 - DNA, 25 bp, Homo sapien
gattcttcgctgatccagtcaccgg

SEQ ID NO: 330880 - DNA, 25 bp, Homo sapien
gaagcaagggcaggcgagacttcct

SEQ ID NO: 330881 - DNA, 25 bp, Homo sapien
tacattctacttccgtgacagggag

SEQ ID NO: 330882 - DNA, 25 bp, Homo sapien
cgcgtggacggacagagacccatca

SEQ ID NO: 330883 - DNA, 25 bp, Homo sapien
caggtggcgctgtctcccgcgtgga

SEQ ID NO: 330884 - DNA, 25 bp, Homo sapien
gctgtctcccgcgtggacggacaga

SEQ ID NO: 330885 - DNA, 25 bp, Homo sapien
tctcccgcgtggacggacagagacc

SEQ ID NO: 330886 - DNA, 25 bp, Homo sapien
ttttccccggatgcacgcatgcact

SEQ ID NO: 330887 - DNA, 25 bp, Homo sapien
catgcactagtaatgccgaatttag

SEQ ID NO: 330888 - DNA, 25 bp, Homo sapien
tgtctcccaggctaaggcaaggctg

SEQ ID NO: 330889 - DNA, 25 bp, Homo sapien
tgctggcggcctcgggtattcgctt

SEQ ID NO: 330890 - DNA, 25 bp, Homo sapien
agcagcaagtggtggcggggccttc

SEQ ID NO: 330891 - DNA, 25 bp, Homo sapien
ttcctgaattcggaaaggtctgtct

SEQ ID NO: 330892 - DNA, 25 bp, Homo sapien
gaaactgcttcgtgggccagagcag

SEQ ID NO: 330893 - DNA, 25 bp, Homo sapien
gcagcagcaagtggtggcggggcct

SEQ ID NO: 330894 - DNA, 25 bp, Homo sapien
cccttccccaactgtcagcccacat

SEQ ID NO: 330895 - DNA, 25 bp, Homo sapien
ccccttccccaactgtcagcccaca

SEQ ID NO: 330896 - DNA, 25 bp, Homo sapien
cccagcaggagaccacacctagccc

SEQ ID NO: 330897 - DNA, 25 bp, Homo sapien
aaggagccagttctgtcaatatcct

SEQ ID NO: 330898 - DNA, 25 bp, Homo sapien
cccagaaagcccatggccagctcag

SEQ ID NO: 330899 - DNA, 25 bp, Homo sapien
aagtcttgcaggagcgtgtccagga

SEQ ID NO: 330900 - DNA, 25 bp, Homo sapien
ggctgagcaccgtccctggggcctt

SEQ ID NO: 330901 - DNA, 25 bp, Homo sapien
gctccactggccattgggctgctct

SEQ ID NO: 330902 - DNA, 25 bp, Homo sapien
ggcctgcagctaggccagggcaaga

SEQ ID NO: 330903 - DNA, 25 bp, Homo sapien
ggcaagagggtctccaggcttcacc

SEQ ID NO: 330904 - DNA, 25 bp, Homo sapien
cccaaagcatcccgggggcctgcag

SEQ ID NO: 330905 - DNA, 25 bp, Homo sapien
ctaggccagggcaagagggtctcca

SEQ ID NO: 330906 - DNA, 25 bp, Homo sapien
caaactttgctaaaagggcggctgt

SEQ ID NO: 330907 - DNA, 25 bp, Homo sapien
tagaatcatcagtcttagaatagcc

SEQ ID NO: 330908 - DNA, 25 bp, Homo sapien
tagaatagccacagactctgcctac

SEQ ID NO: 330909 - DNA, 25 bp, Homo sapien
caggaattgctaacttggaacaagc

SEQ ID NO: 330910 - DNA, 25 bp, Homo sapien
aaaacaactggcaaggcgctgtggc

SEQ ID NO: 330911 - DNA, 25 bp, Homo sapien
tcaggtctatatctcagcgcttggg

SEQ ID NO: 330912 - DNA, 25 bp, Homo sapien
taatgcaacccaggttacagaaggc

SEQ ID NO: 330913 - DNA, 25 bp, Homo sapien
gaaaaatcactttgagagcaggagg

SEQ ID NO: 330914 - DNA, 25 bp, Homo sapien
tgtgtcaagcgctgtgccgaaatcc

SEQ ID NO: 330915 - DNA, 25 bp, Homo sapien
ggcaaagcgaactcaatcaaggtct

SEQ ID NO: 330916 - DNA, 25 bp, Homo sapien
gggaatgccaccacgacatgtgtga

SEQ ID NO: 330917 - DNA, 25 bp, Homo sapien
taggttataggagggcaagcaccca

SEQ ID NO: 330918 - DNA, 25 bp, Homo sapien
atttcacccctgtgcgccttgggcg

SEQ ID NO: 330919 - DNA, 25 bp, Homo sapien
tcgcttcacggacgcttgggaggcc

SEQ ID NO: 330920 - DNA, 25 bp, Homo sapien
caccctttcggtgcacccatgtgag

SEQ ID NO: 330921 - DNA, 25 bp, Homo sapien
cacttgtgcagctgacgctcgcttc

SEQ ID NO: 330922 - DNA, 25 bp, Homo sapien
tgtcccgcaagctgctgccggccgg

SEQ ID NO: 330923 - DNA, 25 bp, Homo sapien
tcgcggctccgtgtcccgcaagctg

SEQ ID NO: 330924 - DNA, 25 bp, Homo sapien
cctggcggctacgtggacggtgact

SEQ ID NO: 330925 - DNA, 25 bp, Homo sapien
tggacggtgactgcggccctttagt

SEQ ID NO: 330926 - DNA, 25 bp, Homo sapien
tacttcttataaacagtggccctgg

SEQ ID NO: 330927 - DNA, 25 bp, Homo sapien
gaacctggagaactagcagctgggt

SEQ ID NO: 330928 - DNA, 25 bp, Homo sapien
ctgggatgcttctctaacaggagga

SEQ ID NO: 330929 - DNA, 25 bp, Homo sapien
tcagggcagtaaccatgagcaaggc

SEQ ID NO: 330930 - DNA, 25 bp, Homo sapien
cctgaatgagccctataacctaagg

SEQ ID NO: 330931 - DNA, 25 bp, Homo sapien
tgagccctataacctaagggtcctg

SEQ ID NO: 330932 - DNA, 25 bp, Homo sapien
tcctccaagcctgaatgagccctat

SEQ ID NO: 330933 - DNA, 25 bp, Homo sapien
ggaggtcttgaaaccttctgcggag

SEQ ID NO: 330934 - DNA, 25 bp, Homo sapien
atagtttgaagtgccatgaggtgtc

SEQ ID NO: 330935 - DNA, 25 bp, Homo sapien
acgcagcccatgtgctgcgtctcat

SEQ ID NO: 330936 - DNA, 25 bp, Homo sapien
gcagcccatgtgctgcgtctcatcg

SEQ ID NO: 330937 - DNA, 25 bp, Homo sapien
cgcagcccatgtgctgcgtctcatc

SEQ ID NO: 330938 - DNA, 25 bp, Homo sapien
tgaaaagagactgcagctacctgtg

SEQ ID NO: 330939 - DNA, 25 bp, Homo sapien
tgcctgctcgattctgacacagaga

SEQ ID NO: 330940 - DNA, 25 bp, Homo sapien
gggtctctcgtctcagtgccaatga

SEQ ID NO: 330941 - DNA, 25 bp, Homo sapien
tcccagtgggtttcagctgactcca

SEQ ID NO: 330942 - DNA, 25 bp, Homo sapien
acagcgggtagctcttgccccgaga

SEQ ID NO: 330943 - DNA, 25 bp, Homo sapien
ttcttcatgtctcggaagggtgggt

SEQ ID NO: 330944 - DNA, 25 bp, Homo sapien
acaggaccagctcgaagtcatccag

SEQ ID NO: 330945 - DNA, 25 bp, Homo sapien
catcgcagtgggagcagtgcaggcg

SEQ ID NO: 330946 - DNA, 25 bp, Homo sapien
gcctgtggccgccaggggcgagaaa

SEQ ID NO: 330947 - DNA, 25 bp, Homo sapien
tggcacttcccacagcgtgagaggg

SEQ ID NO: 330948 - DNA, 25 bp, Homo sapien
cgccaggggcgagaaagacacctcc

SEQ ID NO: 330949 - DNA, 25 bp, Homo sapien
cccacagcgtgagaggggcttgcct

SEQ ID NO: 330950 - DNA, 25 bp, Homo sapien
cgtcagaggcacgtgttcctggcca

SEQ ID NO: 330951 - DNA, 25 bp, Homo sapien
gtgtcactgacctggcctacggagg

SEQ ID NO: 330952 - DNA, 25 bp, Homo sapien
tccgcaacacgtggtcaagggtctg

SEQ ID NO: 330953 - DNA, 25 bp, Homo sapien
tctttcaacccagccaggaggtgtc

SEQ ID NO: 330954 - DNA, 25 bp, Homo sapien
cagcaatggagtcgacaaagtagtg

SEQ ID NO: 330955 - DNA, 25 bp, Homo sapien
cgacaaagtagtggaacttcctctt

SEQ ID NO: 330956 - DNA, 25 bp, Homo sapien
tcttgaacacgtccagggtgtggcc

SEQ ID NO: 330957 - DNA, 25 bp, Homo sapien
ttcctcttgaacacgtccagggtgt

SEQ ID NO: 330958 - DNA, 25 bp, Homo sapien
ctggcggtagtcggccttgccctgg

SEQ ID NO: 330959 - DNA, 25 bp, Homo sapien
tctccactgcactgcggatggtggg

SEQ ID NO: 330960 - DNA, 25 bp, Homo sapien
ttctccactgcactgcggatggtgg

SEQ ID NO: 330961 - DNA, 25 bp, Homo sapien
ccttgccctgggcgatcaggttcag

SEQ ID NO: 330962 - DNA, 25 bp, Homo sapien
gcagatattgccctgagcactcgca

SEQ ID NO: 330963 - DNA, 25 bp, Homo sapien
tcccacctggaaatgtcaggcagag

SEQ ID NO: 330964 - DNA, 25 bp, Homo sapien
tagaaccacatcacacatgagctcc

SEQ ID NO: 330965 - DNA, 25 bp, Homo sapien
gtccacagcctcagatggtaccagg

SEQ ID NO: 330966 - DNA, 25 bp, Homo sapien
tctgttcagccttcaaacacactga

SEQ ID NO: 330967 - DNA, 25 bp, Homo sapien
ttcagccttcaaacacactgagctc

SEQ ID NO: 330968 - DNA, 25 bp, Homo sapien
atctgttcagccttcaaacacactg

SEQ ID NO: 330969 - DNA, 25 bp, Homo sapien
tgttcagccttcaaacacactgagc

SEQ ID NO: 330970 - DNA, 25 bp, Homo sapien
agcgggcagcagagccaacatccag

SEQ ID NO: 330971 - DNA, 25 bp, Homo sapien
agcaccccttcagcgggtgttgagg

SEQ ID NO: 330972 - DNA, 25 bp, Homo sapien
gggcctgtctggagcgggcagcaga

SEQ ID NO: 330973 - DNA, 25 bp, Homo sapien
gcagcaccccttcagcgggtgttga

SEQ ID NO: 330974 - DNA, 25 bp, Homo sapien
caatcttatagtagccgtgcaccag

SEQ ID NO: 330975 - DNA, 25 bp, Homo sapien
tgttgttgatatgcacagggatgct

SEQ ID NO: 330976 - DNA, 25 bp, Homo sapien
cgctctccaccgtgacatagttgcg

SEQ ID NO: 330977 - DNA, 25 bp, Homo sapien
gacatagttgcgctggcagatgttg

SEQ ID NO: 330978 - DNA, 25 bp, Homo sapien
cagctttgtgagtagactcgaagcc

SEQ ID NO: 330979 - DNA, 25 bp, Homo sapien
tttccagataccagcccatggaggg

SEQ ID NO: 330980 - DNA, 25 bp, Homo sapien
cacagtgcacgagggcacatctggg

SEQ ID NO: 330981 - DNA, 25 bp, Homo sapien
tcgaagcctgagtactggagacgga

SEQ ID NO: 330982 - DNA, 25 bp, Homo sapien
tagtcgggtgggttcgtctgcttct

SEQ ID NO: 330983 - DNA, 25 bp, Homo sapien
catgagcgtgatgagctcggcctcc

SEQ ID NO: 330984 - DNA, 25 bp, Homo sapien
agggaaggcatcaccccgctggcaa

SEQ ID NO: 330985 - DNA, 25 bp, Homo sapien
tcggcctccgtcaggtagtcgggtg

SEQ ID NO: 330986 - DNA, 25 bp, Homo sapien
cgctctgccagggcatgacctccgt

SEQ ID NO: 330987 - DNA, 25 bp, Homo sapien
tgccagggcatgacctccgtgaagc

SEQ ID NO: 330988 - DNA, 25 bp, Homo sapien
tctgccagggcatgacctccgtgaa

SEQ ID NO: 330989 - DNA, 25 bp, Homo sapien
gctctgccagggcatgacctccgtg

SEQ ID NO: 330990 - DNA, 25 bp, Homo sapien
tacttgcagtcatggctgaccgtgg

SEQ ID NO: 330991 - DNA, 25 bp, Homo sapien
tcgggcccaattctgaaggagatgg

SEQ ID NO: 330992 - DNA, 25 bp, Homo sapien
cgatgaagtgtctggtgatgtactc

SEQ ID NO: 330993 - DNA, 25 bp, Homo sapien
tgatgtactcatagagccgccacgc

SEQ ID NO: 330994 - DNA, 25 bp, Homo sapien
caggccagggctagtcagttgggag

SEQ ID NO: 330995 - DNA, 25 bp, Homo sapien
caagctcctgcttacagagccgctg

SEQ ID NO: 330996 - DNA, 25 bp, Homo sapien
ggctagtcagttgggagccagctgg

SEQ ID NO: 330997 - DNA, 25 bp, Homo sapien
ccagtactctcgctcgagcagcaag

SEQ ID NO: 330998 - DNA, 25 bp, Homo sapien
cgtcatggcctttccgcgggcggtt

SEQ ID NO: 330999 - DNA, 25 bp, Homo sapien
gataccttctgctaacaaccgcttc

SEQ ID NO: 331000 - DNA, 25 bp, Homo sapien
ttccgcgggcggttgataccttctg

SEQ ID NO: 331001 - DNA, 25 bp, Homo sapien
atggtcgccggcgtcatggcctttc

SEQ ID NO: 331002 - DNA, 25 bp, Homo sapien
agcccttcaggtcaaagttctcagg

SEQ ID NO: 331003 - DNA, 25 bp, Homo sapien
gtctgcatggcgtgctgcggcccca

SEQ ID NO: 331004 - DNA, 25 bp, Homo sapien
agccgctcagccgtctgcatggcgt

SEQ ID NO: 331005 - DNA, 25 bp, Homo sapien
ctgtccgtgggtagctgatgtagcc

SEQ ID NO: 331006 - DNA, 25 bp, Homo sapien
catctccacagtgttcagggccagg

SEQ ID NO: 331007 - DNA, 25 bp, Homo sapien
atctccacagtgttcagggccaggg

SEQ ID NO: 331008 - DNA, 25 bp, Homo sapien
agagctggccacacgcagcatctcc

SEQ ID NO: 331009 - DNA, 25 bp, Homo sapien
agaagagctggccacacgcagcatc

SEQ ID NO: 331010 - DNA, 25 bp, Homo sapien
tatatgagggagtaaccattcagct

SEQ ID NO: 331011 - DNA, 25 bp, Homo sapien
gaaagacgtggactaggatcacagg

SEQ ID NO: 331012 - DNA, 25 bp, Homo sapien
tcacaggctgttcctccagcgggag

SEQ ID NO: 331013 - DNA, 25 bp, Homo sapien
tcacccaaggcaactgtgatagatg

SEQ ID NO: 331014 - DNA, 25 bp, Homo sapien
gtcaaacactcttactcggtcccag

SEQ ID NO: 331015 - DNA, 25 bp, Homo sapien
tgcgatctcccggtcaaacactctt

SEQ ID NO: 331016 - DNA, 25 bp, Homo sapien
ctcttactcggtcccagtccaaaag

SEQ ID NO: 331017 - DNA, 25 bp, Homo sapien
ctcggtcccagtccaaaaggagaga

SEQ ID NO: 331018 - DNA, 25 bp, Homo sapien
aggtgagcccaacgccaggaagaac

SEQ ID NO: 331019 - DNA, 25 bp, Homo sapien
tcacagctgtacctgttcaggtggg

SEQ ID NO: 331020 - DNA, 25 bp, Homo sapien
ttgtctgggagccaaatagccctgg

SEQ ID NO: 331021 - DNA, 25 bp, Homo sapien
gatacgcaagctgacatctggccct

SEQ ID NO: 331022 - DNA, 25 bp, Homo sapien
aaagccccagcatgaatagagaaag

SEQ ID NO: 331023 - DNA, 25 bp, Homo sapien
tgatgatggaagactctcagaatcc

SEQ ID NO: 331024 - DNA, 25 bp, Homo sapien
atgatgatggaagactctcagaatc

SEQ ID NO: 331025 - DNA, 25 bp, Homo sapien
ccggggcctgccggctgatgatgat

SEQ ID NO: 331026 - DNA, 25 bp, Homo sapien
tctgacacggcccaaaggagatgag

SEQ ID NO: 331027 - DNA, 25 bp, Homo sapien
tctccacacagaatcccagggttgg

SEQ ID NO: 331028 - DNA, 25 bp, Homo sapien
gatgagagagctgtctaaatcaccg

SEQ ID NO: 331029 - DNA, 25 bp, Homo sapien
ccagtaggtctctggtttgaaggac

SEQ ID NO: 331030 - DNA, 25 bp, Homo sapien
cctggccttcttcagggttggtgaa

SEQ ID NO: 331031 - DNA, 25 bp, Homo sapien
ggttggtgaaatcccctgttgctca

SEQ ID NO: 331032 - DNA, 25 bp, Homo sapien
tgttgctcatcctggctcgaggagg

SEQ ID NO: 331033 - DNA, 25 bp, Homo sapien
gaccagtagaggcaggtctctggct

SEQ ID NO: 331034 - DNA, 25 bp, Homo sapien
ggtcttctcgccaccatgggccttg

SEQ ID NO: 331035 - DNA, 25 bp, Homo sapien
cctcgttgtggtcaggctcgcctag

SEQ ID NO: 331036 - DNA, 25 bp, Homo sapien
tcatgacgggcagaacagcatcaag

SEQ ID NO: 331037 - DNA, 25 bp, Homo sapien
ggtgaatgcacagccgattcgcagg

SEQ ID NO: 331038 - DNA, 25 bp, Homo sapien
ggagcctggccacgcagcttcctta

SEQ ID NO: 331039 - DNA, 25 bp, Homo sapien
ccttactgggaataagtggcttcat

SEQ ID NO: 331040 - DNA, 25 bp, Homo sapien
taggaaggccgtgcagtgggactag

SEQ ID NO: 331041 - DNA, 25 bp, Homo sapien
agtgggactagggtcgccgccggag

SEQ ID NO: 331042 - DNA, 25 bp, Homo sapien
gcacgggggcgacccatagaacaac

SEQ ID NO: 331043 - DNA, 25 bp, Homo sapien
acgggggcgacccatagaacaacag

SEQ ID NO: 331044 - DNA, 25 bp, Homo sapien
caggagcacgggggcgacccataga

SEQ ID NO: 331045 - DNA, 25 bp, Homo sapien
gagcacgggggcgacccatagaaca

SEQ ID NO: 331046 - DNA, 25 bp, Homo sapien
cacagcacgatgtagtcgcagcctc

SEQ ID NO: 331047 - DNA, 25 bp, Homo sapien
agccacagcacgatgtagtcgcagc

SEQ ID NO: 331048 - DNA, 25 bp, Homo sapien
agcacgatgtagtcgcagcctctgc

SEQ ID NO: 331049 - DNA, 25 bp, Homo sapien
acgatgtagtcgcagcctctgccct

SEQ ID NO: 331050 - DNA, 25 bp, Homo sapien
tcttgggtaatatgattatgcataa

SEQ ID NO: 331051 - DNA, 25 bp, Homo sapien
tgataacagcagtcgtcttgggtaa

SEQ ID NO: 331052 - DNA, 25 bp, Homo sapien
attaggactcaagcaagggtgggca

SEQ ID NO: 331053 - DNA, 25 bp, Homo sapien
tctgtctttctacttatctgcactt

SEQ ID NO: 331054 - DNA, 25 bp, Homo sapien
ctgaacagttctgcggggtccactt

SEQ ID NO: 331055 - DNA, 25 bp, Homo sapien
ccactttgtcccatttgttgtattt

SEQ ID NO: 331056 - DNA, 25 bp, Homo sapien
ggctgaacagttctgcggggtccac

SEQ ID NO: 331057 - DNA, 25 bp, Homo sapien
ggtccactttgtcccatttgttgta

SEQ ID NO: 331058 - DNA, 25 bp, Homo sapien
gagaagtgtaaactcagaggccgtc

SEQ ID NO: 331059 - DNA, 25 bp, Homo sapien
cctgccagttggagataaaacttgg

SEQ ID NO: 331060 - DNA, 25 bp, Homo sapien
tggcattgctgtgagacccatttca

SEQ ID NO: 331061 - DNA, 25 bp, Homo sapien
aggccccatttcttgcatcctggga

SEQ ID NO: 331062 - DNA, 25 bp, Homo sapien
tggccagcaaaggtcccagtgtact

SEQ ID NO: 331063 - DNA, 25 bp, Homo sapien
cacagacagacgtcatcttgaagcg

SEQ ID NO: 331064 - DNA, 25 bp, Homo sapien
aggaaatccagggtcatcacgtgac

SEQ ID NO: 331065 - DNA, 25 bp, Homo sapien
cccgttcagccctttgtgtgaggac

SEQ ID NO: 331066 - DNA, 25 bp, Homo sapien
tcagcaaccatgagcacagtcttca

SEQ ID NO: 331067 - DNA, 25 bp, Homo sapien
ttttcagcaaccatgagcacagtct

SEQ ID NO: 331068 - DNA, 25 bp, Homo sapien
tgtgccaaggacggcttttcagcaa

SEQ ID NO: 331069 - DNA, 25 bp, Homo sapien
tgccaaggacggcttttcagcaacc

SEQ ID NO: 331070 - DNA, 25 bp, Homo sapien
tttgtctcggtccttcacactccag

SEQ ID NO: 331071 - DNA, 25 bp, Homo sapien
tgtctcggtccttcacactccagtt

SEQ ID NO: 331072 - DNA, 25 bp, Homo sapien
cggtccttcacactccagtttcggg

SEQ ID NO: 331073 - DNA, 25 bp, Homo sapien
ctcggtccttcacactccagtttcg

SEQ ID NO: 331074 - DNA, 25 bp, Homo sapien
ggcaatgaaaaagtttagactccac

SEQ ID NO: 331075 - DNA, 25 bp, Homo sapien
aagtttagactccactcttccgcag

SEQ ID NO: 331076 - DNA, 25 bp, Homo sapien
aaagtttagactccactcttccgca

SEQ ID NO: 331077 - DNA, 25 bp, Homo sapien
tgaaaaagtttagactccactcttc

SEQ ID NO: 331078 - DNA, 25 bp, Homo sapien
gaagaaaagacactcaggatagcaa

SEQ ID NO: 331079 - DNA, 25 bp, Homo sapien
tagcaatgctgtcaatagaacctac

SEQ ID NO: 331080 - DNA, 25 bp, Homo sapien
aagagaagaaaagacactcaggata

SEQ ID NO: 331081 - DNA, 25 bp, Homo sapien
aatagaacctacaccactacaagga

SEQ ID NO: 331082 - DNA, 25 bp, Homo sapien
aattttattcctaaatccatgctag

SEQ ID NO: 331083 - DNA, 25 bp, Homo sapien
agatgatcctgggaatgtggctcca

SEQ ID NO: 331084 - DNA, 25 bp, Homo sapien
gaagctgcctgggtgtgtaccgcac

SEQ ID NO: 331085 - DNA, 25 bp, Homo sapien
tcatttacagataacaggtcagaga

SEQ ID NO: 331086 - DNA, 25 bp, Homo sapien
ggattccagctaatttgttcacaaa

SEQ ID NO: 331087 - DNA, 25 bp, Homo sapien
caaaagtaccctacttcatttacag

SEQ ID NO: 331088 - DNA, 25 bp, Homo sapien
tggtacagcagatctcaccctaaag

SEQ ID NO: 331089 - DNA, 25 bp, Homo sapien
gactggtacagcagatctcacccta

SEQ ID NO: 331090 - DNA, 25 bp, Homo sapien
gtacagcagatctcaccctaaagag

SEQ ID NO: 331091 - DNA, 25 bp, Homo sapien
actggtacagcagatctcaccctaa

SEQ ID NO: 331092 - DNA, 25 bp, Homo sapien
ccagggaagaggcaacaagaatgca

SEQ ID NO: 331093 - DNA, 25 bp, Homo sapien
gaaaagtattaaccacagcgcctgc

SEQ ID NO: 331094 - DNA, 25 bp, Homo sapien
gccaacgttcaggaaacaagccaga

SEQ ID NO: 331095 - DNA, 25 bp, Homo sapien
ccagaaaaatgcgtgcgcttcccgc

SEQ ID NO: 331096 - DNA, 25 bp, Homo sapien
ccacagccgcaccgcggatccagct

SEQ ID NO: 331097 - DNA, 25 bp, Homo sapien
gcaccgcggatccagctccggtcct

SEQ ID NO: 331098 - DNA, 25 bp, Homo sapien
agccgcaccgcggatccagctccgg

SEQ ID NO: 331099 - DNA, 25 bp, Homo sapien
cctatttccgggtccagccgcttct

SEQ ID NO: 331100 - DNA, 25 bp, Homo sapien
tgttccttgcaaacaacatgtggcc

SEQ ID NO: 331101 - DNA, 25 bp, Homo sapien
tcccatggaagtttattttatgttc

SEQ ID NO: 331102 - DNA, 25 bp, Homo sapien
acatgtggcctcagctgtgattcca

SEQ ID NO: 331103 - DNA, 25 bp, Homo sapien
tattttatgttccttgcaaacaaca

SEQ ID NO: 331104 - DNA, 25 bp, Homo sapien
tctctgacttctgttccctgagcct

SEQ ID NO: 331105 - DNA, 25 bp, Homo sapien
tggctcctgttcttcattcaaactg

SEQ ID NO: 331106 - DNA, 25 bp, Homo sapien
tgagcctggctcctgttcttcattc

SEQ ID NO: 331107 - DNA, 25 bp, Homo sapien
agcctggctcctgttcttcattcaa

SEQ ID NO: 331108 - DNA, 25 bp, Homo sapien
gcttctgtatctcggcctgcaactg

SEQ ID NO: 331109 - DNA, 25 bp, Homo sapien
tccagggaatgtagtgggacccaca

SEQ ID NO: 331110 - DNA, 25 bp, Homo sapien
gtgatgtcagtgtccagaagcttgc

SEQ ID NO: 331111 - DNA, 25 bp, Homo sapien
gacaagtcgttgacgctcagatcca

SEQ ID NO: 331112 - DNA, 25 bp, Homo sapien
tcttggggaccagcataacattcag

SEQ ID NO: 331113 - DNA, 25 bp, Homo sapien
gaagaggcataacctgtgctgtgtc

SEQ ID NO: 331114 - DNA, 25 bp, Homo sapien
gggcagtatgagctcagaagaagag

SEQ ID NO: 331115 - DNA, 25 bp, Homo sapien
aagaagaggcataacctgtgctgtg

SEQ ID NO: 331116 - DNA, 25 bp, Homo sapien
agtgagacaggtgcagcttccggag

SEQ ID NO: 331117 - DNA, 25 bp, Homo sapien
gcatggtgagctgggagaagaagta

SEQ ID NO: 331118 - DNA, 25 bp, Homo sapien
gtatgtaatgtagtttgcctacgag

SEQ ID NO: 331119 - DNA, 25 bp, Homo sapien
ttgcctacgaggtaggagtgagaca

SEQ ID NO: 331120 - DNA, 25 bp, Homo sapien
tagtagaagagcttgaagctgcgca

SEQ ID NO: 331121 - DNA, 25 bp, Homo sapien
gagaaggcccacttgtagtagaaga

SEQ ID NO: 331122 - DNA, 25 bp, Homo sapien
tcccagctgtatggcagataggttt

SEQ ID NO: 331123 - DNA, 25 bp, Homo sapien
caggttgaagatccttcccagctgt

SEQ ID NO: 331124 - DNA, 25 bp, Homo sapien
ggctctgttccactttcgtcaggag

SEQ ID NO: 331125 - DNA, 25 bp, Homo sapien
gttccactttcgtcaggaggtcgga

SEQ ID NO: 331126 - DNA, 25 bp, Homo sapien
ccactttcgtcaggaggtcggagag

SEQ ID NO: 331127 - DNA, 25 bp, Homo sapien
gtcaggaggtcggagaggaacttat

SEQ ID NO: 331128 - DNA, 25 bp, Homo sapien
ccaaaatgggaacttggtcaaggct

SEQ ID NO: 331129 - DNA, 25 bp, Homo sapien
ttggtcaaggcttcagaagcccctt

SEQ ID NO: 331130 - DNA, 25 bp, Homo sapien
gatcaatgtgtatttccactgcttc

SEQ ID NO: 331131 - DNA, 25 bp, Homo sapien
gaagcctcataggaaaagatcaatg

SEQ ID NO: 331132 - DNA, 25 bp, Homo sapien
cagtaaaagacttgctcagagtcca

SEQ ID NO: 331133 - DNA, 25 bp, Homo sapien
agtaaaagacttgctcagagtccag

SEQ ID NO: 331134 - DNA, 25 bp, Homo sapien
cacagtaaaagacttgctcagagtc

SEQ ID NO: 331135 - DNA, 25 bp, Homo sapien
tgtgggctgcaagttccaagaggct

SEQ ID NO: 331136 - DNA, 25 bp, Homo sapien
ttcactgtgagctgttccaacacca

SEQ ID NO: 331137 - DNA, 25 bp, Homo sapien
ccagatggagaaaccggaagggcca

SEQ ID NO: 331138 - DNA, 25 bp, Homo sapien
tgcaggctgtcttggttgggccact

SEQ ID NO: 331139 - DNA, 25 bp, Homo sapien
tgaccccgttcatctggagttagtg

SEQ ID NO: 331140 - DNA, 25 bp, Homo sapien
taacttcactgctttggaacgctga

SEQ ID NO: 331141 - DNA, 25 bp, Homo sapien
tgcattccggtctgggcgagacagt

SEQ ID NO: 331142 - DNA, 25 bp, Homo sapien
taatggcaccggatataggacccct

SEQ ID NO: 331143 - DNA, 25 bp, Homo sapien
cacacactactggacctgagatggc

SEQ ID NO: 331144 - DNA, 25 bp, Homo sapien
tccctcccagcacagttataaaaga

SEQ ID NO: 331145 - DNA, 25 bp, Homo sapien
tggtgtataaatccctatctctagt

SEQ ID NO: 331146 - DNA, 25 bp, Homo sapien
tgccccacacacatgtaaagaaatc

SEQ ID NO: 331147 - DNA, 25 bp, Homo sapien
cataaaagtgcagtactcgttaagg

SEQ ID NO: 331148 - DNA, 25 bp, Homo sapien
aactctcgcatctatgatcatttga

SEQ ID NO: 331149 - DNA, 25 bp, Homo sapien
tactcgttaaggtagacacatagac

SEQ ID NO: 331150 - DNA, 25 bp, Homo sapien
gaaataaactctcgcatctatgatc

SEQ ID NO: 331151 - DNA, 25 bp, Homo sapien
tgtgtctggtctggcaatgtttttt

SEQ ID NO: 331152 - DNA, 25 bp, Homo sapien
actgtgtctggtctggcaatgtttt

SEQ ID NO: 331153 - DNA, 25 bp, Homo sapien
aaccactgtgtctggtctggcaatg

SEQ ID NO: 331154 - DNA, 25 bp, Homo sapien
ccactgtgtctggtctggcaatgtt

SEQ ID NO: 331155 - DNA, 25 bp, Homo sapien
tgaggttcggatacatctgcaacat

SEQ ID NO: 331156 - DNA, 25 bp, Homo sapien
ggttcggatacatctgcaacatgga

SEQ ID NO: 331157 - DNA, 25 bp, Homo sapien
ttcggatacatctgcaacatggatg

SEQ ID NO: 331158 - DNA, 25 bp, Homo sapien
gaatgaggttcggatacatctgcaa

SEQ ID NO: 331159 - DNA, 25 bp, Homo sapien
gccaagggttccatgactctccatt

SEQ ID NO: 331160 - DNA, 25 bp, Homo sapien
tagtatcagtaacgtatgcaacaaa

SEQ ID NO: 331161 - DNA, 25 bp, Homo sapien
tccaggtgacttcacatgaagggcc

SEQ ID NO: 331162 - DNA, 25 bp, Homo sapien
tccacttaattagcctgtttccacc

SEQ ID NO: 331163 - DNA, 25 bp, Homo sapien
tcattaactgtgtcgattggctcct

SEQ ID NO: 331164 - DNA, 25 bp, Homo sapien
tagctgagggaatcgtcacttacct

SEQ ID NO: 331165 - DNA, 25 bp, Homo sapien
tttcaattccatgtagtgaccaggg

SEQ ID NO: 331166 - DNA, 25 bp, Homo sapien
taacttgtgcctagatctagagccc

SEQ ID NO: 331167 - DNA, 25 bp, Homo sapien
cagactcgtgttcgtggctccaaat

SEQ ID NO: 331168 - DNA, 25 bp, Homo sapien
caaagctctgccagactcgtgttcg

SEQ ID NO: 331169 - DNA, 25 bp, Homo sapien
gtgttcgtggctccaaatctgcttc

SEQ ID NO: 331170 - DNA, 25 bp, Homo sapien
aagctctgccagactcgtgttcgtg

SEQ ID NO: 331171 - DNA, 25 bp, Homo sapien
tatagatagtccttgatcatatgct

SEQ ID NO: 331172 - DNA, 25 bp, Homo sapien
tatagaccacataaggtaacttgtg

SEQ ID NO: 331173 - DNA, 25 bp, Homo sapien
ccaaacactgctggtcggctatttg

SEQ ID NO: 331174 - DNA, 25 bp, Homo sapien
catttctaactgtgaggacaaccag

SEQ ID NO: 331175 - DNA, 25 bp, Homo sapien
cacattggactgtgagtaaagggct

SEQ ID NO: 331176 - DNA, 25 bp, Homo sapien
gggaggcggaggttcaacaagagca

SEQ ID NO: 331177 - DNA, 25 bp, Homo sapien
aatggttaaatcacattggactgtg

SEQ ID NO: 331178 - DNA, 25 bp, Homo sapien
agcaaagcccattctcaaaaacaaa

SEQ ID NO: 331179 - DNA, 25 bp, Homo sapien
tgggcacagtctgcgctgacccagg

SEQ ID NO: 331180 - DNA, 25 bp, Homo sapien
gaagcctcggtgtcagggaccgtgg

SEQ ID NO: 331181 - DNA, 25 bp, Homo sapien
accgtgggacagaaggtcaccctct

SEQ ID NO: 331182 - DNA, 25 bp, Homo sapien
ctgggcacagtctgcgctgacccag

SEQ ID NO: 331183 - DNA, 25 bp, Homo sapien
agaacaccccctctcgagtggcctt

SEQ ID NO: 331184 - DNA, 25 bp, Homo sapien
accccctctcgagtggccttctggt

SEQ ID NO: 331185 - DNA, 25 bp, Homo sapien
acaccccctctcgagtggccttctg

SEQ ID NO: 331186 - DNA, 25 bp, Homo sapien
ctagaacaccccctctcgagtggcc

SEQ ID NO: 331187 - DNA, 25 bp, Homo sapien
ggaggaagggaggagtccaggccat

SEQ ID NO: 331188 - DNA, 25 bp, Homo sapien
tgagagaagagggaagagtaggagg

SEQ ID NO: 331189 - DNA, 25 bp, Homo sapien
agaagagggaagagtaggaggaagg

SEQ ID NO: 331190 - DNA, 25 bp, Homo sapien
gagagaagagggaagagtaggagga

SEQ ID NO: 331191 - DNA, 25 bp, Homo sapien
ttggcaaagatggagctgtctggcc

SEQ ID NO: 331192 - DNA, 25 bp, Homo sapien
gcactggggacagcaacaatgttgg

SEQ ID NO: 331193 - DNA, 25 bp, Homo sapien
caaagatggagctgtctggccgcag

SEQ ID NO: 331194 - DNA, 25 bp, Homo sapien
gacagcaacaatgttggcaaagatg

SEQ ID NO: 331195 - DNA, 25 bp, Homo sapien
aaaacagccaactctcagggatctc

SEQ ID NO: 331196 - DNA, 25 bp, Homo sapien
aaacagccaactctcagggatctca

SEQ ID NO: 331197 - DNA, 25 bp, Homo sapien
aaaaacagccaactctcagggatct

SEQ ID NO: 331198 - DNA, 25 bp, Homo sapien
gaaaaacagccaactctcagggatc

SEQ ID NO: 331199 - DNA, 25 bp, Homo sapien
aatcatgctcagacttcagctcttc

SEQ ID NO: 331200 - DNA, 25 bp, Homo sapien
aagaatcatgctcagacttcagctc

SEQ ID NO: 331201 - DNA, 25 bp, Homo sapien
atctaaagaatcatgctcagacttc

SEQ ID NO: 331202 - DNA, 25 bp, Homo sapien
taaagaatcatgctcagacttcagc

SEQ ID NO: 331203 - DNA, 25 bp, Homo sapien
ctttggcaacaataccatgtgctct

SEQ ID NO: 331204 - DNA, 25 bp, Homo sapien
tttggcaacaataccatgtgctctt

SEQ ID NO: 331205 - DNA, 25 bp, Homo sapien
tctttggcaacaataccatgtgctc

SEQ ID NO: 331206 - DNA, 25 bp, Homo sapien
ttggcaacaataccatgtgctcttt

SEQ ID NO: 331207 - DNA, 25 bp, Homo sapien
aatttgccatttttgctattcaata

SEQ ID NO: 331208 - DNA, 25 bp, Homo sapien
gaaatcggtgactggttctggcaga

SEQ ID NO: 331209 - DNA, 25 bp, Homo sapien
gggaaccctatctaatatctcgtga

SEQ ID NO: 331210 - DNA, 25 bp, Homo sapien
accatgccgggtctgtttcagccta

SEQ ID NO: 331211 - DNA, 25 bp, Homo sapien
ttggactcaagtaagaaacagggct

SEQ ID NO: 331212 - DNA, 25 bp, Homo sapien
aaacaccacaagcatttcagcaggg

SEQ ID NO: 331213 - DNA, 25 bp, Homo sapien
catctctgtcatggcccggattcct

SEQ ID NO: 331214 - DNA, 25 bp, Homo sapien
tctcaattgcagacatagtgagtgc

SEQ ID NO: 331215 - DNA, 25 bp, Homo sapien
gacagatggacaatcacacagcagg

SEQ ID NO: 331216 - DNA, 25 bp, Homo sapien
gcaactgcttgcattgaaggaatgt

SEQ ID NO: 331217 - DNA, 25 bp, Homo sapien
aactgcttgcattgaaggaatgtag

SEQ ID NO: 331218 - DNA, 25 bp, Homo sapien
ctggaagcaactgcttgcattgaag

SEQ ID NO: 331219 - DNA, 25 bp, Homo sapien
gaagcaactgcttgcattgaaggaa

SEQ ID NO: 331220 - DNA, 25 bp, Homo sapien
tactctggaagataaggcagagcgg

SEQ ID NO: 331221 - DNA, 25 bp, Homo sapien
gcggcccgagaaatgtgcactgagt

SEQ ID NO: 331222 - DNA, 25 bp, Homo sapien
ctgatagagaatgagccagcggccc

SEQ ID NO: 331223 - DNA, 25 bp, Homo sapien
gaaagcaagtatggcaatcctctgt

SEQ ID NO: 331224 - DNA, 25 bp, Homo sapien
aaggaaaggagtgcgtagctctgtt

SEQ ID NO: 331225 - DNA, 25 bp, Homo sapien
tccaaaaggaaaggagtgcgtagct

SEQ ID NO: 331226 - DNA, 25 bp, Homo sapien
ccaaaaggaaaggagtgcgtagctc

SEQ ID NO: 331227 - DNA, 25 bp, Homo sapien
aaaaggaaaggagtgcgtagctctg

SEQ ID NO: 331228 - DNA, 25 bp, Homo sapien
atcacctcgtcctctatgccgtgga

SEQ ID NO: 331229 - DNA, 25 bp, Homo sapien
ctcgtcctctatgccgtggatgatg

SEQ ID NO: 331230 - DNA, 25 bp, Homo sapien
cgatgtcgttgtgtccggcgccctc

SEQ ID NO: 331231 - DNA, 25 bp, Homo sapien
gctgtagagctcgatgtcgttgtgt

SEQ ID NO: 331232 - DNA, 25 bp, Homo sapien
cgtcgaagcagtaggtcttggtgtc

SEQ ID NO: 331233 - DNA, 25 bp, Homo sapien
ctcgatgttagggaaggcgtcgaag

SEQ ID NO: 331234 - DNA, 25 bp, Homo sapien
cagtaggtcttggtgtcggggaagg

SEQ ID NO: 331235 - DNA, 25 bp, Homo sapien
cgaagcagtaggtcttggtgtcggg

SEQ ID NO: 331236 - DNA, 25 bp, Homo sapien
gcaccaccgcggcacactcgtagcg

SEQ ID NO: 331237 - DNA, 25 bp, Homo sapien
accaccgcggcacactcgtagcgcg

SEQ ID NO: 331238 - DNA, 25 bp, Homo sapien
accgcggcacactcgtagcgcgagg

SEQ ID NO: 331239 - DNA, 25 bp, Homo sapien
gcgcatgcccgaggtgagcggcgag

SEQ ID NO: 331240 - DNA, 25 bp, Homo sapien
cacgcagcgaacatacatgcaggag

SEQ ID NO: 331241 - DNA, 25 bp, Homo sapien
tcgcgctggctgtactggaagtcgg

SEQ ID NO: 331242 - DNA, 25 bp, Homo sapien
atggtgtccagctcgcgctggctgt

SEQ ID NO: 331243 - DNA, 25 bp, Homo sapien
gcgagcttggcagcgatgcggccgg

SEQ ID NO: 331244 - DNA, 25 bp, Homo sapien
gccccagggagcctcgcaaccacag

SEQ ID NO: 331245 - DNA, 25 bp, Homo sapien
agggagcctcgcaaccacaggtctc

SEQ ID NO: 331246 - DNA, 25 bp, Homo sapien
ggggtgctccgagtcgcgggcaggg

SEQ ID NO: 331247 - DNA, 25 bp, Homo sapien
gcccagccccatcgcggtccaagcc

SEQ ID NO: 331248 - DNA, 25 bp, Homo sapien
catttttaagtaaggatgaagaact

SEQ ID NO: 331249 - DNA, 25 bp, Homo sapien
atgccatcagatgccttgaatatac

SEQ ID NO: 331250 - DNA, 25 bp, Homo sapien
tcctcagttgctcatcaatgccatc

SEQ ID NO: 331251 - DNA, 25 bp, Homo sapien
ttgatgcatgattttgtgactctac

SEQ ID NO: 331252 - DNA, 25 bp, Homo sapien
cacagtgaggcgagccgcggtgccg

SEQ ID NO: 331253 - DNA, 25 bp, Homo sapien
ggtcgcactgcagtcgccatctcgg

SEQ ID NO: 331254 - DNA, 25 bp, Homo sapien
cactccggtcgcactgcagtcgcca

SEQ ID NO: 331255 - DNA, 25 bp, Homo sapien
tccggtcgcactgcagtcgccatct

SEQ ID NO: 331256 - DNA, 25 bp, Homo sapien
gctcaggaatgagagcccgcacttg

SEQ ID NO: 331257 - DNA, 25 bp, Homo sapien
gacatacagtgtttccgcaggaata

SEQ ID NO: 331258 - DNA, 25 bp, Homo sapien
tgggttacaccctctcgctctgtgt

SEQ ID NO: 331259 - DNA, 25 bp, Homo sapien
ggcaccgagtaacgtgcaccacgtg

SEQ ID NO: 331260 - DNA, 25 bp, Homo sapien
taccatggaaactggcccaatggct

SEQ ID NO: 331261 - DNA, 25 bp, Homo sapien
gaaacattgaatattaccatggaaa

SEQ ID NO: 331262 - DNA, 25 bp, Homo sapien
gaactgcagtaatcaaccttcaggg

SEQ ID NO: 331263 - DNA, 25 bp, Homo sapien
cctgaatttgtgactgagaactgca

SEQ ID NO: 331264 - DNA, 25 bp, Homo sapien
gatatccatggttagacaagtcaag

SEQ ID NO: 331265 - DNA, 25 bp, Homo sapien
tcagaggtactccacatgaggcatg

SEQ ID NO: 331266 - DNA, 25 bp, Homo sapien
aacagggacacaactacttcaaggg

SEQ ID NO: 331267 - DNA, 25 bp, Homo sapien
tgatagagttccatgccaattgccc

SEQ ID NO: 331268 - DNA, 25 bp, Homo sapien
cagtcattcaacgtttctgcagaaa

SEQ ID NO: 331269 - DNA, 25 bp, Homo sapien
cactaagagaacctgtgagtctaga

SEQ ID NO: 331270 - DNA, 25 bp, Homo sapien
aggtaggaagacaaaactcacttca

SEQ ID NO: 331271 - DNA, 25 bp, Homo sapien
gaagactatttgcacagttaaagca

SEQ ID NO: 331272 - DNA, 25 bp, Homo sapien
cagagcatctctacctgggccagtc

SEQ ID NO: 331273 - DNA, 25 bp, Homo sapien
accactgtgatctatgaggataacc

SEQ ID NO: 331274 - DNA, 25 bp, Homo sapien
cagcaactatgtgcagtggtaccag

SEQ ID NO: 331275 - DNA, 25 bp, Homo sapien
tcagcctgtctccaccagagagggt

SEQ ID NO: 331276 - DNA, 25 bp, Homo sapien
cttacgcagaagaatcagcaccgat

SEQ ID NO: 331277 - DNA, 25 bp, Homo sapien
tcggatcacaggagaagctagcctt

SEQ ID NO: 331278 - DNA, 25 bp, Homo sapien
gaagcaggacatgggcttacgcaga

SEQ ID NO: 331279 - DNA, 25 bp, Homo sapien
acggcctctacggtgctgtcagcaa

SEQ ID NO: 331280 - DNA, 25 bp, Homo sapien
atagtttgaagtgccatgaggtgtc

SEQ ID NO: 331281 - DNA, 25 bp, Homo sapien
tctcgaagcagtgcgctaccacgtt

SEQ ID NO: 331282 - DNA, 25 bp, Homo sapien
gggtcacaaaagacgcagcccatgt

SEQ ID NO: 331283 - DNA, 25 bp, Homo sapien
cagacactgcaggtgtcggcggaca

SEQ ID NO: 331284 - DNA, 25 bp, Homo sapien
acatcttgtccttgggccgtctggg

SEQ ID NO: 331285 - DNA, 25 bp, Homo sapien
tgattcctggtctggctcggtgctc

SEQ ID NO: 331286 - DNA, 25 bp, Homo sapien
gggcagatgcctcactcccgctgat

SEQ ID NO: 331287 - DNA, 25 bp, Homo sapien
cctcactcccgctgattcctggtct

SEQ ID NO: 331288 - DNA, 25 bp, Homo sapien
accaccctgtcagctactctggcgg

SEQ ID NO: 331289 - DNA, 25 bp, Homo sapien
cgggtgggtcccccgactgctgcat

SEQ ID NO: 331290 - DNA, 25 bp, Homo sapien
caggacaaactgaccgtctccaggg

SEQ ID NO: 331291 - DNA, 25 bp, Homo sapien
tagtgtctcagatttagtccggcag

SEQ ID NO: 331292 - DNA, 25 bp, Homo sapien
agggccatgctcctcatttgcaggg

SEQ ID NO: 331293 - DNA, 25 bp, Homo sapien
tcgaaacccctggatcgtcatggcc

SEQ ID NO: 331294 - DNA, 25 bp, Homo sapien
acactccttcctatgctccactaac

SEQ ID NO: 331295 - DNA, 25 bp, Homo sapien
tgattttgctggtatccacaagcct

SEQ ID NO: 331296 - DNA, 25 bp, Homo sapien
tgtccccgaggagaagagtgatttt

SEQ ID NO: 331297 - DNA, 25 bp, Homo sapien
gattttgctggtatccacaagcctt

SEQ ID NO: 331298 - DNA, 25 bp, Homo sapien
gcactggcaaaaccagttgtccccg

SEQ ID NO: 331299 - DNA, 25 bp, Homo sapien
tagaaggcaagaggcccagttggca

SEQ ID NO: 331300 - DNA, 25 bp, Homo sapien
gtatagaaggcaagaggcccagttg

SEQ ID NO: 331301 - DNA, 25 bp, Homo sapien
ctggtatagaaggcaagaggcccag

SEQ ID NO: 331302 - DNA, 25 bp, Homo sapien
tggtatagaaggcaagaggcccagt

SEQ ID NO: 331303 - DNA, 25 bp, Homo sapien
cgtaagacagcctattgggcaaggt

SEQ ID NO: 331304 - DNA, 25 bp, Homo sapien
gagctcgtaagacagcctattgggc

SEQ ID NO: 331305 - DNA, 25 bp, Homo sapien
catgagctcgtaagacagcctattg

SEQ ID NO: 331306 - DNA, 25 bp, Homo sapien
aagacagcctattgggcaaggtttg

SEQ ID NO: 331307 - DNA, 25 bp, Homo sapien
ggccggccggagcgtgcggccgcta

SEQ ID NO: 331308 - DNA, 25 bp, Homo sapien
tagcggccgcacgctccggccggcc

SEQ ID NO: 331309 - DNA, 25 bp, Homo sapien
tcatcttggcacctagagatcatct

SEQ ID NO: 331310 - DNA, 25 bp, Homo sapien
ggctcctggttctgcgtgtgcgctg

SEQ ID NO: 331311 - DNA, 25 bp, Homo sapien
ccttggggcctcataacctgttgag

SEQ ID NO: 331312 - DNA, 25 bp, Homo sapien
gcaatttcatcttggcacctagaga

SEQ ID NO: 331313 - DNA, 25 bp, Homo sapien
gagttggctacatatacatactcaa

SEQ ID NO: 331314 - DNA, 25 bp, Homo sapien
tactcaataggatatcagaggagct

SEQ ID NO: 331315 - DNA, 25 bp, Homo sapien
tgagaatactcataaaagaggtcct

SEQ ID NO: 331316 - DNA, 25 bp, Homo sapien
ggacaggaatttgagccaaatgagt

SEQ ID NO: 331317 - DNA, 25 bp, Homo sapien
cataaaggtactcagcctctgtaaa

SEQ ID NO: 331318 - DNA, 25 bp, Homo sapien
gggacataaaggtactcagcctctg

SEQ ID NO: 331319 - DNA, 25 bp, Homo sapien
aaggctcagcctctgtaaaggcaca

SEQ ID NO: 331320 - DNA, 25 bp, Homo sapien
aaaggctcagcctctgtaaaggcac

SEQ ID NO: 331321 - DNA, 25 bp, Homo sapien
cctgtattggggtcaagatctggcc

SEQ ID NO: 331322 - DNA, 25 bp, Homo sapien
ttgcctgttcatatccagcccctgt

SEQ ID NO: 331323 - DNA, 25 bp, Homo sapien
ggcctgttctcaatgcagcaagatc

SEQ ID NO: 331324 - DNA, 25 bp, Homo sapien
tgttcatatccagcccctgtattgg

SEQ ID NO: 331325 - DNA, 25 bp, Homo sapien
gctcccgggactgcgagaattggca

SEQ ID NO: 331326 - DNA, 25 bp, Homo sapien
gaattggcatgttcacaaggcaccg

SEQ ID NO: 331327 - DNA, 25 bp, Homo sapien
cacggtccacagtcgattaagaaat

SEQ ID NO: 331328 - DNA, 25 bp, Homo sapien
taagaaatcttgcacggccatcagg

SEQ ID NO: 331329 - DNA, 25 bp, Homo sapien
aaaccaagggatggcttgctttgct

SEQ ID NO: 331330 - DNA, 25 bp, Homo sapien
tctagtcaagacaggatggccagga

SEQ ID NO: 331331 - DNA, 25 bp, Homo sapien
gatagatagttatcaggttccagag

SEQ ID NO: 331332 - DNA, 25 bp, Homo sapien
aagccaatggcttctttatcataag

SEQ ID NO: 331333 - DNA, 25 bp, Homo sapien
actgtggttagactgtagcctattt

SEQ ID NO: 331334 - DNA, 25 bp, Homo sapien
ggaactcagatgagtagttgcccaa

SEQ ID NO: 331335 - DNA, 25 bp, Homo sapien
taaatttcacaagcttaattaggtc

SEQ ID NO: 331336 - DNA, 25 bp, Homo sapien
gctcatggcttagtgtaaatttcac

SEQ ID NO: 331337 - DNA, 25 bp, Homo sapien
aagccaaagtagaatagacataaaa

SEQ ID NO: 331338 - DNA, 25 bp, Homo sapien
aaactaagccaaagtagaatagaca

SEQ ID NO: 331339 - DNA, 25 bp, Homo sapien
taagccaaagtagaatagacataaa

SEQ ID NO: 331340 - DNA, 25 bp, Homo sapien
actaagccaaagtagaatagacata

SEQ ID NO: 331341 - DNA, 25 bp, Homo sapien
aataaattgactcttcttggtactg

SEQ ID NO: 331342 - DNA, 25 bp, Homo sapien
tgtacatttacctttacctcatctt

SEQ ID NO: 331343 - DNA, 25 bp, Homo sapien
tactgactcgggttttatagaagaa

SEQ ID NO: 331344 - DNA, 25 bp, Homo sapien
gactcttcttggtactgactcgggt

SEQ ID NO: 331345 - DNA, 25 bp, Homo sapien
tttatacgatgtgtaaagatcaagt

SEQ ID NO: 331346 - DNA, 25 bp, Homo sapien
atttatacgatgtgtaaagatcaag

SEQ ID NO: 331347 - DNA, 25 bp, Homo sapien
ttatacgatgtgtaaagatcaagtc

SEQ ID NO: 331348 - DNA, 25 bp, Homo sapien
tatttatacgatgtgtaaagatcaa

SEQ ID NO: 331349 - DNA, 25 bp, Homo sapien
tacattgtaacccataatgtacaga

SEQ ID NO: 331350 - DNA, 25 bp, Homo sapien
gacagtgcatcacttcacctcatca

SEQ ID NO: 331351 - DNA, 25 bp, Homo sapien
cgtgacagtgcatcacttcacctca

SEQ ID NO: 331352 - DNA, 25 bp, Homo sapien
gaaatacgcccttaattacatagga

SEQ ID NO: 331353 - DNA, 25 bp, Homo sapien
aggaaatacgcccttaattacatag

SEQ ID NO: 331354 - DNA, 25 bp, Homo sapien
aatacgcccttaattacataggaat

SEQ ID NO: 331355 - DNA, 25 bp, Homo sapien
atggagcccttactaagcataaagt

SEQ ID NO: 331356 - DNA, 25 bp, Homo sapien
ttaacagtatcaatggtttggagtt

SEQ ID NO: 331357 - DNA, 25 bp, Homo sapien
tggagcccttactaagcataaagta

SEQ ID NO: 331358 - DNA, 25 bp, Homo sapien
taacagtatcaatggtttggagtta

SEQ ID NO: 331359 - DNA, 25 bp, Homo sapien
gcaggtccagagtcgaggcagagct

SEQ ID NO: 331360 - DNA, 25 bp, Homo sapien
ggcaggtccagagtcgaggcagagc

SEQ ID NO: 331361 - DNA, 25 bp, Homo sapien
caggtccagagtcgaggcagagcta

SEQ ID NO: 331362 - DNA, 25 bp, Homo sapien
gtcagggtagatccagggctgagca

SEQ ID NO: 331363 - DNA, 25 bp, Homo sapien
cagggtgatgacacatccagagcac

SEQ ID NO: 331364 - DNA, 25 bp, Homo sapien
aaggcacaaccagcgcagggtaagg

SEQ ID NO: 331365 - DNA, 25 bp, Homo sapien
caggtccagggagcggccagcacca

SEQ ID NO: 331366 - DNA, 25 bp, Homo sapien
agtcagggcaggtccttgacaggac

SEQ ID NO: 331367 - DNA, 25 bp, Homo sapien
gacctgggatgtacgtctgcgttga

SEQ ID NO: 331368 - DNA, 25 bp, Homo sapien
gaggtttcagaccatcccgctctgt

SEQ ID NO: 331369 - DNA, 25 bp, Homo sapien
taagaaaatcctcaagtcccgagat

SEQ ID NO: 331370 - DNA, 25 bp, Homo sapien
cagtatgagggttttcgacctggga

SEQ ID NO: 331371 - DNA, 25 bp, Homo sapien
cactgtatgaggttgtgaggagcca

SEQ ID NO: 331372 - DNA, 25 bp, Homo sapien
gcaagtacttaagcagtgctcacca

SEQ ID NO: 331373 - DNA, 25 bp, Homo sapien
cagtctgtcagtggcataatggtaa

SEQ ID NO: 331374 - DNA, 25 bp, Homo sapien
tcttcgtacatccttttcagtaggg

SEQ ID NO: 331375 - DNA, 25 bp, Homo sapien
atacctctaaaatatgggcctcata

SEQ ID NO: 331376 - DNA, 25 bp, Homo sapien
gctgttactcctgacttccatgtga

SEQ ID NO: 331377 - DNA, 25 bp, Homo sapien
taaacagctatttaggaattgaggc

SEQ ID NO: 331378 - DNA, 25 bp, Homo sapien
gattttcggatagctgccacataag

SEQ ID NO: 331379 - DNA, 25 bp, Homo sapien
cagtaaatccctcttcgatcttctc

SEQ ID NO: 331380 - DNA, 25 bp, Homo sapien
ttgaaaacagggttaggaagtcata

SEQ ID NO: 331381 - DNA, 25 bp, Homo sapien
gcatgcccatgaactcacatgatta

SEQ ID NO: 331382 - DNA, 25 bp, Homo sapien
gatgagcatgcccatgaactcacat

SEQ ID NO: 331383 - DNA, 25 bp, Homo sapien
cattgaaggcccgagtgacctatca

SEQ ID NO: 331384 - DNA, 25 bp, Homo sapien
ctcatggtactacaactgcctggtg

SEQ ID NO: 331385 - DNA, 25 bp, Homo sapien
ctaggagagtgcacaggaagctttc

SEQ ID NO: 331386 - DNA, 25 bp, Homo sapien
tcaagagatttcgaggtcactgact

SEQ ID NO: 331387 - DNA, 25 bp, Homo sapien
gacgcagccgccctcagtgtctgcg

SEQ ID NO: 331388 - DNA, 25 bp, Homo sapien
cggccccaggacagaaggtcaccat

SEQ ID NO: 331389 - DNA, 25 bp, Homo sapien
tctgcggccccaggacagaaggtca

SEQ ID NO: 331390 - DNA, 25 bp, Homo sapien
gaataattatgtatcctggtaccag

SEQ ID NO: 331391 - DNA, 25 bp, Homo sapien
tcatcttcagcctaggcccctgtga

SEQ ID NO: 331392 - DNA, 25 bp, Homo sapien
tcttgtcttcaagcacagagtgtga

SEQ ID NO: 331393 - DNA, 25 bp, Homo sapien
gatggttgcttgctctaccacagag

SEQ ID NO: 331394 - DNA, 25 bp, Homo sapien
gcacaataatactgagcctcatctt

SEQ ID NO: 331395 - DNA, 25 bp, Homo sapien
tccagcatggccggcttccctctcc

SEQ ID NO: 331396 - DNA, 25 bp, Homo sapien
cctcaccctcctcactcactgtgca

SEQ ID NO: 331397 - DNA, 25 bp, Homo sapien
atctccagcatggccggcttccctc

SEQ ID NO: 331398 - DNA, 25 bp, Homo sapien
agcatggccggcttccctctcctcc

SEQ ID NO: 331399 - DNA, 25 bp, Homo sapien
cctcatctatagtaataatcagcgg

SEQ ID NO: 331400 - DNA, 25 bp, Homo sapien
cgggcagagggtcaccatctcttgt

SEQ ID NO: 331401 - DNA, 25 bp, Homo sapien
tagtaataatcagcggccctcaggg

SEQ ID NO: 331402 - DNA, 25 bp, Homo sapien
gaagcagctccaacatcggaagtaa

SEQ ID NO: 331403 - DNA, 25 bp, Homo sapien
ggctgattattactgtgcagcatgg

SEQ ID NO: 331404 - DNA, 25 bp, Homo sapien
gctgattattactgtgcagcatggg

SEQ ID NO: 331405 - DNA, 25 bp, Homo sapien
aggctgattattactgtgcagcatg

SEQ ID NO: 331406 - DNA, 25 bp, Homo sapien
gaggctgattattactgtgcagcat

SEQ ID NO: 331407 - DNA, 25 bp, Homo sapien
ttccatgcatgttcttcagtaactc

SEQ ID NO: 331408 - DNA, 25 bp, Homo sapien
gggcatggtaatagcaagaaatgcc

SEQ ID NO: 331409 - DNA, 25 bp, Homo sapien
attccatgcatgttcttcagtaact

SEQ ID NO: 331410 - DNA, 25 bp, Homo sapien
cagggcatggtaatagcaagaaatg

SEQ ID NO: 331411 - DNA, 25 bp, Homo sapien
tcctaggtgagatccctggtcacag

SEQ ID NO: 331412 - DNA, 25 bp, Homo sapien
taaaagctaccacgtgtcaggctca

SEQ ID NO: 331413 - DNA, 25 bp, Homo sapien
gactctggtcaaaacaagctgaagt

SEQ ID NO: 331414 - DNA, 25 bp, Homo sapien
tcctaaacatcctagttggaatggt

SEQ ID NO: 331415 - DNA, 25 bp, Homo sapien
tgtgatgccaccaagtcgaagtctc

SEQ ID NO: 331416 - DNA, 25 bp, Homo sapien
cctgccagggtgtctttctcaatcc

SEQ ID NO: 331417 - DNA, 25 bp, Homo sapien
ggctgtcctaaagtggcatctcctc

SEQ ID NO: 331418 - DNA, 25 bp, Homo sapien
tggacttccttacatcttcacctga

SEQ ID NO: 331419 - DNA, 25 bp, Homo sapien
cacatgggacacattatactggacc

SEQ ID NO: 331420 - DNA, 25 bp, Homo sapien
ctcttatcacatgggacacattata

SEQ ID NO: 331421 - DNA, 25 bp, Homo sapien
gagaggtagctgtggacctgctcct

SEQ ID NO: 331422 - DNA, 25 bp, Homo sapien
cacattatactggacccaggatggg

SEQ ID NO: 331423 - DNA, 25 bp, Homo sapien
tgacgcagccgccctcagtgtctgg

SEQ ID NO: 331424 - DNA, 25 bp, Homo sapien
gacgcagccgccctcagtgtctggg

SEQ ID NO: 331425 - DNA, 25 bp, Homo sapien
agctccaacatcggggcaggttatg

SEQ ID NO: 331426 - DNA, 25 bp, Homo sapien
tcggggcaggttatgatgtacactg

SEQ ID NO: 331427 - DNA, 25 bp, Homo sapien
tggtaacagcaatcggccctcaggg

SEQ ID NO: 331428 - DNA, 25 bp, Homo sapien
ctatggtaacagcaatcggccctca

SEQ ID NO: 331429 - DNA, 25 bp, Homo sapien
taacagcaatcggccctcaggggtc

SEQ ID NO: 331430 - DNA, 25 bp, Homo sapien
atggtaacagcaatcggccctcagg

SEQ ID NO: 331431 - DNA, 25 bp, Homo sapien
gattctctggctccaagtctggcac

SEQ ID NO: 331432 - DNA, 25 bp, Homo sapien
aggctgattattactgtgcagcatg

SEQ ID NO: 331433 - DNA, 25 bp, Homo sapien
ggctgattattactgtgcagcatgg

SEQ ID NO: 331434 - DNA, 25 bp, Homo sapien
gaggctgattattactgtgcagcat

SEQ ID NO: 331435 - DNA, 25 bp, Homo sapien
gctgattattactgtgcagcatggg

SEQ ID NO: 331436 - DNA, 25 bp, Homo sapien
ttgctttgtcacataaataagttct

SEQ ID NO: 331437 - DNA, 25 bp, Homo sapien
tttgggggacaagtgttgctttgtc

SEQ ID NO: 331438 - DNA, 25 bp, Homo sapien
tgcatatcagtgcttgccagtctgg

SEQ ID NO: 331439 - DNA, 25 bp, Homo sapien
cacacgtggtgacaaaaagaggagg

SEQ ID NO: 331440 - DNA, 25 bp, Homo sapien
gaggagggcgaaagccaccatattg

SEQ ID NO: 331441 - DNA, 25 bp, Homo sapien
ggtgtgacattcatgcagcctgtaa

SEQ ID NO: 331442 - DNA, 25 bp, Homo sapien
aagtatttgtttcaaggagcatatt

SEQ ID NO: 331443 - DNA, 25 bp, Homo sapien
accatgcccgacctagaagtatttg

SEQ ID NO: 331444 - DNA, 25 bp, Homo sapien
atgcccgacctagaagtatttgttt

SEQ ID NO: 331445 - DNA, 25 bp, Homo sapien
ccatgcccgacctagaagtatttgt

SEQ ID NO: 331446 - DNA, 25 bp, Homo sapien
aattaagtgaggtagcaagccatgc

SEQ ID NO: 331447 - DNA, 25 bp, Homo sapien
cctatgtctacagccaagatggcgg

SEQ ID NO: 331448 - DNA, 25 bp, Homo sapien
tccttgactggtgaagacaggctgc

SEQ ID NO: 331449 - DNA, 25 bp, Homo sapien
gccagtgtgtcaaaatagtgcgtca

SEQ ID NO: 331450 - DNA, 25 bp, Homo sapien
cactaacggctagccagaagggaga

SEQ ID NO: 331451 - DNA, 25 bp, Homo sapien
gacctggccccaagactagaatgaa

SEQ ID NO: 331452 - DNA, 25 bp, Homo sapien
ctaaatttagcccagtccaggaact

SEQ ID NO: 331453 - DNA, 25 bp, Homo sapien
ggaagtcagctagtaccaggcacca

SEQ ID NO: 331454 - DNA, 25 bp, Homo sapien
ccaaaacaataaataggtgccaggg

SEQ ID NO: 331455 - DNA, 25 bp, Homo sapien
tgggccagggcataacaaagccatt

SEQ ID NO: 331456 - DNA, 25 bp, Homo sapien
caaagccattccagtctgactagag

SEQ ID NO: 331457 - DNA, 25 bp, Homo sapien
ggcacttctgggaattcggcagcaa

SEQ ID NO: 331458 - DNA, 25 bp, Homo sapien
aaatacttgctttagatttactgaa

SEQ ID NO: 331459 - DNA, 25 bp, Homo sapien
ttgcttttagacctggggagtgatg

SEQ ID NO: 331460 - DNA, 25 bp, Homo sapien
agtgatggttcagagtcagatgtgc

SEQ ID NO: 331461 - DNA, 25 bp, Homo sapien
gggagtgatggttcagagtcagatg

SEQ ID NO: 331462 - DNA, 25 bp, Homo sapien
atggttcagagtcagatgtgctcac

SEQ ID NO: 331463 - DNA, 25 bp, Homo sapien
cacttggaacactggtgtgcactct

SEQ ID NO: 331464 - DNA, 25 bp, Homo sapien
tggctgaagaggttccagtgacact

SEQ ID NO: 331465 - DNA, 25 bp, Homo sapien
acagacagtagagggctcctgggca

SEQ ID NO: 331466 - DNA, 25 bp, Homo sapien
ccagtggcccctataatgacacatg

SEQ ID NO: 331467 - DNA, 25 bp, Homo sapien
tcttgttttgacttgttagactcaa

SEQ ID NO: 331468 - DNA, 25 bp, Homo sapien
aaaagtcactaagtaacacaatggg

SEQ ID NO: 331469 - DNA, 25 bp, Homo sapien
gatcaaaggtcttgttttgacttgt

SEQ ID NO: 331470 - DNA, 25 bp, Homo sapien
cactaagtaacacaatgggattttc

SEQ ID NO: 331471 - DNA, 25 bp, Homo sapien
tactggatgatgcaatgaatctgtg

SEQ ID NO: 331472 - DNA, 25 bp, Homo sapien
ggtatctgaagggaacgaagctgaa

SEQ ID NO: 331473 - DNA, 25 bp, Homo sapien
gttgctttgatacacgaggactttc

SEQ ID NO: 331474 - DNA, 25 bp, Homo sapien
taattccatccctgagtttagccct

SEQ ID NO: 331475 - DNA, 25 bp, Homo sapien
gaagctggcaggacggtcactgctt

SEQ ID NO: 331476 - DNA, 25 bp, Homo sapien
gtcaccccaacaaagattagctcag

SEQ ID NO: 331477 - DNA, 25 bp, Homo sapien
cggtctcatgacttttaggctgcaa

SEQ ID NO: 331478 - DNA, 25 bp, Homo sapien
tctcgattcaagttgggaagctggc

SEQ ID NO: 331479 - DNA, 25 bp, Homo sapien
tgtatgttcttctgtggttcaggct

SEQ ID NO: 331480 - DNA, 25 bp, Homo sapien
gtttggtttcttgtatgttcttctg

SEQ ID NO: 331481 - DNA, 25 bp, Homo sapien
tcttctgtggttcaggctctttctc

SEQ ID NO: 331482 - DNA, 25 bp, Homo sapien
tctcttcctcacatgattgttccat

SEQ ID NO: 331483 - DNA, 25 bp, Homo sapien
gtggggccacaagtcccaatgcttc

SEQ ID NO: 331484 - DNA, 25 bp, Homo sapien
tggtggggccacaagtcccaatgct

SEQ ID NO: 331485 - DNA, 25 bp, Homo sapien
ggtggggccacaagtcccaatgctt

SEQ ID NO: 331486 - DNA, 25 bp, Homo sapien
aggaaccaaatcgtccagcatcttg

SEQ ID NO: 331487 - DNA, 25 bp, Homo sapien
taaggaaccaaatcgtccagcatct

SEQ ID NO: 331488 - DNA, 25 bp, Homo sapien
cactaaggaaccaaatcgtccagca

SEQ ID NO: 331489 - DNA, 25 bp, Homo sapien
tcactaaggaaccaaatcgtccagc

SEQ ID NO: 331490 - DNA, 25 bp, Homo sapien
tcaacaaagcaatttagagggttcc

SEQ ID NO: 331491 - DNA, 25 bp, Homo sapien
gagggttcccgaatgacctacatca

SEQ ID NO: 331492 - DNA, 25 bp, Homo sapien
caagggagcgaaactgaaggacgaa

SEQ ID NO: 331493 - DNA, 25 bp, Homo sapien
gttacctcatgaaatacagtcgctg

SEQ ID NO: 331494 - DNA, 25 bp, Homo sapien
gaacttgagctattccaggcagaag

SEQ ID NO: 331495 - DNA, 25 bp, Homo sapien
taagaacttgagctattccaggcag

SEQ ID NO: 331496 - DNA, 25 bp, Homo sapien
ctcaggtttattacaacgcaacttt

SEQ ID NO: 331497 - DNA, 25 bp, Homo sapien
tttaagaacttgagctattccaggc

SEQ ID NO: 331498 - DNA, 25 bp, Homo sapien
catgtcacaagaatattttcgatcc

SEQ ID NO: 331499 - DNA, 25 bp, Homo sapien
ctgcctgacattgccatttaggtgt

SEQ ID NO: 331500 - DNA, 25 bp, Homo sapien
gaatattttcgatcccactgcctga

SEQ ID NO: 331501 - DNA, 25 bp, Homo sapien
gagagaagcattagttacttacatg

SEQ ID NO: 331502 - DNA, 25 bp, Homo sapien
tcagctgctgttcgcgagctgccgg

SEQ ID NO: 331503 - DNA, 25 bp, Homo sapien
agctaggagcatgcgcgcgctctga

SEQ ID NO: 331504 - DNA, 25 bp, Homo sapien
acacgcgcgcgtccagtggagacct

SEQ ID NO: 331505 - DNA, 25 bp, Homo sapien
cagtggagacctgcgattggctgcc

SEQ ID NO: 331506 - DNA, 25 bp, Homo sapien
cttgaaaggatcttgggttccggat

SEQ ID NO: 331507 - DNA, 25 bp, Homo sapien
gtcagggttccagagctgtcgcagc

SEQ ID NO: 331508 - DNA, 25 bp, Homo sapien
tccggatcacggttccaggcagtca

SEQ ID NO: 331509 - DNA, 25 bp, Homo sapien
caatacccctgaggccttgaaagga

SEQ ID NO: 331510 - DNA, 25 bp, Homo sapien
agtttaactgtgtctcaccagtccg

SEQ ID NO: 331511 - DNA, 25 bp, Homo sapien
caccagtccgcttggtaatatgttc

SEQ ID NO: 331512 - DNA, 25 bp, Homo sapien
gaaaaatgcctacctcgtttgcttg

SEQ ID NO: 331513 - DNA, 25 bp, Homo sapien
gacttcataggcttgttctgttact

SEQ ID NO: 331514 - DNA, 25 bp, Homo sapien
caatgaaaaagaatgtgctactgct

SEQ ID NO: 331515 - DNA, 25 bp, Homo sapien
agtcactcaacaaaattctacccag

SEQ ID NO: 331516 - DNA, 25 bp, Homo sapien
tcagcctcaaagtccatcaacagtg

SEQ ID NO: 331517 - DNA, 25 bp, Homo sapien
tacacacagcgaaaatgcatctcac

SEQ ID NO: 331518 - DNA, 25 bp, Homo sapien
gaactcctggaagtcagtcgaacat

SEQ ID NO: 331519 - DNA, 25 bp, Homo sapien
tctgaggtcagaataagggatgcct

SEQ ID NO: 331520 - DNA, 25 bp, Homo sapien
gagctacttcttgacaatagggagc

SEQ ID NO: 331521 - DNA, 25 bp, Homo sapien
cacttctgcctttcggaactcctgg

SEQ ID NO: 331522 - DNA, 25 bp, Homo sapien
ataacggaagccataccacttgatc

SEQ ID NO: 331523 - DNA, 25 bp, Homo sapien
gagtctggaatctctagtgttcata

SEQ ID NO: 331524 - DNA, 25 bp, Homo sapien
gactgagggtcagtgttgctaacaa

SEQ ID NO: 331525 - DNA, 25 bp, Homo sapien
gaatctctagtgttcatagccgtct

SEQ ID NO: 331526 - DNA, 25 bp, Homo sapien
tctgctgtgcctccaacaatgattc

SEQ ID NO: 331527 - DNA, 25 bp, Homo sapien
cgagggaacccttgcagttgctccg

SEQ ID NO: 331528 - DNA, 25 bp, Homo sapien
catcagcaaagaccgacgatctgta

SEQ ID NO: 331529 - DNA, 25 bp, Homo sapien
tgatggtccttggttttgtgctcta

SEQ ID NO: 331530 - DNA, 25 bp, Homo sapien
agagggccccatggcgatgtgtaca

SEQ ID NO: 331531 - DNA, 25 bp, Homo sapien
cccatggcgatgtgtacactatcaa

SEQ ID NO: 331532 - DNA, 25 bp, Homo sapien
gggccccatggcgatgtgtacacta

SEQ ID NO: 331533 - DNA, 25 bp, Homo sapien
gcgatgtgtacactatcaatgtgac

SEQ ID NO: 331534 - DNA, 25 bp, Homo sapien
ttttgacttgctagacttgaaatgt

SEQ ID NO: 331535 - DNA, 25 bp, Homo sapien
gttttgacttgctagacttgaaatg

SEQ ID NO: 331536 - DNA, 25 bp, Homo sapien
ttgttttgacttgctagacttgaaa

SEQ ID NO: 331537 - DNA, 25 bp, Homo sapien
gatcaaaggtcttgttttgacttgc

SEQ ID NO: 331538 - DNA, 25 bp, Homo sapien
gacatatctgaagggaccacagcta

SEQ ID NO: 331539 - DNA, 25 bp, Homo sapien
gatttgcaggctgcgacacgtgagc

SEQ ID NO: 331540 - DNA, 25 bp, Homo sapien
ggcttttgccatagaggtcacatga

SEQ ID NO: 331541 - DNA, 25 bp, Homo sapien
tgatgagttgcagatcccctgtgag

SEQ ID NO: 331542 - DNA, 25 bp, Homo sapien
ttccagagctgtctttttacaaatt

SEQ ID NO: 331543 - DNA, 25 bp, Homo sapien
ttgaagccactggtctcttcaactt

SEQ ID NO: 331544 - DNA, 25 bp, Homo sapien
tttttgcttgaagccactggtctct

SEQ ID NO: 331545 - DNA, 25 bp, Homo sapien
ccagagctgtctttttacaaattgc

SEQ ID NO: 331546 - DNA, 25 bp, Homo sapien
gaacaacgccgcttgctcttcaaag

SEQ ID NO: 331547 - DNA, 25 bp, Homo sapien
cacctccgggagaaatttgtccaga

SEQ ID NO: 331548 - DNA, 25 bp, Homo sapien
gcactgcttccgcaggcgaacaacg

SEQ ID NO: 331549 - DNA, 25 bp, Homo sapien
cagttcctaaagttgcgagtgcatc

SEQ ID NO: 331550 - DNA, 25 bp, Homo sapien
gcacatcctggctttagtgtccaag

SEQ ID NO: 331551 - DNA, 25 bp, Homo sapien
gctttgttgcttcaagatgcatgca

SEQ ID NO: 331552 - DNA, 25 bp, Homo sapien
tttacaacagtctacacagggatta

SEQ ID NO: 331553 - DNA, 25 bp, Homo sapien
agtgtccaagtatgcagaatgaagc

SEQ ID NO: 331554 - DNA, 25 bp, Homo sapien
ggtcatagaaggttctgtccccaca

SEQ ID NO: 331555 - DNA, 25 bp, Homo sapien
ggctccgggtcatagaaggttctgt

SEQ ID NO: 331556 - DNA, 25 bp, Homo sapien
ggttggcactaagccagaccatgct

SEQ ID NO: 331557 - DNA, 25 bp, Homo sapien
gacaggggttggcactaagccagac

SEQ ID NO: 331558 - DNA, 25 bp, Homo sapien
cctggcatgcagataggcaagcctc

SEQ ID NO: 331559 - DNA, 25 bp, Homo sapien
catgcagataggcaagcctctccag

SEQ ID NO: 331560 - DNA, 25 bp, Homo sapien
gagcctggcatgcagataggcaagc

SEQ ID NO: 331561 - DNA, 25 bp, Homo sapien
ccctgagcctggcatgcagataggc

SEQ ID NO: 331562 - DNA, 25 bp, Homo sapien
tcagattgctcagcccgatgaggtg

SEQ ID NO: 331563 - DNA, 25 bp, Homo sapien
tacagcacgtgggtcagattgctca

SEQ ID NO: 331564 - DNA, 25 bp, Homo sapien
ctcagcccgatgaggtgctgcagga

SEQ ID NO: 331565 - DNA, 25 bp, Homo sapien
gacaggatacagcacgtgggtcaga

SEQ ID NO: 331566 - DNA, 25 bp, Homo sapien
ggctcgggacttacatcggtcagca

SEQ ID NO: 331567 - DNA, 25 bp, Homo sapien
gacacttagctgactgacgctggga

SEQ ID NO: 331568 - DNA, 25 bp, Homo sapien
agcatgaccccacttagactcagga

SEQ ID NO: 331569 - DNA, 25 bp, Homo sapien
gaaagccggcagttagttattgaga

SEQ ID NO: 331570 - DNA, 25 bp, Homo sapien
caaagtcttcctgatgatggttaac

SEQ ID NO: 331571 - DNA, 25 bp, Homo sapien
gagagaggcccatttcaccaaaacc

SEQ ID NO: 331572 - DNA, 25 bp, Homo sapien
gatgatggttaaccgccaggatgcc

SEQ ID NO: 331573 - DNA, 25 bp, Homo sapien
tgcaaatagacaaagcagttagtgc

SEQ ID NO: 331574 - DNA, 25 bp, Homo sapien
tttcgccaaggtgggtagcttccag

SEQ ID NO: 331575 - DNA, 25 bp, Homo sapien
aactgggcgatatactgctcttcct

SEQ ID NO: 331576 - DNA, 25 bp, Homo sapien
taaagagtccacatagagagcctgc

SEQ ID NO: 331577 - DNA, 25 bp, Homo sapien
gcaactgatccaggcggcctctaag

SEQ ID NO: 331578 - DNA, 25 bp, Homo sapien
tcttcaatagagtccagctgcacca

SEQ ID NO: 331579 - DNA, 25 bp, Homo sapien
gatcatcttgatatcctgcatgggc

SEQ ID NO: 331580 - DNA, 25 bp, Homo sapien
tacagcacaggcgtagtacattttt

SEQ ID NO: 331581 - DNA, 25 bp, Homo sapien
tctcaatgaggtaggagaacaattc

SEQ ID NO: 331582 - DNA, 25 bp, Homo sapien
ccatctacttttcgcttctttgtca

SEQ ID NO: 331583 - DNA, 25 bp, Homo sapien
cttgaggaacaggtctacgagcacc

SEQ ID NO: 331584 - DNA, 25 bp, Homo sapien
tacgagcacctctactggaatgaag

SEQ ID NO: 331585 - DNA, 25 bp, Homo sapien
tcaaaccatctacttttcgcttctt

SEQ ID NO: 331586 - DNA, 25 bp, Homo sapien
cagactggccctgtttccagaccat

SEQ ID NO: 331587 - DNA, 25 bp, Homo sapien
ggctctggaaatgagtacagactgg

SEQ ID NO: 331588 - DNA, 25 bp, Homo sapien
gagagttcttccgtaaatccagcac

SEQ ID NO: 331589 - DNA, 25 bp, Homo sapien
tccagaccatacagtccagaagtcc

SEQ ID NO: 331590 - DNA, 25 bp, Homo sapien
tgtgtctcccgtcaaaggctgccat

SEQ ID NO: 331591 - DNA, 25 bp, Homo sapien
tgatgtatcggctctgaatggaacc

SEQ ID NO: 331592 - DNA, 25 bp, Homo sapien
acaagtctccgtgggcttgtccaca

SEQ ID NO: 331593 - DNA, 25 bp, Homo sapien
tgaaggtctccaggtgaagatgttg

SEQ ID NO: 331594 - DNA, 25 bp, Homo sapien
tctggtcagcgagatgcaatcaggc

SEQ ID NO: 331595 - DNA, 25 bp, Homo sapien
gcttagggatgattcctatcctggg

SEQ ID NO: 331596 - DNA, 25 bp, Homo sapien
gcaatcaggcctatcaattagactc

SEQ ID NO: 331597 - DNA, 25 bp, Homo sapien
tctctatttccatgctaggcacagt

SEQ ID NO: 331598 - DNA, 25 bp, Homo sapien
taggtctcagtcacttgttgccacg

SEQ ID NO: 331599 - DNA, 25 bp, Homo sapien
tttgaagcgacttaggctggcctca

SEQ ID NO: 331600 - DNA, 25 bp, Homo sapien
gcctcaggacctccaacgcttggat

SEQ ID NO: 331601 - DNA, 25 bp, Homo sapien
caacgcttggatttctaggtctcag

SEQ ID NO: 331602 - DNA, 25 bp, Homo sapien
atgtataatatttacgaagcaacgg

SEQ ID NO: 331603 - DNA, 25 bp, Homo sapien
ataatatttacgaagcaacggcctc

SEQ ID NO: 331604 - DNA, 25 bp, Homo sapien
tataatatttacgaagcaacggcct

SEQ ID NO: 331605 - DNA, 25 bp, Homo sapien
gtataatatttacgaagcaacggcc

SEQ ID NO: 331606 - DNA, 25 bp, Homo sapien
gggtgacccaagtggcgcacattat

SEQ ID NO: 331607 - DNA, 25 bp, Homo sapien
tggtcttcaacccatttccagagag

SEQ ID NO: 331608 - DNA, 25 bp, Homo sapien
gaaaacctccgcaaatactgctgag

SEQ ID NO: 331609 - DNA, 25 bp, Homo sapien
ctgaggaaactgacaactggcgact

SEQ ID NO: 331610 - DNA, 25 bp, Homo sapien
tcagagagttcaccacaccgcgaag

SEQ ID NO: 331611 - DNA, 25 bp, Homo sapien
cagagagttcaccacaccgcgaagt

SEQ ID NO: 331612 - DNA, 25 bp, Homo sapien
ctcagagagttcaccacaccgcgaa

SEQ ID NO: 331613 - DNA, 25 bp, Homo sapien
ggctgggcagcctggtctgaccaat

SEQ ID NO: 331614 - DNA, 25 bp, Homo sapien
tggaaggaaagaacgagacaatggc

SEQ ID NO: 331615 - DNA, 25 bp, Homo sapien
ctaagcgccctagccgctgcgtggg

SEQ ID NO: 331616 - DNA, 25 bp, Homo sapien
tggtctgaccaatccccgtttctca

SEQ ID NO: 331617 - DNA, 25 bp, Homo sapien
tctggagcgcgcgttcctccctgct

SEQ ID NO: 331618 - DNA, 25 bp, Homo sapien
aaaactttctgaggcccgcgcatgc

SEQ ID NO: 331619 - DNA, 25 bp, Homo sapien
gctgctccttttgtcgccaatacaa

SEQ ID NO: 331620 - DNA, 25 bp, Homo sapien
tgctttccctacattcagggctgct

SEQ ID NO: 331621 - DNA, 25 bp, Homo sapien
gctgtaccctgaagcctcgccggaa

SEQ ID NO: 331622 - DNA, 25 bp, Homo sapien
gggtgtcccggagcggtgctgaggc

SEQ ID NO: 331623 - DNA, 25 bp, Homo sapien
tggctgcgggggagctgtaccctga

SEQ ID NO: 331624 - DNA, 25 bp, Homo sapien
tgttgacaggtcacgcctgggaagc

SEQ ID NO: 331625 - DNA, 25 bp, Homo sapien
gggcactagagtcaacagggactgt

SEQ ID NO: 331626 - DNA, 25 bp, Homo sapien
gactgtatgcaaaacccacttcctc

SEQ ID NO: 331627 - DNA, 25 bp, Homo sapien
aacagggactgtatgcaaaacccac

SEQ ID NO: 331628 - DNA, 25 bp, Homo sapien
gcactagagtcaacagggactgtat

SEQ ID NO: 331629 - DNA, 25 bp, Homo sapien
agagaaccagtagagtttacctggg

SEQ ID NO: 331630 - DNA, 25 bp, Homo sapien
gtggagagaaccagtagagtttacc

SEQ ID NO: 331631 - DNA, 25 bp, Homo sapien
caggtggagagaaccagtagagttt

SEQ ID NO: 331632 - DNA, 25 bp, Homo sapien
tccaggtggagagaaccagtagagt

SEQ ID NO: 331633 - DNA, 25 bp, Homo sapien
cagtcatggcaggtgacacattcca

SEQ ID NO: 331634 - DNA, 25 bp, Homo sapien
tccctggggcaagcgaatggtcctt

SEQ ID NO: 331635 - DNA, 25 bp, Homo sapien
gcaagcgaatggtcctttgcctgga

SEQ ID NO: 331636 - DNA, 25 bp, Homo sapien
aagcagcgacccgacccgtggagtg

SEQ ID NO: 331637 - DNA, 25 bp, Homo sapien
gcttggaattagtcacggtcccaga

SEQ ID NO: 331638 - DNA, 25 bp, Homo sapien
tgcttggaagcagtaggctggctcc

SEQ ID NO: 331639 - DNA, 25 bp, Homo sapien
tcagcttgaagaggatgccgtcccg

SEQ ID NO: 331640 - DNA, 25 bp, Homo sapien
caatcctggctcttgctgaagtaga

SEQ ID NO: 331641 - DNA, 25 bp, Homo sapien
ttcaacgtcagtgagtgtcggcctg

SEQ ID NO: 331642 - DNA, 25 bp, Homo sapien
cttcaacgtcagtgagtgtcggcct

SEQ ID NO: 331643 - DNA, 25 bp, Homo sapien
caggatcttcaaggaggccgctgca

SEQ ID NO: 331644 - DNA, 25 bp, Homo sapien
gcaggggaccagaaccgagcctgtc

SEQ ID NO: 331645 - DNA, 25 bp, Homo sapien
gggaccagaaccgagcctgtcctgg

SEQ ID NO: 331646 - DNA, 25 bp, Homo sapien
aggggaccagaaccgagcctgtcct

SEQ ID NO: 331647 - DNA, 25 bp, Homo sapien
ggaccagaaccgagcctgtcctgga

SEQ ID NO: 331648 - DNA, 25 bp, Homo sapien
atgagcagctgctctagcggctcct

SEQ ID NO: 331649 - DNA, 25 bp, Homo sapien
ctggtggtggcgttgaaacagcacc

SEQ ID NO: 331650 - DNA, 25 bp, Homo sapien
tggcacggtgtttggccccacgctg

SEQ ID NO: 331651 - DNA, 25 bp, Homo sapien
ccttggcacggtgtttggccccacg

SEQ ID NO: 331652 - DNA, 25 bp, Homo sapien
ctgcacaaccttggcacggtgtttg

SEQ ID NO: 331653 - DNA, 25 bp, Homo sapien
cacaaccttggcacggtgtttggcc

SEQ ID NO: 331654 - DNA, 25 bp, Homo sapien
atcagtctgggcaatgcagcaaacc

SEQ ID NO: 331655 - DNA, 25 bp, Homo sapien
ggaaacctctggctaatcgggccat

SEQ ID NO: 331656 - DNA, 25 bp, Homo sapien
tggtcctgctggtgcatcttgctgg

SEQ ID NO: 331657 - DNA, 25 bp, Homo sapien
atccctgccctggacagcaagagac

SEQ ID NO: 331658 - DNA, 25 bp, Homo sapien
cctggacaatccgtgtcctggcagc

SEQ ID NO: 331659 - DNA, 25 bp, Homo sapien
cgtgggtggcgaggacagaacagga

SEQ ID NO: 331660 - DNA, 25 bp, Homo sapien
tgggtggcgaggacagaacaggagc

SEQ ID NO: 331661 - DNA, 25 bp, Homo sapien
gggtggcgaggacagaacaggagcc

SEQ ID NO: 331662 - DNA, 25 bp, Homo sapien
ggtggcgaggacagaacaggagcct

SEQ ID NO: 331663 - DNA, 25 bp, Homo sapien
gctgtctaatgatgggatgaccaca

SEQ ID NO: 331664 - DNA, 25 bp, Homo sapien
tttatgtaggatgtgtgctgtctaa

SEQ ID NO: 331665 - DNA, 25 bp, Homo sapien
taggatgtgtgctgtctaatgatgg

SEQ ID NO: 331666 - DNA, 25 bp, Homo sapien
tgtgctgtctaatgatgggatgacc

SEQ ID NO: 331667 - DNA, 25 bp, Homo sapien
cacgtgctgttctgcccaatctggt

SEQ ID NO: 331668 - DNA, 25 bp, Homo sapien
tgcaagagctgcaagtgccacgtgc

SEQ ID NO: 331669 - DNA, 25 bp, Homo sapien
gcccaatctggtgtctgcaggtgag

SEQ ID NO: 331670 - DNA, 25 bp, Homo sapien
aaagggctgccgctggcccgtttct

SEQ ID NO: 331671 - DNA, 25 bp, Homo sapien
gtatctgccgtcttttcacactggg

SEQ ID NO: 331672 - DNA, 25 bp, Homo sapien
atgcactggaatgccgcctccttct

SEQ ID NO: 331673 - DNA, 25 bp, Homo sapien
gggaaacttgcatctacggggccta

SEQ ID NO: 331674 - DNA, 25 bp, Homo sapien
gttgatgcactggaatgccgcctcc

SEQ ID NO: 331675 - DNA, 25 bp, Homo sapien
atttggggcacgagctggtccggga

SEQ ID NO: 331676 - DNA, 25 bp, Homo sapien
gaggtctgcgatctctggttctgac

SEQ ID NO: 331677 - DNA, 25 bp, Homo sapien
tcatttggggcacgagctggtccgg

SEQ ID NO: 331678 - DNA, 25 bp, Homo sapien
gggaggtctgcgatctctggttctg

SEQ ID NO: 331679 - DNA, 25 bp, Homo sapien
gaaacttgtgtgtactgggcctaga

SEQ ID NO: 331680 - DNA, 25 bp, Homo sapien
tctcccggtcaaggtcttcaacagt

SEQ ID NO: 331681 - DNA, 25 bp, Homo sapien
actccagtagtgaccccaacgtggg

SEQ ID NO: 331682 - DNA, 25 bp, Homo sapien
gagcagaagtgccacgccttgttct

SEQ ID NO: 331683 - DNA, 25 bp, Homo sapien
tctgggtgtctcaccatggcctgga

SEQ ID NO: 331684 - DNA, 25 bp, Homo sapien
ctccccctcttcactctctgcacag

SEQ ID NO: 331685 - DNA, 25 bp, Homo sapien
tcaccatggcctggatccctctact

SEQ ID NO: 331686 - DNA, 25 bp, Homo sapien
ggcctggatccctctacttctcccc

SEQ ID NO: 331687 - DNA, 25 bp, Homo sapien
agctcagggacaacagtcacgttga

SEQ ID NO: 331688 - DNA, 25 bp, Homo sapien
cacgttgaccatcagtggagtccag

SEQ ID NO: 331689 - DNA, 25 bp, Homo sapien
tgaggcctcctatgagctgacacag

SEQ ID NO: 331690 - DNA, 25 bp, Homo sapien
tgctctggagatgcattgccaaagc

SEQ ID NO: 331691 - DNA, 25 bp, Homo sapien
gaatccacacctagacccaggaagt

SEQ ID NO: 331692 - DNA, 25 bp, Homo sapien
tattttattgggtaagctgagcccc

SEQ ID NO: 331693 - DNA, 25 bp, Homo sapien
gcagtcctcggatcagggcatcagg

SEQ ID NO: 331694 - DNA, 25 bp, Homo sapien
catcagggacctgaacagcaggttc

SEQ ID NO: 331695 - DNA, 25 bp, Homo sapien
cagttgtgctaaaatggtgtccctg

SEQ ID NO: 331696 - DNA, 25 bp, Homo sapien
ccagttgtgctaaaatggtgtccct

SEQ ID NO: 331697 - DNA, 25 bp, Homo sapien
tgggagttataaccttgtctcctgg

SEQ ID NO: 331698 - DNA, 25 bp, Homo sapien
agcagtgatgttgggagttataacc

SEQ ID NO: 331699 - DNA, 25 bp, Homo sapien
actgctgctcatatgcaggtagtag

SEQ ID NO: 331700 - DNA, 25 bp, Homo sapien
tgctgctcatatgcaggtagtagca

SEQ ID NO: 331701 - DNA, 25 bp, Homo sapien
aggcccctgtgctggtcgtctatga

SEQ ID NO: 331702 - DNA, 25 bp, Homo sapien
tcgtctatgatgatagcgaccggcc

SEQ ID NO: 331703 - DNA, 25 bp, Homo sapien
gacagacggccaggattacctgtgg

SEQ ID NO: 331704 - DNA, 25 bp, Homo sapien
gatgaggccgactattactgtcagg

SEQ ID NO: 331705 - DNA, 25 bp, Homo sapien
gctgactattactgtaactcccggg

SEQ ID NO: 331706 - DNA, 25 bp, Homo sapien
gaagctattatgcaagctggtacca

SEQ ID NO: 331707 - DNA, 25 bp, Homo sapien
tggccttgggacagacagtcaggat

SEQ ID NO: 331708 - DNA, 25 bp, Homo sapien
tcatctatggtaaaaacaaccggcc

SEQ ID NO: 331709 - DNA, 25 bp, Homo sapien
tgcctccgtgtctgggtctcctgga

SEQ ID NO: 331710 - DNA, 25 bp, Homo sapien
gttataactatgtctcctggtacca

SEQ ID NO: 331711 - DNA, 25 bp, Homo sapien
cagcagtgacgttggtggttataac

SEQ ID NO: 331712 - DNA, 25 bp, Homo sapien
ggacagtcgatcaccatctcctgca

SEQ ID NO: 331713 - DNA, 25 bp, Homo sapien
gaagcccagttgagggcagacctcc

SEQ ID NO: 331714 - DNA, 25 bp, Homo sapien
tatacccgggtctctacctccatgt

SEQ ID NO: 331715 - DNA, 25 bp, Homo sapien
ctctctggcgagtcagaggagcgca

SEQ ID NO: 331716 - DNA, 25 bp, Homo sapien
taacactatggatgaattctagggc

SEQ ID NO: 331717 - DNA, 25 bp, Homo sapien
tctcgggacgtctccaccatggcct

SEQ ID NO: 331718 - DNA, 25 bp, Homo sapien
ccatggcctgggctctgctcctcct

SEQ ID NO: 331719 - DNA, 25 bp, Homo sapien
tgctcctcctcagcctcctcactca

SEQ ID NO: 331720 - DNA, 25 bp, Homo sapien
ctcctcctcagcctcctcactcagg

SEQ ID NO: 331721 - DNA, 25 bp, Homo sapien
tcagcctcgctcagtgtccgggtct

SEQ ID NO: 331722 - DNA, 25 bp, Homo sapien
ctcgctcagtgtccgggtctcctgg

SEQ ID NO: 331723 - DNA, 25 bp, Homo sapien
actcagcctcgctcagtgtccgggt

SEQ ID NO: 331724 - DNA, 25 bp, Homo sapien
ctgactcagcctcgctcagtgtccg

SEQ ID NO: 331725 - DNA, 25 bp, Homo sapien
actcatggatgccacgggagcagtg

SEQ ID NO: 331726 - DNA, 25 bp, Homo sapien
tgaccacatgatgtccctccactgg

SEQ ID NO: 331727 - DNA, 25 bp, Homo sapien
cactggttcagtagatttagcgaga

SEQ ID NO: 331728 - DNA, 25 bp, Homo sapien
gcacctgactcatgggaaatggata

SEQ ID NO: 331729 - DNA, 25 bp, Homo sapien
tgtcaggtcaatttctggccatgga

SEQ ID NO: 331730 - DNA, 25 bp, Homo sapien
tctgacaaggaagctggtccttacc

SEQ ID NO: 331731 - DNA, 25 bp, Homo sapien
ggaaatgtcaccacgcaattgaata

SEQ ID NO: 331732 - DNA, 25 bp, Homo sapien
aactgcatggatcactctgacaagg

SEQ ID NO: 331733 - DNA, 25 bp, Homo sapien
tcccatgaggctcacatcacattgt

SEQ ID NO: 331734 - DNA, 25 bp, Homo sapien
tagccatgcaaagtatatgatatat

SEQ ID NO: 331735 - DNA, 25 bp, Homo sapien
gacatcagtgtgaacccagggagag

SEQ ID NO: 331736 - DNA, 25 bp, Homo sapien
catgatgactagacagtgggattcc

SEQ ID NO: 331737 - DNA, 25 bp, Homo sapien
cagcagtgacgttggtggttataac

SEQ ID NO: 331738 - DNA, 25 bp, Homo sapien
aagtctggcaacacggcctccctga

SEQ ID NO: 331739 - DNA, 25 bp, Homo sapien
gttataactatgtctcctggtacca

SEQ ID NO: 331740 - DNA, 25 bp, Homo sapien
tccgggtctcctggacagtcagtca

SEQ ID NO: 331741 - DNA, 25 bp, Homo sapien
cactaattcgatccttacatactgt

SEQ ID NO: 331742 - DNA, 25 bp, Homo sapien
tattcatgacctgcagacacacact

SEQ ID NO: 331743 - DNA, 25 bp, Homo sapien
tatagaacagtccatccaacacagc

SEQ ID NO: 331744 - DNA, 25 bp, Homo sapien
tatggaacactctccagggtagaac

SEQ ID NO: 331745 - DNA, 25 bp, Homo sapien
aacccagagtgtggcaggcgcgccc

SEQ ID NO: 331746 - DNA, 25 bp, Homo sapien
cctgagctgggaatcaaccgtcttt

SEQ ID NO: 331747 - DNA, 25 bp, Homo sapien
aagagctgactgagatgccgtctcc

SEQ ID NO: 331748 - DNA, 25 bp, Homo sapien
tgccgtctccatagggagggatttg

SEQ ID NO: 331749 - DNA, 25 bp, Homo sapien
gattttgtgttcctaggtcctgtat

SEQ ID NO: 331750 - DNA, 25 bp, Homo sapien
ttacaggtccagagcatttctcgtc

SEQ ID NO: 331751 - DNA, 25 bp, Homo sapien
tacaggtccagagcatttctcgtct

SEQ ID NO: 331752 - DNA, 25 bp, Homo sapien
ttttgtgttaagtgcagtttgcaga

SEQ ID NO: 331753 - DNA, 25 bp, Homo sapien
tcggtgaatatagaagacagtgctc

SEQ ID NO: 331754 - DNA, 25 bp, Homo sapien
gaaaagggcctcatgaatctagtgc

SEQ ID NO: 331755 - DNA, 25 bp, Homo sapien
gctaagggtgtatttctcgctgcaa

SEQ ID NO: 331756 - DNA, 25 bp, Homo sapien
gaattcaccgcatggaacgtgtccc

SEQ ID NO: 331757 - DNA, 25 bp, Homo sapien
ttcctccattggcaccagcagtctg

SEQ ID NO: 331758 - DNA, 25 bp, Homo sapien
atttcctccattggcaccagcagtc

SEQ ID NO: 331759 - DNA, 25 bp, Homo sapien
aaatttcctccattggcaccagcag

SEQ ID NO: 331760 - DNA, 25 bp, Homo sapien
cctccattggcaccagcagtctgca

SEQ ID NO: 331761 - DNA, 25 bp, Homo sapien
gattgtggaaagcaccactcagaag

SEQ ID NO: 331762 - DNA, 25 bp, Homo sapien
cactccgtgtgcacatgacaagggt

SEQ ID NO: 331763 - DNA, 25 bp, Homo sapien
catgacaagggtgaagtttgattgt

SEQ ID NO: 331764 - DNA, 25 bp, Homo sapien
agcatctcctgagtctttcaacact

SEQ ID NO: 331765 - DNA, 25 bp, Homo sapien
taatccctcagtcgccattgtaagt

SEQ ID NO: 331766 - DNA, 25 bp, Homo sapien
cattgtaagtcagtccctggccatc

SEQ ID NO: 331767 - DNA, 25 bp, Homo sapien
cttagatctcagaataatccctcag

SEQ ID NO: 331768 - DNA, 25 bp, Homo sapien
tctccacgcaggacaaggaatggcc

SEQ ID NO: 331769 - DNA, 25 bp, Homo sapien
tttattgttttcaccctcatccacc

SEQ ID NO: 331770 - DNA, 25 bp, Homo sapien
ggaaccagcagttaacattgacaca

SEQ ID NO: 331771 - DNA, 25 bp, Homo sapien
gaattccctgaagcaatgagtgaca

SEQ ID NO: 331772 - DNA, 25 bp, Homo sapien
atccacctgggaaagagtatcctgg

SEQ ID NO: 331773 - DNA, 25 bp, Homo sapien
agtcccacaggggtcattcctcttg

SEQ ID NO: 331774 - DNA, 25 bp, Homo sapien
attaaatccctagacacaaacaaat

SEQ ID NO: 331775 - DNA, 25 bp, Homo sapien
ccacatgagggtcccccaagcggtg

SEQ ID NO: 331776 - DNA, 25 bp, Homo sapien
ggaaatgaccacatgagggtccccc

SEQ ID NO: 331777 - DNA, 25 bp, Homo sapien
gagggatggaagtctggtccagtcc

SEQ ID NO: 331778 - DNA, 25 bp, Homo sapien
gggatggaagtctggtccagtcctt

SEQ ID NO: 331779 - DNA, 25 bp, Homo sapien
agagggatggaagtctggtccagtc

SEQ ID NO: 331780 - DNA, 25 bp, Homo sapien
agggatggaagtctggtccagtcct

SEQ ID NO: 331781 - DNA, 25 bp, Homo sapien
tcttcggaactgggaccaaggtcac

SEQ ID NO: 331782 - DNA, 25 bp, Homo sapien
gtcttcggaactgggaccaaggtca

SEQ ID NO: 331783 - DNA, 25 bp, Homo sapien
aggccaaccccactgtcactctgtt

SEQ ID NO: 331784 - DNA, 25 bp, Homo sapien
cccctacagaatgttcataggttcc

SEQ ID NO: 331785 - DNA, 25 bp, Homo sapien
gaatgttcataggttcccaactcta

SEQ ID NO: 331786 - DNA, 25 bp, Homo sapien
ccacactagtgtgtctgatcagtga

SEQ ID NO: 331787 - DNA, 25 bp, Homo sapien
tgatgatggtcagtctgcaggagca

SEQ ID NO: 331788 - DNA, 25 bp, Homo sapien
ggctcaaagttaacactagcgtggg

SEQ ID NO: 331789 - DNA, 25 bp, Homo sapien
caagcatgaagggtgtggaccacta

SEQ ID NO: 331790 - DNA, 25 bp, Homo sapien
gaaccagtttaatatgatgagccac

SEQ ID NO: 331791 - DNA, 25 bp, Homo sapien
tcggcggagggaccaagctgaccgt

SEQ ID NO: 331792 - DNA, 25 bp, Homo sapien
cggagggaccaagctgaccgtccta

SEQ ID NO: 331793 - DNA, 25 bp, Homo sapien
ggcggagggaccaagctgaccgtcc

SEQ ID NO: 331794 - DNA, 25 bp, Homo sapien
gcggagggaccaagctgaccgtcct

SEQ ID NO: 331795 - DNA, 25 bp, Homo sapien
atagcagccccgtcaaggcgggagt

SEQ ID NO: 331796 - DNA, 25 bp, Homo sapien
gacagtggcccctacagaatgttca

SEQ ID NO: 331797 - DNA, 25 bp, Homo sapien
cacgggagactagagctgcaggatc

SEQ ID NO: 331798 - DNA, 25 bp, Homo sapien
ataagtgacttctacccgggagccg

SEQ ID NO: 331799 - DNA, 25 bp, Homo sapien
ggcggagggaccaagctgaccgtcc

SEQ ID NO: 331800 - DNA, 25 bp, Homo sapien
cggagggaccaagctgaccgtccta

SEQ ID NO: 331801 - DNA, 25 bp, Homo sapien
tcggcggagggaccaagctgaccgt

SEQ ID NO: 331802 - DNA, 25 bp, Homo sapien
tgttcggcggagggaccaagctgac

SEQ ID NO: 331803 - DNA, 25 bp, Homo sapien
atagcagccccgtcaaggcgggagt

SEQ ID NO: 331804 - DNA, 25 bp, Homo sapien
gacagtggcccctacagaatgttca

SEQ ID NO: 331805 - DNA, 25 bp, Homo sapien
cacgggagactagagctgcaggatc

SEQ ID NO: 331806 - DNA, 25 bp, Homo sapien
ataagtgacttctacccgggagccg

SEQ ID NO: 331807 - DNA, 25 bp, Homo sapien
ttggtccaacctgcaagatgaacaa

SEQ ID NO: 331808 - DNA, 25 bp, Homo sapien
ttttgaggggtagttccaccatcac

SEQ ID NO: 331809 - DNA, 25 bp, Homo sapien
tctaccctaaattggtccaacctgc

SEQ ID NO: 331810 - DNA, 25 bp, Homo sapien
ctaaattggtccaacctgcaagatg

SEQ ID NO: 331811 - DNA, 25 bp, Homo sapien
ctaatgtccagttatccacggatgg

SEQ ID NO: 331812 - DNA, 25 bp, Homo sapien
ttccagagtggtgccatagacgtgc

SEQ ID NO: 331813 - DNA, 25 bp, Homo sapien
atcatgagattccagagtggtgcca

SEQ ID NO: 331814 - DNA, 25 bp, Homo sapien
tggggaggtcaaagtcaatcatgag

SEQ ID NO: 331815 - DNA, 25 bp, Homo sapien
caggaaggagactcacacgaaaggc

SEQ ID NO: 331816 - DNA, 25 bp, Homo sapien
gggacacttggaaaagataggctct

SEQ ID NO: 331817 - DNA, 25 bp, Homo sapien
aaaggcctacaggaggctcgggaca

SEQ ID NO: 331818 - DNA, 25 bp, Homo sapien
cagcaggttcagacacttaagagga

SEQ ID NO: 331819 - DNA, 25 bp, Homo sapien
ccaagtgccattgggtgacataggc

SEQ ID NO: 331820 - DNA, 25 bp, Homo sapien
cactccacatgcagccattcaacag

SEQ ID NO: 331821 - DNA, 25 bp, Homo sapien
tctggatgtggctttatgcccaggg

SEQ ID NO: 331822 - DNA, 25 bp, Homo sapien
catgcagccattcaacagctctgga

SEQ ID NO: 331823 - DNA, 25 bp, Homo sapien
gtcactcgaaggtcaccagaccctg

SEQ ID NO: 331824 - DNA, 25 bp, Homo sapien
gggatgttcctatccccagagagca

SEQ ID NO: 331825 - DNA, 25 bp, Homo sapien
cctgccttggaactgtggacgattg

SEQ ID NO: 331826 - DNA, 25 bp, Homo sapien
gtaaagcccaagggcgaggcccagc

SEQ ID NO: 331827 - DNA, 25 bp, Homo sapien
tcctgatcatgctcaaggtccttgg

SEQ ID NO: 331828 - DNA, 25 bp, Homo sapien
gcgtcatctactttgcctgaagcag

SEQ ID NO: 331829 - DNA, 25 bp, Homo sapien
aagcgtttcctactgggagacccat

SEQ ID NO: 331830 - DNA, 25 bp, Homo sapien
tcatgaacagggacaaagcgtttcc

SEQ ID NO: 331831 - DNA, 25 bp, Homo sapien
taaagagacttagcacatttattca

SEQ ID NO: 331832 - DNA, 25 bp, Homo sapien
aaagagacttagcacatttattcac

SEQ ID NO: 331833 - DNA, 25 bp, Homo sapien
gatgacactgatggcgatccgggct

SEQ ID NO: 331834 - DNA, 25 bp, Homo sapien
gctgtaaggcttcggccacttgagg

SEQ ID NO: 331835 - DNA, 25 bp, Homo sapien
tccatggcacggaaagtgggcacgt

SEQ ID NO: 331836 - DNA, 25 bp, Homo sapien
cattcaggcgcgctatggtcatggg

SEQ ID NO: 331837 - DNA, 25 bp, Homo sapien
gatggggatgacgtcaaaatgacac

SEQ ID NO: 331838 - DNA, 25 bp, Homo sapien
agggcaccggcagcgttagacttca

SEQ ID NO: 331839 - DNA, 25 bp, Homo sapien
cgttagacttcacatgctccactgg

SEQ ID NO: 331840 - DNA, 25 bp, Homo sapien
cagtgatcactgtggcgaacatcag

SEQ ID NO: 331841 - DNA, 25 bp, Homo sapien
ctgacattaaggagcgcacgggcgg

SEQ ID NO: 331842 - DNA, 25 bp, Homo sapien
gacaagcaccacattgctgcccagg

SEQ ID NO: 331843 - DNA, 25 bp, Homo sapien
gcacgggcggccttgctgcggatgt

SEQ ID NO: 331844 - DNA, 25 bp, Homo sapien
gatgttctggttggcgctgaggagc

SEQ ID NO: 331845 - DNA, 25 bp, Homo sapien
cctgcagcttccataccagtgagga

SEQ ID NO: 331846 - DNA, 25 bp, Homo sapien
cacctgcagcttccataccagtgag

SEQ ID NO: 331847 - DNA, 25 bp, Homo sapien
tgcagcttccataccagtgaggaaa

SEQ ID NO: 331848 - DNA, 25 bp, Homo sapien
ctgcagcttccataccagtgaggaa

SEQ ID NO: 331849 - DNA, 25 bp, Homo sapien
ggtgggtttgacaaaaggacttgca

SEQ ID NO: 331850 - DNA, 25 bp, Homo sapien
caaggagggtcttgcagaaccagtg

SEQ ID NO: 331851 - DNA, 25 bp, Homo sapien
gctcaaggagggtcttgcagaacca

SEQ ID NO: 331852 - DNA, 25 bp, Homo sapien
gtgggtttgacaaaaggacttgcaa

SEQ ID NO: 331853 - DNA, 25 bp, Homo sapien
tgggttcttcctggcctcgtgctcc

SEQ ID NO: 331854 - DNA, 25 bp, Homo sapien
tctctgggttcttcctggcctcgtg

SEQ ID NO: 331855 - DNA, 25 bp, Homo sapien
tcttcctggcctcgtgctccttcat

SEQ ID NO: 331856 - DNA, 25 bp, Homo sapien
gttcttcctggcctcgtgctccttc

SEQ ID NO: 331857 - DNA, 25 bp, Homo sapien
ggtgtcatgtcccatgcctgaagta

SEQ ID NO: 331858 - DNA, 25 bp, Homo sapien
taccagcatataggtccaggaacag

SEQ ID NO: 331859 - DNA, 25 bp, Homo sapien
gatcaatccatgtgatagtttggca

SEQ ID NO: 331860 - DNA, 25 bp, Homo sapien
tttggcaaatccatgaagctcctgc

SEQ ID NO: 331861 - DNA, 25 bp, Homo sapien
agcctcgcgggacacgtgttgtaca

SEQ ID NO: 331862 - DNA, 25 bp, Homo sapien
gtgttgtacataagcctctgcagtg

SEQ ID NO: 331863 - DNA, 25 bp, Homo sapien
gaaattttggagtgagtggcagtcc

SEQ ID NO: 331864 - DNA, 25 bp, Homo sapien
caaatctcgtggtgtttcgcagaaa

SEQ ID NO: 331865 - DNA, 25 bp, Homo sapien
taagaaaataaacacgacatattta

SEQ ID NO: 331866 - DNA, 25 bp, Homo sapien
acacgacatatttaaagaaggttct

SEQ ID NO: 331867 - DNA, 25 bp, Homo sapien
tgcagtagctgtgtgtccgaggtca

SEQ ID NO: 331868 - DNA, 25 bp, Homo sapien
gccaagggccgtgtgtaaatacgaa

SEQ ID NO: 331869 - DNA, 25 bp, Homo sapien
cagccaaggacgtgaagagatgtac

SEQ ID NO: 331870 - DNA, 25 bp, Homo sapien
taaatacgaactgcgccatggagag

SEQ ID NO: 331871 - DNA, 25 bp, Homo sapien
agtagtgtagggcaaaccttgtagg

SEQ ID NO: 331872 - DNA, 25 bp, Homo sapien
ctgtgcccccagtagtgtagggcaa

SEQ ID NO: 331873 - DNA, 25 bp, Homo sapien
tgagcatgcagtgctcgctgactgg

SEQ ID NO: 331874 - DNA, 25 bp, Homo sapien
tgcagtgctcgctgactggcttgtg

SEQ ID NO: 331875 - DNA, 25 bp, Homo sapien
attcctccaaacaatgccccatgga

SEQ ID NO: 331876 - DNA, 25 bp, Homo sapien
tggtccaggagtcttagccaacggg

SEQ ID NO: 331877 - DNA, 25 bp, Homo sapien
gccccatggagaaggcgcatgctga

SEQ ID NO: 331878 - DNA, 25 bp, Homo sapien
taagcaccaggactcaccaaggttg

SEQ ID NO: 331879 - DNA, 25 bp, Homo sapien
gctggctggtggtatccaatgttcc

SEQ ID NO: 331880 - DNA, 25 bp, Homo sapien
tattagtagctcaaggaaaggcagg

SEQ ID NO: 331881 - DNA, 25 bp, Homo sapien
gtaacagagggatacatacagcaag

SEQ ID NO: 331882 - DNA, 25 bp, Homo sapien
cattgtaagaggactggttgagagc

SEQ ID NO: 331883 - DNA, 25 bp, Homo sapien
tccccatctagtcagcagggccagt

SEQ ID NO: 331884 - DNA, 25 bp, Homo sapien
ggacatccccttttaatcatcaggg

SEQ ID NO: 331885 - DNA, 25 bp, Homo sapien
ggttcatctgactcctgggctacaa

SEQ ID NO: 331886 - DNA, 25 bp, Homo sapien
taaatcttaactctcgagccgtggt

SEQ ID NO: 331887 - DNA, 25 bp, Homo sapien
tggaagtataaattggtacaagtat

SEQ ID NO: 331888 - DNA, 25 bp, Homo sapien
tagtggaagtataaattggtacaag

SEQ ID NO: 331889 - DNA, 25 bp, Homo sapien
ctagtggaagtataaattggtacaa

SEQ ID NO: 331890 - DNA, 25 bp, Homo sapien
taaattggtacaagtattttattca

SEQ ID NO: 331891 - DNA, 25 bp, Homo sapien
ggttattcataggtacagtcccatt

SEQ ID NO: 331892 - DNA, 25 bp, Homo sapien
tggttattcataggtacagtcccat

SEQ ID NO: 331893 - DNA, 25 bp, Homo sapien
gtgcggacacccgactggcgtaggg

SEQ ID NO: 331894 - DNA, 25 bp, Homo sapien
ccgactggcgtagggcactacagcc

SEQ ID NO: 331895 - DNA, 25 bp, Homo sapien
ttgggtagtaccttctaaaagctga

SEQ ID NO: 331896 - DNA, 25 bp, Homo sapien
tgcatatacatgtccatcaaaagac

SEQ ID NO: 331897 - DNA, 25 bp, Homo sapien
aaagctgaacataatcttacccagg

SEQ ID NO: 331898 - DNA, 25 bp, Homo sapien
catttataagggtgttcatagccac

SEQ ID NO: 331899 - DNA, 25 bp, Homo sapien
gacaacttgagtgcccgacagatct

SEQ ID NO: 331900 - DNA, 25 bp, Homo sapien
tacaccctggtacatatgtgacctg

SEQ ID NO: 331901 - DNA, 25 bp, Homo sapien
cgacagatctgtgtgcaggacgcaa

SEQ ID NO: 331902 - DNA, 25 bp, Homo sapien
taaaaagtggacgatctacaccctg

SEQ ID NO: 331903 - DNA, 25 bp, Homo sapien
acagggcaaggacgatgtcgtgctc

SEQ ID NO: 331904 - DNA, 25 bp, Homo sapien
catgtatgccttgtacaggttcccc

SEQ ID NO: 331905 - DNA, 25 bp, Homo sapien
ctggaccagctgcatgtatgccttg

SEQ ID NO: 331906 - DNA, 25 bp, Homo sapien
gatgtcgtgctctagaaaggcgtat

SEQ ID NO: 331907 - DNA, 25 bp, Homo sapien
caggaagctctcttgtccgtgggat

SEQ ID NO: 331908 - DNA, 25 bp, Homo sapien
tccgtgggatgtcatgcaaattaac

SEQ ID NO: 331909 - DNA, 25 bp, Homo sapien
catgtctctcatgctttgatagtca

SEQ ID NO: 331910 - DNA, 25 bp, Homo sapien
tccttggtccgtgtctagtcaccca

SEQ ID NO: 331911 - DNA, 25 bp, Homo sapien
cctgaaccgatttgaagcctctctg

SEQ ID NO: 331912 - DNA, 25 bp, Homo sapien
tctgggcctgtgcacactgggcagt

SEQ ID NO: 331913 - DNA, 25 bp, Homo sapien
ggagtcaagtcacctttcctgctgt

SEQ ID NO: 331914 - DNA, 25 bp, Homo sapien
gttcagggcagctacttagagcttg

SEQ ID NO: 331915 - DNA, 25 bp, Homo sapien
acgctatggcttgccgtgatgtgga

SEQ ID NO: 331916 - DNA, 25 bp, Homo sapien
tgatgtggagcacctcggtggtctt

SEQ ID NO: 331917 - DNA, 25 bp, Homo sapien
tactgttgctatccttcagcaaagc

SEQ ID NO: 331918 - DNA, 25 bp, Homo sapien
tctttatgcgcaccatactgttgct

SEQ ID NO: 331919 - DNA, 25 bp, Homo sapien
tcatggccttgtagatacactcggg

SEQ ID NO: 331920 - DNA, 25 bp, Homo sapien
ctccttcagcttgggcagggcccga

SEQ ID NO: 331921 - DNA, 25 bp, Homo sapien
cagtggtaatctgggtggcattgat

SEQ ID NO: 331922 - DNA, 25 bp, Homo sapien
tgatgttaatgggaagctccaagga

SEQ ID NO: 331923 - DNA, 25 bp, Homo sapien
tccccaactacagaggcctttccaa

SEQ ID NO: 331924 - DNA, 25 bp, Homo sapien
ggcctttccaaatgaagctctgcag

SEQ ID NO: 331925 - DNA, 25 bp, Homo sapien
ttccccaactacagaggcctttcca

SEQ ID NO: 331926 - DNA, 25 bp, Homo sapien
aatgaagctctgcagaaaccactca

SEQ ID NO: 331927 - DNA, 25 bp, Homo sapien
aggcgacatcgttgccaggcgactc

SEQ ID NO: 331928 - DNA, 25 bp, Homo sapien
gcgccgcggtcgacataatcagcac

SEQ ID NO: 331929 - DNA, 25 bp, Homo sapien
gcgccactggccaacctattcagtt

SEQ ID NO: 331930 - DNA, 25 bp, Homo sapien
cgcggcgccgcggtcgacataatca

SEQ ID NO: 331931 - DNA, 25 bp, Homo sapien
gagaaacactgatgaggtcccggct

SEQ ID NO: 331932 - DNA, 25 bp, Homo sapien
tcactatggaccaagcaggactgcc

SEQ ID NO: 331933 - DNA, 25 bp, Homo sapien
gagttcaccgacagctcactatgga

SEQ ID NO: 331934 - DNA, 25 bp, Homo sapien
aaatgaagtcatacgcagggcctgg

SEQ ID NO: 331935 - DNA, 25 bp, Homo sapien
tggcattcgagcagtcggtgctgca

SEQ ID NO: 331936 - DNA, 25 bp, Homo sapien
tgcccggctccaggtcggcaatgga

SEQ ID NO: 331937 - DNA, 25 bp, Homo sapien
taggctggaggcctaaaatccacat

SEQ ID NO: 331938 - DNA, 25 bp, Homo sapien
taatccgtgagtataggtgtgactg

SEQ ID NO: 331939 - DNA, 25 bp, Homo sapien
ctcgtcacctgaggccttgccattt

SEQ ID NO: 331940 - DNA, 25 bp, Homo sapien
cctcaggcctgtagcccctctgatt

SEQ ID NO: 331941 - DNA, 25 bp, Homo sapien
tgtcctttgaccctcctctcagggt

SEQ ID NO: 331942 - DNA, 25 bp, Homo sapien
ttcctgaacttgtggccctctcctg

SEQ ID NO: 331943 - DNA, 25 bp, Homo sapien
gtatgtttagtgtgaacaaagacag

SEQ ID NO: 331944 - DNA, 25 bp, Homo sapien
cgcgtccggcctccataaatgactt

SEQ ID NO: 331945 - DNA, 25 bp, Homo sapien
taaaggggttgtatgtttagtgtga

SEQ ID NO: 331946 - DNA, 25 bp, Homo sapien
caaagacagtacaaagcatataaaa

SEQ ID NO: 331947 - DNA, 25 bp, Homo sapien
tgcccatggtggactgtcgttctcc

SEQ ID NO: 331948 - DNA, 25 bp, Homo sapien
tagctttgcgtactcaggaaggccc

SEQ ID NO: 331949 - DNA, 25 bp, Homo sapien
gctgggcataagcttcacaggacgg

SEQ ID NO: 331950 - DNA, 25 bp, Homo sapien
tcttgccaatggtgctgcagtggcc

SEQ ID NO: 331951 - DNA, 25 bp, Homo sapien
cacagaagttttagcctgttgcact

SEQ ID NO: 331952 - DNA, 25 bp, Homo sapien
agaagttttagcctgttgcactttc

SEQ ID NO: 331953 - DNA, 25 bp, Homo sapien
tggcacagaagttttagcctgttgc

SEQ ID NO: 331954 - DNA, 25 bp, Homo sapien
gaagttttagcctgttgcactttct

SEQ ID NO: 331955 - DNA, 25 bp, Homo sapien
gaaacctgatggtcatcatgttgat

SEQ ID NO: 331956 - DNA, 25 bp, Homo sapien
taggaaacctgatggtcatcatgtt

SEQ ID NO: 331957 - DNA, 25 bp, Homo sapien
ccttaggaaacctgatggtcatcat

SEQ ID NO: 331958 - DNA, 25 bp, Homo sapien
cttaggaaacctgatggtcatcatg

SEQ ID NO: 331959 - DNA, 25 bp, Homo sapien
gccctgaggctggtgagaggccagg

SEQ ID NO: 331960 - DNA, 25 bp, Homo sapien
tgagaggccaggctgtgaggtgtga

SEQ ID NO: 331961 - DNA, 25 bp, Homo sapien
gccaggctgtgaggtgtgaggaact

SEQ ID NO: 331962 - DNA, 25 bp, Homo sapien
gaggccaggctgtgaggtgtgagga

SEQ ID NO: 331963 - DNA, 25 bp, Homo sapien
tggtggcctctgacacgacgactgg

SEQ ID NO: 331964 - DNA, 25 bp, Homo sapien
catggaaggtgccctccgcatcgtt

SEQ ID NO: 331965 - DNA, 25 bp, Homo sapien
ctggtcttgcagatgcccacgatgg

SEQ ID NO: 331966 - DNA, 25 bp, Homo sapien
ctgacacgacgactgggcagtgccg

SEQ ID NO: 331967 - DNA, 25 bp, Homo sapien
cagaggggggaggttgcttctgtcg

SEQ ID NO: 331968 - DNA, 25 bp, Homo sapien
gaggggggaggttgcttctgtcgga

SEQ ID NO: 331969 - DNA, 25 bp, Homo sapien
ggggaggttgcttctgtcggaggac

SEQ ID NO: 331970 - DNA, 25 bp, Homo sapien
gggcagaggggggaggttgcttctg

SEQ ID NO: 331971 - DNA, 25 bp, Homo sapien
tgctgcgagttctgccagagagagc

SEQ ID NO: 331972 - DNA, 25 bp, Homo sapien
gcagctcttgtcccggaacatgagg

SEQ ID NO: 331973 - DNA, 25 bp, Homo sapien
gctgcgagttctgccagagagagca

SEQ ID NO: 331974 - DNA, 25 bp, Homo sapien
agctcttgtcccggaacatgaggta

SEQ ID NO: 331975 - DNA, 25 bp, Homo sapien
agtgggcgacatcgagcaggagctg

SEQ ID NO: 331976 - DNA, 25 bp, Homo sapien
agctggagcgctgcaaggcctccat

SEQ ID NO: 331977 - DNA, 25 bp, Homo sapien
gcgtggaaggcgcagttcccggact

SEQ ID NO: 331978 - DNA, 25 bp, Homo sapien
ccccgcgcatggagctgcgctcagt

SEQ ID NO: 331979 - DNA, 25 bp, Homo sapien
taggtctgccagatagcattgtcca

SEQ ID NO: 331980 - DNA, 25 bp, Homo sapien
tccagctttgatagggaggagccct

SEQ ID NO: 331981 - DNA, 25 bp, Homo sapien
tagactgggctccacggtaattccc

SEQ ID NO: 331982 - DNA, 25 bp, Homo sapien
gattccttgatgaccctcgaaacag

SEQ ID NO: 331983 - DNA, 25 bp, Homo sapien
tcctctttccgttgctggtttcttc

SEQ ID NO: 331984 - DNA, 25 bp, Homo sapien
aaggggactgctgctttcccatgag

SEQ ID NO: 331985 - DNA, 25 bp, Homo sapien
cctctttccgttgctggtttcttct

SEQ ID NO: 331986 - DNA, 25 bp, Homo sapien
ctctgcaaggggactgctgctttcc

SEQ ID NO: 331987 - DNA, 25 bp, Homo sapien
ggattttgaccctgctgtagtgaca

SEQ ID NO: 331988 - DNA, 25 bp, Homo sapien
cgtccatgggattttgaccctgctg

SEQ ID NO: 331989 - DNA, 25 bp, Homo sapien
tttgaccctgctgtagtgacagctg

SEQ ID NO: 331990 - DNA, 25 bp, Homo sapien
catgggattttgaccctgctgtagt

SEQ ID NO: 331991 - DNA, 25 bp, Homo sapien
gatgtatattcccactgggtggcga

SEQ ID NO: 331992 - DNA, 25 bp, Homo sapien
gtggcgaggacatagatgtccaggc

SEQ ID NO: 331993 - DNA, 25 bp, Homo sapien
cccatgtgttccacggcataatgtg

SEQ ID NO: 331994 - DNA, 25 bp, Homo sapien
gaaagatgtatattcccactgggtg

SEQ ID NO: 331995 - DNA, 25 bp, Homo sapien
caggatcgtggagttcttgaaggaa

SEQ ID NO: 331996 - DNA, 25 bp, Homo sapien
gaaccggcgtcagatacctctgaga

SEQ ID NO: 331997 - DNA, 25 bp, Homo sapien
ccggttgccacggttctcccaggat

SEQ ID NO: 331998 - DNA, 25 bp, Homo sapien
tgaaggaaggccttttcctggcgtg

SEQ ID NO: 331999 - DNA, 25 bp, Homo sapien
acagagagatccttgccggctggtt

SEQ ID NO: 332000 - DNA, 25 bp, Homo sapien
cgagcctggccgattgggagtaaca

SEQ ID NO: 332001 - DNA, 25 bp, Homo sapien
tgacagctgggattatcaccgtggg

SEQ ID NO: 332002 - DNA, 25 bp, Homo sapien
cagtttcgagtttcaggtcaagagc

SEQ ID NO: 332003 - DNA, 25 bp, Homo sapien
gggcagctgcggctttccattcttg

SEQ ID NO: 332004 - DNA, 25 bp, Homo sapien
tgatgtcattgttggggtacggcat

SEQ ID NO: 332005 - DNA, 25 bp, Homo sapien
agctgcggctttccattcttgggtg

SEQ ID NO: 332006 - DNA, 25 bp, Homo sapien
tgctggcctggtgatgtcattgttg

SEQ ID NO: 332007 - DNA, 25 bp, Homo sapien
ccttggctgtttcactccttcttag

SEQ ID NO: 332008 - DNA, 25 bp, Homo sapien
accttggctgtttcactccttctta

SEQ ID NO: 332009 - DNA, 25 bp, Homo sapien
cagcactgcgttctaactgtgaagg

SEQ ID NO: 332010 - DNA, 25 bp, Homo sapien
tgtccattgctaagactcagaggag

SEQ ID NO: 332011 - DNA, 25 bp, Homo sapien
ggaggtattggaattgtccattgct

SEQ ID NO: 332012 - DNA, 25 bp, Homo sapien
tctagtgtcctgtgtggaggtattg

SEQ ID NO: 332013 - DNA, 25 bp, Homo sapien
cagctcagtggactcgctcaacttt

SEQ ID NO: 332014 - DNA, 25 bp, Homo sapien
gctcagtggactcgctcaacttttg

SEQ ID NO: 332015 - DNA, 25 bp, Homo sapien
tcagctcagtggactcgctcaactt

SEQ ID NO: 332016 - DNA, 25 bp, Homo sapien
ctcagctcagtggactcgctcaact

SEQ ID NO: 332017 - DNA, 25 bp, Homo sapien
cccagagggaagcaggatcacattt

SEQ ID NO: 332018 - DNA, 25 bp, Homo sapien
tgagagccaagtttccacacggtcc

SEQ ID NO: 332019 - DNA, 25 bp, Homo sapien
tgctgaacccgcagctcactaggga

SEQ ID NO: 332020 - DNA, 25 bp, Homo sapien
ttacaagcagtgtcaccgtcgtggg

SEQ ID NO: 332021 - DNA, 25 bp, Homo sapien
gggtttgaagcagcctggctttctc

SEQ ID NO: 332022 - DNA, 25 bp, Homo sapien
tcccacaaggcgtggcttccagact

SEQ ID NO: 332023 - DNA, 25 bp, Homo sapien
tagatgccagtgtgacctcccacaa

SEQ ID NO: 332024 - DNA, 25 bp, Homo sapien
caatgcaggcgaaggcctagatgcc

SEQ ID NO: 332025 - DNA, 25 bp, Homo sapien
tattcaatgcaaaataatcttctcc

SEQ ID NO: 332026 - DNA, 25 bp, Homo sapien
caatgcaaaataatcttctccaatt

SEQ ID NO: 332027 - DNA, 25 bp, Homo sapien
tttattcaatgcaaaataatcttct

SEQ ID NO: 332028 - DNA, 25 bp, Homo sapien
gtctttttggctgtaagtttattca

SEQ ID NO: 332029 - DNA, 25 bp, Homo sapien
cagggggcatagcattccctctgta

SEQ ID NO: 332030 - DNA, 25 bp, Homo sapien
gggcatagcattccctctgtaggta

SEQ ID NO: 332031 - DNA, 25 bp, Homo sapien
ggcaccagggggcatagcattccct

SEQ ID NO: 332032 - DNA, 25 bp, Homo sapien
caccagggggcatagcattccctct

SEQ ID NO: 332033 - DNA, 25 bp, Homo sapien
ctcgttgagtcttgcaggtcgctca

SEQ ID NO: 332034 - DNA, 25 bp, Homo sapien
tcgttgagtcttgcaggtcgctcac

SEQ ID NO: 332035 - DNA, 25 bp, Homo sapien
taaggtaccagcagacatgactcca

SEQ ID NO: 332036 - DNA, 25 bp, Homo sapien
gcagacatgactccaggcaaactgt

SEQ ID NO: 332037 - DNA, 25 bp, Homo sapien
ttggtaaggtaccagcagacatgac

SEQ ID NO: 332038 - DNA, 25 bp, Homo sapien
tgttccttcatgtagtagcctcggg

SEQ ID NO: 332039 - DNA, 25 bp, Homo sapien
ggatgggttggaacctggattcgaa

SEQ ID NO: 332040 - DNA, 25 bp, Homo sapien
cctggattcgaagaagcaggtatcg

SEQ ID NO: 332041 - DNA, 25 bp, Homo sapien
tatgtgtgcacgtaaaatggaaatg

SEQ ID NO: 332042 - DNA, 25 bp, Homo sapien
tcgaagaagcaggtatcggccctgg

SEQ ID NO: 332043 - DNA, 25 bp, Homo sapien
tcctagtctcattatagcttgtcaa

SEQ ID NO: 332044 - DNA, 25 bp, Homo sapien
tgtttttagtaatctcttacgatcc

SEQ ID NO: 332045 - DNA, 25 bp, Homo sapien
tactgccttaattgcattactcatt

SEQ ID NO: 332046 - DNA, 25 bp, Homo sapien
tgtgaaattgctatgcttccagaca

SEQ ID NO: 332047 - DNA, 25 bp, Homo sapien
cctgaagcggggtgctcagagactc

SEQ ID NO: 332048 - DNA, 25 bp, Homo sapien
atcaacctcgctgggctgtcgtcct

SEQ ID NO: 332049 - DNA, 25 bp, Homo sapien
ctcgctgggctgtcgtcctgaagcg

SEQ ID NO: 332050 - DNA, 25 bp, Homo sapien
ttggccatcaacctcgctgggctgt

SEQ ID NO: 332051 - DNA, 25 bp, Homo sapien
cacaaggtgcaaataattgggcagg

SEQ ID NO: 332052 - DNA, 25 bp, Homo sapien
gtgatcagcttagggatcacaaaga

SEQ ID NO: 332053 - DNA, 25 bp, Homo sapien
tctatgatactgagctgtgatcagc

SEQ ID NO: 332054 - DNA, 25 bp, Homo sapien
atcagcttagggatcacaaagaaca

SEQ ID NO: 332055 - DNA, 25 bp, Homo sapien
ggcaagggacttgttggagccactg

SEQ ID NO: 332056 - DNA, 25 bp, Homo sapien
gggcaagggacttgttggagccact

SEQ ID NO: 332057 - DNA, 25 bp, Homo sapien
caagagctgcatcacagtttgaggg

SEQ ID NO: 332058 - DNA, 25 bp, Homo sapien
ccaagagctgcatcacagtttgagg

SEQ ID NO: 332059 - DNA, 25 bp, Homo sapien
agccaagagctgcatcacagtttga

SEQ ID NO: 332060 - DNA, 25 bp, Homo sapien
gccaagagctgcatcacagtttgag

SEQ ID NO: 332061 - DNA, 25 bp, Homo sapien
aatgctttctgagacaatagatcta

SEQ ID NO: 332062 - DNA, 25 bp, Homo sapien
taatttacaagacactgagggctcc

SEQ ID NO: 332063 - DNA, 25 bp, Homo sapien
ccctttcgtaaggagttggcctgtg

SEQ ID NO: 332064 - DNA, 25 bp, Homo sapien
ggaaggctggacaaactccagttga

SEQ ID NO: 332065 - DNA, 25 bp, Homo sapien
aaataagactctctccagctaggaa

SEQ ID NO: 332066 - DNA, 25 bp, Homo sapien
gagtctgatgcattgtacccacaga

SEQ ID NO: 332067 - DNA, 25 bp, Homo sapien
cctcagagtctgatgcattgtaccc

SEQ ID NO: 332068 - DNA, 25 bp, Homo sapien
tgcattgtacccacagaattgtgca

SEQ ID NO: 332069 - DNA, 25 bp, Homo sapien
tgatgcattgtacccacagaattgt

SEQ ID NO: 332070 - DNA, 25 bp, Homo sapien
gaaggtgcctgaacacattctcccc

SEQ ID NO: 332071 - DNA, 25 bp, Homo sapien
gagacagatgacaaatatcgtggga

SEQ ID NO: 332072 - DNA, 25 bp, Homo sapien
cattctcccctaactgaggagagga

SEQ ID NO: 332073 - DNA, 25 bp, Homo sapien
tatcgtgggatagatggcacatggt

SEQ ID NO: 332074 - DNA, 25 bp, Homo sapien
ggaataagccttcggccatgggaga

SEQ ID NO: 332075 - DNA, 25 bp, Homo sapien
ttcaggtaaaggatgatggccaccc

SEQ ID NO: 332076 - DNA, 25 bp, Homo sapien
cactcttctcataatcatgggcctt

SEQ ID NO: 332077 - DNA, 25 bp, Homo sapien
cactctccatgacggctttgtggaa

SEQ ID NO: 332078 - DNA, 25 bp, Homo sapien
gtccccaccgaagaactcgatgttc

SEQ ID NO: 332079 - DNA, 25 bp, Homo sapien
tccccaccgaagaactcgatgttct

SEQ ID NO: 332080 - DNA, 25 bp, Homo sapien
ccgaagaactcgatgttcttctgga

SEQ ID NO: 332081 - DNA, 25 bp, Homo sapien
agaactcgatgttcttctggaccca

SEQ ID NO: 332082 - DNA, 25 bp, Homo sapien
ccagggaggacccatcgaagatgga

SEQ ID NO: 332083 - DNA, 25 bp, Homo sapien
acaaccagcatgtcctcataggcag

SEQ ID NO: 332084 - DNA, 25 bp, Homo sapien
gaagaagccaaatattcccagccgg

SEQ ID NO: 332085 - DNA, 25 bp, Homo sapien
tcccagccggtactggacgatcaca

SEQ ID NO: 332086 - DNA, 25 bp, Homo sapien
acaggaatgtcccatcagcccacca

SEQ ID NO: 332087 - DNA, 25 bp, Homo sapien
gaggagacaggaatgtcccatcagc

SEQ ID NO: 332088 - DNA, 25 bp, Homo sapien
aggaatgtcccatcagcccaccagg

SEQ ID NO: 332089 - DNA, 25 bp, Homo sapien
ggagacaggaatgtcccatcagccc

SEQ ID NO: 332090 - DNA, 25 bp, Homo sapien
gaagatggaaaccgttgtaagccat

SEQ ID NO: 332091 - DNA, 25 bp, Homo sapien
ggaagatggaaaccgttgtaagcca

SEQ ID NO: 332092 - DNA, 25 bp, Homo sapien
tgtcctgtcgctctgctcttgtggc

SEQ ID NO: 332093 - DNA, 25 bp, Homo sapien
tgtgtcctgtcgctctgctcttgtg

SEQ ID NO: 332094 - DNA, 25 bp, Homo sapien
actgtgtcctgtcgctctgctcttg

SEQ ID NO: 332095 - DNA, 25 bp, Homo sapien
gtcctgtcgctctgctcttgtggcc

SEQ ID NO: 332096 - DNA, 25 bp, Homo sapien
gctgtgcagaaggtgagcctcatct

SEQ ID NO: 332097 - DNA, 25 bp, Homo sapien
gttcccgaatctccacggccaagtg

SEQ ID NO: 332098 - DNA, 25 bp, Homo sapien
gacaatgacctattggctgtgcaga

SEQ ID NO: 332099 - DNA, 25 bp, Homo sapien
caagtgctgagacaagagccctggg

SEQ ID NO: 332100 - DNA, 25 bp, Homo sapien
tcccatgggtaacagcgtggccttc

SEQ ID NO: 332101 - DNA, 25 bp, Homo sapien
tcggcaagtgactaaagggcttcct

SEQ ID NO: 332102 - DNA, 25 bp, Homo sapien
taagacgcttctagtcccgtgaggc

SEQ ID NO: 332103 - DNA, 25 bp, Homo sapien
tctcaaggcagaacgtgctcaccaa

SEQ ID NO: 332104 - DNA, 25 bp, Homo sapien
tcagagatacattaggcgaaaataa

SEQ ID NO: 332105 - DNA, 25 bp, Homo sapien
ctgtaaacagaggataacaatggca

SEQ ID NO: 332106 - DNA, 25 bp, Homo sapien
tgtaaacagaggataacaatggcat

SEQ ID NO: 332107 - DNA, 25 bp, Homo sapien
cctcagagatacattaggcgaaaat

SEQ ID NO: 332108 - DNA, 25 bp, Homo sapien
gtgtattatcggttttacatcttaa

SEQ ID NO: 332109 - DNA, 25 bp, Homo sapien
ctgtgtgtgtattatcggttttaca

SEQ ID NO: 332110 - DNA, 25 bp, Homo sapien
cactgtgtgtgtattatcggtttta

SEQ ID NO: 332111 - DNA, 25 bp, Homo sapien
tgtgtgtattatcggttttacatct

SEQ ID NO: 332112 - DNA, 25 bp, Homo sapien
gccaggatcttttctgtccagcgag

SEQ ID NO: 332113 - DNA, 25 bp, Homo sapien
gatcttttctgtccagcgaggagca

SEQ ID NO: 332114 - DNA, 25 bp, Homo sapien
agcagagagcgagaaaccctgaagg

SEQ ID NO: 332115 - DNA, 25 bp, Homo sapien
ggagcagagagcgagaaaccctgaa

SEQ ID NO: 332116 - DNA, 25 bp, Homo sapien
gctggagattctcaggtaacacagg

SEQ ID NO: 332117 - DNA, 25 bp, Homo sapien
cccagaacctcaagaaggacatctg

SEQ ID NO: 332118 - DNA, 25 bp, Homo sapien
tgctggaccagatggaggacatcca

SEQ ID NO: 332119 - DNA, 25 bp, Homo sapien
acatctggggcgtgctggaccagat

SEQ ID NO: 332120 - DNA, 25 bp, Homo sapien
gacaccttcttaaccagcgtgtgcc

SEQ ID NO: 332121 - DNA, 25 bp, Homo sapien
caggcccagagactgcccattaagc

SEQ ID NO: 332122 - DNA, 25 bp, Homo sapien
cctgtggcaggtcccagccgggcca

SEQ ID NO: 332123 - DNA, 25 bp, Homo sapien
cccagagactgcccattaagcttac

SEQ ID NO: 332124 - DNA, 25 bp, Homo sapien
tgtggcaggtcccagccgggccagg

SEQ ID NO: 332125 - DNA, 25 bp, Homo sapien
ctgggggagtcttcagctgagggtg

SEQ ID NO: 332126 - DNA, 25 bp, Homo sapien
gggagtcttcagctgagggtggtcc

SEQ ID NO: 332127 - DNA, 25 bp, Homo sapien
tgggggagtcttcagctgagggtgg

SEQ ID NO: 332128 - DNA, 25 bp, Homo sapien
ggggagtcttcagctgagggtggtc

SEQ ID NO: 332129 - DNA, 25 bp, Homo sapien
ggaggcaacaggacagagacgacac

SEQ ID NO: 332130 - DNA, 25 bp, Homo sapien
cctctaggctcggagggttcaccca

SEQ ID NO: 332131 - DNA, 25 bp, Homo sapien
ggctgtgccatcacaggacagatgt

SEQ ID NO: 332132 - DNA, 25 bp, Homo sapien
acgtggactggtgtagccatgtcgt

SEQ ID NO: 332133 - DNA, 25 bp, Homo sapien
tggctctaggaggtccatttggatg

SEQ ID NO: 332134 - DNA, 25 bp, Homo sapien
cctttggggcctgtgtaggatggtg

SEQ ID NO: 332135 - DNA, 25 bp, Homo sapien
gcggtggctctaggaggtccatttg

SEQ ID NO: 332136 - DNA, 25 bp, Homo sapien
tgaaggtgacacctttggggcctgt

SEQ ID NO: 332137 - DNA, 25 bp, Homo sapien
gggaggaggacgacgtccgcagtgc

SEQ ID NO: 332138 - DNA, 25 bp, Homo sapien
gaggaggacgacgtccgcagtgcac

SEQ ID NO: 332139 - DNA, 25 bp, Homo sapien
ggaggacgacgtccgcagtgcacgg

SEQ ID NO: 332140 - DNA, 25 bp, Homo sapien
cagggaggaggacgacgtccgcagt

SEQ ID NO: 332141 - DNA, 25 bp, Homo sapien
gctggaaagcgaggacaatgatgtc

SEQ ID NO: 332142 - DNA, 25 bp, Homo sapien
gtaggacctcggaagccctcagaca

SEQ ID NO: 332143 - DNA, 25 bp, Homo sapien
gcctggccacaaggtcatctgtaga

SEQ ID NO: 332144 - DNA, 25 bp, Homo sapien
tagagctgtagcacagcgtaggacc

SEQ ID NO: 332145 - DNA, 25 bp, Homo sapien
tgtcgtagagcacaggcgagggctc

SEQ ID NO: 332146 - DNA, 25 bp, Homo sapien
cctggacaggatgtcgtagagcaca

SEQ ID NO: 332147 - DNA, 25 bp, Homo sapien
atggtcctggacaggatgtcgtaga

SEQ ID NO: 332148 - DNA, 25 bp, Homo sapien
tcgtagagcacaggcgagggctcct

SEQ ID NO: 332149 - DNA, 25 bp, Homo sapien
ggatgggcgaggcaggcgtggccac

SEQ ID NO: 332150 - DNA, 25 bp, Homo sapien
ccaactgctggatgggcgaggcagg

SEQ ID NO: 332151 - DNA, 25 bp, Homo sapien
ccagggttgagcacattattgtagg

SEQ ID NO: 332152 - DNA, 25 bp, Homo sapien
accaggcgagccagggttgagcaca

SEQ ID NO: 332153 - DNA, 25 bp, Homo sapien
ctgcgattgtggttgggcagtgcat

SEQ ID NO: 332154 - DNA, 25 bp, Homo sapien
gctcgacacaaagtccaggctatgg

SEQ ID NO: 332155 - DNA, 25 bp, Homo sapien
ccctgccggcttgaggccttgaggc

SEQ ID NO: 332156 - DNA, 25 bp, Homo sapien
atagtcagggaagtccaggctcggc

SEQ ID NO: 332157 - DNA, 25 bp, Homo sapien
agggagcacaaagcaatgagaaggc

SEQ ID NO: 332158 - DNA, 25 bp, Homo sapien
gaaggtgccttaggacccgtgagcc

SEQ ID NO: 332159 - DNA, 25 bp, Homo sapien
ctgctcgcctcatccacagaaggtg

SEQ ID NO: 332160 - DNA, 25 bp, Homo sapien
tgctcgcctcatccacagaaggtgc

SEQ ID NO: 332161 - DNA, 25 bp, Homo sapien
gccttaggacccgtgagccggccta

SEQ ID NO: 332162 - DNA, 25 bp, Homo sapien
caagtccagcggcttatctagcggg

SEQ ID NO: 332163 - DNA, 25 bp, Homo sapien
tccagcggcttatctagcgggtcca

SEQ ID NO: 332164 - DNA, 25 bp, Homo sapien
ggccccaagtccagcggcttatcta

SEQ ID NO: 332165 - DNA, 25 bp, Homo sapien
gcggcttatctagcgggtccaggct

SEQ ID NO: 332166 - DNA, 25 bp, Homo sapien
gggcgcgtcgaggaccgaaagtcgc

SEQ ID NO: 332167 - DNA, 25 bp, Homo sapien
ggcgcgtcgaggaccgaaagtcgct

SEQ ID NO: 332168 - DNA, 25 bp, Homo sapien
ggcggcgcgggcctccgggaggatg

SEQ ID NO: 332169 - DNA, 25 bp, Homo sapien
cggcgcgggcctccgggaggatgaa

SEQ ID NO: 332170 - DNA, 25 bp, Homo sapien
gcctccgggaggatgaatgtcttat

SEQ ID NO: 332171 - DNA, 25 bp, Homo sapien
gcgggcctccgggaggatgaatgtc

SEQ ID NO: 332172 - DNA, 25 bp, Homo sapien
cagtctgtaggaccctgactcaggg

SEQ ID NO: 332173 - DNA, 25 bp, Homo sapien
tgatggccctccttagagcccaggt

SEQ ID NO: 332174 - DNA, 25 bp, Homo sapien
cagggatggagtgggccagcctgag

SEQ ID NO: 332175 - DNA, 25 bp, Homo sapien
aggtccactgacatgaagcagagag

SEQ ID NO: 332176 - DNA, 25 bp, Homo sapien
ggattccacaaaactacaaggtcca

SEQ ID NO: 332177 - DNA, 25 bp, Homo sapien
tctgtcactggtcctcctacactag

SEQ ID NO: 332178 - DNA, 25 bp, Homo sapien
cacaaaactacaaggtccaggagga

SEQ ID NO: 332179 - DNA, 25 bp, Homo sapien
tccacaaaactacaaggtccaggag

SEQ ID NO: 332180 - DNA, 25 bp, Homo sapien
cggtcgtagtatacttccatgaagc

SEQ ID NO: 332181 - DNA, 25 bp, Homo sapien
gtatacttccatgaagccgcccctg

SEQ ID NO: 332182 - DNA, 25 bp, Homo sapien
gacacggtcgtagtatacttccatg

SEQ ID NO: 332183 - DNA, 25 bp, Homo sapien
agcagagacacggtcgtagtatact

SEQ ID NO: 332184 - DNA, 25 bp, Homo sapien
ctctgagcccgcatgagtataagtg

SEQ ID NO: 332185 - DNA, 25 bp, Homo sapien
tgtggtaggacctggtctcggtggg

SEQ ID NO: 332186 - DNA, 25 bp, Homo sapien
tattgtggtaggacctggtctcggt

SEQ ID NO: 332187 - DNA, 25 bp, Homo sapien
ttgtggtaggacctggtctcggtgg

SEQ ID NO: 332188 - DNA, 25 bp, Homo sapien
ttattgtggtaggacctggtctcgg

SEQ ID NO: 332189 - DNA, 25 bp, Homo sapien
tcggagtggcgtcttctcttttgct

SEQ ID NO: 332190 - DNA, 25 bp, Homo sapien
tttgctgggaaccttgccgcctttc

SEQ ID NO: 332191 - DNA, 25 bp, Homo sapien
ctcttttgctgggaaccttgccgcc

SEQ ID NO: 332192 - DNA, 25 bp, Homo sapien
gggttctcggagtggcgtcttctct

SEQ ID NO: 332193 - DNA, 25 bp, Homo sapien
agggagctcgtcctgattgtacctg

SEQ ID NO: 332194 - DNA, 25 bp, Homo sapien
ctgattgtacctgcccggctgtgac

SEQ ID NO: 332195 - DNA, 25 bp, Homo sapien
gtacctgcccggctgtgacggctga

SEQ ID NO: 332196 - DNA, 25 bp, Homo sapien
acacggagcgggagcacaggtggga

SEQ ID NO: 332197 - DNA, 25 bp, Homo sapien
ctgtgggctcgtccagcttcaggta

SEQ ID NO: 332198 - DNA, 25 bp, Homo sapien
tcgtccagcttcaggtaggcgcccg

SEQ ID NO: 332199 - DNA, 25 bp, Homo sapien
ggcctcagccactgtgggctcgtcc

SEQ ID NO: 332200 - DNA, 25 bp, Homo sapien
tccagcttcaggtaggcgcccggcc

SEQ ID NO: 332201 - DNA, 25 bp, Homo sapien
ctgggaggctctgagaacgacagct

SEQ ID NO: 332202 - DNA, 25 bp, Homo sapien
acgtggtgcccgctttcatcctggg

SEQ ID NO: 332203 - DNA, 25 bp, Homo sapien
gacagcttctgtctcgtgagtgacg

SEQ ID NO: 332204 - DNA, 25 bp, Homo sapien
tctgtctcgtgagtgacgtggtgcc

SEQ ID NO: 332205 - DNA, 25 bp, Homo sapien
gacaggccgcccaacttggtataaa

SEQ ID NO: 332206 - DNA, 25 bp, Homo sapien
cctcttcgctgaggaggtcaggaca

SEQ ID NO: 332207 - DNA, 25 bp, Homo sapien
gaggctgctcaggtccaagtaggca

SEQ ID NO: 332208 - DNA, 25 bp, Homo sapien
cagaagcttctagatgacaggccgc

SEQ ID NO: 332209 - DNA, 25 bp, Homo sapien
agtcatactttcttctcggccaggg

SEQ ID NO: 332210 - DNA, 25 bp, Homo sapien
tgtcagtcatactttcttctcggcc

SEQ ID NO: 332211 - DNA, 25 bp, Homo sapien
tcagtcatactttcttctcggccag

SEQ ID NO: 332212 - DNA, 25 bp, Homo sapien
gtcatactttcttctcggccaggga

SEQ ID NO: 332213 - DNA, 25 bp, Homo sapien
agctggcgcccccactccctcggct

SEQ ID NO: 332214 - DNA, 25 bp, Homo sapien
ctcggctcccctccggctgcggctg

SEQ ID NO: 332215 - DNA, 25 bp, Homo sapien
ggctgctcaggccgccccaccccga

SEQ ID NO: 332216 - DNA, 25 bp, Homo sapien
ccaccccgagctggcgcccccactc

SEQ ID NO: 332217 - DNA, 25 bp, Homo sapien
cacgcggcagcatctgcgaggcctc

SEQ ID NO: 332218 - DNA, 25 bp, Homo sapien
tcatgccgggacatttgttctcggc

SEQ ID NO: 332219 - DNA, 25 bp, Homo sapien
tttttgccagcttccgttctttgga

SEQ ID NO: 332220 - DNA, 25 bp, Homo sapien
ttctttggaacttcatgccgggaca

SEQ ID NO: 332221 - DNA, 25 bp, Homo sapien
atgacgccagcgtggcaccccaagc

SEQ ID NO: 332222 - DNA, 25 bp, Homo sapien
tgccagccatgacgccagcgtggca

SEQ ID NO: 332223 - DNA, 25 bp, Homo sapien
agatgccagccatgacgccagcgtg

SEQ ID NO: 332224 - DNA, 25 bp, Homo sapien
catgacgccagcgtggcaccccaag

SEQ ID NO: 332225 - DNA, 25 bp, Homo sapien
ttcccagtagaggccatccgatggc

SEQ ID NO: 332226 - DNA, 25 bp, Homo sapien
cccagtcgcggatgaagtctccaga

SEQ ID NO: 332227 - DNA, 25 bp, Homo sapien
tatggatgaagtctccagtcgtgga

SEQ ID NO: 332228 - DNA, 25 bp, Homo sapien
gtcaatgtggcagccccgtcttgct

SEQ ID NO: 332229 - DNA, 25 bp, Homo sapien
gatcaggcaaaccaaccaaggatga

SEQ ID NO: 332230 - DNA, 25 bp, Homo sapien
ttcaaacccgagaagaaatcataag

SEQ ID NO: 332231 - DNA, 25 bp, Homo sapien
gtttcaaacccgagaagaaatcata

SEQ ID NO: 332232 - DNA, 25 bp, Homo sapien
tgtttcaaacccgagaagaaatcat

SEQ ID NO: 332233 - DNA, 25 bp, Homo sapien
caaacccgagaagaaatcataagcc

SEQ ID NO: 332234 - DNA, 25 bp, Homo sapien
tcagtcaatatatttctcagggtta

SEQ ID NO: 332235 - DNA, 25 bp, Homo sapien
ggcgcccagtctatcctgtccagtg

SEQ ID NO: 332236 - DNA, 25 bp, Homo sapien
ggcctgggcgcccagtctatcctgt

SEQ ID NO: 332237 - DNA, 25 bp, Homo sapien
ttgaggcctgggcgcccagtctatc

SEQ ID NO: 332238 - DNA, 25 bp, Homo sapien
cagtctatcctgtccagtgagcgag

SEQ ID NO: 332239 - DNA, 25 bp, Homo sapien
ctcaattcctgattctcaccaaggt

SEQ ID NO: 332240 - DNA, 25 bp, Homo sapien
cctgattctcaccaaggtgtgtaat

SEQ ID NO: 332241 - DNA, 25 bp, Homo sapien
ttcctgattctcaccaaggtgtgta

SEQ ID NO: 332242 - DNA, 25 bp, Homo sapien
aattcctgattctcaccaaggtgtg

SEQ ID NO: 332243 - DNA, 25 bp, Homo sapien
aaaatcctcgtcatcagacatgctc

SEQ ID NO: 332244 - DNA, 25 bp, Homo sapien
tgcaaaatcctcgtcatcagacatg

SEQ ID NO: 332245 - DNA, 25 bp, Homo sapien
ctgcaaaatcctcgtcatcagacat

SEQ ID NO: 332246 - DNA, 25 bp, Homo sapien
gcaaaatcctcgtcatcagacatgc

SEQ ID NO: 332247 - DNA, 25 bp, Homo sapien
tacagcgtcattagagatgtcacgt

SEQ ID NO: 332248 - DNA, 25 bp, Homo sapien
gcctcattacagatgtctacagcgt

SEQ ID NO: 332249 - DNA, 25 bp, Homo sapien
tttacagaggtatcgtacagcatcc

SEQ ID NO: 332250 - DNA, 25 bp, Homo sapien
tagagatgtcttgtacagcgtaccc

SEQ ID NO: 332251 - DNA, 25 bp, Homo sapien
caaaaccaggcctcagaggggccac

SEQ ID NO: 332252 - DNA, 25 bp, Homo sapien
aaccaggcctcagaggggccacccg

SEQ ID NO: 332253 - DNA, 25 bp, Homo sapien
ccaggcctcagaggggccacccgca

SEQ ID NO: 332254 - DNA, 25 bp, Homo sapien
aggcctcagaggggccacccgcacc

SEQ ID NO: 332255 - DNA, 25 bp, Homo sapien
ctcgcgttgactggcctctctccac

SEQ ID NO: 332256 - DNA, 25 bp, Homo sapien
ctctgtccttgtgagctggaggctc

SEQ ID NO: 332257 - DNA, 25 bp, Homo sapien
acctcctctgtccttgtgagctgga

SEQ ID NO: 332258 - DNA, 25 bp, Homo sapien
cctcgcgttgactggcctctctcca

SEQ ID NO: 332259 - DNA, 25 bp, Homo sapien
ctccaatgctggttggtgtacaggc

SEQ ID NO: 332260 - DNA, 25 bp, Homo sapien
agccatgatgcctccaatgctggtt

SEQ ID NO: 332261 - DNA, 25 bp, Homo sapien
gctggttggtgtacaggctgtatct

SEQ ID NO: 332262 - DNA, 25 bp, Homo sapien
aagccatgatgcctccaatgctggt

SEQ ID NO: 332263 - DNA, 25 bp, Homo sapien
ttgattgggctcaatgaagtcacct

SEQ ID NO: 332264 - DNA, 25 bp, Homo sapien
attgattgggctcaatgaagtcacc

SEQ ID NO: 332265 - DNA, 25 bp, Homo sapien
cattgattgggctcaatgaagtcac

SEQ ID NO: 332266 - DNA, 25 bp, Homo sapien
tttttggaaggcttcttcaagtcac

SEQ ID NO: 332267 - DNA, 25 bp, Homo sapien
cacgctttttggaaggcttcttcaa

SEQ ID NO: 332268 - DNA, 25 bp, Homo sapien
catggtagtagagtagggctccctt

SEQ ID NO: 332269 - DNA, 25 bp, Homo sapien
atggtagtagagtagggctcccttt

SEQ ID NO: 332270 - DNA, 25 bp, Homo sapien
cgaatgcaggaaaagtggatcccca

SEQ ID NO: 332271 - DNA, 25 bp, Homo sapien
gaatgcaggaaaagtggatccccat

SEQ ID NO: 332272 - DNA, 25 bp, Homo sapien
ctcgaatgcaggaaaagtggatccc

SEQ ID NO: 332273 - DNA, 25 bp, Homo sapien
tcgaatgcaggaaaagtggatcccc

SEQ ID NO: 332274 - DNA, 25 bp, Homo sapien
gcacaaaggttcaatctgctctgac

SEQ ID NO: 332275 - DNA, 25 bp, Homo sapien
aagcacaaaggttcaatctgctctg

SEQ ID NO: 332276 - DNA, 25 bp, Homo sapien
atgaaagcacaaaggttcaatctgc

SEQ ID NO: 332277 - DNA, 25 bp, Homo sapien
gaaagcacaaaggttcaatctgctc

SEQ ID NO: 332278 - DNA, 25 bp, Homo sapien
taggacttgggctccggattcactg

SEQ ID NO: 332279 - DNA, 25 bp, Homo sapien
ggaggccctgcacgtcgtgtagcaa

SEQ ID NO: 332280 - DNA, 25 bp, Homo sapien
tatcactcctgtctcttgcgtgggc

SEQ ID NO: 332281 - DNA, 25 bp, Homo sapien
caacccacgtgatggctcttgaagc

SEQ ID NO: 332282 - DNA, 25 bp, Homo sapien
ctgctccctaatatatcgaaagctc

SEQ ID NO: 332283 - DNA, 25 bp, Homo sapien
agggctggatggcttgggatgcaga

SEQ ID NO: 332284 - DNA, 25 bp, Homo sapien
cagagagagacccttcccctgggat

SEQ ID NO: 332285 - DNA, 25 bp, Homo sapien
gcttgggatgcagagagagaccctt

SEQ ID NO: 332286 - DNA, 25 bp, Homo sapien
ctggttgacaaagagggtatttatt

SEQ ID NO: 332287 - DNA, 25 bp, Homo sapien
gtcatctccacgccctgggtgatgg

SEQ ID NO: 332288 - DNA, 25 bp, Homo sapien
tcatctccacgccctgggtgatggg

SEQ ID NO: 332289 - DNA, 25 bp, Homo sapien
gtttggagggcgtggtcatctccac

SEQ ID NO: 332290 - DNA, 25 bp, Homo sapien
gctctgtttggagggcgtggtcatc

SEQ ID NO: 332291 - DNA, 25 bp, Homo sapien
gacggcgggaacagagtgaccgagg

SEQ ID NO: 332292 - DNA, 25 bp, Homo sapien
agaggacggcgggaacagagtgacc

SEQ ID NO: 332293 - DNA, 25 bp, Homo sapien
tcagaggacggcgggaacagagtga

SEQ ID NO: 332294 - DNA, 25 bp, Homo sapien
acagagtgaccgagggggtggcctt

SEQ ID NO: 332295 - DNA, 25 bp, Homo sapien
caggacccttcacatcggctgggtt

SEQ ID NO: 332296 - DNA, 25 bp, Homo sapien
ccccagactttggggcaccgcagcc

SEQ ID NO: 332297 - DNA, 25 bp, Homo sapien
acaggacccttcacatcggctgggt

SEQ ID NO: 332298 - DNA, 25 bp, Homo sapien
gacccttcacatcggctgggttctt

SEQ ID NO: 332299 - DNA, 25 bp, Homo sapien
tgagttatgcttggattgaaacccc

SEQ ID NO: 332300 - DNA, 25 bp, Homo sapien
cgtcactgagttatgcttggattga

SEQ ID NO: 332301 - DNA, 25 bp, Homo sapien
taaaacggtgagctgggtcccgctg

SEQ ID NO: 332302 - DNA, 25 bp, Homo sapien
gctgccaaacacatgcgtcactgag

SEQ ID NO: 332303 - DNA, 25 bp, Homo sapien
tgacactttagttaaagtcagtgtc

SEQ ID NO: 332304 - DNA, 25 bp, Homo sapien
aatcttgacactttagttaaagtca

SEQ ID NO: 332305 - DNA, 25 bp, Homo sapien
tcttgacactttagttaaagtcagt

SEQ ID NO: 332306 - DNA, 25 bp, Homo sapien
cttgacactttagttaaagtcagtg

SEQ ID NO: 332307 - DNA, 25 bp, Homo sapien
cctcaggctggaccggctgcttcct

SEQ ID NO: 332308 - DNA, 25 bp, Homo sapien
aggctggaccggctgcttcctccag

SEQ ID NO: 332309 - DNA, 25 bp, Homo sapien
tcaggctggaccggctgcttcctcc

SEQ ID NO: 332310 - DNA, 25 bp, Homo sapien
gccctgctctgcgatgcagctgttg

SEQ ID NO: 332311 - DNA, 25 bp, Homo sapien
tggctcaccaggggcctcaaggccc

SEQ ID NO: 332312 - DNA, 25 bp, Homo sapien
caaggcccccctggcctgtccctgg

SEQ ID NO: 332313 - DNA, 25 bp, Homo sapien
ggcctcaaggcccccctggcctgtc

SEQ ID NO: 332314 - DNA, 25 bp, Homo sapien
gggcctggctcaccaggggcctcaa

SEQ ID NO: 332315 - DNA, 25 bp, Homo sapien
ggtcagaggtccttgtggcctgact

SEQ ID NO: 332316 - DNA, 25 bp, Homo sapien
tggcctgacttgcagtgtgggctcc

SEQ ID NO: 332317 - DNA, 25 bp, Homo sapien
agcagctgtcccattgcaccccagt

SEQ ID NO: 332318 - DNA, 25 bp, Homo sapien
tgggctccctagagagtggtgccct

SEQ ID NO: 332319 - DNA, 25 bp, Homo sapien
tcctgagcggtgagtgcatcatgtc

SEQ ID NO: 332320 - DNA, 25 bp, Homo sapien
tagatttcactcaaaggccagtagc

SEQ ID NO: 332321 - DNA, 25 bp, Homo sapien
aacatctcgcgaccctgtgctttgg

SEQ ID NO: 332322 - DNA, 25 bp, Homo sapien
aaatcaagctgacacacacgtccgt

SEQ ID NO: 332323 - DNA, 25 bp, Homo sapien
cgcgcctggcccatcttgaccattt

SEQ ID NO: 332324 - DNA, 25 bp, Homo sapien
aatcttagctcatggcaatctcttt

SEQ ID NO: 332325 - DNA, 25 bp, Homo sapien
tcatggcaatctctttctcccgggt

SEQ ID NO: 332326 - DNA, 25 bp, Homo sapien
gcctggcccatcttgaccattttta

SEQ ID NO: 332327 - DNA, 25 bp, Homo sapien
tctggatacctcctatggatgggac

SEQ ID NO: 332328 - DNA, 25 bp, Homo sapien
gctagttcccatctctatatttggg

SEQ ID NO: 332329 - DNA, 25 bp, Homo sapien
tggatgggaccatacactacttgtc

SEQ ID NO: 332330 - DNA, 25 bp, Homo sapien
tgctgcatgtgtaataccttcaggg

SEQ ID NO: 332331 - DNA, 25 bp, Homo sapien
tgccttaggtcctccatatccctgt

SEQ ID NO: 332332 - DNA, 25 bp, Homo sapien
ctgatggcttgtccagcgctgtgag

SEQ ID NO: 332333 - DNA, 25 bp, Homo sapien
ctgtcacgtttgaagccaccctttg

SEQ ID NO: 332334 - DNA, 25 bp, Homo sapien
tggtatttccccagcggctgatctg

SEQ ID NO: 332335 - DNA, 25 bp, Homo sapien
accatgcccgcctagcagcgtattt

SEQ ID NO: 332336 - DNA, 25 bp, Homo sapien
tccaaatatatgaggaggttctagt

SEQ ID NO: 332337 - DNA, 25 bp, Homo sapien
ctagcagcgtatttcttaatttcca

SEQ ID NO: 332338 - DNA, 25 bp, Homo sapien
ctgaactcaagatcctcccgacttg

SEQ ID NO: 332339 - DNA, 25 bp, Homo sapien
atgtggaagctgtagagggaggagc

SEQ ID NO: 332340 - DNA, 25 bp, Homo sapien
gctcgtcctggacccgctgtctcct

SEQ ID NO: 332341 - DNA, 25 bp, Homo sapien
gagggaggagcgttccgggagctcg

SEQ ID NO: 332342 - DNA, 25 bp, Homo sapien
aagctgtagagggaggagcgttccg

SEQ ID NO: 332343 - DNA, 25 bp, Homo sapien
ccccagagtccctgccttggccgtg

SEQ ID NO: 332344 - DNA, 25 bp, Homo sapien
cccccagagtccctgccttggccgt

SEQ ID NO: 332345 - DNA, 25 bp, Homo sapien
tgctcgtggagcacagtcacgtctc

SEQ ID NO: 332346 - DNA, 25 bp, Homo sapien
cctttgggtcagcaccctggtcagc

SEQ ID NO: 332347 - DNA, 25 bp, Homo sapien
gaagcactgggtcctggatggtaca

SEQ ID NO: 332348 - DNA, 25 bp, Homo sapien
gggaatggcactttctgctcgtgga

SEQ ID NO: 332349 - DNA, 25 bp, Homo sapien
tacatagtaagacccagtgtggttg

SEQ ID NO: 332350 - DNA, 25 bp, Homo sapien
gcaagaccaatttctgacccatgga

SEQ ID NO: 332351 - DNA, 25 bp, Homo sapien
ccagtacaggcggtgtagcacgtta

SEQ ID NO: 332352 - DNA, 25 bp, Homo sapien
tcaaggagacaacatacagaagtgc

SEQ ID NO: 332353 - DNA, 25 bp, Homo sapien
ccattgggtttttgctggcacgtag

SEQ ID NO: 332354 - DNA, 25 bp, Homo sapien
caacagggataacctggaggctcct

SEQ ID NO: 332355 - DNA, 25 bp, Homo sapien
tttttgctggcacgtagttccctac

SEQ ID NO: 332356 - DNA, 25 bp, Homo sapien
agcaacagggataacctggaggctc

SEQ ID NO: 332357 - DNA, 25 bp, Homo sapien
atctcttcatcacttagactctcca

SEQ ID NO: 332358 - DNA, 25 bp, Homo sapien
gatgaatctcttcatcacttagact

SEQ ID NO: 332359 - DNA, 25 bp, Homo sapien
ctggatgaatctcttcatcacttag

SEQ ID NO: 332360 - DNA, 25 bp, Homo sapien
cttcatcacttagactctccagcgt

SEQ ID NO: 332361 - DNA, 25 bp, Homo sapien
tctttgtgtctcagtgagcatctta

SEQ ID NO: 332362 - DNA, 25 bp, Homo sapien
agtgagcatcttaaaaacaggctat

SEQ ID NO: 332363 - DNA, 25 bp, Homo sapien
gtgtctcagtgagcatcttaaaaac

SEQ ID NO: 332364 - DNA, 25 bp, Homo sapien
tctcagtgagcatcttaaaaacagg

SEQ ID NO: 332365 - DNA, 25 bp, Homo sapien
tcgtggtaggcatactaaactcagg

SEQ ID NO: 332366 - DNA, 25 bp, Homo sapien
ggcatactaaactcaggttgtcctc

SEQ ID NO: 332367 - DNA, 25 bp, Homo sapien
atcttcacttcgtggtaggcatact

SEQ ID NO: 332368 - DNA, 25 bp, Homo sapien
tcacttcgtggtaggcatactaaac

SEQ ID NO: 332369 - DNA, 25 bp, Homo sapien
tggttgattaacaaacatggactgg

SEQ ID NO: 332370 - DNA, 25 bp, Homo sapien
gatccgtgccctggttgtttgtgac

SEQ ID NO: 332371 - DNA, 25 bp, Homo sapien
cacacactaagggtcaatggaagag

SEQ ID NO: 332372 - DNA, 25 bp, Homo sapien
tgtactagaggcatcacgcagcaac

SEQ ID NO: 332373 - DNA, 25 bp, Homo sapien
ctgctatcaaaccggtaacagccac

SEQ ID NO: 332374 - DNA, 25 bp, Homo sapien
aagaactgctatcaaaccggtaaca

SEQ ID NO: 332375 - DNA, 25 bp, Homo sapien
aactgctatcaaaccggtaacagcc

SEQ ID NO: 332376 - DNA, 25 bp, Homo sapien
agaactgctatcaaaccggtaacag

SEQ ID NO: 332377 - DNA, 25 bp, Homo sapien
tcgtggtaggcatactaaactcagg

SEQ ID NO: 332378 - DNA, 25 bp, Homo sapien
tcacttcgtggtaggcatactaaac

SEQ ID NO: 332379 - DNA, 25 bp, Homo sapien
ggcatactaaactcaggttgtcctc

SEQ ID NO: 332380 - DNA, 25 bp, Homo sapien
atcttcacttcgtggtaggcatact

SEQ ID NO: 332381 - DNA, 25 bp, Homo sapien
agtagaaaggcatcccatattcatg

SEQ ID NO: 332382 - DNA, 25 bp, Homo sapien
gattctagaaagtaaagaacataca

SEQ ID NO: 332383 - DNA, 25 bp, Homo sapien
acaaatttatatcagtcttgttaaa

SEQ ID NO: 332384 - DNA, 25 bp, Homo sapien
gttaaatctaactaatcagctgtca

SEQ ID NO: 332385 - DNA, 25 bp, Homo sapien
cagctgatcttcaatgaaggtacca

SEQ ID NO: 332386 - DNA, 25 bp, Homo sapien
agagtcagctgatcttcaatgaagg

SEQ ID NO: 332387 - DNA, 25 bp, Homo sapien
gatcttcaatgaaggtaccaagaat

SEQ ID NO: 332388 - DNA, 25 bp, Homo sapien
gtcagctgatcttcaatgaaggtac

SEQ ID NO: 332389 - DNA, 25 bp, Homo sapien
attttaaactcaggcggtcctcagg

SEQ ID NO: 332390 - DNA, 25 bp, Homo sapien
tcattgtcttcctcacttgatggca

SEQ ID NO: 332391 - DNA, 25 bp, Homo sapien
tcctcacttgatggcagaaatttta

SEQ ID NO: 332392 - DNA, 25 bp, Homo sapien
gcagaaattttaaactcaggcggtc

SEQ ID NO: 332393 - DNA, 25 bp, Homo sapien
ggccatggattggagcatttctaag

SEQ ID NO: 332394 - DNA, 25 bp, Homo sapien
ccggccatggattggagcatttcta

SEQ ID NO: 332395 - DNA, 25 bp, Homo sapien
atttctaaggcttgaggtactcatg

SEQ ID NO: 332396 - DNA, 25 bp, Homo sapien
tgaggtactcatgttactaaataca

SEQ ID NO: 332397 - DNA, 25 bp, Homo sapien
tgggcatgcgggtccacatttttgg

SEQ ID NO: 332398 - DNA, 25 bp, Homo sapien
tagacagggaatgatacacactggg

SEQ ID NO: 332399 - DNA, 25 bp, Homo sapien
tcatctaaatgacacggctgtttcc

SEQ ID NO: 332400 - DNA, 25 bp, Homo sapien
agtcccctgcgaaccatcacttaga

SEQ ID NO: 332401 - DNA, 25 bp, Homo sapien
aataagctaccttaagagatggaag

SEQ ID NO: 332402 - DNA, 25 bp, Homo sapien
gaaaaacaatctgacccttagctgg

SEQ ID NO: 332403 - DNA, 25 bp, Homo sapien
tcatttaggtaccaaaccggccaga

SEQ ID NO: 332404 - DNA, 25 bp, Homo sapien
aattaaattaggagccgggcgcgat

SEQ ID NO: 332405 - DNA, 25 bp, Homo sapien
tcaacgacaaagacaggaggcagag

SEQ ID NO: 332406 - DNA, 25 bp, Homo sapien
tgtgccagagggtaaacggcacccg

SEQ ID NO: 332407 - DNA, 25 bp, Homo sapien
tgccagagggtaaacggcacccgtg

SEQ ID NO: 332408 - DNA, 25 bp, Homo sapien
aggtgtgccagagggtaaacggcac

SEQ ID NO: 332409 - DNA, 25 bp, Homo sapien
agaggtgtgccagagggtaaacggc

SEQ ID NO: 332410 - DNA, 25 bp, Homo sapien
cagtctcataaatatcagtatcaga

SEQ ID NO: 332411 - DNA, 25 bp, Homo sapien
ttcataacagggtgcgtccttcccc

SEQ ID NO: 332412 - DNA, 25 bp, Homo sapien
tatcagtatcagattcataacaggg

SEQ ID NO: 332413 - DNA, 25 bp, Homo sapien
cagccacagtctcataaatatcagt

SEQ ID NO: 332414 - DNA, 25 bp, Homo sapien
gccacagtgggagttgatacaacag

SEQ ID NO: 332415 - DNA, 25 bp, Homo sapien
gagttgatacaacaggtcagtatat

SEQ ID NO: 332416 - DNA, 25 bp, Homo sapien
ggccagccacagtgggagttgatac

SEQ ID NO: 332417 - DNA, 25 bp, Homo sapien
cagtgggagttgatacaacaggtca

SEQ ID NO: 332418 - DNA, 25 bp, Homo sapien
caaactagctggtctatgaggtcag

SEQ ID NO: 332419 - DNA, 25 bp, Homo sapien
gaaattgtaactgtgctgccctagc

SEQ ID NO: 332420 - DNA, 25 bp, Homo sapien
tgccatcaaagagcacagttggagc

SEQ ID NO: 332421 - DNA, 25 bp, Homo sapien
gcctcagccttcagcgaaattgtaa

SEQ ID NO: 332422 - DNA, 25 bp, Homo sapien
gcctgggtgacaaaggtgcaactgt

SEQ ID NO: 332423 - DNA, 25 bp, Homo sapien
tccttgtgtaactgagcagtactcc

SEQ ID NO: 332424 - DNA, 25 bp, Homo sapien
tcctgtgacctgtatccatagtttc

SEQ ID NO: 332425 - DNA, 25 bp, Homo sapien
actgtatgcacagaccacatgggtc

SEQ ID NO: 332426 - DNA, 25 bp, Homo sapien
aatgttttgaagatcatccctcctg

SEQ ID NO: 332427 - DNA, 25 bp, Homo sapien
cctgggcgacagagtgagactccat

SEQ ID NO: 332428 - DNA, 25 bp, Homo sapien
acggtgagccaagatcgagccattg

SEQ ID NO: 332429 - DNA, 25 bp, Homo sapien
cactccagcctgggcgacagagtga

SEQ ID NO: 332430 - DNA, 25 bp, Homo sapien
tgggagacagaggttacggtgagcc

SEQ ID NO: 332431 - DNA, 25 bp, Homo sapien
agggtttactgggtacagcgagaag

SEQ ID NO: 332432 - DNA, 25 bp, Homo sapien
tggctgacaaagatatttattgagg

SEQ ID NO: 332433 - DNA, 25 bp, Homo sapien
ggctgacaaagatatttattgaggg

SEQ ID NO: 332434 - DNA, 25 bp, Homo sapien
ttattgagggtttactgggtacagc

SEQ ID NO: 332435 - DNA, 25 bp, Homo sapien
atggcttgggatgcagagagagacc

SEQ ID NO: 332436 - DNA, 25 bp, Homo sapien
ggctgaatggcttgggatgcagaga

SEQ ID NO: 332437 - DNA, 25 bp, Homo sapien
agagagagacccctcccctgggatc

SEQ ID NO: 332438 - DNA, 25 bp, Homo sapien
gcttgggatgcagagagagacccct

SEQ ID NO: 332439 - DNA, 25 bp, Homo sapien
atgaacattctgcaggggccactga

SEQ ID NO: 332440 - DNA, 25 bp, Homo sapien
tgaacattctgcaggggccactgac

SEQ ID NO: 332441 - DNA, 25 bp, Homo sapien
tatgaacattctgcaggggccactg

SEQ ID NO: 332442 - DNA, 25 bp, Homo sapien
ctatgaacattctgcaggggccact

SEQ ID NO: 332443 - DNA, 25 bp, Homo sapien
cttcttgcataacctggcagctgta

SEQ ID NO: 332444 - DNA, 25 bp, Homo sapien
tcccttcttgcataacctggcagct

SEQ ID NO: 332445 - DNA, 25 bp, Homo sapien
ttctccacggtgctcccttcttgca

SEQ ID NO: 332446 - DNA, 25 bp, Homo sapien
ggtgctcccttcttgcataacctgg

SEQ ID NO: 332447 - DNA, 25 bp, Homo sapien
tgctctgtttggagggcgtggtctt

SEQ ID NO: 332448 - DNA, 25 bp, Homo sapien
ctctgtttggagggcgtggtcttct

SEQ ID NO: 332449 - DNA, 25 bp, Homo sapien
tgtttggagggcgtggtcttctcca

SEQ ID NO: 332450 - DNA, 25 bp, Homo sapien
tctgtttggagggcgtggtcttctc

SEQ ID NO: 332451 - DNA, 25 bp, Homo sapien
tcccggataaagttattcatgagac

SEQ ID NO: 332452 - DNA, 25 bp, Homo sapien
tcaagattcccggataaagttattc

SEQ ID NO: 332453 - DNA, 25 bp, Homo sapien
caccatcaagattcccggataaagt

SEQ ID NO: 332454 - DNA, 25 bp, Homo sapien
ggataaagttattcatgagacacac

SEQ ID NO: 332455 - DNA, 25 bp, Homo sapien
aacagaatgaccgacggggtagtct

SEQ ID NO: 332456 - DNA, 25 bp, Homo sapien
gaccgacggggtagtcttgggctga

SEQ ID NO: 332457 - DNA, 25 bp, Homo sapien
cagaatgaccgacggggtagtcttg

SEQ ID NO: 332458 - DNA, 25 bp, Homo sapien
caggaacagaatgaccgacggggta

SEQ ID NO: 332459 - DNA, 25 bp, Homo sapien
tgtctaaagtctctgggagggttca

SEQ ID NO: 332460 - DNA, 25 bp, Homo sapien
actgccaaacacatgcttcactgaa

SEQ ID NO: 332461 - DNA, 25 bp, Homo sapien
ctaaaacagtgagctgggtcccact

SEQ ID NO: 332462 - DNA, 25 bp, Homo sapien
gggtcccactgccaaacacatgctt

SEQ ID NO: 332463 - DNA, 25 bp, Homo sapien
agctgggtcccactgccaaacacat

SEQ ID NO: 332464 - DNA, 25 bp, Homo sapien
cagggccagcatctggcgccagtcc

SEQ ID NO: 332465 - DNA, 25 bp, Homo sapien
ccagggccagcatctggcgccagtc

SEQ ID NO: 332466 - DNA, 25 bp, Homo sapien
agggccagcatctggcgccagtcca

SEQ ID NO: 332467 - DNA, 25 bp, Homo sapien
gtgaggggcacagggctgcagtgtg

SEQ ID NO: 332468 - DNA, 25 bp, Homo sapien
ggggcacagggctgcagtgtgtagg

SEQ ID NO: 332469 - DNA, 25 bp, Homo sapien
aggggcacagggctgcagtgtgtag

SEQ ID NO: 332470 - DNA, 25 bp, Homo sapien
tgctgggtgtgaggggcacagggct

SEQ ID NO: 332471 - DNA, 25 bp, Homo sapien
tctgtgcctgttctctatctgaggc

SEQ ID NO: 332472 - DNA, 25 bp, Homo sapien
tgctgatggcaacgctgggcccagt

SEQ ID NO: 332473 - DNA, 25 bp, Homo sapien
ttggagtcaccccagcatatgtccc

SEQ ID NO: 332474 - DNA, 25 bp, Homo sapien
ggtggccagtatcccagtagtgtcc

SEQ ID NO: 332475 - DNA, 25 bp, Homo sapien
acgttctagacgattctcttgtctc

SEQ ID NO: 332476 - DNA, 25 bp, Homo sapien
ctcccacgttctagacgattctctt

SEQ ID NO: 332477 - DNA, 25 bp, Homo sapien
tgcctcccacgttctagacgattct

SEQ ID NO: 332478 - DNA, 25 bp, Homo sapien
ccacgttctagacgattctcttgtc

SEQ ID NO: 332479 - DNA, 25 bp, Homo sapien
tactgggtgcaagttccctgccagg

SEQ ID NO: 332480 - DNA, 25 bp, Homo sapien
gaagctggtctagtaattggtattg

SEQ ID NO: 332481 - DNA, 25 bp, Homo sapien
tgccaggggttcagaccagagtgtt

SEQ ID NO: 332482 - DNA, 25 bp, Homo sapien
agtgtttctaccttagaagctggtc

SEQ ID NO: 332483 - DNA, 25 bp, Homo sapien
aaaaaacatgtaaggtcaggcgcgg

SEQ ID NO: 332484 - DNA, 25 bp, Homo sapien
gtacctggcttccttgttatgaaca

SEQ ID NO: 332485 - DNA, 25 bp, Homo sapien
ttcacatatacccttgtacctggct

SEQ ID NO: 332486 - DNA, 25 bp, Homo sapien
gccaagatagcacagagttcacata

SEQ ID NO: 332487 - DNA, 25 bp, Homo sapien
gccacccgcccagcttggctaggtt

SEQ ID NO: 332488 - DNA, 25 bp, Homo sapien
ctagttattttattactgggtagag

SEQ ID NO: 332489 - DNA, 25 bp, Homo sapien
ccatctatgactctcagtgtccttg

SEQ ID NO: 332490 - DNA, 25 bp, Homo sapien
tctcaattcctaggcgcaaatgatc

SEQ ID NO: 332491 - DNA, 25 bp, Homo sapien
tgcggctcatgtcgcctgagaacag

SEQ ID NO: 332492 - DNA, 25 bp, Homo sapien
atccagggcactgtactgctccacg

SEQ ID NO: 332493 - DNA, 25 bp, Homo sapien
gctgtgcccgtattcccacatgcgg

SEQ ID NO: 332494 - DNA, 25 bp, Homo sapien
gggcactgtactgctccacgctgtg

SEQ ID NO: 332495 - DNA, 25 bp, Homo sapien
cacctggagacagcgtggggaaggg

SEQ ID NO: 332496 - DNA, 25 bp, Homo sapien
ccacctggagacagcgtggggaagg

SEQ ID NO: 332497 - DNA, 25 bp, Homo sapien
atggctttccttggaggcctcgtgg

SEQ ID NO: 332498 - DNA, 25 bp, Homo sapien
ggctttccttggaggcctcgtgggc

SEQ ID NO: 332499 - DNA, 25 bp, Homo sapien
tggctttccttggaggcctcgtggg

SEQ ID NO: 332500 - DNA, 25 bp, Homo sapien
ggatccagtgatctcccaggacaaa

SEQ ID NO: 332501 - DNA, 25 bp, Homo sapien
tggaaaaagtgtcgtcctgcagcac

SEQ ID NO: 332502 - DNA, 25 bp, Homo sapien
gcagcactccacctgaatgagggat

SEQ ID NO: 332503 - DNA, 25 bp, Homo sapien
ttgccaggaacacccgaaggctgag

SEQ ID NO: 332504 - DNA, 25 bp, Homo sapien
ccattttaagttcacattgtagcgt

SEQ ID NO: 332505 - DNA, 25 bp, Homo sapien
cattttaagttcacattgtagcgta

SEQ ID NO: 332506 - DNA, 25 bp, Homo sapien
attttaagttcacattgtagcgtac

SEQ ID NO: 332507 - DNA, 25 bp, Homo sapien
acatccacaacctgaggtccgtgac

SEQ ID NO: 332508 - DNA, 25 bp, Homo sapien
tgcccaatcccccatagtcctgatg

SEQ ID NO: 332509 - DNA, 25 bp, Homo sapien
cccatagtcctgatgagctcccaga

SEQ ID NO: 332510 - DNA, 25 bp, Homo sapien
cccgagagcgtgaagcaggtctgcc

SEQ ID NO: 332511 - DNA, 25 bp, Homo sapien
cttcaggtggcacttgttggctgtg

SEQ ID NO: 332512 - DNA, 25 bp, Homo sapien
tgtcctcatcattggggttgagttt

SEQ ID NO: 332513 - DNA, 25 bp, Homo sapien
cattggggttgagtttgaaggtgcc

SEQ ID NO: 332514 - DNA, 25 bp, Homo sapien
gagtttgaaggtgccctgggcccac

SEQ ID NO: 332515 - DNA, 25 bp, Homo sapien
tcctgatgactgactgtccctgtcc

SEQ ID NO: 332516 - DNA, 25 bp, Homo sapien
cttattcctgatgactgactgtccc

SEQ ID NO: 332517 - DNA, 25 bp, Homo sapien
ccaggagctgagtcctggaagtgca

SEQ ID NO: 332518 - DNA, 25 bp, Homo sapien
aggagctgagtcctggaagtgcacc

SEQ ID NO: 332519 - DNA, 25 bp, Homo sapien
cacaggtgctggtcgtaggctggat

SEQ ID NO: 332520 - DNA, 25 bp, Homo sapien
tccatgccccggctgtaggctctgc

SEQ ID NO: 332521 - DNA, 25 bp, Homo sapien
ctggtcgtaggctggatgtgttgaa

SEQ ID NO: 332522 - DNA, 25 bp, Homo sapien
ccatgccccggctgtaggctctgct

SEQ ID NO: 332523 - DNA, 25 bp, Homo sapien
gaccatcctaactgggaagacaaaa

SEQ ID NO: 332524 - DNA, 25 bp, Homo sapien
gaacagtgcctcttgcagagtctcc

SEQ ID NO: 332525 - DNA, 25 bp, Homo sapien
gggcatgggaccatcctaactggga

SEQ ID NO: 332526 - DNA, 25 bp, Homo sapien
catgggaccatcctaactgggaaga

SEQ ID NO: 332527 - DNA, 25 bp, Homo sapien
ataggcataagccaaggcgctggcc

SEQ ID NO: 332528 - DNA, 25 bp, Homo sapien
taggcataagccaaggcgctggcca

SEQ ID NO: 332529 - DNA, 25 bp, Homo sapien
ctatgtgatagccttgttttgagca

SEQ ID NO: 332530 - DNA, 25 bp, Homo sapien
aaactcagggttgggaggcccagat

SEQ ID NO: 332531 - DNA, 25 bp, Homo sapien
tgtggaagggactctacaatggcca

SEQ ID NO: 332532 - DNA, 25 bp, Homo sapien
caatggccaatagggacatatgtcc

SEQ ID NO: 332533 - DNA, 25 bp, Homo sapien
catgactggcctggttgtttccttt

SEQ ID NO: 332534 - DNA, 25 bp, Homo sapien
gctcacttggtgtctttgttcaaca

SEQ ID NO: 332535 - DNA, 25 bp, Homo sapien
ggcaaccttgtgttgagctagtgta

SEQ ID NO: 332536 - DNA, 25 bp, Homo sapien
tatattacaggattgtggcaacctt

SEQ ID NO: 332537 - DNA, 25 bp, Homo sapien
ccacataaagttttgcgcctctcca

SEQ ID NO: 332538 - DNA, 25 bp, Homo sapien
accacataaagttttgcgcctctcc

SEQ ID NO: 332539 - DNA, 25 bp, Homo sapien
gggtcttgctatgcttagcagactg

SEQ ID NO: 332540 - DNA, 25 bp, Homo sapien
gcctgctttttgcaagtgagtaata

SEQ ID NO: 332541 - DNA, 25 bp, Homo sapien
gctatgcttagcagactggtctcga

SEQ ID NO: 332542 - DNA, 25 bp, Homo sapien
tccacccaacgtgacagcacagatg

SEQ ID NO: 332543 - DNA, 25 bp, Homo sapien
taaagtaaatccatgaggtccagtt

SEQ ID NO: 332544 - DNA, 25 bp, Homo sapien
gtaaatccatgaggtccagtttttc

SEQ ID NO: 332545 - DNA, 25 bp, Homo sapien
aatccatgaggtccagtttttcctt

SEQ ID NO: 332546 - DNA, 25 bp, Homo sapien
ttcctaaagtaaatccatgaggtcc

SEQ ID NO: 332547 - DNA, 25 bp, Homo sapien
acaatcaaagtgtccagaatgggca

SEQ ID NO: 332548 - DNA, 25 bp, Homo sapien
ttctgagtttttgatccagacccag

SEQ ID NO: 332549 - DNA, 25 bp, Homo sapien
agctctccaaccacgtattttctga

SEQ ID NO: 332550 - DNA, 25 bp, Homo sapien
tgagtttttgatccagacccagatg

SEQ ID NO: 332551 - DNA, 25 bp, Homo sapien
tctagcagacttttctggtagtctt

SEQ ID NO: 332552 - DNA, 25 bp, Homo sapien
agctgatctctcagcagaaaccgta

SEQ ID NO: 332553 - DNA, 25 bp, Homo sapien
tcaccaaagttgaaatgaaggaaaa

SEQ ID NO: 332554 - DNA, 25 bp, Homo sapien
tgatctctcagcagaaaccgtacaa

SEQ ID NO: 332555 - DNA, 25 bp, Homo sapien
tccaatacacataattgtcagattc

SEQ ID NO: 332556 - DNA, 25 bp, Homo sapien
tgtacacatggttgtcaggttcctt

SEQ ID NO: 332557 - DNA, 25 bp, Homo sapien
acatggttgtcaggttccttggagg

SEQ ID NO: 332558 - DNA, 25 bp, Homo sapien
ctggtgtacacatggttgtcaggtt

SEQ ID NO: 332559 - DNA, 25 bp, Homo sapien
tacacatggttgtcaggttccttgg

SEQ ID NO: 332560 - DNA, 25 bp, Homo sapien
tgaaggctgacccaatattgctgcc

SEQ ID NO: 332561 - DNA, 25 bp, Homo sapien
gcagcctccacctgaggtctattcc

SEQ ID NO: 332562 - DNA, 25 bp, Homo sapien
cccataacacctaccccacaatcat

SEQ ID NO: 332563 - DNA, 25 bp, Homo sapien
gaggtctattccgtgcccataacac

SEQ ID NO: 332564 - DNA, 25 bp, Homo sapien
caagggcttcttcgaataagtcagg

SEQ ID NO: 332565 - DNA, 25 bp, Homo sapien
cagacgcagttggatagagaaccca

SEQ ID NO: 332566 - DNA, 25 bp, Homo sapien
tacacgcatgaccactgcgtctggc

SEQ ID NO: 332567 - DNA, 25 bp, Homo sapien
tcaattccaagaagccacggctctc

SEQ ID NO: 332568 - DNA, 25 bp, Homo sapien
aagacagtgacccatgacaccagga

SEQ ID NO: 332569 - DNA, 25 bp, Homo sapien
ggatctgccccacctctgtatctgg

SEQ ID NO: 332570 - DNA, 25 bp, Homo sapien
gaaggctgtgcaaaccacttcctgc

SEQ ID NO: 332571 - DNA, 25 bp, Homo sapien
ccttgtctgtttcaacgggctggga

SEQ ID NO: 332572 - DNA, 25 bp, Homo sapien
ccggaaatcctcgtgccctgagtgg

SEQ ID NO: 332573 - DNA, 25 bp, Homo sapien
acccggaaatcctcgtgccctgagt

SEQ ID NO: 332574 - DNA, 25 bp, Homo sapien
ctgaccacaggaatcacccggaaat

SEQ ID NO: 332575 - DNA, 25 bp, Homo sapien
aagctgaccacaggaatcacccgga

SEQ ID NO: 332576 - DNA, 25 bp, Homo sapien
gacaggaaggtgaataagaactcat

SEQ ID NO: 332577 - DNA, 25 bp, Homo sapien
ggccgacaggaaggtgaataagaac

SEQ ID NO: 332578 - DNA, 25 bp, Homo sapien
agcttcatgtggaggccgacaggaa

SEQ ID NO: 332579 - DNA, 25 bp, Homo sapien
gggagcttcatgtggaggccgacag

SEQ ID NO: 332580 - DNA, 25 bp, Homo sapien
gagccaagcactgggtacacatgga

SEQ ID NO: 332581 - DNA, 25 bp, Homo sapien
aaacgataccatttgtggccaggca

SEQ ID NO: 332582 - DNA, 25 bp, Homo sapien
gggcaagcgctgaaaacctacatat

SEQ ID NO: 332583 - DNA, 25 bp, Homo sapien
tacatattgggtcctatctgggtgc

SEQ ID NO: 332584 - DNA, 25 bp, Homo sapien
caactaatccaacaaaacttgggca

SEQ ID NO: 332585 - DNA, 25 bp, Homo sapien
aaggtgttcatctgacatataccag

SEQ ID NO: 332586 - DNA, 25 bp, Homo sapien
aggtgttcatctgacatataccaga

SEQ ID NO: 332587 - DNA, 25 bp, Homo sapien
gggaaactcttagacactactggtg

SEQ ID NO: 332588 - DNA, 25 bp, Homo sapien
tacactgcgagatgtaggtgcgtgc

SEQ ID NO: 332589 - DNA, 25 bp, Homo sapien
taaatgggcgtacacactatgagca

SEQ ID NO: 332590 - DNA, 25 bp, Homo sapien
tacagaacaagacacaacgagggaa

SEQ ID NO: 332591 - DNA, 25 bp, Homo sapien
gcttaaagctctcagcctagggccc

SEQ ID NO: 332592 - DNA, 25 bp, Homo sapien
tcagcatgaccagggatcgaagacc

SEQ ID NO: 332593 - DNA, 25 bp, Homo sapien
tcaacctgagcgtgaggccttgctg

SEQ ID NO: 332594 - DNA, 25 bp, Homo sapien
gagagatgcctgtgccatcagagaa

SEQ ID NO: 332595 - DNA, 25 bp, Homo sapien
ctgccccttgggagtccactgtgac

SEQ ID NO: 332596 - DNA, 25 bp, Homo sapien
actgtgactgcagtccagtggggtc

SEQ ID NO: 332597 - DNA, 25 bp, Homo sapien
cccttgggagtccactgtgactgca

SEQ ID NO: 332598 - DNA, 25 bp, Homo sapien
gtgactgcagtccagtggggtcaat

SEQ ID NO: 332599 - DNA, 25 bp, Homo sapien
ggcatcctgtagcggcaggcagtct

SEQ ID NO: 332600 - DNA, 25 bp, Homo sapien
caggcagtctgggtggtccacgggt

SEQ ID NO: 332601 - DNA, 25 bp, Homo sapien
ccacgggtgtgagcttcagcaggtc

SEQ ID NO: 332602 - DNA, 25 bp, Homo sapien
atgccggaaagaagtcctgggagat

SEQ ID NO: 332603 - DNA, 25 bp, Homo sapien
ctcagagaccagctttgtcccccac

SEQ ID NO: 332604 - DNA, 25 bp, Homo sapien
agcagcaagaacaggtgacacacag

SEQ ID NO: 332605 - DNA, 25 bp, Homo sapien
tgcaggaagccaaagtgggtccaca

SEQ ID NO: 332606 - DNA, 25 bp, Homo sapien
tggtcaatgggctgctacagcagag

SEQ ID NO: 332607 - DNA, 25 bp, Homo sapien
ctgtgaaccctgagaattcagggtg

SEQ ID NO: 332608 - DNA, 25 bp, Homo sapien
ttcagggtgaggagctcactcttgc

SEQ ID NO: 332609 - DNA, 25 bp, Homo sapien
gaattcagggtgaggagctcactct

SEQ ID NO: 332610 - DNA, 25 bp, Homo sapien
tgagaattcagggtgaggagctcac

SEQ ID NO: 332611 - DNA, 25 bp, Homo sapien
ggcaccaagttaacttcttcgcatg

SEQ ID NO: 332612 - DNA, 25 bp, Homo sapien
atctctccggtttgctgggctctca

SEQ ID NO: 332613 - DNA, 25 bp, Homo sapien
tgatgtgggcagctgatctctccgg

SEQ ID NO: 332614 - DNA, 25 bp, Homo sapien
gcactcctcgccactgatgtgggca

SEQ ID NO: 332615 - DNA, 25 bp, Homo sapien
cataatggtgactacgtaaggagtt

SEQ ID NO: 332616 - DNA, 25 bp, Homo sapien
catttccagctcacttcgtaggcga

SEQ ID NO: 332617 - DNA, 25 bp, Homo sapien
tggaacctacaagatgtgacctcac

SEQ ID NO: 332618 - DNA, 25 bp, Homo sapien
gacttatggaaaggaggagcttaca

SEQ ID NO: 332619 - DNA, 25 bp, Homo sapien
gttttccccaagtcgcctcgcagat

SEQ ID NO: 332620 - DNA, 25 bp, Homo sapien
tcctgggccttgggacgcgcttcct

SEQ ID NO: 332621 - DNA, 25 bp, Homo sapien
ggatggccgtagctgtttctccaga

SEQ ID NO: 332622 - DNA, 25 bp, Homo sapien
gctgggatggccgtagctgtttctc

SEQ ID NO: 332623 - DNA, 25 bp, Homo sapien
tcttgaagatgcacctctcggagcc

SEQ ID NO: 332624 - DNA, 25 bp, Homo sapien
tataattcccacgagaaggctgaca

SEQ ID NO: 332625 - DNA, 25 bp, Homo sapien
ttctgactagaatgacgcagcccag

SEQ ID NO: 332626 - DNA, 25 bp, Homo sapien
aacaccgggacgatgccttgaaggc

SEQ ID NO: 332627 - DNA, 25 bp, Homo sapien
tgtcctaggccagttggtgcttccg

SEQ ID NO: 332628 - DNA, 25 bp, Homo sapien
tgtaaagaaccaacccagtgaggag

SEQ ID NO: 332629 - DNA, 25 bp, Homo sapien
gagcagctgaccctcatggatgcgg

SEQ ID NO: 332630 - DNA, 25 bp, Homo sapien
tcctgggcaacacgcattaacaatg

SEQ ID NO: 332631 - DNA, 25 bp, Homo sapien
catcggctttcaggatcggcatctg

SEQ ID NO: 332632 - DNA, 25 bp, Homo sapien
gctgttcaagaaggtggtgctccac

SEQ ID NO: 332633 - DNA, 25 bp, Homo sapien
cacaaggaaagtgcaccggtacgga

SEQ ID NO: 332634 - DNA, 25 bp, Homo sapien
ggttctaggccatgatgcattcagg

SEQ ID NO: 332635 - DNA, 25 bp, Homo sapien
tctgtgcagcaacccaataggtcag

SEQ ID NO: 332636 - DNA, 25 bp, Homo sapien
tcagggttgacctagggactcacag

SEQ ID NO: 332637 - DNA, 25 bp, Homo sapien
taggtcagctacacaagacgtgggc

SEQ ID NO: 332638 - DNA, 25 bp, Homo sapien
taggcaaggatttccaactcaggac

SEQ ID NO: 332639 - DNA, 25 bp, Homo sapien
cagtctccacgaaatacagataaac

SEQ ID NO: 332640 - DNA, 25 bp, Homo sapien
gccatcagtctccacgaaatacaga

SEQ ID NO: 332641 - DNA, 25 bp, Homo sapien
gatcttcccagaccttctgacacct

SEQ ID NO: 332642 - DNA, 25 bp, Homo sapien
tctccacgaaatacagataaacttt

SEQ ID NO: 332643 - DNA, 25 bp, Homo sapien
gcaaaacttgtatctatgcacgcag

SEQ ID NO: 332644 - DNA, 25 bp, Homo sapien
taaatccaatcctggagccgcaaag

SEQ ID NO: 332645 - DNA, 25 bp, Homo sapien
tgttcacaggcagtggccaacgtag

SEQ ID NO: 332646 - DNA, 25 bp, Homo sapien
gcaaagctcctataagaaaagcggg

SEQ ID NO: 332647 - DNA, 25 bp, Homo sapien
gcagtggaatcctcttcggccgcag

SEQ ID NO: 332648 - DNA, 25 bp, Homo sapien
taaagaaactgcagcacgcagtgga

SEQ ID NO: 332649 - DNA, 25 bp, Homo sapien
tgcagcaacgtgcagaaacctggag

SEQ ID NO: 332650 - DNA, 25 bp, Homo sapien
ctcttcggccgcagaaattcatgaa

SEQ ID NO: 332651 - DNA, 25 bp, Homo sapien
gaaaggactccctatcagtaagtgg

SEQ ID NO: 332652 - DNA, 25 bp, Homo sapien
gataagtggctagctggatgcagaa

SEQ ID NO: 332653 - DNA, 25 bp, Homo sapien
tcccacaagaaaacagggtgcgcat

SEQ ID NO: 332654 - DNA, 25 bp, Homo sapien
gatataaacccgcacaactgaaacc

SEQ ID NO: 332655 - DNA, 25 bp, Homo sapien
gttcagaccccctggagagtagtgt

SEQ ID NO: 332656 - DNA, 25 bp, Homo sapien
gagtagtgtggacatttctcaaaga

SEQ ID NO: 332657 - DNA, 25 bp, Homo sapien
aaatgcaggtccactgttgggggaa

SEQ ID NO: 332658 - DNA, 25 bp, Homo sapien
gggaaatgcaaactagttcagaccc

SEQ ID NO: 332659 - DNA, 25 bp, Homo sapien
cagagccgtagtccattatgaacaa

SEQ ID NO: 332660 - DNA, 25 bp, Homo sapien
taaagacatggaatcggccttggtg

SEQ ID NO: 332661 - DNA, 25 bp, Homo sapien
gagctcacagagatgctagacactg

SEQ ID NO: 332662 - DNA, 25 bp, Homo sapien
cttaccagaaacacggacagagccg

SEQ ID NO: 332663 - DNA, 25 bp, Homo sapien
gctgctccacaggtacatactggga

SEQ ID NO: 332664 - DNA, 25 bp, Homo sapien
tgaagggataaagaagctgctccac

SEQ ID NO: 332665 - DNA, 25 bp, Homo sapien
tactgggatactcttcagacagaaa

SEQ ID NO: 332666 - DNA, 25 bp, Homo sapien
aatgaaatcatatcgtggggaacca

SEQ ID NO: 332667 - DNA, 25 bp, Homo sapien
gaaacacacttcagctctaacactt

SEQ ID NO: 332668 - DNA, 25 bp, Homo sapien
gataaaggaaccacagtatatatac

SEQ ID NO: 332669 - DNA, 25 bp, Homo sapien
gatgaagggataaaggaaccacagt

SEQ ID NO: 332670 - DNA, 25 bp, Homo sapien
aggaaacacacttcagctctaacac

SEQ ID NO: 332671 - DNA, 25 bp, Homo sapien
gcttttgtgtgaatcagcgatggtg

SEQ ID NO: 332672 - DNA, 25 bp, Homo sapien
tgaatcagcgatggtgagaatcttc

SEQ ID NO: 332673 - DNA, 25 bp, Homo sapien
ttgtgtgaatcagcgatggtgagaa

SEQ ID NO: 332674 - DNA, 25 bp, Homo sapien
tccacctcacgtcttcaggtcctcc

SEQ ID NO: 332675 - DNA, 25 bp, Homo sapien
gagctagagtgagagcagcaccgtg

SEQ ID NO: 332676 - DNA, 25 bp, Homo sapien
caagcgagatctaccacatgggtga

SEQ ID NO: 332677 - DNA, 25 bp, Homo sapien
cctatgaaggtttagagatgctggg

SEQ ID NO: 332678 - DNA, 25 bp, Homo sapien
gcttcataggtggatgggaacctat

SEQ ID NO: 332679 - DNA, 25 bp, Homo sapien
tgtctcgcttcacgccggtggtgac

SEQ ID NO: 332680 - DNA, 25 bp, Homo sapien
tcacgccggtggtgacggtgacgtc

SEQ ID NO: 332681 - DNA, 25 bp, Homo sapien
ttcacgccggtggtgacggtgacgt

SEQ ID NO: 332682 - DNA, 25 bp, Homo sapien
cactgtctcgcttcacgccggtggt

SEQ ID NO: 332683 - DNA, 25 bp, Homo sapien
agctgaagaagtcaaagtctgtgtt

SEQ ID NO: 332684 - DNA, 25 bp, Homo sapien
aagaagtcaaagtctgtgttctgga

SEQ ID NO: 332685 - DNA, 25 bp, Homo sapien
ctgcgtagctgaagaagtcaaagtc

SEQ ID NO: 332686 - DNA, 25 bp, Homo sapien
agtcaaagtctgtgttctggacaaa

SEQ ID NO: 332687 - DNA, 25 bp, Homo sapien
cccttgccatgggtcttttgacctc

SEQ ID NO: 332688 - DNA, 25 bp, Homo sapien
ctcagctcacatgcctccccagatc

SEQ ID NO: 332689 - DNA, 25 bp, Homo sapien
catgggtcttttgacctcagctcac

SEQ ID NO: 332690 - DNA, 25 bp, Homo sapien
tgccatgggtcttttgacctcagct

SEQ ID NO: 332691 - DNA, 25 bp, Homo sapien
gggaaggtgggtgcgtgcagtggag

SEQ ID NO: 332692 - DNA, 25 bp, Homo sapien
tgggtgcgtgcagtggaggcaggat

SEQ ID NO: 332693 - DNA, 25 bp, Homo sapien
gttggggggtgagcgtgttgttgat

SEQ ID NO: 332694 - DNA, 25 bp, Homo sapien
ttggaggtgtcggtcatgtacagat

SEQ ID NO: 332695 - DNA, 25 bp, Homo sapien
gatggcgatagtgatgcagaggtgg

SEQ ID NO: 332696 - DNA, 25 bp, Homo sapien
aggtgtcggtcatgtacagatggtc

SEQ ID NO: 332697 - DNA, 25 bp, Homo sapien
tgctctaccgtgtcgaccccattta

SEQ ID NO: 332698 - DNA, 25 bp, Homo sapien
aacaggctgctgatgtcggcctcaa

SEQ ID NO: 332699 - DNA, 25 bp, Homo sapien
acaggctgctgatgtcggcctcaaa

SEQ ID NO: 332700 - DNA, 25 bp, Homo sapien
caaaggggaggtagcccccttcatg

SEQ ID NO: 332701 - DNA, 25 bp, Homo sapien
ccctggccgatgtcgttgaagctgg

SEQ ID NO: 332702 - DNA, 25 bp, Homo sapien
tggatccatcgctccagcagggtca

SEQ ID NO: 332703 - DNA, 25 bp, Homo sapien
acaggtcctggatccatcgctccag

SEQ ID NO: 332704 - DNA, 25 bp, Homo sapien
gggtcacctcccgttcataccacaa

SEQ ID NO: 332705 - DNA, 25 bp, Homo sapien
gcagagctgacctcaaaatatctaa

SEQ ID NO: 332706 - DNA, 25 bp, Homo sapien
ggcagagctgacctcaaaatatcta

SEQ ID NO: 332707 - DNA, 25 bp, Homo sapien
tggcagagctgacctcaaaatatct

SEQ ID NO: 332708 - DNA, 25 bp, Homo sapien
cagagctgacctcaaaatatctaaa

SEQ ID NO: 332709 - DNA, 25 bp, Homo sapien
ctggccctgccccgagtccgcgcct

SEQ ID NO: 332710 - DNA, 25 bp, Homo sapien
tggccctgccccgagtccgcgcctc

SEQ ID NO: 332711 - DNA, 25 bp, Homo sapien
gccctgccccgagtccgcgcctccg

SEQ ID NO: 332712 - DNA, 25 bp, Homo sapien
cctgccccgagtccgcgcctccgac

SEQ ID NO: 332713 - DNA, 25 bp, Homo sapien
tccggtagcgccaacgtgcagccat

SEQ ID NO: 332714 - DNA, 25 bp, Homo sapien
agaggccgtccagctgcttgcgctg

SEQ ID NO: 332715 - DNA, 25 bp, Homo sapien
gggatacagcatcccgtccggtagc

SEQ ID NO: 332716 - DNA, 25 bp, Homo sapien
cagccatacaacagcagccggagag

SEQ ID NO: 332717 - DNA, 25 bp, Homo sapien
ctacggggataagagctgcgcggga

SEQ ID NO: 332718 - DNA, 25 bp, Homo sapien
tacccagctttgttcgatccctagg

SEQ ID NO: 332719 - DNA, 25 bp, Homo sapien
gaaatgttgacaccacagtacagta

SEQ ID NO: 332720 - DNA, 25 bp, Homo sapien
caggcccaaagaagtcctatggaca

SEQ ID NO: 332721 - DNA, 25 bp, Homo sapien
gagaaaaactgcacaacatagcgac

SEQ ID NO: 332722 - DNA, 25 bp, Homo sapien
aaaatctaataagctggctgggcac

SEQ ID NO: 332723 - DNA, 25 bp, Homo sapien
gggaatgaggctctggtcatacttc

SEQ ID NO: 332724 - DNA, 25 bp, Homo sapien
gatcttcatctccacgttacacaaa

SEQ ID NO: 332725 - DNA, 25 bp, Homo sapien
cagcacagaattatgagctgggagt

SEQ ID NO: 332726 - DNA, 25 bp, Homo sapien
agaacagcacagaattatgagctgg

SEQ ID NO: 332727 - DNA, 25 bp, Homo sapien
cacagaattatgagctgggagtgat

SEQ ID NO: 332728 - DNA, 25 bp, Homo sapien
gaaatctctggcctatcaagaccca

SEQ ID NO: 332729 - DNA, 25 bp, Homo sapien
tctccatgcggcttgctcagagtgg

SEQ ID NO: 332730 - DNA, 25 bp, Homo sapien
tttcacatacgtagcaaagacaggg

SEQ ID NO: 332731 - DNA, 25 bp, Homo sapien
tcagtccaactggttacacagaggg

SEQ ID NO: 332732 - DNA, 25 bp, Homo sapien
tgatgagttcatgttagcccagcca

SEQ ID NO: 332733 - DNA, 25 bp, Homo sapien
tgtcgagggatgcacaaaaacccag

SEQ ID NO: 332734 - DNA, 25 bp, Homo sapien
tctgatcagctgaaatacccagtgt

SEQ ID NO: 332735 - DNA, 25 bp, Homo sapien
gaagccaggactaaagagatcccca

SEQ ID NO: 332736 - DNA, 25 bp, Homo sapien
tgcatcattgccagaacagaccaga

SEQ ID NO: 332737 - DNA, 25 bp, Homo sapien
cgggaacatctctccagtccgtgga

SEQ ID NO: 332738 - DNA, 25 bp, Homo sapien
aaaacctgctgagagctggcgtgct

SEQ ID NO: 332739 - DNA, 25 bp, Homo sapien
cacgcgacgtggaataaaggctcca

SEQ ID NO: 332740 - DNA, 25 bp, Homo sapien
tgatggcgaatcaggtgcgagctcc

SEQ ID NO: 332741 - DNA, 25 bp, Homo sapien
tctgatggcgaatcaggtgcgagct

SEQ ID NO: 332742 - DNA, 25 bp, Homo sapien
tgcgagctcccccggaaggacttgc

SEQ ID NO: 332743 - DNA, 25 bp, Homo sapien
cttctgatggcgaatcaggtgcgag

SEQ ID NO: 332744 - DNA, 25 bp, Homo sapien
tggtgctggatcagcgcagagctgt

SEQ ID NO: 332745 - DNA, 25 bp, Homo sapien
ctctggtgtgggttttatagtgctc

SEQ ID NO: 332746 - DNA, 25 bp, Homo sapien
ctgaccggtgccggaaggctttgcc

SEQ ID NO: 332747 - DNA, 25 bp, Homo sapien
tgctcaatgagggctgaccggtgcc

SEQ ID NO: 332748 - DNA, 25 bp, Homo sapien
cgcactcgtgaggtttctttagggt

SEQ ID NO: 332749 - DNA, 25 bp, Homo sapien
ctttcccacagagatcgcactcgtg

SEQ ID NO: 332750 - DNA, 25 bp, Homo sapien
ggatcttccgatgctggctcaggcc

SEQ ID NO: 332751 - DNA, 25 bp, Homo sapien
gcctctttccggtgtggatcttttg

SEQ ID NO: 332752 - DNA, 25 bp, Homo sapien
ctctcgacacgcatagggcttggct

SEQ ID NO: 332753 - DNA, 25 bp, Homo sapien
tgcacaatcgcatggactgggctct

SEQ ID NO: 332754 - DNA, 25 bp, Homo sapien
ggatactttgatgctgaacagggct

SEQ ID NO: 332755 - DNA, 25 bp, Homo sapien
cacatgctgaggtcggatttctgga

SEQ ID NO: 332756 - DNA, 25 bp, Homo sapien
tgaatctgctatcatccccaatggt

SEQ ID NO: 332757 - DNA, 25 bp, Homo sapien
gtgaatctgctatcatccccaatgg

SEQ ID NO: 332758 - DNA, 25 bp, Homo sapien
ttctttgggccacacttactgttct

SEQ ID NO: 332759 - DNA, 25 bp, Homo sapien
gtggtcaggcggactcaggtcacac

SEQ ID NO: 332760 - DNA, 25 bp, Homo sapien
ccctacaggcttccccgcgattggg

SEQ ID NO: 332761 - DNA, 25 bp, Homo sapien
tgcaaactcttagtgcagtcaaggt

SEQ ID NO: 332762 - DNA, 25 bp, Homo sapien
cagggccaccggagggacaggtggt

SEQ ID NO: 332763 - DNA, 25 bp, Homo sapien
tcacaatagctgttgttgacatgtt

SEQ ID NO: 332764 - DNA, 25 bp, Homo sapien
ttatgaccctcacaatagctgttgt

SEQ ID NO: 332765 - DNA, 25 bp, Homo sapien
gggaggcacccatctcacaccccac

SEQ ID NO: 332766 - DNA, 25 bp, Homo sapien
tgaccctcacaatagctgttgttga

SEQ ID NO: 332767 - DNA, 25 bp, Homo sapien
gcacgggactaatggtgaggacaca

SEQ ID NO: 332768 - DNA, 25 bp, Homo sapien
gactaaagccgtagccaacagagca

SEQ ID NO: 332769 - DNA, 25 bp, Homo sapien
tgatcctcctccgagcggtagtaga

SEQ ID NO: 332770 - DNA, 25 bp, Homo sapien
cagagcagtagtaatccgcgtcgtc

SEQ ID NO: 332771 - DNA, 25 bp, Homo sapien
ctgggaagaccagcagtgcatccag

SEQ ID NO: 332772 - DNA, 25 bp, Homo sapien
tgacaggaaggtccccatcagaagg

SEQ ID NO: 332773 - DNA, 25 bp, Homo sapien
tccccatcagaaggaagctgaggca

SEQ ID NO: 332774 - DNA, 25 bp, Homo sapien
ggaagctgaggcaccggcaggccat

SEQ ID NO: 332775 - DNA, 25 bp, Homo sapien
ctgacaggaaggtccccatcagaag

SEQ ID NO: 332776 - DNA, 25 bp, Homo sapien
gcaaggctatatgctccaggtgctt

SEQ ID NO: 332777 - DNA, 25 bp, Homo sapien
ttctgcaaggctatatgctccaggt

SEQ ID NO: 332778 - DNA, 25 bp, Homo sapien
accgtgcctcacaagagtgcaccat

SEQ ID NO: 332779 - DNA, 25 bp, Homo sapien
caagtaaggtaaggctaacatcaga

SEQ ID NO: 332780 - DNA, 25 bp, Homo sapien
aaataataataaggctggacgcagt

SEQ ID NO: 332781 - DNA, 25 bp, Homo sapien
gagtgcaccattttaatcggtttta

SEQ ID NO: 332782 - DNA, 25 bp, Homo sapien
aaacttttaattgcacatttgtgtc

SEQ ID NO: 332783 - DNA, 25 bp, Homo sapien
aatctggtgttgtggtctggctgtc

SEQ ID NO: 332784 - DNA, 25 bp, Homo sapien
gtgagaaacctcctcacttccaatc

SEQ ID NO: 332785 - DNA, 25 bp, Homo sapien
cagctatctgggtacaatctggtgt

SEQ ID NO: 332786 - DNA, 25 bp, Homo sapien
cctgcaggtgcaagaggagggttgg

SEQ ID NO: 332787 - DNA, 25 bp, Homo sapien
tgcaggtgcaagaggagggttggcc

SEQ ID NO: 332788 - DNA, 25 bp, Homo sapien
caggtgcaagaggagggttggcctc

SEQ ID NO: 332789 - DNA, 25 bp, Homo sapien
gcctgagtcggggtccactcactca

SEQ ID NO: 332790 - DNA, 25 bp, Homo sapien
tgcctgatctcgtaggcgcagggcc

SEQ ID NO: 332791 - DNA, 25 bp, Homo sapien
ggtagtacttgcactgcttcagggc

SEQ ID NO: 332792 - DNA, 25 bp, Homo sapien
ggtcactctgagtggtggaacagtc

SEQ ID NO: 332793 - DNA, 25 bp, Homo sapien
gacaggtcactctgagtggtggaac

SEQ ID NO: 332794 - DNA, 25 bp, Homo sapien
agttggcacctggaggtgcgtttca

SEQ ID NO: 332795 - DNA, 25 bp, Homo sapien
cctggaggtgcgtttcaaacctggg

SEQ ID NO: 332796 - DNA, 25 bp, Homo sapien
tcctaggcaggctgagtgatccagc

SEQ ID NO: 332797 - DNA, 25 bp, Homo sapien
gaggcggctacagacagcatgtttc

SEQ ID NO: 332798 - DNA, 25 bp, Homo sapien
gcctcgagataatcctgcctcagtt

SEQ ID NO: 332799 - DNA, 25 bp, Homo sapien
gacactcctcactggacacttgggc

SEQ ID NO: 332800 - DNA, 25 bp, Homo sapien
tgaatacacgcggacactcctcact

SEQ ID NO: 332801 - DNA, 25 bp, Homo sapien
ctgtgtggcctcgagataatcctgc

SEQ ID NO: 332802 - DNA, 25 bp, Homo sapien
ccgctgaaggctccggtcagggcgc

SEQ ID NO: 332803 - DNA, 25 bp, Homo sapien
gtggtcgccatctgagccatgagcc

SEQ ID NO: 332804 - DNA, 25 bp, Homo sapien
agggcggtgggtgcgcgggcgggtg

SEQ ID NO: 332805 - DNA, 25 bp, Homo sapien
ctgcggccgtggtcgccatctgagc

SEQ ID NO: 332806 - DNA, 25 bp, Homo sapien
cgggaggccgcgctgcggcttcccc

SEQ ID NO: 332807 - DNA, 25 bp, Homo sapien
ggaggccgcgctgcggcttccccga

SEQ ID NO: 332808 - DNA, 25 bp, Homo sapien
ccgcgctgcggcttccccgaggcat

SEQ ID NO: 332809 - DNA, 25 bp, Homo sapien
tggccgggaggccgcgctgcggctt

SEQ ID NO: 332810 - DNA, 25 bp, Homo sapien
gcagctccgggtctcggctggaaat

SEQ ID NO: 332811 - DNA, 25 bp, Homo sapien
acaaatgccgcagcgcttgtcacag

SEQ ID NO: 332812 - DNA, 25 bp, Homo sapien
cttaaggagggcgacagtgccttct

SEQ ID NO: 332813 - DNA, 25 bp, Homo sapien
agtgccttctgttaggaccaccgca

SEQ ID NO: 332814 - DNA, 25 bp, Homo sapien
ggccccgaggcagtgaagtgactca

SEQ ID NO: 332815 - DNA, 25 bp, Homo sapien
gacagatggatccttagggacacag

SEQ ID NO: 332816 - DNA, 25 bp, Homo sapien
tgttggtgcgttcaaccctcagcca

SEQ ID NO: 332817 - DNA, 25 bp, Homo sapien
agtggatagggagagctgccccaaa

SEQ ID NO: 332818 - DNA, 25 bp, Homo sapien
tgccttctggctgacaatcctggaa

SEQ ID NO: 332819 - DNA, 25 bp, Homo sapien
tgccaggccacgaatatcaggctag

SEQ ID NO: 332820 - DNA, 25 bp, Homo sapien
tcagggtagcaccatggcaggactg

SEQ ID NO: 332821 - DNA, 25 bp, Homo sapien
tcaggctagagacccatggccatct

SEQ ID NO: 332822 - DNA, 25 bp, Homo sapien
agaccttcgggcagaagcccgtgaa

SEQ ID NO: 332823 - DNA, 25 bp, Homo sapien
gaggacgacggcgagttctacatga

SEQ ID NO: 332824 - DNA, 25 bp, Homo sapien
ccgtgaagttccagctggaggacga

SEQ ID NO: 332825 - DNA, 25 bp, Homo sapien
cggcgagttctacatgatcggctcc

SEQ ID NO: 332826 - DNA, 25 bp, Homo sapien
gaaaatagttgcatcgtcacatggt

SEQ ID NO: 332827 - DNA, 25 bp, Homo sapien
ggttctctgtacaagagatacccct

SEQ ID NO: 332828 - DNA, 25 bp, Homo sapien
tacctccgtatgttccgaggttctc

SEQ ID NO: 332829 - DNA, 25 bp, Homo sapien
ctggaggcgactagccactgtggaa

SEQ ID NO: 332830 - DNA, 25 bp, Homo sapien
tggcaacgatgagaagtacaaggct

SEQ ID NO: 332831 - DNA, 25 bp, Homo sapien
agtgtgaccctgttaaaagcctcgg

SEQ ID NO: 332832 - DNA, 25 bp, Homo sapien
gatcacggatacacgactctagcca

SEQ ID NO: 332833 - DNA, 25 bp, Homo sapien
tacaaggctgtgtccatcagcacag

SEQ ID NO: 332834 - DNA, 25 bp, Homo sapien
caccacttagatgccgtgccatgct

SEQ ID NO: 332835 - DNA, 25 bp, Homo sapien
cacaaccatcaacaggaaccgcatg

SEQ ID NO: 332836 - DNA, 25 bp, Homo sapien
gaacagccagtgggtacccaccctg

SEQ ID NO: 332837 - DNA, 25 bp, Homo sapien
gccgagacaagaagagaaccttccc

SEQ ID NO: 332838 - DNA, 25 bp, Homo sapien
tctcagcccgaggtgctggtcccca

SEQ ID NO: 332839 - DNA, 25 bp, Homo sapien
gctgtgatccatgagaacgcatctc

SEQ ID NO: 332840 - DNA, 25 bp, Homo sapien
agaacgcatctcagcccgaggtgct

SEQ ID NO: 332841 - DNA, 25 bp, Homo sapien
tgatgaccatgacccagctgtgatc

SEQ ID NO: 332842 - DNA, 25 bp, Homo sapien
gaatccattgtcaatccagagtcat

SEQ ID NO: 332843 - DNA, 25 bp, Homo sapien
tgctcttcctccattgagtggactt

SEQ ID NO: 332844 - DNA, 25 bp, Homo sapien
cattgtcaatccagagtcatgttgc

SEQ ID NO: 332845 - DNA, 25 bp, Homo sapien
tctaagaatccattgtcaatccaga

SEQ ID NO: 332846 - DNA, 25 bp, Homo sapien
agaagattgggccgcctctcctcca

SEQ ID NO: 332847 - DNA, 25 bp, Homo sapien
cagcgccatcctgaggatcgggtgg

SEQ ID NO: 332848 - DNA, 25 bp, Homo sapien
gtaaccagcccatcagcacacggct

SEQ ID NO: 332849 - DNA, 25 bp, Homo sapien
gctcccacggagcatctcagaagat

SEQ ID NO: 332850 - DNA, 25 bp, Homo sapien
gggacgaaggtggtatgtgaacaag

SEQ ID NO: 332851 - DNA, 25 bp, Homo sapien
gcctcaggaaggtgccgcgagctct

SEQ ID NO: 332852 - DNA, 25 bp, Homo sapien
tttcaggaacagccctaaccctgct

SEQ ID NO: 332853 - DNA, 25 bp, Homo sapien
atggggctccgggtagcacctcagc

SEQ ID NO: 332854 - DNA, 25 bp, Homo sapien
tcaggctactgccagctggggcctt

SEQ ID NO: 332855 - DNA, 25 bp, Homo sapien
tggggccttgctgctctgaagtccc

SEQ ID NO: 332856 - DNA, 25 bp, Homo sapien
gctggggccttgctgctctgaagtc

SEQ ID NO: 332857 - DNA, 25 bp, Homo sapien
cagctggggccttgctgctctgaag

SEQ ID NO: 332858 - DNA, 25 bp, Homo sapien
ctgcggagggcccagtcctgtgtgg

SEQ ID NO: 332859 - DNA, 25 bp, Homo sapien
ccagtcctgtgtgggcactgctggg

SEQ ID NO: 332860 - DNA, 25 bp, Homo sapien
gtcctgtgtgggcactgctgggctg

SEQ ID NO: 332861 - DNA, 25 bp, Homo sapien
tgggcactgctgggctgtcgccagc

SEQ ID NO: 332862 - DNA, 25 bp, Homo sapien
tgttctagctccagtggcacccata

SEQ ID NO: 332863 - DNA, 25 bp, Homo sapien
tcatctgtaatagggaggtgtcccc

SEQ ID NO: 332864 - DNA, 25 bp, Homo sapien
tccatcaaagagtggaactccccag

SEQ ID NO: 332865 - DNA, 25 bp, Homo sapien
gaatatgggaatagccctcccggcc

SEQ ID NO: 332866 - DNA, 25 bp, Homo sapien
cctgtgtctccacaactggggggat

SEQ ID NO: 332867 - DNA, 25 bp, Homo sapien
tggaaggaaccttggctgcctcacc

SEQ ID NO: 332868 - DNA, 25 bp, Homo sapien
tgtctccacaactggggggatggaa

SEQ ID NO: 332869 - DNA, 25 bp, Homo sapien
ggatggaaggaaccttggctgcctc

SEQ ID NO: 332870 - DNA, 25 bp, Homo sapien
ggaaagctgccaggtcagaagagaa

SEQ ID NO: 332871 - DNA, 25 bp, Homo sapien
cacaacatggacaggcttagaacaa

SEQ ID NO: 332872 - DNA, 25 bp, Homo sapien
tctccacaaggtctggctacaacac

SEQ ID NO: 332873 - DNA, 25 bp, Homo sapien
gctacaacacggagggcagactcaa

SEQ ID NO: 332874 - DNA, 25 bp, Homo sapien
tttggcacaacctaggagacgcctg

SEQ ID NO: 332875 - DNA, 25 bp, Homo sapien
tagattggcatcagcctgaaggcac

SEQ ID NO: 332876 - DNA, 25 bp, Homo sapien
cagcagccgaaatctggtgaacttc

SEQ ID NO: 332877 - DNA, 25 bp, Homo sapien
aacttccccgctgactggcaggtag

SEQ ID NO: 332878 - DNA, 25 bp, Homo sapien
tattcaggtgggcccttgcatgggc

SEQ ID NO: 332879 - DNA, 25 bp, Homo sapien
tgtttattcaggtgggcccttgcat

SEQ ID NO: 332880 - DNA, 25 bp, Homo sapien
attctgtttattcaggtgggccctt

SEQ ID NO: 332881 - DNA, 25 bp, Homo sapien
tcaggtgggcccttgcatgggccca

SEQ ID NO: 332882 - DNA, 25 bp, Homo sapien
ctgccagaagcctcttaggcctggc

SEQ ID NO: 332883 - DNA, 25 bp, Homo sapien
tgccagaagcctcttaggcctggcc

SEQ ID NO: 332884 - DNA, 25 bp, Homo sapien
gggtcatgggtaggatggaagctgc

SEQ ID NO: 332885 - DNA, 25 bp, Homo sapien
cccaagtaggggtcatgggtaggat

SEQ ID NO: 332886 - DNA, 25 bp, Homo sapien
gggcaggtaattggggtcttctgca

SEQ ID NO: 332887 - DNA, 25 bp, Homo sapien
ctggctgttcctcagggaggggcag

SEQ ID NO: 332888 - DNA, 25 bp, Homo sapien
aggtaattggggtcttctgcagggg

SEQ ID NO: 332889 - DNA, 25 bp, Homo sapien
gcaggtaattggggtcttctgcagg

SEQ ID NO: 332890 - DNA, 25 bp, Homo sapien
catcggtggggatccttctgagggt

SEQ ID NO: 332891 - DNA, 25 bp, Homo sapien
cagcacaggtccccatcggtgggga

SEQ ID NO: 332892 - DNA, 25 bp, Homo sapien
ggggaggggcccgtgttgagcacag

SEQ ID NO: 332893 - DNA, 25 bp, Homo sapien
cccgtgttgagcacaggccagcaca

SEQ ID NO: 332894 - DNA, 25 bp, Homo sapien
ctcttgcctccaggctggttgggga

SEQ ID NO: 332895 - DNA, 25 bp, Homo sapien
cctcttgcctccaggctggttgggg

SEQ ID NO: 332896 - DNA, 25 bp, Homo sapien
agtagtagatatggcccaccgcaat

SEQ ID NO: 332897 - DNA, 25 bp, Homo sapien
tggttggggaagacgtcctccagga

SEQ ID NO: 332898 - DNA, 25 bp, Homo sapien
acggactgtggggtcaccctccaca

SEQ ID NO: 332899 - DNA, 25 bp, Homo sapien
gcccagagtcctagaccagcagagc

SEQ ID NO: 332900 - DNA, 25 bp, Homo sapien
ctgtgagacagccacggactgtggg

SEQ ID NO: 332901 - DNA, 25 bp, Homo sapien
tccacagcccagagtcctagaccag

SEQ ID NO: 332902 - DNA, 25 bp, Homo sapien
ccaggcccccatccacagcctggtg

SEQ ID NO: 332903 - DNA, 25 bp, Homo sapien
ggcccccatccacagcctggtggcc

SEQ ID NO: 332904 - DNA, 25 bp, Homo sapien
caggcccccatccacagcctggtgg

SEQ ID NO: 332905 - DNA, 25 bp, Homo sapien
aggcccccatccacagcctggtggc

SEQ ID NO: 332906 - DNA, 25 bp, Homo sapien
aggtccacgaggatggagttgccca

SEQ ID NO: 332907 - DNA, 25 bp, Homo sapien
acgaggatggagttgcccagcagca

SEQ ID NO: 332908 - DNA, 25 bp, Homo sapien
gagaagcccatgagcgcccaaggca

SEQ ID NO: 332909 - DNA, 25 bp, Homo sapien
catgagcgcccaaggcaggaacggt

SEQ ID NO: 332910 - DNA, 25 bp, Homo sapien
agtgagcaggccgaagaagttgacc

SEQ ID NO: 332911 - DNA, 25 bp, Homo sapien
gcaggccgaagaagttgaccctcac

SEQ ID NO: 332912 - DNA, 25 bp, Homo sapien
tgagcaggccgaagaagttgaccct

SEQ ID NO: 332913 - DNA, 25 bp, Homo sapien
tggaaagtgagcaggccgaagaagt

SEQ ID NO: 332914 - DNA, 25 bp, Homo sapien
ggcggctccacacgtacaccagcat

SEQ ID NO: 332915 - DNA, 25 bp, Homo sapien
tgcggcggctccacacgtacaccag

SEQ ID NO: 332916 - DNA, 25 bp, Homo sapien
ctgcggcggctccacacgtacacca

SEQ ID NO: 332917 - DNA, 25 bp, Homo sapien
ggctccacacgtacaccagcatggc

SEQ ID NO: 332918 - DNA, 25 bp, Homo sapien
aggaagaacaggctgcccaggagtc

SEQ ID NO: 332919 - DNA, 25 bp, Homo sapien
ccaggaagaacaggctgcccaggag

SEQ ID NO: 332920 - DNA, 25 bp, Homo sapien
gaagaacaggctgcccaggagtccc

SEQ ID NO: 332921 - DNA, 25 bp, Homo sapien
aacaggctgcccaggagtcccagca

SEQ ID NO: 332922 - DNA, 25 bp, Homo sapien
tgcatacagcactgaagatctagcc

SEQ ID NO: 332923 - DNA, 25 bp, Homo sapien
actgaagatctagccctgacccctg

SEQ ID NO: 332924 - DNA, 25 bp, Homo sapien
agcactgaagatctagccctgaccc

SEQ ID NO: 332925 - DNA, 25 bp, Homo sapien
tacagcactgaagatctagccctga

SEQ ID NO: 332926 - DNA, 25 bp, Homo sapien
taagctggagacagcgactgtgtcc

SEQ ID NO: 332927 - DNA, 25 bp, Homo sapien
gccctagcccgaggttccagagcct

SEQ ID NO: 332928 - DNA, 25 bp, Homo sapien
aagctggagacagcgactgtgtccc

SEQ ID NO: 332929 - DNA, 25 bp, Homo sapien
aggctggacgccgaggcgccctagc

SEQ ID NO: 332930 - DNA, 25 bp, Homo sapien
ctcttccagcatgcggcagtagcgg

SEQ ID NO: 332931 - DNA, 25 bp, Homo sapien
gcggaaggagccctcttccagcatg

SEQ ID NO: 332932 - DNA, 25 bp, Homo sapien
acatgaagacgaagtcggccgtgcg

SEQ ID NO: 332933 - DNA, 25 bp, Homo sapien
aaggacgcccccgaagagaaacatg

SEQ ID NO: 332934 - DNA, 25 bp, Homo sapien
ctacggcgtcggtataggaagtgcc

SEQ ID NO: 332935 - DNA, 25 bp, Homo sapien
tcggtataggaagtgccaccaggcg

SEQ ID NO: 332936 - DNA, 25 bp, Homo sapien
acccagcccgtgtccgcagggcgca

SEQ ID NO: 332937 - DNA, 25 bp, Homo sapien
ggcgtcggtataggaagtgccacca

SEQ ID NO: 332938 - DNA, 25 bp, Homo sapien
agaggaagttggtgacgagcctcca

SEQ ID NO: 332939 - DNA, 25 bp, Homo sapien
aggaagttggtgacgagcctccaga

SEQ ID NO: 332940 - DNA, 25 bp, Homo sapien
ggaagttggtgacgagcctccagac

SEQ ID NO: 332941 - DNA, 25 bp, Homo sapien
ggtgggtcgggcccacaggtgcgcg

SEQ ID NO: 332942 - DNA, 25 bp, Homo sapien
gtgggtcgggcccacaggtgcgcgg

SEQ ID NO: 332943 - DNA, 25 bp, Homo sapien
tcgggcccacaggtgcgcggcgcgg

SEQ ID NO: 332944 - DNA, 25 bp, Homo sapien
gggtcgggcccacaggtgcgcggcg

SEQ ID NO: 332945 - DNA, 25 bp, Homo sapien
cttccggaacacaaggtgcgggttg

SEQ ID NO: 332946 - DNA, 25 bp, Homo sapien
tccggaacacaaggtgcgggttgaa

SEQ ID NO: 332947 - DNA, 25 bp, Homo sapien
tgcgggttgaagtagagttgaaagg

SEQ ID NO: 332948 - DNA, 25 bp, Homo sapien
gagttgaaaggggctgaggagctcc

SEQ ID NO: 332949 - DNA, 25 bp, Homo sapien
gggagccacgccgtaaccatggcga

SEQ ID NO: 332950 - DNA, 25 bp, Homo sapien
ctcccgccagaggctgtaaccaagg

SEQ ID NO: 332951 - DNA, 25 bp, Homo sapien
ccctcccgccagaggctgtaaccaa

SEQ ID NO: 332952 - DNA, 25 bp, Homo sapien
ccagtcaagagctgcccgggagcca

SEQ ID NO: 332953 - DNA, 25 bp, Homo sapien
acacaggctgcggtgtaagcccgcg

SEQ ID NO: 332954 - DNA, 25 bp, Homo sapien
tgaggacacaggctgcggtgtaagc

SEQ ID NO: 332955 - DNA, 25 bp, Homo sapien
gctgcggtgtaagcccgcgtcaccg

SEQ ID NO: 332956 - DNA, 25 bp, Homo sapien
tgcaggaactcggccgctagtccct

SEQ ID NO: 332957 - DNA, 25 bp, Homo sapien
cgcgtggcccagccagcaacgcgct

SEQ ID NO: 332958 - DNA, 25 bp, Homo sapien
acgcgctctttaacccgcctcccag

SEQ ID NO: 332959 - DNA, 25 bp, Homo sapien
tgaaccttctcaagcacgcgtggcc

SEQ ID NO: 332960 - DNA, 25 bp, Homo sapien
gccagcaacgcgctctttaacccgc

SEQ ID NO: 332961 - DNA, 25 bp, Homo sapien
catagagggtcctgttctggactca

SEQ ID NO: 332962 - DNA, 25 bp, Homo sapien
ggcatctgtgtgacatcacttggaa

SEQ ID NO: 332963 - DNA, 25 bp, Homo sapien
ccttaagggacagtgattactttcg

SEQ ID NO: 332964 - DNA, 25 bp, Homo sapien
tatgggtttgcctacagacgggaca

SEQ ID NO: 332965 - DNA, 25 bp, Homo sapien
taaagttcagagcagcaaaagtcaa

SEQ ID NO: 332966 - DNA, 25 bp, Homo sapien
cggacctgcctctcacgcaatggat

SEQ ID NO: 332967 - DNA, 25 bp, Homo sapien
gattaatccggttcagtggactctg

SEQ ID NO: 332968 - DNA, 25 bp, Homo sapien
gagcaatagagctactacagtgccc

SEQ ID NO: 332969 - DNA, 25 bp, Homo sapien
agatgagagcgctccgaagactggt

SEQ ID NO: 332970 - DNA, 25 bp, Homo sapien
cccaggacgcacagatgagagcgct

SEQ ID NO: 332971 - DNA, 25 bp, Homo sapien
gcattccgccaagtctctcgctctg

SEQ ID NO: 332972 - DNA, 25 bp, Homo sapien
tggtgggtctatctttcggtctttc

SEQ ID NO: 332973 - DNA, 25 bp, Homo sapien
taggcatgacgccattgttgatcag

SEQ ID NO: 332974 - DNA, 25 bp, Homo sapien
cgccattgttgatcagcacggaagt

SEQ ID NO: 332975 - DNA, 25 bp, Homo sapien
ttcataggcatgacgccattgttga

SEQ ID NO: 332976 - DNA, 25 bp, Homo sapien
catgacgccattgttgatcagcacg

SEQ ID NO: 332977 - DNA, 25 bp, Homo sapien
agcgtactacaacccagagctcctg

SEQ ID NO: 332978 - DNA, 25 bp, Homo sapien
cacctgatctgcctagcgtactaca

SEQ ID NO: 332979 - DNA, 25 bp, Homo sapien
tgtatctggctagcatgggagtttt

SEQ ID NO: 332980 - DNA, 25 bp, Homo sapien
cattgtatctggctagcatgggagt

SEQ ID NO: 332981 - DNA, 25 bp, Homo sapien
tttgggattcttttgctagctggag

SEQ ID NO: 332982 - DNA, 25 bp, Homo sapien
ctctcccaaggcctaattgctggta

SEQ ID NO: 332983 - DNA, 25 bp, Homo sapien
tgtcaggctaccgtgaatcaacgcc

SEQ ID NO: 332984 - DNA, 25 bp, Homo sapien
gaggatagaggcgagaaaacatttt

SEQ ID NO: 332985 - DNA, 25 bp, Homo sapien
tggtggtatgtgctaacagctctag

SEQ ID NO: 332986 - DNA, 25 bp, Homo sapien
tggtatgtgctaacagctctagcta

SEQ ID NO: 332987 - DNA, 25 bp, Homo sapien
gtgctaacagctctagctactcagg

SEQ ID NO: 332988 - DNA, 25 bp, Homo sapien
tatgtgctaacagctctagctactc

SEQ ID NO: 332989 - DNA, 25 bp, Homo sapien
caccgtgatcaagatggaaccttta

SEQ ID NO: 332990 - DNA, 25 bp, Homo sapien
tatacacttgggaaacaccaccgtg

SEQ ID NO: 332991 - DNA, 25 bp, Homo sapien
tgttgcacgtattaggagagactcc

SEQ ID NO: 332992 - DNA, 25 bp, Homo sapien
tattcccctctgtggttagaccatg

SEQ ID NO: 332993 - DNA, 25 bp, Homo sapien
tccggcgtgacatgactaggtcttc

SEQ ID NO: 332994 - DNA, 25 bp, Homo sapien
gcatacttgtaggttccagggatta

SEQ ID NO: 332995 - DNA, 25 bp, Homo sapien
tcttcaaagccggtaatggacatcg

SEQ ID NO: 332996 - DNA, 25 bp, Homo sapien
ttctgtgtaaggactcgcatggcca

SEQ ID NO: 332997 - DNA, 25 bp, Homo sapien
ggaaagtgagccaaatgtccatgct

SEQ ID NO: 332998 - DNA, 25 bp, Homo sapien
cacgtgtgggaatggaccaagccag

SEQ ID NO: 332999 - DNA, 25 bp, Homo sapien
gatgaggctgactgccactggaaac

SEQ ID NO: 333000 - DNA, 25 bp, Homo sapien
cataactcagagaaccagggagggt

SEQ ID NO: 333001 - DNA, 25 bp, Homo sapien
gagctgagcacgtttgaaccactga

SEQ ID NO: 333002 - DNA, 25 bp, Homo sapien
catacacggtggacctgactagggt

SEQ ID NO: 333003 - DNA, 25 bp, Homo sapien
tctagccgccaagtggagaacaggt

SEQ ID NO: 333004 - DNA, 25 bp, Homo sapien
caatgtctcttgtatgcctggcacc

SEQ ID NO: 333005 - DNA, 25 bp, Homo sapien
cgtgccggacgggttcctctccgag

SEQ ID NO: 333006 - DNA, 25 bp, Homo sapien
tccttctgccatcatgccgatgttc

SEQ ID NO: 333007 - DNA, 25 bp, Homo sapien
tctgtgcctctgcgcgggtctcctg

SEQ ID NO: 333008 - DNA, 25 bp, Homo sapien
tgttcatcgtaaacaccaacgtgcc

SEQ ID NO: 333009 - DNA, 25 bp, Homo sapien
gctggggaggcgactcctgaacgga

SEQ ID NO: 333010 - DNA, 25 bp, Homo sapien
ccaccggacgaggggttccgcgctg

SEQ ID NO: 333011 - DNA, 25 bp, Homo sapien
ggacgaggggttccgcgctgggagc

SEQ ID NO: 333012 - DNA, 25 bp, Homo sapien
gggagctggggaggcgactcctgaa

SEQ ID NO: 333013 - DNA, 25 bp, Homo sapien
gctggggcgggctgaccgcgccctt

SEQ ID NO: 333014 - DNA, 25 bp, Homo sapien
cgttcggggcccgacgaggtcgctg

SEQ ID NO: 333015 - DNA, 25 bp, Homo sapien
tgaccgcgccctttcctcgcagtac

SEQ ID NO: 333016 - DNA, 25 bp, Homo sapien
tggctcgggcccgaagtggacgttc

SEQ ID NO: 333017 - DNA, 25 bp, Homo sapien
agccgtgcgcgctctgcagcctgca

SEQ ID NO: 333018 - DNA, 25 bp, Homo sapien
atcgcggtgcacgtggtcccggacc

SEQ ID NO: 333019 - DNA, 25 bp, Homo sapien
ctccagcgagccgtgcgcgctctgc

SEQ ID NO: 333020 - DNA, 25 bp, Homo sapien
cagctcatggccttcggcggctcca

SEQ ID NO: 333021 - DNA, 25 bp, Homo sapien
aactattacgacatgaacgcggcca

SEQ ID NO: 333022 - DNA, 25 bp, Homo sapien
cattctatggcgtacgaagggatga

SEQ ID NO: 333023 - DNA, 25 bp, Homo sapien
tgcagactcgggatctaaggcgctc

SEQ ID NO: 333024 - DNA, 25 bp, Homo sapien
taaacggtttagagactaggagtgc

SEQ ID NO: 333025 - DNA, 25 bp, Homo sapien
aaccttcagttatgtttgggcgcag

SEQ ID NO: 333026 - DNA, 25 bp, Homo sapien
ccgccacagcagttccctgaggaaa

SEQ ID NO: 333027 - DNA, 25 bp, Homo sapien
tgttcactcggtcatcccgcgcagt

SEQ ID NO: 333028 - DNA, 25 bp, Homo sapien
ccgttcgtgttctgtggtgccacag

SEQ ID NO: 333029 - DNA, 25 bp, Homo sapien
ctgggtggggtgaagattaggaaga

SEQ ID NO: 333030 - DNA, 25 bp, Homo sapien
gagtctggaagggtggcacccatct

SEQ ID NO: 333031 - DNA, 25 bp, Homo sapien
cagagcaccaaattgaaaggctaca

SEQ ID NO: 333032 - DNA, 25 bp, Homo sapien
gaaaggctacaaatgagaagtatcg

SEQ ID NO: 333033 - DNA, 25 bp, Homo sapien
caaatgagaagtatcgtccccaccg

SEQ ID NO: 333034 - DNA, 25 bp, Homo sapien
ccagacagagcaccaaattgaaagg

SEQ ID NO: 333035 - DNA, 25 bp, Homo sapien
cgtggtgagaccctggtctatataa

SEQ ID NO: 333036 - DNA, 25 bp, Homo sapien
tccaagatgtactctacagagaacc

SEQ ID NO: 333037 - DNA, 25 bp, Homo sapien
ttcctgtacctagaaacaaatccaa

SEQ ID NO: 333038 - DNA, 25 bp, Homo sapien
caccctgaacgttattggagaacta

SEQ ID NO: 333039 - DNA, 25 bp, Homo sapien
gaatatgttctgatagcggaggcca

SEQ ID NO: 333040 - DNA, 25 bp, Homo sapien
tactgttcagaggaccacgtgtagg

SEQ ID NO: 333041 - DNA, 25 bp, Homo sapien
tccctggacctagagactgaagtga

SEQ ID NO: 333042 - DNA, 25 bp, Homo sapien
tctagcaaagggatccggagttcct

SEQ ID NO: 333043 - DNA, 25 bp, Homo sapien
actcagttatccaggcgcaggttct

SEQ ID NO: 333044 - DNA, 25 bp, Homo sapien
tatcctcatgaggaccaccctgtga

SEQ ID NO: 333045 - DNA, 25 bp, Homo sapien
ggactctgtctgacggcacctgctt

SEQ ID NO: 333046 - DNA, 25 bp, Homo sapien
tagggtacccacgtgttgagctcag

SEQ ID NO: 333047 - DNA, 25 bp, Homo sapien
cacaggtagaatagcactccaggat

SEQ ID NO: 333048 - DNA, 25 bp, Homo sapien
cgaaaatgtgatcaaagagtctgca

SEQ ID NO: 333049 - DNA, 25 bp, Homo sapien
gacatgcctactgccaaaggagaga

SEQ ID NO: 333050 - DNA, 25 bp, Homo sapien
taattcctgggttattgccgtggga

SEQ ID NO: 333051 - DNA, 25 bp, Homo sapien
tatggctctgttctcacgcaatgca

SEQ ID NO: 333052 - DNA, 25 bp, Homo sapien
gacacagcatgacacgagggatgag

SEQ ID NO: 333053 - DNA, 25 bp, Homo sapien
tgacagatgttgaagatgacacagc

SEQ ID NO: 333054 - DNA, 25 bp, Homo sapien
taactataacagattcctggccagg

SEQ ID NO: 333055 - DNA, 25 bp, Homo sapien
cagaccctgcttagcttctgagatc

SEQ ID NO: 333056 - DNA, 25 bp, Homo sapien
agaccctgcttagcttctgagatca

SEQ ID NO: 333057 - DNA, 25 bp, Homo sapien
tgagatcagacgagattgggcgtgt

SEQ ID NO: 333058 - DNA, 25 bp, Homo sapien
ttctgagatcagacgagattgggcg

SEQ ID NO: 333059 - DNA, 25 bp, Homo sapien
cccgttggttgttgctggtagctcc

SEQ ID NO: 333060 - DNA, 25 bp, Homo sapien
tcaaaacaatctgaggtccctaggc

SEQ ID NO: 333061 - DNA, 25 bp, Homo sapien
gcacacgggcagatggtcaccgcct

SEQ ID NO: 333062 - DNA, 25 bp, Homo sapien
aagtgagtccgtatgtccccagcat

SEQ ID NO: 333063 - DNA, 25 bp, Homo sapien
aaatattggcactactgcacagtgg

SEQ ID NO: 333064 - DNA, 25 bp, Homo sapien
cccatggtgcaatcgggtacgaaag

SEQ ID NO: 333065 - DNA, 25 bp, Homo sapien
gaccttcaaggttctctgtagcaga

SEQ ID NO: 333066 - DNA, 25 bp, Homo sapien
gataatagccttaaccagagccctg

SEQ ID NO: 333067 - DNA, 25 bp, Homo sapien
gagggaaggtaagattatatggggc

SEQ ID NO: 333068 - DNA, 25 bp, Homo sapien
tataattagttctaccctggcatcc

SEQ ID NO: 333069 - DNA, 25 bp, Homo sapien
tggattgaatgccaccggactggat

SEQ ID NO: 333070 - DNA, 25 bp, Homo sapien
ggcttgcacttatcaaatgggacat

SEQ ID NO: 333071 - DNA, 25 bp, Homo sapien
tacttctggctttagggcattccca

SEQ ID NO: 333072 - DNA, 25 bp, Homo sapien
tgcaaagagccgagatcgcaccact

SEQ ID NO: 333073 - DNA, 25 bp, Homo sapien
agagccgagatcgcaccactgcact

SEQ ID NO: 333074 - DNA, 25 bp, Homo sapien
ctacttgaggctgaggcaaggagaa

SEQ ID NO: 333075 - DNA, 25 bp, Homo sapien
ttgcttgaacgtgggaggtggaggt

SEQ ID NO: 333076 - DNA, 25 bp, Homo sapien
cccaggaaagtcgagactgcggtga

SEQ ID NO: 333077 - DNA, 25 bp, Homo sapien
caggaaagtcgagactgcggtgagc

SEQ ID NO: 333078 - DNA, 25 bp, Homo sapien
tgagcccaggaaagtcgagactgcg

SEQ ID NO: 333079 - DNA, 25 bp, Homo sapien
agcccaggaaagtcgagactgcggt

SEQ ID NO: 333080 - DNA, 25 bp, Homo sapien
cagtagtagtcagacgttatcatcc

SEQ ID NO: 333081 - DNA, 25 bp, Homo sapien
caagccctgaattatgccgaacaaa

SEQ ID NO: 333082 - DNA, 25 bp, Homo sapien
tgtttgagacataaacagttgtgcg

SEQ ID NO: 333083 - DNA, 25 bp, Homo sapien
tatcatcctgtcatattatggagcc

SEQ ID NO: 333084 - DNA, 25 bp, Homo sapien
gatgcccgttgccaagcagaccctg

SEQ ID NO: 333085 - DNA, 25 bp, Homo sapien
tgcccgttgccaagcagaccctggt

SEQ ID NO: 333086 - DNA, 25 bp, Homo sapien
atgcccgttgccaagcagaccctgg

SEQ ID NO: 333087 - DNA, 25 bp, Homo sapien
agatgcccgttgccaagcagaccct

SEQ ID NO: 333088 - DNA, 25 bp, Homo sapien
gaggagaaaactcactgaccctgta

SEQ ID NO: 333089 - DNA, 25 bp, Homo sapien
ggctggaccctacatactcatatcc

SEQ ID NO: 333090 - DNA, 25 bp, Homo sapien
ttttttcagaaacatcggcattgta

SEQ ID NO: 333091 - DNA, 25 bp, Homo sapien
catgatattcttaagtcgaagttga

SEQ ID NO: 333092 - DNA, 25 bp, Homo sapien
acgttatataccctataatgttatt

SEQ ID NO: 333093 - DNA, 25 bp, Homo sapien
aataaacgttatataccctataatg

SEQ ID NO: 333094 - DNA, 25 bp, Homo sapien
gttatataccctataatgttatttc

SEQ ID NO: 333095 - DNA, 25 bp, Homo sapien
tagtacttaattatatggatttatt

SEQ ID NO: 333096 - DNA, 25 bp, Homo sapien
cgccaagaatggcatccccttcgag

SEQ ID NO: 333097 - DNA, 25 bp, Homo sapien
tccccttcgagcttcgcacagtgga

SEQ ID NO: 333098 - DNA, 25 bp, Homo sapien
atcttcgccaagaatggcatcccct

SEQ ID NO: 333099 - DNA, 25 bp, Homo sapien
cgcacagtggagctgaccaaagctg

SEQ ID NO: 333100 - DNA, 25 bp, Homo sapien
gtctggctggcatacagagatgcag

SEQ ID NO: 333101 - DNA, 25 bp, Homo sapien
tgagctccagcgtttgctggtctgg

SEQ ID NO: 333102 - DNA, 25 bp, Homo sapien
ggtctggctggcatacagagatgca

SEQ ID NO: 333103 - DNA, 25 bp, Homo sapien
agctccagcgtttgctggtctggct

SEQ ID NO: 333104 - DNA, 25 bp, Homo sapien
gaggaggcagggctataactaagca

SEQ ID NO: 333105 - DNA, 25 bp, Homo sapien
cagggctataactaagcagtagggc

SEQ ID NO: 333106 - DNA, 25 bp, Homo sapien
ggagcacaattcagtggaggaggca

SEQ ID NO: 333107 - DNA, 25 bp, Homo sapien
ggctataactaagcagtagggcaga

SEQ ID NO: 333108 - DNA, 25 bp, Homo sapien
caggtgaaccccctgaggaaggtgc

SEQ ID NO: 333109 - DNA, 25 bp, Homo sapien
cttggctgagaggtaaccggtccgt

SEQ ID NO: 333110 - DNA, 25 bp, Homo sapien
gatggcttggatcatggactgtggg

SEQ ID NO: 333111 - DNA, 25 bp, Homo sapien
gggccagtcggctgtctgttcactg

SEQ ID NO: 333112 - DNA, 25 bp, Homo sapien
gtaaccggtccgtgggctgctgccg

SEQ ID NO: 333113 - DNA, 25 bp, Homo sapien
ctccaggacctgcaggcccgcgccc

SEQ ID NO: 333114 - DNA, 25 bp, Homo sapien
ccaggacctgcaggcccgcgcccat

SEQ ID NO: 333115 - DNA, 25 bp, Homo sapien
tccaggacctgcaggcccgcgccca

SEQ ID NO: 333116 - DNA, 25 bp, Homo sapien
gatcctgctggtcccgcttgacaat

SEQ ID NO: 333117 - DNA, 25 bp, Homo sapien
ctgaggatcctgctggtcccgcttg

SEQ ID NO: 333118 - DNA, 25 bp, Homo sapien
cccgcttgacaatgatgcacagcat

SEQ ID NO: 333119 - DNA, 25 bp, Homo sapien
tgctggtcccgcttgacaatgatgc

SEQ ID NO: 333120 - DNA, 25 bp, Homo sapien
ataacacaacaatgtagtaaaacca

SEQ ID NO: 333121 - DNA, 25 bp, Homo sapien
cacaacaatgtagtaaaaccaataa

SEQ ID NO: 333122 - DNA, 25 bp, Homo sapien
atgtagtaaaaccaataactcttgg

SEQ ID NO: 333123 - DNA, 25 bp, Homo sapien
acaatgtagtaaaaccaataactct

SEQ ID NO: 333124 - DNA, 25 bp, Homo sapien
tattgcagatttagtctcttactgg

SEQ ID NO: 333125 - DNA, 25 bp, Homo sapien
cttcatgttactgatttgtaggagc

SEQ ID NO: 333126 - DNA, 25 bp, Homo sapien
taagtaacagaatgaatccttgttg

SEQ ID NO: 333127 - DNA, 25 bp, Homo sapien
tcttactggttatgtatgctgcacc

SEQ ID NO: 333128 - DNA, 25 bp, Homo sapien
tggccgtccctcaaacagttcatag

SEQ ID NO: 333129 - DNA, 25 bp, Homo sapien
ttcttggccgcctgttccaggatgc

SEQ ID NO: 333130 - DNA, 25 bp, Homo sapien
gatcctggcgattcgaagcagcata

SEQ ID NO: 333131 - DNA, 25 bp, Homo sapien
tccaggatgctcaagatgatgctgt

SEQ ID NO: 333132 - DNA, 25 bp, Homo sapien
tcctccagggccatgagatcagcca

SEQ ID NO: 333133 - DNA, 25 bp, Homo sapien
gggccatgagatcagccagtgtcac

SEQ ID NO: 333134 - DNA, 25 bp, Homo sapien
tccagggccatgagatcagccagtg

SEQ ID NO: 333135 - DNA, 25 bp, Homo sapien
agggccatgagatcagccagtgtca

SEQ ID NO: 333136 - DNA, 25 bp, Homo sapien
tggcagtcctgttgcgttccacctt

SEQ ID NO: 333137 - DNA, 25 bp, Homo sapien
ggcagtcctgttgcgttccaccttc

SEQ ID NO: 333138 - DNA, 25 bp, Homo sapien
gggtataccaaaggtgccacggatg

SEQ ID NO: 333139 - DNA, 25 bp, Homo sapien
aggtactcatgaacacgggcacgag

SEQ ID NO: 333140 - DNA, 25 bp, Homo sapien
caggtcagatggataccagtggtcc

SEQ ID NO: 333141 - DNA, 25 bp, Homo sapien
agtggtccggcgtctggtacttaca

SEQ ID NO: 333142 - DNA, 25 bp, Homo sapien
tgcagctcagaataggctccctgga

SEQ ID NO: 333143 - DNA, 25 bp, Homo sapien
acacagtggatgctccgtggagtcc

SEQ ID NO: 333144 - DNA, 25 bp, Homo sapien
tggagtcccttgcatgtccacgcgc

SEQ ID NO: 333145 - DNA, 25 bp, Homo sapien
gtccacgcgcttgggtcagggatca

SEQ ID NO: 333146 - DNA, 25 bp, Homo sapien
tgggccatggcattggcctctaggc

SEQ ID NO: 333147 - DNA, 25 bp, Homo sapien
cttgggccatggcattggcctctag

SEQ ID NO: 333148 - DNA, 25 bp, Homo sapien
ttgggccatggcattggcctctagg

SEQ ID NO: 333149 - DNA, 25 bp, Homo sapien
ccttgggccatggcattggcctcta

SEQ ID NO: 333150 - DNA, 25 bp, Homo sapien
taatacccttcagtctgggagtgga

SEQ ID NO: 333151 - DNA, 25 bp, Homo sapien
tagattgggtagtctgcgacaagtc

SEQ ID NO: 333152 - DNA, 25 bp, Homo sapien
ctagaggctcttttcagctagcatt

SEQ ID NO: 333153 - DNA, 25 bp, Homo sapien
tgaacaaatgcgcaacagtggaaaa

SEQ ID NO: 333154 - DNA, 25 bp, Homo sapien
caccgcgcccggcctttttgagacg

SEQ ID NO: 333155 - DNA, 25 bp, Homo sapien
cgaagtgccgggatgacaggcgtga

SEQ ID NO: 333156 - DNA, 25 bp, Homo sapien
cgcgcccggcctttttgagacggag

SEQ ID NO: 333157 - DNA, 25 bp, Homo sapien
gaagtgccgggatgacaggcgtgag

SEQ ID NO: 333158 - DNA, 25 bp, Homo sapien
gatctgcaagaactccttgctcttg

SEQ ID NO: 333159 - DNA, 25 bp, Homo sapien
aaatcaccatccttgagcgtcggca

SEQ ID NO: 333160 - DNA, 25 bp, Homo sapien
ttgagcgtcggcagtttccccaggc

SEQ ID NO: 333161 - DNA, 25 bp, Homo sapien
tccccaggctgttgatctgcaagaa

SEQ ID NO: 333162 - DNA, 25 bp, Homo sapien
gctttgtgaatttatatgcgtgcat

SEQ ID NO: 333163 - DNA, 25 bp, Homo sapien
cagagcagaaggtaacgttatcctc

SEQ ID NO: 333164 - DNA, 25 bp, Homo sapien
cacgcaagaactctgtcaactccat

SEQ ID NO: 333165 - DNA, 25 bp, Homo sapien
gagaggctgtgatcccttcaaggcc

SEQ ID NO: 333166 - DNA, 25 bp, Homo sapien
ggctgggacaccaggtcaagaaaca

SEQ ID NO: 333167 - DNA, 25 bp, Homo sapien
caaatccacggtgcgcagctctaag

SEQ ID NO: 333168 - DNA, 25 bp, Homo sapien
gcgaagatgtagacggcgcggctgg

SEQ ID NO: 333169 - DNA, 25 bp, Homo sapien
ctttgaccaaatccacggtgcgcag

SEQ ID NO: 333170 - DNA, 25 bp, Homo sapien
gacagcggggatggcagtgaaggcg

SEQ ID NO: 333171 - DNA, 25 bp, Homo sapien
gcgctgagcgcggtgtgggcagcag

SEQ ID NO: 333172 - DNA, 25 bp, Homo sapien
gcagctgtggcaggatcccggcgcg

SEQ ID NO: 333173 - DNA, 25 bp, Homo sapien
caggatcccggcgcgccgggaaata

SEQ ID NO: 333174 - DNA, 25 bp, Homo sapien
cccagaaacgactgggcgccgccgt

SEQ ID NO: 333175 - DNA, 25 bp, Homo sapien
tggaaaggccccagcgcacggacat

SEQ ID NO: 333176 - DNA, 25 bp, Homo sapien
gggaccctcgactggcagggaggac

SEQ ID NO: 333177 - DNA, 25 bp, Homo sapien
tgcccagttccaggcgtcgccctga

SEQ ID NO: 333178 - DNA, 25 bp, Homo sapien
cctgagttcgaggagtagacgagac

SEQ ID NO: 333179 - DNA, 25 bp, Homo sapien
ggagctcccacttcgtgcacaggat

SEQ ID NO: 333180 - DNA, 25 bp, Homo sapien
caggaatgactgtccgggaacctcc

SEQ ID NO: 333181 - DNA, 25 bp, Homo sapien
tgggcccgggactctagctgaatct

SEQ ID NO: 333182 - DNA, 25 bp, Homo sapien
taatatgtacagagcacttacccag

SEQ ID NO: 333183 - DNA, 25 bp, Homo sapien
tagacacgcgccctgctgaaagtaa

SEQ ID NO: 333184 - DNA, 25 bp, Homo sapien
tgaaagtaagggaccgcctctctgg

SEQ ID NO: 333185 - DNA, 25 bp, Homo sapien
tctggaggatccatcgggcaataag

SEQ ID NO: 333186 - DNA, 25 bp, Homo sapien
ttgtttgcagaagcgggaggtaccc

SEQ ID NO: 333187 - DNA, 25 bp, Homo sapien
tctaatagggctaggaaccgggcga

SEQ ID NO: 333188 - DNA, 25 bp, Homo sapien
agcttgagagggaaacccacctggc

SEQ ID NO: 333189 - DNA, 25 bp, Homo sapien
gagacgatgggacttccggaaatca

SEQ ID NO: 333190 - DNA, 25 bp, Homo sapien
ttgagcaaatgtagattctggtttc

SEQ ID NO: 333191 - DNA, 25 bp, Homo sapien
tacatagtacgtacattatattagg

SEQ ID NO: 333192 - DNA, 25 bp, Homo sapien
aaatacgtatagactttattccttg

SEQ ID NO: 333193 - DNA, 25 bp, Homo sapien
actgaaaatacgtatagactttatt

SEQ ID NO: 333194 - DNA, 25 bp, Homo sapien
acggtttgagtcttgccaaagggag

SEQ ID NO: 333195 - DNA, 25 bp, Homo sapien
aggacggtttgagtcttgccaaagg

SEQ ID NO: 333196 - DNA, 25 bp, Homo sapien
gctgggaggacggtttgagtcttgc

SEQ ID NO: 333197 - DNA, 25 bp, Homo sapien
ggaggacggtttgagtcttgccaaa

SEQ ID NO: 333198 - DNA, 25 bp, Homo sapien
ataatccaaagctggttatctccag

SEQ ID NO: 333199 - DNA, 25 bp, Homo sapien
acaggaatgttgcatgcgggataat

SEQ ID NO: 333200 - DNA, 25 bp, Homo sapien
ttgcatgcgggataatccaaagctg

SEQ ID NO: 333201 - DNA, 25 bp, Homo sapien
agaggattatgtgatcacaggaatg

SEQ ID NO: 333202 - DNA, 25 bp, Homo sapien
aaaaagtcatgaccgtccctatctt

SEQ ID NO: 333203 - DNA, 25 bp, Homo sapien
agtcatgaccgtccctatcttgcca

SEQ ID NO: 333204 - DNA, 25 bp, Homo sapien
tccctatcttgccaatctgccagga

SEQ ID NO: 333205 - DNA, 25 bp, Homo sapien
cctatcttgccaatctgccaggact

SEQ ID NO: 333206 - DNA, 25 bp, Homo sapien
caggtactcccactgtgggtactca

SEQ ID NO: 333207 - DNA, 25 bp, Homo sapien
ctgtgggtactcaggacagcctgcc

SEQ ID NO: 333208 - DNA, 25 bp, Homo sapien
acatcttgcaagacccctgccaggt

SEQ ID NO: 333209 - DNA, 25 bp, Homo sapien
aaagatatcatcagctccttggcta

SEQ ID NO: 333210 - DNA, 25 bp, Homo sapien
ggtgtgggaggtagccgcacatcat

SEQ ID NO: 333211 - DNA, 25 bp, Homo sapien
tgggaggtagccgcacatcatgacc

SEQ ID NO: 333212 - DNA, 25 bp, Homo sapien
tgtgggaggtagccgcacatcatga

SEQ ID NO: 333213 - DNA, 25 bp, Homo sapien
gaggtagccgcacatcatgacccag

SEQ ID NO: 333214 - DNA, 25 bp, Homo sapien
ccctctcagaggtaacagcaagttt

SEQ ID NO: 333215 - DNA, 25 bp, Homo sapien
tgtaaagtacctgtagaggacctag

SEQ ID NO: 333216 - DNA, 25 bp, Homo sapien
gcgggagtatgaacagcctgtcttc

SEQ ID NO: 333217 - DNA, 25 bp, Homo sapien
tagcctcggtgtgtgtgccgtacac

SEQ ID NO: 333218 - DNA, 25 bp, Homo sapien
cctgggtcaaatgaacctcccgcct

SEQ ID NO: 333219 - DNA, 25 bp, Homo sapien
ctacaactcctgggtcaaatgaacc

SEQ ID NO: 333220 - DNA, 25 bp, Homo sapien
ctgggtcaaatgaacctcccgcctt

SEQ ID NO: 333221 - DNA, 25 bp, Homo sapien
ctcctagacatggatgtggctcaag

SEQ ID NO: 333222 - DNA, 25 bp, Homo sapien
ttcaagcttctcatgcccttacttc

SEQ ID NO: 333223 - DNA, 25 bp, Homo sapien
cttcctcctagacatggatgtggct

SEQ ID NO: 333224 - DNA, 25 bp, Homo sapien
ctttcaagcttctcatgcccttact

SEQ ID NO: 333225 - DNA, 25 bp, Homo sapien
gaggttgccaactggagatggttca

SEQ ID NO: 333226 - DNA, 25 bp, Homo sapien
tgtctagacatccaggccaatggtc

SEQ ID NO: 333227 - DNA, 25 bp, Homo sapien
ccaggtttgggttgcagacgcttct

SEQ ID NO: 333228 - DNA, 25 bp, Homo sapien
ctttaactcggtcacagaacgccag

SEQ ID NO: 333229 - DNA, 25 bp, Homo sapien
gagccttcccggttcacagacttac

SEQ ID NO: 333230 - DNA, 25 bp, Homo sapien
caatcccacatgacccttgcactgc

SEQ ID NO: 333231 - DNA, 25 bp, Homo sapien
taaaagagagccttcccggttcaca

SEQ ID NO: 333232 - DNA, 25 bp, Homo sapien
tgacccttgcactgccccgggggtg

SEQ ID NO: 333233 - DNA, 25 bp, Homo sapien
gagcagagccagaaattcattcaat

SEQ ID NO: 333234 - DNA, 25 bp, Homo sapien
gcagagccagaaattcattcaatcc

SEQ ID NO: 333235 - DNA, 25 bp, Homo sapien
agcagagccagaaattcattcaatc

SEQ ID NO: 333236 - DNA, 25 bp, Homo sapien
gtggctccagtctgcggcagtccca

SEQ ID NO: 333237 - DNA, 25 bp, Homo sapien
atggatcccctactacccctacgca

SEQ ID NO: 333238 - DNA, 25 bp, Homo sapien
ctgcggcagtcccacatggatcccc

SEQ ID NO: 333239 - DNA, 25 bp, Homo sapien
cagaccctgatgtgtccttactggg

SEQ ID NO: 333240 - DNA, 25 bp, Homo sapien
actacgccgatggaggagatggaca

SEQ ID NO: 333241 - DNA, 25 bp, Homo sapien
tgcggttgtcctcggcggtgcccac

SEQ ID NO: 333242 - DNA, 25 bp, Homo sapien
cagggctagctccttggtgagaaac

SEQ ID NO: 333243 - DNA, 25 bp, Homo sapien
agggctcggtggacccgctcagcgc

SEQ ID NO: 333244 - DNA, 25 bp, Homo sapien
catgaaaagttttgcccgaagttgg

SEQ ID NO: 333245 - DNA, 25 bp, Homo sapien
ctgagggggacatgaaaagttttgc

SEQ ID NO: 333246 - DNA, 25 bp, Homo sapien
acatgaaaagttttgcccgaagttg

SEQ ID NO: 333247 - DNA, 25 bp, Homo sapien
tgcccgaagttggagccggccgggc

SEQ ID NO: 333248 - DNA, 25 bp, Homo sapien
ccgagcgcgcgaaagccgaaacgcg

SEQ ID NO: 333249 - DNA, 25 bp, Homo sapien
cgaaagccgaaacgcgcagtgttcg

SEQ ID NO: 333250 - DNA, 25 bp, Homo sapien
cgcgcgaaagccgaaacgcgcagtg

SEQ ID NO: 333251 - DNA, 25 bp, Homo sapien
gagcgcgcgaaagccgaaacgcgca

SEQ ID NO: 333252 - DNA, 25 bp, Homo sapien
ctcgccccgtgctgcccggcccacg

SEQ ID NO: 333253 - DNA, 25 bp, Homo sapien
tcgccccgtgctgcccggcccacgc

SEQ ID NO: 333254 - DNA, 25 bp, Homo sapien
ctcccctcgccccgtgctgcccggc

SEQ ID NO: 333255 - DNA, 25 bp, Homo sapien
ccccgtgctgcccggcccacgctta

SEQ ID NO: 333256 - DNA, 25 bp, Homo sapien
gcggcgcagagtcgtttctccagcc

SEQ ID NO: 333257 - DNA, 25 bp, Homo sapien
cagcggcggcgcagagtcgtttctc

SEQ ID NO: 333258 - DNA, 25 bp, Homo sapien
gcgggcaaattcgtgtccagctcca

SEQ ID NO: 333259 - DNA, 25 bp, Homo sapien
ggcgggcaaattcgtgtccagctcc

SEQ ID NO: 333260 - DNA, 25 bp, Homo sapien
ggcgggcagaggaacggaaacagct

SEQ ID NO: 333261 - DNA, 25 bp, Homo sapien
gtacccaaggctcgcggaccaggga

SEQ ID NO: 333262 - DNA, 25 bp, Homo sapien
tggctggacagagactcggcgctcc

SEQ ID NO: 333263 - DNA, 25 bp, Homo sapien
gcaacctggcttctcattggctgga

SEQ ID NO: 333264 - DNA, 25 bp, Homo sapien
ggcgaggcgccacagcaacctggct

SEQ ID NO: 333265 - DNA, 25 bp, Homo sapien
tctgcctgtgtagcctcttgtgccg

SEQ ID NO: 333266 - DNA, 25 bp, Homo sapien
gcctggtccccattgacatctgcct

SEQ ID NO: 333267 - DNA, 25 bp, Homo sapien
ttgacatctgcctgtgtagcctctt

SEQ ID NO: 333268 - DNA, 25 bp, Homo sapien
cctcttgtgccggtggtgagccact

SEQ ID NO: 333269 - DNA, 25 bp, Homo sapien
tgggtccgctttcaaagactcagca

SEQ ID NO: 333270 - DNA, 25 bp, Homo sapien
gctgcattaaggtcttcagattctc

SEQ ID NO: 333271 - DNA, 25 bp, Homo sapien
taacagcaggttctactggaggcag

SEQ ID NO: 333272 - DNA, 25 bp, Homo sapien
tgctgccaccgtgggtccgctttca

SEQ ID NO: 333273 - DNA, 25 bp, Homo sapien
agctccgtgattgccaccaagccag

SEQ ID NO: 333274 - DNA, 25 bp, Homo sapien
aggaacttgtcctcgagcagctgca

SEQ ID NO: 333275 - DNA, 25 bp, Homo sapien
gccacagagatacggggcccagtaa

SEQ ID NO: 333276 - DNA, 25 bp, Homo sapien
agctgcaggcatccgtccagctcag

SEQ ID NO: 333277 - DNA, 25 bp, Homo sapien
ctcgggtggcactgactcgcccagg

SEQ ID NO: 333278 - DNA, 25 bp, Homo sapien
cgggtggcactgactcgcccaggaa

SEQ ID NO: 333279 - DNA, 25 bp, Homo sapien
tgactcgcccaggaacacagggatt

SEQ ID NO: 333280 - DNA, 25 bp, Homo sapien
cactgactcgcccaggaacacaggg

SEQ ID NO: 333281 - DNA, 25 bp, Homo sapien
ccactcatagccaccagtagctctc

SEQ ID NO: 333282 - DNA, 25 bp, Homo sapien
actcatagccaccagtagctctcat

SEQ ID NO: 333283 - DNA, 25 bp, Homo sapien
ttctttccactcatagccaccagta

SEQ ID NO: 333284 - DNA, 25 bp, Homo sapien
tttccactcatagccaccagtagct

SEQ ID NO: 333285 - DNA, 25 bp, Homo sapien
ccacaaagtaaccttgtatatgtat

SEQ ID NO: 333286 - DNA, 25 bp, Homo sapien
cagacatcagagaaacagatcccgt

SEQ ID NO: 333287 - DNA, 25 bp, Homo sapien
gtctgatgggtttctaagaacatct

SEQ ID NO: 333288 - DNA, 25 bp, Homo sapien
tctgacgtatcttttaccgagatcc

SEQ ID NO: 333289 - DNA, 25 bp, Homo sapien
tcgtttctgggtcagggcgacgcct

SEQ ID NO: 333290 - DNA, 25 bp, Homo sapien
tcagggcgacgcctggaactgggca

SEQ ID NO: 333291 - DNA, 25 bp, Homo sapien
tcagatgtccgtgcgctggggcctt

SEQ ID NO: 333292 - DNA, 25 bp, Homo sapien
gacggcggcgcccagtcgtttctgg

SEQ ID NO: 333293 - DNA, 25 bp, Homo sapien
gactgagtggccttgaagggatcac

SEQ ID NO: 333294 - DNA, 25 bp, Homo sapien
tgcagcgtctgccaccagagaatgc

SEQ ID NO: 333295 - DNA, 25 bp, Homo sapien
gggatcacagcctctctgaacctta

SEQ ID NO: 333296 - DNA, 25 bp, Homo sapien
caccagagaatgctgtggactgagt

SEQ ID NO: 333297 - DNA, 25 bp, Homo sapien
cagacgccggaccactggtatccat

SEQ ID NO: 333298 - DNA, 25 bp, Homo sapien
ctgagctgtaagtaccagacgccgg

SEQ ID NO: 333299 - DNA, 25 bp, Homo sapien
taccagacgccggaccactggtatc

SEQ ID NO: 333300 - DNA, 25 bp, Homo sapien
gtaagtaccagacgccggaccactg

SEQ ID NO: 333301 - DNA, 25 bp, Homo sapien
tggaacgcaacaggactgccatgga

SEQ ID NO: 333302 - DNA, 25 bp, Homo sapien
caatggctggaggacaagttcctgg

SEQ ID NO: 333303 - DNA, 25 bp, Homo sapien
gaaggtggaacgcaacaggactgcc

SEQ ID NO: 333304 - DNA, 25 bp, Homo sapien
ggagaaggtggaacgcaacaggact

SEQ ID NO: 333305 - DNA, 25 bp, Homo sapien
gctttcctgggtgctgagctatgcc

SEQ ID NO: 333306 - DNA, 25 bp, Homo sapien
tgaactgtttgagggacggccacga

SEQ ID NO: 333307 - DNA, 25 bp, Homo sapien
agccggtggctctcggctatgaact

SEQ ID NO: 333308 - DNA, 25 bp, Homo sapien
tcttgagcatcctggaacaggcggc

SEQ ID NO: 333309 - DNA, 25 bp, Homo sapien
caggtgcagcatacataaccagtaa

SEQ ID NO: 333310 - DNA, 25 bp, Homo sapien
cagacaagacactcagtgtccttgg

SEQ ID NO: 333311 - DNA, 25 bp, Homo sapien
ctactcctcaggtgcagcatacata

SEQ ID NO: 333312 - DNA, 25 bp, Homo sapien
tccttggcagtgctgctactcctca

SEQ ID NO: 333313 - DNA, 25 bp, Homo sapien
cagctcatatagagcaagctagcca

SEQ ID NO: 333314 - DNA, 25 bp, Homo sapien
tacatgcagctcatatagagcaagc

SEQ ID NO: 333315 - DNA, 25 bp, Homo sapien
tgcagctcatatagagcaagctagc

SEQ ID NO: 333316 - DNA, 25 bp, Homo sapien
gctcatatagagcaagctagccaca

SEQ ID NO: 333317 - DNA, 25 bp, Homo sapien
ctctcagccaaggtgaagtccccat

SEQ ID NO: 333318 - DNA, 25 bp, Homo sapien
tcaaggcccggcaccttcctcaggg

SEQ ID NO: 333319 - DNA, 25 bp, Homo sapien
catccttcaaggcccggcaccttcc

SEQ ID NO: 333320 - DNA, 25 bp, Homo sapien
ccttcaaggcccggcaccttcctca

SEQ ID NO: 333321 - DNA, 25 bp, Homo sapien
ctgggcaaaggcatcgctgtgctgc

SEQ ID NO: 333322 - DNA, 25 bp, Homo sapien
gggcaaaggcatcgctgtgctgctg

SEQ ID NO: 333323 - DNA, 25 bp, Homo sapien
gcaaaggcatcgctgtgctgctggc

SEQ ID NO: 333324 - DNA, 25 bp, Homo sapien
tgggcaaaggcatcgctgtgctgct

SEQ ID NO: 333325 - DNA, 25 bp, Homo sapien
caggcagggattcgtggccaatatc

SEQ ID NO: 333326 - DNA, 25 bp, Homo sapien
gggacaggcagggattcgtggccaa

SEQ ID NO: 333327 - DNA, 25 bp, Homo sapien
gggattcgtggccaatatcccctgg

SEQ ID NO: 333328 - DNA, 25 bp, Homo sapien
gcagggattcgtggccaatatcccc

SEQ ID NO: 333329 - DNA, 25 bp, Homo sapien
aaggaaggtggctcagattgctaag

SEQ ID NO: 333330 - DNA, 25 bp, Homo sapien
taaggaaggtggctcagattgctaa

SEQ ID NO: 333331 - DNA, 25 bp, Homo sapien
ggaaggtggctcagattgctaagcc

SEQ ID NO: 333332 - DNA, 25 bp, Homo sapien
gaaggtggctcagattgctaagcca

SEQ ID NO: 333333 - DNA, 25 bp, Homo sapien
cggccaactgcattagtcgatcatg

SEQ ID NO: 333334 - DNA, 25 bp, Homo sapien
gtcccagtcggccaactgcattagt

SEQ ID NO: 333335 - DNA, 25 bp, Homo sapien
ttgaaaagtcccagtcggccaactg

SEQ ID NO: 333336 - DNA, 25 bp, Homo sapien
cattagtcgatcatgggcctcccta

SEQ ID NO: 333337 - DNA, 25 bp, Homo sapien
cttggagctgttgaggaagacatta

SEQ ID NO: 333338 - DNA, 25 bp, Homo sapien
cactcagctagcttggagctgttga

SEQ ID NO: 333339 - DNA, 25 bp, Homo sapien
gcatacgccactcagctagcttgga

SEQ ID NO: 333340 - DNA, 25 bp, Homo sapien
gaagacattatagttggctgccatg

SEQ ID NO: 333341 - DNA, 25 bp, Homo sapien
agacgaagacaaagacgtggtcagc

SEQ ID NO: 333342 - DNA, 25 bp, Homo sapien
gatagacgaagacaaagacgtggtc

SEQ ID NO: 333343 - DNA, 25 bp, Homo sapien
ctgtagatagacgaagacaaagacg

SEQ ID NO: 333344 - DNA, 25 bp, Homo sapien
tagatagacgaagacaaagacgtgg

SEQ ID NO: 333345 - DNA, 25 bp, Homo sapien
tcccggtgatgaacatcttatcctg

SEQ ID NO: 333346 - DNA, 25 bp, Homo sapien
atttggttcccggtgatgaacatct

SEQ ID NO: 333347 - DNA, 25 bp, Homo sapien
gttcccggtgatgaacatcttatcc

SEQ ID NO: 333348 - DNA, 25 bp, Homo sapien
tggttcccggtgatgaacatcttat

SEQ ID NO: 333349 - DNA, 25 bp, Homo sapien
tgggcagctgaaaggccgtgtgttg

SEQ ID NO: 333350 - DNA, 25 bp, Homo sapien
cttgcggcacaggtagtaaaggatg

SEQ ID NO: 333351 - DNA, 25 bp, Homo sapien
ctgtacttgcggcacaggtagtaaa

SEQ ID NO: 333352 - DNA, 25 bp, Homo sapien
aactcatccacacgggcacgtgcgt

SEQ ID NO: 333353 - DNA, 25 bp, Homo sapien
caccagtgcgatggtgcgctgtact

SEQ ID NO: 333354 - DNA, 25 bp, Homo sapien
tcaccagagctgtctgtctgacagt

SEQ ID NO: 333355 - DNA, 25 bp, Homo sapien
caccagagctgtctgtctgacagtc

SEQ ID NO: 333356 - DNA, 25 bp, Homo sapien
accagagctgtctgtctgacagtca

SEQ ID NO: 333357 - DNA, 25 bp, Homo sapien
tcaaccaccccggtgtggcctgggc

SEQ ID NO: 333358 - DNA, 25 bp, Homo sapien
ggaagcttcctgagggggttgatgt

SEQ ID NO: 333359 - DNA, 25 bp, Homo sapien
ttcacttaagataaatttcccatct

SEQ ID NO: 333360 - DNA, 25 bp, Homo sapien
ggttgatgtcaatgtattctttgct

SEQ ID NO: 333361 - DNA, 25 bp, Homo sapien
aaatttcccatctttgaggctggga

SEQ ID NO: 333362 - DNA, 25 bp, Homo sapien
tcgagaagatgtagacggcacggca

SEQ ID NO: 333363 - DNA, 25 bp, Homo sapien
ggatgtcatgcttcttcgagaagat

SEQ ID NO: 333364 - DNA, 25 bp, Homo sapien
catgcttcttcgagaagatgtagac

SEQ ID NO: 333365 - DNA, 25 bp, Homo sapien
gacggcacggcagggtgctgacagc

SEQ ID NO: 333366 - DNA, 25 bp, Homo sapien
agacacatgccaggccccacagctg

SEQ ID NO: 333367 - DNA, 25 bp, Homo sapien
ctgcagctggccagccacagacctg

SEQ ID NO: 333368 - DNA, 25 bp, Homo sapien
gttgagacacatgccaggccccaca

SEQ ID NO: 333369 - DNA, 25 bp, Homo sapien
gccacagacctgggcctatgtctgg

SEQ ID NO: 333370 - DNA, 25 bp, Homo sapien
tgacctctggccataatatgactta

SEQ ID NO: 333371 - DNA, 25 bp, Homo sapien
cactcatcggtgcactatgtacagt

SEQ ID NO: 333372 - DNA, 25 bp, Homo sapien
ctttaacgtcgaatatgctgcaggc

SEQ ID NO: 333373 - DNA, 25 bp, Homo sapien
tcagaattaatctcgggctttaacg

SEQ ID NO: 333374 - DNA, 25 bp, Homo sapien
caaaattctccgtgctacataatac

SEQ ID NO: 333375 - DNA, 25 bp, Homo sapien
tctccgtgctacataatacaccaca

SEQ ID NO: 333376 - DNA, 25 bp, Homo sapien
gtgctacataatacaccacatccta

SEQ ID NO: 333377 - DNA, 25 bp, Homo sapien
aattctccgtgctacataatacacc

SEQ ID NO: 333378 - DNA, 25 bp, Homo sapien
accaagggcagccttcatatgggcc

SEQ ID NO: 333379 - DNA, 25 bp, Homo sapien
caagggcagccttcatatgggcctg

SEQ ID NO: 333380 - DNA, 25 bp, Homo sapien
agtaccaagggcagccttcatatgg

SEQ ID NO: 333381 - DNA, 25 bp, Homo sapien
tcagtaccaagggcagccttcatat

SEQ ID NO: 333382 - DNA, 25 bp, Homo sapien
agaggtcgcagccaacggcagtggg

SEQ ID NO: 333383 - DNA, 25 bp, Homo sapien
tcttggaagaggtcgcagccaacgg

SEQ ID NO: 333384 - DNA, 25 bp, Homo sapien
tggaagaggtcgcagccaacggcag

SEQ ID NO: 333385 - DNA, 25 bp, Homo sapien
gaagaggtcgcagccaacggcagtg

SEQ ID NO: 333386 - DNA, 25 bp, Homo sapien
ccgagggcaggtgggtaggaaagct

SEQ ID NO: 333387 - DNA, 25 bp, Homo sapien
catgcccagagtccccccgagggca

SEQ ID NO: 333388 - DNA, 25 bp, Homo sapien
cccatgcccagagtccccccgaggg

SEQ ID NO: 333389 - DNA, 25 bp, Homo sapien
gggcaggtgggtaggaaagcttcac

SEQ ID NO: 333390 - DNA, 25 bp, Homo sapien
agggagatctgctccattgccagga

SEQ ID NO: 333391 - DNA, 25 bp, Homo sapien
ttccagggagatctgctccattgcc

SEQ ID NO: 333392 - DNA, 25 bp, Homo sapien
tccagggagatctgctccattgcca

SEQ ID NO: 333393 - DNA, 25 bp, Homo sapien
cagggagatctgctccattgccagg

SEQ ID NO: 333394 - DNA, 25 bp, Homo sapien
gcatgacagggcctaggaagctcac

SEQ ID NO: 333395 - DNA, 25 bp, Homo sapien
tgcatgacagggcctaggaagctca

SEQ ID NO: 333396 - DNA, 25 bp, Homo sapien
ttgcacaggtagacattggtggcag

SEQ ID NO: 333397 - DNA, 25 bp, Homo sapien
cttgcacaggtagacattggtggca

SEQ ID NO: 333398 - DNA, 25 bp, Homo sapien
caggcagctggatggtgacatgctt

SEQ ID NO: 333399 - DNA, 25 bp, Homo sapien
tggcaggcagctggatggtgacatg

SEQ ID NO: 333400 - DNA, 25 bp, Homo sapien
acgccaagtactcatccacgcaggt

SEQ ID NO: 333401 - DNA, 25 bp, Homo sapien
tgcagctcaggtgggtaccagtgtc

SEQ ID NO: 333402 - DNA, 25 bp, Homo sapien
atccacgcaggtgcgggcttgcagc

SEQ ID NO: 333403 - DNA, 25 bp, Homo sapien
caggtgggtaccagtgtccccgtat

SEQ ID NO: 333404 - DNA, 25 bp, Homo sapien
ctttcgactcaggtataaaacgatg

SEQ ID NO: 333405 - DNA, 25 bp, Homo sapien
tactttcgactcaggtataaaacga

SEQ ID NO: 333406 - DNA, 25 bp, Homo sapien
ctggtactttcgactcaggtataaa

SEQ ID NO: 333407 - DNA, 25 bp, Homo sapien
actttcgactcaggtataaaacgat

SEQ ID NO: 333408 - DNA, 25 bp, Homo sapien
gggggtgtcagagatcttttctcca

SEQ ID NO: 333409 - DNA, 25 bp, Homo sapien
gggtgtcagagatcttttctccagc

SEQ ID NO: 333410 - DNA, 25 bp, Homo sapien
gcagggggtgtcagagatcttttct

SEQ ID NO: 333411 - DNA, 25 bp, Homo sapien
cagggggtgtcagagatcttttctc

SEQ ID NO: 333412 - DNA, 25 bp, Homo sapien
ctagtaggaagtcgccatctctgag

SEQ ID NO: 333413 - DNA, 25 bp, Homo sapien
tgctagtaggaagtcgccatctctg

SEQ ID NO: 333414 - DNA, 25 bp, Homo sapien
taggaagtcgccatctctgagggca

SEQ ID NO: 333415 - DNA, 25 bp, Homo sapien
agtaggaagtcgccatctctgaggg

SEQ ID NO: 333416 - DNA, 25 bp, Homo sapien
ctgaaaagggatgtcattctgcctg

SEQ ID NO: 333417 - DNA, 25 bp, Homo sapien
cccaagccaactccactgtctgcag

SEQ ID NO: 333418 - DNA, 25 bp, Homo sapien
tctgcctggcaaaagtggatagcat

SEQ ID NO: 333419 - DNA, 25 bp, Homo sapien
ctgtctgcagctgaaaagggatgtc

SEQ ID NO: 333420 - DNA, 25 bp, Homo sapien
gtctgacctatggatggaactggct

SEQ ID NO: 333421 - DNA, 25 bp, Homo sapien
tacagctccagggaattgtccttga

SEQ ID NO: 333422 - DNA, 25 bp, Homo sapien
cccagtgactaacagagaggcttcc

SEQ ID NO: 333423 - DNA, 25 bp, Homo sapien
tgggaacatgtttggctgggactct

SEQ ID NO: 333424 - DNA, 25 bp, Homo sapien
cacagtgcccacttctttgagtttc

SEQ ID NO: 333425 - DNA, 25 bp, Homo sapien
ccagggcgctgagcgggtccaccga

SEQ ID NO: 333426 - DNA, 25 bp, Homo sapien
tgtccatctcctccatcggcgtagt

SEQ ID NO: 333427 - DNA, 25 bp, Homo sapien
gtgggcaccgccgaggacaaccgca

SEQ ID NO: 333428 - DNA, 25 bp, Homo sapien
gaaatgcagtgattaaaggacacaa

SEQ ID NO: 333429 - DNA, 25 bp, Homo sapien
tcaaaatgaaatgcagtgattaaag

SEQ ID NO: 333430 - DNA, 25 bp, Homo sapien
atgaaatgcagtgattaaaggacac

SEQ ID NO: 333431 - DNA, 25 bp, Homo sapien
ggcctcagtgtgcatcattctcatt

SEQ ID NO: 333432 - DNA, 25 bp, Homo sapien
tggtggcttcgggaggtgaggtgct

SEQ ID NO: 333433 - DNA, 25 bp, Homo sapien
gggcaagtcttaggcaagccattcc

SEQ ID NO: 333434 - DNA, 25 bp, Homo sapien
gacggtgcaagggtgaggtttccca

SEQ ID NO: 333435 - DNA, 25 bp, Homo sapien
ctgctgaggacggtgcaagggtgag

SEQ ID NO: 333436 - DNA, 25 bp, Homo sapien
tggccttcagaatgacctcatgggc

SEQ ID NO: 333437 - DNA, 25 bp, Homo sapien
ccatgtggccagcttgggtcggcct

SEQ ID NO: 333438 - DNA, 25 bp, Homo sapien
gccagcttgggtcggccttcgaaga

SEQ ID NO: 333439 - DNA, 25 bp, Homo sapien
ttgggtcggccttcgaagacttggc

SEQ ID NO: 333440 - DNA, 25 bp, Homo sapien
gaaaagggtacagactggggatgga

SEQ ID NO: 333441 - DNA, 25 bp, Homo sapien
ctgtggggaaaagggtacagactgg

SEQ ID NO: 333442 - DNA, 25 bp, Homo sapien
aaaagggtacagactggggatggat

SEQ ID NO: 333443 - DNA, 25 bp, Homo sapien
tgcatcagctccgtgatggctacga

SEQ ID NO: 333444 - DNA, 25 bp, Homo sapien
gggagatactggctcacccaggaaa

SEQ ID NO: 333445 - DNA, 25 bp, Homo sapien
gctaaggagatgtgaggaccagtaa

SEQ ID NO: 333446 - DNA, 25 bp, Homo sapien
tcctcgagcaactgcagggtcacat

SEQ ID NO: 333447 - DNA, 25 bp, Homo sapien
tatcggacagcacttgactaaatga

SEQ ID NO: 333448 - DNA, 25 bp, Homo sapien
tagactgagctagtgacctgatctc

SEQ ID NO: 333449 - DNA, 25 bp, Homo sapien
cataagccgttcctagatgagctac

SEQ ID NO: 333450 - DNA, 25 bp, Homo sapien
ttagcttagaagagaacagcctcac

SEQ ID NO: 333451 - DNA, 25 bp, Homo sapien
ccgcagagtcgtgtgctgccatgcc

SEQ ID NO: 333452 - DNA, 25 bp, Homo sapien
ttctccgcagagtcgtgtgctgcca

SEQ ID NO: 333453 - DNA, 25 bp, Homo sapien
gcagcttctccgcagagtcgtgtgc

SEQ ID NO: 333454 - DNA, 25 bp, Homo sapien
cttatgccacaaggcccggaggcag

SEQ ID NO: 333455 - DNA, 25 bp, Homo sapien
ccagtagtcagggaccttatatttg

SEQ ID NO: 333456 - DNA, 25 bp, Homo sapien
gaccttatatttgcgcgtcaggtag

SEQ ID NO: 333457 - DNA, 25 bp, Homo sapien
tagtcagggaccttatatttgcgcg

SEQ ID NO: 333458 - DNA, 25 bp, Homo sapien
tatttgcgcgtcaggtagagcagga

SEQ ID NO: 333459 - DNA, 25 bp, Homo sapien
tgggattccgaccagcctctgatgg

SEQ ID NO: 333460 - DNA, 25 bp, Homo sapien
gaattcatcggaggtgcgtccatcc

SEQ ID NO: 333461 - DNA, 25 bp, Homo sapien
gaaaacctctgtatctgccacgggc

SEQ ID NO: 333462 - DNA, 25 bp, Homo sapien
ggattcaacttcttgggaccagctg

SEQ ID NO: 333463 - DNA, 25 bp, Homo sapien
gcaaaggcatcgcttaagtgctgac

SEQ ID NO: 333464 - DNA, 25 bp, Homo sapien
aagtccccgtccttcaaggctggca

SEQ ID NO: 333465 - DNA, 25 bp, Homo sapien
gctggcaccttcttgagggggttca

SEQ ID NO: 333466 - DNA, 25 bp, Homo sapien
gtgaagtccccgtccttcaaggctg

SEQ ID NO: 333467 - DNA, 25 bp, Homo sapien
catttgacaaccagcttggacgtcc

SEQ ID NO: 333468 - DNA, 25 bp, Homo sapien
gcttagccaagtagagtcgccttac

SEQ ID NO: 333469 - DNA, 25 bp, Homo sapien
caagctgcacgataggtcacctgag

SEQ ID NO: 333470 - DNA, 25 bp, Homo sapien
caaaacagggtgtagggctcatcaa

SEQ ID NO: 333471 - DNA, 25 bp, Homo sapien
gaggacaaggtttcgggcggcagag

SEQ ID NO: 333472 - DNA, 25 bp, Homo sapien
agaggacaaggtttcgggcggcaga

SEQ ID NO: 333473 - DNA, 25 bp, Homo sapien
aggacaaggtttcgggcggcagagg

SEQ ID NO: 333474 - DNA, 25 bp, Homo sapien
gaccccaatgcagactggacgagtg

SEQ ID NO: 333475 - DNA, 25 bp, Homo sapien
tctcgctagattgccctgacgggag

SEQ ID NO: 333476 - DNA, 25 bp, Homo sapien
ttccgtgagaccgagcagagttttg

SEQ ID NO: 333477 - DNA, 25 bp, Homo sapien
gaaccccgtggtctattccgtgaga

SEQ ID NO: 333478 - DNA, 25 bp, Homo sapien
agggaatgtcgttcttcttggcaaa

SEQ ID NO: 333479 - DNA, 25 bp, Homo sapien
aaagatgtaaacagcgcggcagggc

SEQ ID NO: 333480 - DNA, 25 bp, Homo sapien
ccacgatgcgcagctcgaagggaat

SEQ ID NO: 333481 - DNA, 25 bp, Homo sapien
ctttaatcagatccacgatgcgcag

SEQ ID NO: 333482 - DNA, 25 bp, Homo sapien
accggaaaccagagggagtcagcaa

SEQ ID NO: 333483 - DNA, 25 bp, Homo sapien
ccaccgtccgcattttagaggagga

SEQ ID NO: 333484 - DNA, 25 bp, Homo sapien
tcttggctcaacactgcagagtcct

SEQ ID NO: 333485 - DNA, 25 bp, Homo sapien
acggacgcctgggacactctttagt

SEQ ID NO: 333486 - DNA, 25 bp, Homo sapien
tctttagtccaattgcgggcggcgg

SEQ ID NO: 333487 - DNA, 25 bp, Homo sapien
acaagataaaagtgagagtgtgtgg

SEQ ID NO: 333488 - DNA, 25 bp, Homo sapien
ttttttgactttgcccctctctgtc

SEQ ID NO: 333489 - DNA, 25 bp, Homo sapien
agagtgtgtgggttggttcgtttgt

SEQ ID NO: 333490 - DNA, 25 bp, Homo sapien
tagaaacaagataaaagtgagagtg

SEQ ID NO: 333491 - DNA, 25 bp, Homo sapien
catttcctttaaggaaggtggctca

SEQ ID NO: 333492 - DNA, 25 bp, Homo sapien
cacaagtacttctcccgaaactcac

SEQ ID NO: 333493 - DNA, 25 bp, Homo sapien
agccaatattcagctccacccgcat

SEQ ID NO: 333494 - DNA, 25 bp, Homo sapien
gccaatattcagctccacccgcata

SEQ ID NO: 333495 - DNA, 25 bp, Homo sapien
tcctcgtgaccattggatccaatgt

SEQ ID NO: 333496 - DNA, 25 bp, Homo sapien
ttcctcgtgaccattggatccaatg

SEQ ID NO: 333497 - DNA, 25 bp, Homo sapien
tctggcccacgtccctaacatctac

SEQ ID NO: 333498 - DNA, 25 bp, Homo sapien
cagcctctggcccacgtccctaaca

SEQ ID NO: 333499 - DNA, 25 bp, Homo sapien
cctctggcccacgtccctaacatct

SEQ ID NO: 333500 - DNA, 25 bp, Homo sapien
tcccacagcctctggcccacgtccc

SEQ ID NO: 333501 - DNA, 25 bp, Homo sapien
tggttcccggtgatgaacatcttat

SEQ ID NO: 333502 - DNA, 25 bp, Homo sapien
tcccggtgatgaacatcttatcctg

SEQ ID NO: 333503 - DNA, 25 bp, Homo sapien
atttggttcccggtgatgaacatct

SEQ ID NO: 333504 - DNA, 25 bp, Homo sapien
gttcccggtgatgaacatcttatcc

SEQ ID NO: 333505 - DNA, 25 bp, Homo sapien
ggatagatattgaacacttcccagg

SEQ ID NO: 333506 - DNA, 25 bp, Homo sapien
cacctcttttagcagttctgattgg

SEQ ID NO: 333507 - DNA, 25 bp, Homo sapien
gaaggtgccgggaaccatgcgttca

SEQ ID NO: 333508 - DNA, 25 bp, Homo sapien
tcccaggatataaagcagtttcacc

SEQ ID NO: 333509 - DNA, 25 bp, Homo sapien
tgggcagctgaaaggccgtgtgttg

SEQ ID NO: 333510 - DNA, 25 bp, Homo sapien
cttgcggcacaggtagtaaaggatg

SEQ ID NO: 333511 - DNA, 25 bp, Homo sapien
caccagtgcgatggtgcgctgtact

SEQ ID NO: 333512 - DNA, 25 bp, Homo sapien
ctgtacttgcggcacaggtagtaaa

SEQ ID NO: 333513 - DNA, 25 bp, Homo sapien
aactcatccacacgggcacgtgcgt

SEQ ID NO: 333514 - DNA, 25 bp, Homo sapien
tcaccagagctgtctgtctgacagt

SEQ ID NO: 333515 - DNA, 25 bp, Homo sapien
accagagctgtctgtctgacagtca

SEQ ID NO: 333516 - DNA, 25 bp, Homo sapien
tcaaccaccccggtgtggcctgggc

SEQ ID NO: 333517 - DNA, 25 bp, Homo sapien
caccagagctgtctgtctgacagtc

SEQ ID NO: 333518 - DNA, 25 bp, Homo sapien
aaatttcccatctttgaggctgggc

SEQ ID NO: 333519 - DNA, 25 bp, Homo sapien
ccatctttgaggctgggcagcttcc

SEQ ID NO: 333520 - DNA, 25 bp, Homo sapien
ggcagcttcctgagggggttgatgt

SEQ ID NO: 333521 - DNA, 25 bp, Homo sapien
gggttgatgtcaatgtatcctttgc

SEQ ID NO: 333522 - DNA, 25 bp, Homo sapien
acaatcagggtcatcttaacaggga

SEQ ID NO: 333523 - DNA, 25 bp, Homo sapien
tggacaaggatgcagcctacaagcc

SEQ ID NO: 333524 - DNA, 25 bp, Homo sapien
ggaagcttctcggacacaatcaggg

SEQ ID NO: 333525 - DNA, 25 bp, Homo sapien
gaaaagccgcaatctgtgtgtcctg

SEQ ID NO: 333526 - DNA, 25 bp, Homo sapien
tcgagaagatgtagacggcacggca

SEQ ID NO: 333527 - DNA, 25 bp, Homo sapien
catgcttcttcgagaagatgtagac

SEQ ID NO: 333528 - DNA, 25 bp, Homo sapien
ggatgtcatgcttcttcgagaagat

SEQ ID NO: 333529 - DNA, 25 bp, Homo sapien
gacggcacggcagggtgctgacagc

SEQ ID NO: 333530 - DNA, 25 bp, Homo sapien
acagccgcagttggccagccacaga

SEQ ID NO: 333531 - DNA, 25 bp, Homo sapien
cgcagttggccagccacagacctgg

SEQ ID NO: 333532 - DNA, 25 bp, Homo sapien
ccaggccccacagccgcagttggcc

SEQ ID NO: 333533 - DNA, 25 bp, Homo sapien
gttgagacacatgccaggccccaca

SEQ ID NO: 333534 - DNA, 25 bp, Homo sapien
tctggccagagtccctggccctgtg

SEQ ID NO: 333535 - DNA, 25 bp, Homo sapien
tgtctggccagagtccctggccctg

SEQ ID NO: 333536 - DNA, 25 bp, Homo sapien
tatgtctggccagagtccctggccc

SEQ ID NO: 333537 - DNA, 25 bp, Homo sapien
ctatgtctggccagagtccctggcc

SEQ ID NO: 333538 - DNA, 25 bp, Homo sapien
acgggcctgccacactgccagccgg

SEQ ID NO: 333539 - DNA, 25 bp, Homo sapien
gtatgagcttgtgggcctccagcaa

SEQ ID NO: 333540 - DNA, 25 bp, Homo sapien
gagctcagtaccaagggcagccgcc

SEQ ID NO: 333541 - DNA, 25 bp, Homo sapien
cgccaagcctcactgtggttcagag

SEQ ID NO: 333542 - DNA, 25 bp, Homo sapien
catgcccagagtccccccagagggc

SEQ ID NO: 333543 - DNA, 25 bp, Homo sapien
ccagagggcaggtgggtaggaaagc

SEQ ID NO: 333544 - DNA, 25 bp, Homo sapien
gccccatgcccagagtccccccaga

SEQ ID NO: 333545 - DNA, 25 bp, Homo sapien
gggcaggtgggtaggaaagcttcac

SEQ ID NO: 333546 - DNA, 25 bp, Homo sapien
agggagatctgctccattgccagga

SEQ ID NO: 333547 - DNA, 25 bp, Homo sapien
ttccagggagatctgctccattgcc

SEQ ID NO: 333548 - DNA, 25 bp, Homo sapien
tccagggagatctgctccattgcca

SEQ ID NO: 333549 - DNA, 25 bp, Homo sapien
cagggagatctgctccattgccagg

SEQ ID NO: 333550 - DNA, 25 bp, Homo sapien
ttgcacaggtagacattggtggcag

SEQ ID NO: 333551 - DNA, 25 bp, Homo sapien
cttgcacaggtagacattggtggca

SEQ ID NO: 333552 - DNA, 25 bp, Homo sapien
caggcagctggatggtgacatgctt

SEQ ID NO: 333553 - DNA, 25 bp, Homo sapien
tggcaggcagctggatggtgacatg

SEQ ID NO: 333554 - DNA, 25 bp, Homo sapien
acgccaagtactcatccacgcaggt

SEQ ID NO: 333555 - DNA, 25 bp, Homo sapien
tgcagctcaggtgggtaccagtgtc

SEQ ID NO: 333556 - DNA, 25 bp, Homo sapien
ctttcgactcaggtataaaacgatg

SEQ ID NO: 333557 - DNA, 25 bp, Homo sapien
atccacgcaggtgcgggcttgcagc

SEQ ID NO: 333558 - DNA, 25 bp, Homo sapien
gggtgtcagagatcttttctccagc

SEQ ID NO: 333559 - DNA, 25 bp, Homo sapien
gggggtgtcagagatcttttctcca

SEQ ID NO: 333560 - DNA, 25 bp, Homo sapien
gcagggggtgtcagagatcttttct

SEQ ID NO: 333561 - DNA, 25 bp, Homo sapien
cagggggtgtcagagatcttttctc

SEQ ID NO: 333562 - DNA, 25 bp, Homo sapien
ctagtaggaagtcgccatctctgag

SEQ ID NO: 333563 - DNA, 25 bp, Homo sapien
agtaggaagtcgccatctctgaggg

SEQ ID NO: 333564 - DNA, 25 bp, Homo sapien
tgctagtaggaagtcgccatctctg

SEQ ID NO: 333565 - DNA, 25 bp, Homo sapien
taggaagtcgccatctctgagggca

SEQ ID NO: 333566 - DNA, 25 bp, Homo sapien
caggaactcaggcttcaggtgctcc

SEQ ID NO: 333567 - DNA, 25 bp, Homo sapien
ttcaggaactcaggcttcaggtgct

SEQ ID NO: 333568 - DNA, 25 bp, Homo sapien
tcaggaactcaggcttcaggtgctc

SEQ ID NO: 333569 - DNA, 25 bp, Homo sapien
cttcaggaactcaggcttcaggtgc

SEQ ID NO: 333570 - DNA, 25 bp, Homo sapien
tccacagctcaaaagggatgtcatt

SEQ ID NO: 333571 - DNA, 25 bp, Homo sapien
accatccacagctcaaaagggatgt

SEQ ID NO: 333572 - DNA, 25 bp, Homo sapien
caccatccacagctcaaaagggatg

SEQ ID NO: 333573 - DNA, 25 bp, Homo sapien
aggagttgctcagcccttctccact

SEQ ID NO: 333574 - DNA, 25 bp, Homo sapien
gagcacagggcagatttgtcttcag

SEQ ID NO: 333575 - DNA, 25 bp, Homo sapien
gcccttctccactagttctgagctg

SEQ ID NO: 333576 - DNA, 25 bp, Homo sapien
catagtctgctgtagtgggccagag

SEQ ID NO: 333577 - DNA, 25 bp, Homo sapien
gtagctaggcaccttgtaaaaccca

SEQ ID NO: 333578 - DNA, 25 bp, Homo sapien
tctgttaactcttgctgataattct

SEQ ID NO: 333579 - DNA, 25 bp, Homo sapien
aattctctgtagctaggcaccttgt

SEQ ID NO: 333580 - DNA, 25 bp, Homo sapien
tctctgtagctaggcaccttgtaaa

SEQ ID NO: 333581 - DNA, 25 bp, Homo sapien
tcctggtgccgccccatcctcaggg

SEQ ID NO: 333582 - DNA, 25 bp, Homo sapien
cccaggtcctggtgccgccccatcc

SEQ ID NO: 333583 - DNA, 25 bp, Homo sapien
aggtcctggtgccgccccatcctca

SEQ ID NO: 333584 - DNA, 25 bp, Homo sapien
ccaggtcctggtgccgccccatcct

SEQ ID NO: 333585 - DNA, 25 bp, Homo sapien
cattaacctcatggattcacagtga

SEQ ID NO: 333586 - DNA, 25 bp, Homo sapien
gccactccgattgaccacgattacg

SEQ ID NO: 333587 - DNA, 25 bp, Homo sapien
cacgggcaatgttgcggctgctcat

SEQ ID NO: 333588 - DNA, 25 bp, Homo sapien
gggtgctcggacgactcattttgtc

SEQ ID NO: 333589 - DNA, 25 bp, Homo sapien
cagggtcgccacctgccagcttgcc

SEQ ID NO: 333590 - DNA, 25 bp, Homo sapien
tcagggtcgccacctgccagcttgc

SEQ ID NO: 333591 - DNA, 25 bp, Homo sapien
ctcagggtcgccacctgccagcttg

SEQ ID NO: 333592 - DNA, 25 bp, Homo sapien
gctcagggtcgccacctgccagctt

SEQ ID NO: 333593 - DNA, 25 bp, Homo sapien
ccttgcccagtgctcgggttcctgg

SEQ ID NO: 333594 - DNA, 25 bp, Homo sapien
tgctcgggttcctggatatagcatg

SEQ ID NO: 333595 - DNA, 25 bp, Homo sapien
ctttctgaactaagtgggtagggct

SEQ ID NO: 333596 - DNA, 25 bp, Homo sapien
cttcgctctagtgccctgctgaggc

SEQ ID NO: 333597 - DNA, 25 bp, Homo sapien
catgctgtcaccgtctgtgtcgtgt

SEQ ID NO: 333598 - DNA, 25 bp, Homo sapien
tgtcaccgtctgtgtcgtgtgccgt

SEQ ID NO: 333599 - DNA, 25 bp, Homo sapien
ccgtctgtgtcgtgtgccgtctgtg

SEQ ID NO: 333600 - DNA, 25 bp, Homo sapien
tgtgctcatcttcgcctgttcgccc

SEQ ID NO: 333601 - DNA, 25 bp, Homo sapien
taagtctaccaggtctagctatggg

SEQ ID NO: 333602 - DNA, 25 bp, Homo sapien
taccagtagccttcctctagctgtg

SEQ ID NO: 333603 - DNA, 25 bp, Homo sapien
tttgcagtaggtatgtgcccgcagc

SEQ ID NO: 333604 - DNA, 25 bp, Homo sapien
tctaatgcctacacaggattctcgg

SEQ ID NO: 333605 - DNA, 25 bp, Homo sapien
tgctgccacttaaagaggtcttccg

SEQ ID NO: 333606 - DNA, 25 bp, Homo sapien
tccaggttgggtttgacaggctagt

SEQ ID NO: 333607 - DNA, 25 bp, Homo sapien
tacctccatggtcagatgtgctcaa

SEQ ID NO: 333608 - DNA, 25 bp, Homo sapien
cacagctggaggagtggtctgccac

SEQ ID NO: 333609 - DNA, 25 bp, Homo sapien
taccactggccgtgaataaggaacg

SEQ ID NO: 333610 - DNA, 25 bp, Homo sapien
tcatcgtggtttgccatgcagccag

SEQ ID NO: 333611 - DNA, 25 bp, Homo sapien
cactgaaggcgcatgaattgacccc

SEQ ID NO: 333612 - DNA, 25 bp, Homo sapien
aatggttcagtatgctcagcctggc

SEQ ID NO: 333613 - DNA, 25 bp, Homo sapien
tccatgtgagaaggtcaggtcgttt

SEQ ID NO: 333614 - DNA, 25 bp, Homo sapien
gtgtgtgctttttagcgactttgct

SEQ ID NO: 333615 - DNA, 25 bp, Homo sapien
gcttctgtgatcagccaagctgtta

SEQ ID NO: 333616 - DNA, 25 bp, Homo sapien
acaaaaacagatgtgtcgtgcggct

SEQ ID NO: 333617 - DNA, 25 bp, Homo sapien
caaagtgggcctcctcaaccaccgg

SEQ ID NO: 333618 - DNA, 25 bp, Homo sapien
cactgagcccatggacacgagtgag

SEQ ID NO: 333619 - DNA, 25 bp, Homo sapien
agacttggagcggacaccacccctg

SEQ ID NO: 333620 - DNA, 25 bp, Homo sapien
gaaggataaagagagcccacgggca

SEQ ID NO: 333621 - DNA, 25 bp, Homo sapien
tcaagacatgctgtcagggcactgg

SEQ ID NO: 333622 - DNA, 25 bp, Homo sapien
atcacctcaagacatgctgtcaggg

SEQ ID NO: 333623 - DNA, 25 bp, Homo sapien
tcacatcacctcaagacatgctgtc

SEQ ID NO: 333624 - DNA, 25 bp, Homo sapien
tgcctcacatcacctcaagacatgc

SEQ ID NO: 333625 - DNA, 25 bp, Homo sapien
agcgagacagacgaggacgacgact

SEQ ID NO: 333626 - DNA, 25 bp, Homo sapien
cagacgaggacgacgactacatgga

SEQ ID NO: 333627 - DNA, 25 bp, Homo sapien
agtcctcgctggagagcgagacaga

SEQ ID NO: 333628 - DNA, 25 bp, Homo sapien
ggacgacgactacatggacatttga

SEQ ID NO: 333629 - DNA, 25 bp, Homo sapien
attacaatgaccttgctcaattcac

SEQ ID NO: 333630 - DNA, 25 bp, Homo sapien
acaatgaccttgctcaattcaccta

SEQ ID NO: 333631 - DNA, 25 bp, Homo sapien
tacaatgaccttgctcaattcacct

SEQ ID NO: 333632 - DNA, 25 bp, Homo sapien
ttacaatgaccttgctcaattcacc

SEQ ID NO: 333633 - DNA, 25 bp, Homo sapien
taagagctaagagtcacggtcaggg

SEQ ID NO: 333634 - DNA, 25 bp, Homo sapien
aatattagcgttggctccactaggg

SEQ ID NO: 333635 - DNA, 25 bp, Homo sapien
caaatgcgtcttcagtctcgatgga

SEQ ID NO: 333636 - DNA, 25 bp, Homo sapien
gaagatcttccttgcaatattagcg

SEQ ID NO: 333637 - DNA, 25 bp, Homo sapien
tcaccaatgtgatagcgttagcagg

SEQ ID NO: 333638 - DNA, 25 bp, Homo sapien
cagaccacctcttctagccatgcag

SEQ ID NO: 333639 - DNA, 25 bp, Homo sapien
gaacccaagattagaccttatatgg

SEQ ID NO: 333640 - DNA, 25 bp, Homo sapien
tcaagcccagattaggaattagccc

SEQ ID NO: 333641 - DNA, 25 bp, Homo sapien
catgtccggcctggacacaggactc

SEQ ID NO: 333642 - DNA, 25 bp, Homo sapien
gatcctgccagagtagttggtcccc

SEQ ID NO: 333643 - DNA, 25 bp, Homo sapien
actggaggatatacagatcgagagg

SEQ ID NO: 333644 - DNA, 25 bp, Homo sapien
ccgcctctttaatcttggactggag

SEQ ID NO: 333645 - DNA, 25 bp, Homo sapien
gtccgagacggcgtacacacaggcc

SEQ ID NO: 333646 - DNA, 25 bp, Homo sapien
ttcctcaggtccgagacggcgtaca

SEQ ID NO: 333647 - DNA, 25 bp, Homo sapien
actcttcctcaggtccgagacggcg

SEQ ID NO: 333648 - DNA, 25 bp, Homo sapien
tcaggtccgagacggcgtacacaca

SEQ ID NO: 333649 - DNA, 25 bp, Homo sapien
tcaaaaggcaagacggagaggaaga

SEQ ID NO: 333650 - DNA, 25 bp, Homo sapien
gatccaaaggcccatagaggacaag

SEQ ID NO: 333651 - DNA, 25 bp, Homo sapien
tcatgtctgttctggatccaaggac

SEQ ID NO: 333652 - DNA, 25 bp, Homo sapien
ggactatgtacgaaggacaccaccc

SEQ ID NO: 333653 - DNA, 25 bp, Homo sapien
tgggcaatgcagcaagatcctgttt

SEQ ID NO: 333654 - DNA, 25 bp, Homo sapien
ctgggcaatgcagcaagatcctgtt

SEQ ID NO: 333655 - DNA, 25 bp, Homo sapien
tcttagccacttgggagccaaggtg

SEQ ID NO: 333656 - DNA, 25 bp, Homo sapien
cagtcttagccacttgggagccaag

SEQ ID NO: 333657 - DNA, 25 bp, Homo sapien
ttagccacttgggagccaaggtggc

SEQ ID NO: 333658 - DNA, 25 bp, Homo sapien
tacagtcttagccacttgggagcca

SEQ ID NO: 333659 - DNA, 25 bp, Homo sapien
tggccgctctcaggtcaaagccaag

SEQ ID NO: 333660 - DNA, 25 bp, Homo sapien
tgaagttgggctcgtactccacaca

SEQ ID NO: 333661 - DNA, 25 bp, Homo sapien
aagttgggctcgtactccacacagc

SEQ ID NO: 333662 - DNA, 25 bp, Homo sapien
atgggggctgcaatggccgctctca

SEQ ID NO: 333663 - DNA, 25 bp, Homo sapien
ctttgttgatcaagatggagggcac

SEQ ID NO: 333664 - DNA, 25 bp, Homo sapien
cagccccgccaatcactagcttcga

SEQ ID NO: 333665 - DNA, 25 bp, Homo sapien
cactagcttcgacccctgggctttg

SEQ ID NO: 333666 - DNA, 25 bp, Homo sapien
cccctgggctttgttgatcaagatg

SEQ ID NO: 333667 - DNA, 25 bp, Homo sapien
gcaccttccgggagctccacccacc

SEQ ID NO: 333668 - DNA, 25 bp, Homo sapien
ccagcaccttccgggagctccaccc

SEQ ID NO: 333669 - DNA, 25 bp, Homo sapien
cagcaccttccgggagctccaccca

SEQ ID NO: 333670 - DNA, 25 bp, Homo sapien
agcaccttccgggagctccacccac

SEQ ID NO: 333671 - DNA, 25 bp, Homo sapien
gggcatcgctcgcataagtccagga

SEQ ID NO: 333672 - DNA, 25 bp, Homo sapien
tggtgaatacaccatcgctccaaag

SEQ ID NO: 333673 - DNA, 25 bp, Homo sapien
tccaggagctcgttgttgaggatga

SEQ ID NO: 333674 - DNA, 25 bp, Homo sapien
gaggatgatgcctgtccgtggtgaa

SEQ ID NO: 333675 - DNA, 25 bp, Homo sapien
gaagccatccgccttcccccaggcc

SEQ ID NO: 333676 - DNA, 25 bp, Homo sapien
catccgccttcccccaggccctacg

SEQ ID NO: 333677 - DNA, 25 bp, Homo sapien
tccgccttcccccaggccctacgca

SEQ ID NO: 333678 - DNA, 25 bp, Homo sapien
gtgaagccatccgccttcccccagg

SEQ ID NO: 333679 - DNA, 25 bp, Homo sapien
atgggacgtgcctgtcccgtggccc

SEQ ID NO: 333680 - DNA, 25 bp, Homo sapien
ccccggccatcgatctgttggcgga

SEQ ID NO: 333681 - DNA, 25 bp, Homo sapien
ctgagctggtggtccccccggccat

SEQ ID NO: 333682 - DNA, 25 bp, Homo sapien
tctgttggcggatgagctgggccag

SEQ ID NO: 333683 - DNA, 25 bp, Homo sapien
ttgagcgtctctacaaggtggtggt

SEQ ID NO: 333684 - DNA, 25 bp, Homo sapien
aggcctggccatagactctgttgag

SEQ ID NO: 333685 - DNA, 25 bp, Homo sapien
tgccccttggcaaacttgagcgtct

SEQ ID NO: 333686 - DNA, 25 bp, Homo sapien
ggagcttcgggtggcttcgagggtc

SEQ ID NO: 333687 - DNA, 25 bp, Homo sapien
ctcttagcacgttgaggataaagct

SEQ ID NO: 333688 - DNA, 25 bp, Homo sapien
atccaccacctcgggctggaacttg

SEQ ID NO: 333689 - DNA, 25 bp, Homo sapien
accacctcgggctggaacttggcca

SEQ ID NO: 333690 - DNA, 25 bp, Homo sapien
aggtcctgcagcgtcagctggctcc

SEQ ID NO: 333691 - DNA, 25 bp, Homo sapien
cccagcctccccgtgtagaagacct

SEQ ID NO: 333692 - DNA, 25 bp, Homo sapien
ccctctgtggccacggtctccaggg

SEQ ID NO: 333693 - DNA, 25 bp, Homo sapien
gcctcaggggttctgtcccgttgaa

SEQ ID NO: 333694 - DNA, 25 bp, Homo sapien
gtagaagacctccacgccctctgtg

SEQ ID NO: 333695 - DNA, 25 bp, Homo sapien
gcggcggtgggcctcggcatagcca

SEQ ID NO: 333696 - DNA, 25 bp, Homo sapien
gaaggccgcaggatgctgttgtgca

SEQ ID NO: 333697 - DNA, 25 bp, Homo sapien
tgggcctcggcatagccacggagct

SEQ ID NO: 333698 - DNA, 25 bp, Homo sapien
cagggttgacgcctgcaaggaaggc

SEQ ID NO: 333699 - DNA, 25 bp, Homo sapien
gtggctggccggcaccgtctcccgg

SEQ ID NO: 333700 - DNA, 25 bp, Homo sapien
tggccggcaccgtctcccgggcatt

SEQ ID NO: 333701 - DNA, 25 bp, Homo sapien
gcaccgtctcccgggcattgatgac

SEQ ID NO: 333702 - DNA, 25 bp, Homo sapien
ccggcaccgtctcccgggcattgat

SEQ ID NO: 333703 - DNA, 25 bp, Homo sapien
ggttgacgacgctggtgcagaccag

SEQ ID NO: 333704 - DNA, 25 bp, Homo sapien
tggcatccacgggtgagccctgctg

SEQ ID NO: 333705 - DNA, 25 bp, Homo sapien
accagagccgcgatggtggcatcca

SEQ ID NO: 333706 - DNA, 25 bp, Homo sapien
catgctctgagggttgacgacgctg

SEQ ID NO: 333707 - DNA, 25 bp, Homo sapien
gatgcaacctgtgtgatggtaactc

SEQ ID NO: 333708 - DNA, 25 bp, Homo sapien
aggcttggtccatggtccttgtgca

SEQ ID NO: 333709 - DNA, 25 bp, Homo sapien
tgtctgcttccagcctagtcagttg

SEQ ID NO: 333710 - DNA, 25 bp, Homo sapien
cctaactaaatggagtgcacccttg

SEQ ID NO: 333711 - DNA, 25 bp, Homo sapien
agggagacccagcaggtccagactc

SEQ ID NO: 333712 - DNA, 25 bp, Homo sapien
tcactcagggagacccagcaggtcc

SEQ ID NO: 333713 - DNA, 25 bp, Homo sapien
gagacccagcaggtccagactccac

SEQ ID NO: 333714 - DNA, 25 bp, Homo sapien
cactcagggagacccagcaggtcca

SEQ ID NO: 333715 - DNA, 25 bp, Homo sapien
gtgggtgtcgcatcctgaatgtcct

SEQ ID NO: 333716 - DNA, 25 bp, Homo sapien
aggactaggctgaccgtggccccgt

SEQ ID NO: 333717 - DNA, 25 bp, Homo sapien
ccagcaggactaggctgaccgtggc

SEQ ID NO: 333718 - DNA, 25 bp, Homo sapien
actaggctgaccgtggccccgtagc

SEQ ID NO: 333719 - DNA, 25 bp, Homo sapien
ccagacccagcaggactaggctgac

SEQ ID NO: 333720 - DNA, 25 bp, Homo sapien
ccaaactcacgcctcaacttctggt

SEQ ID NO: 333721 - DNA, 25 bp, Homo sapien
actcacgcctcaacttctggttttc

SEQ ID NO: 333722 - DNA, 25 bp, Homo sapien
aactcacgcctcaacttctggtttt

SEQ ID NO: 333723 - DNA, 25 bp, Homo sapien
caaactcacgcctcaacttctggtt

SEQ ID NO: 333724 - DNA, 25 bp, Homo sapien
agagtccccttcctggtcctagtga

SEQ ID NO: 333725 - DNA, 25 bp, Homo sapien
cctggtcctagtgagtatcttgtcc

SEQ ID NO: 333726 - DNA, 25 bp, Homo sapien
ttcctggtcctagtgagtatcttgt

SEQ ID NO: 333727 - DNA, 25 bp, Homo sapien
ccccttcctggtcctagtgagtatc

SEQ ID NO: 333728 - DNA, 25 bp, Homo sapien
gtcatagccgaaccagaggttgtag

SEQ ID NO: 333729 - DNA, 25 bp, Homo sapien
catgggagtgtgatcagcgtggctt

SEQ ID NO: 333730 - DNA, 25 bp, Homo sapien
ggcatgggagtgtgatcagcgtggc

SEQ ID NO: 333731 - DNA, 25 bp, Homo sapien
ctggggcatgggagtgtgatcagcg

SEQ ID NO: 333732 - DNA, 25 bp, Homo sapien
gggagtgtgatcagcgtggcttggg

SEQ ID NO: 333733 - DNA, 25 bp, Homo sapien
tgggcacggccagggagaaaagctg

SEQ ID NO: 333734 - DNA, 25 bp, Homo sapien
tgtgcagggtgggcacggccaggga

SEQ ID NO: 333735 - DNA, 25 bp, Homo sapien
tgcagggtgggcacggccagggaga

SEQ ID NO: 333736 - DNA, 25 bp, Homo sapien
ggtgggcacggccagggagaaaagc

SEQ ID NO: 333737 - DNA, 25 bp, Homo sapien
atgatcgtcgggcacatggacgaga

SEQ ID NO: 333738 - DNA, 25 bp, Homo sapien
cacatggacgagagcggctgcttcc

SEQ ID NO: 333739 - DNA, 25 bp, Homo sapien
acaaccatccggacctggccgtcct

SEQ ID NO: 333740 - DNA, 25 bp, Homo sapien
ggctgtggtgatctgtgtgccccca

SEQ ID NO: 333741 - DNA, 25 bp, Homo sapien
ctgaagtcgtccatttcatcattga

SEQ ID NO: 333742 - DNA, 25 bp, Homo sapien
caccccaaactcgttggtgatgttg

SEQ ID NO: 333743 - DNA, 25 bp, Homo sapien
gaagtcgtccatttcatcattgaac

SEQ ID NO: 333744 - DNA, 25 bp, Homo sapien
ggcaccccaaactcgttggtgatgt

SEQ ID NO: 333745 - DNA, 25 bp, Homo sapien
tgagcagtgcccccatcaactggcg

SEQ ID NO: 333746 - DNA, 25 bp, Homo sapien
agtgcccccatcaactggcgtgtag

SEQ ID NO: 333747 - DNA, 25 bp, Homo sapien
cccatcaactggcgtgtagaactcg

SEQ ID NO: 333748 - DNA, 25 bp, Homo sapien
tgcccccatcaactggcgtgtagaa

SEQ ID NO: 333749 - DNA, 25 bp, Homo sapien
agtctggaagccacgccttgtggga

SEQ ID NO: 333750 - DNA, 25 bp, Homo sapien
gtaagacgtagctgtagacccaaag

SEQ ID NO: 333751 - DNA, 25 bp, Homo sapien
gctaagacaccagccacttaccaag

SEQ ID NO: 333752 - DNA, 25 bp, Homo sapien
gtcacactggcatctaggccttcgc

SEQ ID NO: 333753 - DNA, 25 bp, Homo sapien
ggtcgctctccctggagaacgaacc

SEQ ID NO: 333754 - DNA, 25 bp, Homo sapien
ggacgaggtcgctctccctggagaa

SEQ ID NO: 333755 - DNA, 25 bp, Homo sapien
aagtccaggcctgtggaagccaaac

SEQ ID NO: 333756 - DNA, 25 bp, Homo sapien
cgtgggccggaagggcggtcaggat

SEQ ID NO: 333757 - DNA, 25 bp, Homo sapien
gacatcggtggagaacaggatgctc

SEQ ID NO: 333758 - DNA, 25 bp, Homo sapien
ttagacatcggtggagaacaggatg

SEQ ID NO: 333759 - DNA, 25 bp, Homo sapien
acatcggtggagaacaggatgctct

SEQ ID NO: 333760 - DNA, 25 bp, Homo sapien
tagacatcggtggagaacaggatgc

SEQ ID NO: 333761 - DNA, 25 bp, Homo sapien
gacagtggcgaggttgtgcagggac

SEQ ID NO: 333762 - DNA, 25 bp, Homo sapien
gggccaaagacagtggcgaggttgt

SEQ ID NO: 333763 - DNA, 25 bp, Homo sapien
tgagacatgacctccaaggacctgc

SEQ ID NO: 333764 - DNA, 25 bp, Homo sapien
gtgcagggacatcttattgactgct

SEQ ID NO: 333765 - DNA, 25 bp, Homo sapien
tgagcaggttggcctccggcaggga

SEQ ID NO: 333766 - DNA, 25 bp, Homo sapien
ggtgagcaggttggcctccggcagg

SEQ ID NO: 333767 - DNA, 25 bp, Homo sapien
gagcaggttggcctccggcagggac

SEQ ID NO: 333768 - DNA, 25 bp, Homo sapien
gtgagcaggttggcctccggcaggg

SEQ ID NO: 333769 - DNA, 25 bp, Homo sapien
cctccttgaggaatagggatgggga

SEQ ID NO: 333770 - DNA, 25 bp, Homo sapien
ggcctccttgaggaatagggatggg

SEQ ID NO: 333771 - DNA, 25 bp, Homo sapien
ttgaggaatagggatggggagccct

SEQ ID NO: 333772 - DNA, 25 bp, Homo sapien
gcctccttgaggaatagggatgggg

SEQ ID NO: 333773 - DNA, 25 bp, Homo sapien
tcatcatcaccgacatgtccttctt

SEQ ID NO: 333774 - DNA, 25 bp, Homo sapien
gcgttcatgtccgtctcgctcatca

SEQ ID NO: 333775 - DNA, 25 bp, Homo sapien
tcaggcagctcacggaagtacagct

SEQ ID NO: 333776 - DNA, 25 bp, Homo sapien
cagcgtgcctgcgatggcgttcatg

SEQ ID NO: 333777 - DNA, 25 bp, Homo sapien
atcgaaggctgccttcagtgcctgg

SEQ ID NO: 333778 - DNA, 25 bp, Homo sapien
cttcagtgcctggatgtctgcggcc

SEQ ID NO: 333779 - DNA, 25 bp, Homo sapien
tcagtgcctggatgtctgcggccac

SEQ ID NO: 333780 - DNA, 25 bp, Homo sapien
agtgcctggatgtctgcggccacac

SEQ ID NO: 333781 - DNA, 25 bp, Homo sapien
gtggtagatgcccacctcctccatg

SEQ ID NO: 333782 - DNA, 25 bp, Homo sapien
atctcctccacgcactggcgcacga

SEQ ID NO: 333783 - DNA, 25 bp, Homo sapien
ctccacgcactggcgcacgatgtag

SEQ ID NO: 333784 - DNA, 25 bp, Homo sapien
cgcactggcgcacgatgtagggcac

SEQ ID NO: 333785 - DNA, 25 bp, Homo sapien
gtgaggacggtgacgaaggtaccca

SEQ ID NO: 333786 - DNA, 25 bp, Homo sapien
cgaaggtacccaggtctggggctgc

SEQ ID NO: 333787 - DNA, 25 bp, Homo sapien
tgaggacggtgacgaaggtacccag

SEQ ID NO: 333788 - DNA, 25 bp, Homo sapien
caatgcaaaataatcctctccaatt

SEQ ID NO: 333789 - DNA, 25 bp, Homo sapien
ttcaatgcaaaataatcctctccaa

SEQ ID NO: 333790 - DNA, 25 bp, Homo sapien
gtctttttggctgtaagtttattca

SEQ ID NO: 333791 - DNA, 25 bp, Homo sapien
agtttattcaatgcaaaataatcct

SEQ ID NO: 333792 - DNA, 25 bp, Homo sapien
ggctgacggtgtccacgaccaaatt

SEQ ID NO: 333793 - DNA, 25 bp, Homo sapien
gacggtgtccacgaccaaatttgcc

SEQ ID NO: 333794 - DNA, 25 bp, Homo sapien
ggtgtccacgaccaaatttgcctct

SEQ ID NO: 333795 - DNA, 25 bp, Homo sapien
tgacggtgtccacgaccaaatttgc

SEQ ID NO: 333796 - DNA, 25 bp, Homo sapien
atctctgtcggcttctcctcttgtg

SEQ ID NO: 333797 - DNA, 25 bp, Homo sapien
cacagcactccttctgtaggtatct

SEQ ID NO: 333798 - DNA, 25 bp, Homo sapien
ccagggggcacagcactccttctgt

SEQ ID NO: 333799 - DNA, 25 bp, Homo sapien
cagcactccttctgtaggtatctct

SEQ ID NO: 333800 - DNA, 25 bp, Homo sapien
cctttagaccgaggcctgccagtcc

SEQ ID NO: 333801 - DNA, 25 bp, Homo sapien
tgccagtccctggacggctgcggcg

SEQ ID NO: 333802 - DNA, 25 bp, Homo sapien
ccagtccctggacggctgcggcgta

SEQ ID NO: 333803 - DNA, 25 bp, Homo sapien
gtccctggacggctgcggcgtaggg

SEQ ID NO: 333804 - DNA, 25 bp, Homo sapien
tctgccaactccaggtgcttaggca

SEQ ID NO: 333805 - DNA, 25 bp, Homo sapien
cttgtctgccaactccaggtgctta

SEQ ID NO: 333806 - DNA, 25 bp, Homo sapien
gccaactccaggtgcttaggcatgt

SEQ ID NO: 333807 - DNA, 25 bp, Homo sapien
ttgtctgccaactccaggtgcttag

SEQ ID NO: 333808 - DNA, 25 bp, Homo sapien
cataaatggcaatccggtttttctt

SEQ ID NO: 333809 - DNA, 25 bp, Homo sapien
tccggtttttcttaggcatcagcat

SEQ ID NO: 333810 - DNA, 25 bp, Homo sapien
ttcataaatggcaatccggtttttc

SEQ ID NO: 333811 - DNA, 25 bp, Homo sapien
caatccggtttttcttaggcatcag

SEQ ID NO: 333812 - DNA, 25 bp, Homo sapien
ccccgcttgcggcttgactgtgtgc

SEQ ID NO: 333813 - DNA, 25 bp, Homo sapien
tgtgtgcagacaggccgggtgcgac

SEQ ID NO: 333814 - DNA, 25 bp, Homo sapien
cttgcggcttgactgtgtgcagaca

SEQ ID NO: 333815 - DNA, 25 bp, Homo sapien
cggcttgactgtgtgcagacaggcc

SEQ ID NO: 333816 - DNA, 25 bp, Homo sapien
ctcgtgcttgcctttccgccgctcc

SEQ ID NO: 333817 - DNA, 25 bp, Homo sapien
gttcagtggccccgagggcgcagag

SEQ ID NO: 333818 - DNA, 25 bp, Homo sapien
ttcagtggccccgagggcgcagagc

SEQ ID NO: 333819 - DNA, 25 bp, Homo sapien
tgttcagtggccccgagggcgcaga

SEQ ID NO: 333820 - DNA, 25 bp, Homo sapien
gcatcaggttggatgtgaataatcc

SEQ ID NO: 333821 - DNA, 25 bp, Homo sapien
ttttcttgagacgtggttaattgca

SEQ ID NO: 333822 - DNA, 25 bp, Homo sapien
gacgtggttaattgcatcaggttgg

SEQ ID NO: 333823 - DNA, 25 bp, Homo sapien
tcaggttggatgtgaataatccggt

SEQ ID NO: 333824 - DNA, 25 bp, Homo sapien
tctttgtacacttcgtcttgctcca

SEQ ID NO: 333825 - DNA, 25 bp, Homo sapien
ctttgtacacttcgtcttgctccat

SEQ ID NO: 333826 - DNA, 25 bp, Homo sapien
catttctttgtacacttcgtcttgc

SEQ ID NO: 333827 - DNA, 25 bp, Homo sapien
tttctttgtacacttcgtcttgctc

SEQ ID NO: 333828 - DNA, 25 bp, Homo sapien
ccggtgaggtttgagagggactgga

SEQ ID NO: 333829 - DNA, 25 bp, Homo sapien
agtgtggaatccctaggaccccgct

SEQ ID NO: 333830 - DNA, 25 bp, Homo sapien
taggaccccgctggaatataatggg

SEQ ID NO: 333831 - DNA, 25 bp, Homo sapien
ctggagaacagtggatttcgaccat

SEQ ID NO: 333832 - DNA, 25 bp, Homo sapien
gggagaggacatagagtacagtttc

SEQ ID NO: 333833 - DNA, 25 bp, Homo sapien
ttcgtcctggagttggaggtagaaa

SEQ ID NO: 333834 - DNA, 25 bp, Homo sapien
gagtacagtttctttcgtcctggag

SEQ ID NO: 333835 - DNA, 25 bp, Homo sapien
aacaggggaggtagatctggatgcc

SEQ ID NO: 333836 - DNA, 25 bp, Homo sapien
tccggctaatgtttttgtagaggtg

SEQ ID NO: 333837 - DNA, 25 bp, Homo sapien
tgtgatcctcactcactgcagtctc

SEQ ID NO: 333838 - DNA, 25 bp, Homo sapien
aagctgtcctcccacgtcagtcccc

SEQ ID NO: 333839 - DNA, 25 bp, Homo sapien
ctcaagctgtcctcccacgtcagtc

SEQ ID NO: 333840 - DNA, 25 bp, Homo sapien
gagtttgtatacaaactgttggctc

SEQ ID NO: 333841 - DNA, 25 bp, Homo sapien
gaagtcaatgaaggatttggacaga

SEQ ID NO: 333842 - DNA, 25 bp, Homo sapien
tctttggagcatgagtacttgtgga

SEQ ID NO: 333843 - DNA, 25 bp, Homo sapien
tgttttcgtgactctccctttctgg

SEQ ID NO: 333844 - DNA, 25 bp, Homo sapien
ggtatagtaatagatgtaaatccat

SEQ ID NO: 333845 - DNA, 25 bp, Homo sapien
taaaatcacatattagcaaagtaat

SEQ ID NO: 333846 - DNA, 25 bp, Homo sapien
gactttttcagtgtggctataatat

SEQ ID NO: 333847 - DNA, 25 bp, Homo sapien
acattataggtaaataggctgaata

SEQ ID NO: 333848 - DNA, 25 bp, Homo sapien
tctttgctctactgcagccagaagt

SEQ ID NO: 333849 - DNA, 25 bp, Homo sapien
ccagaagtttcctagcatgcgtcat

SEQ ID NO: 333850 - DNA, 25 bp, Homo sapien
gtgtgtccccatagattgaagaatc

SEQ ID NO: 333851 - DNA, 25 bp, Homo sapien
tagggaaaggatctatctacctctt

SEQ ID NO: 333852 - DNA, 25 bp, Homo sapien
tgctgccattgtgtccctccatagg

SEQ ID NO: 333853 - DNA, 25 bp, Homo sapien
gctggtaaccaactcgtatgtaaaa

SEQ ID NO: 333854 - DNA, 25 bp, Homo sapien
gcagggcgctctgcttgaacaccag

SEQ ID NO: 333855 - DNA, 25 bp, Homo sapien
catagaagttgcgtttcacgtggcc

SEQ ID NO: 333856 - DNA, 25 bp, Homo sapien
ggtcagactaaatgcactgcctgtg

SEQ ID NO: 333857 - DNA, 25 bp, Homo sapien
tagaaacgaatacaccgacagagtg

SEQ ID NO: 333858 - DNA, 25 bp, Homo sapien
taagttcatcgtaaggtgagcacac

SEQ ID NO: 333859 - DNA, 25 bp, Homo sapien
agaagtacaggaaggtggtgccaca

SEQ ID NO: 333860 - DNA, 25 bp, Homo sapien
caaactctgccacagtatagggggg

SEQ ID NO: 333861 - DNA, 25 bp, Homo sapien
aaactctgccacagtataggggggc

SEQ ID NO: 333862 - DNA, 25 bp, Homo sapien
aactctgccacagtataggggggca

SEQ ID NO: 333863 - DNA, 25 bp, Homo sapien
gtcaggtactcaaatgtgaacttcc

SEQ ID NO: 333864 - DNA, 25 bp, Homo sapien
taggaaatttcgttgtcaggtactc

SEQ ID NO: 333865 - DNA, 25 bp, Homo sapien
gaagtctctcttcccggaggttcca

SEQ ID NO: 333866 - DNA, 25 bp, Homo sapien
tttcttcccggttcaggtcactgtg

SEQ ID NO: 333867 - DNA, 25 bp, Homo sapien
tggtcaccagatggccagaagctgc

SEQ ID NO: 333868 - DNA, 25 bp, Homo sapien
tgccccacagactggatgcaatgag

SEQ ID NO: 333869 - DNA, 25 bp, Homo sapien
tgaacaatgtccagacaagacctgt

SEQ ID NO: 333870 - DNA, 25 bp, Homo sapien
gcacctgcatagcaccatgaggaag

SEQ ID NO: 333871 - DNA, 25 bp, Homo sapien
gatgggctgtatctgtgttttccct

SEQ ID NO: 333872 - DNA, 25 bp, Homo sapien
atgggctgtatctgtgttttccctc

SEQ ID NO: 333873 - DNA, 25 bp, Homo sapien
tgggctgtatctgtgttttccctct

SEQ ID NO: 333874 - DNA, 25 bp, Homo sapien
gtggtgcttcctgcacacgagggca

SEQ ID NO: 333875 - DNA, 25 bp, Homo sapien
tgcacacgagggcatgtagtgaatg

SEQ ID NO: 333876 - DNA, 25 bp, Homo sapien
tgcttcctgcacacgagggcatgta

SEQ ID NO: 333877 - DNA, 25 bp, Homo sapien
accttgtccacgtcacatgcaaaag

SEQ ID NO: 333878 - DNA, 25 bp, Homo sapien
ggagagccccagaagcaaggatggg

SEQ ID NO: 333879 - DNA, 25 bp, Homo sapien
caaggatgggggggccaaggatggg

SEQ ID NO: 333880 - DNA, 25 bp, Homo sapien
gccccagaagcaaggatgggggggc

SEQ ID NO: 333881 - DNA, 25 bp, Homo sapien
ctcgtggagagccccagaagcaagg

SEQ ID NO: 333882 - DNA, 25 bp, Homo sapien
gagaaggcgagctcctttgaataga

SEQ ID NO: 333883 - DNA, 25 bp, Homo sapien
gccatgggagaaggcgagctccttt

SEQ ID NO: 333884 - DNA, 25 bp, Homo sapien
aatagagggtcagcaaaggccagga

SEQ ID NO: 333885 - DNA, 25 bp, Homo sapien
gagctcctttgaatagagggtcagc

SEQ ID NO: 333886 - DNA, 25 bp, Homo sapien
agcgcgggtctcaaagctgcctgca

SEQ ID NO: 333887 - DNA, 25 bp, Homo sapien
ggcctcggtttctccgcgcagcggg

SEQ ID NO: 333888 - DNA, 25 bp, Homo sapien
gcgtgcgagcggcaggtcagccggg

SEQ ID NO: 333889 - DNA, 25 bp, Homo sapien
ggatcgtccttccaggatcgcctgc

SEQ ID NO: 333890 - DNA, 25 bp, Homo sapien
gggcaccctgccgatactccatgac

SEQ ID NO: 333891 - DNA, 25 bp, Homo sapien
gatactccatgacgcgccagggctg

SEQ ID NO: 333892 - DNA, 25 bp, Homo sapien
tgccgatactccatgacgcgccagg

SEQ ID NO: 333893 - DNA, 25 bp, Homo sapien
accctgccgatactccatgacgcgc

SEQ ID NO: 333894 - DNA, 25 bp, Homo sapien
tctgtgagttgccatggggattctc

SEQ ID NO: 333895 - DNA, 25 bp, Homo sapien
ctgtgagttgccatggggattctct

SEQ ID NO: 333896 - DNA, 25 bp, Homo sapien
ccagatgatgtttctgtgagttgcc

SEQ ID NO: 333897 - DNA, 25 bp, Homo sapien
tgatgtttctgtgagttgccatggg

SEQ ID NO: 333898 - DNA, 25 bp, Homo sapien
ctggcatcggccgtcacctggtgga

SEQ ID NO: 333899 - DNA, 25 bp, Homo sapien
ctggtctctggcatcggccgtcacc

SEQ ID NO: 333900 - DNA, 25 bp, Homo sapien
atcggccgtcacctggtggagaggc

SEQ ID NO: 333901 - DNA, 25 bp, Homo sapien
ggtctctggcatcggccgtcacctg

SEQ ID NO: 333902 - DNA, 25 bp, Homo sapien
gcccgtgtcacaggaggactcgcct

SEQ ID NO: 333903 - DNA, 25 bp, Homo sapien
ccgtgtcacaggaggactcgcctct

SEQ ID NO: 333904 - DNA, 25 bp, Homo sapien
ctgcccgtgtcacaggaggactcgc

SEQ ID NO: 333905 - DNA, 25 bp, Homo sapien
tgcccgtgtcacaggaggactcgcc

SEQ ID NO: 333906 - DNA, 25 bp, Homo sapien
tagctgagccaatgttgtggagaca

SEQ ID NO: 333907 - DNA, 25 bp, Homo sapien
gcgactcctcttagctgagccaatg

SEQ ID NO: 333908 - DNA, 25 bp, Homo sapien
ccttcatatacctcttgcgctttga

SEQ ID NO: 333909 - DNA, 25 bp, Homo sapien
tgaaattgatttgcgactcctctta

SEQ ID NO: 333910 - DNA, 25 bp, Homo sapien
cctttggcccagcagttggggtgct

SEQ ID NO: 333911 - DNA, 25 bp, Homo sapien
ctccctttggcccagcagttggggt

SEQ ID NO: 333912 - DNA, 25 bp, Homo sapien
cagcaacgggggcacacctcccttt

SEQ ID NO: 333913 - DNA, 25 bp, Homo sapien
tgccatatgctcagatggggccagg

SEQ ID NO: 333914 - DNA, 25 bp, Homo sapien
gacgcgtaaggtttggcagctcagc

SEQ ID NO: 333915 - DNA, 25 bp, Homo sapien
gagtctgaccgcgtggaatcctata

SEQ ID NO: 333916 - DNA, 25 bp, Homo sapien
gatctgctttgctcagggccgagaa

SEQ ID NO: 333917 - DNA, 25 bp, Homo sapien
gaggcattatgcacattccgcagca

SEQ ID NO: 333918 - DNA, 25 bp, Homo sapien
gagcctgcaggagtgcttaaggagg

SEQ ID NO: 333919 - DNA, 25 bp, Homo sapien
tttagccccgtgtgaggccggcctg

SEQ ID NO: 333920 - DNA, 25 bp, Homo sapien
ggcagcgaggtggcctgtgtggacc

SEQ ID NO: 333921 - DNA, 25 bp, Homo sapien
gtctttagccccgtgtgaggccggc

SEQ ID NO: 333922 - DNA, 25 bp, Homo sapien
agccgtgggtgtctttagccccgtg

SEQ ID NO: 333923 - DNA, 25 bp, Homo sapien
gaggcaggcgccgatgatttgaccc

SEQ ID NO: 333924 - DNA, 25 bp, Homo sapien
tatcggtatctagtgctgtttagca

SEQ ID NO: 333925 - DNA, 25 bp, Homo sapien
ggcagacgtgttatgttccaccttg

SEQ ID NO: 333926 - DNA, 25 bp, Homo sapien
gaaggtggcttcagtatagtcaaga

SEQ ID NO: 333927 - DNA, 25 bp, Homo sapien
cctgggagtccaccttggagccaca

SEQ ID NO: 333928 - DNA, 25 bp, Homo sapien
gcctgggagtccaccttggagccac

SEQ ID NO: 333929 - DNA, 25 bp, Homo sapien
tccctgccaacgacacactttgtga

SEQ ID NO: 333930 - DNA, 25 bp, Homo sapien
gccacttgaggtgccgacagcattg

SEQ ID NO: 333931 - DNA, 25 bp, Homo sapien
ccaagagcatcagggataactgtgt

SEQ ID NO: 333932 - DNA, 25 bp, Homo sapien
aactgtgttccttgagtgtggccag

SEQ ID NO: 333933 - DNA, 25 bp, Homo sapien
cagggaccaaactcccgttagtcat

SEQ ID NO: 333934 - DNA, 25 bp, Homo sapien
agctccctccgagtggaagctcaca

SEQ ID NO: 333935 - DNA, 25 bp, Homo sapien
ccgttagtcattcctggtgtcagcc

SEQ ID NO: 333936 - DNA, 25 bp, Homo sapien
cctccgagtggaagctcacagtcag

SEQ ID NO: 333937 - DNA, 25 bp, Homo sapien
gagagttgacgggatggagcaggcc

SEQ ID NO: 333938 - DNA, 25 bp, Homo sapien
ttcacagggcggctggtgtccctta

SEQ ID NO: 333939 - DNA, 25 bp, Homo sapien
ggtgggtgctggtagttcctgggag

SEQ ID NO: 333940 - DNA, 25 bp, Homo sapien
ctggcttgtcctttcacagggcggc

SEQ ID NO: 333941 - DNA, 25 bp, Homo sapien
tcgcctcctggctatgaccacagca

SEQ ID NO: 333942 - DNA, 25 bp, Homo sapien
ctcgcctcctggctatgaccacagc

SEQ ID NO: 333943 - DNA, 25 bp, Homo sapien
ctctcgcctcctggctatgaccaca

SEQ ID NO: 333944 - DNA, 25 bp, Homo sapien
cgcctcctggctatgaccacagcag

SEQ ID NO: 333945 - DNA, 25 bp, Homo sapien
acatcgcagtgggtgtgctcgccat

SEQ ID NO: 333946 - DNA, 25 bp, Homo sapien
caactactttgtggtgtcactggcg

SEQ ID NO: 333947 - DNA, 25 bp, Homo sapien
tacatcacggtggagctggccattg

SEQ ID NO: 333948 - DNA, 25 bp, Homo sapien
tgtgaaaaagcccttggagagcgcc

SEQ ID NO: 333949 - DNA, 25 bp, Homo sapien
gaagcaatgggcaagtctatgaccc

SEQ ID NO: 333950 - DNA, 25 bp, Homo sapien
gagattcagaacagacagactcgcc

SEQ ID NO: 333951 - DNA, 25 bp, Homo sapien
tgtagatgtgagaatgagagagcct

SEQ ID NO: 333952 - DNA, 25 bp, Homo sapien
tatgtttgcgagtcccacaggaggc

SEQ ID NO: 333953 - DNA, 25 bp, Homo sapien
gcaatgcagagatggatgtaggaaa

SEQ ID NO: 333954 - DNA, 25 bp, Homo sapien
gagatctctatcctggacttgaagg

SEQ ID NO: 333955 - DNA, 25 bp, Homo sapien
gggagtgtagtctggtcttgccaga

SEQ ID NO: 333956 - DNA, 25 bp, Homo sapien
gatctgctgcacttcggtaggaaac

SEQ ID NO: 333957 - DNA, 25 bp, Homo sapien
tcctctataggtctgatctggctgg

SEQ ID NO: 333958 - DNA, 25 bp, Homo sapien
caagcctgttgtagccttaaccaag

SEQ ID NO: 333959 - DNA, 25 bp, Homo sapien
gatccagccatttcccgagtatgag

SEQ ID NO: 333960 - DNA, 25 bp, Homo sapien
ttaaggctgcgaccaacatggaggt

SEQ ID NO: 333961 - DNA, 25 bp, Homo sapien
tgccgtcggtcctgctgctaacctg

SEQ ID NO: 333962 - DNA, 25 bp, Homo sapien
gctgctgggtctgccgtcggtcctg

SEQ ID NO: 333963 - DNA, 25 bp, Homo sapien
tgggtctgccgtcggtcctgctgct

SEQ ID NO: 333964 - DNA, 25 bp, Homo sapien
gtcctgctgctaacctggcaccaga

SEQ ID NO: 333965 - DNA, 25 bp, Homo sapien
tgagtagcgcagagctacccagtga

SEQ ID NO: 333966 - DNA, 25 bp, Homo sapien
gcaggccactggcatgtgctgagta

SEQ ID NO: 333967 - DNA, 25 bp, Homo sapien
cagggagttgtaacagagcagtgcc

SEQ ID NO: 333968 - DNA, 25 bp, Homo sapien
cagagctacccagtgagaggccttg

SEQ ID NO: 333969 - DNA, 25 bp, Homo sapien
tgtcaagggtaatcctcacacagcc

SEQ ID NO: 333970 - DNA, 25 bp, Homo sapien
gaagtgaacttaaaactcaggtctg

SEQ ID NO: 333971 - DNA, 25 bp, Homo sapien
ctcccggaaggagtgtaagaatgtc

SEQ ID NO: 333972 - DNA, 25 bp, Homo sapien
ggttacatgattgctccaggtcaca

SEQ ID NO: 333973 - DNA, 25 bp, Homo sapien
gagggtaaccaatcaatagctccag

SEQ ID NO: 333974 - DNA, 25 bp, Homo sapien
gtgggtatgagttcaagccaggcac

SEQ ID NO: 333975 - DNA, 25 bp, Homo sapien
tttaacacaaatgcccaggatgatg

SEQ ID NO: 333976 - DNA, 25 bp, Homo sapien
ggagagctactgaccaccttctata

SEQ ID NO: 333977 - DNA, 25 bp, Homo sapien
aaggcagagattgcactgaactgag

SEQ ID NO: 333978 - DNA, 25 bp, Homo sapien
tgaagccagaaggcagagattgcac

SEQ ID NO: 333979 - DNA, 25 bp, Homo sapien
gccagaaggcagagattgcactgaa

SEQ ID NO: 333980 - DNA, 25 bp, Homo sapien
tacactgcagcctggactacagagg

SEQ ID NO: 333981 - DNA, 25 bp, Homo sapien
gagctgttacagatcacgcccaagg

SEQ ID NO: 333982 - DNA, 25 bp, Homo sapien
ggatgggcagccacctacttcaggt

SEQ ID NO: 333983 - DNA, 25 bp, Homo sapien
ggaaggtgcctccatttgggaaaca

SEQ ID NO: 333984 - DNA, 25 bp, Homo sapien
gcctgtagaatacctggatgggcag

SEQ ID NO: 333985 - DNA, 25 bp, Homo sapien
gctatccagagaccctccctaccca

SEQ ID NO: 333986 - DNA, 25 bp, Homo sapien
cccactggaagctccatgcaataat

SEQ ID NO: 333987 - DNA, 25 bp, Homo sapien
atgcaataatatgcatggagctatc

SEQ ID NO: 333988 - DNA, 25 bp, Homo sapien
acacattaacctaggtcagggctat

SEQ ID NO: 333989 - DNA, 25 bp, Homo sapien
tcctgcaggggcttggcaagaagcc

SEQ ID NO: 333990 - DNA, 25 bp, Homo sapien
aaagagcactagcttgggagtcagg

SEQ ID NO: 333991 - DNA, 25 bp, Homo sapien
gagtcactaaaagttcaggctaaga

SEQ ID NO: 333992 - DNA, 25 bp, Homo sapien
gctcagctatgtgacctcctgcagg

SEQ ID NO: 333993 - DNA, 25 bp, Homo sapien
cacttctacatagaagcccactgga

SEQ ID NO: 333994 - DNA, 25 bp, Homo sapien
tggagggacctatcacactttattt

SEQ ID NO: 333995 - DNA, 25 bp, Homo sapien
gcgcccagcctcgatttactgcatt

SEQ ID NO: 333996 - DNA, 25 bp, Homo sapien
tcagcccctaaagtagcttgaacca

SEQ ID NO: 333997 - DNA, 25 bp, Homo sapien
accctggactcccattggtttcatt

SEQ ID NO: 333998 - DNA, 25 bp, Homo sapien
caaaggcaacaagcgttctggctgc

SEQ ID NO: 333999 - DNA, 25 bp, Homo sapien
gatagtgttctcagccaaaggcaac

SEQ ID NO: 334000 - DNA, 25 bp, Homo sapien
cattcagatccaggatagtgttctc

SEQ ID NO: 334001 - DNA, 25 bp, Homo sapien
gagtttgtgctctagccactatgct

SEQ ID NO: 334002 - DNA, 25 bp, Homo sapien
catacctttggtgtgagttgctgag

SEQ ID NO: 334003 - DNA, 25 bp, Homo sapien
tgctatactgtagccaaacaccagc

SEQ ID NO: 334004 - DNA, 25 bp, Homo sapien
caccagcatggatatcccaagctca

SEQ ID NO: 334005 - DNA, 25 bp, Homo sapien
tctccactgcatcagaatacttcag

SEQ ID NO: 334006 - DNA, 25 bp, Homo sapien
ttgtagtccccgctatgatcgcacc

SEQ ID NO: 334007 - DNA, 25 bp, Homo sapien
cgtagacaagcatgtggtgcacact

SEQ ID NO: 334008 - DNA, 25 bp, Homo sapien
tcttcactccagagttctacactct

SEQ ID NO: 334009 - DNA, 25 bp, Homo sapien
aacacatagagctatcccacagacc

SEQ ID NO: 334010 - DNA, 25 bp, Homo sapien
actgtgtccggcctatgtagacttt

SEQ ID NO: 334011 - DNA, 25 bp, Homo sapien
gtggaacacatagagctatcccaca

SEQ ID NO: 334012 - DNA, 25 bp, Homo sapien
ctcccctgctaccaacatccagcac

SEQ ID NO: 334013 - DNA, 25 bp, Homo sapien
cccggcggttgctgctggaaccagc

SEQ ID NO: 334014 - DNA, 25 bp, Homo sapien
acggtgcggacaggaggtcgcggtc

SEQ ID NO: 334015 - DNA, 25 bp, Homo sapien
ctgccctacggtgcggacaggaggt

SEQ ID NO: 334016 - DNA, 25 bp, Homo sapien
cctgcccggcggttgctgctggaac

SEQ ID NO: 334017 - DNA, 25 bp, Homo sapien
tgttggagacgatctgcctattacg

SEQ ID NO: 334018 - DNA, 25 bp, Homo sapien
ataaagggggtgacaccagcttagg

SEQ ID NO: 334019 - DNA, 25 bp, Homo sapien
gtgacaccagcttagggatgttgga

SEQ ID NO: 334020 - DNA, 25 bp, Homo sapien
gcctattacgaagataggagttata

SEQ ID NO: 334021 - DNA, 25 bp, Homo sapien
caagtgtcatgaccgcctccagata

SEQ ID NO: 334022 - DNA, 25 bp, Homo sapien
tttgcgggctacttgaatgtcacac

SEQ ID NO: 334023 - DNA, 25 bp, Homo sapien
cctcgcagaggccagttaaacactg

SEQ ID NO: 334024 - DNA, 25 bp, Homo sapien
ggcagctcacgtttgcatattaaag

SEQ ID NO: 334025 - DNA, 25 bp, Homo sapien
gcagattggccaacagcatgagatc

SEQ ID NO: 334026 - DNA, 25 bp, Homo sapien
tggacacctctacccattaaacagt

SEQ ID NO: 334027 - DNA, 25 bp, Homo sapien
tctcatcattcacaattggacacct

SEQ ID NO: 334028 - DNA, 25 bp, Homo sapien
tctggcctctgacagctattctact

SEQ ID NO: 334029 - DNA, 25 bp, Homo sapien
taagatgtttatggcaatcgccctg

SEQ ID NO: 334030 - DNA, 25 bp, Homo sapien
gggcattttgatcctagtcacacag

SEQ ID NO: 334031 - DNA, 25 bp, Homo sapien
tgctgacacgaaggaagattccggg

SEQ ID NO: 334032 - DNA, 25 bp, Homo sapien
tgagtcccctcaatcaagcctgtga

SEQ ID NO: 334033 - DNA, 25 bp, Homo sapien
tgtttactggccctgaaatcacccg

SEQ ID NO: 334034 - DNA, 25 bp, Homo sapien
ggtgaccctgctgccgaatctgacc

SEQ ID NO: 334035 - DNA, 25 bp, Homo sapien
tacttagagactcaaggttcagaag

SEQ ID NO: 334036 - DNA, 25 bp, Homo sapien
cacccgctttggagattgccttgca

SEQ ID NO: 334037 - DNA, 25 bp, Homo sapien
cagaagatcttttcagtctgagata

SEQ ID NO: 334038 - DNA, 25 bp, Homo sapien
cattgaccccatacacttaacagtt

SEQ ID NO: 334039 - DNA, 25 bp, Homo sapien
tatctgacttctagcagcataaaga

SEQ ID NO: 334040 - DNA, 25 bp, Homo sapien
gttttgactgccaaacagaatgcac

SEQ ID NO: 334041 - DNA, 25 bp, Homo sapien
ggagcccacagtgcatctacacaag

SEQ ID NO: 334042 - DNA, 25 bp, Homo sapien
tttatggctcgagctatgtggcagc

SEQ ID NO: 334043 - DNA, 25 bp, Homo sapien
tcaaggtgcctgaccctctgtggag

SEQ ID NO: 334044 - DNA, 25 bp, Homo sapien
gctgtgggtagaagtgacacctctc

SEQ ID NO: 334045 - DNA, 25 bp, Homo sapien
gaacagagctaagggtttccctgag

SEQ ID NO: 334046 - DNA, 25 bp, Homo sapien
agtgcttggcgagagttcctgacag

SEQ ID NO: 334047 - DNA, 25 bp, Homo sapien
tgtcagcttagctaggccacagtca

SEQ ID NO: 334048 - DNA, 25 bp, Homo sapien
cagagtttagacatgactagccagc

SEQ ID NO: 334049 - DNA, 25 bp, Homo sapien
tccccgtggctagaatgaacaaagc

SEQ ID NO: 334050 - DNA, 25 bp, Homo sapien
gtgtgtcttacatcctgcctctgtg

SEQ ID NO: 334051 - DNA, 25 bp, Homo sapien
tgaccctccctaggcagatgagtct

SEQ ID NO: 334052 - DNA, 25 bp, Homo sapien
ggcttcaggtgctgtgctggtcccc

SEQ ID NO: 334053 - DNA, 25 bp, Homo sapien
attttggctggactgaggtgctgtt

SEQ ID NO: 334054 - DNA, 25 bp, Homo sapien
tttaacttgtggcatgccctgagaa

SEQ ID NO: 334055 - DNA, 25 bp, Homo sapien
gtgctgttaccaccctccatgaagg

SEQ ID NO: 334056 - DNA, 25 bp, Homo sapien
tccatgaaggccactccctagtgac

SEQ ID NO: 334057 - DNA, 25 bp, Homo sapien
agccctaacagcatgtgcactgtct

SEQ ID NO: 334058 - DNA, 25 bp, Homo sapien
tgtgcactgtctaaatcacatccca

SEQ ID NO: 334059 - DNA, 25 bp, Homo sapien
atcccaccatcctgaaaacttcatt

SEQ ID NO: 334060 - DNA, 25 bp, Homo sapien
caccatcctgaaaacttcatttcct

SEQ ID NO: 334061 - DNA, 25 bp, Homo sapien
ctgctgtgcatgggtactcctgggc

SEQ ID NO: 334062 - DNA, 25 bp, Homo sapien
ccttcatacagctattctaacaatt

SEQ ID NO: 334063 - DNA, 25 bp, Homo sapien
taccagaacaccacctgaagatgcc

SEQ ID NO: 334064 - DNA, 25 bp, Homo sapien
tttaccagaacaccacctgaagatg

SEQ ID NO: 334065 - DNA, 25 bp, Homo sapien
gtctagggttgagaagcaatttggc

SEQ ID NO: 334066 - DNA, 25 bp, Homo sapien
agaccagtctagagccaacaccggt

SEQ ID NO: 334067 - DNA, 25 bp, Homo sapien
gaagggctgcccaactaacagcacc

SEQ ID NO: 334068 - DNA, 25 bp, Homo sapien
tgggtggtctcactgccctcctaaa

SEQ ID NO: 334069 - DNA, 25 bp, Homo sapien
cttgggcattggaagagcaggaccc

SEQ ID NO: 334070 - DNA, 25 bp, Homo sapien
tctgtgctccaaagcaatgggcggg

SEQ ID NO: 334071 - DNA, 25 bp, Homo sapien
tcatctgtgctccaaagcaatgggc

SEQ ID NO: 334072 - DNA, 25 bp, Homo sapien
atgccttgggcattggaagagcagg

SEQ ID NO: 334073 - DNA, 25 bp, Homo sapien
taccagtgggatctaggcccgagag

SEQ ID NO: 334074 - DNA, 25 bp, Homo sapien
ggtatcatcaaccactgggcacagg

SEQ ID NO: 334075 - DNA, 25 bp, Homo sapien
catggatctggctcaaaggcaacaa

SEQ ID NO: 334076 - DNA, 25 bp, Homo sapien
gctttaagagtctccagcggccagg

SEQ ID NO: 334077 - DNA, 25 bp, Homo sapien
ccgagggcctaggcgcaccaggctc

SEQ ID NO: 334078 - DNA, 25 bp, Homo sapien
agggcctaggcgcaccaggctcctg

SEQ ID NO: 334079 - DNA, 25 bp, Homo sapien
gagggcctaggcgcaccaggctcct

SEQ ID NO: 334080 - DNA, 25 bp, Homo sapien
gtccgagggcctaggcgcaccaggc

SEQ ID NO: 334081 - DNA, 25 bp, Homo sapien
tctgtgccatagctggttctggcct

SEQ ID NO: 334082 - DNA, 25 bp, Homo sapien
tcatctgtgccatagctggttctgg

SEQ ID NO: 334083 - DNA, 25 bp, Homo sapien
catctgtgccatagctggttctggc

SEQ ID NO: 334084 - DNA, 25 bp, Homo sapien
ctcatctgtgccatagctggttctg

SEQ ID NO: 334085 - DNA, 25 bp, Homo sapien
cctggtagtcaggagtgcggcagaa

SEQ ID NO: 334086 - DNA, 25 bp, Homo sapien
tgtagccacgcagcacgatgaagtg

SEQ ID NO: 334087 - DNA, 25 bp, Homo sapien
agatgcagccagtggcccggttgta

SEQ ID NO: 334088 - DNA, 25 bp, Homo sapien
tgggttgttgtagaagatgcagcca

SEQ ID NO: 334089 - DNA, 25 bp, Homo sapien
tggagcacaggtcacagtgcagcac

SEQ ID NO: 334090 - DNA, 25 bp, Homo sapien
ggtcacagtgcagcacccccgagtt

SEQ ID NO: 334091 - DNA, 25 bp, Homo sapien
aagcagcagtacttgacagggctgg

SEQ ID NO: 334092 - DNA, 25 bp, Homo sapien
acccccgagttcaccagcacgatgg

SEQ ID NO: 334093 - DNA, 25 bp, Homo sapien
tggtatgagattgtggttccagcta

SEQ ID NO: 334094 - DNA, 25 bp, Homo sapien
ttcagcaatgacatctacctggagc

SEQ ID NO: 334095 - DNA, 25 bp, Homo sapien
ccaggggagctccagttcagcaatg

SEQ ID NO: 334096 - DNA, 25 bp, Homo sapien
gagctgtattgcaatattgcgccac

SEQ ID NO: 334097 - DNA, 25 bp, Homo sapien
tgtcaaagtgcttcctgtagaagga

SEQ ID NO: 334098 - DNA, 25 bp, Homo sapien
cttctgtgtcaaagtgcttcctgta

SEQ ID NO: 334099 - DNA, 25 bp, Homo sapien
tgtgtcaaagtgcttcctgtagaag

SEQ ID NO: 334100 - DNA, 25 bp, Homo sapien
ctgtgtcaaagtgcttcctgtagaa

SEQ ID NO: 334101 - DNA, 25 bp, Homo sapien
ctgccagggcagacggtacatgcag

SEQ ID NO: 334102 - DNA, 25 bp, Homo sapien
cagggcagacggtacatgcagcaag

SEQ ID NO: 334103 - DNA, 25 bp, Homo sapien
ccagggcagacggtacatgcagcaa

SEQ ID NO: 334104 - DNA, 25 bp, Homo sapien
tgccagggcagacggtacatgcagc

SEQ ID NO: 334105 - DNA, 25 bp, Homo sapien
ccaaatcctgcctatagcctctctg

SEQ ID NO: 334106 - DNA, 25 bp, Homo sapien
ggtgtctagcccttgactgttccct

SEQ ID NO: 334107 - DNA, 25 bp, Homo sapien
tgttccctcttccaactactggaac

SEQ ID NO: 334108 - DNA, 25 bp, Homo sapien
tgtctagcccttgactgttccctct

SEQ ID NO: 334109 - DNA, 25 bp, Homo sapien
ctctgtgtggccccacatgggaagg

SEQ ID NO: 334110 - DNA, 25 bp, Homo sapien
tgggaaggcctggtggctggtcgct

SEQ ID NO: 334111 - DNA, 25 bp, Homo sapien
ggaaggcctggtggctggtcgctca

SEQ ID NO: 334112 - DNA, 25 bp, Homo sapien
ctgtgtggccccacatgggaaggcc

SEQ ID NO: 334113 - DNA, 25 bp, Homo sapien
cccttgtcgacacccagggtctggg

SEQ ID NO: 334114 - DNA, 25 bp, Homo sapien
aggtaggccaggtcgatggtccaga

SEQ ID NO: 334115 - DNA, 25 bp, Homo sapien
gtctgggtacagaagcggtgcctca

SEQ ID NO: 334116 - DNA, 25 bp, Homo sapien
ccaaagtggtgcatcaggtaggcca

SEQ ID NO: 334117 - DNA, 25 bp, Homo sapien
acgggcacaggcagttgcacaaagt

SEQ ID NO: 334118 - DNA, 25 bp, Homo sapien
gacgggcacaggcagttgcacaaag

SEQ ID NO: 334119 - DNA, 25 bp, Homo sapien
ccctgcctaacctggcccgccagcc

SEQ ID NO: 334120 - DNA, 25 bp, Homo sapien
gccctgcctaacctggcccgccagc

SEQ ID NO: 334121 - DNA, 25 bp, Homo sapien
gctcgagcggcggccccgctgcctc

SEQ ID NO: 334122 - DNA, 25 bp, Homo sapien
cgggctcgagcggcggccccgctgc

SEQ ID NO: 334123 - DNA, 25 bp, Homo sapien
ccgctgcctccgcctccgtcctcat

SEQ ID NO: 334124 - DNA, 25 bp, Homo sapien
cccgctgcctccgcctccgtcctca

SEQ ID NO: 334125 - DNA, 25 bp, Homo sapien
tcttgatttaagtctgctccggcca

SEQ ID NO: 334126 - DNA, 25 bp, Homo sapien
caaactttgatcttagaggtcccca

SEQ ID NO: 334127 - DNA, 25 bp, Homo sapien
ccaggtctcgaatctggaggccccg

SEQ ID NO: 334128 - DNA, 25 bp, Homo sapien
cattcgccgcctcagcgttgagtgg

SEQ ID NO: 334129 - DNA, 25 bp, Homo sapien
tgacgggaagtcctggcccttggcc

SEQ ID NO: 334130 - DNA, 25 bp, Homo sapien
cggtgccgggatcaacaaatgaaat

SEQ ID NO: 334131 - DNA, 25 bp, Homo sapien
tccggtgccggaactatcgtactgg

SEQ ID NO: 334132 - DNA, 25 bp, Homo sapien
cagtcatcagccctcttttccggtg

SEQ ID NO: 334133 - DNA, 25 bp, Homo sapien
gacggagtcttgatatgtttttcag

SEQ ID NO: 334134 - DNA, 25 bp, Homo sapien
ttctaagtatccaggactaccagtg

SEQ ID NO: 334135 - DNA, 25 bp, Homo sapien
tttgtctctaaatatgatcacattc

SEQ ID NO: 334136 - DNA, 25 bp, Homo sapien
tcttgatatgtttttcaggccagtt

SEQ ID NO: 334137 - DNA, 25 bp, Homo sapien
tccgtggcagcaaaatccgctttct

SEQ ID NO: 334138 - DNA, 25 bp, Homo sapien
tttgcctgacatgctgaagaacgca

SEQ ID NO: 334139 - DNA, 25 bp, Homo sapien
acatacagagatggccgagtggcac

SEQ ID NO: 334140 - DNA, 25 bp, Homo sapien
acagctggagcaggtatacatccgt

SEQ ID NO: 334141 - DNA, 25 bp, Homo sapien
tcagcattgattggcacatccatag

SEQ ID NO: 334142 - DNA, 25 bp, Homo sapien
tcagcacagtggcttgcttccagca

SEQ ID NO: 334143 - DNA, 25 bp, Homo sapien
gcttccttggctcgtatactggcta

SEQ ID NO: 334144 - DNA, 25 bp, Homo sapien
aaccagcccgcgagacatagtgaga

SEQ ID NO: 334145 - DNA, 25 bp, Homo sapien
gctttgtcttatgatactacctgga

SEQ ID NO: 334146 - DNA, 25 bp, Homo sapien
tatggtatgagctacagcataagcc

SEQ ID NO: 334147 - DNA, 25 bp, Homo sapien
gcatcagtgagttggtcagatacaa

SEQ ID NO: 334148 - DNA, 25 bp, Homo sapien
gcacattagttaacctggcatcaat

SEQ ID NO: 334149 - DNA, 25 bp, Homo sapien
cctgagtagctagaaatactggtgc

SEQ ID NO: 334150 - DNA, 25 bp, Homo sapien
tagctagaaatactggtgcacacca

SEQ ID NO: 334151 - DNA, 25 bp, Homo sapien
agtagctagaaatactggtgcacac

SEQ ID NO: 334152 - DNA, 25 bp, Homo sapien
tgagtagctagaaatactggtgcac

SEQ ID NO: 334153 - DNA, 25 bp, Homo sapien
ccctgatattgtaattctggttaga

SEQ ID NO: 334154 - DNA, 25 bp, Homo sapien
tcctgcccaccatgaatttacttcc

SEQ ID NO: 334155 - DNA, 25 bp, Homo sapien
tcacccatctccctgatattgtaat

SEQ ID NO: 334156 - DNA, 25 bp, Homo sapien
aattctggttagatcatattcagtg

SEQ ID NO: 334157 - DNA, 25 bp, Homo sapien
gctgcctggcaatcgttggtaatct

SEQ ID NO: 334158 - DNA, 25 bp, Homo sapien
aacttttggtttcacatcaggaggg

SEQ ID NO: 334159 - DNA, 25 bp, Homo sapien
taatacctgccttggcgaaggtctg

SEQ ID NO: 334160 - DNA, 25 bp, Homo sapien
tctgttactcagatggtggacccag

SEQ ID NO: 334161 - DNA, 25 bp, Homo sapien
gcattctagtatgtccacattcagt

SEQ ID NO: 334162 - DNA, 25 bp, Homo sapien
gaagagggtgagaatttcagcattc

SEQ ID NO: 334163 - DNA, 25 bp, Homo sapien
cagttccttcatccaggtctctggg

SEQ ID NO: 334164 - DNA, 25 bp, Homo sapien
tctgggagggctcctagtccagaaa

SEQ ID NO: 334165 - DNA, 25 bp, Homo sapien
tccctgcaagatgttctcagcatcc

SEQ ID NO: 334166 - DNA, 25 bp, Homo sapien
agcatccctgcaagatgttctcagc

SEQ ID NO: 334167 - DNA, 25 bp, Homo sapien
catccctgcaagatgttctcagcat

SEQ ID NO: 334168 - DNA, 25 bp, Homo sapien
tcagcatccctgcaagatgttctca

SEQ ID NO: 334169 - DNA, 25 bp, Homo sapien
ggctctaaacacctgcatggcaatg

SEQ ID NO: 334170 - DNA, 25 bp, Homo sapien
tgaaactatctgctgccgcctggat

SEQ ID NO: 334171 - DNA, 25 bp, Homo sapien
gctggtggtcgtgaaggctctaaac

SEQ ID NO: 334172 - DNA, 25 bp, Homo sapien
catcgtgtgcttctgtccaagaggc

SEQ ID NO: 334173 - DNA, 25 bp, Homo sapien
tcagcagggcgcaagggactggaga

SEQ ID NO: 334174 - DNA, 25 bp, Homo sapien
cagcagggcgcaagggactggagag

SEQ ID NO: 334175 - DNA, 25 bp, Homo sapien
gtcagcagggcgcaagggactggag

SEQ ID NO: 334176 - DNA, 25 bp, Homo sapien
agcagggcgcaagggactggagagc

SEQ ID NO: 334177 - DNA, 25 bp, Homo sapien
cctggccacctatgagtccattctt

SEQ ID NO: 334178 - DNA, 25 bp, Homo sapien
tctgtccccttaatctcaggctgag

SEQ ID NO: 334179 - DNA, 25 bp, Homo sapien
gaaggctgagcctctagccagggct

SEQ ID NO: 334180 - DNA, 25 bp, Homo sapien
tgagagcatcacaagtcagtagcaa

SEQ ID NO: 334181 - DNA, 25 bp, Homo sapien
agtgaggtgcgctggctcagccgcc

SEQ ID NO: 334182 - DNA, 25 bp, Homo sapien
caggccctcgtagatggtggggagt

SEQ ID NO: 334183 - DNA, 25 bp, Homo sapien
ggcgcaggccgaccagcaggggctg

SEQ ID NO: 334184 - DNA, 25 bp, Homo sapien
tggccccggccgcactgccctcagg

SEQ ID NO: 334185 - DNA, 25 bp, Homo sapien
tcctgtgtcgacagcgggatgcctg

SEQ ID NO: 334186 - DNA, 25 bp, Homo sapien
cgcgtcagtcggttgccgttgagca

SEQ ID NO: 334187 - DNA, 25 bp, Homo sapien
aggtccacccaagccaaagcaggga

SEQ ID NO: 334188 - DNA, 25 bp, Homo sapien
ccatggctgctcaggtagcgtgtga

SEQ ID NO: 334189 - DNA, 25 bp, Homo sapien
agtcttctggaggctgctcttgagg

SEQ ID NO: 334190 - DNA, 25 bp, Homo sapien
cagagtcttctggaggctgctcttg

SEQ ID NO: 334191 - DNA, 25 bp, Homo sapien
tgccagcagagtcttctggaggctg

SEQ ID NO: 334192 - DNA, 25 bp, Homo sapien
ctgccagcagagtcttctggaggct

SEQ ID NO: 334193 - DNA, 25 bp, Homo sapien
gctattaggctgtacagggcaccgg

SEQ ID NO: 334194 - DNA, 25 bp, Homo sapien
cctattaggcccaaggtgggacagg

SEQ ID NO: 334195 - DNA, 25 bp, Homo sapien
aattctcctacaaagggacggctat

SEQ ID NO: 334196 - DNA, 25 bp, Homo sapien
taggtctctccccagttatctgaac

SEQ ID NO: 334197 - DNA, 25 bp, Homo sapien
cttgtccgaggacttccagagctca

SEQ ID NO: 334198 - DNA, 25 bp, Homo sapien
tcggcagatcttgtccgaggacttc

SEQ ID NO: 334199 - DNA, 25 bp, Homo sapien
tgagctgtcggcagatcttgtccga

SEQ ID NO: 334200 - DNA, 25 bp, Homo sapien
tgaggtggtagatgagctgtcggca

SEQ ID NO: 334201 - DNA, 25 bp, Homo sapien
acaggctggtccagtcccgcagtgc

SEQ ID NO: 334202 - DNA, 25 bp, Homo sapien
gtctcgggctatcagccggctgcct

SEQ ID NO: 334203 - DNA, 25 bp, Homo sapien
ggaggaagcccagacaatgagccct

SEQ ID NO: 334204 - DNA, 25 bp, Homo sapien
atgcaccatgcatcaccgagttgcc

SEQ ID NO: 334205 - DNA, 25 bp, Homo sapien
cactgacgccaatcccagggagtag

SEQ ID NO: 334206 - DNA, 25 bp, Homo sapien
tcgagggagccgtgctccactgacg

SEQ ID NO: 334207 - DNA, 25 bp, Homo sapien
ctccaagcgagactgcgcctgcggg

SEQ ID NO: 334208 - DNA, 25 bp, Homo sapien
gagtaggaacaagccaggtcagcgt

SEQ ID NO: 334209 - DNA, 25 bp, Homo sapien
gatgtaatgttttacagcaccacca

SEQ ID NO: 334210 - DNA, 25 bp, Homo sapien
ggatgtaatgttttacagcaccacc

SEQ ID NO: 334211 - DNA, 25 bp, Homo sapien
gggatgtaatgttttacagcaccac

SEQ ID NO: 334212 - DNA, 25 bp, Homo sapien
atgtaatgttttacagcaccaccac

SEQ ID NO: 334213 - DNA, 25 bp, Homo sapien
ctcagggtggaatccgaggtgcgcg

SEQ ID NO: 334214 - DNA, 25 bp, Homo sapien
cgcggcccacaaagctggcactgag

SEQ ID NO: 334215 - DNA, 25 bp, Homo sapien
tctcagtcctaactgggctccggca

SEQ ID NO: 334216 - DNA, 25 bp, Homo sapien
aggtgcgcggcccacaaagctggca

SEQ ID NO: 334217 - DNA, 25 bp, Homo sapien
gatggccgtgggctaggcgcagagt

SEQ ID NO: 334218 - DNA, 25 bp, Homo sapien
ccctggctgttcctgtgatggccgt

SEQ ID NO: 334219 - DNA, 25 bp, Homo sapien
cctaggggccgactgtgcagagacc

SEQ ID NO: 334220 - DNA, 25 bp, Homo sapien
ggcgcagagtcctaggggccgactg

SEQ ID NO: 334221 - DNA, 25 bp, Homo sapien
gggtccggtggctggtcacagccac

SEQ ID NO: 334222 - DNA, 25 bp, Homo sapien
tgggtccggtggctggtcacagcca

SEQ ID NO: 334223 - DNA, 25 bp, Homo sapien
atcctggggctgtgtcgatgctcat

SEQ ID NO: 334224 - DNA, 25 bp, Homo sapien
aggacatctgcaggtgctgtcagca

SEQ ID NO: 334225 - DNA, 25 bp, Homo sapien
tgctgtcagcatggggttctgggca

SEQ ID NO: 334226 - DNA, 25 bp, Homo sapien
gctgtcagcatggggttctgggcag

SEQ ID NO: 334227 - DNA, 25 bp, Homo sapien
ggcaggacatctgcaggtgctgtca

SEQ ID NO: 334228 - DNA, 25 bp, Homo sapien
tggcaaactccaccccagcaaggag

SEQ ID NO: 334229 - DNA, 25 bp, Homo sapien
gaggagggccttgcttatgacccca

SEQ ID NO: 334230 - DNA, 25 bp, Homo sapien
gggaaagcagtgagcacccgtccgc

SEQ ID NO: 334231 - DNA, 25 bp, Homo sapien
tccgcaagggtgtctgtacaggatg

SEQ ID NO: 334232 - DNA, 25 bp, Homo sapien
caggttcacaagcaggtcatgggag

SEQ ID NO: 334233 - DNA, 25 bp, Homo sapien
ctctgtagaggatatcaggaaggag

SEQ ID NO: 334234 - DNA, 25 bp, Homo sapien
ggaaggagggtcctctcaaggccca

SEQ ID NO: 334235 - DNA, 25 bp, Homo sapien
tcgaccgggttgaggaaggccacat

SEQ ID NO: 334236 - DNA, 25 bp, Homo sapien
cttctgcaggccgaacacctgcatg

SEQ ID NO: 334237 - DNA, 25 bp, Homo sapien
ggccgaacacctgcatggctgactt

SEQ ID NO: 334238 - DNA, 25 bp, Homo sapien
tggctgacttcctgctcacaggatg

SEQ ID NO: 334239 - DNA, 25 bp, Homo sapien
tgcaggccgaacacctgcatggctg

SEQ ID NO: 334240 - DNA, 25 bp, Homo sapien
aactggtgatgcatggatggctctc

SEQ ID NO: 334241 - DNA, 25 bp, Homo sapien
caccggaccgagtgttgtgatgcac

SEQ ID NO: 334242 - DNA, 25 bp, Homo sapien
gatgtgtactctaagggcatgagcc

SEQ ID NO: 334243 - DNA, 25 bp, Homo sapien
taggagcagagccaccaccggaccg

SEQ ID NO: 334244 - DNA, 25 bp, Homo sapien
tgggctcttaggtccaggctaccgg

SEQ ID NO: 334245 - DNA, 25 bp, Homo sapien
ctcttaggtccaggctaccgggcca

SEQ ID NO: 334246 - DNA, 25 bp, Homo sapien
acaagatgatttgacctcacttgcc

SEQ ID NO: 334247 - DNA, 25 bp, Homo sapien
gatgatttgacctcacttgccactc

SEQ ID NO: 334248 - DNA, 25 bp, Homo sapien
tcactccaggcggtcgccctctcgc

SEQ ID NO: 334249 - DNA, 25 bp, Homo sapien
tcctccacacggtccgccgacctca

SEQ ID NO: 334250 - DNA, 25 bp, Homo sapien
gtgctgcagcctgtcgcgccctcgg

SEQ ID NO: 334251 - DNA, 25 bp, Homo sapien
tctcgcccacgcaagaccccgcgtg

SEQ ID NO: 334252 - DNA, 25 bp, Homo sapien
gccgctcgcggagcgtggactggat

SEQ ID NO: 334253 - DNA, 25 bp, Homo sapien
tggactggatctcgcggagccaccg

SEQ ID NO: 334254 - DNA, 25 bp, Homo sapien
gcacccggcgctcgtagggcgcggg

SEQ ID NO: 334255 - DNA, 25 bp, Homo sapien
ctcgcggagcgtggactggatctcg

SEQ ID NO: 334256 - DNA, 25 bp, Homo sapien
gatggtcgccgaacccacaggaggc

SEQ ID NO: 334257 - DNA, 25 bp, Homo sapien
gcgcgatggtcgccgaacccacagg

SEQ ID NO: 334258 - DNA, 25 bp, Homo sapien
gccgcgcgatggtcgccgaacccac

SEQ ID NO: 334259 - DNA, 25 bp, Homo sapien
gccgccgcgcgatggtcgccgaacc

SEQ ID NO: 334260 - DNA, 25 bp, Homo sapien
tcctcagacatactttatcatccct

SEQ ID NO: 334261 - DNA, 25 bp, Homo sapien
tcagtagctcaaaggaaactttaaa

SEQ ID NO: 334262 - DNA, 25 bp, Homo sapien
ctttatcatcccttaaagtcagtag

SEQ ID NO: 334263 - DNA, 25 bp, Homo sapien
ttaaagtcagtagctcaaaggaaac

SEQ ID NO: 334264 - DNA, 25 bp, Homo sapien
aaaggatagctcatatccagctgcc

SEQ ID NO: 334265 - DNA, 25 bp, Homo sapien
cagagtgagatgcagtgccagaggg

SEQ ID NO: 334266 - DNA, 25 bp, Homo sapien
tggagtcagtgcaaagtcccaaaga

SEQ ID NO: 334267 - DNA, 25 bp, Homo sapien
tctccatgataatggagtcagtgca

SEQ ID NO: 334268 - DNA, 25 bp, Homo sapien
gggctagactctggctgctctggtg

SEQ ID NO: 334269 - DNA, 25 bp, Homo sapien
cagggctagactctggctgctctgg

SEQ ID NO: 334270 - DNA, 25 bp, Homo sapien
ggtggcagttgcttagctcaggctt

SEQ ID NO: 334271 - DNA, 25 bp, Homo sapien
tggcagttgcttagctcaggcttgg

SEQ ID NO: 334272 - DNA, 25 bp, Homo sapien
aaacattagccagcagggcgcagac

SEQ ID NO: 334273 - DNA, 25 bp, Homo sapien
cgcagactcgtcagtgagagcattc

SEQ ID NO: 334274 - DNA, 25 bp, Homo sapien
agcatccaagaagcgagggaggtcg

SEQ ID NO: 334275 - DNA, 25 bp, Homo sapien
tccaagaagcgagggaggtcgggaa

SEQ ID NO: 334276 - DNA, 25 bp, Homo sapien
acagcctcagggatgggaccaggag

SEQ ID NO: 334277 - DNA, 25 bp, Homo sapien
ctgcagcggtcccagatcacagcct

SEQ ID NO: 334278 - DNA, 25 bp, Homo sapien
cagcagttcctgtgcctttaaagcc

SEQ ID NO: 334279 - DNA, 25 bp, Homo sapien
tcctgtgcctttaaagcctcccctc

SEQ ID NO: 334280 - DNA, 25 bp, Homo sapien
gaattaagaggaaagagtgcagcat

SEQ ID NO: 334281 - DNA, 25 bp, Homo sapien
cgtggcttcttggaattaagaggaa

SEQ ID NO: 334282 - DNA, 25 bp, Homo sapien
gacttgtgcgaagaagctcttgaga

SEQ ID NO: 334283 - DNA, 25 bp, Homo sapien
cttgagagagccgtggcttcttgga

SEQ ID NO: 334284 - DNA, 25 bp, Homo sapien
cctcatactcctctctctgctgcat

SEQ ID NO: 334285 - DNA, 25 bp, Homo sapien
tcctcatactcctctctctgctgca

SEQ ID NO: 334286 - DNA, 25 bp, Homo sapien
ctcttcctcatactcctctctctgc

SEQ ID NO: 334287 - DNA, 25 bp, Homo sapien
cttcctcatactcctctctctgctg

SEQ ID NO: 334288 - DNA, 25 bp, Homo sapien
tatgctagcagacctcatggaccag

SEQ ID NO: 334289 - DNA, 25 bp, Homo sapien
tcatcaccatggtaaagggccggga

SEQ ID NO: 334290 - DNA, 25 bp, Homo sapien
tcagacaggtcacgcaaatcagttg

SEQ ID NO: 334291 - DNA, 25 bp, Homo sapien
tgttatttctgctaaggcctccggg

SEQ ID NO: 334292 - DNA, 25 bp, Homo sapien
cagttctgagttttcaaggggagag

SEQ ID NO: 334293 - DNA, 25 bp, Homo sapien
cttttcttacctggactctgggttg

SEQ ID NO: 334294 - DNA, 25 bp, Homo sapien
gagaggggcccagtgatggctgttc

SEQ ID NO: 334295 - DNA, 25 bp, Homo sapien
tctgggttgcttgttagctgcttct

SEQ ID NO: 334296 - DNA, 25 bp, Homo sapien
gaaagtgccacttgagagtttcctt

SEQ ID NO: 334297 - DNA, 25 bp, Homo sapien
tgcctctgcttagggttcactccgg

SEQ ID NO: 334298 - DNA, 25 bp, Homo sapien
gagaaagcgcactctgtccgcatcc

SEQ ID NO: 334299 - DNA, 25 bp, Homo sapien
tgtgtggttctgactgactgctccc

SEQ ID NO: 334300 - DNA, 25 bp, Homo sapien
gcatctaccgcgtgtccggtgtggc

SEQ ID NO: 334301 - DNA, 25 bp, Homo sapien
cgtgtccggtgtggccacggacatc

SEQ ID NO: 334302 - DNA, 25 bp, Homo sapien
tctaccgcgtgtccggtgtggccac

SEQ ID NO: 334303 - DNA, 25 bp, Homo sapien
gcaggggaccagaaccgagcctgtc

SEQ ID NO: 334304 - DNA, 25 bp, Homo sapien
gggaccagaaccgagcctgtcctgg

SEQ ID NO: 334305 - DNA, 25 bp, Homo sapien
aggggaccagaaccgagcctgtcct

SEQ ID NO: 334306 - DNA, 25 bp, Homo sapien
ggaccagaaccgagcctgtcctgga

SEQ ID NO: 334307 - DNA, 25 bp, Homo sapien
ctggtggtggcgttgaaacagcacc

SEQ ID NO: 334308 - DNA, 25 bp, Homo sapien
aaggagagcaagctccctgccaacc

SEQ ID NO: 334309 - DNA, 25 bp, Homo sapien
ccagcccatgcaaccccagcctgac

SEQ ID NO: 334310 - DNA, 25 bp, Homo sapien
agaaggagagcaagctccctgccaa

SEQ ID NO: 334311 - DNA, 25 bp, Homo sapien
gaaggagagcaagctccctgccaac

SEQ ID NO: 334312 - DNA, 25 bp, Homo sapien
ggaaacctctggctaatcgggccat

SEQ ID NO: 334313 - DNA, 25 bp, Homo sapien
ccaccccaagtgttcgggtgtggtg

SEQ ID NO: 334314 - DNA, 25 bp, Homo sapien
cctgccctgaacagcaagagacaga

SEQ ID NO: 334315 - DNA, 25 bp, Homo sapien
gacgaggtgctgctgtacttcttgc

SEQ ID NO: 334316 - DNA, 25 bp, Homo sapien
gaatcaagattttctgaggcatcct

SEQ ID NO: 334317 - DNA, 25 bp, Homo sapien
caggtgtcaggccatctgccaagag

SEQ ID NO: 334318 - DNA, 25 bp, Homo sapien
acttgtcaagaagcgccctctctgg

SEQ ID NO: 334319 - DNA, 25 bp, Homo sapien
agttcatctcggagtccaggcctgg

SEQ ID NO: 334320 - DNA, 25 bp, Homo sapien
cctggacaatccgtgtcctggcagc

SEQ ID NO: 334321 - DNA, 25 bp, Homo sapien
ctctgtctcagcgaccattcagccc

SEQ ID NO: 334322 - DNA, 25 bp, Homo sapien
ttccatctctgtctcagcgaccatt

SEQ ID NO: 334323 - DNA, 25 bp, Homo sapien
catctctgtctcagcgaccattcag

SEQ ID NO: 334324 - DNA, 25 bp, Homo sapien
ctgtctcagcgaccattcagccctg

SEQ ID NO: 334325 - DNA, 25 bp, Homo sapien
gctgtctaatgatgggatgaccaca

SEQ ID NO: 334326 - DNA, 25 bp, Homo sapien
tttatgtaggatgtgtgctgtctaa

SEQ ID NO: 334327 - DNA, 25 bp, Homo sapien
tgtgctgtctaatgatgggatgacc

SEQ ID NO: 334328 - DNA, 25 bp, Homo sapien
taggatgtgtgctgtctaatgatgg

SEQ ID NO: 334329 - DNA, 25 bp, Homo sapien
ccaccgtggccgacactttcattaa

SEQ ID NO: 334330 - DNA, 25 bp, Homo sapien
gagacgacttgcgtgcatgttgact

SEQ ID NO: 334331 - DNA, 25 bp, Homo sapien
gttgacttcatgatcagcgccgctg

SEQ ID NO: 334332 - DNA, 25 bp, Homo sapien
aagtttcctgagacgacttgcgtgc

SEQ ID NO: 334333 - DNA, 25 bp, Homo sapien
cccaggaggcctcagtgctcaatca

SEQ ID NO: 334334 - DNA, 25 bp, Homo sapien
caggaggcctcagtgctcaatcagg

SEQ ID NO: 334335 - DNA, 25 bp, Homo sapien
agcaggtgcagtgatagggctgggt

SEQ ID NO: 334336 - DNA, 25 bp, Homo sapien
ggtgcagtgatagggctgggtgccc

SEQ ID NO: 334337 - DNA, 25 bp, Homo sapien
ggcagggaccgctgttgctttggca

SEQ ID NO: 334338 - DNA, 25 bp, Homo sapien
cagggaccgctgttgctttggcaga

SEQ ID NO: 334339 - DNA, 25 bp, Homo sapien
agcatccgtaactccactgagtggg

SEQ ID NO: 334340 - DNA, 25 bp, Homo sapien
ctggagcagcatccgtaactccact

SEQ ID NO: 334341 - DNA, 25 bp, Homo sapien
acccggctggtcttcctttgctatg

SEQ ID NO: 334342 - DNA, 25 bp, Homo sapien
tgcaagagctgcaagtgccacgtgc

SEQ ID NO: 334343 - DNA, 25 bp, Homo sapien
cacgtgctgttctgcccaatctggt

SEQ ID NO: 334344 - DNA, 25 bp, Homo sapien
actgccgctggcccgtttctgagtg

SEQ ID NO: 334345 - DNA, 25 bp, Homo sapien
ctgcaggtgaggaaaggactgccgc

SEQ ID NO: 334346 - DNA, 25 bp, Homo sapien
cagtcttgggacttgtgtgtctcct

SEQ ID NO: 334347 - DNA, 25 bp, Homo sapien
agatgcaggggggccactaggccca

SEQ ID NO: 334348 - DNA, 25 bp, Homo sapien
agcagatgcaggggggccactaggc

SEQ ID NO: 334349 - DNA, 25 bp, Homo sapien
tgcaggggggccactaggcccaggc

SEQ ID NO: 334350 - DNA, 25 bp, Homo sapien
agggtctgcagtccgagatggcctg

SEQ ID NO: 334351 - DNA, 25 bp, Homo sapien
gcagtccgagatggcctggtcctca

SEQ ID NO: 334352 - DNA, 25 bp, Homo sapien
ctgcagtccgagatggcctggtcct

SEQ ID NO: 334353 - DNA, 25 bp, Homo sapien
gtctgcagtccgagatggcctggtc

SEQ ID NO: 334354 - DNA, 25 bp, Homo sapien
gttgatgcgctggaaggccgcctcc

SEQ ID NO: 334355 - DNA, 25 bp, Homo sapien
tgcactgttgatgcgctggaaggcc

SEQ ID NO: 334356 - DNA, 25 bp, Homo sapien
tccttctcccggtccaggtcttcag

SEQ ID NO: 334357 - DNA, 25 bp, Homo sapien
ctgttgatgcgctggaaggccgcct

SEQ ID NO: 334358 - DNA, 25 bp, Homo sapien
gtatctgccgtcttttcacactgga

SEQ ID NO: 334359 - DNA, 25 bp, Homo sapien
gtcttttcacactggatgtgacccg

SEQ ID NO: 334360 - DNA, 25 bp, Homo sapien
tgtaggggctcgagatggcatttca

SEQ ID NO: 334361 - DNA, 25 bp, Homo sapien
aggctggcccctcttccgctttcgt

SEQ ID NO: 334362 - DNA, 25 bp, Homo sapien
gaaacttgtgtgtactgggcctaga

SEQ ID NO: 334363 - DNA, 25 bp, Homo sapien
ccatactggatgctttagaaacagc

SEQ ID NO: 334364 - DNA, 25 bp, Homo sapien
actccagtagtgaccccaacgtggg

SEQ ID NO: 334365 - DNA, 25 bp, Homo sapien
gagcagaagtgccacgccttgttct

SEQ ID NO: 334366 - DNA, 25 bp, Homo sapien
agagcgagcttaacggattaataag

SEQ ID NO: 334367 - DNA, 25 bp, Homo sapien
cgagcttaacggattaataagcgca

SEQ ID NO: 334368 - DNA, 25 bp, Homo sapien
ggcgcccgtgacagagcgagcttaa

SEQ ID NO: 334369 - DNA, 25 bp, Homo sapien
cgcccgtgacagagcgagcttaacg

SEQ ID NO: 334370 - DNA, 25 bp, Homo sapien
cagcgtcggggcctttcgcgcggca

SEQ ID NO: 334371 - DNA, 25 bp, Homo sapien
cgtcggggcctttcgcgcggcaggg

SEQ ID NO: 334372 - DNA, 25 bp, Homo sapien
cgatgtccgggagccaggccagtgc

SEQ ID NO: 334373 - DNA, 25 bp, Homo sapien
aggtggcggcgatgtccgggagcca

SEQ ID NO: 334374 - DNA, 25 bp, Homo sapien
cagaggcctgacactaaccaacctc

SEQ ID NO: 334375 - DNA, 25 bp, Homo sapien
ctaaccaacctcccaaatcattgag

SEQ ID NO: 334376 - DNA, 25 bp, Homo sapien
actaaccaacctcccaaatcattga

SEQ ID NO: 334377 - DNA, 25 bp, Homo sapien
agaggcctgacactaaccaacctcc

SEQ ID NO: 334378 - DNA, 25 bp, Homo sapien
tgtccgtgtggaacctgatgtacct

SEQ ID NO: 334379 - DNA, 25 bp, Homo sapien
tggccagagaatatgtgacctttcg

SEQ ID NO: 334380 - DNA, 25 bp, Homo sapien
gatgtacctgtggacctggttgccc

SEQ ID NO: 334381 - DNA, 25 bp, Homo sapien
tgacctttcggttgttgagggactg

SEQ ID NO: 334382 - DNA, 25 bp, Homo sapien
gggagggcatttgttcacgtgcagc

SEQ ID NO: 334383 - DNA, 25 bp, Homo sapien
tgtctccacagctaagttgcgggac

SEQ ID NO: 334384 - DNA, 25 bp, Homo sapien
tctgtctccacagctaagttgcggg

SEQ ID NO: 334385 - DNA, 25 bp, Homo sapien
atttgttcacgtgcagcggcctctt

SEQ ID NO: 334386 - DNA, 25 bp, Homo sapien
agtgagtgtaggatgctggctgccc

SEQ ID NO: 334387 - DNA, 25 bp, Homo sapien
ttgggcacctcgagaccagtgagtg

SEQ ID NO: 334388 - DNA, 25 bp, Homo sapien
atttcccagtaatgcccaaagtcct

SEQ ID NO: 334389 - DNA, 25 bp, Homo sapien
ctggcttgggcacctcgagaccagt

SEQ ID NO: 334390 - DNA, 25 bp, Homo sapien
gagatgtgacggaggaggttgggat

SEQ ID NO: 334391 - DNA, 25 bp, Homo sapien
acagagatgtgacggaggaggttgg

SEQ ID NO: 334392 - DNA, 25 bp, Homo sapien
tggcaggcagatatgctctggccac

SEQ ID NO: 334393 - DNA, 25 bp, Homo sapien
caggcagatatgctctggccacctt

SEQ ID NO: 334394 - DNA, 25 bp, Homo sapien
tgaatgccacccagtagtcttgagc

SEQ ID NO: 334395 - DNA, 25 bp, Homo sapien
gcctgccgctgagtgatgaatgcca

SEQ ID NO: 334396 - DNA, 25 bp, Homo sapien
gaatgcgtcaatgtgtggaaagccc

SEQ ID NO: 334397 - DNA, 25 bp, Homo sapien
catgctgcgtgtcaggtctccagaa

SEQ ID NO: 334398 - DNA, 25 bp, Homo sapien
tcagtgattgcagaatacagactcc

SEQ ID NO: 334399 - DNA, 25 bp, Homo sapien
ttcctgaggccacctacaattacag

SEQ ID NO: 334400 - DNA, 25 bp, Homo sapien
ggccacctacaattacaggagagaa

SEQ ID NO: 334401 - DNA, 25 bp, Homo sapien
ggatttttcagcagcaagtcagtga

SEQ ID NO: 334402 - DNA, 25 bp, Homo sapien
aagagatcttttttagacttctaga

SEQ ID NO: 334403 - DNA, 25 bp, Homo sapien
cactcagaaagttttaatgcctact

SEQ ID NO: 334404 - DNA, 25 bp, Homo sapien
taactttattgaatcacatcatctt

SEQ ID NO: 334405 - DNA, 25 bp, Homo sapien
gacttctagaaattgatcattataa

SEQ ID NO: 334406 - DNA, 25 bp, Homo sapien
gaaactgcaagccaaaccctgtcag

SEQ ID NO: 334407 - DNA, 25 bp, Homo sapien
gagaatttaatgctatggacctagg

SEQ ID NO: 334408 - DNA, 25 bp, Homo sapien
tactctctctgtgacgaatgcccca

SEQ ID NO: 334409 - DNA, 25 bp, Homo sapien
tggaaaatgttcagtcacgttcagc

SEQ ID NO: 334410 - DNA, 25 bp, Homo sapien
caaggcgctggaactcggatgatgc

SEQ ID NO: 334411 - DNA, 25 bp, Homo sapien
atggactgccccacgaggtaagcca

SEQ ID NO: 334412 - DNA, 25 bp, Homo sapien
aacgattcggttcctggtgaatgga

SEQ ID NO: 334413 - DNA, 25 bp, Homo sapien
taaaagagacgagttgacaaggaac

SEQ ID NO: 334414 - DNA, 25 bp, Homo sapien
tagacaatatgttaaacgctgtact

SEQ ID NO: 334415 - DNA, 25 bp, Homo sapien
gggctcaagccaatcgtgtcataga

SEQ ID NO: 334416 - DNA, 25 bp, Homo sapien
gggtaacagtcccatcttgcacaga

SEQ ID NO: 334417 - DNA, 25 bp, Homo sapien
catagatgacgttataatgagtggg

SEQ ID NO: 334418 - DNA, 25 bp, Homo sapien
tagaaggcaattaaatcactgacac

SEQ ID NO: 334419 - DNA, 25 bp, Homo sapien
caacgatttgagaaatcaagtctat

SEQ ID NO: 334420 - DNA, 25 bp, Homo sapien
cctaactgataaacaacgatttgag

SEQ ID NO: 334421 - DNA, 25 bp, Homo sapien
cagtaactctcgtgggattttgcct

SEQ ID NO: 334422 - DNA, 25 bp, Homo sapien
tcattcctagtcaactctacatcaa

SEQ ID NO: 334423 - DNA, 25 bp, Homo sapien
tcaccacaatgaaagctagagtgaa

SEQ ID NO: 334424 - DNA, 25 bp, Homo sapien
aatctagtgtttattcgtttcttca

SEQ ID NO: 334425 - DNA, 25 bp, Homo sapien
cattcattcctagtcaactctacat

SEQ ID NO: 334426 - DNA, 25 bp, Homo sapien
ttttcgcttcatggtcaagcaatgc

SEQ ID NO: 334427 - DNA, 25 bp, Homo sapien
aatgcttgaagctgaccatctccca

SEQ ID NO: 334428 - DNA, 25 bp, Homo sapien
caagcaatgcttgaagctgaccatc

SEQ ID NO: 334429 - DNA, 25 bp, Homo sapien
atggtttttaagtaggtcgacatct

SEQ ID NO: 334430 - DNA, 25 bp, Homo sapien
tccatcccgatacacaataacagaa

SEQ ID NO: 334431 - DNA, 25 bp, Homo sapien
cgatacacaataacagaatgtggca

SEQ ID NO: 334432 - DNA, 25 bp, Homo sapien
catcccgatacacaataacagaatg

SEQ ID NO: 334433 - DNA, 25 bp, Homo sapien
tcccgatacacaataacagaatgtg

SEQ ID NO: 334434 - DNA, 25 bp, Homo sapien
cgatgattcgtttttacaccagaca

SEQ ID NO: 334435 - DNA, 25 bp, Homo sapien
tcgtttttacaccagacatccaggg

SEQ ID NO: 334436 - DNA, 25 bp, Homo sapien
gattcgtttttacaccagacatcca

SEQ ID NO: 334437 - DNA, 25 bp, Homo sapien
gtttttacaccagacatccagggca

SEQ ID NO: 334438 - DNA, 25 bp, Homo sapien
ttctggatgacacattgagagtacc

SEQ ID NO: 334439 - DNA, 25 bp, Homo sapien
tctggatgacacattgagagtacca

SEQ ID NO: 334440 - DNA, 25 bp, Homo sapien
ctggatgacacattgagagtaccac

SEQ ID NO: 334441 - DNA, 25 bp, Homo sapien
gtggaaacaatcaatgccaacgaac

SEQ ID NO: 334442 - DNA, 25 bp, Homo sapien
tggtacttgcaacaaatcctgctat

SEQ ID NO: 334443 - DNA, 25 bp, Homo sapien
taattcagcattggtacttgcaaca

SEQ ID NO: 334444 - DNA, 25 bp, Homo sapien
tctgtcgatttacgatatcgtggaa

SEQ ID NO: 334445 - DNA, 25 bp, Homo sapien
cacacactggcttggaattgggcat

SEQ ID NO: 334446 - DNA, 25 bp, Homo sapien
catcattgggcaggatacaaatcac

SEQ ID NO: 334447 - DNA, 25 bp, Homo sapien
gcaattcatctgctgggcaatcttg

SEQ ID NO: 334448 - DNA, 25 bp, Homo sapien
cttggtgacgatggtccttgcctgg

SEQ ID NO: 334449 - DNA, 25 bp, Homo sapien
tgaaaaccagcaaacatgacattcc

SEQ ID NO: 334450 - DNA, 25 bp, Homo sapien
ttgaaaaccagcaaacatgacattc

SEQ ID NO: 334451 - DNA, 25 bp, Homo sapien
cttgaaaaccagcaaacatgacatt

SEQ ID NO: 334452 - DNA, 25 bp, Homo sapien
ggagttagcatcaccatctacttca

SEQ ID NO: 334453 - DNA, 25 bp, Homo sapien
gtctatataggagttagcatcacca

SEQ ID NO: 334454 - DNA, 25 bp, Homo sapien
tatttccgtaatgtgtctatatagg

SEQ ID NO: 334455 - DNA, 25 bp, Homo sapien
tggtctagtatatttccgtaatgtg

SEQ ID NO: 334456 - DNA, 25 bp, Homo sapien
gacactctgtagatgaccctttaag

SEQ ID NO: 334457 - DNA, 25 bp, Homo sapien
gggctgtgacactctgtagatgacc

SEQ ID NO: 334458 - DNA, 25 bp, Homo sapien
ctctgtagatgaccctttaaggaca

SEQ ID NO: 334459 - DNA, 25 bp, Homo sapien
catagttatgcccatgggggctgtg

SEQ ID NO: 334460 - DNA, 25 bp, Homo sapien
cctgctatagagtatgagccaacta

SEQ ID NO: 334461 - DNA, 25 bp, Homo sapien
caactatgtagtggcattgcattaa

SEQ ID NO: 334462 - DNA, 25 bp, Homo sapien
tgtgactgctcctgctatagagtat

SEQ ID NO: 334463 - DNA, 25 bp, Homo sapien
tctcttgaccagtctccttgtgaat

SEQ ID NO: 334464 - DNA, 25 bp, Homo sapien
cattcttctgccttgcacgatgttt

SEQ ID NO: 334465 - DNA, 25 bp, Homo sapien
cgatgtttgcgtttttcaaaactct

SEQ ID NO: 334466 - DNA, 25 bp, Homo sapien
ccttgcacgatgtttgcgtttttca

SEQ ID NO: 334467 - DNA, 25 bp, Homo sapien
tctgccttgcacgatgtttgcgttt

SEQ ID NO: 334468 - DNA, 25 bp, Homo sapien
aattctttcacaatgctataatctt

SEQ ID NO: 334469 - DNA, 25 bp, Homo sapien
tcttcttggactcaatcttgtatgt

SEQ ID NO: 334470 - DNA, 25 bp, Homo sapien
tcttttaatgtatgatgccttcttc

SEQ ID NO: 334471 - DNA, 25 bp, Homo sapien
tcttgtagagtattgatgaattctt

SEQ ID NO: 334472 - DNA, 25 bp, Homo sapien
ctgccctggctgaccaaaagtggct

SEQ ID NO: 334473 - DNA, 25 bp, Homo sapien
gaggaatcagcaggataggttcacg

SEQ ID NO: 334474 - DNA, 25 bp, Homo sapien
gaatcagcaggataggttcacgttg

SEQ ID NO: 334475 - DNA, 25 bp, Homo sapien
tgccctggctgaccaaaagtggctg

SEQ ID NO: 334476 - DNA, 25 bp, Homo sapien
aatatcatctactctgtaggttttg

SEQ ID NO: 334477 - DNA, 25 bp, Homo sapien
tgcctgtagtagtctatataggtga

SEQ ID NO: 334478 - DNA, 25 bp, Homo sapien
tcaatatcatctactctgtaggttt

SEQ ID NO: 334479 - DNA, 25 bp, Homo sapien
cctgtagtagtctatataggtgatt

SEQ ID NO: 334480 - DNA, 25 bp, Homo sapien
ggctcacatcggcacagagggtaat

SEQ ID NO: 334481 - DNA, 25 bp, Homo sapien
tttattagttacttcctctcggatg

SEQ ID NO: 334482 - DNA, 25 bp, Homo sapien
cataagcagtttctattcggagcag

SEQ ID NO: 334483 - DNA, 25 bp, Homo sapien
tcctctcggatgtttcctgtctggg

SEQ ID NO: 334484 - DNA, 25 bp, Homo sapien
cagaagtaacataaccaagccagat

SEQ ID NO: 334485 - DNA, 25 bp, Homo sapien
ctgttttcgtattgaagaacagaag

SEQ ID NO: 334486 - DNA, 25 bp, Homo sapien
acataaccaagccagatttccaaac

SEQ ID NO: 334487 - DNA, 25 bp, Homo sapien
tcgtattgaagaacagaagtaacat

SEQ ID NO: 334488 - DNA, 25 bp, Homo sapien
ccatgacggtataactgaatggcct

SEQ ID NO: 334489 - DNA, 25 bp, Homo sapien
agttgcgaccaacttgttcaaaatc

SEQ ID NO: 334490 - DNA, 25 bp, Homo sapien
ttttggtataatagttgcgaccaac

SEQ ID NO: 334491 - DNA, 25 bp, Homo sapien
ctgaatggccttctttttggtataa

SEQ ID NO: 334492 - DNA, 25 bp, Homo sapien
tggttgtgctcaaccattccactct

SEQ ID NO: 334493 - DNA, 25 bp, Homo sapien
ctcaactgtaatcttcacgatgttt

SEQ ID NO: 334494 - DNA, 25 bp, Homo sapien
tgggcgtgagttctttggaaaactc

SEQ ID NO: 334495 - DNA, 25 bp, Homo sapien
taatagcgtaggcaatctggcgacg

SEQ ID NO: 334496 - DNA, 25 bp, Homo sapien
cgtgatggagcagtctttcccacaa

SEQ ID NO: 334497 - DNA, 25 bp, Homo sapien
aaaagtacgtgcgtgtggaaaacat

SEQ ID NO: 334498 - DNA, 25 bp, Homo sapien
gatggagcagtctttcccacaaaag

SEQ ID NO: 334499 - DNA, 25 bp, Homo sapien
cacaaaagtacgtgcgtgtggaaaa

SEQ ID NO: 334500 - DNA, 25 bp, Homo sapien
catcaaatatatggcgctctccaaa

SEQ ID NO: 334501 - DNA, 25 bp, Homo sapien
taaaattgtacggagatttccatct

SEQ ID NO: 334502 - DNA, 25 bp, Homo sapien
ccgctcttttagtggccgagataat

SEQ ID NO: 334503 - DNA, 25 bp, Homo sapien
gtagtcaacgttgtatttatatgca

SEQ ID NO: 334504 - DNA, 25 bp, Homo sapien
gaggacgagatatcactcggaagtg

SEQ ID NO: 334505 - DNA, 25 bp, Homo sapien
gacgagatatcactcggaagtggtt

SEQ ID NO: 334506 - DNA, 25 bp, Homo sapien
cactgaggacgagatatcactcgga

SEQ ID NO: 334507 - DNA, 25 bp, Homo sapien
tcggaagtggttggcgagtagctgt

SEQ ID NO: 334508 - DNA, 25 bp, Homo sapien
caccaccaggtcttgaaaaactcca

SEQ ID NO: 334509 - DNA, 25 bp, Homo sapien
cctgcaagggcgctgtatgcaaccc

SEQ ID NO: 334510 - DNA, 25 bp, Homo sapien
tttaacatgcttcatatcttgcctg

SEQ ID NO: 334511 - DNA, 25 bp, Homo sapien
gcgctgtatgcaacccagcctcagg

SEQ ID NO: 334512 - DNA, 25 bp, Homo sapien
tgcagaggtctaaccactgggactt

SEQ ID NO: 334513 - DNA, 25 bp, Homo sapien
ccggggtgtcgactgcaactgaggg

SEQ ID NO: 334514 - DNA, 25 bp, Homo sapien
tcttggctgcagaggtctaaccact

SEQ ID NO: 334515 - DNA, 25 bp, Homo sapien
gaggtctaaccactgggacttcctc

SEQ ID NO: 334516 - DNA, 25 bp, Homo sapien
gcctcttgttggtagctctccctgc

SEQ ID NO: 334517 - DNA, 25 bp, Homo sapien
ggtagctctccctgcggcgggctct

SEQ ID NO: 334518 - DNA, 25 bp, Homo sapien
gctctgcctcgggcgcgagtccttg

SEQ ID NO: 334519 - DNA, 25 bp, Homo sapien
ggcgggctctgcctcgggcgcgagt

SEQ ID NO: 334520 - DNA, 25 bp, Homo sapien
ctgaagaatacagttatattagaca

SEQ ID NO: 334521 - DNA, 25 bp, Homo sapien
ttttcaagagggcaaatggatggga

SEQ ID NO: 334522 - DNA, 25 bp, Homo sapien
tgtcctgtggacaacttatttaaaa

SEQ ID NO: 334523 - DNA, 25 bp, Homo sapien
gaatttgtcagcgttctaccaggca

SEQ ID NO: 334524 - DNA, 25 bp, Homo sapien
taaacctggagataataacataagg

SEQ ID NO: 334525 - DNA, 25 bp, Homo sapien
acagtcgtcactctattgtcatggg

SEQ ID NO: 334526 - DNA, 25 bp, Homo sapien
cagcgcatctgctacagtcgtcact

SEQ ID NO: 334527 - DNA, 25 bp, Homo sapien
cagtcgtagctttggcagtgttttg

SEQ ID NO: 334528 - DNA, 25 bp, Homo sapien
gggatcaatcttcactaaacttgaa

SEQ ID NO: 334529 - DNA, 25 bp, Homo sapien
taatcagtgactgaaaccattttcc

SEQ ID NO: 334530 - DNA, 25 bp, Homo sapien
ggaaggatgaagggcgagtgagtct

SEQ ID NO: 334531 - DNA, 25 bp, Homo sapien
agtctatggataatgaaataatcag

SEQ ID NO: 334532 - DNA, 25 bp, Homo sapien
gatgaagggcgagtgagtctatgga

SEQ ID NO: 334533 - DNA, 25 bp, Homo sapien
atgatgacgccggccacttccacag

SEQ ID NO: 334534 - DNA, 25 bp, Homo sapien
gatcctgatacgaaccatgcacctc

SEQ ID NO: 334535 - DNA, 25 bp, Homo sapien
ctggagggggtcacaccacctgaca

SEQ ID NO: 334536 - DNA, 25 bp, Homo sapien
ccttagaagcttcagtagtcagatc

SEQ ID NO: 334537 - DNA, 25 bp, Homo sapien
tagacgcgtgtaactgcacagcagc

SEQ ID NO: 334538 - DNA, 25 bp, Homo sapien
catgaaaacggaaccctgcagaatc

SEQ ID NO: 334539 - DNA, 25 bp, Homo sapien
acagcagcacgggtgctgcaacact

SEQ ID NO: 334540 - DNA, 25 bp, Homo sapien
cactgataggagcatgaaaacggaa

SEQ ID NO: 334541 - DNA, 25 bp, Homo sapien
gaagcaaaagttgaccagaaagaac

SEQ ID NO: 334542 - DNA, 25 bp, Homo sapien
ttgggcacagaagtgttgggccacc

SEQ ID NO: 334543 - DNA, 25 bp, Homo sapien
cagagcaaggagcagctttgccttc

SEQ ID NO: 334544 - DNA, 25 bp, Homo sapien
cctgcctctagtgtggacagagcaa

SEQ ID NO: 334545 - DNA, 25 bp, Homo sapien
catgccctgaggtctatactcttca

SEQ ID NO: 334546 - DNA, 25 bp, Homo sapien
caggcacatgccctgaggtctatac

SEQ ID NO: 334547 - DNA, 25 bp, Homo sapien
ggcacatgccctgaggtctatactc

SEQ ID NO: 334548 - DNA, 25 bp, Homo sapien
cacatgccctgaggtctatactctt

SEQ ID NO: 334549 - DNA, 25 bp, Homo sapien
taatgttcacattgaataacttcag

SEQ ID NO: 334550 - DNA, 25 bp, Homo sapien
gttcacattgaataacttcagccct

SEQ ID NO: 334551 - DNA, 25 bp, Homo sapien
tcacattgaataacttcagccctct

SEQ ID NO: 334552 - DNA, 25 bp, Homo sapien
acattgaataacttcagccctctag

SEQ ID NO: 334553 - DNA, 25 bp, Homo sapien
tcctgggactcggaacgcagcgctc

SEQ ID NO: 334554 - DNA, 25 bp, Homo sapien
tccggccgtcactcagcgctcggcc

SEQ ID NO: 334555 - DNA, 25 bp, Homo sapien
gccgctggacacgagggcggcggga

SEQ ID NO: 334556 - DNA, 25 bp, Homo sapien
gctgacccgcggctctcgtttcttg

SEQ ID NO: 334557 - DNA, 25 bp, Homo sapien
gaacaccagtaagacatctggggaa

SEQ ID NO: 334558 - DNA, 25 bp, Homo sapien
ggtcccagctcagctaccatcttcc

SEQ ID NO: 334559 - DNA, 25 bp, Homo sapien
tcagtttcctgcgcaggttccttct

SEQ ID NO: 334560 - DNA, 25 bp, Homo sapien
agtttcctgcgcaggttccttcttc

SEQ ID NO: 334561 - DNA, 25 bp, Homo sapien
caccggatgttgcacagggactcaa

SEQ ID NO: 334562 - DNA, 25 bp, Homo sapien
gaggttcgtgtacagtccaaacaag

SEQ ID NO: 334563 - DNA, 25 bp, Homo sapien
cattgggctgttctaagagtggtga

SEQ ID NO: 334564 - DNA, 25 bp, Homo sapien
tataaagtgcctggcgcactgcctg

SEQ ID NO: 334565 - DNA, 25 bp, Homo sapien
catgagacggtcagagctctttggg

SEQ ID NO: 334566 - DNA, 25 bp, Homo sapien
tccttgggaaacatctgctgatgaa

SEQ ID NO: 334567 - DNA, 25 bp, Homo sapien
tccacaaacagacccgaagtgaact

SEQ ID NO: 334568 - DNA, 25 bp, Homo sapien
tcacacagagtatcaccaatccaca

SEQ ID NO: 334569 - DNA, 25 bp, Homo sapien
aagtaatgagatgattacccttatc

SEQ ID NO: 334570 - DNA, 25 bp, Homo sapien
tgggtccaagtaatgagatgattac

SEQ ID NO: 334571 - DNA, 25 bp, Homo sapien
ggtccaagtaatgagatgattaccc

SEQ ID NO: 334572 - DNA, 25 bp, Homo sapien
taaatgggtccaagtaatgagatga

SEQ ID NO: 334573 - DNA, 25 bp, Homo sapien
catttggtgagtcctggcgtgccac

SEQ ID NO: 334574 - DNA, 25 bp, Homo sapien
ggcgtgccacaggaataggactgct

SEQ ID NO: 334575 - DNA, 25 bp, Homo sapien
taaacttaagcactcggtcagtgct

SEQ ID NO: 334576 - DNA, 25 bp, Homo sapien
gtagtttccacatcaacgggattat

SEQ ID NO: 334577 - DNA, 25 bp, Homo sapien
ccagtgaattctcagaacaacctta

SEQ ID NO: 334578 - DNA, 25 bp, Homo sapien
agttggctacatgatgatttcataa

SEQ ID NO: 334579 - DNA, 25 bp, Homo sapien
tcataaaactctggagtgtgccctt

SEQ ID NO: 334580 - DNA, 25 bp, Homo sapien
gaggtaggtatgatttcaactttca

SEQ ID NO: 334581 - DNA, 25 bp, Homo sapien
cacaaagatgattctctcggtggca

SEQ ID NO: 334582 - DNA, 25 bp, Homo sapien
tgattctctcggtggcactggagaa

SEQ ID NO: 334583 - DNA, 25 bp, Homo sapien
agaagatgatggtcctcccttggac

SEQ ID NO: 334584 - DNA, 25 bp, Homo sapien
ctggcacaaagatgattctctcggt

SEQ ID NO: 334585 - DNA, 25 bp, Homo sapien
aatcagcagacccacaatcatggca

SEQ ID NO: 334586 - DNA, 25 bp, Homo sapien
gaggaggcttcgcacacttccttga

SEQ ID NO: 334587 - DNA, 25 bp, Homo sapien
caggactgcattgaggatagcagtc

SEQ ID NO: 334588 - DNA, 25 bp, Homo sapien
cacttccttgatgaatggggaggca

SEQ ID NO: 334589 - DNA, 25 bp, Homo sapien
gacaggaggaaaattgcattgaagg

SEQ ID NO: 334590 - DNA, 25 bp, Homo sapien
cctggcattggaacactgcttctcc

SEQ ID NO: 334591 - DNA, 25 bp, Homo sapien
cacccctggcattggaacactgctt

SEQ ID NO: 334592 - DNA, 25 bp, Homo sapien
caggaggaaaattgcattgaaggcc

SEQ ID NO: 334593 - DNA, 25 bp, Homo sapien
gaactgaaggtcacgcagctctggt

SEQ ID NO: 334594 - DNA, 25 bp, Homo sapien
cagggaactgaaggtcacgcagctc

SEQ ID NO: 334595 - DNA, 25 bp, Homo sapien
tgaaggtcacgcagctctggttcca

SEQ ID NO: 334596 - DNA, 25 bp, Homo sapien
ctccagggaactgaaggtcacgcag

SEQ ID NO: 334597 - DNA, 25 bp, Homo sapien
ctggaaccaggcaggggagatgagg

SEQ ID NO: 334598 - DNA, 25 bp, Homo sapien
gtcaaccgtccaggtgcccagaaac

SEQ ID NO: 334599 - DNA, 25 bp, Homo sapien
tgttctccagataatgctcaatgtc

SEQ ID NO: 334600 - DNA, 25 bp, Homo sapien
tgtcacctgggaaaatcacgtcaac

SEQ ID NO: 334601 - DNA, 25 bp, Homo sapien
ttttgttctccagataatgctcaat

SEQ ID NO: 334602 - DNA, 25 bp, Homo sapien
taaatgaggcattataacccgaaac

SEQ ID NO: 334603 - DNA, 25 bp, Homo sapien
gcattataacccgaaaccacatccg

SEQ ID NO: 334604 - DNA, 25 bp, Homo sapien
accacatccggccaggctgcaattg

SEQ ID NO: 334605 - DNA, 25 bp, Homo sapien
ccggccaggctgcaattggctggaa

SEQ ID NO: 334606 - DNA, 25 bp, Homo sapien
gcccaaggttagggcatggtcagct

SEQ ID NO: 334607 - DNA, 25 bp, Homo sapien
ctgcccaaggttagggcatggtcag

SEQ ID NO: 334608 - DNA, 25 bp, Homo sapien
tgcccaaggttagggcatggtcagc

SEQ ID NO: 334609 - DNA, 25 bp, Homo sapien
gctgcccaaggttagggcatggtca

SEQ ID NO: 334610 - DNA, 25 bp, Homo sapien
cagaggaagggcacccagtccagcc

SEQ ID NO: 334611 - DNA, 25 bp, Homo sapien
catgaaaaagcctggggtgacactg

SEQ ID NO: 334612 - DNA, 25 bp, Homo sapien
cacagaggaagggcacccagtccag

SEQ ID NO: 334613 - DNA, 25 bp, Homo sapien
gacactggggacaagcacagaggaa

SEQ ID NO: 334614 - DNA, 25 bp, Homo sapien
cactttaggtcaagaccctccagcg

SEQ ID NO: 334615 - DNA, 25 bp, Homo sapien
cgtctgtgaccttatacaattctcc

SEQ ID NO: 334616 - DNA, 25 bp, Homo sapien
tcaggctccggctttggatccacgt

SEQ ID NO: 334617 - DNA, 25 bp, Homo sapien
tgaaggaataatttagcttgtagaa

SEQ ID NO: 334618 - DNA, 25 bp, Homo sapien
cagcagcccaggcaagtcagtgggc

SEQ ID NO: 334619 - DNA, 25 bp, Homo sapien
tatggagcgcctcctgaaatcctgg

SEQ ID NO: 334620 - DNA, 25 bp, Homo sapien
tgggcagcgggtcggtgccggtggc

SEQ ID NO: 334621 - DNA, 25 bp, Homo sapien
tcctgggttgcattaggctctcggg

SEQ ID NO: 334622 - DNA, 25 bp, Homo sapien
ccgcgggctgcgggcaggtggcggc

SEQ ID NO: 334623 - DNA, 25 bp, Homo sapien
cggcgcgggctggcggtggctccac

SEQ ID NO: 334624 - DNA, 25 bp, Homo sapien
ctgcgggcaggtggcggcgcggcgc

SEQ ID NO: 334625 - DNA, 25 bp, Homo sapien
gctgcgggctcccagggcaggtgcc

SEQ ID NO: 334626 - DNA, 25 bp, Homo sapien
aggtagctgggggtgacggcggctg

SEQ ID NO: 334627 - DNA, 25 bp, Homo sapien
tggcgagggccgccaagtttctgcc

SEQ ID NO: 334628 - DNA, 25 bp, Homo sapien
ggagccggaggatttccccagactc

SEQ ID NO: 334629 - DNA, 25 bp, Homo sapien
ctgtccccggccgacgaggtagctg

SEQ ID NO: 334630 - DNA, 25 bp, Homo sapien
agaatatgaaatacggccgggcgcg

SEQ ID NO: 334631 - DNA, 25 bp, Homo sapien
ataattatggacttgacttctgggc

SEQ ID NO: 334632 - DNA, 25 bp, Homo sapien
gagcatcttatgtgggcaaggcact

SEQ ID NO: 334633 - DNA, 25 bp, Homo sapien
ggaatcctctggtcaactgtacgag

SEQ ID NO: 334634 - DNA, 25 bp, Homo sapien
tggccctaggctttggattgggttc

SEQ ID NO: 334635 - DNA, 25 bp, Homo sapien
ctaggctttggattgggttcaggtc

SEQ ID NO: 334636 - DNA, 25 bp, Homo sapien
ttcaggtctggctcgtgaatcttca

SEQ ID NO: 334637 - DNA, 25 bp, Homo sapien
gttcaggtctggctcgtgaatcttc

SEQ ID NO: 334638 - DNA, 25 bp, Homo sapien
catgccctacccctatacattgttg

SEQ ID NO: 334639 - DNA, 25 bp, Homo sapien
tgcccaggaccatactactgggaat

SEQ ID NO: 334640 - DNA, 25 bp, Homo sapien
tgccctacccctatacattgttgta

SEQ ID NO: 334641 - DNA, 25 bp, Homo sapien
gaaggagtcacttgcccaggaccat

SEQ ID NO: 334642 - DNA, 25 bp, Homo sapien
tggctgtgctgtgaatccagctgca

SEQ ID NO: 334643 - DNA, 25 bp, Homo sapien
tatagtagaagacgccacctgggtc

SEQ ID NO: 334644 - DNA, 25 bp, Homo sapien
tgctggctgacctagcagagcaggt

SEQ ID NO: 334645 - DNA, 25 bp, Homo sapien
ttttggaatgcccagaatgctggct

SEQ ID NO: 334646 - DNA, 25 bp, Homo sapien
tgggaacactgagccgggcacatcc

SEQ ID NO: 334647 - DNA, 25 bp, Homo sapien
actgcaggcgcttggccctgctgca

SEQ ID NO: 334648 - DNA, 25 bp, Homo sapien
cacccgtagccagcgactgcaggcg

SEQ ID NO: 334649 - DNA, 25 bp, Homo sapien
cgactgcaggcgcttggccctgctg

SEQ ID NO: 334650 - DNA, 25 bp, Homo sapien
gaagatgctttcagcacccagcacc

SEQ ID NO: 334651 - DNA, 25 bp, Homo sapien
cgggctggtcgcgacatgaagatgc

SEQ ID NO: 334652 - DNA, 25 bp, Homo sapien
ggctggtcgcgacatgaagatgctt

SEQ ID NO: 334653 - DNA, 25 bp, Homo sapien
tgaagatgctttcagcacccagcac

SEQ ID NO: 334654 - DNA, 25 bp, Homo sapien
acagaaaggcctgaatgtgtctgag

SEQ ID NO: 334655 - DNA, 25 bp, Homo sapien
gaccctctaactctgattagctcag

SEQ ID NO: 334656 - DNA, 25 bp, Homo sapien
aaaggcctgaatgtgtctgagaccc

SEQ ID NO: 334657 - DNA, 25 bp, Homo sapien
ctctgattagctcaggaatccacct

SEQ ID NO: 334658 - DNA, 25 bp, Homo sapien
tctcgcccttagattcccagggttg

SEQ ID NO: 334659 - DNA, 25 bp, Homo sapien
gccccacgggtctgatgtgctgaca

SEQ ID NO: 334660 - DNA, 25 bp, Homo sapien
aggatcttggactggcttctcgccc

SEQ ID NO: 334661 - DNA, 25 bp, Homo sapien
gctgacacgccaggatcttggactg

SEQ ID NO: 334662 - DNA, 25 bp, Homo sapien
gagagggcagggccttggcctacgt

SEQ ID NO: 334663 - DNA, 25 bp, Homo sapien
gagggcagggccttggcctacgtca

SEQ ID NO: 334664 - DNA, 25 bp, Homo sapien
ctagagagggcagggccttggccta

SEQ ID NO: 334665 - DNA, 25 bp, Homo sapien
gggcagggccttggcctacgtcacc

SEQ ID NO: 334666 - DNA, 25 bp, Homo sapien
gctcggtgggtaagccagacactga

SEQ ID NO: 334667 - DNA, 25 bp, Homo sapien
gggctcggtgggtaagccagacact

SEQ ID NO: 334668 - DNA, 25 bp, Homo sapien
ctcagggctcggtgggtaagccaga

SEQ ID NO: 334669 - DNA, 25 bp, Homo sapien
cggtgggtaagccagacactgagct

SEQ ID NO: 334670 - DNA, 25 bp, Homo sapien
gggcatgggttccaaggtcactaac

SEQ ID NO: 334671 - DNA, 25 bp, Homo sapien
gctagatgcttagcacacacttgtg

SEQ ID NO: 334672 - DNA, 25 bp, Homo sapien
cacacttgtgattaggatcacctgg

SEQ ID NO: 334673 - DNA, 25 bp, Homo sapien
gacctgcagcaggttacttgccttc

SEQ ID NO: 334674 - DNA, 25 bp, Homo sapien
ccgtgaacggaaggagaagatgctt

SEQ ID NO: 334675 - DNA, 25 bp, Homo sapien
actgtttggtcaaggcggaggctcc

SEQ ID NO: 334676 - DNA, 25 bp, Homo sapien
tctacacccttggagctggaacgaa

SEQ ID NO: 334677 - DNA, 25 bp, Homo sapien
gaggtgggctccataacgcccttga

SEQ ID NO: 334678 - DNA, 25 bp, Homo sapien
gattacagccgtgtgccacgacacc

SEQ ID NO: 334679 - DNA, 25 bp, Homo sapien
gggattacagccgtgtgccacgaca

SEQ ID NO: 334680 - DNA, 25 bp, Homo sapien
tgggattacagccgtgtgccacgac

SEQ ID NO: 334681 - DNA, 25 bp, Homo sapien
ttacagccgtgtgccacgacaccca

SEQ ID NO: 334682 - DNA, 25 bp, Homo sapien
ggacttagcatgaaccggagagtgc

SEQ ID NO: 334683 - DNA, 25 bp, Homo sapien
ggaccttttagtattgggctctgga

SEQ ID NO: 334684 - DNA, 25 bp, Homo sapien
tttgtccttggagtcctcgggcagc

SEQ ID NO: 334685 - DNA, 25 bp, Homo sapien
cagcccatcctagagggacctttta

SEQ ID NO: 334686 - DNA, 25 bp, Homo sapien
cctggacacccgcagtgtttggttt

SEQ ID NO: 334687 - DNA, 25 bp, Homo sapien
taaacttgacttccacgtgaccctc

SEQ ID NO: 334688 - DNA, 25 bp, Homo sapien
tacaacggatgtcatctggggtcct

SEQ ID NO: 334689 - DNA, 25 bp, Homo sapien
ctgaggctggtgctgtgtcatcgtc

SEQ ID NO: 334690 - DNA, 25 bp, Homo sapien
tgttccttgcaaagcctcccttgtg

SEQ ID NO: 334691 - DNA, 25 bp, Homo sapien
agcctcccttgtggagtaggccagc

SEQ ID NO: 334692 - DNA, 25 bp, Homo sapien
tgcaaagcctcccttgtggagtagg

SEQ ID NO: 334693 - DNA, 25 bp, Homo sapien
cctcccttgtggagtaggccagcat

SEQ ID NO: 334694 - DNA, 25 bp, Homo sapien
tgtaacagggtcatggattccgcag

SEQ ID NO: 334695 - DNA, 25 bp, Homo sapien
ggaagcctcatcacttacgtctggt

SEQ ID NO: 334696 - DNA, 25 bp, Homo sapien
gaagtaatttccatggtccggtgat

SEQ ID NO: 334697 - DNA, 25 bp, Homo sapien
tacggcactgttcggaaactgctgc

SEQ ID NO: 334698 - DNA, 25 bp, Homo sapien
gccggccttctgactgtgctgccag

SEQ ID NO: 334699 - DNA, 25 bp, Homo sapien
ggcttttcagctgtactgtctggca

SEQ ID NO: 334700 - DNA, 25 bp, Homo sapien
cacttttgtcggtcagcaggaccca

SEQ ID NO: 334701 - DNA, 25 bp, Homo sapien
gtgcagaggaaccagcccttttgct

SEQ ID NO: 334702 - DNA, 25 bp, Homo sapien
gcctcagggagctgatccctccctt

SEQ ID NO: 334703 - DNA, 25 bp, Homo sapien
cctgtgtcagcttcttagaagtggg

SEQ ID NO: 334704 - DNA, 25 bp, Homo sapien
tatgcataattgttccccgccttaa

SEQ ID NO: 334705 - DNA, 25 bp, Homo sapien
catttcgagctgtctcctgtgtcag

SEQ ID NO: 334706 - DNA, 25 bp, Homo sapien
tattcccaggtgtttattgtatgca

SEQ ID NO: 334707 - DNA, 25 bp, Homo sapien
gcaggctgttctcagcatcctccat

SEQ ID NO: 334708 - DNA, 25 bp, Homo sapien
ggtgagaagcccacaatggcaggct

SEQ ID NO: 334709 - DNA, 25 bp, Homo sapien
tgcacgtggccggtgtggtgagaag

SEQ ID NO: 334710 - DNA, 25 bp, Homo sapien
gtgtggtgagaagcccacaatggca

SEQ ID NO: 334711 - DNA, 25 bp, Homo sapien
tctggttagccttcggctttctcct

SEQ ID NO: 334712 - DNA, 25 bp, Homo sapien
tgaaggtgcagcacccaatggagga

SEQ ID NO: 334713 - DNA, 25 bp, Homo sapien
aggaagcctaggttttctgctgggc

SEQ ID NO: 334714 - DNA, 25 bp, Homo sapien
ttctgtagccaagataaaaaatttc

SEQ ID NO: 334715 - DNA, 25 bp, Homo sapien
acagtgggtacgatgagagcctctt

SEQ ID NO: 334716 - DNA, 25 bp, Homo sapien
gcctcttcaggatgttgagtgtcaa

SEQ ID NO: 334717 - DNA, 25 bp, Homo sapien
aagggtggacaggacacgtccctgc

SEQ ID NO: 334718 - DNA, 25 bp, Homo sapien
gtgggtacgatgagagcctcttcag

SEQ ID NO: 334719 - DNA, 25 bp, Homo sapien
catgactcaggcgatgcaggcctta

SEQ ID NO: 334720 - DNA, 25 bp, Homo sapien
tgtgccagcggcacaaattatctca

SEQ ID NO: 334721 - DNA, 25 bp, Homo sapien
tgagaaaaccatgactcaggcgatg

SEQ ID NO: 334722 - DNA, 25 bp, Homo sapien
ggtgggcctcatacaagatgagaaa

SEQ ID NO: 334723 - DNA, 25 bp, Homo sapien
cgctgccttctgactgacggtgttg

SEQ ID NO: 334724 - DNA, 25 bp, Homo sapien
tgtgccatccgctgccttctgactg

SEQ ID NO: 334725 - DNA, 25 bp, Homo sapien
gcggaagccctgtgccatccgctgc

SEQ ID NO: 334726 - DNA, 25 bp, Homo sapien
catccgctgccttctgactgacggt

SEQ ID NO: 334727 - DNA, 25 bp, Homo sapien
tggatctcagcagcttctccagcat

SEQ ID NO: 334728 - DNA, 25 bp, Homo sapien
tcctggatctcagcagcttctccag

SEQ ID NO: 334729 - DNA, 25 bp, Homo sapien
ttcctggatctcagcagcttctcca

SEQ ID NO: 334730 - DNA, 25 bp, Homo sapien
ctggatctcagcagcttctccagca

SEQ ID NO: 334731 - DNA, 25 bp, Homo sapien
aggaatctggctttgtagctcactt

SEQ ID NO: 334732 - DNA, 25 bp, Homo sapien
cagaccgctctgtacctaaaggaag

SEQ ID NO: 334733 - DNA, 25 bp, Homo sapien
gaagcgaagctttttatagtcacac

SEQ ID NO: 334734 - DNA, 25 bp, Homo sapien
gccaggagggaacaagcaggaatct

SEQ ID NO: 334735 - DNA, 25 bp, Homo sapien
agcttgtcacaggtatgaagttggg

SEQ ID NO: 334736 - DNA, 25 bp, Homo sapien
tctttctgccgtggtttttccatca

SEQ ID NO: 334737 - DNA, 25 bp, Homo sapien
tatagcttgtcacaggtatgaagtt

SEQ ID NO: 334738 - DNA, 25 bp, Homo sapien
ttctttctgccgtggtttttccatc

SEQ ID NO: 334739 - DNA, 25 bp, Homo sapien
gtatcagcctcctttcattgttggg

SEQ ID NO: 334740 - DNA, 25 bp, Homo sapien
tcctttcattgttgggaggagctga

SEQ ID NO: 334741 - DNA, 25 bp, Homo sapien
cctcctttcattgttgggaggagct

SEQ ID NO: 334742 - DNA, 25 bp, Homo sapien
cagcctcctttcattgttgggagga

SEQ ID NO: 334743 - DNA, 25 bp, Homo sapien
ggtgtaggagctcactatgggcaat

SEQ ID NO: 334744 - DNA, 25 bp, Homo sapien
tcctgggcctgcgtaatgagggagc

SEQ ID NO: 334745 - DNA, 25 bp, Homo sapien
tggtgtaggagctcactatgggcaa

SEQ ID NO: 334746 - DNA, 25 bp, Homo sapien
cctgcgtaatgagggagcagaccat

SEQ ID NO: 334747 - DNA, 25 bp, Homo sapien
tccttcctgggggacctcagaggct

SEQ ID NO: 334748 - DNA, 25 bp, Homo sapien
cccagtccttcctgggggacctcag

SEQ ID NO: 334749 - DNA, 25 bp, Homo sapien
ctgggggacctcagaggctgtctca

SEQ ID NO: 334750 - DNA, 25 bp, Homo sapien
tgaaatacagccctccccagtcctt

SEQ ID NO: 334751 - DNA, 25 bp, Homo sapien
tcagtgttgccttccagagagggag

SEQ ID NO: 334752 - DNA, 25 bp, Homo sapien
gatcagtgttgccttccagagaggg

SEQ ID NO: 334753 - DNA, 25 bp, Homo sapien
cagtgttgccttccagagagggagg

SEQ ID NO: 334754 - DNA, 25 bp, Homo sapien
ctggatcagtgttgccttccagaga

SEQ ID NO: 334755 - DNA, 25 bp, Homo sapien
ggagataaactcacagtggcccaga

SEQ ID NO: 334756 - DNA, 25 bp, Homo sapien
caatttggtgaccaccacggtgggc

SEQ ID NO: 334757 - DNA, 25 bp, Homo sapien
atgggcaccgtgaggaggtccttcc

SEQ ID NO: 334758 - DNA, 25 bp, Homo sapien
ccacgaacggacgagtgcagagtcg

SEQ ID NO: 334759 - DNA, 25 bp, Homo sapien
ggaaagaggcacgtagcaataattc

SEQ ID NO: 334760 - DNA, 25 bp, Homo sapien
tgggaaagaggcacgtagcaataat

SEQ ID NO: 334761 - DNA, 25 bp, Homo sapien
gaaagaggcacgtagcaataattcc

SEQ ID NO: 334762 - DNA, 25 bp, Homo sapien
aagaggcacgtagcaataattcctc

SEQ ID NO: 334763 - DNA, 25 bp, Homo sapien
ccataaataagatgctggaggccac

SEQ ID NO: 334764 - DNA, 25 bp, Homo sapien
tgccatcttcgccagagggtctggt

SEQ ID NO: 334765 - DNA, 25 bp, Homo sapien
tgcccacaagttgccgaatccgatc

SEQ ID NO: 334766 - DNA, 25 bp, Homo sapien
ggccacagtagagtcacagctctgg

SEQ ID NO: 334767 - DNA, 25 bp, Homo sapien
tgggggatctgatttaggtagccac

SEQ ID NO: 334768 - DNA, 25 bp, Homo sapien
ggggatctgatttaggtagccactc

SEQ ID NO: 334769 - DNA, 25 bp, Homo sapien
actgggggatctgatttaggtagcc

SEQ ID NO: 334770 - DNA, 25 bp, Homo sapien
atactgggggatctgatttaggtag

SEQ ID NO: 334771 - DNA, 25 bp, Homo sapien
catgaaaagttattagcgaggcagt

SEQ ID NO: 334772 - DNA, 25 bp, Homo sapien
tccagtgtgtaagatgctcacggca

SEQ ID NO: 334773 - DNA, 25 bp, Homo sapien
agtgccttagacagcacctcgctgg

SEQ ID NO: 334774 - DNA, 25 bp, Homo sapien
gataagcagcttccgtccaggacag

SEQ ID NO: 334775 - DNA, 25 bp, Homo sapien
gagatgggtgcatattacagtaggc

SEQ ID NO: 334776 - DNA, 25 bp, Homo sapien
atgagatgggtgcatattacagtag

SEQ ID NO: 334777 - DNA, 25 bp, Homo sapien
agatgggtgcatattacagtaggct

SEQ ID NO: 334778 - DNA, 25 bp, Homo sapien
gatgggtgcatattacagtaggctt

SEQ ID NO: 334779 - DNA, 25 bp, Homo sapien
agccttgggttcccatcccagctgg

SEQ ID NO: 334780 - DNA, 25 bp, Homo sapien
ttctgagtcccacaaaagccacatg

SEQ ID NO: 334781 - DNA, 25 bp, Homo sapien
tgccaccatgagtaatatcccagcc

SEQ ID NO: 334782 - DNA, 25 bp, Homo sapien
cccagccctcggttctgcttccctt

SEQ ID NO: 334783 - DNA, 25 bp, Homo sapien
ccctggctctgggtcctaagagaac

SEQ ID NO: 334784 - DNA, 25 bp, Homo sapien
tggtgtggctctggaagacgctggc

SEQ ID NO: 334785 - DNA, 25 bp, Homo sapien
gcagtgggtccgtgctgacccctga

SEQ ID NO: 334786 - DNA, 25 bp, Homo sapien
tcccgtggtccctggtgtggctctg

SEQ ID NO: 334787 - DNA, 25 bp, Homo sapien
cattttacagcaaggggtcgggcag

SEQ ID NO: 334788 - DNA, 25 bp, Homo sapien
attttacagcaaggggtcgggcagc

SEQ ID NO: 334789 - DNA, 25 bp, Homo sapien
cacattttacagcaaggggtcgggc

SEQ ID NO: 334790 - DNA, 25 bp, Homo sapien
cttcacattttacagcaaggggtcg

SEQ ID NO: 334791 - DNA, 25 bp, Homo sapien
ccaaggccagcactgggcattcaag

SEQ ID NO: 334792 - DNA, 25 bp, Homo sapien
ctgcagtggtacaaagacagcctcc

SEQ ID NO: 334793 - DNA, 25 bp, Homo sapien
gaaagaaggaactcagcccagaggg

SEQ ID NO: 334794 - DNA, 25 bp, Homo sapien
gagaggcctagagtcaggcctcgac

SEQ ID NO: 334795 - DNA, 25 bp, Homo sapien
ctccaaagggctctagggtgggtct

SEQ ID NO: 334796 - DNA, 25 bp, Homo sapien
tctagggtgggtctttcaaggacat

SEQ ID NO: 334797 - DNA, 25 bp, Homo sapien
agggctctagggtgggtctttcaag

SEQ ID NO: 334798 - DNA, 25 bp, Homo sapien
cagcggtcccacaaaatcccccttg

SEQ ID NO: 334799 - DNA, 25 bp, Homo sapien
catctagacagaggtgaacgaaaca

SEQ ID NO: 334800 - DNA, 25 bp, Homo sapien
ggacccctgtgcaaccacattaagg

SEQ ID NO: 334801 - DNA, 25 bp, Homo sapien
gggtccctggcagagaatgcccact

SEQ ID NO: 334802 - DNA, 25 bp, Homo sapien
atgcagcctgctcatgggtccctgg

SEQ ID NO: 334803 - DNA, 25 bp, Homo sapien
tcctctcgctgctccttgttcctgc

SEQ ID NO: 334804 - DNA, 25 bp, Homo sapien
ctctcgctgctccttgttcctgcgc

SEQ ID NO: 334805 - DNA, 25 bp, Homo sapien
ttagcccgacatctcctctcgctgc

SEQ ID NO: 334806 - DNA, 25 bp, Homo sapien
gacatctcctctcgctgctccttgt

SEQ ID NO: 334807 - DNA, 25 bp, Homo sapien
ctcgcggatctccttgctgagctcc

SEQ ID NO: 334808 - DNA, 25 bp, Homo sapien
gccgctcgcgcagtgcggccaggtg

SEQ ID NO: 334809 - DNA, 25 bp, Homo sapien
tcgcggatctccttgctgagctcca

SEQ ID NO: 334810 - DNA, 25 bp, Homo sapien
cgcggatctccttgctgagctccat

SEQ ID NO: 334811 - DNA, 25 bp, Homo sapien
tctcctccgcctggcggctgaagtt

SEQ ID NO: 334812 - DNA, 25 bp, Homo sapien
ctccgcctggcggctgaagttgtta

SEQ ID NO: 334813 - DNA, 25 bp, Homo sapien
cgcctggcggctgaagttgttattc

SEQ ID NO: 334814 - DNA, 25 bp, Homo sapien
ttctcctccgcctggcggctgaagt

SEQ ID NO: 334815 - DNA, 25 bp, Homo sapien
ccgctcgtgctcgcgcggctccacc

SEQ ID NO: 334816 - DNA, 25 bp, Homo sapien
gaggcagttgctgttcagcaccagg

SEQ ID NO: 334817 - DNA, 25 bp, Homo sapien
aatctcattccacatagccttatag

SEQ ID NO: 334818 - DNA, 25 bp, Homo sapien
aataatctcattccacatagcctta

SEQ ID NO: 334819 - DNA, 25 bp, Homo sapien
tcattccacatagccttatagatcc

SEQ ID NO: 334820 - DNA, 25 bp, Homo sapien
ccacatagccttatagatcctgtaa

SEQ ID NO: 334821 - DNA, 25 bp, Homo sapien
gaactgggcagagtagggatacaaa

SEQ ID NO: 334822 - DNA, 25 bp, Homo sapien
cctcaataccttagagaatgtgacc

SEQ ID NO: 334823 - DNA, 25 bp, Homo sapien
actgggtcattgcaagtgcagtttt

SEQ ID NO: 334824 - DNA, 25 bp, Homo sapien
cataaaggtggaaattagtaagtgc

SEQ ID NO: 334825 - DNA, 25 bp, Homo sapien
cctgggcaggcctctagaatcccgt

SEQ ID NO: 334826 - DNA, 25 bp, Homo sapien
aggcaagcgccgtcagtcacaggcg

SEQ ID NO: 334827 - DNA, 25 bp, Homo sapien
tctagaatcccgtgtctttctgcag

SEQ ID NO: 334828 - DNA, 25 bp, Homo sapien
gccctgattggaggcaagcgccgtc

SEQ ID NO: 334829 - DNA, 25 bp, Homo sapien
acgcctggccttgcatatcttttta

SEQ ID NO: 334830 - DNA, 25 bp, Homo sapien
ttcccatatttaagcaggagtaggg

SEQ ID NO: 334831 - DNA, 25 bp, Homo sapien
gagcctagtttcaccctactctgta

SEQ ID NO: 334832 - DNA, 25 bp, Homo sapien
gagcaatgctgtcagtagcatctct

SEQ ID NO: 334833 - DNA, 25 bp, Homo sapien
tacaataacacgagtaaacgaatgc

SEQ ID NO: 334834 - DNA, 25 bp, Homo sapien
gaaggtgggagagctctaaaattag

SEQ ID NO: 334835 - DNA, 25 bp, Homo sapien
ggttatggttatacaataacacgag

SEQ ID NO: 334836 - DNA, 25 bp, Homo sapien
cacgagtaaacgaatgccactgaat

SEQ ID NO: 334837 - DNA, 25 bp, Homo sapien
gaagcttctaacgtctccttagtaa

SEQ ID NO: 334838 - DNA, 25 bp, Homo sapien
cccataggacttctgtgatgacacc

SEQ ID NO: 334839 - DNA, 25 bp, Homo sapien
ttccttgaagcttctaacgtctcct

SEQ ID NO: 334840 - DNA, 25 bp, Homo sapien
ttagtaactgcactctcatcctcca

SEQ ID NO: 334841 - DNA, 25 bp, Homo sapien
caggatccagcaggtcagttatgac

SEQ ID NO: 334842 - DNA, 25 bp, Homo sapien
tacccctgggtaattgagtcagctg

SEQ ID NO: 334843 - DNA, 25 bp, Homo sapien
ccttaactgtatctggtgggtccca

SEQ ID NO: 334844 - DNA, 25 bp, Homo sapien
tgatgatgaaagacaccgagacgga

SEQ ID NO: 334845 - DNA, 25 bp, Homo sapien
tgcgggtacgttcaggagcgaggtt

SEQ ID NO: 334846 - DNA, 25 bp, Homo sapien
cacggcgggcttgcgggtacgttca

SEQ ID NO: 334847 - DNA, 25 bp, Homo sapien
ggcttgcgggtacgttcaggagcga

SEQ ID NO: 334848 - DNA, 25 bp, Homo sapien
gctgaattctcacggcgggcttgcg

SEQ ID NO: 334849 - DNA, 25 bp, Homo sapien
gatgctgtcccgtttgagaactact

SEQ ID NO: 334850 - DNA, 25 bp, Homo sapien
aggtagcagaggcctccccgatgcc

SEQ ID NO: 334851 - DNA, 25 bp, Homo sapien
cccgatgccccttgagtagtgggca

SEQ ID NO: 334852 - DNA, 25 bp, Homo sapien
ctgattgatgctgtcccgtttgaga

SEQ ID NO: 334853 - DNA, 25 bp, Homo sapien
cgggctacagcctgcggcgcttgca

SEQ ID NO: 334854 - DNA, 25 bp, Homo sapien
cgcagaccctcgcggaatgagctgg

SEQ ID NO: 334855 - DNA, 25 bp, Homo sapien
agcggaaggcgcactgcgaccccgg

SEQ ID NO: 334856 - DNA, 25 bp, Homo sapien
cgcgcgaggcggcggagcggaaggc

SEQ ID NO: 334857 - DNA, 25 bp, Homo sapien
agagcgctccaaagtgcccagcgcg

SEQ ID NO: 334858 - DNA, 25 bp, Homo sapien
tgacaccgcggaactggcgatgcgg

SEQ ID NO: 334859 - DNA, 25 bp, Homo sapien
tcgggcattgagtcgtcgctgtcct

SEQ ID NO: 334860 - DNA, 25 bp, Homo sapien
agcaagaggaccgtcctgcccgatc

SEQ ID NO: 334861 - DNA, 25 bp, Homo sapien
gtcctgtcctgtcccatccccgtgg

SEQ ID NO: 334862 - DNA, 25 bp, Homo sapien
tgtcccatccccgtggttcttcctg

SEQ ID NO: 334863 - DNA, 25 bp, Homo sapien
ggctggttatgacttggctggacca

SEQ ID NO: 334864 - DNA, 25 bp, Homo sapien
gttatgacttggctggaccagctcc

SEQ ID NO: 334865 - DNA, 25 bp, Homo sapien
aaaggcacttgaatggatgattcca

SEQ ID NO: 334866 - DNA, 25 bp, Homo sapien
gcccaggcaggatttttgacccact

SEQ ID NO: 334867 - DNA, 25 bp, Homo sapien
aaattatcaaaggagggcccgattg

SEQ ID NO: 334868 - DNA, 25 bp, Homo sapien
gccacgtgtgtcacctgagctgctt

SEQ ID NO: 334869 - DNA, 25 bp, Homo sapien
cattcttgaagggttggggaaggct

SEQ ID NO: 334870 - DNA, 25 bp, Homo sapien
cttgaagggttggggaaggcttcat

SEQ ID NO: 334871 - DNA, 25 bp, Homo sapien
tgtagaaaccattcttgaagggttg

SEQ ID NO: 334872 - DNA, 25 bp, Homo sapien
tcttgaagggttggggaaggcttca

SEQ ID NO: 334873 - DNA, 25 bp, Homo sapien
ccagtaggccatgacaggtagggtt

SEQ ID NO: 334874 - DNA, 25 bp, Homo sapien
gcaggaccccagtaggccatgacag

SEQ ID NO: 334875 - DNA, 25 bp, Homo sapien
ggtagggttggtatatttccagcca

SEQ ID NO: 334876 - DNA, 25 bp, Homo sapien
cagccatttggtattaacacaagtc

SEQ ID NO: 334877 - DNA, 25 bp, Homo sapien
tttcttaagccttggatttcaaggc

SEQ ID NO: 334878 - DNA, 25 bp, Homo sapien
cttaagccttggatttcaaggcctt

SEQ ID NO: 334879 - DNA, 25 bp, Homo sapien
ttcttaagccttggatttcaaggcc

SEQ ID NO: 334880 - DNA, 25 bp, Homo sapien
tcttaagccttggatttcaaggcct

SEQ ID NO: 334881 - DNA, 25 bp, Homo sapien
ctacttaaactctactgctggacag

SEQ ID NO: 334882 - DNA, 25 bp, Homo sapien
tgcaaacacgtctgatagagactcc

SEQ ID NO: 334883 - DNA, 25 bp, Homo sapien
tcatctctatgtggttccgtgactc

SEQ ID NO: 334884 - DNA, 25 bp, Homo sapien
taattggtcccattgcttccatgag

SEQ ID NO: 334885 - DNA, 25 bp, Homo sapien
tgatgcctctagtacaaggacaagg

SEQ ID NO: 334886 - DNA, 25 bp, Homo sapien
tctagtgtactgacatgatcttgaa

SEQ ID NO: 334887 - DNA, 25 bp, Homo sapien
gcatgtagtaccagcataattggat

SEQ ID NO: 334888 - DNA, 25 bp, Homo sapien
gacccttagtgtgtgctttagttcc

SEQ ID NO: 334889 - DNA, 25 bp, Homo sapien
tcacttggcaatgcgggctttttgg

SEQ ID NO: 334890 - DNA, 25 bp, Homo sapien
ttttgtggtttcaggtctaacatgt

SEQ ID NO: 334891 - DNA, 25 bp, Homo sapien
ggattcacttggcaatgcgggcttt

SEQ ID NO: 334892 - DNA, 25 bp, Homo sapien
cagccccactggttaaatagggaat

SEQ ID NO: 334893 - DNA, 25 bp, Homo sapien
tccaagcaaggtgcgggatacagtc

SEQ ID NO: 334894 - DNA, 25 bp, Homo sapien
ctactgaagactcggcaatggcggg

SEQ ID NO: 334895 - DNA, 25 bp, Homo sapien
cctgctgtccgacaatccccagtga

SEQ ID NO: 334896 - DNA, 25 bp, Homo sapien
tcatttgtcttctgcgccactcacg

SEQ ID NO: 334897 - DNA, 25 bp, Homo sapien
ggattacaggggtgacccacctgcc

SEQ ID NO: 334898 - DNA, 25 bp, Homo sapien
tacaggggtgagctgctgcctcagc

SEQ ID NO: 334899 - DNA, 25 bp, Homo sapien
ggggtgagccgctgctctcagcctc

SEQ ID NO: 334900 - DNA, 25 bp, Homo sapien
aggggtgagcccctgctctcagcct

SEQ ID NO: 334901 - DNA, 25 bp, Homo sapien
taagtatgtaaccttctgagcctgg

SEQ ID NO: 334902 - DNA, 25 bp, Homo sapien
ggtactctggccagttccctcaagg

SEQ ID NO: 334903 - DNA, 25 bp, Homo sapien
gctacagtaatggatcagagccagg

SEQ ID NO: 334904 - DNA, 25 bp, Homo sapien
tccaggtggctcaattgcaacgtag

SEQ ID NO: 334905 - DNA, 25 bp, Homo sapien
ggagggttcagttaatgcagcctct

SEQ ID NO: 334906 - DNA, 25 bp, Homo sapien
cagacctgagctagatagggtctca

SEQ ID NO: 334907 - DNA, 25 bp, Homo sapien
caggagtagggtttgcttgatatgc

SEQ ID NO: 334908 - DNA, 25 bp, Homo sapien
ggtgggtcaaaccagatgtttctgc

SEQ ID NO: 334909 - DNA, 25 bp, Homo sapien
tttcagggatgcagaaaagaggcct

SEQ ID NO: 334910 - DNA, 25 bp, Homo sapien
cacagggtcagacaaagtgtcctgc

SEQ ID NO: 334911 - DNA, 25 bp, Homo sapien
tcagagcagagtaaggccgagtcag

SEQ ID NO: 334912 - DNA, 25 bp, Homo sapien
cagagcgtgttcttccaagtggagc

SEQ ID NO: 334913 - DNA, 25 bp, Homo sapien
ctaatcattgtttgctctgttggca

SEQ ID NO: 334914 - DNA, 25 bp, Homo sapien
tcaaactgtcgaactgtcaggggat

SEQ ID NO: 334915 - DNA, 25 bp, Homo sapien
gaactaatcattgtttgctctgttg

SEQ ID NO: 334916 - DNA, 25 bp, Homo sapien
gtcgaactgtcaggggatgagaccc

SEQ ID NO: 334917 - DNA, 25 bp, Homo sapien
gcaatgctgttatacctagcatgca

SEQ ID NO: 334918 - DNA, 25 bp, Homo sapien
tctgtaattcgctgacattcatttt

SEQ ID NO: 334919 - DNA, 25 bp, Homo sapien
atggtctgtaattcgctgacattca

SEQ ID NO: 334920 - DNA, 25 bp, Homo sapien
tgcgcaatgctgttatacctagcat

SEQ ID NO: 334921 - DNA, 25 bp, Homo sapien
tctcaggtagagtttctccttgtga

SEQ ID NO: 334922 - DNA, 25 bp, Homo sapien
tgctggatagtgactaaagccaaga

SEQ ID NO: 334923 - DNA, 25 bp, Homo sapien
gctggatagtgactaaagccaagat

SEQ ID NO: 334924 - DNA, 25 bp, Homo sapien
ctggatagtgactaaagccaagatc

SEQ ID NO: 334925 - DNA, 25 bp, Homo sapien
tggatagtgactaaagccaagatct

SEQ ID NO: 334926 - DNA, 25 bp, Homo sapien
ttatcatccttccgggactgtgctc

SEQ ID NO: 334927 - DNA, 25 bp, Homo sapien
attatcatccttccgggactgtgct

SEQ ID NO: 334928 - DNA, 25 bp, Homo sapien
gcacgcagcggggacagctcagccc

SEQ ID NO: 334929 - DNA, 25 bp, Homo sapien
caggcacgcagcggggacagctcag

SEQ ID NO: 334930 - DNA, 25 bp, Homo sapien
aggcacgcagcggggacagctcagc

SEQ ID NO: 334931 - DNA, 25 bp, Homo sapien
gcaggcacgcagcggggacagctca

SEQ ID NO: 334932 - DNA, 25 bp, Homo sapien
caggggcaggcaccgccatggctgc

SEQ ID NO: 334933 - DNA, 25 bp, Homo sapien
ccttcagccccttcgctcgcctcag

SEQ ID NO: 334934 - DNA, 25 bp, Homo sapien
ttcagcaccaccgtgactcccttca

SEQ ID NO: 334935 - DNA, 25 bp, Homo sapien
cccttcagccccttcgctcgcctca

SEQ ID NO: 334936 - DNA, 25 bp, Homo sapien
agcaccaccgtgactcccttcagcc

SEQ ID NO: 334937 - DNA, 25 bp, Homo sapien
acctttgaggcaggtacagagggaa

SEQ ID NO: 334938 - DNA, 25 bp, Homo sapien
aaacctttgaggcaggtacagaggg

SEQ ID NO: 334939 - DNA, 25 bp, Homo sapien
ttttgaaataggcttgctcatattt

SEQ ID NO: 334940 - DNA, 25 bp, Homo sapien
gctcatatttaattagcttgaattg

SEQ ID NO: 334941 - DNA, 25 bp, Homo sapien
gtgtgcatgttcgggcccacgctac

SEQ ID NO: 334942 - DNA, 25 bp, Homo sapien
gacacatcaaagtccagggccgagg

SEQ ID NO: 334943 - DNA, 25 bp, Homo sapien
ccagtagatgtggttgctggacaca

SEQ ID NO: 334944 - DNA, 25 bp, Homo sapien
tgatgtctgtccagtagatgtggtt

SEQ ID NO: 334945 - DNA, 25 bp, Homo sapien
gtggttgctggacacatcaaagtcc

SEQ ID NO: 334946 - DNA, 25 bp, Homo sapien
cttgacgccgagagcaggatggcca

SEQ ID NO: 334947 - DNA, 25 bp, Homo sapien
gccttgggcatgatgcaggtcttca

SEQ ID NO: 334948 - DNA, 25 bp, Homo sapien
ctggtgaagaccaagaaggccttgg

SEQ ID NO: 334949 - DNA, 25 bp, Homo sapien
gtggatggcggctctactggtgaag

SEQ ID NO: 334950 - DNA, 25 bp, Homo sapien
ctcgagggagatcctgtggatggcg

SEQ ID NO: 334951 - DNA, 25 bp, Homo sapien
cagccaaaccgggttgtgtggggcg

SEQ ID NO: 334952 - DNA, 25 bp, Homo sapien
ccattcctgtccgcatgagggttgg

SEQ ID NO: 334953 - DNA, 25 bp, Homo sapien
ccccattcctgtccgcatgagggtt

SEQ ID NO: 334954 - DNA, 25 bp, Homo sapien
cccattcctgtccgcatgagggttg

SEQ ID NO: 334955 - DNA, 25 bp, Homo sapien
tggaagtgaacacacaggctccgat

SEQ ID NO: 334956 - DNA, 25 bp, Homo sapien
ctggaagtgaacacacaggctccga

SEQ ID NO: 334957 - DNA, 25 bp, Homo sapien
tgggttgggctgtgattatcattcc

SEQ ID NO: 334958 - DNA, 25 bp, Homo sapien
cgacctcacggctgggttgggctgt

SEQ ID NO: 334959 - DNA, 25 bp, Homo sapien
gggttgggctgtgattatcattccc

SEQ ID NO: 334960 - DNA, 25 bp, Homo sapien
ctaggtagggttcgacctcacggct

SEQ ID NO: 334961 - DNA, 25 bp, Homo sapien
cacgtaccttttacctcaaagccag

SEQ ID NO: 334962 - DNA, 25 bp, Homo sapien
tcaaagccaggatgtgccaaaagct

SEQ ID NO: 334963 - DNA, 25 bp, Homo sapien
cacatgtcaaacagggacagtagct

SEQ ID NO: 334964 - DNA, 25 bp, Homo sapien
tgcaacgtgcacagctttattccag

SEQ ID NO: 334965 - DNA, 25 bp, Homo sapien
ctggcaatggcaaccaagttctccc

SEQ ID NO: 334966 - DNA, 25 bp, Homo sapien
cagggattcaacctgtgcgaactta

SEQ ID NO: 334967 - DNA, 25 bp, Homo sapien
tccaccttggagttaggagctattc

SEQ ID NO: 334968 - DNA, 25 bp, Homo sapien
tgcgaacttactccatccaccttgg

SEQ ID NO: 334969 - DNA, 25 bp, Homo sapien
cggccaagggtcagtatcagtaaca

SEQ ID NO: 334970 - DNA, 25 bp, Homo sapien
cactgcccctggcatgaatgagttt

SEQ ID NO: 334971 - DNA, 25 bp, Homo sapien
catcccctttatgaggaccacaggg

SEQ ID NO: 334972 - DNA, 25 bp, Homo sapien
tgacggaagcactcactgctcctgg

SEQ ID NO: 334973 - DNA, 25 bp, Homo sapien
taaagccagggacctaacatcacag

SEQ ID NO: 334974 - DNA, 25 bp, Homo sapien
tcatcagcaaagatttactgagtgc

SEQ ID NO: 334975 - DNA, 25 bp, Homo sapien
cagcaagcatcatgtcctctatcct

SEQ ID NO: 334976 - DNA, 25 bp, Homo sapien
aagcatcatgtcctctatcctctca

SEQ ID NO: 334977 - DNA, 25 bp, Homo sapien
gagtgcttctgacacacaggtgcag

SEQ ID NO: 334978 - DNA, 25 bp, Homo sapien
tcctcggggaacgttctgcggatcc

SEQ ID NO: 334979 - DNA, 25 bp, Homo sapien
cctcctcggggaacgttctgcggat

SEQ ID NO: 334980 - DNA, 25 bp, Homo sapien
tcggggaacgttctgcggatcctgg

SEQ ID NO: 334981 - DNA, 25 bp, Homo sapien
cctcggggaacgttctgcggatcct

SEQ ID NO: 334982 - DNA, 25 bp, Homo sapien
cccgcttgatgctgtggtgctgcca

SEQ ID NO: 334983 - DNA, 25 bp, Homo sapien
tcttcgtctcatcgacactgatcgc

SEQ ID NO: 334984 - DNA, 25 bp, Homo sapien
tcccccagcagggtgaacctgaaaa

SEQ ID NO: 334985 - DNA, 25 bp, Homo sapien
ttcaggagggtctgcctcttcgtct

SEQ ID NO: 334986 - DNA, 25 bp, Homo sapien
tgcctgtccaggttggcacgcttga

SEQ ID NO: 334987 - DNA, 25 bp, Homo sapien
gcctgtccaggttggcacgcttgat

SEQ ID NO: 334988 - DNA, 25 bp, Homo sapien
cctgtccaggttggcacgcttgatt

SEQ ID NO: 334989 - DNA, 25 bp, Homo sapien
catctgtctagtttctgtggcaccc

SEQ ID NO: 334990 - DNA, 25 bp, Homo sapien
gggtcagtaaatatcggcattggta

SEQ ID NO: 334991 - DNA, 25 bp, Homo sapien
catggctaaatgttggggtcagtaa

SEQ ID NO: 334992 - DNA, 25 bp, Homo sapien
ccccactgctaagagcaaggcccgt

SEQ ID NO: 334993 - DNA, 25 bp, Homo sapien
gtagatgctggtgtcagtaagtgct

SEQ ID NO: 334994 - DNA, 25 bp, Homo sapien
agcatgccagccacaagcccagtga

SEQ ID NO: 334995 - DNA, 25 bp, Homo sapien
tgtaggtaaatgtcggcgtcggtca

SEQ ID NO: 334996 - DNA, 25 bp, Homo sapien
tgttggtcaatgtcagtgtttgtaa

SEQ ID NO: 334997 - DNA, 25 bp, Homo sapien
catccgtccagtagacgtggccctc

SEQ ID NO: 334998 - DNA, 25 bp, Homo sapien
tgcaatggcacggggctcgtccatg

SEQ ID NO: 334999 - DNA, 25 bp, Homo sapien
ccgtccagtagacgtggccctccat

SEQ ID NO: 335000 - DNA, 25 bp, Homo sapien
catctcgggatgcagtgcaatggca

SEQ ID NO: 335001 - DNA, 25 bp, Homo sapien
gcatgctggatgtcgtccagctgca

SEQ ID NO: 335002 - DNA, 25 bp, Homo sapien
gcgatggcatgctggatgtcgtcca

SEQ ID NO: 335003 - DNA, 25 bp, Homo sapien
gatggcatgctggatgtcgtccagc

SEQ ID NO: 335004 - DNA, 25 bp, Homo sapien
gatggcgatggcatgctggatgtcg

SEQ ID NO: 335005 - DNA, 25 bp, Homo sapien
taccgggccagcagcaggacctcct

SEQ ID NO: 335006 - DNA, 25 bp, Homo sapien
ctaccgggccagcagcaggacctcc

SEQ ID NO: 335007 - DNA, 25 bp, Homo sapien
cgggccagcagcaggacctccttgg

SEQ ID NO: 335008 - DNA, 25 bp, Homo sapien
gccagcagcaggacctccttggctc

SEQ ID NO: 335009 - DNA, 25 bp, Homo sapien
gatttgccggacctcaagattcgca

SEQ ID NO: 335010 - DNA, 25 bp, Homo sapien
tggtttctaaacagggtcccacaga

SEQ ID NO: 335011 - DNA, 25 bp, Homo sapien
taatgttaggtgacacgcacccagc

SEQ ID NO: 335012 - DNA, 25 bp, Homo sapien
gatgctcccgggtcactgagatgaa

SEQ ID NO: 335013 - DNA, 25 bp, Homo sapien
acggccggcacaagagaggctcgac

SEQ ID NO: 335014 - DNA, 25 bp, Homo sapien
gcgtacggccggcacaagagaggct

SEQ ID NO: 335015 - DNA, 25 bp, Homo sapien
tggcctgacagcgtacggccggcac

SEQ ID NO: 335016 - DNA, 25 bp, Homo sapien
cagcgtggcctgacagcgtacggcc

SEQ ID NO: 335017 - DNA, 25 bp, Homo sapien
gggatcagctgtggacggggtcctg

SEQ ID NO: 335018 - DNA, 25 bp, Homo sapien
ggcccagggatcagctgtggacggg

SEQ ID NO: 335019 - DNA, 25 bp, Homo sapien
agggcccagggatcagctgtggacg

SEQ ID NO: 335020 - DNA, 25 bp, Homo sapien
gggtcctgctgctcaggcccagcag

SEQ ID NO: 335021 - DNA, 25 bp, Homo sapien
gacacggatccttctgaggctgctg

SEQ ID NO: 335022 - DNA, 25 bp, Homo sapien
aggatcccggcgtccagcatttcaa

SEQ ID NO: 335023 - DNA, 25 bp, Homo sapien
ggtttcaaggatgcacagagccaag

SEQ ID NO: 335024 - DNA, 25 bp, Homo sapien
tgcctggctacaatggaaatctctg

SEQ ID NO: 335025 - DNA, 25 bp, Homo sapien
atgcagccttcacccgagtgtcagt

SEQ ID NO: 335026 - DNA, 25 bp, Homo sapien
gactctctctgaaggcgccagggga

SEQ ID NO: 335027 - DNA, 25 bp, Homo sapien
taacatcagaaatgtaccccgccgc

SEQ ID NO: 335028 - DNA, 25 bp, Homo sapien
gcaacccagaagtcaaatgtcaaga

SEQ ID NO: 335029 - DNA, 25 bp, Homo sapien
ccgggacctcagagtcgtgctgtca

SEQ ID NO: 335030 - DNA, 25 bp, Homo sapien
acatccggctggtgaggtgccctgc

SEQ ID NO: 335031 - DNA, 25 bp, Homo sapien
actgcccaacgtgacacctcggaag

SEQ ID NO: 335032 - DNA, 25 bp, Homo sapien
caggagatccgcgtgtgaccccagg

SEQ ID NO: 335033 - DNA, 25 bp, Homo sapien
gagttcctcatggacaaagccattt

SEQ ID NO: 335034 - DNA, 25 bp, Homo sapien
tatggaaagatcttctagaaccacc

SEQ ID NO: 335035 - DNA, 25 bp, Homo sapien
tctccctctggattaagaaatatgg

SEQ ID NO: 335036 - DNA, 25 bp, Homo sapien
gtttggatactaacgccccaggctg

SEQ ID NO: 335037 - DNA, 25 bp, Homo sapien
aggtggccacacctgagtacaggag

SEQ ID NO: 335038 - DNA, 25 bp, Homo sapien
gccacacctgagtacaggagtctcc

SEQ ID NO: 335039 - DNA, 25 bp, Homo sapien
cgtaccagatccaggtctgtcctga

SEQ ID NO: 335040 - DNA, 25 bp, Homo sapien
tgctgtgtcccgtaccagatccagg

SEQ ID NO: 335041 - DNA, 25 bp, Homo sapien
gtccagctccggcactgagttcagc

SEQ ID NO: 335042 - DNA, 25 bp, Homo sapien
ggccaagctgtctgttttaaaccca

SEQ ID NO: 335043 - DNA, 25 bp, Homo sapien
cactgctgaacgcagggtccagctc

SEQ ID NO: 335044 - DNA, 25 bp, Homo sapien
ggactttgaccgacacactgctgaa

SEQ ID NO: 335045 - DNA, 25 bp, Homo sapien
ctgccgttgtcctgcagctgcacac

SEQ ID NO: 335046 - DNA, 25 bp, Homo sapien
cctgccgttgtcctgcagctgcaca

SEQ ID NO: 335047 - DNA, 25 bp, Homo sapien
ttgtcctcctcacagcgagtgtgga

SEQ ID NO: 335048 - DNA, 25 bp, Homo sapien
cattgtcctcctcacagcgagtgtg

SEQ ID NO: 335049 - DNA, 25 bp, Homo sapien
attgtcctcctcacagcgagtgtgg

SEQ ID NO: 335050 - DNA, 25 bp, Homo sapien
caagatctcgttcctcttccccgca

SEQ ID NO: 335051 - DNA, 25 bp, Homo sapien
agtagagggcgctcaagatctcgtt

SEQ ID NO: 335052 - DNA, 25 bp, Homo sapien
tggatatccatgctgagtagagggc

SEQ ID NO: 335053 - DNA, 25 bp, Homo sapien
agcacgtcagccagtccatccagtg

SEQ ID NO: 335054 - DNA, 25 bp, Homo sapien
cacggtggatgaagccgagcttagt

SEQ ID NO: 335055 - DNA, 25 bp, Homo sapien
tcttctgggtgctgtcgtccatccc

SEQ ID NO: 335056 - DNA, 25 bp, Homo sapien
acctgctcgatccagggcgtctcac

SEQ ID NO: 335057 - DNA, 25 bp, Homo sapien
cgagcttagtgtcagcccagtagag

SEQ ID NO: 335058 - DNA, 25 bp, Homo sapien
ccaatgcaaactggaacctgccctt

SEQ ID NO: 335059 - DNA, 25 bp, Homo sapien
aatgcaaactggaacctgcccttgg

SEQ ID NO: 335060 - DNA, 25 bp, Homo sapien
agctcaggctcccaatgcaaactgg

SEQ ID NO: 335061 - DNA, 25 bp, Homo sapien
ggctcccaatgcaaactggaacctg

SEQ ID NO: 335062 - DNA, 25 bp, Homo sapien
gaaacaagcctgttactgacattct

SEQ ID NO: 335063 - DNA, 25 bp, Homo sapien
caagcctgttactgacattcttatt

SEQ ID NO: 335064 - DNA, 25 bp, Homo sapien
aaacaagcctgttactgacattctt

SEQ ID NO: 335065 - DNA, 25 bp, Homo sapien
aacaagcctgttactgacattctta

SEQ ID NO: 335066 - DNA, 25 bp, Homo sapien
ctcctgccttgccaagcccccggaa

SEQ ID NO: 335067 - DNA, 25 bp, Homo sapien
tcctgccttgccaagcccccggaag

SEQ ID NO: 335068 - DNA, 25 bp, Homo sapien
cctcctgccttgccaagcccccgga

SEQ ID NO: 335069 - DNA, 25 bp, Homo sapien
aaggccacacggcaaactcaaggat

SEQ ID NO: 335070 - DNA, 25 bp, Homo sapien
tgcaaggccacacggcaaactcaag

SEQ ID NO: 335071 - DNA, 25 bp, Homo sapien
ccacacggcaaactcaaggatccag

SEQ ID NO: 335072 - DNA, 25 bp, Homo sapien
agggacagaggtacagactgcagtg

SEQ ID NO: 335073 - DNA, 25 bp, Homo sapien
ctgcacaacactgggcaaagtccac

SEQ ID NO: 335074 - DNA, 25 bp, Homo sapien
cctgcacaacactgggcaaagtcca

SEQ ID NO: 335075 - DNA, 25 bp, Homo sapien
caacactgggcaaagtccacgttct

SEQ ID NO: 335076 - DNA, 25 bp, Homo sapien
cacaacactgggcaaagtccacgtt

SEQ ID NO: 335077 - DNA, 25 bp, Homo sapien
gtgtcccgccctgggctacagtcca

SEQ ID NO: 335078 - DNA, 25 bp, Homo sapien
cctcggtcagggagctccaggggtt

SEQ ID NO: 335079 - DNA, 25 bp, Homo sapien
gggctacagtccaccctgatgcagg

SEQ ID NO: 335080 - DNA, 25 bp, Homo sapien
tgacgggtgtggtggtgtcccgccc

SEQ ID NO: 335081 - DNA, 25 bp, Homo sapien
ggatcctggaggagatctctcatca

SEQ ID NO: 335082 - DNA, 25 bp, Homo sapien
caagtcagtcatgcccaacccaggg

SEQ ID NO: 335083 - DNA, 25 bp, Homo sapien
gaggagatctctcatcacactccaa

SEQ ID NO: 335084 - DNA, 25 bp, Homo sapien
tcatcacactccaagtcagtcatgc

SEQ ID NO: 335085 - DNA, 25 bp, Homo sapien
ccggtgcggaacaggtggaatccca

SEQ ID NO: 335086 - DNA, 25 bp, Homo sapien
tactgggtccaagaagggccttcga

SEQ ID NO: 335087 - DNA, 25 bp, Homo sapien
agtggcaccccccggtgcggaacag

SEQ ID NO: 335088 - DNA, 25 bp, Homo sapien
cagcgagcacggctggacgatgagc

SEQ ID NO: 335089 - DNA, 25 bp, Homo sapien
cctgtggacatagttctcactgtcc

SEQ ID NO: 335090 - DNA, 25 bp, Homo sapien
aagcctcccctgtggacatagttct

SEQ ID NO: 335091 - DNA, 25 bp, Homo sapien
cccctgtggacatagttctcactgt

SEQ ID NO: 335092 - DNA, 25 bp, Homo sapien
gcctcccctgtggacatagttctca

SEQ ID NO: 335093 - DNA, 25 bp, Homo sapien
tgctccacagggacaggcaacgccg

SEQ ID NO: 335094 - DNA, 25 bp, Homo sapien
ctgctccacagggacaggcaacgcc

SEQ ID NO: 335095 - DNA, 25 bp, Homo sapien
catagccagacaggcgttctacaac

SEQ ID NO: 335096 - DNA, 25 bp, Homo sapien
ccagacaggcgttctacaacctggg

SEQ ID NO: 335097 - DNA, 25 bp, Homo sapien
tagccagacaggcgttctacaacct

SEQ ID NO: 335098 - DNA, 25 bp, Homo sapien
gccagacaggcgttctacaacctgg

SEQ ID NO: 335099 - DNA, 25 bp, Homo sapien
tgtcttgctccaaaactacctcgta

SEQ ID NO: 335100 - DNA, 25 bp, Homo sapien
gatccaggctccttttgggaaccaa

SEQ ID NO: 335101 - DNA, 25 bp, Homo sapien
tacctcgtacagtgaggacattaag

SEQ ID NO: 335102 - DNA, 25 bp, Homo sapien
gaagcaagccccagaacatgtcttg

SEQ ID NO: 335103 - DNA, 25 bp, Homo sapien
ccccaactcgcttccaaggcggcgg

SEQ ID NO: 335104 - DNA, 25 bp, Homo sapien
tggcgcccgtgcacttggtcgcggg

SEQ ID NO: 335105 - DNA, 25 bp, Homo sapien
aactcgcccccaactcgcttccaag

SEQ ID NO: 335106 - DNA, 25 bp, Homo sapien
caactcgcttccaaggcggcggtgg

SEQ ID NO: 335107 - DNA, 25 bp, Homo sapien
gccgggcagccgcacagcgccagca

SEQ ID NO: 335108 - DNA, 25 bp, Homo sapien
gcggcccgggcagtgcagcctccat

SEQ ID NO: 335109 - DNA, 25 bp, Homo sapien
ccacggcggcccgggcagtgcagcc

SEQ ID NO: 335110 - DNA, 25 bp, Homo sapien
cggcggcccgggcagtgcagcctcc

SEQ ID NO: 335111 - DNA, 25 bp, Homo sapien
ctcctcgcgcgtgtccctgcatctt

SEQ ID NO: 335112 - DNA, 25 bp, Homo sapien
gttgtccagcggccggacgggctgg

SEQ ID NO: 335113 - DNA, 25 bp, Homo sapien
gcggctcctcgcgcgtgtccctgca

SEQ ID NO: 335114 - DNA, 25 bp, Homo sapien
tcactcgggctccacagcgcggcgg

SEQ ID NO: 335115 - DNA, 25 bp, Homo sapien
tatgcctattgtgccttggatcttg

SEQ ID NO: 335116 - DNA, 25 bp, Homo sapien
tttatgcctattgtgccttggatct

SEQ ID NO: 335117 - DNA, 25 bp, Homo sapien
actttatgcctattgtgccttggat

SEQ ID NO: 335118 - DNA, 25 bp, Homo sapien
ggcaggcatagcagggaatcagatt

SEQ ID NO: 335119 - DNA, 25 bp, Homo sapien
ggttggggggatgttcaggctcagg

SEQ ID NO: 335120 - DNA, 25 bp, Homo sapien
ctgttcaccggtagcccggaccaga

SEQ ID NO: 335121 - DNA, 25 bp, Homo sapien
tgttcaccggtagcccggaccagag

SEQ ID NO: 335122 - DNA, 25 bp, Homo sapien
cgctgttcaccggtagcccggacca

SEQ ID NO: 335123 - DNA, 25 bp, Homo sapien
cttgttgcttactgtccgaggtagt

SEQ ID NO: 335124 - DNA, 25 bp, Homo sapien
tcttcttgaagtccctaagtctagt

SEQ ID NO: 335125 - DNA, 25 bp, Homo sapien
tactgtccgaggtagttaaactgct

SEQ ID NO: 335126 - DNA, 25 bp, Homo sapien
tgaagtccctaagtctagtcacctt

SEQ ID NO: 335127 - DNA, 25 bp, Homo sapien
ggcaaggagtggctttcagccttcc

SEQ ID NO: 335128 - DNA, 25 bp, Homo sapien
gaatcctactaagtgagagcctccc

SEQ ID NO: 335129 - DNA, 25 bp, Homo sapien
ctatgtgtaagaaacggtagtgttc

SEQ ID NO: 335130 - DNA, 25 bp, Homo sapien
catagcccaattttgaactgaaaag

SEQ ID NO: 335131 - DNA, 25 bp, Homo sapien
tattgggagtctgattccggcctct

SEQ ID NO: 335132 - DNA, 25 bp, Homo sapien
catctactcataggaggaggtccag

SEQ ID NO: 335133 - DNA, 25 bp, Homo sapien
gaaacagtaccctgagtgcttagag

SEQ ID NO: 335134 - DNA, 25 bp, Homo sapien
gaactttcaccacagcgaccaagag

SEQ ID NO: 335135 - DNA, 25 bp, Homo sapien
ttatttgaatgccagtggtagctca

SEQ ID NO: 335136 - DNA, 25 bp, Homo sapien
ggagccctggtgcttatttgaatgc

SEQ ID NO: 335137 - DNA, 25 bp, Homo sapien
tctgccatctccagtgtatcccata

SEQ ID NO: 335138 - DNA, 25 bp, Homo sapien
ccagtgtatcccatagtcaccaaca

SEQ ID NO: 335139 - DNA, 25 bp, Homo sapien
ctaccggggttgcagagagggaggg

SEQ ID NO: 335140 - DNA, 25 bp, Homo sapien
tgcagacacagacagtcactggtgc

SEQ ID NO: 335141 - DNA, 25 bp, Homo sapien
ccagggtaaagattttcagggccag

SEQ ID NO: 335142 - DNA, 25 bp, Homo sapien
tggtgctgcgtcaaggaccagggta

SEQ ID NO: 335143 - DNA, 25 bp, Homo sapien
ctgggtctctgaggcctgtccctac

SEQ ID NO: 335144 - DNA, 25 bp, Homo sapien
gagaggaatccaggccgtggtggag

SEQ ID NO: 335145 - DNA, 25 bp, Homo sapien
ctgtgcagtgagagagggacatgag

SEQ ID NO: 335146 - DNA, 25 bp, Homo sapien
aatccaggccgtggtggagacagcc

SEQ ID NO: 335147 - DNA, 25 bp, Homo sapien
gggacatgaggaggagaggaatcca

SEQ ID NO: 335148 - DNA, 25 bp, Homo sapien
cctcagggtccaggtacttaatgcc

SEQ ID NO: 335149 - DNA, 25 bp, Homo sapien
agggtccaggtacttaatgccccag

SEQ ID NO: 335150 - DNA, 25 bp, Homo sapien
caggtacttaatgccccaggacgtc

SEQ ID NO: 335151 - DNA, 25 bp, Homo sapien
ccaggtacttaatgccccaggacgt

SEQ ID NO: 335152 - DNA, 25 bp, Homo sapien
gctgaccatgaggtgaatcatcctg

SEQ ID NO: 335153 - DNA, 25 bp, Homo sapien
ctgggcttatgctgaccatgaggtg

SEQ ID NO: 335154 - DNA, 25 bp, Homo sapien
catgaggtgaatcatcctgcactgt

SEQ ID NO: 335155 - DNA, 25 bp, Homo sapien
gcttatgctgaccatgaggtgaatc

SEQ ID NO: 335156 - DNA, 25 bp, Homo sapien
tgccttccacccctccaactagtgc

SEQ ID NO: 335157 - DNA, 25 bp, Homo sapien
tccaactagtgcccaccccaccatg

SEQ ID NO: 335158 - DNA, 25 bp, Homo sapien
ttccacccctccaactagtgcccac

SEQ ID NO: 335159 - DNA, 25 bp, Homo sapien
tggtgccttccacccctccaactag

SEQ ID NO: 335160 - DNA, 25 bp, Homo sapien
cgtagaagcagcagtaggtaaatga

SEQ ID NO: 335161 - DNA, 25 bp, Homo sapien
tctcatcgcagattggtaacaaaca

SEQ ID NO: 335162 - DNA, 25 bp, Homo sapien
caattaccaccgaccagactttgag

SEQ ID NO: 335163 - DNA, 25 bp, Homo sapien
caaccctgctggcatcacgtagaag

SEQ ID NO: 335164 - DNA, 25 bp, Homo sapien
taacgtatggttatcaaaatcagag

SEQ ID NO: 335165 - DNA, 25 bp, Homo sapien
aatgttgctccgtcccttgttcctg

SEQ ID NO: 335166 - DNA, 25 bp, Homo sapien
gggatgaagaatgttgctccgtccc

SEQ ID NO: 335167 - DNA, 25 bp, Homo sapien
caagcaaaaataacgtatggttatc

SEQ ID NO: 335168 - DNA, 25 bp, Homo sapien
taaggtgattgggaagcagtcagac

SEQ ID NO: 335169 - DNA, 25 bp, Homo sapien
ccagcagctcagtctacgttctaat

SEQ ID NO: 335170 - DNA, 25 bp, Homo sapien
gaatgccaggcaatactacacaatg

SEQ ID NO: 335171 - DNA, 25 bp, Homo sapien
ccccagccggcattgagtttgatga

SEQ ID NO: 335172 - DNA, 25 bp, Homo sapien
ttaaaaggcgtaactcatacacagt

SEQ ID NO: 335173 - DNA, 25 bp, Homo sapien
ggacatagcctgtctgtcagcctaa

SEQ ID NO: 335174 - DNA, 25 bp, Homo sapien
ggatgtgggcatctcctgtttactg

SEQ ID NO: 335175 - DNA, 25 bp, Homo sapien
gcctaaattggagctgacatattcg

SEQ ID NO: 335176 - DNA, 25 bp, Homo sapien
ggagcattcactatttaccgggcac

SEQ ID NO: 335177 - DNA, 25 bp, Homo sapien
gaaatcaggcagtccaattccagag

SEQ ID NO: 335178 - DNA, 25 bp, Homo sapien
tcaaaggcatgttcaacaccagggt

SEQ ID NO: 335179 - DNA, 25 bp, Homo sapien
taccgggcactgagccaacattgta

SEQ ID NO: 335180 - DNA, 25 bp, Homo sapien
tcaaaaatcttctaactggagtctt

SEQ ID NO: 335181 - DNA, 25 bp, Homo sapien
cccagcgtttatagtccagagattc

SEQ ID NO: 335182 - DNA, 25 bp, Homo sapien
cagcgtttatagtccagagattctg

SEQ ID NO: 335183 - DNA, 25 bp, Homo sapien
aaaaatcttctaactggagtcttag

SEQ ID NO: 335184 - DNA, 25 bp, Homo sapien
cttgtgggaacgctggagttttgtc

SEQ ID NO: 335185 - DNA, 25 bp, Homo sapien
gcgtgagccccaagtcatttaaatc

SEQ ID NO: 335186 - DNA, 25 bp, Homo sapien
agggaacattattaatcttgtggga

SEQ ID NO: 335187 - DNA, 25 bp, Homo sapien
gtgagccccaagtcatttaaatcct

SEQ ID NO: 335188 - DNA, 25 bp, Homo sapien
tattgtgccttgggtcttgagaagc

SEQ ID NO: 335189 - DNA, 25 bp, Homo sapien
ttgtgccttgggtcttgagaagcat

SEQ ID NO: 335190 - DNA, 25 bp, Homo sapien
attgtgccttgggtcttgagaagca

SEQ ID NO: 335191 - DNA, 25 bp, Homo sapien
taagacacgcaactttttccagctt

SEQ ID NO: 335192 - DNA, 25 bp, Homo sapien
ggagccgtcaccccactttgttctg

SEQ ID NO: 335193 - DNA, 25 bp, Homo sapien
aagggagtggtgaccttcttaagcg

SEQ ID NO: 335194 - DNA, 25 bp, Homo sapien
ctaagacacgcaactttttccagct

SEQ ID NO: 335195 - DNA, 25 bp, Homo sapien
ggataggtgggacacatgtatttcc

SEQ ID NO: 335196 - DNA, 25 bp, Homo sapien
gaggatgctgattgacactgtccag

SEQ ID NO: 335197 - DNA, 25 bp, Homo sapien
gatgctgattgacactgtccagttt

SEQ ID NO: 335198 - DNA, 25 bp, Homo sapien
taggtgggacacatgtatttccggg

SEQ ID NO: 335199 - DNA, 25 bp, Homo sapien
catggatttaagtagcagtaggcca

SEQ ID NO: 335200 - DNA, 25 bp, Homo sapien
atggatttaagtagcagtaggccat

SEQ ID NO: 335201 - DNA, 25 bp, Homo sapien
gccttcccagttcaatcacatctcc

SEQ ID NO: 335202 - DNA, 25 bp, Homo sapien
ccttcccagttcaatcacatctcct

SEQ ID NO: 335203 - DNA, 25 bp, Homo sapien
cagcgtctgagggtatcagccagat

SEQ ID NO: 335204 - DNA, 25 bp, Homo sapien
agccagatcatagcgtttgctgtgc

SEQ ID NO: 335205 - DNA, 25 bp, Homo sapien
ctgtgcagtgggatcgtgaagagcc

SEQ ID NO: 335206 - DNA, 25 bp, Homo sapien
gagggtatcagccagatcatagcgt

SEQ ID NO: 335207 - DNA, 25 bp, Homo sapien
agtcgtcttgccgtaggacttgcag

SEQ ID NO: 335208 - DNA, 25 bp, Homo sapien
gtcttgccgtaggacttgcagatgt

SEQ ID NO: 335209 - DNA, 25 bp, Homo sapien
tccaagtcgtcttgccgtaggactt

SEQ ID NO: 335210 - DNA, 25 bp, Homo sapien
tgtctccaagtcgtcttgccgtagg

SEQ ID NO: 335211 - DNA, 25 bp, Homo sapien
tagagggatcctttgggcagctgtt

SEQ ID NO: 335212 - DNA, 25 bp, Homo sapien
ctgtggaaatagagggatcctttgg

SEQ ID NO: 335213 - DNA, 25 bp, Homo sapien
atcagggaatagcagctgtgtccac

SEQ ID NO: 335214 - DNA, 25 bp, Homo sapien
gggcagctgttttgagtagggatca

SEQ ID NO: 335215 - DNA, 25 bp, Homo sapien
cacaagctggtcggggcggcatagc

SEQ ID NO: 335216 - DNA, 25 bp, Homo sapien
caagctggtcggggcggcatagcac

SEQ ID NO: 335217 - DNA, 25 bp, Homo sapien
acaagctggtcggggcggcatagca

SEQ ID NO: 335218 - DNA, 25 bp, Homo sapien
ggtgcacagtcagggctatcgtctg

SEQ ID NO: 335219 - DNA, 25 bp, Homo sapien
gtgttccactgttatgggtttagtc

SEQ ID NO: 335220 - DNA, 25 bp, Homo sapien
gtttgaagatcggtgcacagtcagg

SEQ ID NO: 335221 - DNA, 25 bp, Homo sapien
agtggcacccataccacctggtgtt

SEQ ID NO: 335222 - DNA, 25 bp, Homo sapien
tgattttgaaaagcacagggactcc

SEQ ID NO: 335223 - DNA, 25 bp, Homo sapien
ggactgggcacacgaagggccccat

SEQ ID NO: 335224 - DNA, 25 bp, Homo sapien
ctttgacctcatagggactgggcac

SEQ ID NO: 335225 - DNA, 25 bp, Homo sapien
actgggcacacgaagggccccatgg

SEQ ID NO: 335226 - DNA, 25 bp, Homo sapien
gggactgggcacacgaagggcccca

SEQ ID NO: 335227 - DNA, 25 bp, Homo sapien
acatgtgcgatgtcttcccaccttc

SEQ ID NO: 335228 - DNA, 25 bp, Homo sapien
ccatcagcaatgcagggacatgtgc

SEQ ID NO: 335229 - DNA, 25 bp, Homo sapien
tgcagggacatgtgcgatgtcttcc

SEQ ID NO: 335230 - DNA, 25 bp, Homo sapien
caatgcagggacatgtgcgatgtct

SEQ ID NO: 335231 - DNA, 25 bp, Homo sapien
ctggttcgctagatcagtagctggg

SEQ ID NO: 335232 - DNA, 25 bp, Homo sapien
aagtgaagcataagccgttgtggca

SEQ ID NO: 335233 - DNA, 25 bp, Homo sapien
ttcagatgctggttcgctagatcag

SEQ ID NO: 335234 - DNA, 25 bp, Homo sapien
gaagtgaagcataagccgttgtggc

SEQ ID NO: 335235 - DNA, 25 bp, Homo sapien
ctgtggacaatgatcaccgatcatg

SEQ ID NO: 335236 - DNA, 25 bp, Homo sapien
ggacaatgatcaccgatcatgggct

SEQ ID NO: 335237 - DNA, 25 bp, Homo sapien
tgtggacaatgatcaccgatcatgg

SEQ ID NO: 335238 - DNA, 25 bp, Homo sapien
aatgatcaccgatcatgggctccat

SEQ ID NO: 335239 - DNA, 25 bp, Homo sapien
gatcagatgacatcgggtgtgttaa

SEQ ID NO: 335240 - DNA, 25 bp, Homo sapien
gatgacatcgggtgtgttaagggtt

SEQ ID NO: 335241 - DNA, 25 bp, Homo sapien
atcagatgacatcgggtgtgttaag

SEQ ID NO: 335242 - DNA, 25 bp, Homo sapien
acatcgggtgtgttaagggttgtat

SEQ ID NO: 335243 - DNA, 25 bp, Homo sapien
gatactttgcactgggctgtacgac

SEQ ID NO: 335244 - DNA, 25 bp, Homo sapien
ggttatgagaaccagcgaaatcccc

SEQ ID NO: 335245 - DNA, 25 bp, Homo sapien
gagtcgacaagcagtacctggcatg

SEQ ID NO: 335246 - DNA, 25 bp, Homo sapien
gagtccagtgtgcacgagtcgacaa

SEQ ID NO: 335247 - DNA, 25 bp, Homo sapien
cactgattgagaaacgcaggctccc

SEQ ID NO: 335248 - DNA, 25 bp, Homo sapien
gaagtcctggtaaaactgtcaagag

SEQ ID NO: 335249 - DNA, 25 bp, Homo sapien
tgaactctaaaatggtactccttgg

SEQ ID NO: 335250 - DNA, 25 bp, Homo sapien
ggtttataagctcaacactggccat

SEQ ID NO: 335251 - DNA, 25 bp, Homo sapien
tcatcatctcacggccctggcactg

SEQ ID NO: 335252 - DNA, 25 bp, Homo sapien
catggccatctcatcacgcctcgcc

SEQ ID NO: 335253 - DNA, 25 bp, Homo sapien
gcatggccatctcatcacgcctcgc

SEQ ID NO: 335254 - DNA, 25 bp, Homo sapien
tctcatcatctcacggccctggcac

SEQ ID NO: 335255 - DNA, 25 bp, Homo sapien
tgctggttgactcactgagctctct

SEQ ID NO: 335256 - DNA, 25 bp, Homo sapien
ggcttctcatacatgggcttggtca

SEQ ID NO: 335257 - DNA, 25 bp, Homo sapien
tctgcaaaacagattcgggaagagg

SEQ ID NO: 335258 - DNA, 25 bp, Homo sapien
ttggtcatgtatgtctcctccgccc

SEQ ID NO: 335259 - DNA, 25 bp, Homo sapien
gctactctccgctgcctgggtttga

SEQ ID NO: 335260 - DNA, 25 bp, Homo sapien
taggcccatgagtgtctataacacg

SEQ ID NO: 335261 - DNA, 25 bp, Homo sapien
taactaggtgaattcatctctctgg

SEQ ID NO: 335262 - DNA, 25 bp, Homo sapien
gaagttgttaccctagtgatttgca

SEQ ID NO: 335263 - DNA, 25 bp, Homo sapien
cctggagacctcgtgattggatggc

SEQ ID NO: 335264 - DNA, 25 bp, Homo sapien
tttgttcagtagtgccaggagtttc

SEQ ID NO: 335265 - DNA, 25 bp, Homo sapien
gaatttgtgcccttgagatgtccag

SEQ ID NO: 335266 - DNA, 25 bp, Homo sapien
tgtcagcattattccctccgtgtgt

SEQ ID NO: 335267 - DNA, 25 bp, Homo sapien
aaatggcttggctccatcttggcca

SEQ ID NO: 335268 - DNA, 25 bp, Homo sapien
gaaaatggcttggctccatcttggc

SEQ ID NO: 335269 - DNA, 25 bp, Homo sapien
ccttggcaaataacaccacctctct

SEQ ID NO: 335270 - DNA, 25 bp, Homo sapien
gtgtgtccttggcaaataacaccac

SEQ ID NO: 335271 - DNA, 25 bp, Homo sapien
tgagggccgcctgtatattaatccc

SEQ ID NO: 335272 - DNA, 25 bp, Homo sapien
tgaagacatgagggccgcctgtata

SEQ ID NO: 335273 - DNA, 25 bp, Homo sapien
tgtgagttgatgaatagttgtgaag

SEQ ID NO: 335274 - DNA, 25 bp, Homo sapien
gacatgagggccgcctgtatattaa

SEQ ID NO: 335275 - DNA, 25 bp, Homo sapien
gagtacctggaacagtccaccgtgg

SEQ ID NO: 335276 - DNA, 25 bp, Homo sapien
tggatcgagccatcgtcagcaggca

SEQ ID NO: 335277 - DNA, 25 bp, Homo sapien
tctgtcctggtatcagggacaacag

SEQ ID NO: 335278 - DNA, 25 bp, Homo sapien
gacaacagatgtccaatagacttct

SEQ ID NO: 335279 - DNA, 25 bp, Homo sapien
gagacagtcatcctcttgaagcatg

SEQ ID NO: 335280 - DNA, 25 bp, Homo sapien
agacagtcatcctcttgaagcatgc

SEQ ID NO: 335281 - DNA, 25 bp, Homo sapien
agagacagtcatcctcttgaagcat

SEQ ID NO: 335282 - DNA, 25 bp, Homo sapien
tcattggaattctgccttctccagc

SEQ ID NO: 335283 - DNA, 25 bp, Homo sapien
gcctccttctttgtgctcagtgtcc

SEQ ID NO: 335284 - DNA, 25 bp, Homo sapien
taaatgactcggagcccatcttgct

SEQ ID NO: 335285 - DNA, 25 bp, Homo sapien
gacctgtgagttcatagatgcctcc

SEQ ID NO: 335286 - DNA, 25 bp, Homo sapien
cagggtctggcatgcttacgtcagt

SEQ ID NO: 335287 - DNA, 25 bp, Homo sapien
aacatctggccgcaagtggtgcctg

SEQ ID NO: 335288 - DNA, 25 bp, Homo sapien
tcacactttgttcaggagtttctct

SEQ ID NO: 335289 - DNA, 25 bp, Homo sapien
gctggatggtggcagtcacactttg

SEQ ID NO: 335290 - DNA, 25 bp, Homo sapien
tagatatgcccctttttgaactgtg

SEQ ID NO: 335291 - DNA, 25 bp, Homo sapien
gatacatcgttgatggttcagaaca

SEQ ID NO: 335292 - DNA, 25 bp, Homo sapien
tgtggttctctgattaagctaaggt

SEQ ID NO: 335293 - DNA, 25 bp, Homo sapien
tggaccattacagtgcccctacaac

SEQ ID NO: 335294 - DNA, 25 bp, Homo sapien
tcaaccttctggaggggaactgatc

SEQ ID NO: 335295 - DNA, 25 bp, Homo sapien
ccccaagaagcgtgttttacattca

SEQ ID NO: 335296 - DNA, 25 bp, Homo sapien
ctgcaggcctttggatgatgtattt

SEQ ID NO: 335297 - DNA, 25 bp, Homo sapien
gaactgatctgttcagcaggctccc

SEQ ID NO: 335298 - DNA, 25 bp, Homo sapien
cagctggttccaacttagttatttc

SEQ ID NO: 335299 - DNA, 25 bp, Homo sapien
tctggatcccagctggttccaactt

SEQ ID NO: 335300 - DNA, 25 bp, Homo sapien
acttagttatttcatctagaaggtt

SEQ ID NO: 335301 - DNA, 25 bp, Homo sapien
gatcccagctggttccaacttagtt

SEQ ID NO: 335302 - DNA, 25 bp, Homo sapien
ccagttggtaaattccctgggcttg

SEQ ID NO: 335303 - DNA, 25 bp, Homo sapien
gcctggctctagactggaattattg

SEQ ID NO: 335304 - DNA, 25 bp, Homo sapien
actggaattattgtcggtgttgttg

SEQ ID NO: 335305 - DNA, 25 bp, Homo sapien
cagttggtaaattccctgggcttgt

SEQ ID NO: 335306 - DNA, 25 bp, Homo sapien
aggacctggatggacaggaacagag

SEQ ID NO: 335307 - DNA, 25 bp, Homo sapien
ggacctggatggacaggaacagagg

SEQ ID NO: 335308 - DNA, 25 bp, Homo sapien
gacctggatggacaggaacagaggg

SEQ ID NO: 335309 - DNA, 25 bp, Homo sapien
ggtgtggccttagaattaaggatgc

SEQ ID NO: 335310 - DNA, 25 bp, Homo sapien
tgtggccttagaattaaggatgctg

SEQ ID NO: 335311 - DNA, 25 bp, Homo sapien
ccaggtgtggccttagaattaagga

SEQ ID NO: 335312 - DNA, 25 bp, Homo sapien
caggtgtggccttagaattaaggat

SEQ ID NO: 335313 - DNA, 25 bp, Homo sapien
cttcctcgttacaactcttgcccat

SEQ ID NO: 335314 - DNA, 25 bp, Homo sapien
tcccttcctcgttacaactcttgcc

SEQ ID NO: 335315 - DNA, 25 bp, Homo sapien
ttcccttcctcgttacaactcttgc

SEQ ID NO: 335316 - DNA, 25 bp, Homo sapien
ccttcctcgttacaactcttgccca

SEQ ID NO: 335317 - DNA, 25 bp, Homo sapien
catcataagcctgcaatggctgctg

SEQ ID NO: 335318 - DNA, 25 bp, Homo sapien
cctgtttgactaagcctttaagctg

SEQ ID NO: 335319 - DNA, 25 bp, Homo sapien
ggtggagagtctaagctgcagctaa

SEQ ID NO: 335320 - DNA, 25 bp, Homo sapien
aaagtctcgctggaaggaaattgtc

SEQ ID NO: 335321 - DNA, 25 bp, Homo sapien
ttcaaacaagcagtatcgaaagggt

SEQ ID NO: 335322 - DNA, 25 bp, Homo sapien
tgaatctctcccctgtaccatcctt

SEQ ID NO: 335323 - DNA, 25 bp, Homo sapien
acaatcacctccacctcagaaaagt

SEQ ID NO: 335324 - DNA, 25 bp, Homo sapien
tccttctcatgctcatgtcatggtc

SEQ ID NO: 335325 - DNA, 25 bp, Homo sapien
tcacctccacctcagaaaagttgat

SEQ ID NO: 335326 - DNA, 25 bp, Homo sapien
ttgccaataacactctggcctggca

SEQ ID NO: 335327 - DNA, 25 bp, Homo sapien
tttgccaataacactctggcctggc

SEQ ID NO: 335328 - DNA, 25 bp, Homo sapien
tcttcatactgattgagggattcag

SEQ ID NO: 335329 - DNA, 25 bp, Homo sapien
cagagtccatatcttcatactgatt

SEQ ID NO: 335330 - DNA, 25 bp, Homo sapien
cacagatttgtgtagttttaaggaa

SEQ ID NO: 335331 - DNA, 25 bp, Homo sapien
ccacagatttgtgtagttttaagga

SEQ ID NO: 335332 - DNA, 25 bp, Homo sapien
ttctcttggtgtgtctttttattca

SEQ ID NO: 335333 - DNA, 25 bp, Homo sapien
tctcttggtgtgtctttttattcat

SEQ ID NO: 335334 - DNA, 25 bp, Homo sapien
cttctcttggtgtgtctttttattc

SEQ ID NO: 335335 - DNA, 25 bp, Homo sapien
gactttgaattcaggtagccttcca

SEQ ID NO: 335336 - DNA, 25 bp, Homo sapien
gagcacagctttcaagaggatgttg

SEQ ID NO: 335337 - DNA, 25 bp, Homo sapien
tctgtgccactcataagctatgtga

SEQ ID NO: 335338 - DNA, 25 bp, Homo sapien
cagactgcttagttggtggtatatc

SEQ ID NO: 335339 - DNA, 25 bp, Homo sapien
ctcactgccgggaagcatcacctgt

SEQ ID NO: 335340 - DNA, 25 bp, Homo sapien
ttggcacttagatcatgtctctggc

SEQ ID NO: 335341 - DNA, 25 bp, Homo sapien
caggctttaatggtgccgctaatgt

SEQ ID NO: 335342 - DNA, 25 bp, Homo sapien
tgggaactcccgctggtttcgagtc

SEQ ID NO: 335343 - DNA, 25 bp, Homo sapien
tgactgttggcaaatttcatcaccc

SEQ ID NO: 335344 - DNA, 25 bp, Homo sapien
gactgttggcaaatttcatcacccc

SEQ ID NO: 335345 - DNA, 25 bp, Homo sapien
ctccctgtgagcctcagagtgtcca

SEQ ID NO: 335346 - DNA, 25 bp, Homo sapien
tccctgtgagcctcagagtgtccac

SEQ ID NO: 335347 - DNA, 25 bp, Homo sapien
cacttgaatcttcaaggcaccagca

SEQ ID NO: 335348 - DNA, 25 bp, Homo sapien
ggcacttgaatcttcaaggcaccag

SEQ ID NO: 335349 - DNA, 25 bp, Homo sapien
agataagcttgcaccggggaatggt

SEQ ID NO: 335350 - DNA, 25 bp, Homo sapien
taagcttgcaccggggaatggtgcc

SEQ ID NO: 335351 - DNA, 25 bp, Homo sapien
gaaggattgagtgaggcatagctaa

SEQ ID NO: 335352 - DNA, 25 bp, Homo sapien
ccagcccggagcaagtagtagggac

SEQ ID NO: 335353 - DNA, 25 bp, Homo sapien
catggatagtggctgattgagaaac

SEQ ID NO: 335354 - DNA, 25 bp, Homo sapien
ctaatgtagttggtgccagcccgga

SEQ ID NO: 335355 - DNA, 25 bp, Homo sapien
ttaatccaaaccaagttccctcagc

SEQ ID NO: 335356 - DNA, 25 bp, Homo sapien
ccagaactggttggggtcagcttta

SEQ ID NO: 335357 - DNA, 25 bp, Homo sapien
ttccagaactggttggggtcagctt

SEQ ID NO: 335358 - DNA, 25 bp, Homo sapien
aatccaaaccaagttccctcagctt

SEQ ID NO: 335359 - DNA, 25 bp, Homo sapien
ttaaaggcttagcaaggctctggcc

SEQ ID NO: 335360 - DNA, 25 bp, Homo sapien
tatggacagtcattgcaagagcaca

SEQ ID NO: 335361 - DNA, 25 bp, Homo sapien
caagagcacagatgttcagagagac

SEQ ID NO: 335362 - DNA, 25 bp, Homo sapien
gataccagcatatacacagactggg

SEQ ID NO: 335363 - DNA, 25 bp, Homo sapien
tctgcaattctagtacccactcctc

SEQ ID NO: 335364 - DNA, 25 bp, Homo sapien
ccactcctctgtgacctcaggaaag

SEQ ID NO: 335365 - DNA, 25 bp, Homo sapien
taaagagactgtttgtgacaagcag

SEQ ID NO: 335366 - DNA, 25 bp, Homo sapien
aagaggatggcagatttcagaggcc

SEQ ID NO: 335367 - DNA, 25 bp, Homo sapien
taaaatgtgacggacaagtggaagc

SEQ ID NO: 335368 - DNA, 25 bp, Homo sapien
gcataacagggatttcagctagacc

SEQ ID NO: 335369 - DNA, 25 bp, Homo sapien
tacacctagttacagctgactgcct

SEQ ID NO: 335370 - DNA, 25 bp, Homo sapien
caatacagtgtggaagacaaagcac

SEQ ID NO: 335371 - DNA, 25 bp, Homo sapien
caagtgtgctatttcacatgccggc

SEQ ID NO: 335372 - DNA, 25 bp, Homo sapien
catgccggctgtttaagtgtacacc

SEQ ID NO: 335373 - DNA, 25 bp, Homo sapien
gaaaagaggacttgggactcaggcc

SEQ ID NO: 335374 - DNA, 25 bp, Homo sapien
tcatcaggtacgtcccacattcagg

SEQ ID NO: 335375 - DNA, 25 bp, Homo sapien
caaatgggcacgataatagtacctg

SEQ ID NO: 335376 - DNA, 25 bp, Homo sapien
caggcctaggtgtgatgctgaatca

SEQ ID NO: 335377 - DNA, 25 bp, Homo sapien
tgaaagcccaggacatgaagctcaa

SEQ ID NO: 335378 - DNA, 25 bp, Homo sapien
ctatgtgcccatattgcagctgctg

SEQ ID NO: 335379 - DNA, 25 bp, Homo sapien
gtccctaaagggagaccaccatgag

SEQ ID NO: 335380 - DNA, 25 bp, Homo sapien
tatatggcaggtgtgagactcaact

SEQ ID NO: 335381 - DNA, 25 bp, Homo sapien
cagcaatgccatgctaaggctgcat

SEQ ID NO: 335382 - DNA, 25 bp, Homo sapien
tgcaaaatggcaaaccgcggcagca

SEQ ID NO: 335383 - DNA, 25 bp, Homo sapien
tgaattgcatgcatctttgggaacc

SEQ ID NO: 335384 - DNA, 25 bp, Homo sapien
ggtttggatgtttcgcggcctcagc

SEQ ID NO: 335385 - DNA, 25 bp, Homo sapien
tatctcagccctcaaaatagaggag

SEQ ID NO: 335386 - DNA, 25 bp, Homo sapien
tacaagtgccagaatcgatcaccat

SEQ ID NO: 335387 - DNA, 25 bp, Homo sapien
cactctcaagctgtggtaataaaca

SEQ ID NO: 335388 - DNA, 25 bp, Homo sapien
ggccccactcatacagtgacaagga

SEQ ID NO: 335389 - DNA, 25 bp, Homo sapien
agactgccaaacagcccagaaggaa

SEQ ID NO: 335390 - DNA, 25 bp, Homo sapien
tctgattgctacctgatggccattc

SEQ ID NO: 335391 - DNA, 25 bp, Homo sapien
cgagtgaatccgaagggcatgatct

SEQ ID NO: 335392 - DNA, 25 bp, Homo sapien
taactatgatcctttgaagctcacc

SEQ ID NO: 335393 - DNA, 25 bp, Homo sapien
ggattgtcctggctgaaaccagaga

SEQ ID NO: 335394 - DNA, 25 bp, Homo sapien
ggatgggattgtcctggctgaaacc

SEQ ID NO: 335395 - DNA, 25 bp, Homo sapien
gctctttcaagctgccctgttcaca

SEQ ID NO: 335396 - DNA, 25 bp, Homo sapien
ctggctgaaaccagagacacagccc

SEQ ID NO: 335397 - DNA, 25 bp, Homo sapien
tcgggcacatttacagtggcaagac

SEQ ID NO: 335398 - DNA, 25 bp, Homo sapien
gcttttgtactcctaggcagtctcc

SEQ ID NO: 335399 - DNA, 25 bp, Homo sapien
tccaagacactaagtaggcccgatc

SEQ ID NO: 335400 - DNA, 25 bp, Homo sapien
acagcacttgtaggcttttgtactc

SEQ ID NO: 335401 - DNA, 25 bp, Homo sapien
ccatcagcttgctcatctttagcac

SEQ ID NO: 335402 - DNA, 25 bp, Homo sapien
gaagctccatgagtagtttttccaa

SEQ ID NO: 335403 - DNA, 25 bp, Homo sapien
tgctcatctttagcacctatcttgt

SEQ ID NO: 335404 - DNA, 25 bp, Homo sapien
tgaagctccatgagtagtttttcca

SEQ ID NO: 335405 - DNA, 25 bp, Homo sapien
aagcataagaagtcttccatatttg

SEQ ID NO: 335406 - DNA, 25 bp, Homo sapien
tgaaaacatctggagaggataaatg

SEQ ID NO: 335407 - DNA, 25 bp, Homo sapien
aagtcttccatatttgattgttgca

SEQ ID NO: 335408 - DNA, 25 bp, Homo sapien
tggaagttcgtcaggtagcttttgc

SEQ ID NO: 335409 - DNA, 25 bp, Homo sapien
ggaagttcgtcaggtagcttttgcc

SEQ ID NO: 335410 - DNA, 25 bp, Homo sapien
atggaagttcgtcaggtagcttttg

SEQ ID NO: 335411 - DNA, 25 bp, Homo sapien
aaacacatgacccatgaggacatca

SEQ ID NO: 335412 - DNA, 25 bp, Homo sapien
gacccatgaggacatcagatgcaat

SEQ ID NO: 335413 - DNA, 25 bp, Homo sapien
tcaaacacatgacccatgaggacat

SEQ ID NO: 335414 - DNA, 25 bp, Homo sapien
cccatgaggacatcagatgcaattt

SEQ ID NO: 335415 - DNA, 25 bp, Homo sapien
ggtcctggtgactagcatctttccg

SEQ ID NO: 335416 - DNA, 25 bp, Homo sapien
ggtgactagcatctttccgatattt

SEQ ID NO: 335417 - DNA, 25 bp, Homo sapien
gactagcatctttccgatatttctt

SEQ ID NO: 335418 - DNA, 25 bp, Homo sapien
cctggtgactagcatctttccgata

SEQ ID NO: 335419 - DNA, 25 bp, Homo sapien
ttcataaggtgcttgttcttgccaa

SEQ ID NO: 335420 - DNA, 25 bp, Homo sapien
ataaggtgcttgttcttgccaacca

SEQ ID NO: 335421 - DNA, 25 bp, Homo sapien
attgtacaagtcttccttagaaaat

SEQ ID NO: 335422 - DNA, 25 bp, Homo sapien
tgtacaagtcttccttagaaaatgg

SEQ ID NO: 335423 - DNA, 25 bp, Homo sapien
agagatgagaggtgggttctgggac

SEQ ID NO: 335424 - DNA, 25 bp, Homo sapien
gaccaggtggattttgggacagaga

SEQ ID NO: 335425 - DNA, 25 bp, Homo sapien
gagatgagaggtgggttctgggaca

SEQ ID NO: 335426 - DNA, 25 bp, Homo sapien
cagggaccaggtggattttgggaca

SEQ ID NO: 335427 - DNA, 25 bp, Homo sapien
tgggttctgtagcaggaaggaggta

SEQ ID NO: 335428 - DNA, 25 bp, Homo sapien
gtgggttctgtagcaggaaggaggt

SEQ ID NO: 335429 - DNA, 25 bp, Homo sapien
gggttctgtagcaggaaggaggtag

SEQ ID NO: 335430 - DNA, 25 bp, Homo sapien
ctcagcgcagctggcagggacgggg

SEQ ID NO: 335431 - DNA, 25 bp, Homo sapien
cacgctcagcgcagctggcagggac

SEQ ID NO: 335432 - DNA, 25 bp, Homo sapien
cgcgcacgctcagcgcagctggcag

SEQ ID NO: 335433 - DNA, 25 bp, Homo sapien
gcgcagctggcagggacggggaccc

SEQ ID NO: 335434 - DNA, 25 bp, Homo sapien
atcaggcagaaagtaccaaggaggc

SEQ ID NO: 335435 - DNA, 25 bp, Homo sapien
ttctgtgggtttcgccaaatggata

SEQ ID NO: 335436 - DNA, 25 bp, Homo sapien
aaatggataatgacacggacctacc

SEQ ID NO: 335437 - DNA, 25 bp, Homo sapien
tttccttttgtccaccctgctcaga

SEQ ID NO: 335438 - DNA, 25 bp, Homo sapien
gaccagagacttagtgcccttgtaa

SEQ ID NO: 335439 - DNA, 25 bp, Homo sapien
tctggcctaacagcgcattcctttg

SEQ ID NO: 335440 - DNA, 25 bp, Homo sapien
gattggtccttgagtgaccagagac

SEQ ID NO: 335441 - DNA, 25 bp, Homo sapien
taagtctgtcttctgttgctacttg

SEQ ID NO: 335442 - DNA, 25 bp, Homo sapien
tccctgatggcaaaagcattgggcc

SEQ ID NO: 335443 - DNA, 25 bp, Homo sapien
gagctagagaacttggcctctgatg

SEQ ID NO: 335444 - DNA, 25 bp, Homo sapien
tggaggctactctttaaacatggct

SEQ ID NO: 335445 - DNA, 25 bp, Homo sapien
tcacacagatcagccacggaacgtg

SEQ ID NO: 335446 - DNA, 25 bp, Homo sapien
gaatatacagctggtcgcaggtgca

SEQ ID NO: 335447 - DNA, 25 bp, Homo sapien
tgatgtgtgaaagcgtagccggcca

SEQ ID NO: 335448 - DNA, 25 bp, Homo sapien
gtgcactgcgtgacaatgacccaag

SEQ ID NO: 335449 - DNA, 25 bp, Homo sapien
gaacatgtggatctcttcccgaagg

SEQ ID NO: 335450 - DNA, 25 bp, Homo sapien
taaagaaagacttaggccaggctcg

SEQ ID NO: 335451 - DNA, 25 bp, Homo sapien
gaggatttaggactccgtgccagga

SEQ ID NO: 335452 - DNA, 25 bp, Homo sapien
cagtatctggcacatgaagggcact

SEQ ID NO: 335453 - DNA, 25 bp, Homo sapien
tgggaaaacacatcgggacagcagt

SEQ ID NO: 335454 - DNA, 25 bp, Homo sapien
tcttctcacgccctccgtgctctgt

SEQ ID NO: 335455 - DNA, 25 bp, Homo sapien
gctcggcgctactgagagagaggga

SEQ ID NO: 335456 - DNA, 25 bp, Homo sapien
ccgcgccatggcaacctcatgtggg

SEQ ID NO: 335457 - DNA, 25 bp, Homo sapien
gattatacaggcgtcacaccgcgcc

SEQ ID NO: 335458 - DNA, 25 bp, Homo sapien
ccataagaggttgtggtgcccattc

SEQ ID NO: 335459 - DNA, 25 bp, Homo sapien
gggccacagttaccaagctttagag

SEQ ID NO: 335460 - DNA, 25 bp, Homo sapien
ggattaaccgtgtcctgagtgaccc

SEQ ID NO: 335461 - DNA, 25 bp, Homo sapien
tcggtgtcaactaggagtccagggt

SEQ ID NO: 335462 - DNA, 25 bp, Homo sapien
caaagacaacgtgagacattgcggg

SEQ ID NO: 335463 - DNA, 25 bp, Homo sapien
tataaagttgtcttcgctggcctgg

SEQ ID NO: 335464 - DNA, 25 bp, Homo sapien
cacggataggctttgtacggttcca

SEQ ID NO: 335465 - DNA, 25 bp, Homo sapien
tctgagttaatccaggtgcatgaga

SEQ ID NO: 335466 - DNA, 25 bp, Homo sapien
catagcagaggagtaagacaacatt

SEQ ID NO: 335467 - DNA, 25 bp, Homo sapien
tagcttcggataggatcctcttcca

SEQ ID NO: 335468 - DNA, 25 bp, Homo sapien
ggagtaagacaacatttatcctagc

SEQ ID NO: 335469 - DNA, 25 bp, Homo sapien
acatttatcctagcttcggatagga

SEQ ID NO: 335470 - DNA, 25 bp, Homo sapien
ctggcagccctacaaacagacggtc

SEQ ID NO: 335471 - DNA, 25 bp, Homo sapien
gagacacaggcttggtgtattggat

SEQ ID NO: 335472 - DNA, 25 bp, Homo sapien
aggaaaagagggatgcgcccacgtt

SEQ ID NO: 335473 - DNA, 25 bp, Homo sapien
cttggtgtattggatcagctgcagc

SEQ ID NO: 335474 - DNA, 25 bp, Homo sapien
aacattcagttaagattttgacaaa

SEQ ID NO: 335475 - DNA, 25 bp, Homo sapien
tcataaacatcagatatcagttcac

SEQ ID NO: 335476 - DNA, 25 bp, Homo sapien
tctcaaatggaatctcaagtacttc

SEQ ID NO: 335477 - DNA, 25 bp, Homo sapien
tattaacaatacaactctcaaatgg

SEQ ID NO: 335478 - DNA, 25 bp, Homo sapien
cacagctgagtgtcgctccctttca

SEQ ID NO: 335479 - DNA, 25 bp, Homo sapien
ttctaagtaccacacaagcccagga

SEQ ID NO: 335480 - DNA, 25 bp, Homo sapien
ctataacgtaatagaactgaggttc

SEQ ID NO: 335481 - DNA, 25 bp, Homo sapien
aaaatgtctgactataacgtaatag

SEQ ID NO: 335482 - DNA, 25 bp, Homo sapien
cctatttagggacactcgctcgaga

SEQ ID NO: 335483 - DNA, 25 bp, Homo sapien
tgcacggcccacttgtagtcaaagg

SEQ ID NO: 335484 - DNA, 25 bp, Homo sapien
tagtcaaaggcagcgcaggttggtc

SEQ ID NO: 335485 - DNA, 25 bp, Homo sapien
tgtgggtccaaagaagacgccccta

SEQ ID NO: 335486 - DNA, 25 bp, Homo sapien
gggtctgccgacctgaagaactaac

SEQ ID NO: 335487 - DNA, 25 bp, Homo sapien
caccaattcaagctgggatggaaca

SEQ ID NO: 335488 - DNA, 25 bp, Homo sapien
tttatcaagtgctctgggtctgccg

SEQ ID NO: 335489 - DNA, 25 bp, Homo sapien
cactctgggctagtggacgatcagg

SEQ ID NO: 335490 - DNA, 25 bp, Homo sapien
ctgctttgctttgccggagaggctg

SEQ ID NO: 335491 - DNA, 25 bp, Homo sapien
gctgaaggcgccatcctgagggttt

SEQ ID NO: 335492 - DNA, 25 bp, Homo sapien
tgagggtttgggaagccggagctcc

SEQ ID NO: 335493 - DNA, 25 bp, Homo sapien
gttgcaacaggcgtacacagccgtg

SEQ ID NO: 335494 - DNA, 25 bp, Homo sapien
cagtggtggtatggtcccatttcac

SEQ ID NO: 335495 - DNA, 25 bp, Homo sapien
gatgtgacacgaagtgacaggaagc

SEQ ID NO: 335496 - DNA, 25 bp, Homo sapien
gagaaaggagtctagtctgctctcc

SEQ ID NO: 335497 - DNA, 25 bp, Homo sapien
tatgacgaggcaatggcagtgtccg

SEQ ID NO: 335498 - DNA, 25 bp, Homo sapien
ggccaaggacttcacatctaaaaca

SEQ ID NO: 335499 - DNA, 25 bp, Homo sapien
ccaaggacttcacatctaaaacacc

SEQ ID NO: 335500 - DNA, 25 bp, Homo sapien
gccaaggacttcacatctaaaacac

SEQ ID NO: 335501 - DNA, 25 bp, Homo sapien
agtcatttcataaagcgcgggcagc

SEQ ID NO: 335502 - DNA, 25 bp, Homo sapien
gcagctgggcaaattcgctatgcat

SEQ ID NO: 335503 - DNA, 25 bp, Homo sapien
ctatgcatcaggctgacggcctgga

SEQ ID NO: 335504 - DNA, 25 bp, Homo sapien
ataaagcgcgggcagctgggcaaat

SEQ ID NO: 335505 - DNA, 25 bp, Homo sapien
aatgcggtcgtaatgtgtgaagttg

SEQ ID NO: 335506 - DNA, 25 bp, Homo sapien
gctctgaatgcggtcgtaatgtgtg

SEQ ID NO: 335507 - DNA, 25 bp, Homo sapien
gttgtaggtgctgctcgtggaggct

SEQ ID NO: 335508 - DNA, 25 bp, Homo sapien
tgaagttgtaggtgctgctcgtgga

SEQ ID NO: 335509 - DNA, 25 bp, Homo sapien
cataataggcttggtctgaaatggg

SEQ ID NO: 335510 - DNA, 25 bp, Homo sapien
gggcttgactcagtaggccaggcct

SEQ ID NO: 335511 - DNA, 25 bp, Homo sapien
aatgaccaggagcaagttaccaagt

SEQ ID NO: 335512 - DNA, 25 bp, Homo sapien
tgcagttcccaggtaaaaaacatcc

SEQ ID NO: 335513 - DNA, 25 bp, Homo sapien
gcacacgggcacacataagcattca

SEQ ID NO: 335514 - DNA, 25 bp, Homo sapien
gaccaacactgcgtttaacactgag

SEQ ID NO: 335515 - DNA, 25 bp, Homo sapien
tggacctcaagaacgtgctaacagt

SEQ ID NO: 335516 - DNA, 25 bp, Homo sapien
tgtttccccacaggcacggagcttt

SEQ ID NO: 335517 - DNA, 25 bp, Homo sapien
gatgaggcatttaacactgcagcca

SEQ ID NO: 335518 - DNA, 25 bp, Homo sapien
ccccgcactgctataagaaggagat

SEQ ID NO: 335519 - DNA, 25 bp, Homo sapien
taactcagtgatccagcgtctgtgg

SEQ ID NO: 335520 - DNA, 25 bp, Homo sapien
acttccaaggctcgacactgtgcag

SEQ ID NO: 335521 - DNA, 25 bp, Homo sapien
ttcctctatggctgcgctgtctccc

SEQ ID NO: 335522 - DNA, 25 bp, Homo sapien
tgacgcagtgagtgtagagattcat

SEQ ID NO: 335523 - DNA, 25 bp, Homo sapien
ccctttgacgcagtgagtgtagaga

SEQ ID NO: 335524 - DNA, 25 bp, Homo sapien
gcaccagccctttgacgcagtgagt

SEQ ID NO: 335525 - DNA, 25 bp, Homo sapien
caggactctgctggtgtcagcctgg

SEQ ID NO: 335526 - DNA, 25 bp, Homo sapien
gtggctttcacagaccccatcaaca

SEQ ID NO: 335527 - DNA, 25 bp, Homo sapien
ctctgtcctggatctaagcgaggca

SEQ ID NO: 335528 - DNA, 25 bp, Homo sapien
tcctggatctaagcgaggcaataac

SEQ ID NO: 335529 - DNA, 25 bp, Homo sapien
gggctgcgtggctttcacagacccc

SEQ ID NO: 335530 - DNA, 25 bp, Homo sapien
cagagttgtgcagtcctgcgggcct

SEQ ID NO: 335531 - DNA, 25 bp, Homo sapien
gatcatggccagacaagcatccgtt

SEQ ID NO: 335532 - DNA, 25 bp, Homo sapien
tgccatctggacaagcttcgtcagg

SEQ ID NO: 335533 - DNA, 25 bp, Homo sapien
gatgccttgcagtaaggagccctgc

SEQ ID NO: 335534 - DNA, 25 bp, Homo sapien
gctttacgtagtgacaccagactca

SEQ ID NO: 335535 - DNA, 25 bp, Homo sapien
caaggtcccatagctggtataagta

SEQ ID NO: 335536 - DNA, 25 bp, Homo sapien
ataagactgacccacatctggaagg

SEQ ID NO: 335537 - DNA, 25 bp, Homo sapien
tggaaggtctcctacgcatcaggcc

SEQ ID NO: 335538 - DNA, 25 bp, Homo sapien
tggtcacaaaaacagggataatctg

SEQ ID NO: 335539 - DNA, 25 bp, Homo sapien
cacaaaaacagggataatctggaca

SEQ ID NO: 335540 - DNA, 25 bp, Homo sapien
aatctggacattcgggggcaatgcc

SEQ ID NO: 335541 - DNA, 25 bp, Homo sapien
aacagggataatctggacattcggg

SEQ ID NO: 335542 - DNA, 25 bp, Homo sapien
gaccgagcagtctcacaatatgaag

SEQ ID NO: 335543 - DNA, 25 bp, Homo sapien
gcccagtaaggaaagagtccctgca

SEQ ID NO: 335544 - DNA, 25 bp, Homo sapien
aatctcctggcacttgaccgagcag

SEQ ID NO: 335545 - DNA, 25 bp, Homo sapien
gaaagcagggatttgacagcatgcc

SEQ ID NO: 335546 - DNA, 25 bp, Homo sapien
tgggtaactcgattcttgaagctcc

SEQ ID NO: 335547 - DNA, 25 bp, Homo sapien
taactcgattcttgaagctccataa

SEQ ID NO: 335548 - DNA, 25 bp, Homo sapien
cattagggttctggtgggtaactcg

SEQ ID NO: 335549 - DNA, 25 bp, Homo sapien
gttctggtgggtaactcgattcttg

SEQ ID NO: 335550 - DNA, 25 bp, Homo sapien
tttccttcgcataacttgtacaggg

SEQ ID NO: 335551 - DNA, 25 bp, Homo sapien
ataaacatgcagatggcttggtttc

SEQ ID NO: 335552 - DNA, 25 bp, Homo sapien
gttctcaagaggcaaccatgcgcct

SEQ ID NO: 335553 - DNA, 25 bp, Homo sapien
taggtagcataaaagaccgccgttc

SEQ ID NO: 335554 - DNA, 25 bp, Homo sapien
gttcctgcggggcatcctctcccgt

SEQ ID NO: 335555 - DNA, 25 bp, Homo sapien
gggcatcctctcccgtagggagtct

SEQ ID NO: 335556 - DNA, 25 bp, Homo sapien
cggggcatcctctcccgtagggagt

SEQ ID NO: 335557 - DNA, 25 bp, Homo sapien
ctgcggggcatcctctcccgtaggg

SEQ ID NO: 335558 - DNA, 25 bp, Homo sapien
cctgtacagttcaaagatgggcaat

SEQ ID NO: 335559 - DNA, 25 bp, Homo sapien
caggcctagctcgtggaagaaaaca

SEQ ID NO: 335560 - DNA, 25 bp, Homo sapien
tcactactgaggagaatgacattgg

SEQ ID NO: 335561 - DNA, 25 bp, Homo sapien
cacacacagaagttggcgctgggca

SEQ ID NO: 335562 - DNA, 25 bp, Homo sapien
tcctgaggtgctgttcggtgaagca

SEQ ID NO: 335563 - DNA, 25 bp, Homo sapien
gtgctgttcggtgaagcaggacctt

SEQ ID NO: 335564 - DNA, 25 bp, Homo sapien
gctcctgaggtgctgttcggtgaag

SEQ ID NO: 335565 - DNA, 25 bp, Homo sapien
ctgttcggtgaagcaggaccttggc

SEQ ID NO: 335566 - DNA, 25 bp, Homo sapien
tctttggtgggtatgtcactgacga

SEQ ID NO: 335567 - DNA, 25 bp, Homo sapien
tgtattcatgtattagccgtataat

SEQ ID NO: 335568 - DNA, 25 bp, Homo sapien
tctgtgtgttcctctattgattgat

SEQ ID NO: 335569 - DNA, 25 bp, Homo sapien
tattagccgtataatgtaaatacag

SEQ ID NO: 335570 - DNA, 25 bp, Homo sapien
ggaggtggctgatggtcagttgtgc

SEQ ID NO: 335571 - DNA, 25 bp, Homo sapien
tggtcagttgtgcagcaagggaatg

SEQ ID NO: 335572 - DNA, 25 bp, Homo sapien
tggctgatggtcagttgtgcagcaa

SEQ ID NO: 335573 - DNA, 25 bp, Homo sapien
gaagaaaggggtctggagttactca

SEQ ID NO: 335574 - DNA, 25 bp, Homo sapien
agtcctttatagaggatgcagccag

SEQ ID NO: 335575 - DNA, 25 bp, Homo sapien
caggtctgcagaatgcgggctgcct

SEQ ID NO: 335576 - DNA, 25 bp, Homo sapien
tgccttcagcaacaacaggggctcc

SEQ ID NO: 335577 - DNA, 25 bp, Homo sapien
aatgtgaggcgagcgctggcaggtc

SEQ ID NO: 335578 - DNA, 25 bp, Homo sapien
tcatgcccacccatcagcatgctca

SEQ ID NO: 335579 - DNA, 25 bp, Homo sapien
cagcatgctcacaatcaggaaggga

SEQ ID NO: 335580 - DNA, 25 bp, Homo sapien
aacagctggacagggtgtagctcaa

SEQ ID NO: 335581 - DNA, 25 bp, Homo sapien
agctggacagggtgtagctcaaagc

SEQ ID NO: 335582 - DNA, 25 bp, Homo sapien
gccatggcttgggactattctacct

SEQ ID NO: 335583 - DNA, 25 bp, Homo sapien
ctggaaaaggagaatgtgtcacaca

SEQ ID NO: 335584 - DNA, 25 bp, Homo sapien
acacagtgaaagctgtgccatggct

SEQ ID NO: 335585 - DNA, 25 bp, Homo sapien
ttgggactattctacctctctatac

SEQ ID NO: 335586 - DNA, 25 bp, Homo sapien
caatccccatggtgatacaggtggc

SEQ ID NO: 335587 - DNA, 25 bp, Homo sapien
ccacattccttgtatggagtcaggg

SEQ ID NO: 335588 - DNA, 25 bp, Homo sapien
gaccaggttccatgactctattcca

SEQ ID NO: 335589 - DNA, 25 bp, Homo sapien
ggtggcttgatgtctgaccaggttc

SEQ ID NO: 335590 - DNA, 25 bp, Homo sapien
atgaataaggaggatgaaaatgtta

SEQ ID NO: 335591 - DNA, 25 bp, Homo sapien
taaaatgaataaggaggatgaaaat

SEQ ID NO: 335592 - DNA, 25 bp, Homo sapien
tgaataaggaggatgaaaatgttac

SEQ ID NO: 335593 - DNA, 25 bp, Homo sapien
atataaaatgaataaggaggatgaa

SEQ ID NO: 335594 - DNA, 25 bp, Homo sapien
aagttccagagggaattgaaaatct

SEQ ID NO: 335595 - DNA, 25 bp, Homo sapien
gaattgaaaatcttatgcagatcac

SEQ ID NO: 335596 - DNA, 25 bp, Homo sapien
ttatgcagatcactggtgtttttca

SEQ ID NO: 335597 - DNA, 25 bp, Homo sapien
tttcagaatttgctcgatgaaggtg

SEQ ID NO: 335598 - DNA, 25 bp, Homo sapien
ccaactagctgatccagaaaccgct

SEQ ID NO: 335599 - DNA, 25 bp, Homo sapien
tagctgatccagaaaccgcttgcag

SEQ ID NO: 335600 - DNA, 25 bp, Homo sapien
tccagaaaccgcttgcagctgacat

SEQ ID NO: 335601 - DNA, 25 bp, Homo sapien
aaaaattaaagaatccaactagctg

SEQ ID NO: 335602 - DNA, 25 bp, Homo sapien
cttacccagtaagtgtagagagcat

SEQ ID NO: 335603 - DNA, 25 bp, Homo sapien
taaatgtagccatgggaaacagcac

SEQ ID NO: 335604 - DNA, 25 bp, Homo sapien
gaagcgagggtgattactaaacaca

SEQ ID NO: 335605 - DNA, 25 bp, Homo sapien
tgcagagagtaccacaggaagcgag

SEQ ID NO: 335606 - DNA, 25 bp, Homo sapien
ttcagttttctcagacgaacaagag

SEQ ID NO: 335607 - DNA, 25 bp, Homo sapien
acgaacaagagtaggaggagagtca

SEQ ID NO: 335608 - DNA, 25 bp, Homo sapien
aatgtcagaaacacagcggacaact

SEQ ID NO: 335609 - DNA, 25 bp, Homo sapien
acagcggacaactccagcaatctgt

SEQ ID NO: 335610 - DNA, 25 bp, Homo sapien
taccttggaaccatcataaagaaaa

SEQ ID NO: 335611 - DNA, 25 bp, Homo sapien
tcttcctttaccttggaaccatcat

SEQ ID NO: 335612 - DNA, 25 bp, Homo sapien
agctcttgttggatcgccttcttcc

SEQ ID NO: 335613 - DNA, 25 bp, Homo sapien
tcctttaccttggaaccatcataaa

SEQ ID NO: 335614 - DNA, 25 bp, Homo sapien
ctggcaagagaacagagtggagcca

SEQ ID NO: 335615 - DNA, 25 bp, Homo sapien
tggcaagagaacagagtggagccat

SEQ ID NO: 335616 - DNA, 25 bp, Homo sapien
gataaaaccattctgtaagcgcagg

SEQ ID NO: 335617 - DNA, 25 bp, Homo sapien
tatccagccgttagaccatctgccg

SEQ ID NO: 335618 - DNA, 25 bp, Homo sapien
tctgccggagaagacacgagtagct

SEQ ID NO: 335619 - DNA, 25 bp, Homo sapien
tgatcacggcatttaaaacacagct

SEQ ID NO: 335620 - DNA, 25 bp, Homo sapien
ttcaagcacacttcctcattaaccg

SEQ ID NO: 335621 - DNA, 25 bp, Homo sapien
agtatcattcaagcacacttcctca

SEQ ID NO: 335622 - DNA, 25 bp, Homo sapien
acttcctcattaaccgtctcctgat

SEQ ID NO: 335623 - DNA, 25 bp, Homo sapien
aagcacacttcctcattaaccgtct

SEQ ID NO: 335624 - DNA, 25 bp, Homo sapien
ggctgactttgcctctgtggaggta

SEQ ID NO: 335625 - DNA, 25 bp, Homo sapien
cacgaggctgactttgcctctgtgg

SEQ ID NO: 335626 - DNA, 25 bp, Homo sapien
cgaggctgactttgcctctgtggag

SEQ ID NO: 335627 - DNA, 25 bp, Homo sapien
tgactttgcctctgtggaggtagag

SEQ ID NO: 335628 - DNA, 25 bp, Homo sapien
cagagaatcctagcagaaaagtcaa

SEQ ID NO: 335629 - DNA, 25 bp, Homo sapien
ctaagtatcactgtggctgtctgca

SEQ ID NO: 335630 - DNA, 25 bp, Homo sapien
ttccatgcctcttacaactcaggga

SEQ ID NO: 335631 - DNA, 25 bp, Homo sapien
gcttgtctagttcaaacccatcctg

SEQ ID NO: 335632 - DNA, 25 bp, Homo sapien
aacctgaacatgcagaattccagag

SEQ ID NO: 335633 - DNA, 25 bp, Homo sapien
ggtgtggacagctatacaaataaac

SEQ ID NO: 335634 - DNA, 25 bp, Homo sapien
tcaaatgacagggtgaaaatgctct

SEQ ID NO: 335635 - DNA, 25 bp, Homo sapien
caaataaaccagttgctgtggtaat

SEQ ID NO: 335636 - DNA, 25 bp, Homo sapien
tttcagagtcggaaggaaccctggc

SEQ ID NO: 335637 - DNA, 25 bp, Homo sapien
agagaaagacagctcagtgtatcac

SEQ ID NO: 335638 - DNA, 25 bp, Homo sapien
tggcatcgtttactctactctcctg

SEQ ID NO: 335639 - DNA, 25 bp, Homo sapien
cagtgtatcacggaatttcagagtc

SEQ ID NO: 335640 - DNA, 25 bp, Homo sapien
gcctcccactcgctagtctggataa

SEQ ID NO: 335641 - DNA, 25 bp, Homo sapien
tccaacaaactaaaatctgcgttcc

SEQ ID NO: 335642 - DNA, 25 bp, Homo sapien
tgcgtggttcactatgttacatttc

SEQ ID NO: 335643 - DNA, 25 bp, Homo sapien
tgctttacaccctccagagatgcgt

SEQ ID NO: 335644 - DNA, 25 bp, Homo sapien
ccaggcatcccagtgctcggggttc

SEQ ID NO: 335645 - DNA, 25 bp, Homo sapien
caggcatcccagtgctcggggttcg

SEQ ID NO: 335646 - DNA, 25 bp, Homo sapien
ctcggggttcgggactctggaccag

SEQ ID NO: 335647 - DNA, 25 bp, Homo sapien
gttcgggactctggaccagaaatgt

SEQ ID NO: 335648 - DNA, 25 bp, Homo sapien
gagaggccttaggtcacgcgccgcc

SEQ ID NO: 335649 - DNA, 25 bp, Homo sapien
tcctggcaagccggcgcgcggcgat

SEQ ID NO: 335650 - DNA, 25 bp, Homo sapien
cctggcaagccggcgcgcggcgatg

SEQ ID NO: 335651 - DNA, 25 bp, Homo sapien
ctgcgcgcgcggcagagaggcctta

SEQ ID NO: 335652 - DNA, 25 bp, Homo sapien
tagtgcctgaacgatgtaaccagcc

SEQ ID NO: 335653 - DNA, 25 bp, Homo sapien
aaaagtctaggtgcctcaagtgagg

SEQ ID NO: 335654 - DNA, 25 bp, Homo sapien
tgaagtccttaacacccttggtgtg

SEQ ID NO: 335655 - DNA, 25 bp, Homo sapien
ggtatatgaccctctgtttagccaa

SEQ ID NO: 335656 - DNA, 25 bp, Homo sapien
gatgcacaccaggacgcccggctga

SEQ ID NO: 335657 - DNA, 25 bp, Homo sapien
tggtttactccacatcttgagtttt

SEQ ID NO: 335658 - DNA, 25 bp, Homo sapien
atgcacaccaggacgcccggctgat

SEQ ID NO: 335659 - DNA, 25 bp, Homo sapien
tatttaactggtttactccacatct

SEQ ID NO: 335660 - DNA, 25 bp, Homo sapien
ctaggttgttggcaaggattctgca

SEQ ID NO: 335661 - DNA, 25 bp, Homo sapien
ctttacaggcgtaggaggaaactca

SEQ ID NO: 335662 - DNA, 25 bp, Homo sapien
tgtgttccagaaagctatgactctt

SEQ ID NO: 335663 - DNA, 25 bp, Homo sapien
gaaactcatgggctaagtggcgcta

SEQ ID NO: 335664 - DNA, 25 bp, Homo sapien
gactgaactcgttgtgaggtactca

SEQ ID NO: 335665 - DNA, 25 bp, Homo sapien
agaagatccttctgctactgactga

SEQ ID NO: 335666 - DNA, 25 bp, Homo sapien
tgctatggaggaactacagagaact

SEQ ID NO: 335667 - DNA, 25 bp, Homo sapien
tgtccactggttccctgtgcaaaag

SEQ ID NO: 335668 - DNA, 25 bp, Homo sapien
tggagtagctcctgagtaaagaagt

SEQ ID NO: 335669 - DNA, 25 bp, Homo sapien
tgttttgaggacgataccccacatg

SEQ ID NO: 335670 - DNA, 25 bp, Homo sapien
aagattcctgccctacgtggcattg

SEQ ID NO: 335671 - DNA, 25 bp, Homo sapien
gacctggcctgatgtggagtagctc

SEQ ID NO: 335672 - DNA, 25 bp, Homo sapien
tatttacagtacatccctcttaggg

SEQ ID NO: 335673 - DNA, 25 bp, Homo sapien
atccctcttaggggcaagtctctga

SEQ ID NO: 335674 - DNA, 25 bp, Homo sapien
tcttaggggcaagtctctgactggt

SEQ ID NO: 335675 - DNA, 25 bp, Homo sapien
ttatttacagtacatccctcttagg

SEQ ID NO: 335676 - DNA, 25 bp, Homo sapien
ggccaaaggtgtagagctgcttccc

SEQ ID NO: 335677 - DNA, 25 bp, Homo sapien
ggtccttaaagttcatgggcacaga

SEQ ID NO: 335678 - DNA, 25 bp, Homo sapien
ttcgtgtcgcttcccaatgacgggc

SEQ ID NO: 335679 - DNA, 25 bp, Homo sapien
tgtagatcacaatgcggccaaaggt

SEQ ID NO: 335680 - DNA, 25 bp, Homo sapien
tccgctccgtgtgggtgagataggc

SEQ ID NO: 335681 - DNA, 25 bp, Homo sapien
tgtgggtgagataggcaatgttctc

SEQ ID NO: 335682 - DNA, 25 bp, Homo sapien
aggcaatgttctcccgtgctcctgg

SEQ ID NO: 335683 - DNA, 25 bp, Homo sapien
tgagataggcaatgttctcccgtgc

SEQ ID NO: 335684 - DNA, 25 bp, Homo sapien
gaacagatatagtacacgaacagtg

SEQ ID NO: 335685 - DNA, 25 bp, Homo sapien
cagatatagtacacgaacagtgaac

SEQ ID NO: 335686 - DNA, 25 bp, Homo sapien
gggaacagatatagtacacgaacag

SEQ ID NO: 335687 - DNA, 25 bp, Homo sapien
atatagtacacgaacagtgaactgc

SEQ ID NO: 335688 - DNA, 25 bp, Homo sapien
acaccgcccggttcatgatatcaag

SEQ ID NO: 335689 - DNA, 25 bp, Homo sapien
ttgggctgttactgagccaagagca

SEQ ID NO: 335690 - DNA, 25 bp, Homo sapien
ccaacccaggtaccacttggtgatc

SEQ ID NO: 335691 - DNA, 25 bp, Homo sapien
tgagaacatcgacttccaacccagg

SEQ ID NO: 335692 - DNA, 25 bp, Homo sapien
tcagcctggtagctaaagtgccctt

SEQ ID NO: 335693 - DNA, 25 bp, Homo sapien
ccatcgtggcaacaaatgaaggcaa

SEQ ID NO: 335694 - DNA, 25 bp, Homo sapien
tcagcttccatgtctacacaacagg

SEQ ID NO: 335695 - DNA, 25 bp, Homo sapien
gaaaaattacttgcatccatcgtgg

SEQ ID NO: 335696 - DNA, 25 bp, Homo sapien
gggaagaagtgcttttcaagaagtc

SEQ ID NO: 335697 - DNA, 25 bp, Homo sapien
ctgaagccacttggggaagaagtgc

SEQ ID NO: 335698 - DNA, 25 bp, Homo sapien
gaagaagtgcttttcaagaagtccc

SEQ ID NO: 335699 - DNA, 25 bp, Homo sapien
agaagtgcttttcaagaagtcccac

SEQ ID NO: 335700 - DNA, 25 bp, Homo sapien
caatagaatgcatccatgtgctgct

SEQ ID NO: 335701 - DNA, 25 bp, Homo sapien
gggttaatgactagctcaccaagac

SEQ ID NO: 335702 - DNA, 25 bp, Homo sapien
tcccagtcaatcacccaatagaatg

SEQ ID NO: 335703 - DNA, 25 bp, Homo sapien
tagagacagagatcatcccttccca

SEQ ID NO: 335704 - DNA, 25 bp, Homo sapien
gaaacccggtctgtaaggcacagct

SEQ ID NO: 335705 - DNA, 25 bp, Homo sapien
acccggtctgtaaggcacagcttta

SEQ ID NO: 335706 - DNA, 25 bp, Homo sapien
agagaaacccggtctgtaaggcaca

SEQ ID NO: 335707 - DNA, 25 bp, Homo sapien
ctggaagagaaacccggtctgtaag

SEQ ID NO: 335708 - DNA, 25 bp, Homo sapien
taagctcccgacatagcgattctta

SEQ ID NO: 335709 - DNA, 25 bp, Homo sapien
atttaagctcccgacatagcgattc

SEQ ID NO: 335710 - DNA, 25 bp, Homo sapien
gctcccgacatagcgattcttaaaa

SEQ ID NO: 335711 - DNA, 25 bp, Homo sapien
caaatttaagctcccgacatagcga

SEQ ID NO: 335712 - DNA, 25 bp, Homo sapien
caaggcacagagtccgatattgtca

SEQ ID NO: 335713 - DNA, 25 bp, Homo sapien
ccaatcgggaaaaccacaaggcaca

SEQ ID NO: 335714 - DNA, 25 bp, Homo sapien
caatggctgtcctattaccagaagc

SEQ ID NO: 335715 - DNA, 25 bp, Homo sapien
cagcggaaaggacccaagttacatt

SEQ ID NO: 335716 - DNA, 25 bp, Homo sapien
ttttgaccatgaatgcttcccagga

SEQ ID NO: 335717 - DNA, 25 bp, Homo sapien
gagccaggagtgaagacatccttcc

SEQ ID NO: 335718 - DNA, 25 bp, Homo sapien
gagtcgctggggtgccacttctgca

SEQ ID NO: 335719 - DNA, 25 bp, Homo sapien
tgagcttggcagaggagtcgctggg

SEQ ID NO: 335720 - DNA, 25 bp, Homo sapien
tccagccgtgcctgcataaggggca

SEQ ID NO: 335721 - DNA, 25 bp, Homo sapien
agccatgggtggatccaagagtgga

SEQ ID NO: 335722 - DNA, 25 bp, Homo sapien
cttactacggatgggggaatagagt

SEQ ID NO: 335723 - DNA, 25 bp, Homo sapien
ctgtgagcgggttccagttttccac

SEQ ID NO: 335724 - DNA, 25 bp, Homo sapien
gagttggtccagtatgttatctaag

SEQ ID NO: 335725 - DNA, 25 bp, Homo sapien
tgccactgggtgacaatatttcgaa

SEQ ID NO: 335726 - DNA, 25 bp, Homo sapien
ccatcgggtcacagttccttggctg

SEQ ID NO: 335727 - DNA, 25 bp, Homo sapien
tatccaaaaagtccaccatcgggtc

SEQ ID NO: 335728 - DNA, 25 bp, Homo sapien
tgtccgccatgggacaagagctggt

SEQ ID NO: 335729 - DNA, 25 bp, Homo sapien
tgatctcggtgccataagtgcagtc

SEQ ID NO: 335730 - DNA, 25 bp, Homo sapien
ggcatctgctgagaggtcctgtccg

SEQ ID NO: 335731 - DNA, 25 bp, Homo sapien
tctctaggaggcttttccacttaga

SEQ ID NO: 335732 - DNA, 25 bp, Homo sapien
cttcatgagtggatagacgatggcc

SEQ ID NO: 335733 - DNA, 25 bp, Homo sapien
ccttgctgaggttcgagatgacccg

SEQ ID NO: 335734 - DNA, 25 bp, Homo sapien
ggaagaggttgaccaccatgtcccg

SEQ ID NO: 335735 - DNA, 25 bp, Homo sapien
cagggtttcgaagatgcgggcacac

SEQ ID NO: 335736 - DNA, 25 bp, Homo sapien
gtagcggcagcccatcatcgggaac

SEQ ID NO: 335737 - DNA, 25 bp, Homo sapien
tgttgggactgtagcggcagcccat

SEQ ID NO: 335738 - DNA, 25 bp, Homo sapien
ggactgtagcggcagcccatcatcg

SEQ ID NO: 335739 - DNA, 25 bp, Homo sapien
cagctgttgggactgtagcggcagc

SEQ ID NO: 335740 - DNA, 25 bp, Homo sapien
gactgtagctgtagtagaccttctg

SEQ ID NO: 335741 - DNA, 25 bp, Homo sapien
gctgtagtagaccttctgctcccgg

SEQ ID NO: 335742 - DNA, 25 bp, Homo sapien
ggctgatctgactgtagctgtagta

SEQ ID NO: 335743 - DNA, 25 bp, Homo sapien
tgtgcttgtggctgatctgactgta

SEQ ID NO: 335744 - DNA, 25 bp, Homo sapien
gagggatgaaggttaacaccgctgc

SEQ ID NO: 335745 - DNA, 25 bp, Homo sapien
gatgaaggttaacaccgctgcagcc

SEQ ID NO: 335746 - DNA, 25 bp, Homo sapien
cttggaaaacatagagggatgaagg

SEQ ID NO: 335747 - DNA, 25 bp, Homo sapien
aacatagagggatgaaggttaacac

SEQ ID NO: 335748 - DNA, 25 bp, Homo sapien
gcttcttgctaatcctgcccttggc

SEQ ID NO: 335749 - DNA, 25 bp, Homo sapien
ggccttcaactcttccacggtcttg

SEQ ID NO: 335750 - DNA, 25 bp, Homo sapien
cacggtcttgtaagagtatttgggc

SEQ ID NO: 335751 - DNA, 25 bp, Homo sapien
cttgggtctttcctccactggctca

SEQ ID NO: 335752 - DNA, 25 bp, Homo sapien
gtcaaccacagggaagtcttgcatg

SEQ ID NO: 335753 - DNA, 25 bp, Homo sapien
aagtcttgcatggactgagtggtgc

SEQ ID NO: 335754 - DNA, 25 bp, Homo sapien
tctgcttggcttcaattgggttaat

SEQ ID NO: 335755 - DNA, 25 bp, Homo sapien
gtggtgcgctcggatccataagccc

SEQ ID NO: 335756 - DNA, 25 bp, Homo sapien
gcacatgcctccacacccaactgat

SEQ ID NO: 335757 - DNA, 25 bp, Homo sapien
aggcacatgcctccacacccaactg

SEQ ID NO: 335758 - DNA, 25 bp, Homo sapien
atttattcagggatggagtctcgct

SEQ ID NO: 335759 - DNA, 25 bp, Homo sapien
atttatttattcagggatggagtct

SEQ ID NO: 335760 - DNA, 25 bp, Homo sapien
gctgccgaagtccatgaaagatttg

SEQ ID NO: 335761 - DNA, 25 bp, Homo sapien
gtctttcccagctgccgaagtccat

SEQ ID NO: 335762 - DNA, 25 bp, Homo sapien
ccgtccagggacgtagcccatcttc

SEQ ID NO: 335763 - DNA, 25 bp, Homo sapien
ttcccagctgccgaagtccatgaaa

SEQ ID NO: 335764 - DNA, 25 bp, Homo sapien
taggaaagtcgtcctgcttaacagg

SEQ ID NO: 335765 - DNA, 25 bp, Homo sapien
ctttcttgagccctgcgctgatgaa

SEQ ID NO: 335766 - DNA, 25 bp, Homo sapien
agttgactggcgcagagtagtcacg

SEQ ID NO: 335767 - DNA, 25 bp, Homo sapien
ttctcttcgtcatcagaatcttcca

SEQ ID NO: 335768 - DNA, 25 bp, Homo sapien
tgcccacaccccgtaggtggcttct

SEQ ID NO: 335769 - DNA, 25 bp, Homo sapien
ggcctctcatcatccgagtctcgct

SEQ ID NO: 335770 - DNA, 25 bp, Homo sapien
cccagtcagtgatctcaaagttctc

SEQ ID NO: 335771 - DNA, 25 bp, Homo sapien
tggtctgccagtggcgctgtcggtt

SEQ ID NO: 335772 - DNA, 25 bp, Homo sapien
cccggtataagtgggacaatgacat

SEQ ID NO: 335773 - DNA, 25 bp, Homo sapien
catcccggtataagtgggacaatga

SEQ ID NO: 335774 - DNA, 25 bp, Homo sapien
tccccatcccggtataagtgggaca

SEQ ID NO: 335775 - DNA, 25 bp, Homo sapien
cccatcccggtataagtgggacaat

SEQ ID NO: 335776 - DNA, 25 bp, Homo sapien
tactgaggaaagaattatatctgga

SEQ ID NO: 335777 - DNA, 25 bp, Homo sapien
ggtatcttcttagatcccagattct

SEQ ID NO: 335778 - DNA, 25 bp, Homo sapien
tgaggaaagaattatatctggatcc

SEQ ID NO: 335779 - DNA, 25 bp, Homo sapien
aggtatcttcttagatcccagattc

SEQ ID NO: 335780 - DNA, 25 bp, Homo sapien
taagtgctcaagaaacgatagcttc

SEQ ID NO: 335781 - DNA, 25 bp, Homo sapien
gattaactaccataccaaccttaga

SEQ ID NO: 335782 - DNA, 25 bp, Homo sapien
caaccttagagaaggcttacaaagc

SEQ ID NO: 335783 - DNA, 25 bp, Homo sapien
gctgggtgaccagattcagttgtct

SEQ ID NO: 335784 - DNA, 25 bp, Homo sapien
agagccagtcaagttccaaagctga

SEQ ID NO: 335785 - DNA, 25 bp, Homo sapien
ccagtcaagttccaaagctgaagaa

SEQ ID NO: 335786 - DNA, 25 bp, Homo sapien
gagagccagtcaagttccaaagctg

SEQ ID NO: 335787 - DNA, 25 bp, Homo sapien
aaggagagccagtcaagttccaaag

SEQ ID NO: 335788 - DNA, 25 bp, Homo sapien
tcaggcctcgggcttgtctctctct

SEQ ID NO: 335789 - DNA, 25 bp, Homo sapien
ctcaggagtgctagaagtcaggcct

SEQ ID NO: 335790 - DNA, 25 bp, Homo sapien
aaactcaggagtgctagaagtcagg

SEQ ID NO: 335791 - DNA, 25 bp, Homo sapien
ctgctcatagggctcaaactcagga

SEQ ID NO: 335792 - DNA, 25 bp, Homo sapien
caacggcttggaccgaagctcgcct

SEQ ID NO: 335793 - DNA, 25 bp, Homo sapien
taaatgaatccaagccctaaatccc

SEQ ID NO: 335794 - DNA, 25 bp, Homo sapien
ctaaatcccagttgaccccaagcag

SEQ ID NO: 335795 - DNA, 25 bp, Homo sapien
cctcggcagagctgtctacgaaatg

SEQ ID NO: 335796 - DNA, 25 bp, Homo sapien
agcttcaccatccgcgcgagaagac

SEQ ID NO: 335797 - DNA, 25 bp, Homo sapien
tagtcgacagcggatgtcctgctgg

SEQ ID NO: 335798 - DNA, 25 bp, Homo sapien
gagggtccagcgtaccaaattcagc

SEQ ID NO: 335799 - DNA, 25 bp, Homo sapien
ccggcgcgccggaaatgacgttagt

SEQ ID NO: 335800 - DNA, 25 bp, Homo sapien
caaacgtagcagcttgcaacaccag

SEQ ID NO: 335801 - DNA, 25 bp, Homo sapien
catggttaccaagtgtcgttatgac

SEQ ID NO: 335802 - DNA, 25 bp, Homo sapien
tgaccagggctggatgaccaacttc

SEQ ID NO: 335803 - DNA, 25 bp, Homo sapien
gacatagtggctagcttccctcaaa

SEQ ID NO: 335804 - DNA, 25 bp, Homo sapien
gaaccctaaccctattcagtgcaca

SEQ ID NO: 335805 - DNA, 25 bp, Homo sapien
gcttctacaaccttaacatgctggg

SEQ ID NO: 335806 - DNA, 25 bp, Homo sapien
tatgtatgtctcgtaaaatattgcg

SEQ ID NO: 335807 - DNA, 25 bp, Homo sapien
caaatttaaccaccatcctgtatgg

SEQ ID NO: 335808 - DNA, 25 bp, Homo sapien
gcttatctggtatcaaggaccaccg

SEQ ID NO: 335809 - DNA, 25 bp, Homo sapien
gattctcaaagggacagtgtcacac

SEQ ID NO: 335810 - DNA, 25 bp, Homo sapien
tgaaaactgctaacagcctaagggc

SEQ ID NO: 335811 - DNA, 25 bp, Homo sapien
tatatgtgcaggagaacgtccactg

SEQ ID NO: 335812 - DNA, 25 bp, Homo sapien
tcattctctaccctggagtgtccag

SEQ ID NO: 335813 - DNA, 25 bp, Homo sapien
aattaaggaggatggcaaatctgtc

SEQ ID NO: 335814 - DNA, 25 bp, Homo sapien
tcaaagtaagggtcaataggagagg

SEQ ID NO: 335815 - DNA, 25 bp, Homo sapien
tcctctgtgaaactaggtagaactg

SEQ ID NO: 335816 - DNA, 25 bp, Homo sapien
cttggcaatgaagtcatttgcggag

SEQ ID NO: 335817 - DNA, 25 bp, Homo sapien
tcttcttggcaatgaagtcatttgc

SEQ ID NO: 335818 - DNA, 25 bp, Homo sapien
tggcaatgaagtcatttgcggagat

SEQ ID NO: 335819 - DNA, 25 bp, Homo sapien
ttcttggcaatgaagtcatttgcgg

SEQ ID NO: 335820 - DNA, 25 bp, Homo sapien
ttcttggaggcaagagaaggactca

SEQ ID NO: 335821 - DNA, 25 bp, Homo sapien
tggccagagagagtttaaatttaaa

SEQ ID NO: 335822 - DNA, 25 bp, Homo sapien
gaacatactgtcttcatccattcgc

SEQ ID NO: 335823 - DNA, 25 bp, Homo sapien
tatggacacagagcaaatgacagtg

SEQ ID NO: 335824 - DNA, 25 bp, Homo sapien
ggaaggacagaaaagtggcttttca

SEQ ID NO: 335825 - DNA, 25 bp, Homo sapien
gggaggaggtgctgttctggttcac

SEQ ID NO: 335826 - DNA, 25 bp, Homo sapien
aagtgggaggaggtgctgttctggt

SEQ ID NO: 335827 - DNA, 25 bp, Homo sapien
tcacgagcttcctaagtgggaggag

SEQ ID NO: 335828 - DNA, 25 bp, Homo sapien
gtgggaggaggtgctgttctggttc

SEQ ID NO: 335829 - DNA, 25 bp, Homo sapien
gaaaatatcctttcagattggctgg

SEQ ID NO: 335830 - DNA, 25 bp, Homo sapien
gctggtgttttatagtcccctttca

SEQ ID NO: 335831 - DNA, 25 bp, Homo sapien
ctttcagattggctggtgttttata

SEQ ID NO: 335832 - DNA, 25 bp, Homo sapien
gattggctggtgttttatagtcccc

SEQ ID NO: 335833 - DNA, 25 bp, Homo sapien
gctggcctgctgttagatgttagag

SEQ ID NO: 335834 - DNA, 25 bp, Homo sapien
gctaccagttggctttgagcttccc

SEQ ID NO: 335835 - DNA, 25 bp, Homo sapien
gacttgaggtgccttacaaacagat

SEQ ID NO: 335836 - DNA, 25 bp, Homo sapien
gagagactgaacatttcctcaggtg

SEQ ID NO: 335837 - DNA, 25 bp, Homo sapien
caggcttgatgacctggtccgtgga

SEQ ID NO: 335838 - DNA, 25 bp, Homo sapien
gggtttgcataagggtcatagccga

SEQ ID NO: 335839 - DNA, 25 bp, Homo sapien
tgacctggtccgtggaccgctcgat

SEQ ID NO: 335840 - DNA, 25 bp, Homo sapien
ggtcatagccgagctgagccagcat

SEQ ID NO: 335841 - DNA, 25 bp, Homo sapien
ggcgcctgagcggattccctgctca

SEQ ID NO: 335842 - DNA, 25 bp, Homo sapien
aggagacgctggagagggtagggca

SEQ ID NO: 335843 - DNA, 25 bp, Homo sapien
gagggtagggcagacccagatggcg

SEQ ID NO: 335844 - DNA, 25 bp, Homo sapien
tagggcagacccagatggcgcctga

SEQ ID NO: 335845 - DNA, 25 bp, Homo sapien
aaaggagaggagtaattgttgtcat

SEQ ID NO: 335846 - DNA, 25 bp, Homo sapien
gattttcttgcctggcgcctctgac

SEQ ID NO: 335847 - DNA, 25 bp, Homo sapien
tctgagtggaagcatcaggggctcc

SEQ ID NO: 335848 - DNA, 25 bp, Homo sapien
tttgggataatgaaacggaggctca

SEQ ID NO: 335849 - DNA, 25 bp, Homo sapien
gctgaggtcaaagcccgcaatggtg

SEQ ID NO: 335850 - DNA, 25 bp, Homo sapien
ttcatggtggaggacagcgtcgctc

SEQ ID NO: 335851 - DNA, 25 bp, Homo sapien
caggtagaccgaggacttgagcgta

SEQ ID NO: 335852 - DNA, 25 bp, Homo sapien
ggccttgccatagcggtattccacg

SEQ ID NO: 335853 - DNA, 25 bp, Homo sapien
cttcagcgacaggttagcgggcagc

SEQ ID NO: 335854 - DNA, 25 bp, Homo sapien
ggcttcagcgacaggttagcgggca

SEQ ID NO: 335855 - DNA, 25 bp, Homo sapien
cctggcctgagggcccgcttctggg

SEQ ID NO: 335856 - DNA, 25 bp, Homo sapien
tcagcgacaggttagcgggcagccc

SEQ ID NO: 335857 - DNA, 25 bp, Homo sapien
gtgtgccaaggctgtctgctggcag

SEQ ID NO: 335858 - DNA, 25 bp, Homo sapien
tgtgccaaggctgtctgctggcaga

SEQ ID NO: 335859 - DNA, 25 bp, Homo sapien
gtgccaaggctgtctgctggcagag

SEQ ID NO: 335860 - DNA, 25 bp, Homo sapien
agggtgagcacgactctaccacaca

SEQ ID NO: 335861 - DNA, 25 bp, Homo sapien
tatattaaatacacagcacccctgt

SEQ ID NO: 335862 - DNA, 25 bp, Homo sapien
ggaaatatgactcaactgctaccag

SEQ ID NO: 335863 - DNA, 25 bp, Homo sapien
tcatactcacatcagcccagtcagg

SEQ ID NO: 335864 - DNA, 25 bp, Homo sapien
gtgagtatgaaaccaggtagggcat

SEQ ID NO: 335865 - DNA, 25 bp, Homo sapien
cacccgcctgattgggctgatgtga

SEQ ID NO: 335866 - DNA, 25 bp, Homo sapien
gaggacatggcaccacccgcctgat

SEQ ID NO: 335867 - DNA, 25 bp, Homo sapien
tatgaaaccaggtagggcatgggaa

SEQ ID NO: 335868 - DNA, 25 bp, Homo sapien
tgcccacgtgctcaggctcagccat

SEQ ID NO: 335869 - DNA, 25 bp, Homo sapien
agggcccagtgcccacgtgctcagg

SEQ ID NO: 335870 - DNA, 25 bp, Homo sapien
gagcagggcccagtgcccacgtgct

SEQ ID NO: 335871 - DNA, 25 bp, Homo sapien
agtgcccacgtgctcaggctcagcc

SEQ ID NO: 335872 - DNA, 25 bp, Homo sapien
aacttgtcgggaggcgcataagaag

SEQ ID NO: 335873 - DNA, 25 bp, Homo sapien
cactgggcgactgtgcctcgctgag

SEQ ID NO: 335874 - DNA, 25 bp, Homo sapien
cgggaggcgcataagaagaagcacc

SEQ ID NO: 335875 - DNA, 25 bp, Homo sapien
aaacatgagcaaaggagatcctaag

SEQ ID NO: 335876 - DNA, 25 bp, Homo sapien
aggatccgaatgcacccaagaggac

SEQ ID NO: 335877 - DNA, 25 bp, Homo sapien
gatccgaatgcacccaagaggactc

SEQ ID NO: 335878 - DNA, 25 bp, Homo sapien
ccgaatgcacccaagaggactcctt

SEQ ID NO: 335879 - DNA, 25 bp, Homo sapien
gttcaaggatccgaatgcacccaag

SEQ ID NO: 335880 - DNA, 25 bp, Homo sapien
atggtattttcaatagccgctaacc

SEQ ID NO: 335881 - DNA, 25 bp, Homo sapien
tttagatagccctgtcctgatggta

SEQ ID NO: 335882 - DNA, 25 bp, Homo sapien
tatagttaacacactaccgaatgtg

SEQ ID NO: 335883 - DNA, 25 bp, Homo sapien
tgtacacaactcactccttttaaag

SEQ ID NO: 335884 - DNA, 25 bp, Homo sapien
gagacttcataatgccacctccaaa

SEQ ID NO: 335885 - DNA, 25 bp, Homo sapien
gggaaagccacttgctctagttgac

SEQ ID NO: 335886 - DNA, 25 bp, Homo sapien
caggccatgcaaagctggtagcccc

SEQ ID NO: 335887 - DNA, 25 bp, Homo sapien
gacgtaacacacagagtggagaggg

SEQ ID NO: 335888 - DNA, 25 bp, Homo sapien
agctggcagacccttggtggccaag

SEQ ID NO: 335889 - DNA, 25 bp, Homo sapien
tctggatccagtcttgttgctcacc

SEQ ID NO: 335890 - DNA, 25 bp, Homo sapien
tgctggcttttagctgggaggctcc

SEQ ID NO: 335891 - DNA, 25 bp, Homo sapien
gatcagtcagccttgcgatgggcct

SEQ ID NO: 335892 - DNA, 25 bp, Homo sapien
caatgcggatttgagtttccacaca

SEQ ID NO: 335893 - DNA, 25 bp, Homo sapien
caataagtttcctcagatatcaggg

SEQ ID NO: 335894 - DNA, 25 bp, Homo sapien
tcatctgtgaatcgggagagcagct

SEQ ID NO: 335895 - DNA, 25 bp, Homo sapien
gagagcagctaaatacacataaggg

SEQ ID NO: 335896 - DNA, 25 bp, Homo sapien
tcgtcctggtaatattttgggcata

SEQ ID NO: 335897 - DNA, 25 bp, Homo sapien
gggtagtgcatactacgaatccggt

SEQ ID NO: 335898 - DNA, 25 bp, Homo sapien
gaagcatgaggccttcgtcctggta

SEQ ID NO: 335899 - DNA, 25 bp, Homo sapien
taagagcagaatttgccagccccaa

SEQ ID NO: 335900 - DNA, 25 bp, Homo sapien
gactgtgatatcttcttcgttttca

SEQ ID NO: 335901 - DNA, 25 bp, Homo sapien
tgtgatatcttcttcgttttcactc

SEQ ID NO: 335902 - DNA, 25 bp, Homo sapien
gacagactgtgatatcttcttcgtt

SEQ ID NO: 335903 - DNA, 25 bp, Homo sapien
tgatatcttcttcgttttcactcac

SEQ ID NO: 335904 - DNA, 25 bp, Homo sapien
tagtaagacaaagccgggcacagta

SEQ ID NO: 335905 - DNA, 25 bp, Homo sapien
ggcaaggaattcactgtgaacagaa

SEQ ID NO: 335906 - DNA, 25 bp, Homo sapien
acaataatagtaagacaaagccggg

SEQ ID NO: 335907 - DNA, 25 bp, Homo sapien
atggcaaggaattcactgtgaacag

SEQ ID NO: 335908 - DNA, 25 bp, Homo sapien
ccagctcaacacaggggtgcactgt

SEQ ID NO: 335909 - DNA, 25 bp, Homo sapien
ggtgtctacacaacaaccgctgagg

SEQ ID NO: 335910 - DNA, 25 bp, Homo sapien
tcagaagtcggtgtctacacaacaa

SEQ ID NO: 335911 - DNA, 25 bp, Homo sapien
caaccgctgagggatgtcaaagcag

SEQ ID NO: 335912 - DNA, 25 bp, Homo sapien
tagccgacactcccccagtacccca

SEQ ID NO: 335913 - DNA, 25 bp, Homo sapien
tcagaggaagggtagccgacactcc

SEQ ID NO: 335914 - DNA, 25 bp, Homo sapien
cagaggaagggtagccgacactccc

SEQ ID NO: 335915 - DNA, 25 bp, Homo sapien
tggctgcccgccatctgagcacata

SEQ ID NO: 335916 - DNA, 25 bp, Homo sapien
tacaaagtcactcggcagacgggct

SEQ ID NO: 335917 - DNA, 25 bp, Homo sapien
ccaagatctcaagcagctctgaatg

SEQ ID NO: 335918 - DNA, 25 bp, Homo sapien
gcacataggataagaagtttctccc

SEQ ID NO: 335919 - DNA, 25 bp, Homo sapien
tcttcctctgtgaaaacgctgggtt

SEQ ID NO: 335920 - DNA, 25 bp, Homo sapien
ttcctctgtgaaaacgctgggttct

SEQ ID NO: 335921 - DNA, 25 bp, Homo sapien
tctcaaggaactcttcctctgtgaa

SEQ ID NO: 335922 - DNA, 25 bp, Homo sapien
actcttcctctgtgaaaacgctggg

SEQ ID NO: 335923 - DNA, 25 bp, Homo sapien
ctgagttcttccggtgcagcctctt

SEQ ID NO: 335924 - DNA, 25 bp, Homo sapien
tgagttcttccggtgcagcctcttg

SEQ ID NO: 335925 - DNA, 25 bp, Homo sapien
aaagagtgtgaaggaagaaacacag

SEQ ID NO: 335926 - DNA, 25 bp, Homo sapien
ctgaagcaaagagtgtgaaggaaga

SEQ ID NO: 335927 - DNA, 25 bp, Homo sapien
aagagtgtgaaggaagaaacacagg

SEQ ID NO: 335928 - DNA, 25 bp, Homo sapien
agtgtgaaggaagaaacacagggtc

SEQ ID NO: 335929 - DNA, 25 bp, Homo sapien
gttaccttacgacccaatcattcca

SEQ ID NO: 335930 - DNA, 25 bp, Homo sapien
aaagcatcagataccaaaggccaca

SEQ ID NO: 335931 - DNA, 25 bp, Homo sapien
gaagtactgatacaggctgcaaggg

SEQ ID NO: 335932 - DNA, 25 bp, Homo sapien
aaatgtatgtccaaagacctgtaca

SEQ ID NO: 335933 - DNA, 25 bp, Homo sapien
tgggtccgaagcgggaagcgtggta

SEQ ID NO: 335934 - DNA, 25 bp, Homo sapien
ggcagccccacgcacccagcgactc

SEQ ID NO: 335935 - DNA, 25 bp, Homo sapien
gtggcgagacgcggcgaggcagccc

SEQ ID NO: 335936 - DNA, 25 bp, Homo sapien
cgtggcgagacgcggcgaggcagcc

SEQ ID NO: 335937 - DNA, 25 bp, Homo sapien
acgcacccagcgactcccggctctc

SEQ ID NO: 335938 - DNA, 25 bp, Homo sapien
gctgcttttattatcgttgtaatta

SEQ ID NO: 335939 - DNA, 25 bp, Homo sapien
acatctgtttacagatccaggagaa

SEQ ID NO: 335940 - DNA, 25 bp, Homo sapien
tcccagtaactatgggggacctcaa

SEQ ID NO: 335941 - DNA, 25 bp, Homo sapien
attaagagcgaggaagtcacatccc

SEQ ID NO: 335942 - DNA, 25 bp, Homo sapien
ttggggcaaggtagcagagtgaggt

SEQ ID NO: 335943 - DNA, 25 bp, Homo sapien
gggcaaggtagcagagtgaggtgtg

SEQ ID NO: 335944 - DNA, 25 bp, Homo sapien
agggttggggcaaggtagcagagtg

SEQ ID NO: 335945 - DNA, 25 bp, Homo sapien
ggttggggcaaggtagcagagtgag

SEQ ID NO: 335946 - DNA, 25 bp, Homo sapien
aggtgccactgcttgtcacgcaggc

SEQ ID NO: 335947 - DNA, 25 bp, Homo sapien
tggaaggctccccactcattccagt

SEQ ID NO: 335948 - DNA, 25 bp, Homo sapien
aaggacccctcgaggtgccactgct

SEQ ID NO: 335949 - DNA, 25 bp, Homo sapien
cgcaggcgacgcagggactgcatct

SEQ ID NO: 335950 - DNA, 25 bp, Homo sapien
gtacccgcggtagccaggatactga

SEQ ID NO: 335951 - DNA, 25 bp, Homo sapien
tggtacccgcggtagccaggatact

SEQ ID NO: 335952 - DNA, 25 bp, Homo sapien
ccgcggtagccaggatactgatagc

SEQ ID NO: 335953 - DNA, 25 bp, Homo sapien
acccgcggtagccaggatactgata

SEQ ID NO: 335954 - DNA, 25 bp, Homo sapien
agacagcctgtctcgttgcctggca

SEQ ID NO: 335955 - DNA, 25 bp, Homo sapien
tcacggtgcctggttttattaagag

SEQ ID NO: 335956 - DNA, 25 bp, Homo sapien
gggaccaaatggagaatgcacctca

SEQ ID NO: 335957 - DNA, 25 bp, Homo sapien
cttttctaggaagtgagcatggtca

SEQ ID NO: 335958 - DNA, 25 bp, Homo sapien
gactgggtgcgtcgtccccctggat

SEQ ID NO: 335959 - DNA, 25 bp, Homo sapien
ccctggatctctatggtgttgccct

SEQ ID NO: 335960 - DNA, 25 bp, Homo sapien
ctgaagccgtagacccagagactgg

SEQ ID NO: 335961 - DNA, 25 bp, Homo sapien
tgcccacgcggtcactgaagccgta

SEQ ID NO: 335962 - DNA, 25 bp, Homo sapien
gttggactgctcaaaggcgacccag

SEQ ID NO: 335963 - DNA, 25 bp, Homo sapien
aggatgaacatctccccgcggaagt

SEQ ID NO: 335964 - DNA, 25 bp, Homo sapien
tgagccgatcactgcggtagctgct

SEQ ID NO: 335965 - DNA, 25 bp, Homo sapien
ccatgtgttccagcgagggtactcg

SEQ ID NO: 335966 - DNA, 25 bp, Homo sapien
ccttggagttggtgaaggattaagt

SEQ ID NO: 335967 - DNA, 25 bp, Homo sapien
tggagttggtgaaggattaagtgag

SEQ ID NO: 335968 - DNA, 25 bp, Homo sapien
tttccttggagttggtgaaggatta

SEQ ID NO: 335969 - DNA, 25 bp, Homo sapien
tgtttccttggagttggtgaaggat

SEQ ID NO: 335970 - DNA, 25 bp, Homo sapien
gtcgaagccacggtctgccagattt

SEQ ID NO: 335971 - DNA, 25 bp, Homo sapien
agttttccagttcgaagaccaccag

SEQ ID NO: 335972 - DNA, 25 bp, Homo sapien
aatgatgctgcgcacacggtcgaag

SEQ ID NO: 335973 - DNA, 25 bp, Homo sapien
cgagaattctgctcgacggccctgg

SEQ ID NO: 335974 - DNA, 25 bp, Homo sapien
caggaggcagttccgccgccttggc

SEQ ID NO: 335975 - DNA, 25 bp, Homo sapien
tgggttcaccgccactgtggccgag

SEQ ID NO: 335976 - DNA, 25 bp, Homo sapien
ttccgccgccttggcgctggtaata

SEQ ID NO: 335977 - DNA, 25 bp, Homo sapien
tagtgccgggactaggggatgttcc

SEQ ID NO: 335978 - DNA, 25 bp, Homo sapien
ctatgggtgactagagtccgacccc

SEQ ID NO: 335979 - DNA, 25 bp, Homo sapien
ggcgggcaggtgctatgggtgacta

SEQ ID NO: 335980 - DNA, 25 bp, Homo sapien
ccccattttatagtctggcagacat

SEQ ID NO: 335981 - DNA, 25 bp, Homo sapien
attttatagtctggcagacatcagg

SEQ ID NO: 335982 - DNA, 25 bp, Homo sapien
ctagtatgaattagtttccaaacga

SEQ ID NO: 335983 - DNA, 25 bp, Homo sapien
ccaggaaggggttccatggtcagtc

SEQ ID NO: 335984 - DNA, 25 bp, Homo sapien
cgagctttatgaaatggactgtgga

SEQ ID NO: 335985 - DNA, 25 bp, Homo sapien
gactgtggaagttgtaagtgttgct

SEQ ID NO: 335986 - DNA, 25 bp, Homo sapien
ctaggcccctttcgcgaaggctaag

SEQ ID NO: 335987 - DNA, 25 bp, Homo sapien
acctgtcatcgcatcaaagtttgac

SEQ ID NO: 335988 - DNA, 25 bp, Homo sapien
acagattatatggagtttcagctag

SEQ ID NO: 335989 - DNA, 25 bp, Homo sapien
ataacacaatactcctggactgtgg

SEQ ID NO: 335990 - DNA, 25 bp, Homo sapien
ctgtatccagtgaacatctgtactg

SEQ ID NO: 335991 - DNA, 25 bp, Homo sapien
actgtatccagtgaacatctgtact

SEQ ID NO: 335992 - DNA, 25 bp, Homo sapien
tcctttggtgatttccagaagcctc

SEQ ID NO: 335993 - DNA, 25 bp, Homo sapien
gatcctttggtgatttccagaagcc

SEQ ID NO: 335994 - DNA, 25 bp, Homo sapien
tctgatcctttggtgatttccagaa

SEQ ID NO: 335995 - DNA, 25 bp, Homo sapien
ctttggtgatttccagaagcctctg

SEQ ID NO: 335996 - DNA, 25 bp, Homo sapien
cagctgtccgtgaggcggatctgcc

SEQ ID NO: 335997 - DNA, 25 bp, Homo sapien
tccgtgaggcggatctgcccgtcgc

SEQ ID NO: 335998 - DNA, 25 bp, Homo sapien
agctgtccgtgaggcggatctgccc

SEQ ID NO: 335999 - DNA, 25 bp, Homo sapien
tgaggcggatctgcccgtcgccggc

SEQ ID NO: 336000 - DNA, 25 bp, Homo sapien
gggctggacgacacgcccggagtcc

SEQ ID NO: 336001 - DNA, 25 bp, Homo sapien
ctcggggctggacgacacgcccgga

SEQ ID NO: 336002 - DNA, 25 bp, Homo sapien
ccctcggccaggaagtgaccgctgt

SEQ ID NO: 336003 - DNA, 25 bp, Homo sapien
aagtgaccgctgtctgcgtcgcggc

SEQ ID NO: 336004 - DNA, 25 bp, Homo sapien
ccacccaggagatcaatttctttgt

SEQ ID NO: 336005 - DNA, 25 bp, Homo sapien
ctccacccaggagatcaatttcttt

SEQ ID NO: 336006 - DNA, 25 bp, Homo sapien
ggagatcaatttctttgttgaggtt

SEQ ID NO: 336007 - DNA, 25 bp, Homo sapien
atcaatttctttgttgaggttccac

SEQ ID NO: 336008 - DNA, 25 bp, Homo sapien
cctgcaggcattgtggcattcacag

SEQ ID NO: 336009 - DNA, 25 bp, Homo sapien
gcccagatgcatctcataaataagg

SEQ ID NO: 336010 - DNA, 25 bp, Homo sapien
tgcaggacggctgtggcgtggctgt

SEQ ID NO: 336011 - DNA, 25 bp, Homo sapien
aggaatgtactgttctgcaggacgg

SEQ ID NO: 336012 - DNA, 25 bp, Homo sapien
gaccctgggatgacaccgtcagcat

SEQ ID NO: 336013 - DNA, 25 bp, Homo sapien
ttagaaggcataagcagctggggtc

SEQ ID NO: 336014 - DNA, 25 bp, Homo sapien
ggagaccctgggatgacaccgtcag

SEQ ID NO: 336015 - DNA, 25 bp, Homo sapien
ctttagaaggcataagcagctgggg

SEQ ID NO: 336016 - DNA, 25 bp, Homo sapien
tccagactggtgacacagggtggtc

SEQ ID NO: 336017 - DNA, 25 bp, Homo sapien
tcttaaaagagtcctagtccagcct

SEQ ID NO: 336018 - DNA, 25 bp, Homo sapien
cacttcacatttggcgttagggcta

SEQ ID NO: 336019 - DNA, 25 bp, Homo sapien
taccgtctggaacttttgaaggctg

SEQ ID NO: 336020 - DNA, 25 bp, Homo sapien
gattctggccacagtgacttagcgg

SEQ ID NO: 336021 - DNA, 25 bp, Homo sapien
tcttcacacctgttgggatggagcc

SEQ ID NO: 336022 - DNA, 25 bp, Homo sapien
ggacttctctttggacctcgggtga

SEQ ID NO: 336023 - DNA, 25 bp, Homo sapien
cagactccggtggttttctagcccg

SEQ ID NO: 336024 - DNA, 25 bp, Homo sapien
cagtcccagcgtttgcaagagagca

SEQ ID NO: 336025 - DNA, 25 bp, Homo sapien
ggtgtgtactattcatcagcttggg

SEQ ID NO: 336026 - DNA, 25 bp, Homo sapien
cccagaatgcggagtggtgtgtact

SEQ ID NO: 336027 - DNA, 25 bp, Homo sapien
cagcttgtggcctcccttaggcaag

SEQ ID NO: 336028 - DNA, 25 bp, Homo sapien
tcaaggtgttaagacttggtttctg

SEQ ID NO: 336029 - DNA, 25 bp, Homo sapien
tccttggcttgcaggtggcaccttc

SEQ ID NO: 336030 - DNA, 25 bp, Homo sapien
ccagatcaaggtgttaagacttggt

SEQ ID NO: 336031 - DNA, 25 bp, Homo sapien
aagtccagatcaaggtgttaagact

SEQ ID NO: 336032 - DNA, 25 bp, Homo sapien
cagacacggagagtggcaggtacca

SEQ ID NO: 336033 - DNA, 25 bp, Homo sapien
ggacatatggaactggcagggctca

SEQ ID NO: 336034 - DNA, 25 bp, Homo sapien
tcagttcttaacagggtggtcaccg

SEQ ID NO: 336035 - DNA, 25 bp, Homo sapien
tattagggcttaaacctatgacctc

SEQ ID NO: 336036 - DNA, 25 bp, Homo sapien
gcagcatttcatggcctccgtagta

SEQ ID NO: 336037 - DNA, 25 bp, Homo sapien
gagatgatacccgaccctctaggga

SEQ ID NO: 336038 - DNA, 25 bp, Homo sapien
tgggataaaaccagctcacatggag

SEQ ID NO: 336039 - DNA, 25 bp, Homo sapien
gtagtaactcacaatgcttcctggg

SEQ ID NO: 336040 - DNA, 25 bp, Homo sapien
gatgtctactaagcacggttgtcag

SEQ ID NO: 336041 - DNA, 25 bp, Homo sapien
ttggagaaactagaggcctgacagt

SEQ ID NO: 336042 - DNA, 25 bp, Homo sapien
tgtcagagtgtaacaggatccagcc

SEQ ID NO: 336043 - DNA, 25 bp, Homo sapien
gattaacctactaacccagggctca

SEQ ID NO: 336044 - DNA, 25 bp, Homo sapien
tcctcagtggtagaatgcgagttct

SEQ ID NO: 336045 - DNA, 25 bp, Homo sapien
tgaggattcccgtcaatataagggt

SEQ ID NO: 336046 - DNA, 25 bp, Homo sapien
tctgataccttacaggttgcagtga

SEQ ID NO: 336047 - DNA, 25 bp, Homo sapien
gagtgagtttgagtaagtcacctca

SEQ ID NO: 336048 - DNA, 25 bp, Homo sapien
ttaacaaactaacggacctgcgtgc

SEQ ID NO: 336049 - DNA, 25 bp, Homo sapien
tgtaagatcagagtccactgggcca

SEQ ID NO: 336050 - DNA, 25 bp, Homo sapien
gggatggccctattaacaagactca

SEQ ID NO: 336051 - DNA, 25 bp, Homo sapien
tgcccctcaccggaaattagcagag

SEQ ID NO: 336052 - DNA, 25 bp, Homo sapien
tttcttacaccggaagtcaatgaag

SEQ ID NO: 336053 - DNA, 25 bp, Homo sapien
tcagaaagcggagcctttcttacac

SEQ ID NO: 336054 - DNA, 25 bp, Homo sapien
caccggaagtcaatgaagcgggtct

SEQ ID NO: 336055 - DNA, 25 bp, Homo sapien
cggaagtcaatgaagcgggtctttc

SEQ ID NO: 336056 - DNA, 25 bp, Homo sapien
caggaagtcagctagagagccgtct

SEQ ID NO: 336057 - DNA, 25 bp, Homo sapien
gagggacatttctgacaccggaagt

SEQ ID NO: 336058 - DNA, 25 bp, Homo sapien
tatttagtacacaggaagtcggcca

SEQ ID NO: 336059 - DNA, 25 bp, Homo sapien
gtgagaggactctttcccacacagg

SEQ ID NO: 336060 - DNA, 25 bp, Homo sapien
ttcagcagaaactaatggtttgtgg

SEQ ID NO: 336061 - DNA, 25 bp, Homo sapien
ttttctgactaacaacaggtctaac

SEQ ID NO: 336062 - DNA, 25 bp, Homo sapien
cctttcagcagaaactaatggtttg

SEQ ID NO: 336063 - DNA, 25 bp, Homo sapien
gttcctttcagcagaaactaatggt

SEQ ID NO: 336064 - DNA, 25 bp, Homo sapien
ttaacagcttggatgtcggcatggc

SEQ ID NO: 336065 - DNA, 25 bp, Homo sapien
cagtcttgcaaggttttggccattg

SEQ ID NO: 336066 - DNA, 25 bp, Homo sapien
ggtcagaagtatagccagtcttgca

SEQ ID NO: 336067 - DNA, 25 bp, Homo sapien
ggtttgaacttgactaacacaggga

SEQ ID NO: 336068 - DNA, 25 bp, Homo sapien
tattcagaagggttataactccgtc

SEQ ID NO: 336069 - DNA, 25 bp, Homo sapien
aatttagctgcaccgaggaaacggg

SEQ ID NO: 336070 - DNA, 25 bp, Homo sapien
gagcatacgcaagggattccaggtg

SEQ ID NO: 336071 - DNA, 25 bp, Homo sapien
tctctttagactgagggaacgtcct

SEQ ID NO: 336072 - DNA, 25 bp, Homo sapien
gctgactcagtctggtagtcagagt

SEQ ID NO: 336073 - DNA, 25 bp, Homo sapien
ggattggatcagtttagggacaggt

SEQ ID NO: 336074 - DNA, 25 bp, Homo sapien
ctgcaggagaagacagttcaaggca

SEQ ID NO: 336075 - DNA, 25 bp, Homo sapien
agaagacagttcaaggcagggcctg

SEQ ID NO: 336076 - DNA, 25 bp, Homo sapien
gcctggaggattggatcagtttagg

SEQ ID NO: 336077 - DNA, 25 bp, Homo sapien
tgtggactcagagctaaccaattgt

SEQ ID NO: 336078 - DNA, 25 bp, Homo sapien
cagagctaaccaattgtagttggca

SEQ ID NO: 336079 - DNA, 25 bp, Homo sapien
cttagaggcaggttgcttgggtcgt

SEQ ID NO: 336080 - DNA, 25 bp, Homo sapien
gaatgctagtctggtgctgagagcc

SEQ ID NO: 336081 - DNA, 25 bp, Homo sapien
atcagagaggatccaaagaggttct

SEQ ID NO: 336082 - DNA, 25 bp, Homo sapien
gacaccagtttctggggatcagaga

SEQ ID NO: 336083 - DNA, 25 bp, Homo sapien
ttctggaaggttcatgtggaatgta

SEQ ID NO: 336084 - DNA, 25 bp, Homo sapien
gttcatgtggaatgtagcaagagat

SEQ ID NO: 336085 - DNA, 25 bp, Homo sapien
tcaggctggaatgacggaggccccg

SEQ ID NO: 336086 - DNA, 25 bp, Homo sapien
cccgtggactctcacggtctttgat

SEQ ID NO: 336087 - DNA, 25 bp, Homo sapien
cacggtctttgatttcagcctctcg

SEQ ID NO: 336088 - DNA, 25 bp, Homo sapien
tttgatttcagcctctcgcccagca

SEQ ID NO: 336089 - DNA, 25 bp, Homo sapien
tcttgtgacacgagcaggtggattg

SEQ ID NO: 336090 - DNA, 25 bp, Homo sapien
tgacatgaccccaagggcgaaatcc

SEQ ID NO: 336091 - DNA, 25 bp, Homo sapien
ttgaaagcgggcctctgacatgacc

SEQ ID NO: 336092 - DNA, 25 bp, Homo sapien
aacatttctattaacctctgccagc

SEQ ID NO: 336093 - DNA, 25 bp, Homo sapien
ccagctgcccttttctgaagactgt

SEQ ID NO: 336094 - DNA, 25 bp, Homo sapien
cagctgcccttttctgaagactgtc

SEQ ID NO: 336095 - DNA, 25 bp, Homo sapien
tccatccgcacagctacagtagaag

SEQ ID NO: 336096 - DNA, 25 bp, Homo sapien
tttctccatccgcacagctacagta

SEQ ID NO: 336097 - DNA, 25 bp, Homo sapien
aaccgaggctcagatatgttggata

SEQ ID NO: 336098 - DNA, 25 bp, Homo sapien
gataacttgtccagagaagaattgg

SEQ ID NO: 336099 - DNA, 25 bp, Homo sapien
caaattccatgattgctgagcaccc

SEQ ID NO: 336100 - DNA, 25 bp, Homo sapien
gctgtagatatcagcatgaggctgt

SEQ ID NO: 336101 - DNA, 25 bp, Homo sapien
tttctgattgcttcaggactcccag

SEQ ID NO: 336102 - DNA, 25 bp, Homo sapien
ggactcccaggacccacccagacag

SEQ ID NO: 336103 - DNA, 25 bp, Homo sapien
tgctttctgattgcttcaggactcc

SEQ ID NO: 336104 - DNA, 25 bp, Homo sapien
gctccagcttctggagacatctcat

SEQ ID NO: 336105 - DNA, 25 bp, Homo sapien
aacatttttatgcacgtggtaacca

SEQ ID NO: 336106 - DNA, 25 bp, Homo sapien
ctgtctccaggtaccctcaaaaggg

SEQ ID NO: 336107 - DNA, 25 bp, Homo sapien
gggctgaaatttataccaatccttc

SEQ ID NO: 336108 - DNA, 25 bp, Homo sapien
gattctagagtatggatgggctgaa

SEQ ID NO: 336109 - DNA, 25 bp, Homo sapien
gagtgaaacgtttcctgcttccact

SEQ ID NO: 336110 - DNA, 25 bp, Homo sapien
acacactgttctgcaaacttgcttt

SEQ ID NO: 336111 - DNA, 25 bp, Homo sapien
tataaaggtgtaatatacctgaata

SEQ ID NO: 336112 - DNA, 25 bp, Homo sapien
actccaccccgcataactatgatta

SEQ ID NO: 336113 - DNA, 25 bp, Homo sapien
catatctctattaagaaacaaggca

SEQ ID NO: 336114 - DNA, 25 bp, Homo sapien
aaacttcattgtgccaggtaattcc

SEQ ID NO: 336115 - DNA, 25 bp, Homo sapien
aaaggcatacacttgtgcaacccat

SEQ ID NO: 336116 - DNA, 25 bp, Homo sapien
tctgatttctattaccgtgagttag

SEQ ID NO: 336117 - DNA, 25 bp, Homo sapien
acctagtggagaactaagctgcttc

SEQ ID NO: 336118 - DNA, 25 bp, Homo sapien
ggctgcacctagtggagaactaagc

SEQ ID NO: 336119 - DNA, 25 bp, Homo sapien
cctggggacgtgagtgccttgtact

SEQ ID NO: 336120 - DNA, 25 bp, Homo sapien
tgccttgtacttgttggctgcacct

SEQ ID NO: 336121 - DNA, 25 bp, Homo sapien
cctcgagctcgggtgatagcacaca

SEQ ID NO: 336122 - DNA, 25 bp, Homo sapien
tggtgcctccgagattagtacggcc

SEQ ID NO: 336123 - DNA, 25 bp, Homo sapien
cagacccagggacatcatggtgcct

SEQ ID NO: 336124 - DNA, 25 bp, Homo sapien
tgtcaaggtagcaacgccctcttta

SEQ ID NO: 336125 - DNA, 25 bp, Homo sapien
tgcacaggacaatcttctctacagc

SEQ ID NO: 336126 - DNA, 25 bp, Homo sapien
gaatacttgaagtccctcggcagac

SEQ ID NO: 336127 - DNA, 25 bp, Homo sapien
tgttgaagatggagactatccacgg

SEQ ID NO: 336128 - DNA, 25 bp, Homo sapien
cagtgccatgggattagcagcagcc

SEQ ID NO: 336129 - DNA, 25 bp, Homo sapien
cagctggtgctggattgattgtgcc

SEQ ID NO: 336130 - DNA, 25 bp, Homo sapien
cacaggaagtcgtggcagggctggt

SEQ ID NO: 336131 - DNA, 25 bp, Homo sapien
tccctaatttgctgggtccctccag

SEQ ID NO: 336132 - DNA, 25 bp, Homo sapien
gggaaggacgtgcattctctggacc

SEQ ID NO: 336133 - DNA, 25 bp, Homo sapien
taataacctcctcactcttgacgtt

SEQ ID NO: 336134 - DNA, 25 bp, Homo sapien
aactaagctaataacctcctcactc

SEQ ID NO: 336135 - DNA, 25 bp, Homo sapien
tcagcagtaattaaaactaagctaa

SEQ ID NO: 336136 - DNA, 25 bp, Homo sapien
cctcctcactcttgacgtttctgtg

SEQ ID NO: 336137 - DNA, 25 bp, Homo sapien
cctccaacttgtcgtttgccaggga

SEQ ID NO: 336138 - DNA, 25 bp, Homo sapien
ttgccagggactgacactttgaaat

SEQ ID NO: 336139 - DNA, 25 bp, Homo sapien
ctccaacttgtcgtttgccagggac

SEQ ID NO: 336140 - DNA, 25 bp, Homo sapien
tttgccagggactgacactttgaaa

SEQ ID NO: 336141 - DNA, 25 bp, Homo sapien
atctgcctagagagcattcccattg

SEQ ID NO: 336142 - DNA, 25 bp, Homo sapien
ctgcctagagagcattcccattgcc

SEQ ID NO: 336143 - DNA, 25 bp, Homo sapien
tctgcctagagagcattcccattgc

SEQ ID NO: 336144 - DNA, 25 bp, Homo sapien
tttcatctgcctagagagcattccc

SEQ ID NO: 336145 - DNA, 25 bp, Homo sapien
caaaggatgcgctgttaacacgtgt

SEQ ID NO: 336146 - DNA, 25 bp, Homo sapien
cctcgtgcggagtgaggcctactac

SEQ ID NO: 336147 - DNA, 25 bp, Homo sapien
tacattatgtcatgggcggtgagcc

SEQ ID NO: 336148 - DNA, 25 bp, Homo sapien
cacgtgtacggtaatgggctccctc

SEQ ID NO: 336149 - DNA, 25 bp, Homo sapien
ttggtatcaaattcagacgctgacg

SEQ ID NO: 336150 - DNA, 25 bp, Homo sapien
tatcaaattcagacgctgacgctcc

SEQ ID NO: 336151 - DNA, 25 bp, Homo sapien
attcagacgctgacgctccttggag

SEQ ID NO: 336152 - DNA, 25 bp, Homo sapien
caaattcagacgctgacgctccttg

SEQ ID NO: 336153 - DNA, 25 bp, Homo sapien
gaatccttcccactcaaaaggtcaa

SEQ ID NO: 336154 - DNA, 25 bp, Homo sapien
tgccctctgtctcgaatccttccca

SEQ ID NO: 336155 - DNA, 25 bp, Homo sapien
cttgccctctgtctcgaatccttcc

SEQ ID NO: 336156 - DNA, 25 bp, Homo sapien
ctgcaagaggatggaaaggatcact

SEQ ID NO: 336157 - DNA, 25 bp, Homo sapien
tcttgtgtcccttcaggttctctcc

SEQ ID NO: 336158 - DNA, 25 bp, Homo sapien
tgttgaattgatcttgtgtcccttc

SEQ ID NO: 336159 - DNA, 25 bp, Homo sapien
gatgacctggtgtataatttcaggg

SEQ ID NO: 336160 - DNA, 25 bp, Homo sapien
ggagatgacctggtgtataatttca

SEQ ID NO: 336161 - DNA, 25 bp, Homo sapien
gtgtgacttgtgcataaaatcccac

SEQ ID NO: 336162 - DNA, 25 bp, Homo sapien
gcataaaatcccaccattcaaggct

SEQ ID NO: 336163 - DNA, 25 bp, Homo sapien
ggctcttctctttagcttgtaaatc

SEQ ID NO: 336164 - DNA, 25 bp, Homo sapien
ctcttctctttagcttgtaaatcct

SEQ ID NO: 336165 - DNA, 25 bp, Homo sapien
catcaaggcggaagccacttctgag

SEQ ID NO: 336166 - DNA, 25 bp, Homo sapien
gaagactgcccgaggacatcaaggc

SEQ ID NO: 336167 - DNA, 25 bp, Homo sapien
tatcgacaggttgatggctgcccca

SEQ ID NO: 336168 - DNA, 25 bp, Homo sapien
caggctgggtgatagctagttatcg

SEQ ID NO: 336169 - DNA, 25 bp, Homo sapien
cagggcttggcgcttcccctcacca

SEQ ID NO: 336170 - DNA, 25 bp, Homo sapien
tagcccttcgcagaaagactgactt

SEQ ID NO: 336171 - DNA, 25 bp, Homo sapien
gagttttagcccttcgcagaaagac

SEQ ID NO: 336172 - DNA, 25 bp, Homo sapien
ggagcacacagagttttagcccttc

SEQ ID NO: 336173 - DNA, 25 bp, Homo sapien
cacagagttttagcccttcgcagaa

SEQ ID NO: 336174 - DNA, 25 bp, Homo sapien
gcgactctttcagccttgtaaaact

SEQ ID NO: 336175 - DNA, 25 bp, Homo sapien
ttgtaaaactgcccgtaccagccca

SEQ ID NO: 336176 - DNA, 25 bp, Homo sapien
gaaaaagccctcgtgtctttacagc

SEQ ID NO: 336177 - DNA, 25 bp, Homo sapien
tgtctttacagcctccggcgactct

SEQ ID NO: 336178 - DNA, 25 bp, Homo sapien
tccacgcggagcccctcttctgctt

SEQ ID NO: 336179 - DNA, 25 bp, Homo sapien
ttccacgcggagcccctcttctgct

SEQ ID NO: 336180 - DNA, 25 bp, Homo sapien
cttccacgcggagcccctcttctgc

SEQ ID NO: 336181 - DNA, 25 bp, Homo sapien
attttctcttctgggacgtatccaa

SEQ ID NO: 336182 - DNA, 25 bp, Homo sapien
caggatgttcgttcttaagattttc

SEQ ID NO: 336183 - DNA, 25 bp, Homo sapien
ttctcttctgggacgtatccaacat

SEQ ID NO: 336184 - DNA, 25 bp, Homo sapien
cctcctcaccagaggtcttcaggat

SEQ ID NO: 336185 - DNA, 25 bp, Homo sapien
cggcaagactccatccccgcctccc

SEQ ID NO: 336186 - DNA, 25 bp, Homo sapien
acacggcaagactccatccccgcct

SEQ ID NO: 336187 - DNA, 25 bp, Homo sapien
tgacacggcaagactccatccccgc

SEQ ID NO: 336188 - DNA, 25 bp, Homo sapien
caagactccatccccgcctccccca

SEQ ID NO: 336189 - DNA, 25 bp, Homo sapien
gaatcagagggacagactttctcag

SEQ ID NO: 336190 - DNA, 25 bp, Homo sapien
ggaggtgtatgtagccacttacaca

SEQ ID NO: 336191 - DNA, 25 bp, Homo sapien
caaatccctgactctatctcaagta

SEQ ID NO: 336192 - DNA, 25 bp, Homo sapien
taacaactggcaaatgttagtgctt

SEQ ID NO: 336193 - DNA, 25 bp, Homo sapien
aaccctgaaaaccaagctacgatgg

SEQ ID NO: 336194 - DNA, 25 bp, Homo sapien
ggcaaccctgaaaaccaagctacga

SEQ ID NO: 336195 - DNA, 25 bp, Homo sapien
cagccagagaaggcaaccctgaaaa

SEQ ID NO: 336196 - DNA, 25 bp, Homo sapien
ccaagctacgatggggaagggaaag

SEQ ID NO: 336197 - DNA, 25 bp, Homo sapien
gaaatactgcctcgaatcatactgc

SEQ ID NO: 336198 - DNA, 25 bp, Homo sapien
gtcatagccagtatataatcccggg

SEQ ID NO: 336199 - DNA, 25 bp, Homo sapien
tagctcattgctccttacgtgtcag

SEQ ID NO: 336200 - DNA, 25 bp, Homo sapien
tgttgaaagtagatggccaggcctg

SEQ ID NO: 336201 - DNA, 25 bp, Homo sapien
caggtctcagagacatgcgtcagct

SEQ ID NO: 336202 - DNA, 25 bp, Homo sapien
tcagagacatgcgtcagctcctcag

SEQ ID NO: 336203 - DNA, 25 bp, Homo sapien
ggtctcagagacatgcgtcagctcc

SEQ ID NO: 336204 - DNA, 25 bp, Homo sapien
gagacatgcgtcagctcctcagctt

SEQ ID NO: 336205 - DNA, 25 bp, Homo sapien
cccgggctgccacgagactggattt

SEQ ID NO: 336206 - DNA, 25 bp, Homo sapien
cgcccattacgaggtgtcatgttgc

SEQ ID NO: 336207 - DNA, 25 bp, Homo sapien
gaattccactctcttgcactgtatg

SEQ ID NO: 336208 - DNA, 25 bp, Homo sapien
gactggatttgtactgatatcgccc

SEQ ID NO: 336209 - DNA, 25 bp, Homo sapien
cttgtggagtggtttgatgatccat

SEQ ID NO: 336210 - DNA, 25 bp, Homo sapien
tgtggagtggtttgatgatccattg

SEQ ID NO: 336211 - DNA, 25 bp, Homo sapien
agtggtttgatgatccattgggtgt

SEQ ID NO: 336212 - DNA, 25 bp, Homo sapien
tgaggacaacctcagaaaattttta

SEQ ID NO: 336213 - DNA, 25 bp, Homo sapien
tgcaacggactgaaggcttcgagca

SEQ ID NO: 336214 - DNA, 25 bp, Homo sapien
cctgtaagaattcaggacgctcaga

SEQ ID NO: 336215 - DNA, 25 bp, Homo sapien
catggtggcgtccagctcgctcctc

SEQ ID NO: 336216 - DNA, 25 bp, Homo sapien
gacgctcagagccccatggtggcgt

SEQ ID NO: 336217 - DNA, 25 bp, Homo sapien
cctatatataacggcgaacacgaat

SEQ ID NO: 336218 - DNA, 25 bp, Homo sapien
atcctatatataacggcgaacacga

SEQ ID NO: 336219 - DNA, 25 bp, Homo sapien
tcctatatataacggcgaacacgaa

SEQ ID NO: 336220 - DNA, 25 bp, Homo sapien
tgcttctttctccatagctccagga

SEQ ID NO: 336221 - DNA, 25 bp, Homo sapien
gaaagcgcatgacatcagactgctt

SEQ ID NO: 336222 - DNA, 25 bp, Homo sapien
gcttctttctccatagctccaggat

SEQ ID NO: 336223 - DNA, 25 bp, Homo sapien
tctttctccatagctccaggatgta

SEQ ID NO: 336224 - DNA, 25 bp, Homo sapien
cttggcttatctgatggctgccgcc

SEQ ID NO: 336225 - DNA, 25 bp, Homo sapien
tatctgatggctgccgccagaccgg

SEQ ID NO: 336226 - DNA, 25 bp, Homo sapien
ggcttatctgatggctgccgccaga

SEQ ID NO: 336227 - DNA, 25 bp, Homo sapien
cttatctgatggctgccgccagacc

SEQ ID NO: 336228 - DNA, 25 bp, Homo sapien
ttgtcatttcgggtgataatttgca

SEQ ID NO: 336229 - DNA, 25 bp, Homo sapien
cttgtcatttcgggtgataatttgc

SEQ ID NO: 336230 - DNA, 25 bp, Homo sapien
tattcttgtcatttcgggtgataat

SEQ ID NO: 336231 - DNA, 25 bp, Homo sapien
ttcttgtcatttcgggtgataattt

SEQ ID NO: 336232 - DNA, 25 bp, Homo sapien
cctgctgcaccaaatactctgctct

SEQ ID NO: 336233 - DNA, 25 bp, Homo sapien
ccaatgtggatggtgctgacatcca

SEQ ID NO: 336234 - DNA, 25 bp, Homo sapien
acatccaaggagaactttagaaggg

SEQ ID NO: 336235 - DNA, 25 bp, Homo sapien
gtccagaatgactatacagaagagg

SEQ ID NO: 336236 - DNA, 25 bp, Homo sapien
gggttgggtccagaatgactataca

SEQ ID NO: 336237 - DNA, 25 bp, Homo sapien
gctggttctccaatgatgataccca

SEQ ID NO: 336238 - DNA, 25 bp, Homo sapien
gtcctgaaacatcggtgggcactgg

SEQ ID NO: 336239 - DNA, 25 bp, Homo sapien
tgctctttggaatgctggttctcca

SEQ ID NO: 336240 - DNA, 25 bp, Homo sapien
cttggtcctgaaacatcggtgggca

SEQ ID NO: 336241 - DNA, 25 bp, Homo sapien
caggtacttttaattggtgcagggt

SEQ ID NO: 336242 - DNA, 25 bp, Homo sapien
ataacaggtacttttaattggtgca

SEQ ID NO: 336243 - DNA, 25 bp, Homo sapien
aacaggtacttttaattggtgcagg

SEQ ID NO: 336244 - DNA, 25 bp, Homo sapien
acaggtacttttaattggtgcaggg

SEQ ID NO: 336245 - DNA, 25 bp, Homo sapien
tcagttccaaatgatgctgaaggtg

SEQ ID NO: 336246 - DNA, 25 bp, Homo sapien
aagagaagactccagcttttgccat

SEQ ID NO: 336247 - DNA, 25 bp, Homo sapien
catcagtgcctgcaggtgtgatgtg

SEQ ID NO: 336248 - DNA, 25 bp, Homo sapien
tgtgatgtgggtaggactttagctg

SEQ ID NO: 336249 - DNA, 25 bp, Homo sapien
tgtgggtaggactttagctgggtgt

SEQ ID NO: 336250 - DNA, 25 bp, Homo sapien
ggtagactttccatactccatcaag

SEQ ID NO: 336251 - DNA, 25 bp, Homo sapien
tatgtggtagactttccatactcca

SEQ ID NO: 336252 - DNA, 25 bp, Homo sapien
tgtggtagactttccatactccatc

SEQ ID NO: 336253 - DNA, 25 bp, Homo sapien
ctatgtggtagactttccatactcc

SEQ ID NO: 336254 - DNA, 25 bp, Homo sapien
ccgtggcttggactcttgaggagat

SEQ ID NO: 336255 - DNA, 25 bp, Homo sapien
gaaccgtggcttggactcttgagga

SEQ ID NO: 336256 - DNA, 25 bp, Homo sapien
caggaaccgtggcttggactcttga

SEQ ID NO: 336257 - DNA, 25 bp, Homo sapien
aaacaggaaccgtggcttggactct

SEQ ID NO: 336258 - DNA, 25 bp, Homo sapien
ggaggagatgggcactccagtccat

SEQ ID NO: 336259 - DNA, 25 bp, Homo sapien
tgtgggcgaggtaagctgagtccac

SEQ ID NO: 336260 - DNA, 25 bp, Homo sapien
caaatgtgggcgaggtaagctgagt

SEQ ID NO: 336261 - DNA, 25 bp, Homo sapien
ctgagtccacaaccggaagggccag

SEQ ID NO: 336262 - DNA, 25 bp, Homo sapien
ctgttaaacctgccatcttggagtt

SEQ ID NO: 336263 - DNA, 25 bp, Homo sapien
tgttaaacctgccatcttggagttg

SEQ ID NO: 336264 - DNA, 25 bp, Homo sapien
atggaaatacaggaagaaaggaatt

SEQ ID NO: 336265 - DNA, 25 bp, Homo sapien
aatggaaatacaggaagaaaggaat

SEQ ID NO: 336266 - DNA, 25 bp, Homo sapien
tggaaatacaggaagaaaggaatta

SEQ ID NO: 336267 - DNA, 25 bp, Homo sapien
ctaaaatggaaatacaggaagaaag

SEQ ID NO: 336268 - DNA, 25 bp, Homo sapien
tccatgccattccttactgtgtact

SEQ ID NO: 336269 - DNA, 25 bp, Homo sapien
catgccattccttactgtgtactgg

SEQ ID NO: 336270 - DNA, 25 bp, Homo sapien
ccattccttactgtgtactggactg

SEQ ID NO: 336271 - DNA, 25 bp, Homo sapien
tgccattccttactgtgtactggac

SEQ ID NO: 336272 - DNA, 25 bp, Homo sapien
tgaggcaggacagcataaaattatc

SEQ ID NO: 336273 - DNA, 25 bp, Homo sapien
ccaaactttgaatggaaattgagtg

SEQ ID NO: 336274 - DNA, 25 bp, Homo sapien
tttcatttcggagggaggccattcc

SEQ ID NO: 336275 - DNA, 25 bp, Homo sapien
gaaattacaaaatcgctcggaactg

SEQ ID NO: 336276 - DNA, 25 bp, Homo sapien
gtggtcttatccctggacattacag

SEQ ID NO: 336277 - DNA, 25 bp, Homo sapien
ggtcgtggtcttatccctggacatt

SEQ ID NO: 336278 - DNA, 25 bp, Homo sapien
tcaggtcgtggtcttatccctggac

SEQ ID NO: 336279 - DNA, 25 bp, Homo sapien
aaagcagggtatgaggctgggttgg

SEQ ID NO: 336280 - DNA, 25 bp, Homo sapien
caattatccagcgtcagatatttct

SEQ ID NO: 336281 - DNA, 25 bp, Homo sapien
aattatccagcgtcagatatttctg

SEQ ID NO: 336282 - DNA, 25 bp, Homo sapien
ttatccagcgtcagatatttctgtt

SEQ ID NO: 336283 - DNA, 25 bp, Homo sapien
tcaattatccagcgtcagatatttc

SEQ ID NO: 336284 - DNA, 25 bp, Homo sapien
agatcagtgccttatcttcctggtc

SEQ ID NO: 336285 - DNA, 25 bp, Homo sapien
ctgccccaaatggaggggtgtagct

SEQ ID NO: 336286 - DNA, 25 bp, Homo sapien
ccacctgggagttgttgaaagacag

SEQ ID NO: 336287 - DNA, 25 bp, Homo sapien
acaggaagatcagtgccttatcttc

SEQ ID NO: 336288 - DNA, 25 bp, Homo sapien
ggtttaatgaccagacgctggaaac

SEQ ID NO: 336289 - DNA, 25 bp, Homo sapien
ttaatgaccagacgctggaaactca

SEQ ID NO: 336290 - DNA, 25 bp, Homo sapien
tattggtttaatgaccagacgctgg

SEQ ID NO: 336291 - DNA, 25 bp, Homo sapien
aaatattggtttaatgaccagacgc

SEQ ID NO: 336292 - DNA, 25 bp, Homo sapien
catcgtctttgcagccactctgatt

SEQ ID NO: 336293 - DNA, 25 bp, Homo sapien
tactacaaccatcgtctttgcagcc

SEQ ID NO: 336294 - DNA, 25 bp, Homo sapien
caaagcctcattactacaaccatcg

SEQ ID NO: 336295 - DNA, 25 bp, Homo sapien
gcctcattactacaaccatcgtctt

SEQ ID NO: 336296 - DNA, 25 bp, Homo sapien
cgccttcccacttgccgtttgcagg

SEQ ID NO: 336297 - DNA, 25 bp, Homo sapien
atcaatcagcgccttcccacttgcc

SEQ ID NO: 336298 - DNA, 25 bp, Homo sapien
agcgccttcccacttgccgtttgca

SEQ ID NO: 336299 - DNA, 25 bp, Homo sapien
aatcagcgccttcccacttgccgtt

SEQ ID NO: 336300 - DNA, 25 bp, Homo sapien
gaaggagaagaaggtggagctgggg

SEQ ID NO: 336301 - DNA, 25 bp, Homo sapien
gggagaaggagaagaaggtggagct

SEQ ID NO: 336302 - DNA, 25 bp, Homo sapien
gagaaggagaagaaggtggagctgg

SEQ ID NO: 336303 - DNA, 25 bp, Homo sapien
ctgggagaaggagaagaaggtggag

SEQ ID NO: 336304 - DNA, 25 bp, Homo sapien
agccaaacaacagcttgacattttc

SEQ ID NO: 336305 - DNA, 25 bp, Homo sapien
ccacccccatccccctcaatccagc

SEQ ID NO: 336306 - DNA, 25 bp, Homo sapien
cagccaaacaacagcttgacatttt

SEQ ID NO: 336307 - DNA, 25 bp, Homo sapien
gaagccaacatgtcagccctcctgc

SEQ ID NO: 336308 - DNA, 25 bp, Homo sapien
ctgcccgtctataggaagccaacat

SEQ ID NO: 336309 - DNA, 25 bp, Homo sapien
tgtgccagctgcccgtctataggaa

SEQ ID NO: 336310 - DNA, 25 bp, Homo sapien
tcagttcccattgaccatgacccct

SEQ ID NO: 336311 - DNA, 25 bp, Homo sapien
cagctggcagcgtaacggagagcca

SEQ ID NO: 336312 - DNA, 25 bp, Homo sapien
cagcccatccgagtggccgaggtgc

SEQ ID NO: 336313 - DNA, 25 bp, Homo sapien
acaccaagtgcagcggagccagctg

SEQ ID NO: 336314 - DNA, 25 bp, Homo sapien
cgaggtgccagccaccgggtgctct

SEQ ID NO: 336315 - DNA, 25 bp, Homo sapien
ccctcattagaaagtggctgttctt

SEQ ID NO: 336316 - DNA, 25 bp, Homo sapien
tctgcctgaagttcgtggctcccct

SEQ ID NO: 336317 - DNA, 25 bp, Homo sapien
gtggctcccctcattagaaagtggc

SEQ ID NO: 336318 - DNA, 25 bp, Homo sapien
tctctgcctgaagttcgtggctccc

SEQ ID NO: 336319 - DNA, 25 bp, Homo sapien
tgaatatttcctgcggtccctgagc

SEQ ID NO: 336320 - DNA, 25 bp, Homo sapien
tggagaagccatagtcgcatagagg

SEQ ID NO: 336321 - DNA, 25 bp, Homo sapien
ggcttctattgatgcctgggaatca

SEQ ID NO: 336322 - DNA, 25 bp, Homo sapien
atgcaatttgaaaggtggagaagcc

SEQ ID NO: 336323 - DNA, 25 bp, Homo sapien
cagtgtggcaaaatgcatgtaccaa

SEQ ID NO: 336324 - DNA, 25 bp, Homo sapien
ttaattttgtctggatctgcaaggg

SEQ ID NO: 336325 - DNA, 25 bp, Homo sapien
ggaagaatcaattgccctgctgccg

SEQ ID NO: 336326 - DNA, 25 bp, Homo sapien
ggtagctgttaatagaataggcttt

SEQ ID NO: 336327 - DNA, 25 bp, Homo sapien
gatatataagatagggtcccagtcc

SEQ ID NO: 336328 - DNA, 25 bp, Homo sapien
cattggctcagataacagggttcta

SEQ ID NO: 336329 - DNA, 25 bp, Homo sapien
tcaagcacaggagatacatacggat

SEQ ID NO: 336330 - DNA, 25 bp, Homo sapien
catagacttaggtgtgcatgccaga

SEQ ID NO: 336331 - DNA, 25 bp, Homo sapien
tgttagcagagtccttacccacgtc

SEQ ID NO: 336332 - DNA, 25 bp, Homo sapien
tacccacgtctaaggcaatcagcat

SEQ ID NO: 336333 - DNA, 25 bp, Homo sapien
caatcagcatgccttctcggagctc

SEQ ID NO: 336334 - DNA, 25 bp, Homo sapien
gaattagtaatatcacgcgccatgg

SEQ ID NO: 336335 - DNA, 25 bp, Homo sapien
gcactctgaagatacaggttcctct

SEQ ID NO: 336336 - DNA, 25 bp, Homo sapien
tcctctgggtaatgtagaataagct

SEQ ID NO: 336337 - DNA, 25 bp, Homo sapien
acaggcccatagcactctgaagata

SEQ ID NO: 336338 - DNA, 25 bp, Homo sapien
gaagatacaggttcctctgggtaat

SEQ ID NO: 336339 - DNA, 25 bp, Homo sapien
taatgagcagccctggcgaatgagg

SEQ ID NO: 336340 - DNA, 25 bp, Homo sapien
tcaggttcaagaggagcgtgagccc

SEQ ID NO: 336341 - DNA, 25 bp, Homo sapien
gatccaggccttcggtaatgagcag

SEQ ID NO: 336342 - DNA, 25 bp, Homo sapien
gcctggctgcagacataacctggag

SEQ ID NO: 336343 - DNA, 25 bp, Homo sapien
agagccccagggtccctcaaaatag

SEQ ID NO: 336344 - DNA, 25 bp, Homo sapien
aaggatctgagtccaatggctgtca

SEQ ID NO: 336345 - DNA, 25 bp, Homo sapien
tcaggagaaattgagtggcaaggca

SEQ ID NO: 336346 - DNA, 25 bp, Homo sapien
ggcaaggcagtagatgtaaaaacac

SEQ ID NO: 336347 - DNA, 25 bp, Homo sapien
ccatcggccttgcactgtctctgca

SEQ ID NO: 336348 - DNA, 25 bp, Homo sapien
ctctgttgattggtccagttgggtc

SEQ ID NO: 336349 - DNA, 25 bp, Homo sapien
tgcccatcggccttgcactgtctct

SEQ ID NO: 336350 - DNA, 25 bp, Homo sapien
ggtccagttgggtcccgctgcccat

SEQ ID NO: 336351 - DNA, 25 bp, Homo sapien
gcacatccagtttgttgctgcaaat

SEQ ID NO: 336352 - DNA, 25 bp, Homo sapien
gcattctagcacatccagtttgttg

SEQ ID NO: 336353 - DNA, 25 bp, Homo sapien
ttgagtgatagttttattctttccc

SEQ ID NO: 336354 - DNA, 25 bp, Homo sapien
gaatctttgagtgatagttttattc

SEQ ID NO: 336355 - DNA, 25 bp, Homo sapien
tagtccactcgtttaattctgcagc

SEQ ID NO: 336356 - DNA, 25 bp, Homo sapien
gaaatagcttgtagcactgagggag

SEQ ID NO: 336357 - DNA, 25 bp, Homo sapien
tcgatgaagcgcttattagtcatgc

SEQ ID NO: 336358 - DNA, 25 bp, Homo sapien
cgattgaatactgccttcgatgaag

SEQ ID NO: 336359 - DNA, 25 bp, Homo sapien
tctcaatgaggcagctgagcgtgaa

SEQ ID NO: 336360 - DNA, 25 bp, Homo sapien
tattgaccagatgccgggatggagt

SEQ ID NO: 336361 - DNA, 25 bp, Homo sapien
gagctgcagacctgaatctcaatga

SEQ ID NO: 336362 - DNA, 25 bp, Homo sapien
caaattgccccatgcataatgcaga

SEQ ID NO: 336363 - DNA, 25 bp, Homo sapien
tgtgagaaaggaggcgtgccggcct

SEQ ID NO: 336364 - DNA, 25 bp, Homo sapien
cctgatagacaaggtcgcatcccag

SEQ ID NO: 336365 - DNA, 25 bp, Homo sapien
gacaaggtcgcatcccagcagctgt

SEQ ID NO: 336366 - DNA, 25 bp, Homo sapien
agaaaggaggcgtgccggcctggca

SEQ ID NO: 336367 - DNA, 25 bp, Homo sapien
ggaagtatttacacgcagcttccta

SEQ ID NO: 336368 - DNA, 25 bp, Homo sapien
gttcttggagctcggaggatactta

SEQ ID NO: 336369 - DNA, 25 bp, Homo sapien
gtatttacacgcagcttcctattta

SEQ ID NO: 336370 - DNA, 25 bp, Homo sapien
ttacccagttcttggagctcggagg

SEQ ID NO: 336371 - DNA, 25 bp, Homo sapien
taaagctgtctggaggctgctgcaa

SEQ ID NO: 336372 - DNA, 25 bp, Homo sapien
cacggttgccagtggctgatcaata

SEQ ID NO: 336373 - DNA, 25 bp, Homo sapien
aagctccacggttgccagtggctga

SEQ ID NO: 336374 - DNA, 25 bp, Homo sapien
tgctgcaagctccacggttgccagt

SEQ ID NO: 336375 - DNA, 25 bp, Homo sapien
ctggctggaaggcattagagctgta

SEQ ID NO: 336376 - DNA, 25 bp, Homo sapien
gctggaaggcattagagctgtaaat

SEQ ID NO: 336377 - DNA, 25 bp, Homo sapien
ggaaggcattagagctgtaaatggc

SEQ ID NO: 336378 - DNA, 25 bp, Homo sapien
gaaggcattagagctgtaaatggct

SEQ ID NO: 336379 - DNA, 25 bp, Homo sapien
gagctggcctcataaggcaacttac

SEQ ID NO: 336380 - DNA, 25 bp, Homo sapien
gaggcagagggcccgtgggaaggtg

SEQ ID NO: 336381 - DNA, 25 bp, Homo sapien
cagagggcccgtgggaaggtgagct

SEQ ID NO: 336382 - DNA, 25 bp, Homo sapien
aggtgagctggcctcataaggcaac

SEQ ID NO: 336383 - DNA, 25 bp, Homo sapien
cacaggatttccattgattgtctct

SEQ ID NO: 336384 - DNA, 25 bp, Homo sapien
tcttgtgattggaggtcagtttcag

SEQ ID NO: 336385 - DNA, 25 bp, Homo sapien
tggaggactggagactcatgagcaa

SEQ ID NO: 336386 - DNA, 25 bp, Homo sapien
ggccagggacagtattttcttgtga

SEQ ID NO: 336387 - DNA, 25 bp, Homo sapien
gaccccaccagtcagactcagagga

SEQ ID NO: 336388 - DNA, 25 bp, Homo sapien
ggcaccaaattgtagtgaccccacc

SEQ ID NO: 336389 - DNA, 25 bp, Homo sapien
gatatccaaggaccctgggcagcat

SEQ ID NO: 336390 - DNA, 25 bp, Homo sapien
gactcagaggatatccaaggaccct

SEQ ID NO: 336391 - DNA, 25 bp, Homo sapien
cgctcgaccctggaaaaaattgact

SEQ ID NO: 336392 - DNA, 25 bp, Homo sapien
tttctgcctgactgctcgagagtta

SEQ ID NO: 336393 - DNA, 25 bp, Homo sapien
cggcgctcgaccctggaaaaaattg

SEQ ID NO: 336394 - DNA, 25 bp, Homo sapien
tctgcctgactgctcgagagttaca

SEQ ID NO: 336395 - DNA, 25 bp, Homo sapien
aacaggatacgggaggctgctcaag

SEQ ID NO: 336396 - DNA, 25 bp, Homo sapien
gaggctgctcaaggagtaatcactg

SEQ ID NO: 336397 - DNA, 25 bp, Homo sapien
ctctgcttgtaggaagagcaggaac

SEQ ID NO: 336398 - DNA, 25 bp, Homo sapien
gttcctccagctgtatgtatgtgca

SEQ ID NO: 336399 - DNA, 25 bp, Homo sapien
aactgcaggccaaaatgccagtact

SEQ ID NO: 336400 - DNA, 25 bp, Homo sapien
ggaacgaggaccagaacacctgaat

SEQ ID NO: 336401 - DNA, 25 bp, Homo sapien
cttgcaggaacgaggaccagaacac

SEQ ID NO: 336402 - DNA, 25 bp, Homo sapien
ccagtactcacccttgcaggaacga

SEQ ID NO: 336403 - DNA, 25 bp, Homo sapien
ttggccacccggcatgaaaacattc

SEQ ID NO: 336404 - DNA, 25 bp, Homo sapien
gccacccggcatgaaaacattctga

SEQ ID NO: 336405 - DNA, 25 bp, Homo sapien
acccggcatgaaaacattctgaatc

SEQ ID NO: 336406 - DNA, 25 bp, Homo sapien
tggccacccggcatgaaaacattct

SEQ ID NO: 336407 - DNA, 25 bp, Homo sapien
cctgccatctgcaggctgccaatca

SEQ ID NO: 336408 - DNA, 25 bp, Homo sapien
ctgccatctgcaggctgccaatcat

SEQ ID NO: 336409 - DNA, 25 bp, Homo sapien
ccctgccatctgcaggctgccaatc

SEQ ID NO: 336410 - DNA, 25 bp, Homo sapien
agcttctggtcgtagttagtaactg

SEQ ID NO: 336411 - DNA, 25 bp, Homo sapien
gagcttctggtcgtagttagtaact

SEQ ID NO: 336412 - DNA, 25 bp, Homo sapien
cctgagcttctggtcgtagttagta

SEQ ID NO: 336413 - DNA, 25 bp, Homo sapien
tgagcttctggtcgtagttagtaac

SEQ ID NO: 336414 - DNA, 25 bp, Homo sapien
cctgaacctaagacgcatttctgat

SEQ ID NO: 336415 - DNA, 25 bp, Homo sapien
catttctgatcttctgtggcgaggg

SEQ ID NO: 336416 - DNA, 25 bp, Homo sapien
gcgagggtggcagggttgccggaga

SEQ ID NO: 336417 - DNA, 25 bp, Homo sapien
ggagccacgtcggacctgccaacat

SEQ ID NO: 336418 - DNA, 25 bp, Homo sapien
ctttgcgttcccgttgtgtgagtct

SEQ ID NO: 336419 - DNA, 25 bp, Homo sapien
accctctttgcgttcccgttgtgtg

SEQ ID NO: 336420 - DNA, 25 bp, Homo sapien
tgcgttcccgttgtgtgagtctggc

SEQ ID NO: 336421 - DNA, 25 bp, Homo sapien
cctctttgcgttcccgttgtgtgag

SEQ ID NO: 336422 - DNA, 25 bp, Homo sapien
ggccagagagaaatttgtgatgaga

SEQ ID NO: 336423 - DNA, 25 bp, Homo sapien
aagagggccagagagaaatttgtga

SEQ ID NO: 336424 - DNA, 25 bp, Homo sapien
tgccccaaatcttgccagccgtgcc

SEQ ID NO: 336425 - DNA, 25 bp, Homo sapien
aatttgtgatgagaacagttcttct

SEQ ID NO: 336426 - DNA, 25 bp, Homo sapien
cgcagtgatgggtaggtgcacgcca

SEQ ID NO: 336427 - DNA, 25 bp, Homo sapien
tacggctgcggtcacagcgcagtga

SEQ ID NO: 336428 - DNA, 25 bp, Homo sapien
gaggagggaatcaagcgggatacgg

SEQ ID NO: 336429 - DNA, 25 bp, Homo sapien
gcccctgagagcctttgctgggaag

SEQ ID NO: 336430 - DNA, 25 bp, Homo sapien
gagagcagagtggtcggtgctggga

SEQ ID NO: 336431 - DNA, 25 bp, Homo sapien
gagcagagtggtcggtgctgggagc

SEQ ID NO: 336432 - DNA, 25 bp, Homo sapien
ctgagagcagagtggtcggtgctgg

SEQ ID NO: 336433 - DNA, 25 bp, Homo sapien
cagagtggtcggtgctgggagccca

SEQ ID NO: 336434 - DNA, 25 bp, Homo sapien
aagcagacttgctcgtgtcctggga

SEQ ID NO: 336435 - DNA, 25 bp, Homo sapien
ctctgtcggcagctgatatcgctga

SEQ ID NO: 336436 - DNA, 25 bp, Homo sapien
ggtgacagtgtccagcgtctccctg

SEQ ID NO: 336437 - DNA, 25 bp, Homo sapien
tgcacaacgcattgggcagaggaag

SEQ ID NO: 336438 - DNA, 25 bp, Homo sapien
tcttggcatctgtggagtgggtctc

SEQ ID NO: 336439 - DNA, 25 bp, Homo sapien
cttggcatctgtggagtgggtctcc

SEQ ID NO: 336440 - DNA, 25 bp, Homo sapien
ttgttgcctgcaactctggaccctg

SEQ ID NO: 336441 - DNA, 25 bp, Homo sapien
caaatcttgaaggtgcgagtgaaca

SEQ ID NO: 336442 - DNA, 25 bp, Homo sapien
gtgagggctttgaagcaggatttgc

SEQ ID NO: 336443 - DNA, 25 bp, Homo sapien
tgctgaaggttagctcgggattgca

SEQ ID NO: 336444 - DNA, 25 bp, Homo sapien
ttccaccagtttcccacagactcca

SEQ ID NO: 336445 - DNA, 25 bp, Homo sapien
ctgtgcctggatgcctcttccgtgc

SEQ ID NO: 336446 - DNA, 25 bp, Homo sapien
ttgcgaattcctgcagatgcttaag

SEQ ID NO: 336447 - DNA, 25 bp, Homo sapien
gatgcctcttccgtgcttgtaagct

SEQ ID NO: 336448 - DNA, 25 bp, Homo sapien
gcttgtaagctttgcgaattcctgc

SEQ ID NO: 336449 - DNA, 25 bp, Homo sapien
caaggtgatggaacgtgactaggac

SEQ ID NO: 336450 - DNA, 25 bp, Homo sapien
caacagctatttcccagatggcaag

SEQ ID NO: 336451 - DNA, 25 bp, Homo sapien
ctggagattcagtgtgataatgatg

SEQ ID NO: 336452 - DNA, 25 bp, Homo sapien
aagacacagtctaaaggccggggtg

SEQ ID NO: 336453 - DNA, 25 bp, Homo sapien
ttctgtctagcaagtctcttcactc

SEQ ID NO: 336454 - DNA, 25 bp, Homo sapien
tcttcactctccctgcatcgctgcc

SEQ ID NO: 336455 - DNA, 25 bp, Homo sapien
ctcttcactctccctgcatcgctgc

SEQ ID NO: 336456 - DNA, 25 bp, Homo sapien
cgccttttctgtctagcaagtctct

SEQ ID NO: 336457 - DNA, 25 bp, Homo sapien
tctgtaccacttgcagaatcataga

SEQ ID NO: 336458 - DNA, 25 bp, Homo sapien
tttctgtaccacttgcagaatcata

SEQ ID NO: 336459 - DNA, 25 bp, Homo sapien
gtaccacttgcagaatcatagaaag

SEQ ID NO: 336460 - DNA, 25 bp, Homo sapien
tgtaccacttgcagaatcatagaaa

SEQ ID NO: 336461 - DNA, 25 bp, Homo sapien
aaagccattatagagcctgctacct

SEQ ID NO: 336462 - DNA, 25 bp, Homo sapien
tagagcctgctacctaaacagctcg

SEQ ID NO: 336463 - DNA, 25 bp, Homo sapien
ctgctacctaaacagctcgccaagg

SEQ ID NO: 336464 - DNA, 25 bp, Homo sapien
acagctcgccaaggacttggagagc

SEQ ID NO: 336465 - DNA, 25 bp, Homo sapien
tattggcatctacagcagctgagat

SEQ ID NO: 336466 - DNA, 25 bp, Homo sapien
gatgaagccattgcaggccacatag

SEQ ID NO: 336467 - DNA, 25 bp, Homo sapien
ggtgtggggtttattggcatctaca

SEQ ID NO: 336468 - DNA, 25 bp, Homo sapien
agatgaagccattgcaggccacata

SEQ ID NO: 336469 - DNA, 25 bp, Homo sapien
cacttcggcagcagagctgacgtgg

SEQ ID NO: 336470 - DNA, 25 bp, Homo sapien
gtatctcccacttcggcagcagagc

SEQ ID NO: 336471 - DNA, 25 bp, Homo sapien
tccagtatctcccacttcggcagca

SEQ ID NO: 336472 - DNA, 25 bp, Homo sapien
ccacttcggcagcagagctgacgtg

SEQ ID NO: 336473 - DNA, 25 bp, Homo sapien
tctgagcttgaaagagttgtgggtc

SEQ ID NO: 336474 - DNA, 25 bp, Homo sapien
ccctgtggggagtctgtcgaagtct

SEQ ID NO: 336475 - DNA, 25 bp, Homo sapien
gtcgaagtctctgtccccattggat

SEQ ID NO: 336476 - DNA, 25 bp, Homo sapien
ctctgagcttgaaagagttgtgggt

SEQ ID NO: 336477 - DNA, 25 bp, Homo sapien
gaaggtcattcaagatggttttatc

SEQ ID NO: 336478 - DNA, 25 bp, Homo sapien
gatgaaggtcattcaagatggtttt

SEQ ID NO: 336479 - DNA, 25 bp, Homo sapien
ggtcattcaagatggttttatcagc

SEQ ID NO: 336480 - DNA, 25 bp, Homo sapien
agtgatgaaggtcattcaagatggt

SEQ ID NO: 336481 - DNA, 25 bp, Homo sapien
tgcagtccagatggtggccaggact

SEQ ID NO: 336482 - DNA, 25 bp, Homo sapien
gaaatagtgagtgtattggtaatct

SEQ ID NO: 336483 - DNA, 25 bp, Homo sapien
gagctcttgtgaagttgcagtccag

SEQ ID NO: 336484 - DNA, 25 bp, Homo sapien
aaaagttgcttgagcaccctcatga

SEQ ID NO: 336485 - DNA, 25 bp, Homo sapien
caggtgtgcattcaagcaggccagc

SEQ ID NO: 336486 - DNA, 25 bp, Homo sapien
ctgtgaatccggagctcaggtgtgc

SEQ ID NO: 336487 - DNA, 25 bp, Homo sapien
cagtgctgatgtattccagagggaa

SEQ ID NO: 336488 - DNA, 25 bp, Homo sapien
cagcctcaaaggcaacagtgctgat

SEQ ID NO: 336489 - DNA, 25 bp, Homo sapien
ctttgcgctgggtggtgccgggacc

SEQ ID NO: 336490 - DNA, 25 bp, Homo sapien
cagcatgtgcatggcgtgcgtgagt

SEQ ID NO: 336491 - DNA, 25 bp, Homo sapien
ccgggaccccgctaactcagaccat

SEQ ID NO: 336492 - DNA, 25 bp, Homo sapien
tccatcgctcctgtctctcatcagc

SEQ ID NO: 336493 - DNA, 25 bp, Homo sapien
acaggtttcggtcaaggtgtccgca

SEQ ID NO: 336494 - DNA, 25 bp, Homo sapien
tcctcactcagtacattgccagatg

SEQ ID NO: 336495 - DNA, 25 bp, Homo sapien
gattccttggagactgctggactgt

SEQ ID NO: 336496 - DNA, 25 bp, Homo sapien
gaagcaccagggagacagaatacca

SEQ ID NO: 336497 - DNA, 25 bp, Homo sapien
acttttgcattccatggggccatga

SEQ ID NO: 336498 - DNA, 25 bp, Homo sapien
tatcaccttccaacatgtcatatag

SEQ ID NO: 336499 - DNA, 25 bp, Homo sapien
catgtcatatagcttgttatttata

SEQ ID NO: 336500 - DNA, 25 bp, Homo sapien
aactatcaccttccaacatgtcata

SEQ ID NO: 336501 - DNA, 25 bp, Homo sapien
aaccgggctgctccagacgcttggg

SEQ ID NO: 336502 - DNA, 25 bp, Homo sapien
gggcccatctggatggacagccgac

SEQ ID NO: 336503 - DNA, 25 bp, Homo sapien
aggaaccgggctgctccagacgctt

SEQ ID NO: 336504 - DNA, 25 bp, Homo sapien
atggacagccgacaggaaccgggct

SEQ ID NO: 336505 - DNA, 25 bp, Homo sapien
tccatgaacactgcgtgtgaagctg

SEQ ID NO: 336506 - DNA, 25 bp, Homo sapien
gctttccaccctgcctctccttgat

SEQ ID NO: 336507 - DNA, 25 bp, Homo sapien
tttccaccctgcctctccttgatgt

SEQ ID NO: 336508 - DNA, 25 bp, Homo sapien
ctgctttccaccctgcctctccttg

SEQ ID NO: 336509 - DNA, 25 bp, Homo sapien
ttccaccctgcctctccttgatgtt

SEQ ID NO: 336510 - DNA, 25 bp, Homo sapien
tcagtgctctttcaaggatcccggg

SEQ ID NO: 336511 - DNA, 25 bp, Homo sapien
cacaagacctagaccactgggagga

SEQ ID NO: 336512 - DNA, 25 bp, Homo sapien
tgttcattacaggacatggtgccca

SEQ ID NO: 336513 - DNA, 25 bp, Homo sapien
ggtgatatgactaacagaggcctct

SEQ ID NO: 336514 - DNA, 25 bp, Homo sapien
cagcagctccctctgtgcgcttctt

SEQ ID NO: 336515 - DNA, 25 bp, Homo sapien
acttgcaggctagcagcagctccct

SEQ ID NO: 336516 - DNA, 25 bp, Homo sapien
cagctccctctgtgcgcttcttctg

SEQ ID NO: 336517 - DNA, 25 bp, Homo sapien
ctctgacttgcaggctagcagcagc

SEQ ID NO: 336518 - DNA, 25 bp, Homo sapien
cccactgtcaggctgctgcgtgttt

SEQ ID NO: 336519 - DNA, 25 bp, Homo sapien
ctgctgcgtgtttgttttccgaggg

SEQ ID NO: 336520 - DNA, 25 bp, Homo sapien
ctaatcaacatcgccacgatattta

SEQ ID NO: 336521 - DNA, 25 bp, Homo sapien
tcaggctgctgcgtgtttgttttcc

SEQ ID NO: 336522 - DNA, 25 bp, Homo sapien
ggccctggaccagtttgtcaaagcc

SEQ ID NO: 336523 - DNA, 25 bp, Homo sapien
gccctggaccagtttgtcaaagccc

SEQ ID NO: 336524 - DNA, 25 bp, Homo sapien
ctggccctggaccagtttgtcaaag

SEQ ID NO: 336525 - DNA, 25 bp, Homo sapien
tggccctggaccagtttgtcaaagc

SEQ ID NO: 336526 - DNA, 25 bp, Homo sapien
tcttcctccgagtctgcaaagactg

SEQ ID NO: 336527 - DNA, 25 bp, Homo sapien
cttggctaggcatcctgacttctct

SEQ ID NO: 336528 - DNA, 25 bp, Homo sapien
gactggcggcttggctaggcatcct

SEQ ID NO: 336529 - DNA, 25 bp, Homo sapien
tctgcaaagactggcggcttggcta

SEQ ID NO: 336530 - DNA, 25 bp, Homo sapien
agtccctgattttgcatccatgctg

SEQ ID NO: 336531 - DNA, 25 bp, Homo sapien
gcatccatgctggtctgtcttctct

SEQ ID NO: 336532 - DNA, 25 bp, Homo sapien
ctcatctcagatggatctggaaatc

SEQ ID NO: 336533 - DNA, 25 bp, Homo sapien
tgtggcaggattattatgaaactct

SEQ ID NO: 336534 - DNA, 25 bp, Homo sapien
agatcctccttgaatgccctgcagc

SEQ ID NO: 336535 - DNA, 25 bp, Homo sapien
ccagggtcccattcttaacagatcc

SEQ ID NO: 336536 - DNA, 25 bp, Homo sapien
ttccccgaggactgcttgtccagag

SEQ ID NO: 336537 - DNA, 25 bp, Homo sapien
ccgctgatgtgctggaagtcacttc

SEQ ID NO: 336538 - DNA, 25 bp, Homo sapien
cacgagctgtcgaaatcaagaggct

SEQ ID NO: 336539 - DNA, 25 bp, Homo sapien
cctgcttgtagctgtgagctgcgta

SEQ ID NO: 336540 - DNA, 25 bp, Homo sapien
gggctgtttgtgcaactctgcctgc

SEQ ID NO: 336541 - DNA, 25 bp, Homo sapien
ctgacatttaacatgcagcagcttc

SEQ ID NO: 336542 - DNA, 25 bp, Homo sapien
gttgacattcctccacaggaaaacc

SEQ ID NO: 336543 - DNA, 25 bp, Homo sapien
ttgacattcctccacaggaaaacct

SEQ ID NO: 336544 - DNA, 25 bp, Homo sapien
cagttgacattcctccacaggaaaa

SEQ ID NO: 336545 - DNA, 25 bp, Homo sapien
tgacattcctccacaggaaaacctt

SEQ ID NO: 336546 - DNA, 25 bp, Homo sapien
agctgagctaggtattcttggctgg

SEQ ID NO: 336547 - DNA, 25 bp, Homo sapien
aaagctgagctaggtattcttggct

SEQ ID NO: 336548 - DNA, 25 bp, Homo sapien
aagctgagctaggtattcttggctg

SEQ ID NO: 336549 - DNA, 25 bp, Homo sapien
gctgagctaggtattcttggctggg

SEQ ID NO: 336550 - DNA, 25 bp, Homo sapien
catctcttaaatgctgatgctcttg

SEQ ID NO: 336551 - DNA, 25 bp, Homo sapien
ctgatgctcttggaattcagtccca

SEQ ID NO: 336552 - DNA, 25 bp, Homo sapien
taaatgctgatgctcttggaattca

SEQ ID NO: 336553 - DNA, 25 bp, Homo sapien
ctcttggaattcagtcccatccatc

SEQ ID NO: 336554 - DNA, 25 bp, Homo sapien
aagtgtctgcaagtgctgcgtgccg

SEQ ID NO: 336555 - DNA, 25 bp, Homo sapien
catcttaataacaaacaggcctcga

SEQ ID NO: 336556 - DNA, 25 bp, Homo sapien
tattgccggcgtatcttttgcagtg

SEQ ID NO: 336557 - DNA, 25 bp, Homo sapien
caggcctcgagaaacccgcggataa

SEQ ID NO: 336558 - DNA, 25 bp, Homo sapien
agcccattttcctggcagactggcc

SEQ ID NO: 336559 - DNA, 25 bp, Homo sapien
ggccctccgaggcaaccagcccatt

SEQ ID NO: 336560 - DNA, 25 bp, Homo sapien
ttttcctggcagactggcccataaa

SEQ ID NO: 336561 - DNA, 25 bp, Homo sapien
tgtcagcttggccctccgaggcaac

SEQ ID NO: 336562 - DNA, 25 bp, Homo sapien
cagtgctcgcacgtgctcggatgag

SEQ ID NO: 336563 - DNA, 25 bp, Homo sapien
ccgcagtgctcgcacgtgctcggat

SEQ ID NO: 336564 - DNA, 25 bp, Homo sapien
tcagccgcagtgctcgcacgtgctc

SEQ ID NO: 336565 - DNA, 25 bp, Homo sapien
agccgcagtgctcgcacgtgctcgg

SEQ ID NO: 336566 - DNA, 25 bp, Homo sapien
tcattccaaatctcctagcagctgt

SEQ ID NO: 336567 - DNA, 25 bp, Homo sapien
aggcagggcttaaattcaggagtca

SEQ ID NO: 336568 - DNA, 25 bp, Homo sapien
tgaagtaggtccatgaggcaaggca

SEQ ID NO: 336569 - DNA, 25 bp, Homo sapien
cattactggctcgatgagggatcca

SEQ ID NO: 336570 - DNA, 25 bp, Homo sapien
ctcccccgccgaaccacagatcttg

SEQ ID NO: 336571 - DNA, 25 bp, Homo sapien
cagcaagccgcctgactaaacactc

SEQ ID NO: 336572 - DNA, 25 bp, Homo sapien
actcccccgccgaaccacagatctt

SEQ ID NO: 336573 - DNA, 25 bp, Homo sapien
caagccgcctgactaaacactcccc

SEQ ID NO: 336574 - DNA, 25 bp, Homo sapien
atcttttaagggctcgagactcagg

SEQ ID NO: 336575 - DNA, 25 bp, Homo sapien
tgtgttcatcctcacggccgtggct

SEQ ID NO: 336576 - DNA, 25 bp, Homo sapien
ggccgtggctgcatacagatattgg

SEQ ID NO: 336577 - DNA, 25 bp, Homo sapien
aaacaatcttgctaccagtcccacg

SEQ ID NO: 336578 - DNA, 25 bp, Homo sapien
taaaaaggagtagcccacagagtat

SEQ ID NO: 336579 - DNA, 25 bp, Homo sapien
cacagagtatacatgggaccagaac

SEQ ID NO: 336580 - DNA, 25 bp, Homo sapien
gcactgctccctacaaacggtggaa

SEQ ID NO: 336581 - DNA, 25 bp, Homo sapien
ggaactcgtcgccatgttgtaagga

SEQ ID NO: 336582 - DNA, 25 bp, Homo sapien
ggtacttggataatgtatcctggtg

SEQ ID NO: 336583 - DNA, 25 bp, Homo sapien
aggtgagaggctcctaagggtactt

SEQ ID NO: 336584 - DNA, 25 bp, Homo sapien
tatcctggtgatgacaggatatgaa

SEQ ID NO: 336585 - DNA, 25 bp, Homo sapien
cctaagggtacttggataatgtatc

SEQ ID NO: 336586 - DNA, 25 bp, Homo sapien
gggctgcagtatcatcctaataggc

SEQ ID NO: 336587 - DNA, 25 bp, Homo sapien
gaaacaacagcacgggtatctcatg

SEQ ID NO: 336588 - DNA, 25 bp, Homo sapien
gatttctgtaggtcagccatcgagg

SEQ ID NO: 336589 - DNA, 25 bp, Homo sapien
tcagagtctaccattaaggtctggg

SEQ ID NO: 336590 - DNA, 25 bp, Homo sapien
agaggctgcgacttttggatctgga

SEQ ID NO: 336591 - DNA, 25 bp, Homo sapien
aggctgcgacttttggatctggaga

SEQ ID NO: 336592 - DNA, 25 bp, Homo sapien
ggctgcgacttttggatctggagag

SEQ ID NO: 336593 - DNA, 25 bp, Homo sapien
gaggctgcgacttttggatctggag

SEQ ID NO: 336594 - DNA, 25 bp, Homo sapien
catctgcaagctgctttcgggccaa

SEQ ID NO: 336595 - DNA, 25 bp, Homo sapien
aactccaggtccatccttatcccag

SEQ ID NO: 336596 - DNA, 25 bp, Homo sapien
ctttgggatggctgactctgtgctc

SEQ ID NO: 336597 - DNA, 25 bp, Homo sapien
aatgcttcagttggagaaagggctg

SEQ ID NO: 336598 - DNA, 25 bp, Homo sapien
atttcaccaggcacatccagcagag

SEQ ID NO: 336599 - DNA, 25 bp, Homo sapien
tcattttgatgaggatccggcggaa

SEQ ID NO: 336600 - DNA, 25 bp, Homo sapien
gagcttccatgtgcagggacggcaa

SEQ ID NO: 336601 - DNA, 25 bp, Homo sapien
cgactgctgggcctcgtcgtcagag

SEQ ID NO: 336602 - DNA, 25 bp, Homo sapien
aatagggtgctcctgataaacgcag

SEQ ID NO: 336603 - DNA, 25 bp, Homo sapien
ctcaaatagggtgctcctgataaac

SEQ ID NO: 336604 - DNA, 25 bp, Homo sapien
gctcctgataaacgcaggcacctct

SEQ ID NO: 336605 - DNA, 25 bp, Homo sapien
cctttctcaaatagggtgctcctga

SEQ ID NO: 336606 - DNA, 25 bp, Homo sapien
ccgtcactgccttctgttgtaactg

SEQ ID NO: 336607 - DNA, 25 bp, Homo sapien
gaagagatgctagctgtgaataaca

SEQ ID NO: 336608 - DNA, 25 bp, Homo sapien
aggttctgggaattcagtggagtca

SEQ ID NO: 336609 - DNA, 25 bp, Homo sapien
taactggctgtgaaacgtctgtctt

SEQ ID NO: 336610 - DNA, 25 bp, Homo sapien
ttgattattccctcctcgaggtgat

SEQ ID NO: 336611 - DNA, 25 bp, Homo sapien
tcttccccgcctgttgtttatatcc

SEQ ID NO: 336612 - DNA, 25 bp, Homo sapien
tattccctcctcgaggtgataaatg

SEQ ID NO: 336613 - DNA, 25 bp, Homo sapien
cctcgaggtgataaatgcaaactac

SEQ ID NO: 336614 - DNA, 25 bp, Homo sapien
tagcccaggctgtccccacatccaa

SEQ ID NO: 336615 - DNA, 25 bp, Homo sapien
tgctgcccttcagagctgcgaccat

SEQ ID NO: 336616 - DNA, 25 bp, Homo sapien
agtctttgccatcctagcccaggct

SEQ ID NO: 336617 - DNA, 25 bp, Homo sapien
cacatccaaagctccccctgtggtc

SEQ ID NO: 336618 - DNA, 25 bp, Homo sapien
tccttgacctgatcctcaaagggct

SEQ ID NO: 336619 - DNA, 25 bp, Homo sapien
tgaattcaatgccaggagccacttt

SEQ ID NO: 336620 - DNA, 25 bp, Homo sapien
gggttgaattcaatgccaggagcca

SEQ ID NO: 336621 - DNA, 25 bp, Homo sapien
tcctcaaagggcttcatctgcctct

SEQ ID NO: 336622 - DNA, 25 bp, Homo sapien
tttccagggataggatggtcccagc

SEQ ID NO: 336623 - DNA, 25 bp, Homo sapien
gcccctgacagatgccaagttgaag

SEQ ID NO: 336624 - DNA, 25 bp, Homo sapien
tatgactatgtctaagcacctgtga

SEQ ID NO: 336625 - DNA, 25 bp, Homo sapien
aactctgcctagagggtgggtagat

SEQ ID NO: 336626 - DNA, 25 bp, Homo sapien
cgagaacctggtattgactgccaag

SEQ ID NO: 336627 - DNA, 25 bp, Homo sapien
agggcgagaacctggtattgactgc

SEQ ID NO: 336628 - DNA, 25 bp, Homo sapien
gggagggcgagaacctggtattgac

SEQ ID NO: 336629 - DNA, 25 bp, Homo sapien
aacctggtattgactgccaagtgca

SEQ ID NO: 336630 - DNA, 25 bp, Homo sapien
cccaaggccgtaaggtgacagccag

SEQ ID NO: 336631 - DNA, 25 bp, Homo sapien
atttaggttccctaattctcagcct

SEQ ID NO: 336632 - DNA, 25 bp, Homo sapien
tatcctcattgcttctttagacttt

SEQ ID NO: 336633 - DNA, 25 bp, Homo sapien
tccctaattctcagccttttatcct

SEQ ID NO: 336634 - DNA, 25 bp, Homo sapien
tcaaatatctgtgacaggcgtggca

SEQ ID NO: 336635 - DNA, 25 bp, Homo sapien
tgacaggcgtggcaggaattactga

SEQ ID NO: 336636 - DNA, 25 bp, Homo sapien
aatatctgtgacaggcgtggcagga

SEQ ID NO: 336637 - DNA, 25 bp, Homo sapien
tctgtgacaggcgtggcaggaatta

SEQ ID NO: 336638 - DNA, 25 bp, Homo sapien
ggcacattccgattgctaagatgca

SEQ ID NO: 336639 - DNA, 25 bp, Homo sapien
tcagagggcacattccgattgctaa

SEQ ID NO: 336640 - DNA, 25 bp, Homo sapien
atgcattgacgagagcccaggtccc

SEQ ID NO: 336641 - DNA, 25 bp, Homo sapien
ttgctaagatgcattgacgagagcc

SEQ ID NO: 336642 - DNA, 25 bp, Homo sapien
cctgcagatataccgaaaaagaatc

SEQ ID NO: 336643 - DNA, 25 bp, Homo sapien
ctgcagatataccgaaaaagaatcc

SEQ ID NO: 336644 - DNA, 25 bp, Homo sapien
ctcctgcagatataccgaaaaagaa

SEQ ID NO: 336645 - DNA, 25 bp, Homo sapien
tcctgcagatataccgaaaaagaat

SEQ ID NO: 336646 - DNA, 25 bp, Homo sapien
tttggccaaacgcttcggtccatcc

SEQ ID NO: 336647 - DNA, 25 bp, Homo sapien
actttggccaaacgcttcggtccat

SEQ ID NO: 336648 - DNA, 25 bp, Homo sapien
tggccaaacgcttcggtccatccct

SEQ ID NO: 336649 - DNA, 25 bp, Homo sapien
gcactttggccaaacgcttcggtcc

SEQ ID NO: 336650 - DNA, 25 bp, Homo sapien
ggaactgagttccatgtacttaggg

SEQ ID NO: 336651 - DNA, 25 bp, Homo sapien
acttagggggaaatagtatagcaca

SEQ ID NO: 336652 - DNA, 25 bp, Homo sapien
aattgtcaagattggaggtgatgaa

SEQ ID NO: 336653 - DNA, 25 bp, Homo sapien
gggactgaacctccacaggatgaat

SEQ ID NO: 336654 - DNA, 25 bp, Homo sapien
tgaagaccagaagggcattagtgct

SEQ ID NO: 336655 - DNA, 25 bp, Homo sapien
tgtagagaccacacctaatggcccc

SEQ ID NO: 336656 - DNA, 25 bp, Homo sapien
tgtcgtgtgacatagcccctcatag

SEQ ID NO: 336657 - DNA, 25 bp, Homo sapien
ttagtgctccataggacctgtcgtg

SEQ ID NO: 336658 - DNA, 25 bp, Homo sapien
ccttggctgaggctcagctcaaagc

SEQ ID NO: 336659 - DNA, 25 bp, Homo sapien
ggctcagctcaaagccagggcaaaa

SEQ ID NO: 336660 - DNA, 25 bp, Homo sapien
caggcaggggatcagtccttggctg

SEQ ID NO: 336661 - DNA, 25 bp, Homo sapien
aggcaggggatcagtccttggctga

SEQ ID NO: 336662 - DNA, 25 bp, Homo sapien
ttcatcgactgcaggatcttagtaa

SEQ ID NO: 336663 - DNA, 25 bp, Homo sapien
tcatcgactgcaggatcttagtaat

SEQ ID NO: 336664 - DNA, 25 bp, Homo sapien
tttcatcgactgcaggatcttagta

SEQ ID NO: 336665 - DNA, 25 bp, Homo sapien
ctttcatcgactgcaggatcttagt

SEQ ID NO: 336666 - DNA, 25 bp, Homo sapien
agagatttgcgggtggccttctgca

SEQ ID NO: 336667 - DNA, 25 bp, Homo sapien
ttgcatgtccaaccacttgaggtct

SEQ ID NO: 336668 - DNA, 25 bp, Homo sapien
tgagaccgagacactctaaggacct

SEQ ID NO: 336669 - DNA, 25 bp, Homo sapien
gtcatgaattctctgggccctaaca

SEQ ID NO: 336670 - DNA, 25 bp, Homo sapien
gcagtggccgccactctctgtccat

SEQ ID NO: 336671 - DNA, 25 bp, Homo sapien
aagccagctcagagatctgccacca

SEQ ID NO: 336672 - DNA, 25 bp, Homo sapien
tcagagcatgaatttagcccccatc

SEQ ID NO: 336673 - DNA, 25 bp, Homo sapien
cattccttgtccttgaaagccagct

SEQ ID NO: 336674 - DNA, 25 bp, Homo sapien
catctggctagttggccggaaccac

SEQ ID NO: 336675 - DNA, 25 bp, Homo sapien
ccttgcagagcaatgggtccctttc

SEQ ID NO: 336676 - DNA, 25 bp, Homo sapien
gccggatggtgtcacggagacatct

SEQ ID NO: 336677 - DNA, 25 bp, Homo sapien
ggtctctgagacatcctgggccgtg

SEQ ID NO: 336678 - DNA, 25 bp, Homo sapien
aggacataagtgtccaagaggctga

SEQ ID NO: 336679 - DNA, 25 bp, Homo sapien
ggaggacataagtgtccaagaggct

SEQ ID NO: 336680 - DNA, 25 bp, Homo sapien
ttcgatgctccctcccttgacccca

SEQ ID NO: 336681 - DNA, 25 bp, Homo sapien
cttcgatgctccctcccttgacccc

SEQ ID NO: 336682 - DNA, 25 bp, Homo sapien
ctccctgattcgatccctgaagatg

SEQ ID NO: 336683 - DNA, 25 bp, Homo sapien
ggcctccctgattcgatccctgaag

SEQ ID NO: 336684 - DNA, 25 bp, Homo sapien
cccaggcacccaacttgcttggcac

SEQ ID NO: 336685 - DNA, 25 bp, Homo sapien
ggcacccaacttgcttggcacttct

SEQ ID NO: 336686 - DNA, 25 bp, Homo sapien
ccagtggcaagagttctctgagagc

SEQ ID NO: 336687 - DNA, 25 bp, Homo sapien
tccccagtggcaagagttctctgag

SEQ ID NO: 336688 - DNA, 25 bp, Homo sapien
cccagtggcaagagttctctgagag

SEQ ID NO: 336689 - DNA, 25 bp, Homo sapien
ccccagtggcaagagttctctgaga

SEQ ID NO: 336690 - DNA, 25 bp, Homo sapien
ctgtgggaggctctaaggaagtggc

SEQ ID NO: 336691 - DNA, 25 bp, Homo sapien
tttctgtgggctcacgactgtggga

SEQ ID NO: 336692 - DNA, 25 bp, Homo sapien
taaggaagtggcctcattggtgaag

SEQ ID NO: 336693 - DNA, 25 bp, Homo sapien
tcattggtgaaggttccctgctgtg

SEQ ID NO: 336694 - DNA, 25 bp, Homo sapien
cacacggaggggagattcgtagcca

SEQ ID NO: 336695 - DNA, 25 bp, Homo sapien
gggagattcgtagccatgaaagatg

SEQ ID NO: 336696 - DNA, 25 bp, Homo sapien
aggggagattcgtagccatgaaaga

SEQ ID NO: 336697 - DNA, 25 bp, Homo sapien
agattcgtagccatgaaagatgatg

SEQ ID NO: 336698 - DNA, 25 bp, Homo sapien
tgataagaggtgcttagttcaggct

SEQ ID NO: 336699 - DNA, 25 bp, Homo sapien
gacttcgtgtccctgagcgttggtt

SEQ ID NO: 336700 - DNA, 25 bp, Homo sapien
tcagcaggtgacttcgtgtccctga

SEQ ID NO: 336701 - DNA, 25 bp, Homo sapien
cctgagcgttggttgagtctgagcc

SEQ ID NO: 336702 - DNA, 25 bp, Homo sapien
atggcatgacactgaagtcacaggg

SEQ ID NO: 336703 - DNA, 25 bp, Homo sapien
tcattgggcccctcacatggcatga

SEQ ID NO: 336704 - DNA, 25 bp, Homo sapien
ggcatgacactgaagtcacagggaa

SEQ ID NO: 336705 - DNA, 25 bp, Homo sapien
agtgagttgtggtcattgggcccct

SEQ ID NO: 336706 - DNA, 25 bp, Homo sapien
gagaaagcagacttgccatctggaa

SEQ ID NO: 336707 - DNA, 25 bp, Homo sapien
agaaagcagacttgccatctggaaa

SEQ ID NO: 336708 - DNA, 25 bp, Homo sapien
gaaagcagacttgccatctggaaaa

SEQ ID NO: 336709 - DNA, 25 bp, Homo sapien
tgaagccacagcgcactgcgtgcac

SEQ ID NO: 336710 - DNA, 25 bp, Homo sapien
ctgaagccacagcgcactgcgtgca

SEQ ID NO: 336711 - DNA, 25 bp, Homo sapien
accgtcctcttctgtagcaccaggg

SEQ ID NO: 336712 - DNA, 25 bp, Homo sapien
gcctggtgatcaccgtcctcttctg

SEQ ID NO: 336713 - DNA, 25 bp, Homo sapien
gcgtggctgcgatcttcattcccag

SEQ ID NO: 336714 - DNA, 25 bp, Homo sapien
cctgtgtcccgcgtctgtccagtgc

SEQ ID NO: 336715 - DNA, 25 bp, Homo sapien
gccttccacagctagggctggctgg

SEQ ID NO: 336716 - DNA, 25 bp, Homo sapien
ttagcacgtgcttccagaagtagat

SEQ ID NO: 336717 - DNA, 25 bp, Homo sapien
gtttgctaagtgtctgccttccaca

SEQ ID NO: 336718 - DNA, 25 bp, Homo sapien
gctagcctggacttttcacacagca

SEQ ID NO: 336719 - DNA, 25 bp, Homo sapien
ctggaaatccgatgccaattgctgc

SEQ ID NO: 336720 - DNA, 25 bp, Homo sapien
tccaactcaagatctcgtaaaattc

SEQ ID NO: 336721 - DNA, 25 bp, Homo sapien
ctggtcctggaaatccgatgccaat

SEQ ID NO: 336722 - DNA, 25 bp, Homo sapien
tctcgtaaaattccaagtcctgctg

SEQ ID NO: 336723 - DNA, 25 bp, Homo sapien
tgccaacaggactctggttaaatga

SEQ ID NO: 336724 - DNA, 25 bp, Homo sapien
gcatccatgcaaaggagtactatgc

SEQ ID NO: 336725 - DNA, 25 bp, Homo sapien
tccatgcaaaggagtactatgcagc

SEQ ID NO: 336726 - DNA, 25 bp, Homo sapien
gaacatggaaccatttgggctgatg

SEQ ID NO: 336727 - DNA, 25 bp, Homo sapien
tttacaccttcacatttggccagtt

SEQ ID NO: 336728 - DNA, 25 bp, Homo sapien
gaactttgtgttttacaccttcaca

SEQ ID NO: 336729 - DNA, 25 bp, Homo sapien
cccgactggactagaaggttcttca

SEQ ID NO: 336730 - DNA, 25 bp, Homo sapien
cgactggactagaaggttcttcagg

SEQ ID NO: 336731 - DNA, 25 bp, Homo sapien
tagtaggtgaattatggccgctggc

SEQ ID NO: 336732 - DNA, 25 bp, Homo sapien
tttagtaggtgaattatggccgctg

SEQ ID NO: 336733 - DNA, 25 bp, Homo sapien
agccataatttagtaggtgaattat

SEQ ID NO: 336734 - DNA, 25 bp, Homo sapien
taatttagtaggtgaattatggccg

SEQ ID NO: 336735 - DNA, 25 bp, Homo sapien
ccatgagagatgcttggaaaggaga

SEQ ID NO: 336736 - DNA, 25 bp, Homo sapien
aataattaagcgctggggtcaggtc

SEQ ID NO: 336737 - DNA, 25 bp, Homo sapien
gcaaaacccacgctgccaaaggtct

SEQ ID NO: 336738 - DNA, 25 bp, Homo sapien
caaaggtcttttcatccaagatgcc

SEQ ID NO: 336739 - DNA, 25 bp, Homo sapien
aaatggccaatcttatattcgtggc

SEQ ID NO: 336740 - DNA, 25 bp, Homo sapien
tgaatagcattcatgccccaaatgg

SEQ ID NO: 336741 - DNA, 25 bp, Homo sapien
caatcttatattcgtggcagacatc

SEQ ID NO: 336742 - DNA, 25 bp, Homo sapien
aatagcattcatgccccaaatggcc

SEQ ID NO: 336743 - DNA, 25 bp, Homo sapien
gtggacaagaaggtgtctcagggtc

SEQ ID NO: 336744 - DNA, 25 bp, Homo sapien
agagaagcaggagttcccacctcgc

SEQ ID NO: 336745 - DNA, 25 bp, Homo sapien
ggccagagaagcaggagttcccacc

SEQ ID NO: 336746 - DNA, 25 bp, Homo sapien
gaagcaggagttcccacctcgccat

SEQ ID NO: 336747 - DNA, 25 bp, Homo sapien
caccagcctgacctggagaggccag

SEQ ID NO: 336748 - DNA, 25 bp, Homo sapien
ctcttgacagctaggaaaatccatg

SEQ ID NO: 336749 - DNA, 25 bp, Homo sapien
cagactggaggcaaaggcttggcat

SEQ ID NO: 336750 - DNA, 25 bp, Homo sapien
tcatagtggccccatggtggagtcc

SEQ ID NO: 336751 - DNA, 25 bp, Homo sapien
gctgtcgcctggttaggtgacctct

SEQ ID NO: 336752 - DNA, 25 bp, Homo sapien
tagcagaacgcaggaactgcctcgg

SEQ ID NO: 336753 - DNA, 25 bp, Homo sapien
gagtcttgcccagaatacggtcaac

SEQ ID NO: 336754 - DNA, 25 bp, Homo sapien
gacatggctctagttttgcaacagg

SEQ ID NO: 336755 - DNA, 25 bp, Homo sapien
tagcacagcgtgaaaatgcagggcc

SEQ ID NO: 336756 - DNA, 25 bp, Homo sapien
ttggctcctgcctgactgatgacac

SEQ ID NO: 336757 - DNA, 25 bp, Homo sapien
aaatcccaggcggaatacctaagag

SEQ ID NO: 336758 - DNA, 25 bp, Homo sapien
tccggtccatatgccactaagcagg

SEQ ID NO: 336759 - DNA, 25 bp, Homo sapien
tatgccaagattaccgaaacatggg

SEQ ID NO: 336760 - DNA, 25 bp, Homo sapien
ccacgtcgtctgtgcagtggacaga

SEQ ID NO: 336761 - DNA, 25 bp, Homo sapien
tgggcacggaggctcgagccttggc

SEQ ID NO: 336762 - DNA, 25 bp, Homo sapien
aatctgttggagatgtcagaatgca

SEQ ID NO: 336763 - DNA, 25 bp, Homo sapien
cttggcgtcacccacgtcgtctgtg

SEQ ID NO: 336764 - DNA, 25 bp, Homo sapien
gagacatttgcttagggcctaccac

SEQ ID NO: 336765 - DNA, 25 bp, Homo sapien
gatgcaccagagttcccaaaagatt

SEQ ID NO: 336766 - DNA, 25 bp, Homo sapien
aggagttcgccgcatgcagtgaaag

SEQ ID NO: 336767 - DNA, 25 bp, Homo sapien
ggtgcctgtggatacccagcttggc

SEQ ID NO: 336768 - DNA, 25 bp, Homo sapien
ccgattcaggcagcacagggggccg

SEQ ID NO: 336769 - DNA, 25 bp, Homo sapien
gattcaggcagcacagggggccgag

SEQ ID NO: 336770 - DNA, 25 bp, Homo sapien
cgattcaggcagcacagggggccga

SEQ ID NO: 336771 - DNA, 25 bp, Homo sapien
cagagctagaagtgccacgtgccag

SEQ ID NO: 336772 - DNA, 25 bp, Homo sapien
ccacgtgccagcgttgtgccatggg

SEQ ID NO: 336773 - DNA, 25 bp, Homo sapien
tttcttcatccctgtgggtgctaga

SEQ ID NO: 336774 - DNA, 25 bp, Homo sapien
tagaagtgccacgtgccagcgttgt

SEQ ID NO: 336775 - DNA, 25 bp, Homo sapien
ctctgagatgtgcatacttctctcc

SEQ ID NO: 336776 - DNA, 25 bp, Homo sapien
cctggctccggctaccatgatggta

SEQ ID NO: 336777 - DNA, 25 bp, Homo sapien
gccccatggcgatgtttctctaaca

SEQ ID NO: 336778 - DNA, 25 bp, Homo sapien
gtaatgataccgctagctgcaggct

SEQ ID NO: 336779 - DNA, 25 bp, Homo sapien
gatggacagagtgggctcctcgcac

SEQ ID NO: 336780 - DNA, 25 bp, Homo sapien
atgacagccgcggacggcaggatgg

SEQ ID NO: 336781 - DNA, 25 bp, Homo sapien
ggatgaggtggtgcatgacagccgc

SEQ ID NO: 336782 - DNA, 25 bp, Homo sapien
tcctagggactgtccctggccctga

SEQ ID NO: 336783 - DNA, 25 bp, Homo sapien
ccacataagttcccacgcactgctt

SEQ ID NO: 336784 - DNA, 25 bp, Homo sapien
cacataagttcccacgcactgcttc

SEQ ID NO: 336785 - DNA, 25 bp, Homo sapien
cataagttcccacgcactgcttcat

SEQ ID NO: 336786 - DNA, 25 bp, Homo sapien
acataagttcccacgcactgcttca

SEQ ID NO: 336787 - DNA, 25 bp, Homo sapien
ctctgaggacccccgtgtgggctgc

SEQ ID NO: 336788 - DNA, 25 bp, Homo sapien
tctgaggacccccgtgtgggctgca

SEQ ID NO: 336789 - DNA, 25 bp, Homo sapien
gaggattgagcgatgctgactgact

SEQ ID NO: 336790 - DNA, 25 bp, Homo sapien
gctggaaaatattcgctggtctcca

SEQ ID NO: 336791 - DNA, 25 bp, Homo sapien
gacttggctcttcgtgctctcactg

SEQ ID NO: 336792 - DNA, 25 bp, Homo sapien
ctgggcctgcaacgcccagtgtcat

SEQ ID NO: 336793 - DNA, 25 bp, Homo sapien
cgactctgcatctggaaacaccttc

SEQ ID NO: 336794 - DNA, 25 bp, Homo sapien
gactctgcatctggaaacaccttca

SEQ ID NO: 336795 - DNA, 25 bp, Homo sapien
actctgcatctggaaacaccttcat

SEQ ID NO: 336796 - DNA, 25 bp, Homo sapien
tctcatgccaatctataatgtatgc

SEQ ID NO: 336797 - DNA, 25 bp, Homo sapien
aactgtgcccggcaaggatgccaat

SEQ ID NO: 336798 - DNA, 25 bp, Homo sapien
gaaaaggagagtcgatggctcagta

SEQ ID NO: 336799 - DNA, 25 bp, Homo sapien
gatggctcagtaagactcgcccaag

SEQ ID NO: 336800 - DNA, 25 bp, Homo sapien
aagtcaaaagaagatacttcataac

SEQ ID NO: 336801 - DNA, 25 bp, Homo sapien
ttataagcgtgagccgccaccctgg

SEQ ID NO: 336802 - DNA, 25 bp, Homo sapien
tatagaggttggtaggggggtctca

SEQ ID NO: 336803 - DNA, 25 bp, Homo sapien
gaagatacttcataacaaatgaaaa

SEQ ID NO: 336804 - DNA, 25 bp, Homo sapien
caggcaacaagtgtgacgaagtaca

SEQ ID NO: 336805 - DNA, 25 bp, Homo sapien
tagtgccgactgtatgcctctgagc

SEQ ID NO: 336806 - DNA, 25 bp, Homo sapien
gggagacggtcatgaaacttggact

SEQ ID NO: 336807 - DNA, 25 bp, Homo sapien
tcgttaccatttgcctttcgaggga

SEQ ID NO: 336808 - DNA, 25 bp, Homo sapien
tgaaggcatacaactcgtgctgggt

SEQ ID NO: 336809 - DNA, 25 bp, Homo sapien
agagtgtgtaccgagactgctccca

SEQ ID NO: 336810 - DNA, 25 bp, Homo sapien
tttgggttacatcttccggaggcgc

SEQ ID NO: 336811 - DNA, 25 bp, Homo sapien
gccctgggtttcaagatagagctac

SEQ ID NO: 336812 - DNA, 25 bp, Homo sapien
taattgatgtttgaataggcccaaa

SEQ ID NO: 336813 - DNA, 25 bp, Homo sapien
ttgatgtttgaataggcccaaactc

SEQ ID NO: 336814 - DNA, 25 bp, Homo sapien
gatgtttgaataggcccaaactcag

SEQ ID NO: 336815 - DNA, 25 bp, Homo sapien
aatttaattgatgtttgaataggcc

SEQ ID NO: 336816 - DNA, 25 bp, Homo sapien
gatgttggcctagactttgcgagaa

SEQ ID NO: 336817 - DNA, 25 bp, Homo sapien
tttgcgagaacgacaacttgccagt

SEQ ID NO: 336818 - DNA, 25 bp, Homo sapien
tactggcatgttttacggcgtgaca

SEQ ID NO: 336819 - DNA, 25 bp, Homo sapien
cataagacaatctgggcacgtccca

SEQ ID NO: 336820 - DNA, 25 bp, Homo sapien
tacaacgtgtgcagatggaactaca

SEQ ID NO: 336821 - DNA, 25 bp, Homo sapien
cgctgctttatcgaggaaactgtcc

SEQ ID NO: 336822 - DNA, 25 bp, Homo sapien
cactgctcaaggctaatgggaccat

SEQ ID NO: 336823 - DNA, 25 bp, Homo sapien
tggtccctgatggaagtccctgtcg

SEQ ID NO: 336824 - DNA, 25 bp, Homo sapien
cttcattcacagcctgcatcttcat

SEQ ID NO: 336825 - DNA, 25 bp, Homo sapien
tcttcattcacagcctgcatcttca

SEQ ID NO: 336826 - DNA, 25 bp, Homo sapien
tggaaaggggatggggagagacaac

SEQ ID NO: 336827 - DNA, 25 bp, Homo sapien
ggggatggggagagacaacttctaa

SEQ ID NO: 336828 - DNA, 25 bp, Homo sapien
aaggggatggggagagacaacttct

SEQ ID NO: 336829 - DNA, 25 bp, Homo sapien
ggatggggagagacaacttctaaaa

SEQ ID NO: 336830 - DNA, 25 bp, Homo sapien
gatgagggaaacgaaggcagaggag

SEQ ID NO: 336831 - DNA, 25 bp, Homo sapien
aatccagggtcaagacatggcagga

SEQ ID NO: 336832 - DNA, 25 bp, Homo sapien
ccagggtcaagacatggcaggatgt

SEQ ID NO: 336833 - DNA, 25 bp, Homo sapien
ttaaatccagggtcaagacatggca

SEQ ID NO: 336834 - DNA, 25 bp, Homo sapien
agtgagaggaaaacgagtgtgcata

SEQ ID NO: 336835 - DNA, 25 bp, Homo sapien
aagtgagaggaaaacgagtgtgcat

SEQ ID NO: 336836 - DNA, 25 bp, Homo sapien
cttgtcagcgggcatgtaccaggca

SEQ ID NO: 336837 - DNA, 25 bp, Homo sapien
gcctctgtagctggatctgcgcctg

SEQ ID NO: 336838 - DNA, 25 bp, Homo sapien
cacgtttggcgaactactgtccgac

SEQ ID NO: 336839 - DNA, 25 bp, Homo sapien
tcctcattggcgtagctcgtgctca

SEQ ID NO: 336840 - DNA, 25 bp, Homo sapien
ttcccccaggatggcgacgtgagcg

SEQ ID NO: 336841 - DNA, 25 bp, Homo sapien
ggctgcgcctgacgcttgctgctgc

SEQ ID NO: 336842 - DNA, 25 bp, Homo sapien
cgcgcgtctcgcctgcggagcttcc

SEQ ID NO: 336843 - DNA, 25 bp, Homo sapien
gatggcgacgtgagcgccttttcgt

SEQ ID NO: 336844 - DNA, 25 bp, Homo sapien
ggagccgccgagtacttgtcaaaga

SEQ ID NO: 336845 - DNA, 25 bp, Homo sapien
cgaggctggcgatcatgttctggca

SEQ ID NO: 336846 - DNA, 25 bp, Homo sapien
tcattccccgacgtggattccaggg

SEQ ID NO: 336847 - DNA, 25 bp, Homo sapien
ttcgcgctcaaagttcggctgggcc

SEQ ID NO: 336848 - DNA, 25 bp, Homo sapien
taatcatgagggccgcgttttggcg

SEQ ID NO: 336849 - DNA, 25 bp, Homo sapien
cttaatcatgagggccgcgttttgg

SEQ ID NO: 336850 - DNA, 25 bp, Homo sapien
ttaatcatgagggccgcgttttggc

SEQ ID NO: 336851 - DNA, 25 bp, Homo sapien
caggggcggccccgaagggaagctg

SEQ ID NO: 336852 - DNA, 25 bp, Homo sapien
aggcggtgtgaactcgccgggtagg

SEQ ID NO: 336853 - DNA, 25 bp, Homo sapien
ggcggtgtgaactcgccgggtaggc

SEQ ID NO: 336854 - DNA, 25 bp, Homo sapien
atccagagcgccgttgtgcatgctg

SEQ ID NO: 336855 - DNA, 25 bp, Homo sapien
gccgttgtgcatgctgccgttccac

SEQ ID NO: 336856 - DNA, 25 bp, Homo sapien
tgattatccagagcgccgttgtgca

SEQ ID NO: 336857 - DNA, 25 bp, Homo sapien
gagaggtgattatccagagcgccgt

SEQ ID NO: 336858 - DNA, 25 bp, Homo sapien
acaggctcggaataagggtgcatgc

SEQ ID NO: 336859 - DNA, 25 bp, Homo sapien
gatactcgaattgcgcgtgctggct

SEQ ID NO: 336860 - DNA, 25 bp, Homo sapien
ggcgcgtcgaaatgctgcagccgct

SEQ ID NO: 336861 - DNA, 25 bp, Homo sapien
ccagccggtggatgggatactcgaa

SEQ ID NO: 336862 - DNA, 25 bp, Homo sapien
cgaattttgtcggactagaagcccg

SEQ ID NO: 336863 - DNA, 25 bp, Homo sapien
actgaacctctcaaagaacacacca

SEQ ID NO: 336864 - DNA, 25 bp, Homo sapien
gctgcattaacgggtgcctggagcc

SEQ ID NO: 336865 - DNA, 25 bp, Homo sapien
agcgcaggcgggcacgaattttgtc

SEQ ID NO: 336866 - DNA, 25 bp, Homo sapien
ggctgggcgtgcattttggacaagc

SEQ ID NO: 336867 - DNA, 25 bp, Homo sapien
gggcgtgcattttggacaagcccac

SEQ ID NO: 336868 - DNA, 25 bp, Homo sapien
gctgcggtggctgggcgtgcatttt

SEQ ID NO: 336869 - DNA, 25 bp, Homo sapien
gctgggcgtgcattttggacaagcc

SEQ ID NO: 336870 - DNA, 25 bp, Homo sapien
tggcgacccgctgcataatgaggca

SEQ ID NO: 336871 - DNA, 25 bp, Homo sapien
aacatgtcaaaatgtcccgagggcg

SEQ ID NO: 336872 - DNA, 25 bp, Homo sapien
ggtgttcatgctcagtccggtctcg

SEQ ID NO: 336873 - DNA, 25 bp, Homo sapien
taattgtattccagcgagtcgacgg

SEQ ID NO: 336874 - DNA, 25 bp, Homo sapien
caatagggcatgacagccggctctc

SEQ ID NO: 336875 - DNA, 25 bp, Homo sapien
gagggggatcaatagggcatgacag

SEQ ID NO: 336876 - DNA, 25 bp, Homo sapien
gatcaatagggcatgacagccggct

SEQ ID NO: 336877 - DNA, 25 bp, Homo sapien
ggatcaatagggcatgacagccggc

SEQ ID NO: 336878 - DNA, 25 bp, Homo sapien
ctctcacatcttgcgaggccgcggg

SEQ ID NO: 336879 - DNA, 25 bp, Homo sapien
tcctgaagctccgattctgcccggg

SEQ ID NO: 336880 - DNA, 25 bp, Homo sapien
gcggggtattagctcctctcctgaa

SEQ ID NO: 336881 - DNA, 25 bp, Homo sapien
ccgcggggcctctaggagccgtgtt

SEQ ID NO: 336882 - DNA, 25 bp, Homo sapien
acgaagccgcggatgaacggagaca

SEQ ID NO: 336883 - DNA, 25 bp, Homo sapien
ttgggagagcagagcgatcaccttc

SEQ ID NO: 336884 - DNA, 25 bp, Homo sapien
gatcaccttctcaagtccgattggg

SEQ ID NO: 336885 - DNA, 25 bp, Homo sapien
gcctcccggagtccgtggcagagct

SEQ ID NO: 336886 - DNA, 25 bp, Homo sapien
gcagcccgagcctccaccgagcacg

SEQ ID NO: 336887 - DNA, 25 bp, Homo sapien
cgagcctccaccgagcacgatccgc

SEQ ID NO: 336888 - DNA, 25 bp, Homo sapien
gcctccaccgagcacgatccgctcg

SEQ ID NO: 336889 - DNA, 25 bp, Homo sapien
cgccgggcaccgacagagcggtccc

SEQ ID NO: 336890 - DNA, 25 bp, Homo sapien
aatccccgtaggctccgggcgagcg

SEQ ID NO: 336891 - DNA, 25 bp, Homo sapien
tgccggcccccgagccgaggacgca

SEQ ID NO: 336892 - DNA, 25 bp, Homo sapien
gtcggaggactggaggctccgctcg

SEQ ID NO: 336893 - DNA, 25 bp, Homo sapien
ctccgctcggcatcgccggtgccgg

SEQ ID NO: 336894 - DNA, 25 bp, Homo sapien
gttcggcgcgcagcttcgcggccac

SEQ ID NO: 336895 - DNA, 25 bp, Homo sapien
tcggcagcgggtgcgctgcgttcgg

SEQ ID NO: 336896 - DNA, 25 bp, Homo sapien
cctctgctcggcagcgggtgcgctg

SEQ ID NO: 336897 - DNA, 25 bp, Homo sapien
cgggtgcgctgcgttcggcgcgcag

SEQ ID NO: 336898 - DNA, 25 bp, Homo sapien
tgccgcttctgttctccgccgttgg

SEQ ID NO: 336899 - DNA, 25 bp, Homo sapien
aggtgcttcgcgagtccctctcgga

SEQ ID NO: 336900 - DNA, 25 bp, Homo sapien
ttgggtcgctccaaggctccggttc

SEQ ID NO: 336901 - DNA, 25 bp, Homo sapien
ccgccgttgggtgtctgagttcgcc

SEQ ID NO: 336902 - DNA, 25 bp, Homo sapien
ttcctgtggaataattccgtgtgct

SEQ ID NO: 336903 - DNA, 25 bp, Homo sapien
ttccaagagttagctccacaaggtg

SEQ ID NO: 336904 - DNA, 25 bp, Homo sapien
gttagctccacaaggtgtgtgagtg

SEQ ID NO: 336905 - DNA, 25 bp, Homo sapien
gaataattccgtgtgctccagggag

SEQ ID NO: 336906 - DNA, 25 bp, Homo sapien
ttgaccttgggccgctgggggaagc

SEQ ID NO: 336907 - DNA, 25 bp, Homo sapien
cttgaccttgggccgctgggggaag

SEQ ID NO: 336908 - DNA, 25 bp, Homo sapien
ctgcagagggtttgacagaagcgca

SEQ ID NO: 336909 - DNA, 25 bp, Homo sapien
acagcgcaatgtcaaggctgctgca

SEQ ID NO: 336910 - DNA, 25 bp, Homo sapien
gcagagggtttgacagaagcgcaca

SEQ ID NO: 336911 - DNA, 25 bp, Homo sapien
cagaagcgcacagcgcaatgtcaag

SEQ ID NO: 336912 - DNA, 25 bp, Homo sapien
aagacaggcccagactgccagagga

SEQ ID NO: 336913 - DNA, 25 bp, Homo sapien
ctgcagaagacaggcccagactgcc

SEQ ID NO: 336914 - DNA, 25 bp, Homo sapien
caggcccagactgccagaggatcat

SEQ ID NO: 336915 - DNA, 25 bp, Homo sapien
agacaggcccagactgccagaggat

SEQ ID NO: 336916 - DNA, 25 bp, Homo sapien
ccctcttggagcctttacttcctca

SEQ ID NO: 336917 - DNA, 25 bp, Homo sapien
gtccatcccggcactcagcaaggcc

SEQ ID NO: 336918 - DNA, 25 bp, Homo sapien
ggtccatcccggcactcagcaaggc

SEQ ID NO: 336919 - DNA, 25 bp, Homo sapien
gggcaggcatttgagctgagggaac

SEQ ID NO: 336920 - DNA, 25 bp, Homo sapien
agggcacaaaggtgtagtgacaggg

SEQ ID NO: 336921 - DNA, 25 bp, Homo sapien
tgaagttcaatgggggcaggcattt

SEQ ID NO: 336922 - DNA, 25 bp, Homo sapien
atgaggaagggcacaaaggtgtagt

SEQ ID NO: 336923 - DNA, 25 bp, Homo sapien
catgtaggggagagagcgaagtgcc

SEQ ID NO: 336924 - DNA, 25 bp, Homo sapien
cttgatcatggaccatgtaggggag

SEQ ID NO: 336925 - DNA, 25 bp, Homo sapien
agagcgaagtgccccagcttgggct

SEQ ID NO: 336926 - DNA, 25 bp, Homo sapien
agcttgggctggaacccaaggatta

SEQ ID NO: 336927 - DNA, 25 bp, Homo sapien
aaatgccgctcttgaccccaaatgg

SEQ ID NO: 336928 - DNA, 25 bp, Homo sapien
ggagtgcggtcctcacagcatgagc

SEQ ID NO: 336929 - DNA, 25 bp, Homo sapien
ggataccatagtccttgcccaggca

SEQ ID NO: 336930 - DNA, 25 bp, Homo sapien
tgtcagatcaatggattgccgcccc

SEQ ID NO: 336931 - DNA, 25 bp, Homo sapien
tttatgatcctgtttgtcatcccct

SEQ ID NO: 336932 - DNA, 25 bp, Homo sapien
tatgatcctgtttgtcatcccctac

SEQ ID NO: 336933 - DNA, 25 bp, Homo sapien
gactctgagcccctttatgatcctg

SEQ ID NO: 336934 - DNA, 25 bp, Homo sapien
tggcagttgactctgagccccttta

SEQ ID NO: 336935 - DNA, 25 bp, Homo sapien
ttctcgatgaccgtccctgtgccct

SEQ ID NO: 336936 - DNA, 25 bp, Homo sapien
tgaaggcaaaacccttgccccgaga

SEQ ID NO: 336937 - DNA, 25 bp, Homo sapien
ccccacttggagacttggtctcaat

SEQ ID NO: 336938 - DNA, 25 bp, Homo sapien
cttggagacttggtctcaattctcc

SEQ ID NO: 336939 - DNA, 25 bp, Homo sapien
ctatcacagaccaagaaggagacat

SEQ ID NO: 336940 - DNA, 25 bp, Homo sapien
gatagacaagaattgcctggaaaca

SEQ ID NO: 336941 - DNA, 25 bp, Homo sapien
tccccgatagacaagaattgcctgg

SEQ ID NO: 336942 - DNA, 25 bp, Homo sapien
gacaagaattgcctggaaacattca

SEQ ID NO: 336943 - DNA, 25 bp, Homo sapien
agatgcctccccgatagacaagaat

SEQ ID NO: 336944 - DNA, 25 bp, Homo sapien
agtggttccaacatcgccacatggc

SEQ ID NO: 336945 - DNA, 25 bp, Homo sapien
tcgccacatggccactgcacactgc

SEQ ID NO: 336946 - DNA, 25 bp, Homo sapien
aacatcgccacatggccactgcaca

SEQ ID NO: 336947 - DNA, 25 bp, Homo sapien
tggttccaacatcgccacatggcca

SEQ ID NO: 336948 - DNA, 25 bp, Homo sapien
ggatactggatgccctgcggcataa

SEQ ID NO: 336949 - DNA, 25 bp, Homo sapien
gatactggatgccctgcggcataac

SEQ ID NO: 336950 - DNA, 25 bp, Homo sapien
aggatactggatgccctgcggcata

SEQ ID NO: 336951 - DNA, 25 bp, Homo sapien
aaggatactggatgccctgcggcat

SEQ ID NO: 336952 - DNA, 25 bp, Homo sapien
catagtctgggtacagtgagaagag

SEQ ID NO: 336953 - DNA, 25 bp, Homo sapien
gtctttctagcacaacagaactgac

SEQ ID NO: 336954 - DNA, 25 bp, Homo sapien
gagggcacaggtttacacgagctga

SEQ ID NO: 336955 - DNA, 25 bp, Homo sapien
gatgagagtcctgaagacatagtct

SEQ ID NO: 336956 - DNA, 25 bp, Homo sapien
taaccacttagtgtggcacaggtac

SEQ ID NO: 336957 - DNA, 25 bp, Homo sapien
taattttcccagactggtagtgctg

SEQ ID NO: 336958 - DNA, 25 bp, Homo sapien
ggtagtgctgcgaattacagaattc

SEQ ID NO: 336959 - DNA, 25 bp, Homo sapien
tgtttcaaaccagacatggctcagg

SEQ ID NO: 336960 - DNA, 25 bp, Homo sapien
cattaaaatccatgcgccgggctct

SEQ ID NO: 336961 - DNA, 25 bp, Homo sapien
catctgggaaacgtcaacactgcaa

SEQ ID NO: 336962 - DNA, 25 bp, Homo sapien
cctgatgacgtcctacttgagagca

SEQ ID NO: 336963 - DNA, 25 bp, Homo sapien
caatgatactacagatgccagcgag

SEQ ID NO: 336964 - DNA, 25 bp, Homo sapien
cttgttcccctcacttgaccttgat

SEQ ID NO: 336965 - DNA, 25 bp, Homo sapien
actcatcactggctgcgcttgttcc

SEQ ID NO: 336966 - DNA, 25 bp, Homo sapien
tgttcccctcacttgaccttgatta

SEQ ID NO: 336967 - DNA, 25 bp, Homo sapien
cactggctgcgcttgttcccctcac

SEQ ID NO: 336968 - DNA, 25 bp, Homo sapien
aaaactaaagtgcatttacgcagag

SEQ ID NO: 336969 - DNA, 25 bp, Homo sapien
ggattactaaattcaacctggtcca

SEQ ID NO: 336970 - DNA, 25 bp, Homo sapien
tacgcagagtaaagctaactgtaac

SEQ ID NO: 336971 - DNA, 25 bp, Homo sapien
taactgtaacaactgaagacgaaat

SEQ ID NO: 336972 - DNA, 25 bp, Homo sapien
tcagcaagttaactgcccatcacca

SEQ ID NO: 336973 - DNA, 25 bp, Homo sapien
agcaagttaactgcccatcaccaaa

SEQ ID NO: 336974 - DNA, 25 bp, Homo sapien
tgctcagcaagttaactgcccatca

SEQ ID NO: 336975 - DNA, 25 bp, Homo sapien
ttctgctcagcaagttaactgccca

SEQ ID NO: 336976 - DNA, 25 bp, Homo sapien
gtctctgaccctacaggggactcat

SEQ ID NO: 336977 - DNA, 25 bp, Homo sapien
attgtctctgaccctacaggggact

SEQ ID NO: 336978 - DNA, 25 bp, Homo sapien
acattgtctctgaccctacagggga

SEQ ID NO: 336979 - DNA, 25 bp, Homo sapien
cattgtctctgaccctacaggggac

SEQ ID NO: 336980 - DNA, 25 bp, Homo sapien
ctcgaacggaacccctcttacgcat

SEQ ID NO: 336981 - DNA, 25 bp, Homo sapien
cagccgacgtgcctcgaacggaacc

SEQ ID NO: 336982 - DNA, 25 bp, Homo sapien
agcagccgacgtgcctcgaacggaa

SEQ ID NO: 336983 - DNA, 25 bp, Homo sapien
gcagccgacgtgcctcgaacggaac

SEQ ID NO: 336984 - DNA, 25 bp, Homo sapien
gaagtgatgttcataaccatatcca

SEQ ID NO: 336985 - DNA, 25 bp, Homo sapien
cgtaaaataaaattgtgagctgctg

SEQ ID NO: 336986 - DNA, 25 bp, Homo sapien
tgctgaaatcagactctaaataggg

SEQ ID NO: 336987 - DNA, 25 bp, Homo sapien
tctagaagagattatgaagtgatgt

SEQ ID NO: 336988 - DNA, 25 bp, Homo sapien
caggggggtgcttgttagagtcaga

SEQ ID NO: 336989 - DNA, 25 bp, Homo sapien
cgagggccaggggggtgcttgttag

SEQ ID NO: 336990 - DNA, 25 bp, Homo sapien
gccaggggggtgcttgttagagtca

SEQ ID NO: 336991 - DNA, 25 bp, Homo sapien
ctaaaactggatagggtagcgaggg

SEQ ID NO: 336992 - DNA, 25 bp, Homo sapien
ggaaccagcctacagaactaaagct

SEQ ID NO: 336993 - DNA, 25 bp, Homo sapien
tctagtctaccttcacgcaagatgc

SEQ ID NO: 336994 - DNA, 25 bp, Homo sapien
gaatagcagtgtctaagaaactcca

SEQ ID NO: 336995 - DNA, 25 bp, Homo sapien
taaaacgactgtgaaccaggaacca

SEQ ID NO: 336996 - DNA, 25 bp, Homo sapien
caacaaaaaagctggcgatggaagt

SEQ ID NO: 336997 - DNA, 25 bp, Homo sapien
gcgatggaagtttgtaaatatccgt

SEQ ID NO: 336998 - DNA, 25 bp, Homo sapien
gagtctcgtcttccattctcctaat

SEQ ID NO: 336999 - DNA, 25 bp, Homo sapien
cctaatgtcttccatcgtgagatcg

SEQ ID NO: 337000 - DNA, 25 bp, Homo sapien
ttctactttgctttgcagtccccac

SEQ ID NO: 337001 - DNA, 25 bp, Homo sapien
ttgctttgcagtccccaccacttga

SEQ ID NO: 337002 - DNA, 25 bp, Homo sapien
cacttgaatttgatggtcaccagct

SEQ ID NO: 337003 - DNA, 25 bp, Homo sapien
tataggcacacatctggggacagtc

SEQ ID NO: 337004 - DNA, 25 bp, Homo sapien
taatacgtaactttagtccatccca

SEQ ID NO: 337005 - DNA, 25 bp, Homo sapien
aattatctgggtactatttcaagtc

SEQ ID NO: 337006 - DNA, 25 bp, Homo sapien
tttgccctcagcagagtattttcgg

SEQ ID NO: 337007 - DNA, 25 bp, Homo sapien
gatcaactcttctaggttatcagca

SEQ ID NO: 337008 - DNA, 25 bp, Homo sapien
ttacacgcaagcaccatcgtgccca

SEQ ID NO: 337009 - DNA, 25 bp, Homo sapien
ctgggattacacgcaagcaccatcg

SEQ ID NO: 337010 - DNA, 25 bp, Homo sapien
gattacacgcaagcaccatcgtgcc

SEQ ID NO: 337011 - DNA, 25 bp, Homo sapien
gggattacacgcaagcaccatcgtg

SEQ ID NO: 337012 - DNA, 25 bp, Homo sapien
ccaagactctgcctgtcagaaaggt

SEQ ID NO: 337013 - DNA, 25 bp, Homo sapien
tgccaagactctgcctgtcagaaag

SEQ ID NO: 337014 - DNA, 25 bp, Homo sapien
gttgccaagactctgcctgtcagaa

SEQ ID NO: 337015 - DNA, 25 bp, Homo sapien
aagactctgcctgtcagaaaggtca

SEQ ID NO: 337016 - DNA, 25 bp, Homo sapien
cctctcttggtcttgactgactgga

SEQ ID NO: 337017 - DNA, 25 bp, Homo sapien
tgactggaataatgctgggtcttca

SEQ ID NO: 337018 - DNA, 25 bp, Homo sapien
actggaataatgctgggtcttcatc

SEQ ID NO: 337019 - DNA, 25 bp, Homo sapien
gactggaataatgctgggtcttcat

SEQ ID NO: 337020 - DNA, 25 bp, Homo sapien
gaatactgtgggtgaagacagctgt

SEQ ID NO: 337021 - DNA, 25 bp, Homo sapien
gtagcctacttgagtcttcagctcc

SEQ ID NO: 337022 - DNA, 25 bp, Homo sapien
gctcctgggtattctgaaggctgaa

SEQ ID NO: 337023 - DNA, 25 bp, Homo sapien
tgcagacttctcatctcattagttc

SEQ ID NO: 337024 - DNA, 25 bp, Homo sapien
aaacgtgtatttgaggtgctttctc

SEQ ID NO: 337025 - DNA, 25 bp, Homo sapien
actgctaccacaaaacgtgtatttg

SEQ ID NO: 337026 - DNA, 25 bp, Homo sapien
aagaccttgacaacagtctgtttca

SEQ ID NO: 337027 - DNA, 25 bp, Homo sapien
ggcaagatgagacaggcgtttggca

SEQ ID NO: 337028 - DNA, 25 bp, Homo sapien
tagcaaactactctgtgaccctagg

SEQ ID NO: 337029 - DNA, 25 bp, Homo sapien
ggatgaccagcagaaggacgcttcc

SEQ ID NO: 337030 - DNA, 25 bp, Homo sapien
ttatgcagaaatcccagactacttg

SEQ ID NO: 337031 - DNA, 25 bp, Homo sapien
catggtgtactctgtgaccactggg

SEQ ID NO: 337032 - DNA, 25 bp, Homo sapien
attctagttgctccatcctgataac

SEQ ID NO: 337033 - DNA, 25 bp, Homo sapien
ttattctagttgctccatcctgata

SEQ ID NO: 337034 - DNA, 25 bp, Homo sapien
tattctagttgctccatcctgataa

SEQ ID NO: 337035 - DNA, 25 bp, Homo sapien
acagatcctcctcacttgggctcaa

SEQ ID NO: 337036 - DNA, 25 bp, Homo sapien
gagaggctaaccaacttgtccaaga

SEQ ID NO: 337037 - DNA, 25 bp, Homo sapien
gaatggaaatctgaagcccacctag

SEQ ID NO: 337038 - DNA, 25 bp, Homo sapien
gccagtaggtggcagagcctcagaa

SEQ ID NO: 337039 - DNA, 25 bp, Homo sapien
tgcctgtaaacactgcccattttcg

SEQ ID NO: 337040 - DNA, 25 bp, Homo sapien
gtgatgggaaccagggcctccacgg

SEQ ID NO: 337041 - DNA, 25 bp, Homo sapien
tcttgtgcaatctgcccttactctg

SEQ ID NO: 337042 - DNA, 25 bp, Homo sapien
agggcctccacggttcttgtgcaat

SEQ ID NO: 337043 - DNA, 25 bp, Homo sapien
tgtccagcctaagattattctatta

SEQ ID NO: 337044 - DNA, 25 bp, Homo sapien
ctgtctaagcctcctcatgtagctg

SEQ ID NO: 337045 - DNA, 25 bp, Homo sapien
atctttatcttgagtcttaatctgg

SEQ ID NO: 337046 - DNA, 25 bp, Homo sapien
tcttaatctggcatgaggaataagc

SEQ ID NO: 337047 - DNA, 25 bp, Homo sapien
taaagggatcacttgcacaaagcca

SEQ ID NO: 337048 - DNA, 25 bp, Homo sapien
tcacttcggcatagaaatgtaggcc

SEQ ID NO: 337049 - DNA, 25 bp, Homo sapien
tctctttgctgcacagacgtactag

SEQ ID NO: 337050 - DNA, 25 bp, Homo sapien
gacgtactagacttcactccaagct

SEQ ID NO: 337051 - DNA, 25 bp, Homo sapien
tttccatgtgtttggatctaaacca

SEQ ID NO: 337052 - DNA, 25 bp, Homo sapien
acttgacttctatctgcaatatcta

SEQ ID NO: 337053 - DNA, 25 bp, Homo sapien
ggttcaacttgacttctatctgcaa

SEQ ID NO: 337054 - DNA, 25 bp, Homo sapien
atgtgtttggatctaaaccatgtac

SEQ ID NO: 337055 - DNA, 25 bp, Homo sapien
tttgtgccatgtttcgattttaatg

SEQ ID NO: 337056 - DNA, 25 bp, Homo sapien
ctaatgttcccaagtctggtttgtg

SEQ ID NO: 337057 - DNA, 25 bp, Homo sapien
tctaatgttcccaagtctggtttgt

SEQ ID NO: 337058 - DNA, 25 bp, Homo sapien
ttgtgccatgtttcgattttaatga

SEQ ID NO: 337059 - DNA, 25 bp, Homo sapien
aacaggaaaatgacagtgatcttct

SEQ ID NO: 337060 - DNA, 25 bp, Homo sapien
caggaaaatgacagtgatcttctac

SEQ ID NO: 337061 - DNA, 25 bp, Homo sapien
acaacaggaaaatgacagtgatctt

SEQ ID NO: 337062 - DNA, 25 bp, Homo sapien
acacaacaggaaaatgacagtgatc

SEQ ID NO: 337063 - DNA, 25 bp, Homo sapien
gagggagcttttcccagtataggca

SEQ ID NO: 337064 - DNA, 25 bp, Homo sapien
ccacgtctgagggagcttttcccag

SEQ ID NO: 337065 - DNA, 25 bp, Homo sapien
cgtctgagggagcttttcccagtat

SEQ ID NO: 337066 - DNA, 25 bp, Homo sapien
tctgagggagcttttcccagtatag

SEQ ID NO: 337067 - DNA, 25 bp, Homo sapien
ggtggaggggtgcaatggctgctgg

SEQ ID NO: 337068 - DNA, 25 bp, Homo sapien
gggaatccctctcattctcagggtg

SEQ ID NO: 337069 - DNA, 25 bp, Homo sapien
cttctcaaagacactggtactggga

SEQ ID NO: 337070 - DNA, 25 bp, Homo sapien
gacactggtactgggaatccctctc

SEQ ID NO: 337071 - DNA, 25 bp, Homo sapien
tctcatgaaacaccaaggagccctc

SEQ ID NO: 337072 - DNA, 25 bp, Homo sapien
ctcatgaaacaccaaggagccctcg

SEQ ID NO: 337073 - DNA, 25 bp, Homo sapien
tcatgaaacaccaaggagccctcgg

SEQ ID NO: 337074 - DNA, 25 bp, Homo sapien
atgaaacaccaaggagccctcggga

SEQ ID NO: 337075 - DNA, 25 bp, Homo sapien
tgacaatgtaaaggacccatgcaga

SEQ ID NO: 337076 - DNA, 25 bp, Homo sapien
tgtgtgaccttaggcctgctacttg

SEQ ID NO: 337077 - DNA, 25 bp, Homo sapien
tggaattcctattacctgctctgca

SEQ ID NO: 337078 - DNA, 25 bp, Homo sapien
gaacttctgatctactaccccaatg

SEQ ID NO: 337079 - DNA, 25 bp, Homo sapien
tggaagcttagcctccgaaaagaac

SEQ ID NO: 337080 - DNA, 25 bp, Homo sapien
tgataaaccaatactcggaacagcg

SEQ ID NO: 337081 - DNA, 25 bp, Homo sapien
tgactaaacgaggaaaatgtgcaca

SEQ ID NO: 337082 - DNA, 25 bp, Homo sapien
taacatggtagttcaagtgtgccag

SEQ ID NO: 337083 - DNA, 25 bp, Homo sapien
gactcttcaggaatacataccgctt

SEQ ID NO: 337084 - DNA, 25 bp, Homo sapien
ttaagagttacccatagcacaatgc

SEQ ID NO: 337085 - DNA, 25 bp, Homo sapien
tgaccataaggtacactgaacgcct

SEQ ID NO: 337086 - DNA, 25 bp, Homo sapien
tgaacgcctgatctaggcacattcc

SEQ ID NO: 337087 - DNA, 25 bp, Homo sapien
aatggatgcaattattgagttaatt

SEQ ID NO: 337088 - DNA, 25 bp, Homo sapien
gaatggatgcaattattgagttaat

SEQ ID NO: 337089 - DNA, 25 bp, Homo sapien
agaatggatgcaattattgagttaa

SEQ ID NO: 337090 - DNA, 25 bp, Homo sapien
cacatgaaattttaaaataactatt

SEQ ID NO: 337091 - DNA, 25 bp, Homo sapien
tggaaccacatgaaattttaaaata

SEQ ID NO: 337092 - DNA, 25 bp, Homo sapien
tcaataaaaacctcttctgtttcga

SEQ ID NO: 337093 - DNA, 25 bp, Homo sapien
ccacatgaaattttaaaataactat

SEQ ID NO: 337094 - DNA, 25 bp, Homo sapien
tatagactataccatctggaatgcc

SEQ ID NO: 337095 - DNA, 25 bp, Homo sapien
ccccaggaagagtccagtgtcttta

SEQ ID NO: 337096 - DNA, 25 bp, Homo sapien
taaatcaagtagcagagttaagctg

SEQ ID NO: 337097 - DNA, 25 bp, Homo sapien
tatgtgtcactataaaccaaggatg

SEQ ID NO: 337098 - DNA, 25 bp, Homo sapien
atttaaaaggtgcatgtcctcccag

SEQ ID NO: 337099 - DNA, 25 bp, Homo sapien
gattagactgccaaacttaagggaa

SEQ ID NO: 337100 - DNA, 25 bp, Homo sapien
taaggcatatagacacatgtacaac

SEQ ID NO: 337101 - DNA, 25 bp, Homo sapien
caaactcttgaagggcaattttggc

SEQ ID NO: 337102 - DNA, 25 bp, Homo sapien
caaggcgtcaaatgtgaacaccgct

SEQ ID NO: 337103 - DNA, 25 bp, Homo sapien
tacaaatatttgatggcaaggagca

SEQ ID NO: 337104 - DNA, 25 bp, Homo sapien
taagccaggtagttacaaggcgtca

SEQ ID NO: 337105 - DNA, 25 bp, Homo sapien
aatggacttacaacgtagggaatgg

SEQ ID NO: 337106 - DNA, 25 bp, Homo sapien
tttaggtgataaattttgtgcgtat

SEQ ID NO: 337107 - DNA, 25 bp, Homo sapien
tctttaggtgataaattttgtgcgt

SEQ ID NO: 337108 - DNA, 25 bp, Homo sapien
ctctttaggtgataaattttgtgcg

SEQ ID NO: 337109 - DNA, 25 bp, Homo sapien
taggtgataaattttgtgcgtatac

SEQ ID NO: 337110 - DNA, 25 bp, Homo sapien
ttcttactagcttctgcaacagagt

SEQ ID NO: 337111 - DNA, 25 bp, Homo sapien
gcaacagagtaaagctgcccaacct

SEQ ID NO: 337112 - DNA, 25 bp, Homo sapien
accaccagtctcattcttactagct

SEQ ID NO: 337113 - DNA, 25 bp, Homo sapien
tctgcaacagagtaaagctgcccaa

SEQ ID NO: 337114 - DNA, 25 bp, Homo sapien
tttcagtgacaataccaagactcaa

SEQ ID NO: 337115 - DNA, 25 bp, Homo sapien
ggagtataacaaaaagccgagaaca

SEQ ID NO: 337116 - DNA, 25 bp, Homo sapien
gattcaaccagctgaaatcaaaaga

SEQ ID NO: 337117 - DNA, 25 bp, Homo sapien
caaaaagatttcgacaagctgattc

SEQ ID NO: 337118 - DNA, 25 bp, Homo sapien
ctcctgaacagaacatggcaaaacc

SEQ ID NO: 337119 - DNA, 25 bp, Homo sapien
aacagaacatggcaaaaccacacgg

SEQ ID NO: 337120 - DNA, 25 bp, Homo sapien
tcctgaacagaacatggcaaaacca

SEQ ID NO: 337121 - DNA, 25 bp, Homo sapien
tgaacagaacatggcaaaaccacac

SEQ ID NO: 337122 - DNA, 25 bp, Homo sapien
cttattgtttgtattagtgacaatc

SEQ ID NO: 337123 - DNA, 25 bp, Homo sapien
agtttgcattccagctacactttcc

SEQ ID NO: 337124 - DNA, 25 bp, Homo sapien
cttattcgtaagtatgaagagagta

SEQ ID NO: 337125 - DNA, 25 bp, Homo sapien
aacccagattatatctagtttgcat

SEQ ID NO: 337126 - DNA, 25 bp, Homo sapien
acaaatctcccatcactgccgtccc

SEQ ID NO: 337127 - DNA, 25 bp, Homo sapien
cacggcctcgctcgcgcccacagac

SEQ ID NO: 337128 - DNA, 25 bp, Homo sapien
ctcgctcgcgcccacagacccactc

SEQ ID NO: 337129 - DNA, 25 bp, Homo sapien
actgccgtcccacggcctcgctcgc

SEQ ID NO: 337130 - DNA, 25 bp, Homo sapien
ttctactgcggctgcgcaagctcga

SEQ ID NO: 337131 - DNA, 25 bp, Homo sapien
actgcggttgcgcagcctgccgaag

SEQ ID NO: 337132 - DNA, 25 bp, Homo sapien
ctcttgtctgcttacgagggctcct

SEQ ID NO: 337133 - DNA, 25 bp, Homo sapien
aagagcgtgcggcttctactgcggc

SEQ ID NO: 337134 - DNA, 25 bp, Homo sapien
gaagatgttgaaccgtatggtgcag

SEQ ID NO: 337135 - DNA, 25 bp, Homo sapien
ggattaacgtccctgtcgtgtgaca

SEQ ID NO: 337136 - DNA, 25 bp, Homo sapien
taggaaagacatgaaccaacgccca

SEQ ID NO: 337137 - DNA, 25 bp, Homo sapien
gacggaaagattaggttgctggaaa

SEQ ID NO: 337138 - DNA, 25 bp, Homo sapien
aaatgggtcataacgcagcagagat

SEQ ID NO: 337139 - DNA, 25 bp, Homo sapien
gaaacatgaacagcgcatttggccc

SEQ ID NO: 337140 - DNA, 25 bp, Homo sapien
catttgatactggaataccctctta

SEQ ID NO: 337141 - DNA, 25 bp, Homo sapien
cagggcagctgtgattcaagaagtt

SEQ ID NO: 337142 - DNA, 25 bp, Homo sapien
gaatgttctatctttggccagttga

SEQ ID NO: 337143 - DNA, 25 bp, Homo sapien
ggcaaatagtacttcaagagcacag

SEQ ID NO: 337144 - DNA, 25 bp, Homo sapien
tataacaagatctagcacaaaagct

SEQ ID NO: 337145 - DNA, 25 bp, Homo sapien
tattttctgccgttccagactggaa

SEQ ID NO: 337146 - DNA, 25 bp, Homo sapien
caagtttggttgacagcgggaccca

SEQ ID NO: 337147 - DNA, 25 bp, Homo sapien
taaaaacccctaggatggagctcag

SEQ ID NO: 337148 - DNA, 25 bp, Homo sapien
tacgtcccagcaaaaggccctgttg

SEQ ID NO: 337149 - DNA, 25 bp, Homo sapien
gaggcatttgcttccatccacgtgg

SEQ ID NO: 337150 - DNA, 25 bp, Homo sapien
gaaggaagcctcaaagggcgcgcgg

SEQ ID NO: 337151 - DNA, 25 bp, Homo sapien
gagacaggaacttgtagccatttcc

SEQ ID NO: 337152 - DNA, 25 bp, Homo sapien
agacaggaacttgtagccatttcca

SEQ ID NO: 337153 - DNA, 25 bp, Homo sapien
ggagacaggaacttgtagccatttc

SEQ ID NO: 337154 - DNA, 25 bp, Homo sapien
tgctatatccggaactcaccttggg

SEQ ID NO: 337155 - DNA, 25 bp, Homo sapien
gacttgagcgagcagatccagctga

SEQ ID NO: 337156 - DNA, 25 bp, Homo sapien
aacgcactggtttctgacgctctga

SEQ ID NO: 337157 - DNA, 25 bp, Homo sapien
tgaagacgctccaccgcaatgagat

SEQ ID NO: 337158 - DNA, 25 bp, Homo sapien
gaagtgcacagtccgtcgattagct

SEQ ID NO: 337159 - DNA, 25 bp, Homo sapien
gactggagcgcgaagtgcacagtcc

SEQ ID NO: 337160 - DNA, 25 bp, Homo sapien
cagtccgtcgattagcttgcttccc

SEQ ID NO: 337161 - DNA, 25 bp, Homo sapien
gcttgcttcccggttttcaggatta

SEQ ID NO: 337162 - DNA, 25 bp, Homo sapien
agcgctatagggctccttgtgcaac

SEQ ID NO: 337163 - DNA, 25 bp, Homo sapien
tgtgcaacttcatggaatgcctgca

SEQ ID NO: 337164 - DNA, 25 bp, Homo sapien
cttcgggaagattccagatcttgaa

SEQ ID NO: 337165 - DNA, 25 bp, Homo sapien
tcttgaacatgagcgctatagggct

SEQ ID NO: 337166 - DNA, 25 bp, Homo sapien
gagctgatgccaagtcctgctcctt

SEQ ID NO: 337167 - DNA, 25 bp, Homo sapien
gccgccacagctggacgctgatgga

SEQ ID NO: 337168 - DNA, 25 bp, Homo sapien
gctggacgctgatggagacctgaat

SEQ ID NO: 337169 - DNA, 25 bp, Homo sapien
gccaggaactcgtggcatcccggga

SEQ ID NO: 337170 - DNA, 25 bp, Homo sapien
gggggacagcgtgagcaccctgtgt

SEQ ID NO: 337171 - DNA, 25 bp, Homo sapien
gggacagcgtgagcaccctgtgtct

SEQ ID NO: 337172 - DNA, 25 bp, Homo sapien
aggggggacagcgtgagcaccctgt

SEQ ID NO: 337173 - DNA, 25 bp, Homo sapien
gacagcgtgagcaccctgtgtctcc

SEQ ID NO: 337174 - DNA, 25 bp, Homo sapien
tggctccgtttgacagcacgtgcac

SEQ ID NO: 337175 - DNA, 25 bp, Homo sapien
gccgcagcccgtgtggctccgtttg

SEQ ID NO: 337176 - DNA, 25 bp, Homo sapien
tttgacagcacgtgcaccccgagct

SEQ ID NO: 337177 - DNA, 25 bp, Homo sapien
gcccgtgtggctccgtttgacagca

SEQ ID NO: 337178 - DNA, 25 bp, Homo sapien
gacaacagttgctacttaaagtagt

SEQ ID NO: 337179 - DNA, 25 bp, Homo sapien
caacagttgctacttaaagtagtac

SEQ ID NO: 337180 - DNA, 25 bp, Homo sapien
ctgacaacagttgctacttaaagta

SEQ ID NO: 337181 - DNA, 25 bp, Homo sapien
acagttgctacttaaagtagtactc

SEQ ID NO: 337182 - DNA, 25 bp, Homo sapien
tcggaggcagtgatgagtttgcaaa

SEQ ID NO: 337183 - DNA, 25 bp, Homo sapien
gctgctcgcccgtctcggaggcagt

SEQ ID NO: 337184 - DNA, 25 bp, Homo sapien
tgctcgcccgtctcggaggcagtga

SEQ ID NO: 337185 - DNA, 25 bp, Homo sapien
gctcgcccgtctcggaggcagtgat

SEQ ID NO: 337186 - DNA, 25 bp, Homo sapien
tggggttggccgcacagcttcatcg

SEQ ID NO: 337187 - DNA, 25 bp, Homo sapien
agtgtctgccggcacgacctcccat

SEQ ID NO: 337188 - DNA, 25 bp, Homo sapien
atcatcccgggaaggggcagcgcca

SEQ ID NO: 337189 - DNA, 25 bp, Homo sapien
gggttggccgcacagcttcatcggg

SEQ ID NO: 337190 - DNA, 25 bp, Homo sapien
ttgggaagaagacagccgctggcag

SEQ ID NO: 337191 - DNA, 25 bp, Homo sapien
ctgggatgtgtacatggcattgcgc

SEQ ID NO: 337192 - DNA, 25 bp, Homo sapien
tgctgcactgctggagccggtcgcc

SEQ ID NO: 337193 - DNA, 25 bp, Homo sapien
tggcattgcgctgcccattctggat

SEQ ID NO: 337194 - DNA, 25 bp, Homo sapien
cccactgggtcaaggagtatccagg

SEQ ID NO: 337195 - DNA, 25 bp, Homo sapien
aggacagacgatcagccctggctgt

SEQ ID NO: 337196 - DNA, 25 bp, Homo sapien
ccaccccagaagataataccaagga

SEQ ID NO: 337197 - DNA, 25 bp, Homo sapien
agtgtgtactcacaccagccaggag

SEQ ID NO: 337198 - DNA, 25 bp, Homo sapien
gagggcctggccgatgagtgatgag

SEQ ID NO: 337199 - DNA, 25 bp, Homo sapien
gggctgttcagcttaacgtcactcc

SEQ ID NO: 337200 - DNA, 25 bp, Homo sapien
acgtcactcccgatgagcatgaacc

SEQ ID NO: 337201 - DNA, 25 bp, Homo sapien
gtgcagcagcactcgcagggcgtcc

SEQ ID NO: 337202 - DNA, 25 bp, Homo sapien
tccccacaagccctgcagtaggttt

SEQ ID NO: 337203 - DNA, 25 bp, Homo sapien
cacaggacttgtgtgatgaggacaa

SEQ ID NO: 337204 - DNA, 25 bp, Homo sapien
gggtcacctctactttctgcgtctc

SEQ ID NO: 337205 - DNA, 25 bp, Homo sapien
ttctgactgccaggagcaggttgca

SEQ ID NO: 337206 - DNA, 25 bp, Homo sapien
gccacccctgcagctgtgttgacag

SEQ ID NO: 337207 - DNA, 25 bp, Homo sapien
ggacctggcagagggactgacccac

SEQ ID NO: 337208 - DNA, 25 bp, Homo sapien
gcagctgtgttgacaggacctggca

SEQ ID NO: 337209 - DNA, 25 bp, Homo sapien
ccctgcagctgtgttgacaggacct

SEQ ID NO: 337210 - DNA, 25 bp, Homo sapien
tttggcagaagcaagactcagcaca

SEQ ID NO: 337211 - DNA, 25 bp, Homo sapien
gaatgggtcatccagtgtacactga

SEQ ID NO: 337212 - DNA, 25 bp, Homo sapien
caaatggttctgttgctccctggtc

SEQ ID NO: 337213 - DNA, 25 bp, Homo sapien
caggaggagtttcacattcatacac

SEQ ID NO: 337214 - DNA, 25 bp, Homo sapien
gaccccgtcggctgtgactttgctg

SEQ ID NO: 337215 - DNA, 25 bp, Homo sapien
ctttcaggccgttcagcagggatga

SEQ ID NO: 337216 - DNA, 25 bp, Homo sapien
tgacagccgccatggatgtggagct

SEQ ID NO: 337217 - DNA, 25 bp, Homo sapien
ccgcaaggactcagggatcgtgtag

SEQ ID NO: 337218 - DNA, 25 bp, Homo sapien
ggcagctcaaggacatccggagttg

SEQ ID NO: 337219 - DNA, 25 bp, Homo sapien
ccggagttggaggatggagcaatgc

SEQ ID NO: 337220 - DNA, 25 bp, Homo sapien
aggatggagcaatgcaggcccttgt

SEQ ID NO: 337221 - DNA, 25 bp, Homo sapien
gcaggcccttgtggtaaagacagtc

SEQ ID NO: 337222 - DNA, 25 bp, Homo sapien
gccaggcgggtgcggagccctgtgg

SEQ ID NO: 337223 - DNA, 25 bp, Homo sapien
ccaggcgggtgcggagccctgtggg

SEQ ID NO: 337224 - DNA, 25 bp, Homo sapien
cccttcaggagggcgaaaggaatga

SEQ ID NO: 337225 - DNA, 25 bp, Homo sapien
gaagcgctcgtagaggtactcattg

SEQ ID NO: 337226 - DNA, 25 bp, Homo sapien
gactgcacgctgagggagcggatgg

SEQ ID NO: 337227 - DNA, 25 bp, Homo sapien
ggacagcaaggaggccgaagcgctc

SEQ ID NO: 337228 - DNA, 25 bp, Homo sapien
ggtgtgccagtgaacctcgaaccag

SEQ ID NO: 337229 - DNA, 25 bp, Homo sapien
gacactgtctatggatgagctctgg

SEQ ID NO: 337230 - DNA, 25 bp, Homo sapien
tccctggccggctccataggtaaag

SEQ ID NO: 337231 - DNA, 25 bp, Homo sapien
tcaattgtgcaacctaggcaggaag

SEQ ID NO: 337232 - DNA, 25 bp, Homo sapien
cctgccatgtgcaaaactggaccca

SEQ ID NO: 337233 - DNA, 25 bp, Homo sapien
tgccatgtgcaaaactggacccact

SEQ ID NO: 337234 - DNA, 25 bp, Homo sapien
cacctgccatgtgcaaaactggacc

SEQ ID NO: 337235 - DNA, 25 bp, Homo sapien
ctcagtgggaactgtgctgcctgag

SEQ ID NO: 337236 - DNA, 25 bp, Homo sapien
tcatgcctaggagctggtaccaagc

SEQ ID NO: 337237 - DNA, 25 bp, Homo sapien
tgtcagaagtctcccaagctgggcc

SEQ ID NO: 337238 - DNA, 25 bp, Homo sapien
caagagtaattcagaccagggcatg

SEQ ID NO: 337239 - DNA, 25 bp, Homo sapien
tgcctaagcccaaaccacagtaagt

SEQ ID NO: 337240 - DNA, 25 bp, Homo sapien
ggcagctctggagccggctagcggt

SEQ ID NO: 337241 - DNA, 25 bp, Homo sapien
ctctggagccggctagcggtgttat

SEQ ID NO: 337242 - DNA, 25 bp, Homo sapien
agcggtgttatatcgccctcttgtg

SEQ ID NO: 337243 - DNA, 25 bp, Homo sapien
agccggctagcggtgttatatcgcc

SEQ ID NO: 337244 - DNA, 25 bp, Homo sapien
cagcgcaggtgacgggtgccaaacc

SEQ ID NO: 337245 - DNA, 25 bp, Homo sapien
tgggcagcgcaggtgacgggtgcca

SEQ ID NO: 337246 - DNA, 25 bp, Homo sapien
ctgggcagcgcaggtgacgggtgcc

SEQ ID NO: 337247 - DNA, 25 bp, Homo sapien
ggcagcgcaggtgacgggtgccaaa

SEQ ID NO: 337248 - DNA, 25 bp, Homo sapien
ggttcaggggccccttcacattctc

SEQ ID NO: 337249 - DNA, 25 bp, Homo sapien
gggccccttcacattctccacacaa

SEQ ID NO: 337250 - DNA, 25 bp, Homo sapien
caagataggactgcagcctgtgggc

SEQ ID NO: 337251 - DNA, 25 bp, Homo sapien
ctcaagataggactgcagcctgtgg

SEQ ID NO: 337252 - DNA, 25 bp, Homo sapien
tgggaagagaggaggtcccgtcctg

SEQ ID NO: 337253 - DNA, 25 bp, Homo sapien
gacacagtgttactgaacaggctcg

SEQ ID NO: 337254 - DNA, 25 bp, Homo sapien
gagcgggggcttggcaaacgagctc

SEQ ID NO: 337255 - DNA, 25 bp, Homo sapien
cgatgagcaggtcatacagggcacg

SEQ ID NO: 337256 - DNA, 25 bp, Homo sapien
tggcaaggcagtagaaacccctggc

SEQ ID NO: 337257 - DNA, 25 bp, Homo sapien
agcaactgctgagcacccacctgag

SEQ ID NO: 337258 - DNA, 25 bp, Homo sapien
ccagcacgggctctgtggcaaggca

SEQ ID NO: 337259 - DNA, 25 bp, Homo sapien
gctcagagcaactgctgagcaccca

SEQ ID NO: 337260 - DNA, 25 bp, Homo sapien
agaaccaaacacccggcccatctga

SEQ ID NO: 337261 - DNA, 25 bp, Homo sapien
cagaaccaaacacccggcccatctg

SEQ ID NO: 337262 - DNA, 25 bp, Homo sapien
gaaccaaacacccggcccatctgac

SEQ ID NO: 337263 - DNA, 25 bp, Homo sapien
caaacacccggcccatctgacccct

SEQ ID NO: 337264 - DNA, 25 bp, Homo sapien
tggagagtgaaatgcacgcacccac

SEQ ID NO: 337265 - DNA, 25 bp, Homo sapien
gctgggctgggctcgtgaatcttcc

SEQ ID NO: 337266 - DNA, 25 bp, Homo sapien
ccagcatgcatgcagagagaggtga

SEQ ID NO: 337267 - DNA, 25 bp, Homo sapien
gatgaagggctctattcctgaggca

SEQ ID NO: 337268 - DNA, 25 bp, Homo sapien
ggtctcccacgtgaagaacacagca

SEQ ID NO: 337269 - DNA, 25 bp, Homo sapien
ccacgtgaagaacacagcactgcct

SEQ ID NO: 337270 - DNA, 25 bp, Homo sapien
tcaggtctcccacgtgaagaacaca

SEQ ID NO: 337271 - DNA, 25 bp, Homo sapien
ggaatcaggtctcccacgtgaagaa

SEQ ID NO: 337272 - DNA, 25 bp, Homo sapien
tctgctgggatcgagctacctggaa

SEQ ID NO: 337273 - DNA, 25 bp, Homo sapien
agtacggacatggaatctcagggcc

SEQ ID NO: 337274 - DNA, 25 bp, Homo sapien
caaggcccgatagcagctgtgtaca

SEQ ID NO: 337275 - DNA, 25 bp, Homo sapien
tttgatgaggaccaagcaaggcccg

SEQ ID NO: 337276 - DNA, 25 bp, Homo sapien
gctgagcacgagcaaccgtttgagg

SEQ ID NO: 337277 - DNA, 25 bp, Homo sapien
tgagcacgagcaaccgtttgaggct

SEQ ID NO: 337278 - DNA, 25 bp, Homo sapien
ttgctgagcacgagcaaccgtttga

SEQ ID NO: 337279 - DNA, 25 bp, Homo sapien
gcacgagcaaccgtttgaggctgtt

SEQ ID NO: 337280 - DNA, 25 bp, Homo sapien
ggtgggactggattgggtcaggcct

SEQ ID NO: 337281 - DNA, 25 bp, Homo sapien
cacattgaagcgagaagaacgccgg

SEQ ID NO: 337282 - DNA, 25 bp, Homo sapien
gggctgggcacaatactcagcctgg

SEQ ID NO: 337283 - DNA, 25 bp, Homo sapien
gagtctgcagagaccccttcaattt

SEQ ID NO: 337284 - DNA, 25 bp, Homo sapien
tattcccacattacaggaaccctgc

SEQ ID NO: 337285 - DNA, 25 bp, Homo sapien
tagtttatcaccacagcctgcatca

SEQ ID NO: 337286 - DNA, 25 bp, Homo sapien
tacagcttgtgagtggcaaggccag

SEQ ID NO: 337287 - DNA, 25 bp, Homo sapien
gaaccctgcagggtaagaagccatc

SEQ ID NO: 337288 - DNA, 25 bp, Homo sapien
agaaggaactaagggtgaactagct

SEQ ID NO: 337289 - DNA, 25 bp, Homo sapien
aggctgccagctcctacatcccctg

SEQ ID NO: 337290 - DNA, 25 bp, Homo sapien
ggtgaactagcttgaagttttggcc

SEQ ID NO: 337291 - DNA, 25 bp, Homo sapien
ttttggcctccttacaaccaggctg

SEQ ID NO: 337292 - DNA, 25 bp, Homo sapien
cagaagctggcaaagaagtatgtga

SEQ ID NO: 337293 - DNA, 25 bp, Homo sapien
gaagctggcaaagaagtatgtgaag

SEQ ID NO: 337294 - DNA, 25 bp, Homo sapien
tgcagaagctggcaaagaagtatgt

SEQ ID NO: 337295 - DNA, 25 bp, Homo sapien
ctgcagaagctggcaaagaagtatg

SEQ ID NO: 337296 - DNA, 25 bp, Homo sapien
ggtccatgatgtctcccgcttcact

SEQ ID NO: 337297 - DNA, 25 bp, Homo sapien
gaccgagttgagtttgttgttcatc

SEQ ID NO: 337298 - DNA, 25 bp, Homo sapien
gcgaaccatccgcagaaagccagtg

SEQ ID NO: 337299 - DNA, 25 bp, Homo sapien
ctgttaaacaggttattgcggcgaa

SEQ ID NO: 337300 - DNA, 25 bp, Homo sapien
tgatgacacacggacagccaggcca

SEQ ID NO: 337301 - DNA, 25 bp, Homo sapien
gggagtgccgccagcctgcagccat

SEQ ID NO: 337302 - DNA, 25 bp, Homo sapien
gattaaaatggcaaaaggcttatta

SEQ ID NO: 337303 - DNA, 25 bp, Homo sapien
ccaggagtaccttgattcatcagca

SEQ ID NO: 337304 - DNA, 25 bp, Homo sapien
ttaggacaaacatgacccacttcaa

SEQ ID NO: 337305 - DNA, 25 bp, Homo sapien
catgacccacttcaaatggccaagc

SEQ ID NO: 337306 - DNA, 25 bp, Homo sapien
tcctgtcgctgagaagaataaggct

SEQ ID NO: 337307 - DNA, 25 bp, Homo sapien
taaggcttggtgcatacagatttgg

SEQ ID NO: 337308 - DNA, 25 bp, Homo sapien
catgggccctttctactcctggact

SEQ ID NO: 337309 - DNA, 25 bp, Homo sapien
ctctggacctgaagattctggctca

SEQ ID NO: 337310 - DNA, 25 bp, Homo sapien
gctcagacatccttcatgggccctt

SEQ ID NO: 337311 - DNA, 25 bp, Homo sapien
tccagacttggccacacgatcgatt

SEQ ID NO: 337312 - DNA, 25 bp, Homo sapien
tcctggcgagggctgagaggggagc

SEQ ID NO: 337313 - DNA, 25 bp, Homo sapien
cagtccagaggcaggcagtagctgc

SEQ ID NO: 337314 - DNA, 25 bp, Homo sapien
cagaggcaggcagtagctgcttcat

SEQ ID NO: 337315 - DNA, 25 bp, Homo sapien
tccagaggcaggcagtagctgcttc

SEQ ID NO: 337316 - DNA, 25 bp, Homo sapien
tctgccaatacctgaaaaggcccac

SEQ ID NO: 337317 - DNA, 25 bp, Homo sapien
taggttttgcatgggccggtctgcc

SEQ ID NO: 337318 - DNA, 25 bp, Homo sapien
gggccggtctgccaatacctgaaaa

SEQ ID NO: 337319 - DNA, 25 bp, Homo sapien
ttgcatgggccggtctgccaatacc

SEQ ID NO: 337320 - DNA, 25 bp, Homo sapien
tgggtccagcaagccgcagggcccc

SEQ ID NO: 337321 - DNA, 25 bp, Homo sapien
ctgggtccagcaagccgcagggccc

SEQ ID NO: 337322 - DNA, 25 bp, Homo sapien
gggtccagcaagccgcagggcccct

SEQ ID NO: 337323 - DNA, 25 bp, Homo sapien
tgatccgcaccagagttctcaccag

SEQ ID NO: 337324 - DNA, 25 bp, Homo sapien
gctgatccgcaccagagttctcacc

SEQ ID NO: 337325 - DNA, 25 bp, Homo sapien
ctactgctgatccgcaccagagttc

SEQ ID NO: 337326 - DNA, 25 bp, Homo sapien
gttctcaccagctctatttctgacc

SEQ ID NO: 337327 - DNA, 25 bp, Homo sapien
tatttagttccttaatattgtacta

SEQ ID NO: 337328 - DNA, 25 bp, Homo sapien
cctgtatgattaccgtttacatggt

SEQ ID NO: 337329 - DNA, 25 bp, Homo sapien
actccagccacctgtatgattaccg

SEQ ID NO: 337330 - DNA, 25 bp, Homo sapien
tacatggtatatcgttttctaccca

SEQ ID NO: 337331 - DNA, 25 bp, Homo sapien
gaaaaaatgatgccccagcgaatat

SEQ ID NO: 337332 - DNA, 25 bp, Homo sapien
tactgaagacatctaggaaaaaatg

SEQ ID NO: 337333 - DNA, 25 bp, Homo sapien
gatgccccagcgaatataactccag

SEQ ID NO: 337334 - DNA, 25 bp, Homo sapien
ttcctgccttcaatgcatactgaag

SEQ ID NO: 337335 - DNA, 25 bp, Homo sapien
tacagggtacatttagagagcaaag

SEQ ID NO: 337336 - DNA, 25 bp, Homo sapien
tcctagaactagatcacagtgacag

SEQ ID NO: 337337 - DNA, 25 bp, Homo sapien
ttaggtgttttagaccagaggtgcc

SEQ ID NO: 337338 - DNA, 25 bp, Homo sapien
tatatgcgaattcagcagtggagcc

SEQ ID NO: 337339 - DNA, 25 bp, Homo sapien
aatggcaggtgtcatacacccaagt

SEQ ID NO: 337340 - DNA, 25 bp, Homo sapien
tggcaggtgtcatacacccaagtac

SEQ ID NO: 337341 - DNA, 25 bp, Homo sapien
aaatggcaggtgtcatacacccaag

SEQ ID NO: 337342 - DNA, 25 bp, Homo sapien
tcaaatggcaggtgtcatacaccca

SEQ ID NO: 337343 - DNA, 25 bp, Homo sapien
tagcagggcagactccggcagtgcc

SEQ ID NO: 337344 - DNA, 25 bp, Homo sapien
gactccggcagtgcccatttctaat

SEQ ID NO: 337345 - DNA, 25 bp, Homo sapien
ggaaaggtagcagggcagactccgg

SEQ ID NO: 337346 - DNA, 25 bp, Homo sapien
ggcagactccggcagtgcccatttc

SEQ ID NO: 337347 - DNA, 25 bp, Homo sapien
caggtagtgttcatgaaacttcaca

SEQ ID NO: 337348 - DNA, 25 bp, Homo sapien
gttctcacccaggtagtgttcatga

SEQ ID NO: 337349 - DNA, 25 bp, Homo sapien
gaagggttacactgctgctggcctg

SEQ ID NO: 337350 - DNA, 25 bp, Homo sapien
agggctgagccggttgctgttggaa

SEQ ID NO: 337351 - DNA, 25 bp, Homo sapien
cagccagggaatagtaaagcactag

SEQ ID NO: 337352 - DNA, 25 bp, Homo sapien
ggaatagtaaagcactagtcccctc

SEQ ID NO: 337353 - DNA, 25 bp, Homo sapien
tagtaaagcactagtcccctctggc

SEQ ID NO: 337354 - DNA, 25 bp, Homo sapien
taaagcactagtcccctctggccat

SEQ ID NO: 337355 - DNA, 25 bp, Homo sapien
agcaaatgcccttgtccgtcccctt

SEQ ID NO: 337356 - DNA, 25 bp, Homo sapien
taagatctgatcaatagtgactggg

SEQ ID NO: 337357 - DNA, 25 bp, Homo sapien
ggtcggagtcttgttgtcctgtttg

SEQ ID NO: 337358 - DNA, 25 bp, Homo sapien
ctgtttgtcgttccaccagaagatc

SEQ ID NO: 337359 - DNA, 25 bp, Homo sapien
cacacgtaagcaaggagtaacccca

SEQ ID NO: 337360 - DNA, 25 bp, Homo sapien
ccgtgcgcactagtgcacacgtaag

SEQ ID NO: 337361 - DNA, 25 bp, Homo sapien
taagcaaggagtaaccccagctgtt

SEQ ID NO: 337362 - DNA, 25 bp, Homo sapien
cactagtgcacacgtaagcaaggag

SEQ ID NO: 337363 - DNA, 25 bp, Homo sapien
ctaggctgacgagcacccgctgcaa

SEQ ID NO: 337364 - DNA, 25 bp, Homo sapien
gtttgtagtccgtgctcagctgtgc

SEQ ID NO: 337365 - DNA, 25 bp, Homo sapien
cagctgtgcctcatgtcggattgtt

SEQ ID NO: 337366 - DNA, 25 bp, Homo sapien
atgatgtctgcaggtcaaagaggga

SEQ ID NO: 337367 - DNA, 25 bp, Homo sapien
ctccaagtttccactagcccaaagg

SEQ ID NO: 337368 - DNA, 25 bp, Homo sapien
gcccagttgctcagctaaccttaaa

SEQ ID NO: 337369 - DNA, 25 bp, Homo sapien
caagtttccactagcccaaagggag

SEQ ID NO: 337370 - DNA, 25 bp, Homo sapien
ttctcttcggcccagttgctcagct

SEQ ID NO: 337371 - DNA, 25 bp, Homo sapien
ggtgcccagggattcataagtcagg

SEQ ID NO: 337372 - DNA, 25 bp, Homo sapien
tgttcagctggcgttcaaggcagga

SEQ ID NO: 337373 - DNA, 25 bp, Homo sapien
caagttcatgagcaaccacgagcct

SEQ ID NO: 337374 - DNA, 25 bp, Homo sapien
tatatgacaccgtcttggccgccaa

SEQ ID NO: 337375 - DNA, 25 bp, Homo sapien
tgatgcccatgttgccatagacctg

SEQ ID NO: 337376 - DNA, 25 bp, Homo sapien
gaatatatcgcccaggtttcctagg

SEQ ID NO: 337377 - DNA, 25 bp, Homo sapien
tctgatagtgttgcagggcccggtc

SEQ ID NO: 337378 - DNA, 25 bp, Homo sapien
tccatgtcttgaaggtcgggagcaa

SEQ ID NO: 337379 - DNA, 25 bp, Homo sapien
gtaaaagacaggcatgattctgtgc

SEQ ID NO: 337380 - DNA, 25 bp, Homo sapien
aaatgtcgtccagtaaaagacaggc

SEQ ID NO: 337381 - DNA, 25 bp, Homo sapien
tcgtccagtaaaagacaggcatgat

SEQ ID NO: 337382 - DNA, 25 bp, Homo sapien
catctggaaatgtcgtccagtaaaa

SEQ ID NO: 337383 - DNA, 25 bp, Homo sapien
tgtggcaaaccaagctcttagcagc

SEQ ID NO: 337384 - DNA, 25 bp, Homo sapien
tcttagcagctgcatatgaacagat

SEQ ID NO: 337385 - DNA, 25 bp, Homo sapien
tattaacattagtatactgctgtgg

SEQ ID NO: 337386 - DNA, 25 bp, Homo sapien
aatatttgcatcatgtgccaatttc

SEQ ID NO: 337387 - DNA, 25 bp, Homo sapien
aagagcaggcccaaacttctcttgg

SEQ ID NO: 337388 - DNA, 25 bp, Homo sapien
agaagggcagccaacgggaagagca

SEQ ID NO: 337389 - DNA, 25 bp, Homo sapien
gagcaggcccaaacttctcttggca

SEQ ID NO: 337390 - DNA, 25 bp, Homo sapien
caggcccaaacttctcttggcagca

SEQ ID NO: 337391 - DNA, 25 bp, Homo sapien
gtaacgccaaaatgcagccacagct

SEQ ID NO: 337392 - DNA, 25 bp, Homo sapien
gatttcctaggtctaaggtgaggcc

SEQ ID NO: 337393 - DNA, 25 bp, Homo sapien
ttttgtaatgctccccaggtaacgc

SEQ ID NO: 337394 - DNA, 25 bp, Homo sapien
tacttaggtagagtgcctggcgcac

SEQ ID NO: 337395 - DNA, 25 bp, Homo sapien
ttccacagtctcatgctgctgaggc

SEQ ID NO: 337396 - DNA, 25 bp, Homo sapien
tccacagtctcatgctgctgaggct

SEQ ID NO: 337397 - DNA, 25 bp, Homo sapien
cacagtctcatgctgctgaggcttc

SEQ ID NO: 337398 - DNA, 25 bp, Homo sapien
ccacagtctcatgctgctgaggctt

SEQ ID NO: 337399 - DNA, 25 bp, Homo sapien
tcacatagcaaatattccgagttct

SEQ ID NO: 337400 - DNA, 25 bp, Homo sapien
gagttctaagtcacaaatcgaatac

SEQ ID NO: 337401 - DNA, 25 bp, Homo sapien
caaatcgaatactcaacaattccgc

SEQ ID NO: 337402 - DNA, 25 bp, Homo sapien
gcaaatattccgagttctaagtcac

SEQ ID NO: 337403 - DNA, 25 bp, Homo sapien
ggtggagcaattcactaacattttg

SEQ ID NO: 337404 - DNA, 25 bp, Homo sapien
ggagcaattcactaacattttggaa

SEQ ID NO: 337405 - DNA, 25 bp, Homo sapien
ctggtggagcaattcactaacattt

SEQ ID NO: 337406 - DNA, 25 bp, Homo sapien
ttccattatttctggtggagcaatt

SEQ ID NO: 337407 - DNA, 25 bp, Homo sapien
agttagcctgctaatcagactctca

SEQ ID NO: 337408 - DNA, 25 bp, Homo sapien
cagactctcatttagctatagggca

SEQ ID NO: 337409 - DNA, 25 bp, Homo sapien
gaaacagtgtgatatcctagtgatt

SEQ ID NO: 337410 - DNA, 25 bp, Homo sapien
cagtcttcctactaactgtaaggag

SEQ ID NO: 337411 - DNA, 25 bp, Homo sapien
aatgaaccaagtgccaactgccaag

SEQ ID NO: 337412 - DNA, 25 bp, Homo sapien
catcagattacaattagcatctaca

SEQ ID NO: 337413 - DNA, 25 bp, Homo sapien
aattagcatctacaaatgaaccaag

SEQ ID NO: 337414 - DNA, 25 bp, Homo sapien
tgataacatcagattacaattagca

SEQ ID NO: 337415 - DNA, 25 bp, Homo sapien
ttgtatctatggcaggtgtatacta

SEQ ID NO: 337416 - DNA, 25 bp, Homo sapien
tatctatggcaggtgtatactaagt

SEQ ID NO: 337417 - DNA, 25 bp, Homo sapien
tctatggcaggtgtatactaagtca

SEQ ID NO: 337418 - DNA, 25 bp, Homo sapien
ctatggcaggtgtatactaagtcac

SEQ ID NO: 337419 - DNA, 25 bp, Homo sapien
ctacaagttctacccacttcacctt

SEQ ID NO: 337420 - DNA, 25 bp, Homo sapien
ctctacaagttctacccacttcacc

SEQ ID NO: 337421 - DNA, 25 bp, Homo sapien
tctacaagttctacccacttcacct

SEQ ID NO: 337422 - DNA, 25 bp, Homo sapien
catctacatcgtggaagttctcttc

SEQ ID NO: 337423 - DNA, 25 bp, Homo sapien
caaaaaccttcttagtgactcaaat

SEQ ID NO: 337424 - DNA, 25 bp, Homo sapien
gcacaggaagcttctattgtccaaa

SEQ ID NO: 337425 - DNA, 25 bp, Homo sapien
aaatgttacatcatctacatcgtgg

SEQ ID NO: 337426 - DNA, 25 bp, Homo sapien
taccaggagtatacagaatcaaaca

SEQ ID NO: 337427 - DNA, 25 bp, Homo sapien
cctctgtgagcctgattcagtctcc

SEQ ID NO: 337428 - DNA, 25 bp, Homo sapien
caaatcatgtgctttccctaactag

SEQ ID NO: 337429 - DNA, 25 bp, Homo sapien
tctttccaaaggcatgaccatcttc

SEQ ID NO: 337430 - DNA, 25 bp, Homo sapien
ggttgatgcaacagactgggcagct

SEQ ID NO: 337431 - DNA, 25 bp, Homo sapien
gacaagacaggaacacaggaattat

SEQ ID NO: 337432 - DNA, 25 bp, Homo sapien
cttcatttagggtgaggactctacc

SEQ ID NO: 337433 - DNA, 25 bp, Homo sapien
ggactctacctataatgtggcatac

SEQ ID NO: 337434 - DNA, 25 bp, Homo sapien
tcaacttctctttgtcctctccccg

SEQ ID NO: 337435 - DNA, 25 bp, Homo sapien
tctttgtcctctccccgtcctgaat

SEQ ID NO: 337436 - DNA, 25 bp, Homo sapien
ctctttgtcctctccccgtcctgaa

SEQ ID NO: 337437 - DNA, 25 bp, Homo sapien
cttctctttgtcctctccccgtcct

SEQ ID NO: 337438 - DNA, 25 bp, Homo sapien
cactgcccaggttgctataagcccg

SEQ ID NO: 337439 - DNA, 25 bp, Homo sapien
tacacagctcccatgttgccaagtt

SEQ ID NO: 337440 - DNA, 25 bp, Homo sapien
tggcccagactgctcaaggctgatg

SEQ ID NO: 337441 - DNA, 25 bp, Homo sapien
gcttggcaagaagaacacactgttt

SEQ ID NO: 337442 - DNA, 25 bp, Homo sapien
cattaccggcctatggctagagcca

SEQ ID NO: 337443 - DNA, 25 bp, Homo sapien
actgactctatgctggtgtactgaa

SEQ ID NO: 337444 - DNA, 25 bp, Homo sapien
agttggaagcttgcctaccctttct

SEQ ID NO: 337445 - DNA, 25 bp, Homo sapien
gaaaagcatgcaaaccctttttgtc

SEQ ID NO: 337446 - DNA, 25 bp, Homo sapien
tactaaagctctctgaacataagga

SEQ ID NO: 337447 - DNA, 25 bp, Homo sapien
tcaggaacttctggtttatggcaac

SEQ ID NO: 337448 - DNA, 25 bp, Homo sapien
tctctaaatgccagggagacatagg

SEQ ID NO: 337449 - DNA, 25 bp, Homo sapien
ctccaaatgatagccctggcatctt

SEQ ID NO: 337450 - DNA, 25 bp, Homo sapien
gagagttcaactatcttggctgaag

SEQ ID NO: 337451 - DNA, 25 bp, Homo sapien
tggagtacagggatgtaatcataac

SEQ ID NO: 337452 - DNA, 25 bp, Homo sapien
tctttaggtgtagaaactaaggaca

SEQ ID NO: 337453 - DNA, 25 bp, Homo sapien
tcagcctactaatgaccagtgaagg

SEQ ID NO: 337454 - DNA, 25 bp, Homo sapien
agctagataaagtaagatctggccc

SEQ ID NO: 337455 - DNA, 25 bp, Homo sapien
gattagatagctactgtaagcctca

SEQ ID NO: 337456 - DNA, 25 bp, Homo sapien
tctggcccagcagcgaaattcttaa

SEQ ID NO: 337457 - DNA, 25 bp, Homo sapien
aaagtactccccttacactgtgtga

SEQ ID NO: 337458 - DNA, 25 bp, Homo sapien
cacttactgagtagatcatttggcc

SEQ ID NO: 337459 - DNA, 25 bp, Homo sapien
ggccagtaagacctttcacaatcag

SEQ ID NO: 337460 - DNA, 25 bp, Homo sapien
tcaaagggaagcttaagtatacatc

SEQ ID NO: 337461 - DNA, 25 bp, Homo sapien
ccaaggtctggcataaaacaggtat

SEQ ID NO: 337462 - DNA, 25 bp, Homo sapien
gtggctcacattagtagcaaagaaa

SEQ ID NO: 337463 - DNA, 25 bp, Homo sapien
aactgtggctcacattagtagcaaa

SEQ ID NO: 337464 - DNA, 25 bp, Homo sapien
gaagagtgactagtcaggaaatgtc

SEQ ID NO: 337465 - DNA, 25 bp, Homo sapien
gaaatgtcagtcataagtgtaggtt

SEQ ID NO: 337466 - DNA, 25 bp, Homo sapien
acactattttataagtagcatacac

SEQ ID NO: 337467 - DNA, 25 bp, Homo sapien
caagacactattttataagtagcat

SEQ ID NO: 337468 - DNA, 25 bp, Homo sapien
agacactattttataagtagcatac

SEQ ID NO: 337469 - DNA, 25 bp, Homo sapien
tcaagacactattttataagtagca

SEQ ID NO: 337470 - DNA, 25 bp, Homo sapien
cacggcagatgctgtaagaaaaggc

SEQ ID NO: 337471 - DNA, 25 bp, Homo sapien
cacttgtaggataatgtgcactcca

SEQ ID NO: 337472 - DNA, 25 bp, Homo sapien
ggtacgtacagccaggaaagagatg

SEQ ID NO: 337473 - DNA, 25 bp, Homo sapien
gaaagacaatgagtctgccacctcc

SEQ ID NO: 337474 - DNA, 25 bp, Homo sapien
tcattctaagcattgaagtccagag

SEQ ID NO: 337475 - DNA, 25 bp, Homo sapien
caagtagtatgggaatacagatggc

SEQ ID NO: 337476 - DNA, 25 bp, Homo sapien
ccagggttgctgaatatctagatca

SEQ ID NO: 337477 - DNA, 25 bp, Homo sapien
tctagatcaaggaagggaaccaggg

SEQ ID NO: 337478 - DNA, 25 bp, Homo sapien
tttgctcacagacccaagtagtata

SEQ ID NO: 337479 - DNA, 25 bp, Homo sapien
tcttagaggagggtactgcaacagt

SEQ ID NO: 337480 - DNA, 25 bp, Homo sapien
aaagttcttagaggagggtactgca

SEQ ID NO: 337481 - DNA, 25 bp, Homo sapien
gttcttagaggagggtactgcaaca

SEQ ID NO: 337482 - DNA, 25 bp, Homo sapien
tggcgagtaccaactgatgcctgtg

SEQ ID NO: 337483 - DNA, 25 bp, Homo sapien
cgatctttgagtttcatggcgagta

SEQ ID NO: 337484 - DNA, 25 bp, Homo sapien
gatgcctgtggttagtgagagcctc

SEQ ID NO: 337485 - DNA, 25 bp, Homo sapien
tgagctcggcattctcctgtctggt

SEQ ID NO: 337486 - DNA, 25 bp, Homo sapien
tgaagctgctgataagtgggctcga

SEQ ID NO: 337487 - DNA, 25 bp, Homo sapien
tgcaggtgccaatcttcagtgcggc

SEQ ID NO: 337488 - DNA, 25 bp, Homo sapien
catatatccggtgctcttctctgta

SEQ ID NO: 337489 - DNA, 25 bp, Homo sapien
ccagctgtcaggagttcctgcccaa

SEQ ID NO: 337490 - DNA, 25 bp, Homo sapien
ctgccagggcatcggcatgacgtcc

SEQ ID NO: 337491 - DNA, 25 bp, Homo sapien
gggtcttgagccagtccagatgcaa

SEQ ID NO: 337492 - DNA, 25 bp, Homo sapien
gtccaaggtactggagggcaacacc

SEQ ID NO: 337493 - DNA, 25 bp, Homo sapien
catgggagatttcatggcggcttcc

SEQ ID NO: 337494 - DNA, 25 bp, Homo sapien
ttgagagggcaactgattttcctgt

SEQ ID NO: 337495 - DNA, 25 bp, Homo sapien
ggcctgtttggttcaataataatac

SEQ ID NO: 337496 - DNA, 25 bp, Homo sapien
aaattgttctacaatcaacggttgc

SEQ ID NO: 337497 - DNA, 25 bp, Homo sapien
agttgcaagtatagtggcctgtttg

SEQ ID NO: 337498 - DNA, 25 bp, Homo sapien
caacggttgctaatggaatagatat

SEQ ID NO: 337499 - DNA, 25 bp, Homo sapien
tgtggcataattttgtaccgaactt

SEQ ID NO: 337500 - DNA, 25 bp, Homo sapien
aagtattgtggcataattttgtacc

SEQ ID NO: 337501 - DNA, 25 bp, Homo sapien
taaatcaaagtattgtggcataatt

SEQ ID NO: 337502 - DNA, 25 bp, Homo sapien
cataattttgtaccgaacttgtgaa

SEQ ID NO: 337503 - DNA, 25 bp, Homo sapien
tctactgttccaagtccgtctagga

SEQ ID NO: 337504 - DNA, 25 bp, Homo sapien
tcagacagtcaacctagtgcttagg

SEQ ID NO: 337505 - DNA, 25 bp, Homo sapien
tcttagacactaggaacaatggcag

SEQ ID NO: 337506 - DNA, 25 bp, Homo sapien
gaaaacggccattactctcttagac

SEQ ID NO: 337507 - DNA, 25 bp, Homo sapien
caatgtcaggattagataacttcac

SEQ ID NO: 337508 - DNA, 25 bp, Homo sapien
gatgtcttatcaatgtcaggattag

SEQ ID NO: 337509 - DNA, 25 bp, Homo sapien
gacacaggaaagatgtcttatcaat

SEQ ID NO: 337510 - DNA, 25 bp, Homo sapien
gaaagatgtcttatcaatgtcagga

SEQ ID NO: 337511 - DNA, 25 bp, Homo sapien
tcctcttctctcaatcacccattct

SEQ ID NO: 337512 - DNA, 25 bp, Homo sapien
tttctttccctacagtcccagccat

SEQ ID NO: 337513 - DNA, 25 bp, Homo sapien
gcaatgtttttctttccctacagtc

SEQ ID NO: 337514 - DNA, 25 bp, Homo sapien
atggcaatgtttttctttccctaca

SEQ ID NO: 337515 - DNA, 25 bp, Homo sapien
ttttctttccctacagtcccagcca

SEQ ID NO: 337516 - DNA, 25 bp, Homo sapien
ccctgaatcctccaccagcttccat

SEQ ID NO: 337517 - DNA, 25 bp, Homo sapien
gttccctgaatcctccaccagcttc

SEQ ID NO: 337518 - DNA, 25 bp, Homo sapien
ttccctgaatcctccaccagcttcc

SEQ ID NO: 337519 - DNA, 25 bp, Homo sapien
tccctgaatcctccaccagcttcca

SEQ ID NO: 337520 - DNA, 25 bp, Homo sapien
caatgaatctcaatggcccctaacc

SEQ ID NO: 337521 - DNA, 25 bp, Homo sapien
cacactgactgaccaaatgaccttg

SEQ ID NO: 337522 - DNA, 25 bp, Homo sapien
tagaaatgcctccaacagtaaaatg

SEQ ID NO: 337523 - DNA, 25 bp, Homo sapien
taaacaccgaagtcaggagaatggg

SEQ ID NO: 337524 - DNA, 25 bp, Homo sapien
tgttcaacatatgcactcactagat

SEQ ID NO: 337525 - DNA, 25 bp, Homo sapien
tatgagcaagtaccatttaatgtag

SEQ ID NO: 337526 - DNA, 25 bp, Homo sapien
tatgctaggctgctttgctaataca

SEQ ID NO: 337527 - DNA, 25 bp, Homo sapien
caagcatccagtgttttttaagaga

SEQ ID NO: 337528 - DNA, 25 bp, Homo sapien
caatgtctcaagagtaaatttgcac

SEQ ID NO: 337529 - DNA, 25 bp, Homo sapien
tactagaggaattgctataacttcc

SEQ ID NO: 337530 - DNA, 25 bp, Homo sapien
ggcaagtagcagttccatttgatgt

SEQ ID NO: 337531 - DNA, 25 bp, Homo sapien
gagcttactgctttgatcagattta

SEQ ID NO: 337532 - DNA, 25 bp, Homo sapien
taccatgggtcaatgttgcacagat

SEQ ID NO: 337533 - DNA, 25 bp, Homo sapien
ggcaacctccacctatgctgagctg

SEQ ID NO: 337534 - DNA, 25 bp, Homo sapien
cacagattttgagtggtctgcaccc

SEQ ID NO: 337535 - DNA, 25 bp, Homo sapien
tatccaaagccactagcatagtgcc

SEQ ID NO: 337536 - DNA, 25 bp, Homo sapien
agggagacaagtgtggtactagaaa

SEQ ID NO: 337537 - DNA, 25 bp, Homo sapien
caagtgtggtactagaaaacatttt

SEQ ID NO: 337538 - DNA, 25 bp, Homo sapien
aaacagcaataactggccgaggtgg

SEQ ID NO: 337539 - DNA, 25 bp, Homo sapien
gagacaagtgtggtactagaaaaca

SEQ ID NO: 337540 - DNA, 25 bp, Homo sapien
gtagccgcatttctgtgctcaggag

SEQ ID NO: 337541 - DNA, 25 bp, Homo sapien
actttgacaaactgagggtgactcc

SEQ ID NO: 337542 - DNA, 25 bp, Homo sapien
tgtggattaaatacagtagccgcat

SEQ ID NO: 337543 - DNA, 25 bp, Homo sapien
gggtgactccagcatgtaaggcatt

SEQ ID NO: 337544 - DNA, 25 bp, Homo sapien
taaatccctgcctgtatactccagc

SEQ ID NO: 337545 - DNA, 25 bp, Homo sapien
taactgtagtgatctggcaatgaac

SEQ ID NO: 337546 - DNA, 25 bp, Homo sapien
tgaaccccgcattatctctgtaaaa

SEQ ID NO: 337547 - DNA, 25 bp, Homo sapien
tcagtagaaacgaggtgcctgggct

SEQ ID NO: 337548 - DNA, 25 bp, Homo sapien
tatccaagtatagaactgagcagca

SEQ ID NO: 337549 - DNA, 25 bp, Homo sapien
tcggcaagttactgacccactctta

SEQ ID NO: 337550 - DNA, 25 bp, Homo sapien
gagcagcacatctatgtcagacaga

SEQ ID NO: 337551 - DNA, 25 bp, Homo sapien
aattactcttgggtcagaaatcagc

SEQ ID NO: 337552 - DNA, 25 bp, Homo sapien
ccctgctgtgtagcggaggaacagc

SEQ ID NO: 337553 - DNA, 25 bp, Homo sapien
ggctgaaatctatgcttgagacaga

SEQ ID NO: 337554 - DNA, 25 bp, Homo sapien
tggtgggcctagagatgcattttct

SEQ ID NO: 337555 - DNA, 25 bp, Homo sapien
taatgacttaacacggcaaatgttt

SEQ ID NO: 337556 - DNA, 25 bp, Homo sapien
tagccaagtaggttgaaaggagccc

SEQ ID NO: 337557 - DNA, 25 bp, Homo sapien
aactttctagtcgtctcagccgggc

SEQ ID NO: 337558 - DNA, 25 bp, Homo sapien
tacttacaccaataccagaggcagc

SEQ ID NO: 337559 - DNA, 25 bp, Homo sapien
taacatacaggttcgaggatcctgc

SEQ ID NO: 337560 - DNA, 25 bp, Homo sapien
ttctgatcgctgaaaaatgatggcc

SEQ ID NO: 337561 - DNA, 25 bp, Homo sapien
cagatcttagtagaacagggctaca

SEQ ID NO: 337562 - DNA, 25 bp, Homo sapien
gcctgatcctacctaaaagctgctg

SEQ ID NO: 337563 - DNA, 25 bp, Homo sapien
gaacagctctcgagtcacttgcagc

SEQ ID NO: 337564 - DNA, 25 bp, Homo sapien
gaaaagctgtaatgtccattcaaag

SEQ ID NO: 337565 - DNA, 25 bp, Homo sapien
tcaaagtaatgaaggcacaccgcat

SEQ ID NO: 337566 - DNA, 25 bp, Homo sapien
ggcacaccgcattaatctcctaaaa

SEQ ID NO: 337567 - DNA, 25 bp, Homo sapien
taatttcagatgtagtgaaaagctg

SEQ ID NO: 337568 - DNA, 25 bp, Homo sapien
aatacaggagagattgttgctctgt

SEQ ID NO: 337569 - DNA, 25 bp, Homo sapien
atttaccactatagcacattctgca

SEQ ID NO: 337570 - DNA, 25 bp, Homo sapien
tgtgaattgtgctacagatctcaaa

SEQ ID NO: 337571 - DNA, 25 bp, Homo sapien
agtagagcaattctatttcttagtg

SEQ ID NO: 337572 - DNA, 25 bp, Homo sapien
aagacatggcattctgaagttggaa

SEQ ID NO: 337573 - DNA, 25 bp, Homo sapien
agagcttggaattccaaatacagga

SEQ ID NO: 337574 - DNA, 25 bp, Homo sapien
cattctgaagttggaagagcttgga

SEQ ID NO: 337575 - DNA, 25 bp, Homo sapien
gagtcccttcatcaggtaactaata

SEQ ID NO: 337576 - DNA, 25 bp, Homo sapien
taaagccgatacgtggaacatcaag

SEQ ID NO: 337577 - DNA, 25 bp, Homo sapien
gccgatacgtggaacatcaagatgt

SEQ ID NO: 337578 - DNA, 25 bp, Homo sapien
atacgtggaacatcaagatgttggc

SEQ ID NO: 337579 - DNA, 25 bp, Homo sapien
tttgtaaagccgatacgtggaacat

SEQ ID NO: 337580 - DNA, 25 bp, Homo sapien
gggggcagatgcagggcagcgacga

SEQ ID NO: 337581 - DNA, 25 bp, Homo sapien
tgggggcagatgcagggcagcgacg

SEQ ID NO: 337582 - DNA, 25 bp, Homo sapien
ctgggggcagatgcagggcagcgac

SEQ ID NO: 337583 - DNA, 25 bp, Homo sapien
ggagagtccagtcttttcgccttca

SEQ ID NO: 337584 - DNA, 25 bp, Homo sapien
tatccccaaaccacgaacacacttc

SEQ ID NO: 337585 - DNA, 25 bp, Homo sapien
accaggctaggaagtcccagcagcc

SEQ ID NO: 337586 - DNA, 25 bp, Homo sapien
tcgccttcagttcaatgaaaagtat

SEQ ID NO: 337587 - DNA, 25 bp, Homo sapien
ggctgctacagaatcccagccgggc

SEQ ID NO: 337588 - DNA, 25 bp, Homo sapien
gcgggctgctacagaatcccagccg

SEQ ID NO: 337589 - DNA, 25 bp, Homo sapien
tgtagcagggggtctccaagctggc

SEQ ID NO: 337590 - DNA, 25 bp, Homo sapien
gcctgtagcagggggtctccaagct

SEQ ID NO: 337591 - DNA, 25 bp, Homo sapien
ctccagggttggctataactatcat

SEQ ID NO: 337592 - DNA, 25 bp, Homo sapien
tctcctattctggactgtcctctgg

SEQ ID NO: 337593 - DNA, 25 bp, Homo sapien
gggttggctataactatcatttcca

SEQ ID NO: 337594 - DNA, 25 bp, Homo sapien
tctgatctttggtatgtgccttgtc

SEQ ID NO: 337595 - DNA, 25 bp, Homo sapien
taaggccaccttactccatacattg

SEQ ID NO: 337596 - DNA, 25 bp, Homo sapien
cccacccaggtcataacttagtctg

SEQ ID NO: 337597 - DNA, 25 bp, Homo sapien
tcctgtcctccttgacttcaaaata

SEQ ID NO: 337598 - DNA, 25 bp, Homo sapien
gatctggcctatcctctctcaccaa

SEQ ID NO: 337599 - DNA, 25 bp, Homo sapien
taggcaaacagccagagtacaataa

SEQ ID NO: 337600 - DNA, 25 bp, Homo sapien
ctaaaacacaatcaggataaattct

SEQ ID NO: 337601 - DNA, 25 bp, Homo sapien
ggataaattctgcatataggcaaac

SEQ ID NO: 337602 - DNA, 25 bp, Homo sapien
acagccagagtacaataagttagac

SEQ ID NO: 337603 - DNA, 25 bp, Homo sapien
tggaactgataatcaaccatcttgt

SEQ ID NO: 337604 - DNA, 25 bp, Homo sapien
gataatcaaccatcttgttagtccg

SEQ ID NO: 337605 - DNA, 25 bp, Homo sapien
catcttgttagtccgaagtattctc

SEQ ID NO: 337606 - DNA, 25 bp, Homo sapien
ggaatctggaactgataatcaacca

SEQ ID NO: 337607 - DNA, 25 bp, Homo sapien
tattatggattagccagctaagccc

SEQ ID NO: 337608 - DNA, 25 bp, Homo sapien
aagggagaaccacgaagaactgcag

SEQ ID NO: 337609 - DNA, 25 bp, Homo sapien
ggaacacagccctggcaagatacct

SEQ ID NO: 337610 - DNA, 25 bp, Homo sapien
gatcacagttcactatgcaccttga

SEQ ID NO: 337611 - DNA, 25 bp, Homo sapien
taatattccaatcttttgccaggcc

SEQ ID NO: 337612 - DNA, 25 bp, Homo sapien
gatacagctcttttgcgagggtaaa

SEQ ID NO: 337613 - DNA, 25 bp, Homo sapien
tatctatcacgtttcaattctccgc

SEQ ID NO: 337614 - DNA, 25 bp, Homo sapien
gtgcagtgactgtgctcaaagcatc

SEQ ID NO: 337615 - DNA, 25 bp, Homo sapien
tatcccagcagctaaggtcacaagg

SEQ ID NO: 337616 - DNA, 25 bp, Homo sapien
atttagctgtttattccagttcagg

SEQ ID NO: 337617 - DNA, 25 bp, Homo sapien
gcgggtggccagaggctatcccagc

SEQ ID NO: 337618 - DNA, 25 bp, Homo sapien
ctgcgggtggccagaggctatccca

SEQ ID NO: 337619 - DNA, 25 bp, Homo sapien
gaatgtcaggactctataaatctca

SEQ ID NO: 337620 - DNA, 25 bp, Homo sapien
tcttgatcaccagtatactctgtgg

SEQ ID NO: 337621 - DNA, 25 bp, Homo sapien
tacactagactaagggttaagaatc

SEQ ID NO: 337622 - DNA, 25 bp, Homo sapien
ccacatgggtggcaaatacactaga

SEQ ID NO: 337623 - DNA, 25 bp, Homo sapien
gaatcgtgcaggatcctttctgaag

SEQ ID NO: 337624 - DNA, 25 bp, Homo sapien
ggctggctagcaacacagtaggaat

SEQ ID NO: 337625 - DNA, 25 bp, Homo sapien
gatggtctataactaaagccttgga

SEQ ID NO: 337626 - DNA, 25 bp, Homo sapien
tatccctgcacctgagaggcttgaa

SEQ ID NO: 337627 - DNA, 25 bp, Homo sapien
tatctatggataattcaaaggtctt

SEQ ID NO: 337628 - DNA, 25 bp, Homo sapien
ctcttctatctatggataattcaaa

SEQ ID NO: 337629 - DNA, 25 bp, Homo sapien
tctatggataattcaaaggtcttat

SEQ ID NO: 337630 - DNA, 25 bp, Homo sapien
tctatctatggataattcaaaggtc

SEQ ID NO: 337631 - DNA, 25 bp, Homo sapien
gaaagatgacggctctaggaataca

SEQ ID NO: 337632 - DNA, 25 bp, Homo sapien
tctaatttatggacttgtaagggca

SEQ ID NO: 337633 - DNA, 25 bp, Homo sapien
ggaatacaatggttactgtccctta

SEQ ID NO: 337634 - DNA, 25 bp, Homo sapien
gatttaggcaaccatatagcttttg

SEQ ID NO: 337635 - DNA, 25 bp, Homo sapien
gcaaactcacagataacataacagc

SEQ ID NO: 337636 - DNA, 25 bp, Homo sapien
aatgacctggtctcacaagaactcc

SEQ ID NO: 337637 - DNA, 25 bp, Homo sapien
gaagctttacaatcgtggtagaagg

SEQ ID NO: 337638 - DNA, 25 bp, Homo sapien
tgggtctggaggcagatgtcacata

SEQ ID NO: 337639 - DNA, 25 bp, Homo sapien
gaaatttactagatgggccagggac

SEQ ID NO: 337640 - DNA, 25 bp, Homo sapien
atgaaatttactagatgggccaggg

SEQ ID NO: 337641 - DNA, 25 bp, Homo sapien
agcaagatgatctcttgagtttgag

SEQ ID NO: 337642 - DNA, 25 bp, Homo sapien
tgggaggtcaaagcaagatgatctc

SEQ ID NO: 337643 - DNA, 25 bp, Homo sapien
gttaaaccattcttgcaacactggg

SEQ ID NO: 337644 - DNA, 25 bp, Homo sapien
tctcttgtctgatagctaggacttc

SEQ ID NO: 337645 - DNA, 25 bp, Homo sapien
tcgtagtggtaatattagcctcata

SEQ ID NO: 337646 - DNA, 25 bp, Homo sapien
cattccgtgtaatactagctgtagc

SEQ ID NO: 337647 - DNA, 25 bp, Homo sapien
catggtggtgacaggtagctactcc

SEQ ID NO: 337648 - DNA, 25 bp, Homo sapien
tagttaactctagggactggaatgg

SEQ ID NO: 337649 - DNA, 25 bp, Homo sapien
catgaaaagaagtgcccattgcctt

SEQ ID NO: 337650 - DNA, 25 bp, Homo sapien
tgtacagactgaccaaaaagacctg

SEQ ID NO: 337651 - DNA, 25 bp, Homo sapien
gagacaggtgtccacctttgctgag

SEQ ID NO: 337652 - DNA, 25 bp, Homo sapien
caggaagttcaaactcggtatagcc

SEQ ID NO: 337653 - DNA, 25 bp, Homo sapien
gacaggtgtccacctttgctgaggc

SEQ ID NO: 337654 - DNA, 25 bp, Homo sapien
aaactcggtatagcccaccacagct

SEQ ID NO: 337655 - DNA, 25 bp, Homo sapien
aacaaaaatagatagaccgctagcc

SEQ ID NO: 337656 - DNA, 25 bp, Homo sapien
aacaaacagtctctcggcccatagt

SEQ ID NO: 337657 - DNA, 25 bp, Homo sapien
caatgtgccagaatctctgatacgc

SEQ ID NO: 337658 - DNA, 25 bp, Homo sapien
cgcatttaaagtagtgtttagagag

SEQ ID NO: 337659 - DNA, 25 bp, Homo sapien
cccagcccttcagcatattattaat

SEQ ID NO: 337660 - DNA, 25 bp, Homo sapien
cctcatgtggtgcattagatctcta

SEQ ID NO: 337661 - DNA, 25 bp, Homo sapien
ttgtggttctatagaaaatatctca

SEQ ID NO: 337662 - DNA, 25 bp, Homo sapien
ctcacatagtaaccctttttgtgtg

SEQ ID NO: 337663 - DNA, 25 bp, Homo sapien
ggaagcttttcgctagtgtaccagc

SEQ ID NO: 337664 - DNA, 25 bp, Homo sapien
acttgcacatggaaagcatgctaca

SEQ ID NO: 337665 - DNA, 25 bp, Homo sapien
tatcttacttatcaagcggcacaga

SEQ ID NO: 337666 - DNA, 25 bp, Homo sapien
gtgtaccagctcaaggaagtcattt

SEQ ID NO: 337667 - DNA, 25 bp, Homo sapien
cattaaagtaagaagccaggacaaa

SEQ ID NO: 337668 - DNA, 25 bp, Homo sapien
tacattaaagtaagaagccaggaca

SEQ ID NO: 337669 - DNA, 25 bp, Homo sapien
aagtaagaagccaggacaaaagatt

SEQ ID NO: 337670 - DNA, 25 bp, Homo sapien
aatattacattaaagtaagaagcca

SEQ ID NO: 337671 - DNA, 25 bp, Homo sapien
tatgaaaataaatcttcataggtaa

SEQ ID NO: 337672 - DNA, 25 bp, Homo sapien
ctatgaaaataaatcttcataggta

SEQ ID NO: 337673 - DNA, 25 bp, Homo sapien
atgaaaataaatcttcataggtaaa

SEQ ID NO: 337674 - DNA, 25 bp, Homo sapien
tgaaaataaatcttcataggtaaaa

SEQ ID NO: 337675 - DNA, 25 bp, Homo sapien
gacaggcctgattactctgacgaac

SEQ ID NO: 337676 - DNA, 25 bp, Homo sapien
tcagctttgctcagtaccggtccat

SEQ ID NO: 337677 - DNA, 25 bp, Homo sapien
acttctctggccaatagtgtcagca

SEQ ID NO: 337678 - DNA, 25 bp, Homo sapien
ccacttgggattgagaagtcgagct

SEQ ID NO: 337679 - DNA, 25 bp, Homo sapien
gaggtgaatcctcctaaccaggctg

SEQ ID NO: 337680 - DNA, 25 bp, Homo sapien
caaagccctgtgcttaagaggtgaa

SEQ ID NO: 337681 - DNA, 25 bp, Homo sapien
tgccaggtactctcctagacactag

SEQ ID NO: 337682 - DNA, 25 bp, Homo sapien
tagcttcgcctgtgaaaggcccaag

SEQ ID NO: 337683 - DNA, 25 bp, Homo sapien
gacaccatcatagcgtactataacc

SEQ ID NO: 337684 - DNA, 25 bp, Homo sapien
cgtactataacctacaactcctagg

SEQ ID NO: 337685 - DNA, 25 bp, Homo sapien
catcatagcgtactataacctacaa

SEQ ID NO: 337686 - DNA, 25 bp, Homo sapien
taatgtggacaccatcatagcgtac

SEQ ID NO: 337687 - DNA, 25 bp, Homo sapien
cctctcttccaggagttatatggcc

SEQ ID NO: 337688 - DNA, 25 bp, Homo sapien
tcctctcttccaggagttatatggc

SEQ ID NO: 337689 - DNA, 25 bp, Homo sapien
aaatcctctcttccaggagttatat

SEQ ID NO: 337690 - DNA, 25 bp, Homo sapien
cataaatcctctcttccaggagtta

SEQ ID NO: 337691 - DNA, 25 bp, Homo sapien
ggaggtattcttactctctactgag

SEQ ID NO: 337692 - DNA, 25 bp, Homo sapien
tactgagaacatccaacctgacaac

SEQ ID NO: 337693 - DNA, 25 bp, Homo sapien
tactctctactgagaacatccaacc

SEQ ID NO: 337694 - DNA, 25 bp, Homo sapien
gaggtattcttactctctactgaga

SEQ ID NO: 337695 - DNA, 25 bp, Homo sapien
acgtacttggcatttctatgccata

SEQ ID NO: 337696 - DNA, 25 bp, Homo sapien
tacgtacttggcatttctatgccat

SEQ ID NO: 337697 - DNA, 25 bp, Homo sapien
cataatggaagtcaaaaatcaccat

SEQ ID NO: 337698 - DNA, 25 bp, Homo sapien
ggtagcacctgagcatcccgggctg

SEQ ID NO: 337699 - DNA, 25 bp, Homo sapien
ctgtctcaccgcgggtgccgcttac

SEQ ID NO: 337700 - DNA, 25 bp, Homo sapien
aaggtagcacctgagcatcccgggc

SEQ ID NO: 337701 - DNA, 25 bp, Homo sapien
tagcacctgagcatcccgggctgcg

SEQ ID NO: 337702 - DNA, 25 bp, Homo sapien
tccggtggactccagtccccagatt

SEQ ID NO: 337703 - DNA, 25 bp, Homo sapien
cagtccccagattccgccccacggg

SEQ ID NO: 337704 - DNA, 25 bp, Homo sapien
cgctccggtggactccagtccccag

SEQ ID NO: 337705 - DNA, 25 bp, Homo sapien
ggtggactccagtccccagattccg

SEQ ID NO: 337706 - DNA, 25 bp, Homo sapien
cgccggagtttcacaaagaaagtct

SEQ ID NO: 337707 - DNA, 25 bp, Homo sapien
cggcccgagcccctcacgcactcac

SEQ ID NO: 337708 - DNA, 25 bp, Homo sapien
cccggcccgagcccctcacgcactc

SEQ ID NO: 337709 - DNA, 25 bp, Homo sapien
cacaaagaaagtctcccggcccgag

SEQ ID NO: 337710 - DNA, 25 bp, Homo sapien
ggcgccgacgccggcggcgactctg

SEQ ID NO: 337711 - DNA, 25 bp, Homo sapien
ccttgggtcggctcgggcgccggcg

SEQ ID NO: 337712 - DNA, 25 bp, Homo sapien
gcgactctggctcccgccgccttcg

SEQ ID NO: 337713 - DNA, 25 bp, Homo sapien
cgccttcggctccttgcgggggtcg

SEQ ID NO: 337714 - DNA, 25 bp, Homo sapien
cccgggccgcgtccgcctcgagcta

SEQ ID NO: 337715 - DNA, 25 bp, Homo sapien
gcgtccgcctcgagctaacggtccc

SEQ ID NO: 337716 - DNA, 25 bp, Homo sapien
ggcccgggccgcgtccgcctcgagc

SEQ ID NO: 337717 - DNA, 25 bp, Homo sapien
cgcctcgagctaacggtcccgccag

SEQ ID NO: 337718 - DNA, 25 bp, Homo sapien
gcgccggttccgcgcgccatgttcc

SEQ ID NO: 337719 - DNA, 25 bp, Homo sapien
gccggttccgcgcgccatgttcccg

SEQ ID NO: 337720 - DNA, 25 bp, Homo sapien
ggttccgcgcgccatgttcccgccg

SEQ ID NO: 337721 - DNA, 25 bp, Homo sapien
gttccgcgcgccatgttcccgccgt

SEQ ID NO: 337722 - DNA, 25 bp, Homo sapien
cgcgcacgcgcgcgttcgccgcgcc

SEQ ID NO: 337723 - DNA, 25 bp, Homo sapien
cgcacgcgcgcgttcgccgcgcccc

SEQ ID NO: 337724 - DNA, 25 bp, Homo sapien
gcgcacgcgcgcgttcgccgcgccc

SEQ ID NO: 337725 - DNA, 25 bp, Homo sapien
taattgtacatcagtgactgtgaaa

SEQ ID NO: 337726 - DNA, 25 bp, Homo sapien
aattgtacatcagtgactgtgaaaa

SEQ ID NO: 337727 - DNA, 25 bp, Homo sapien
ttgtggtctcggcaccctcggcttc

SEQ ID NO: 337728 - DNA, 25 bp, Homo sapien
cacagctgggcgctttgtggtctcg

SEQ ID NO: 337729 - DNA, 25 bp, Homo sapien
gcacacacagctgggcgctttgtgg

SEQ ID NO: 337730 - DNA, 25 bp, Homo sapien
tgggcgctttgtggtctcggcaccc

SEQ ID NO: 337731 - DNA, 25 bp, Homo sapien
ctcagacatgcttatctaatagata

SEQ ID NO: 337732 - DNA, 25 bp, Homo sapien
catcattgacaactgagtcctcacc

SEQ ID NO: 337733 - DNA, 25 bp, Homo sapien
ttcaaaagaaaatcactggcttctt

SEQ ID NO: 337734 - DNA, 25 bp, Homo sapien
ctcaatatgcttccagtaaagtggg

SEQ ID NO: 337735 - DNA, 25 bp, Homo sapien
gacagaagatcttgaaactttctct

SEQ ID NO: 337736 - DNA, 25 bp, Homo sapien
aacctggggtagagctgtggattca

SEQ ID NO: 337737 - DNA, 25 bp, Homo sapien
tgtggattcattttcctcagacaga

SEQ ID NO: 337738 - DNA, 25 bp, Homo sapien
cattttcctcagacagaagatcttg

SEQ ID NO: 337739 - DNA, 25 bp, Homo sapien
gaaggcattatgtgttgcccgcctc

SEQ ID NO: 337740 - DNA, 25 bp, Homo sapien
gaggaaaaatgtccgtccaagaatc

SEQ ID NO: 337741 - DNA, 25 bp, Homo sapien
cctagaatgacagggctagcatgcc

SEQ ID NO: 337742 - DNA, 25 bp, Homo sapien
cccttgatgaagctcccacagcgaa

SEQ ID NO: 337743 - DNA, 25 bp, Homo sapien
cctttggatccactaccaacaactt

SEQ ID NO: 337744 - DNA, 25 bp, Homo sapien
gcctttggatccactaccaacaact

SEQ ID NO: 337745 - DNA, 25 bp, Homo sapien
tcaggaatgaagttgtattttccac

SEQ ID NO: 337746 - DNA, 25 bp, Homo sapien
tctgagacttctgcccagacttcag

SEQ ID NO: 337747 - DNA, 25 bp, Homo sapien
tctgatccttcagtgacacttgagt

SEQ ID NO: 337748 - DNA, 25 bp, Homo sapien
tattttccactggtgatctgatcct

SEQ ID NO: 337749 - DNA, 25 bp, Homo sapien
atgctcagagaaaggtggataccca

SEQ ID NO: 337750 - DNA, 25 bp, Homo sapien
tatgctcagagaaaggtggataccc

SEQ ID NO: 337751 - DNA, 25 bp, Homo sapien
ctatgctcagagaaaggtggatacc

SEQ ID NO: 337752 - DNA, 25 bp, Homo sapien
cagtccacagcacggttatacccag

SEQ ID NO: 337753 - DNA, 25 bp, Homo sapien
gttatacccagcagtcccaacagaa

SEQ ID NO: 337754 - DNA, 25 bp, Homo sapien
agcacggttatacccagcagtccca

SEQ ID NO: 337755 - DNA, 25 bp, Homo sapien
cagcagtcccaacagaaacaagaac

SEQ ID NO: 337756 - DNA, 25 bp, Homo sapien
caaaatcttggagtgcccaaaatca

SEQ ID NO: 337757 - DNA, 25 bp, Homo sapien
aaatcttggagtgcccaaaatcagt

SEQ ID NO: 337758 - DNA, 25 bp, Homo sapien
aaaatcttggagtgcccaaaatcag

SEQ ID NO: 337759 - DNA, 25 bp, Homo sapien
ctttaagtcacggtgtataataccg

SEQ ID NO: 337760 - DNA, 25 bp, Homo sapien
attctctggctttaagtcacggtgt

SEQ ID NO: 337761 - DNA, 25 bp, Homo sapien
cacggtgtataataccgttttcatg

SEQ ID NO: 337762 - DNA, 25 bp, Homo sapien
tttataagacagtcctcttcttgag

SEQ ID NO: 337763 - DNA, 25 bp, Homo sapien
ggtgatgttcctcaaagcaagtgcc

SEQ ID NO: 337764 - DNA, 25 bp, Homo sapien
tctttactgggaaatggatctggtg

SEQ ID NO: 337765 - DNA, 25 bp, Homo sapien
tcactctgtacaaggattgctccca

SEQ ID NO: 337766 - DNA, 25 bp, Homo sapien
cctgcaaggagtgggttttcaagaa

SEQ ID NO: 337767 - DNA, 25 bp, Homo sapien
gcaggtagcttctttcaggcgttta

SEQ ID NO: 337768 - DNA, 25 bp, Homo sapien
gagcttgcaggtagcttctttcagg

SEQ ID NO: 337769 - DNA, 25 bp, Homo sapien
gtaaaaatagagcttgcaggtagct

SEQ ID NO: 337770 - DNA, 25 bp, Homo sapien
caggcgtttattccccaccactttg

SEQ ID NO: 337771 - DNA, 25 bp, Homo sapien
aatataataatcttctgcatcaaaa

SEQ ID NO: 337772 - DNA, 25 bp, Homo sapien
atataataatcttctgcatcaaaaa

SEQ ID NO: 337773 - DNA, 25 bp, Homo sapien
ctatttctgtttcaacattgagagc

SEQ ID NO: 337774 - DNA, 25 bp, Homo sapien
ttctgtttcaacattgagagctggg

SEQ ID NO: 337775 - DNA, 25 bp, Homo sapien
ctgtttcaacattgagagctgggtc

SEQ ID NO: 337776 - DNA, 25 bp, Homo sapien
atttctgtttcaacattgagagctg

SEQ ID NO: 337777 - DNA, 25 bp, Homo sapien
ctttatggctactttcttacatgtt

SEQ ID NO: 337778 - DNA, 25 bp, Homo sapien
ttgctgaaccaatagcaaacttcct

SEQ ID NO: 337779 - DNA, 25 bp, Homo sapien
tacatgttttcctctcgaaagccag

SEQ ID NO: 337780 - DNA, 25 bp, Homo sapien
catgttttcctctcgaaagccagct

SEQ ID NO: 337781 - DNA, 25 bp, Homo sapien
ttttaattatgagacctaccactcc

SEQ ID NO: 337782 - DNA, 25 bp, Homo sapien
ggaaaaacaaagatagtgattgtct

SEQ ID NO: 337783 - DNA, 25 bp, Homo sapien
caaagatagtgattgtctgaatgtt

SEQ ID NO: 337784 - DNA, 25 bp, Homo sapien
tatgagacctaccactcctgggtcc

SEQ ID NO: 337785 - DNA, 25 bp, Homo sapien
caccagtgtaaaatgtcaagggctt

SEQ ID NO: 337786 - DNA, 25 bp, Homo sapien
tacgtatccgagaggtcagaaaaac

SEQ ID NO: 337787 - DNA, 25 bp, Homo sapien
tgtttgcagaggacacagtgaaact

SEQ ID NO: 337788 - DNA, 25 bp, Homo sapien
caaacatgggtcttactgtagccct

SEQ ID NO: 337789 - DNA, 25 bp, Homo sapien
ttttatgccccatagagctcagatg

SEQ ID NO: 337790 - DNA, 25 bp, Homo sapien
gccattgtatgtgttcttgagggaa

SEQ ID NO: 337791 - DNA, 25 bp, Homo sapien
tacattcccgttagcagtgcatggg

SEQ ID NO: 337792 - DNA, 25 bp, Homo sapien
tatggtcagcctagtaggtaggtgt

SEQ ID NO: 337793 - DNA, 25 bp, Homo sapien
tacagccagagttgcccttgaaatc

SEQ ID NO: 337794 - DNA, 25 bp, Homo sapien
gaaacagtcaccctttgcctgggaa

SEQ ID NO: 337795 - DNA, 25 bp, Homo sapien
gaaacacaggatagctacataacca

SEQ ID NO: 337796 - DNA, 25 bp, Homo sapien
tctagctgggtgtctactatggcac

SEQ ID NO: 337797 - DNA, 25 bp, Homo sapien
taggataaactgactgatcatctac

SEQ ID NO: 337798 - DNA, 25 bp, Homo sapien
taatgccttaggataaactgactga

SEQ ID NO: 337799 - DNA, 25 bp, Homo sapien
tgccttaggataaactgactgatca

SEQ ID NO: 337800 - DNA, 25 bp, Homo sapien
tcttaatgccttaggataaactgac

SEQ ID NO: 337801 - DNA, 25 bp, Homo sapien
ttttgaaaatcagctgagagagtag

SEQ ID NO: 337802 - DNA, 25 bp, Homo sapien
ttgaaaatcagctgagagagtagat

SEQ ID NO: 337803 - DNA, 25 bp, Homo sapien
gaaaatcagctgagagagtagattt

SEQ ID NO: 337804 - DNA, 25 bp, Homo sapien
cccgccgtatttttgaaaatcagct

SEQ ID NO: 337805 - DNA, 25 bp, Homo sapien
cgcccagcaacttactcatctttac

SEQ ID NO: 337806 - DNA, 25 bp, Homo sapien
cacgcccagcaacttactcatcttt

SEQ ID NO: 337807 - DNA, 25 bp, Homo sapien
ccacgcccagcaacttactcatctt

SEQ ID NO: 337808 - DNA, 25 bp, Homo sapien
acgcccagcaacttactcatcttta

SEQ ID NO: 337809 - DNA, 25 bp, Homo sapien
taaaccatattctgtaaggacagga

SEQ ID NO: 337810 - DNA, 25 bp, Homo sapien
ttaaaccatattctgtaaggacagg

SEQ ID NO: 337811 - DNA, 25 bp, Homo sapien
aaaccatattctgtaaggacaggac

SEQ ID NO: 337812 - DNA, 25 bp, Homo sapien
caagctctgtatttacaaaggttcc

SEQ ID NO: 337813 - DNA, 25 bp, Homo sapien
cgttttcctttccctacaagctctg

SEQ ID NO: 337814 - DNA, 25 bp, Homo sapien
agtgacagtgcaatttcagaattgt

SEQ ID NO: 337815 - DNA, 25 bp, Homo sapien
ttgccactgtgatcttctatgtatg

SEQ ID NO: 337816 - DNA, 25 bp, Homo sapien
gttcggtatttatctgttcttttca

SEQ ID NO: 337817 - DNA, 25 bp, Homo sapien
cttgctgtatgttcggtatttatct

SEQ ID NO: 337818 - DNA, 25 bp, Homo sapien
ctgaaaatccgaaagtgtttcttgc

SEQ ID NO: 337819 - DNA, 25 bp, Homo sapien
cctgaaaatccgaaagtgtttcttg

SEQ ID NO: 337820 - DNA, 25 bp, Homo sapien
ccctcccaaaccagtagttgtcatt

SEQ ID NO: 337821 - DNA, 25 bp, Homo sapien
cccaaaccagtagttgtcattcaca

SEQ ID NO: 337822 - DNA, 25 bp, Homo sapien
caaaccagtagttgtcattcacaca

SEQ ID NO: 337823 - DNA, 25 bp, Homo sapien
tcccaaaccagtagttgtcattcac

SEQ ID NO: 337824 - DNA, 25 bp, Homo sapien
aagctgatgctacaatgggctgtga

SEQ ID NO: 337825 - DNA, 25 bp, Homo sapien
aagctgtggttgcaccactcactcc

SEQ ID NO: 337826 - DNA, 25 bp, Homo sapien
gaggctgcactaagctgtggttgca

SEQ ID NO: 337827 - DNA, 25 bp, Homo sapien
gcactaagctgtggttgcaccactc

SEQ ID NO: 337828 - DNA, 25 bp, Homo sapien
actaagctgtggttgcaccactcac

SEQ ID NO: 337829 - DNA, 25 bp, Homo sapien
cagattgggtaacatggccagactc

SEQ ID NO: 337830 - DNA, 25 bp, Homo sapien
ttagactgcaaactggccggggatg

SEQ ID NO: 337831 - DNA, 25 bp, Homo sapien
gatcagattgggtaacatggccaga

SEQ ID NO: 337832 - DNA, 25 bp, Homo sapien
gcaaactggccggggatggtgcctc

SEQ ID NO: 337833 - DNA, 25 bp, Homo sapien
atccatcctgaagggcccataatcg

SEQ ID NO: 337834 - DNA, 25 bp, Homo sapien
gcaaatccatcctgaagggcccata

SEQ ID NO: 337835 - DNA, 25 bp, Homo sapien
agattggcaaatccatcctgaaggg

SEQ ID NO: 337836 - DNA, 25 bp, Homo sapien
tcctgaagggcccataatcgagccc

SEQ ID NO: 337837 - DNA, 25 bp, Homo sapien
tgtcccagagctggagtgagaggac

SEQ ID NO: 337838 - DNA, 25 bp, Homo sapien
tagaatagagttcctgagtggacac

SEQ ID NO: 337839 - DNA, 25 bp, Homo sapien
tcaggaatagaatagagttcctgag

SEQ ID NO: 337840 - DNA, 25 bp, Homo sapien
gtggacactgtctctaaggagctca

SEQ ID NO: 337841 - DNA, 25 bp, Homo sapien
taacgctgccatggggctgtgaaca

SEQ ID NO: 337842 - DNA, 25 bp, Homo sapien
gggtaacgctgccatggggctgtga

SEQ ID NO: 337843 - DNA, 25 bp, Homo sapien
tgggactgggtaacgctgccatggg

SEQ ID NO: 337844 - DNA, 25 bp, Homo sapien
ttgggactgggtaacgctgccatgg

SEQ ID NO: 337845 - DNA, 25 bp, Homo sapien
tgagcctcaacatccgactcccgag

SEQ ID NO: 337846 - DNA, 25 bp, Homo sapien
cctcaacatccgactcccgagacat

SEQ ID NO: 337847 - DNA, 25 bp, Homo sapien
gcctcaacatccgactcccgagaca

SEQ ID NO: 337848 - DNA, 25 bp, Homo sapien
gagcctcaacatccgactcccgaga

SEQ ID NO: 337849 - DNA, 25 bp, Homo sapien
catagacgttagcagcctcagcata

SEQ ID NO: 337850 - DNA, 25 bp, Homo sapien
atagacgttagcagcctcagcatac

SEQ ID NO: 337851 - DNA, 25 bp, Homo sapien
tccatattaaattgagatctttcac

SEQ ID NO: 337852 - DNA, 25 bp, Homo sapien
ttatttccatattaaattgagatct

SEQ ID NO: 337853 - DNA, 25 bp, Homo sapien
gcaaaaccatgtaatttaagactta

SEQ ID NO: 337854 - DNA, 25 bp, Homo sapien
cactgcaaaaccatgtaatttaaga

SEQ ID NO: 337855 - DNA, 25 bp, Homo sapien
accatgtaatttaagacttatgaac

SEQ ID NO: 337856 - DNA, 25 bp, Homo sapien
aatttaagacttatgaactgattat

SEQ ID NO: 337857 - DNA, 25 bp, Homo sapien
ttcaagatacaaaggttctgccagg

SEQ ID NO: 337858 - DNA, 25 bp, Homo sapien
tacaaaggttctgccaggtgtggtg

SEQ ID NO: 337859 - DNA, 25 bp, Homo sapien
tttacacagctttcaagatacaaag

SEQ ID NO: 337860 - DNA, 25 bp, Homo sapien
gatacaaaggttctgccaggtgtgg

SEQ ID NO: 337861 - DNA, 25 bp, Homo sapien
tactatgagagattagaggcaagcg

SEQ ID NO: 337862 - DNA, 25 bp, Homo sapien
tgccaaaactgagtatgccacacca

SEQ ID NO: 337863 - DNA, 25 bp, Homo sapien
ggtctaatactacctgagccaggct

SEQ ID NO: 337864 - DNA, 25 bp, Homo sapien
tttaagcaagacaggacaactggag

SEQ ID NO: 337865 - DNA, 25 bp, Homo sapien
cagagtggcgctaaacctgcagata

SEQ ID NO: 337866 - DNA, 25 bp, Homo sapien
cacgagtgaccacggctagataggc

SEQ ID NO: 337867 - DNA, 25 bp, Homo sapien
cgtcgcaggcgggaagcaattatcc

SEQ ID NO: 337868 - DNA, 25 bp, Homo sapien
gaaggagaccgctaagctgcgatgc

SEQ ID NO: 337869 - DNA, 25 bp, Homo sapien
gacggatctggctggcggaagagaa

SEQ ID NO: 337870 - DNA, 25 bp, Homo sapien
tagagagcaggcgtgagagaagtgt

SEQ ID NO: 337871 - DNA, 25 bp, Homo sapien
acacgtcgaggtctggcctgcgaga

SEQ ID NO: 337872 - DNA, 25 bp, Homo sapien
gggcccgggcgagagacacgtcgag

SEQ ID NO: 337873 - DNA, 25 bp, Homo sapien
caggtaccagcaactgcagcgtctt

SEQ ID NO: 337874 - DNA, 25 bp, Homo sapien
tccttcagagttgatacagcgaagc

SEQ ID NO: 337875 - DNA, 25 bp, Homo sapien
tgcagcgtcttgtccacccagattt

SEQ ID NO: 337876 - DNA, 25 bp, Homo sapien
ttgatacagcgaagctccagcacag

SEQ ID NO: 337877 - DNA, 25 bp, Homo sapien
aaggacttctcagagaagcattcga

SEQ ID NO: 337878 - DNA, 25 bp, Homo sapien
cttctcagagaagcattcgaccctg

SEQ ID NO: 337879 - DNA, 25 bp, Homo sapien
tgatgcctataagaccctcctggcc

SEQ ID NO: 337880 - DNA, 25 bp, Homo sapien
accctggtgaatgatgcctataaga

SEQ ID NO: 337881 - DNA, 25 bp, Homo sapien
cacgtaaaagcatgtattctaggcc

SEQ ID NO: 337882 - DNA, 25 bp, Homo sapien
tgagggcagcgtgctactgactttg

SEQ ID NO: 337883 - DNA, 25 bp, Homo sapien
gctactgactttgcgtgaccttgaa

SEQ ID NO: 337884 - DNA, 25 bp, Homo sapien
aggtttggtgtcttatgcctataat

SEQ ID NO: 337885 - DNA, 25 bp, Homo sapien
acacagagacaaaggttatgaagcc

SEQ ID NO: 337886 - DNA, 25 bp, Homo sapien
gctgccatcatggtacacacagaga

SEQ ID NO: 337887 - DNA, 25 bp, Homo sapien
gagttgtgctaaacagcagctgcca

SEQ ID NO: 337888 - DNA, 25 bp, Homo sapien
tgagcagtgcttttgaacaaggtac

SEQ ID NO: 337889 - DNA, 25 bp, Homo sapien
accatcagctggaaaggctgcaggg

SEQ ID NO: 337890 - DNA, 25 bp, Homo sapien
aaaggctgcagggcctcccaacaaa

SEQ ID NO: 337891 - DNA, 25 bp, Homo sapien
gctgcagggcctcccaacaaaccat

SEQ ID NO: 337892 - DNA, 25 bp, Homo sapien
ctgttaccatcagctggaaaggctg

SEQ ID NO: 337893 - DNA, 25 bp, Homo sapien
ttgagtacccaaaccaggcttcagg

SEQ ID NO: 337894 - DNA, 25 bp, Homo sapien
gaaatccctccccttgttacagatg

SEQ ID NO: 337895 - DNA, 25 bp, Homo sapien
taatgcccttccatcacacaacagg

SEQ ID NO: 337896 - DNA, 25 bp, Homo sapien
tacagatggcgtagaagtcacaagt

SEQ ID NO: 337897 - DNA, 25 bp, Homo sapien
tagctgttcccacaataggcaggcc

SEQ ID NO: 337898 - DNA, 25 bp, Homo sapien
tgtggtgcttattcatctgagccgt

SEQ ID NO: 337899 - DNA, 25 bp, Homo sapien
caggccatgtgttgctattctaaaa

SEQ ID NO: 337900 - DNA, 25 bp, Homo sapien
tgcagcatggatcaaacattggctt

SEQ ID NO: 337901 - DNA, 25 bp, Homo sapien
ctcccctcaccgcaagctccgcctc

SEQ ID NO: 337902 - DNA, 25 bp, Homo sapien
taaaaagcgttaggctcacttcagt

SEQ ID NO: 337903 - DNA, 25 bp, Homo sapien
caaatagtggttagggttctagctc

SEQ ID NO: 337904 - DNA, 25 bp, Homo sapien
cataataagggcaagagaatctcga

SEQ ID NO: 337905 - DNA, 25 bp, Homo sapien
gcttatatcacttatggcagtccag

SEQ ID NO: 337906 - DNA, 25 bp, Homo sapien
agaaagcacctttcagaagctacac

SEQ ID NO: 337907 - DNA, 25 bp, Homo sapien
gcacctttcagaagctacactagca

SEQ ID NO: 337908 - DNA, 25 bp, Homo sapien
taattgcatgggtagttttaaataa

SEQ ID NO: 337909 - DNA, 25 bp, Homo sapien
aagcacctttcagaagctacactag

SEQ ID NO: 337910 - DNA, 25 bp, Homo sapien
tcctccaggcagtgtaatagtcaag

SEQ ID NO: 337911 - DNA, 25 bp, Homo sapien
caataccttggactgctggatgtca

SEQ ID NO: 337912 - DNA, 25 bp, Homo sapien
caggtgttcccgttgcttacagaag

SEQ ID NO: 337913 - DNA, 25 bp, Homo sapien
gaggaattctctaggactgtatact

SEQ ID NO: 337914 - DNA, 25 bp, Homo sapien
tgaaagcagatttgagatacccagc

SEQ ID NO: 337915 - DNA, 25 bp, Homo sapien
tctctgtctcagagggtatctctaa

SEQ ID NO: 337916 - DNA, 25 bp, Homo sapien
tggtttacaccaagcagagaggaca

SEQ ID NO: 337917 - DNA, 25 bp, Homo sapien
tccggaacgaggtcatcttctacag

SEQ ID NO: 337918 - DNA, 25 bp, Homo sapien
gggaagggcatttgaagaacatgac

SEQ ID NO: 337919 - DNA, 25 bp, Homo sapien
tccttctgggtagacctctgggagc

SEQ ID NO: 337920 - DNA, 25 bp, Homo sapien
aacatgactgggtccaagttgtcca

SEQ ID NO: 337921 - DNA, 25 bp, Homo sapien
cttctgggtagacctctgggagctc

SEQ ID NO: 337922 - DNA, 25 bp, Homo sapien
tgtaagaggcaaaaattaaatgaag

SEQ ID NO: 337923 - DNA, 25 bp, Homo sapien
taagaggcaaaaattaaatgaagta

SEQ ID NO: 337924 - DNA, 25 bp, Homo sapien
ctgtaagaggcaaaaattaaatgaa

SEQ ID NO: 337925 - DNA, 25 bp, Homo sapien
gaggcaaaaattaaatgaagtacaa

SEQ ID NO: 337926 - DNA, 25 bp, Homo sapien
gaaggtagttgatgttcacctccaa

SEQ ID NO: 337927 - DNA, 25 bp, Homo sapien
ctaactggaacactttgtactgggt

SEQ ID NO: 337928 - DNA, 25 bp, Homo sapien
tatgtgataagatgacctcgggacc

SEQ ID NO: 337929 - DNA, 25 bp, Homo sapien
tgtctagttagggatgtcaagcatc

SEQ ID NO: 337930 - DNA, 25 bp, Homo sapien
gaatccatggggagatgttctggag

SEQ ID NO: 337931 - DNA, 25 bp, Homo sapien
ggaggggtgacaactgggcctgcac

SEQ ID NO: 337932 - DNA, 25 bp, Homo sapien
gcagacccggccactggcctcactt

SEQ ID NO: 337933 - DNA, 25 bp, Homo sapien
acccggccactggcctcacttcatt

SEQ ID NO: 337934 - DNA, 25 bp, Homo sapien
agcagacccggccactggcctcact

SEQ ID NO: 337935 - DNA, 25 bp, Homo sapien
agacccggccactggcctcacttca

SEQ ID NO: 337936 - DNA, 25 bp, Homo sapien
aaacagcttcaagtgcccaaggaaa

SEQ ID NO: 337937 - DNA, 25 bp, Homo sapien
caaaatctggtttgagtggctctct

SEQ ID NO: 337938 - DNA, 25 bp, Homo sapien
cttggaaccagtactcacatgaggc

SEQ ID NO: 337939 - DNA, 25 bp, Homo sapien
aatcgctgggtcatgtcacttggaa

SEQ ID NO: 337940 - DNA, 25 bp, Homo sapien
cctggttctcaactacaaggccatg

SEQ ID NO: 337941 - DNA, 25 bp, Homo sapien
catccatccccaagcgctgtcttaa

SEQ ID NO: 337942 - DNA, 25 bp, Homo sapien
gcgctgtcttaactcctggttctca

SEQ ID NO: 337943 - DNA, 25 bp, Homo sapien
caactacaaggccatgagttttctc

SEQ ID NO: 337944 - DNA, 25 bp, Homo sapien
cactgcttccaactactaatactga

SEQ ID NO: 337945 - DNA, 25 bp, Homo sapien
cagcaaagggtgacttgtggcttta

SEQ ID NO: 337946 - DNA, 25 bp, Homo sapien
ggccataattatggaaaagcaagct

SEQ ID NO: 337947 - DNA, 25 bp, Homo sapien
cttttggaaaactctatgcttgtgg

SEQ ID NO: 337948 - DNA, 25 bp, Homo sapien
ggtgcctgccacgacacccggctaa

SEQ ID NO: 337949 - DNA, 25 bp, Homo sapien
acaggtgcctgccacgacacccggc

SEQ ID NO: 337950 - DNA, 25 bp, Homo sapien
gtggcatgatctcgtgatctcagct

SEQ ID NO: 337951 - DNA, 25 bp, Homo sapien
agtggcatgatctcgtgatctcagc

SEQ ID NO: 337952 - DNA, 25 bp, Homo sapien
gaagcaaatatcagaacattcacca

SEQ ID NO: 337953 - DNA, 25 bp, Homo sapien
ttcaccaaggaagggtatacaatgg

SEQ ID NO: 337954 - DNA, 25 bp, Homo sapien
ctaataggggctgaaacaacttggg

SEQ ID NO: 337955 - DNA, 25 bp, Homo sapien
ctgaaacaacttgggatgggaagca

SEQ ID NO: 337956 - DNA, 25 bp, Homo sapien
tgttccagctcactcattcgagcct

SEQ ID NO: 337957 - DNA, 25 bp, Homo sapien
gctcactcattcgagccttctttcg

SEQ ID NO: 337958 - DNA, 25 bp, Homo sapien
ttctttcgatctctggcagtctgag

SEQ ID NO: 337959 - DNA, 25 bp, Homo sapien
attcgagccttctttcgatctctgg

SEQ ID NO: 337960 - DNA, 25 bp, Homo sapien
cattaatctagtgaaggctgcaatc

SEQ ID NO: 337961 - DNA, 25 bp, Homo sapien
agtgttgagatcctaggcagtgacc

SEQ ID NO: 337962 - DNA, 25 bp, Homo sapien
tcttaaacaggatccaacctggcct

SEQ ID NO: 337963 - DNA, 25 bp, Homo sapien
tgtcaatctagctcgaagacctgct

SEQ ID NO: 337964 - DNA, 25 bp, Homo sapien
cagctctggtcatctctaacgagag

SEQ ID NO: 337965 - DNA, 25 bp, Homo sapien
ccagcgtggcggatccggtcagtcc

SEQ ID NO: 337966 - DNA, 25 bp, Homo sapien
tgggccgccctaggttcccagcgtg

SEQ ID NO: 337967 - DNA, 25 bp, Homo sapien
catgtccgagttaagaggctgaacc

SEQ ID NO: 337968 - DNA, 25 bp, Homo sapien
gaggcgctgtcgcttgcgcgcctgg

SEQ ID NO: 337969 - DNA, 25 bp, Homo sapien
gggctgccccgacagaagcagaact

SEQ ID NO: 337970 - DNA, 25 bp, Homo sapien
ggctcaggtgcgtgaggcgctgtcg

SEQ ID NO: 337971 - DNA, 25 bp, Homo sapien
gctgcctccgggctggcccctctct

SEQ ID NO: 337972 - DNA, 25 bp, Homo sapien
agctccagactacgcaccgcgcacc

SEQ ID NO: 337973 - DNA, 25 bp, Homo sapien
ctccagactacgcaccgcgcaccgc

SEQ ID NO: 337974 - DNA, 25 bp, Homo sapien
caccgcgcaccgcgcgccgcagccg

SEQ ID NO: 337975 - DNA, 25 bp, Homo sapien
agactacgcaccgcgcaccgcgcgc

SEQ ID NO: 337976 - DNA, 25 bp, Homo sapien
gagaatgtctttcactgtgtaagaa

SEQ ID NO: 337977 - DNA, 25 bp, Homo sapien
gtaagaaagaaaatgctggaggacc

SEQ ID NO: 337978 - DNA, 25 bp, Homo sapien
gtgaacatttattaatgccaagaga

SEQ ID NO: 337979 - DNA, 25 bp, Homo sapien
tttattaatgccaagagaatgtctt

SEQ ID NO: 337980 - DNA, 25 bp, Homo sapien
ttagtccagcagggtgtagtgagta

SEQ ID NO: 337981 - DNA, 25 bp, Homo sapien
tagtccagcagggtgtagtgagtaa

SEQ ID NO: 337982 - DNA, 25 bp, Homo sapien
tagagaaagcacagggtgcgggatg

SEQ ID NO: 337983 - DNA, 25 bp, Homo sapien
gttgatgaattgcactttgatctta

SEQ ID NO: 337984 - DNA, 25 bp, Homo sapien
cactttgatcttagttaatgcgata

SEQ ID NO: 337985 - DNA, 25 bp, Homo sapien
tattgaaattcacttccccagcttg

SEQ ID NO: 337986 - DNA, 25 bp, Homo sapien
tattttacccggctggctcttggaa

SEQ ID NO: 337987 - DNA, 25 bp, Homo sapien
tgtccaagtttacctagctaggatg

SEQ ID NO: 337988 - DNA, 25 bp, Homo sapien
tccaagatctgggaacggaagatga

SEQ ID NO: 337989 - DNA, 25 bp, Homo sapien
cagtgatctgtaacctcttggagta

SEQ ID NO: 337990 - DNA, 25 bp, Homo sapien
gacgggagttgatctggtccagcat

SEQ ID NO: 337991 - DNA, 25 bp, Homo sapien
tgctggaactcaaggcgtgtctgcc

SEQ ID NO: 337992 - DNA, 25 bp, Homo sapien
cgtgtctgccggttggattccagca

SEQ ID NO: 337993 - DNA, 25 bp, Homo sapien
agctgctccagacgggagttgatct

SEQ ID NO: 337994 - DNA, 25 bp, Homo sapien
taccccgtatacattcctaccttga

SEQ ID NO: 337995 - DNA, 25 bp, Homo sapien
ggagtctcgctaattcacgccattc

SEQ ID NO: 337996 - DNA, 25 bp, Homo sapien
tatagcatgtactatgttggatcat

SEQ ID NO: 337997 - DNA, 25 bp, Homo sapien
tatacatagccaacacataccccgt

SEQ ID NO: 337998 - DNA, 25 bp, Homo sapien
cagcacagtcggctgactttaatct

SEQ ID NO: 337999 - DNA, 25 bp, Homo sapien
tatgttgtgatgcaggaatcttccc

SEQ ID NO: 338000 - DNA, 25 bp, Homo sapien
tgcaggaatcttcccctgacacaca

SEQ ID NO: 338001 - DNA, 25 bp, Homo sapien
ttttgtgtatgttgtgatgcaggaa

SEQ ID NO: 338002 - DNA, 25 bp, Homo sapien
tcagtgcagacttcatacagagaaa

SEQ ID NO: 338003 - DNA, 25 bp, Homo sapien
tgcacgtggcgagactcaaagtttc

SEQ ID NO: 338004 - DNA, 25 bp, Homo sapien
tgataatggtgttggactcctctgg

SEQ ID NO: 338005 - DNA, 25 bp, Homo sapien
gagaaactgtctaggcgacacctgt

SEQ ID NO: 338006 - DNA, 25 bp, Homo sapien
cggttgggtatttaggtctgcctca

SEQ ID NO: 338007 - DNA, 25 bp, Homo sapien
cgagggcgagatcgtgcaggtagct

SEQ ID NO: 338008 - DNA, 25 bp, Homo sapien
gggctagagctcctgtgaaccccgg

SEQ ID NO: 338009 - DNA, 25 bp, Homo sapien
gagtcgagcccaagcggcgattaca

SEQ ID NO: 338010 - DNA, 25 bp, Homo sapien
gtggctcgtttcaggttgcaggctt

SEQ ID NO: 338011 - DNA, 25 bp, Homo sapien
tgaaaagacaagtgatgagggatgg

SEQ ID NO: 338012 - DNA, 25 bp, Homo sapien
ccatgcatgttctttttgggtgcgg

SEQ ID NO: 338013 - DNA, 25 bp, Homo sapien
ttgggtgcggccaggtttgtctgaa

SEQ ID NO: 338014 - DNA, 25 bp, Homo sapien
ttcctgtggctgacttttatagcaa

SEQ ID NO: 338015 - DNA, 25 bp, Homo sapien
tttctccaaagaggtcacgtcccat

SEQ ID NO: 338016 - DNA, 25 bp, Homo sapien
tgtggctgacttttatagcaatttg

SEQ ID NO: 338017 - DNA, 25 bp, Homo sapien
caatttgggagtctgcatgtctttc

SEQ ID NO: 338018 - DNA, 25 bp, Homo sapien
cccttgtaggtgtatcagagcatga

SEQ ID NO: 338019 - DNA, 25 bp, Homo sapien
caaaatgtcgtaaaagtgaaagtct

SEQ ID NO: 338020 - DNA, 25 bp, Homo sapien
tgtattctgggcaggaacacggcgt

SEQ ID NO: 338021 - DNA, 25 bp, Homo sapien
gaattatgactaatgtctgcactga

SEQ ID NO: 338022 - DNA, 25 bp, Homo sapien
tcagcatgccaagccccggcggatg

SEQ ID NO: 338023 - DNA, 25 bp, Homo sapien
tgccaagccccggcggatgtggtta

SEQ ID NO: 338024 - DNA, 25 bp, Homo sapien
catgccaagccccggcggatgtggt

SEQ ID NO: 338025 - DNA, 25 bp, Homo sapien
agcatgccaagccccggcggatgtg

SEQ ID NO: 338026 - DNA, 25 bp, Homo sapien
ctaatgcttctccttcagcaattgt

SEQ ID NO: 338027 - DNA, 25 bp, Homo sapien
gcttctccttcagcaattgtgattt

SEQ ID NO: 338028 - DNA, 25 bp, Homo sapien
aatgcttctccttcagcaattgtga

SEQ ID NO: 338029 - DNA, 25 bp, Homo sapien
tctccttcagcaattgtgatttgct

SEQ ID NO: 338030 - DNA, 25 bp, Homo sapien
ggtgacttcccatggtgaccttgag

SEQ ID NO: 338031 - DNA, 25 bp, Homo sapien
taactagattctggagggagcttac

SEQ ID NO: 338032 - DNA, 25 bp, Homo sapien
taaagggcatactcacagggtggaa

SEQ ID NO: 338033 - DNA, 25 bp, Homo sapien
gagctagcaagccagcgaggtcagt

SEQ ID NO: 338034 - DNA, 25 bp, Homo sapien
cccacagtgcccagatggtgtccgt

SEQ ID NO: 338035 - DNA, 25 bp, Homo sapien
gcccagatggtgtccgtgcctttca

SEQ ID NO: 338036 - DNA, 25 bp, Homo sapien
agggagcaggtggtggccgcatggt

SEQ ID NO: 338037 - DNA, 25 bp, Homo sapien
gtggccgcatggttccccacagtgc

SEQ ID NO: 338038 - DNA, 25 bp, Homo sapien
ccaacccagcagcatatttagattt

SEQ ID NO: 338039 - DNA, 25 bp, Homo sapien
aacccagcagcatatttagatttga

SEQ ID NO: 338040 - DNA, 25 bp, Homo sapien
ttggttttccaacccagcagcatat

SEQ ID NO: 338041 - DNA, 25 bp, Homo sapien
ttttccaacccagcagcatatttag

SEQ ID NO: 338042 - DNA, 25 bp, Homo sapien
cacatcttgaactagcgttgggccg

SEQ ID NO: 338043 - DNA, 25 bp, Homo sapien
catgccaatcatgctgtagagaagg

SEQ ID NO: 338044 - DNA, 25 bp, Homo sapien
cgttgggccgtgtgcaagtctcttt

SEQ ID NO: 338045 - DNA, 25 bp, Homo sapien
ggatatgcgagagtcactaactagc

SEQ ID NO: 338046 - DNA, 25 bp, Homo sapien
tggcccatgtccgtttcccagttaa

SEQ ID NO: 338047 - DNA, 25 bp, Homo sapien
ggcatgttccgccacagctgtgggt

SEQ ID NO: 338048 - DNA, 25 bp, Homo sapien
cccgatctatatgtggcatgttccg

SEQ ID NO: 338049 - DNA, 25 bp, Homo sapien
agttaactcttttgtgcccgatcta

SEQ ID NO: 338050 - DNA, 25 bp, Homo sapien
ctgtggtcatcattgagtgcctgtt

SEQ ID NO: 338051 - DNA, 25 bp, Homo sapien
tgcctgtttgtaaccaaggttgaaa

SEQ ID NO: 338052 - DNA, 25 bp, Homo sapien
tgagtgcctgtttgtaaccaaggtt

SEQ ID NO: 338053 - DNA, 25 bp, Homo sapien
ccaaggttgaaaggattgaagaaga

SEQ ID NO: 338054 - DNA, 25 bp, Homo sapien
ttggcatgtacagagaatctcaggc

SEQ ID NO: 338055 - DNA, 25 bp, Homo sapien
gcaacattgggtctttgtgcgcatg

SEQ ID NO: 338056 - DNA, 25 bp, Homo sapien
gcagtgtgagagtgtagtagccacc

SEQ ID NO: 338057 - DNA, 25 bp, Homo sapien
cctttggagtgagtgcaaaatgtcc

SEQ ID NO: 338058 - DNA, 25 bp, Homo sapien
gccagtctgccctgcattgactcag

SEQ ID NO: 338059 - DNA, 25 bp, Homo sapien
tggaaccccaaaagcctgggcagag

SEQ ID NO: 338060 - DNA, 25 bp, Homo sapien
cgtattgccttgaatccttgtcttg

SEQ ID NO: 338061 - DNA, 25 bp, Homo sapien
tgggcagagctgacccgtattgcct

SEQ ID NO: 338062 - DNA, 25 bp, Homo sapien
gaaccactgatctagaaggtacaag

SEQ ID NO: 338063 - DNA, 25 bp, Homo sapien
tcttcagtcttaccactcgggagag

SEQ ID NO: 338064 - DNA, 25 bp, Homo sapien
tatcactgtagggatcccagagacc

SEQ ID NO: 338065 - DNA, 25 bp, Homo sapien
tgtgagcttgaactagactgcgcct

SEQ ID NO: 338066 - DNA, 25 bp, Homo sapien
gttatcctgtttgtgccgtctctcc

SEQ ID NO: 338067 - DNA, 25 bp, Homo sapien
ctgtttctcggagggcagaatctgt

SEQ ID NO: 338068 - DNA, 25 bp, Homo sapien
ccgtctctcctctgcaagtactgtt

SEQ ID NO: 338069 - DNA, 25 bp, Homo sapien
tacatgttatcctgtttgtgccgtc

SEQ ID NO: 338070 - DNA, 25 bp, Homo sapien
ccgtaatttactattgcagccagaa

SEQ ID NO: 338071 - DNA, 25 bp, Homo sapien
tgtaaaagagacgaaccagtaggga

SEQ ID NO: 338072 - DNA, 25 bp, Homo sapien
agaagcctgatggtttcagcacccc

SEQ ID NO: 338073 - DNA, 25 bp, Homo sapien
ccttcagaaggttcaaagggcagga

SEQ ID NO: 338074 - DNA, 25 bp, Homo sapien
ctgctggactttgatggggacatgc

SEQ ID NO: 338075 - DNA, 25 bp, Homo sapien
gatggggacatgcttgctgcctcta

SEQ ID NO: 338076 - DNA, 25 bp, Homo sapien
tgacgatgacctcttgctgtttgcc

SEQ ID NO: 338077 - DNA, 25 bp, Homo sapien
cttcccttagcaaccgatcctttga

SEQ ID NO: 338078 - DNA, 25 bp, Homo sapien
ccttcactgtcaacaattgcttggg

SEQ ID NO: 338079 - DNA, 25 bp, Homo sapien
agccttcactgtcaacaattgcttg

SEQ ID NO: 338080 - DNA, 25 bp, Homo sapien
tcagccttcactgtcaacaattgct

SEQ ID NO: 338081 - DNA, 25 bp, Homo sapien
ttcactgtcaacaattgcttgggaa

SEQ ID NO: 338082 - DNA, 25 bp, Homo sapien
cagagcagtgctctgtgactgctca

SEQ ID NO: 338083 - DNA, 25 bp, Homo sapien
tcagagcagtgctctgtgactgctc

SEQ ID NO: 338084 - DNA, 25 bp, Homo sapien
agagcagtgctctgtgactgctcac

SEQ ID NO: 338085 - DNA, 25 bp, Homo sapien
agaatgcaaggttgaggactgtgtt

SEQ ID NO: 338086 - DNA, 25 bp, Homo sapien
gaagaatgcaaggttgaggactgtg

SEQ ID NO: 338087 - DNA, 25 bp, Homo sapien
aagaatgcaaggttgaggactgtgt

SEQ ID NO: 338088 - DNA, 25 bp, Homo sapien
tgaagaatgcaaggttgaggactgt

SEQ ID NO: 338089 - DNA, 25 bp, Homo sapien
ctgctcccatcccgtttgcatgtac

SEQ ID NO: 338090 - DNA, 25 bp, Homo sapien
ccgtggagcaaggagcactgagcca

SEQ ID NO: 338091 - DNA, 25 bp, Homo sapien
ctcttccccgtggagcaaggagcac

SEQ ID NO: 338092 - DNA, 25 bp, Homo sapien
ctgagccagcatgggtatatctggc

SEQ ID NO: 338093 - DNA, 25 bp, Homo sapien
cagcatgggtatatctggctttctt

SEQ ID NO: 338094 - DNA, 25 bp, Homo sapien
acttctcttggtgtggcagggcttc

SEQ ID NO: 338095 - DNA, 25 bp, Homo sapien
gcatcgaatgaaaccccatcaaggg

SEQ ID NO: 338096 - DNA, 25 bp, Homo sapien
tcctacaggaagagggactcgtctg

SEQ ID NO: 338097 - DNA, 25 bp, Homo sapien
tcatgccctgggtataaacagtccc

SEQ ID NO: 338098 - DNA, 25 bp, Homo sapien
tcaaagcacagcgggactgtggctt

SEQ ID NO: 338099 - DNA, 25 bp, Homo sapien
gactcaaagcacagcgggactgtgg

SEQ ID NO: 338100 - DNA, 25 bp, Homo sapien
gcgggactgtggcttcagcattcat

SEQ ID NO: 338101 - DNA, 25 bp, Homo sapien
ttcagactcaaagcacagcgggact

SEQ ID NO: 338102 - DNA, 25 bp, Homo sapien
caggcgggccaggcattcggaaaag

SEQ ID NO: 338103 - DNA, 25 bp, Homo sapien
aggcgggccaggcattcggaaaagc

SEQ ID NO: 338104 - DNA, 25 bp, Homo sapien
cctgtggatgttgaaacttgttgaa

SEQ ID NO: 338105 - DNA, 25 bp, Homo sapien
tcctgtggatgttgaaacttgttga

SEQ ID NO: 338106 - DNA, 25 bp, Homo sapien
tcagcatcctttacactggtaggtg

SEQ ID NO: 338107 - DNA, 25 bp, Homo sapien
ctttcagcatcctttacactggtag

SEQ ID NO: 338108 - DNA, 25 bp, Homo sapien
tacactggtaggtgtaggaagggcc

SEQ ID NO: 338109 - DNA, 25 bp, Homo sapien
catcctttacactggtaggtgtagg

SEQ ID NO: 338110 - DNA, 25 bp, Homo sapien
tgattattgttacaccccggatgcg

SEQ ID NO: 338111 - DNA, 25 bp, Homo sapien
aagcttgccccgtataaatggttgc

SEQ ID NO: 338112 - DNA, 25 bp, Homo sapien
gaggctcctatgcaagaccctggga

SEQ ID NO: 338113 - DNA, 25 bp, Homo sapien
tgttatcgcagaagacccatctgga

SEQ ID NO: 338114 - DNA, 25 bp, Homo sapien
caagtcttgaaagtaagctagccaa

SEQ ID NO: 338115 - DNA, 25 bp, Homo sapien
tgtgtgttggtctcctgtaggccgt

SEQ ID NO: 338116 - DNA, 25 bp, Homo sapien
tgtaggccgtagattaaggggctcc

SEQ ID NO: 338117 - DNA, 25 bp, Homo sapien
ctcctgtgtgttggtctcctgtagg

SEQ ID NO: 338118 - DNA, 25 bp, Homo sapien
tggaatgaaaagtttctgtcggaaa

SEQ ID NO: 338119 - DNA, 25 bp, Homo sapien
gacctcatttcctatggaatgaaaa

SEQ ID NO: 338120 - DNA, 25 bp, Homo sapien
tgctcttggtgtgtgacctcatttc

SEQ ID NO: 338121 - DNA, 25 bp, Homo sapien
atgaaaagtttctgtcggaaaacag

SEQ ID NO: 338122 - DNA, 25 bp, Homo sapien
caatgtggtcggtaaggtctacctc

SEQ ID NO: 338123 - DNA, 25 bp, Homo sapien
taatctccaagggtatgcctggcac

SEQ ID NO: 338124 - DNA, 25 bp, Homo sapien
caagcgaggcctttatgtataggac

SEQ ID NO: 338125 - DNA, 25 bp, Homo sapien
gagccaacgcgctcagccatgttag

SEQ ID NO: 338126 - DNA, 25 bp, Homo sapien
tatgtcctctggaaactagaaatga

SEQ ID NO: 338127 - DNA, 25 bp, Homo sapien
ggcacagggcctacctatgtcctct

SEQ ID NO: 338128 - DNA, 25 bp, Homo sapien
atctttatattctttggcacagggc

SEQ ID NO: 338129 - DNA, 25 bp, Homo sapien
gcctgtattgtctgtgccagtctat

SEQ ID NO: 338130 - DNA, 25 bp, Homo sapien
tatgaaaaagcctaggataccacct

SEQ ID NO: 338131 - DNA, 25 bp, Homo sapien
tccccgagggtgctgtttgatgtgc

SEQ ID NO: 338132 - DNA, 25 bp, Homo sapien
tcagggcccttctatgtctggagaa

SEQ ID NO: 338133 - DNA, 25 bp, Homo sapien
tgcatcaaagcgcacaggtaccgcg

SEQ ID NO: 338134 - DNA, 25 bp, Homo sapien
catggtcccaagtgaaatgacagag

SEQ ID NO: 338135 - DNA, 25 bp, Homo sapien
tacacgatttcaggtctcagacgcc

SEQ ID NO: 338136 - DNA, 25 bp, Homo sapien
aagccgctgctatgaaagctccagg

SEQ ID NO: 338137 - DNA, 25 bp, Homo sapien
cacgcctttaggcaggtgatggcag

SEQ ID NO: 338138 - DNA, 25 bp, Homo sapien
ccagtgggtctgaaagctcgcttga

SEQ ID NO: 338139 - DNA, 25 bp, Homo sapien
gaataggaaacttgagacctggccc

SEQ ID NO: 338140 - DNA, 25 bp, Homo sapien
tgggtaggagaacaaggaccacctg

SEQ ID NO: 338141 - DNA, 25 bp, Homo sapien
cagatagtttacacccaaagggtag

SEQ ID NO: 338142 - DNA, 25 bp, Homo sapien
ctagcagagaatactctaatcccat

SEQ ID NO: 338143 - DNA, 25 bp, Homo sapien
tagcagagaatactctaatcccatg

SEQ ID NO: 338144 - DNA, 25 bp, Homo sapien
gcagagaatactctaatcccatgag

SEQ ID NO: 338145 - DNA, 25 bp, Homo sapien
gagaatactctaatcccatgagttc

SEQ ID NO: 338146 - DNA, 25 bp, Homo sapien
tgagtacaggctcctcgtggacacc

SEQ ID NO: 338147 - DNA, 25 bp, Homo sapien
gagatggcaccctgactgcaaagag

SEQ ID NO: 338148 - DNA, 25 bp, Homo sapien
tgggtttcaggaagcaacactcggc

SEQ ID NO: 338149 - DNA, 25 bp, Homo sapien
ggatggttagcgtgtcctccgacaa

SEQ ID NO: 338150 - DNA, 25 bp, Homo sapien
tccatgtggacgctcacaatccaga

SEQ ID NO: 338151 - DNA, 25 bp, Homo sapien
aggccttcgtaggccaagttctcca

SEQ ID NO: 338152 - DNA, 25 bp, Homo sapien
gttctccatgtggacgctcacaatc

SEQ ID NO: 338153 - DNA, 25 bp, Homo sapien
gtggacgctcacaatccagatccat

SEQ ID NO: 338154 - DNA, 25 bp, Homo sapien
ggtgagtccacatagcagtcctgaa

SEQ ID NO: 338155 - DNA, 25 bp, Homo sapien
tgagtacaagcttaaccagggagaa

SEQ ID NO: 338156 - DNA, 25 bp, Homo sapien
gctttgcacatgttctggccatcca

SEQ ID NO: 338157 - DNA, 25 bp, Homo sapien
gactgtcggagtccatagataggga

SEQ ID NO: 338158 - DNA, 25 bp, Homo sapien
tattttcgctagcttagtaagggga

SEQ ID NO: 338159 - DNA, 25 bp, Homo sapien
attttattttcgctagcttagtaag

SEQ ID NO: 338160 - DNA, 25 bp, Homo sapien
ctggaaattaccatctgtctttact

SEQ ID NO: 338161 - DNA, 25 bp, Homo sapien
taaagcactgaaatgagtatcccgg

SEQ ID NO: 338162 - DNA, 25 bp, Homo sapien
taagtgccatgacctagacgtgctg

SEQ ID NO: 338163 - DNA, 25 bp, Homo sapien
tgcaaacagacaaacggacaccaac

SEQ ID NO: 338164 - DNA, 25 bp, Homo sapien
aacaccccaggcatgtaaagcactg

SEQ ID NO: 338165 - DNA, 25 bp, Homo sapien
caccgcactcggctgtaggcattct

SEQ ID NO: 338166 - DNA, 25 bp, Homo sapien
ccaagtgggatgtgaactctccaaa

SEQ ID NO: 338167 - DNA, 25 bp, Homo sapien
tagtgcaagcgctctgaggagtagc

SEQ ID NO: 338168 - DNA, 25 bp, Homo sapien
gggatcacaggagttgttagccacc

SEQ ID NO: 338169 - DNA, 25 bp, Homo sapien
tgtagctgagctcgcgcgtgggtca

SEQ ID NO: 338170 - DNA, 25 bp, Homo sapien
agctgagctcgcgcgtgggtcacga

SEQ ID NO: 338171 - DNA, 25 bp, Homo sapien
cgctgtagctgagctcgcgcgtggg

SEQ ID NO: 338172 - DNA, 25 bp, Homo sapien
gctgagctcgcgcgtgggtcacgac

SEQ ID NO: 338173 - DNA, 25 bp, Homo sapien
aggaggccctctccgccttgagtct

SEQ ID NO: 338174 - DNA, 25 bp, Homo sapien
ctcaggccgggatggtcccttcctg

SEQ ID NO: 338175 - DNA, 25 bp, Homo sapien
acatcttctctgtctcgggatctgg

SEQ ID NO: 338176 - DNA, 25 bp, Homo sapien
gagtcttccaagaccctctgcgacg

SEQ ID NO: 338177 - DNA, 25 bp, Homo sapien
ccatgtggtcgagaggttctctgta

SEQ ID NO: 338178 - DNA, 25 bp, Homo sapien
ggaatctagactttccttcaaggag

SEQ ID NO: 338179 - DNA, 25 bp, Homo sapien
cttcaaggaggagtgcaaccagggc

SEQ ID NO: 338180 - DNA, 25 bp, Homo sapien
atgtgtagccaaccccaaatgatct

SEQ ID NO: 338181 - DNA, 25 bp, Homo sapien
tgcagtggtctaagtgaaaggagat

SEQ ID NO: 338182 - DNA, 25 bp, Homo sapien
tctgtctggaatgtactgcaaagat

SEQ ID NO: 338183 - DNA, 25 bp, Homo sapien
gattattctggttgcagtttgctaa

SEQ ID NO: 338184 - DNA, 25 bp, Homo sapien
ggtaagcctagaaatggagatagaa

SEQ ID NO: 338185 - DNA, 25 bp, Homo sapien
gagaactctcaggtactcttgggag

SEQ ID NO: 338186 - DNA, 25 bp, Homo sapien
tcaaacctgataccttacacatggg

SEQ ID NO: 338187 - DNA, 25 bp, Homo sapien
tcccatacaagtgcggactcctgga

SEQ ID NO: 338188 - DNA, 25 bp, Homo sapien
tttatgtcttggaacagggccagac

SEQ ID NO: 338189 - DNA, 25 bp, Homo sapien
gcattcatcaaaccactcgggggag

SEQ ID NO: 338190 - DNA, 25 bp, Homo sapien
tagcattcatcaaaccactcggggg

SEQ ID NO: 338191 - DNA, 25 bp, Homo sapien
ctagcattcatcaaaccactcgggg

SEQ ID NO: 338192 - DNA, 25 bp, Homo sapien
attcatcaaaccactcgggggagcc

SEQ ID NO: 338193 - DNA, 25 bp, Homo sapien
cactttgcagaaaagaggatgtaag

SEQ ID NO: 338194 - DNA, 25 bp, Homo sapien
tttgcagaaaagaggatgtaagagg

SEQ ID NO: 338195 - DNA, 25 bp, Homo sapien
ctttgcagaaaagaggatgtaagag

SEQ ID NO: 338196 - DNA, 25 bp, Homo sapien
gcagaaaagaggatgtaagagggca

SEQ ID NO: 338197 - DNA, 25 bp, Homo sapien
agagtgacatccagttgcacctttc

SEQ ID NO: 338198 - DNA, 25 bp, Homo sapien
gagtgacatccagttgcacctttct

SEQ ID NO: 338199 - DNA, 25 bp, Homo sapien
tgacatccagttgcacctttctcac

SEQ ID NO: 338200 - DNA, 25 bp, Homo sapien
gtgacatccagttgcacctttctca

SEQ ID NO: 338201 - DNA, 25 bp, Homo sapien
tatcatctggaacggttgtgaagct

SEQ ID NO: 338202 - DNA, 25 bp, Homo sapien
gacttgctcaggatcagcagtcacc

SEQ ID NO: 338203 - DNA, 25 bp, Homo sapien
caaccacaaaaccagagcggaagga

SEQ ID NO: 338204 - DNA, 25 bp, Homo sapien
tgtcctctcgtggaaacagcacaca

SEQ ID NO: 338205 - DNA, 25 bp, Homo sapien
ccaagattcgttcctgattgttaaa

SEQ ID NO: 338206 - DNA, 25 bp, Homo sapien
aactgtacatcacaaccagtgggat

SEQ ID NO: 338207 - DNA, 25 bp, Homo sapien
agtgggatttctcctaggactgcaa

SEQ ID NO: 338208 - DNA, 25 bp, Homo sapien
taggactgcaaagtggctttaacac

SEQ ID NO: 338209 - DNA, 25 bp, Homo sapien
tgctctttgaaagacgctgttggct

SEQ ID NO: 338210 - DNA, 25 bp, Homo sapien
tagacaagtagtttaataaagcaga

SEQ ID NO: 338211 - DNA, 25 bp, Homo sapien
tgaaagacgctgttggctgggcaca

SEQ ID NO: 338212 - DNA, 25 bp, Homo sapien
caaaggtgcaaactggacatcatca

SEQ ID NO: 338213 - DNA, 25 bp, Homo sapien
gggacacctggatcatcatacttca

SEQ ID NO: 338214 - DNA, 25 bp, Homo sapien
ccttcatctgactatggtagtgata

SEQ ID NO: 338215 - DNA, 25 bp, Homo sapien
tcagggttttgaaaggccgagacag

SEQ ID NO: 338216 - DNA, 25 bp, Homo sapien
tcaattaattgctctcatccttcag

SEQ ID NO: 338217 - DNA, 25 bp, Homo sapien
ccaagacaatctcgccttttgttgg

SEQ ID NO: 338218 - DNA, 25 bp, Homo sapien
gagttagacaccaagacaatctcgc

SEQ ID NO: 338219 - DNA, 25 bp, Homo sapien
ccccacatacgtgattcttactgag

SEQ ID NO: 338220 - DNA, 25 bp, Homo sapien
aaattcagagctgacattaattcag

SEQ ID NO: 338221 - DNA, 25 bp, Homo sapien
aaattcgaacgcttgcgtgctgctg

SEQ ID NO: 338222 - DNA, 25 bp, Homo sapien
gagcgtgcggagaaattcgaacgct

SEQ ID NO: 338223 - DNA, 25 bp, Homo sapien
cgtgcggagaaattcgaacgcttgc

SEQ ID NO: 338224 - DNA, 25 bp, Homo sapien
cggagaaattcgaacgcttgcgtgc

SEQ ID NO: 338225 - DNA, 25 bp, Homo sapien
cattgcgtggatggaccacatgttg

SEQ ID NO: 338226 - DNA, 25 bp, Homo sapien
gttcaattcatctgtcgacgcgcat

SEQ ID NO: 338227 - DNA, 25 bp, Homo sapien
catacaccatgtggccttttgcggc

SEQ ID NO: 338228 - DNA, 25 bp, Homo sapien
cgcgcatttgggtcgttgctgcttt

SEQ ID NO: 338229 - DNA, 25 bp, Homo sapien
tatctttcagtttgttaaagggcca

SEQ ID NO: 338230 - DNA, 25 bp, Homo sapien
tttcagtttgttaaagggccatgct

SEQ ID NO: 338231 - DNA, 25 bp, Homo sapien
tcagtttgttaaagggccatgctaa

SEQ ID NO: 338232 - DNA, 25 bp, Homo sapien
ctttcagtttgttaaagggccatgc

SEQ ID NO: 338233 - DNA, 25 bp, Homo sapien
cataatgtccccaaagatatctggt

SEQ ID NO: 338234 - DNA, 25 bp, Homo sapien
ggcatgtgacacagcaatcgtgtgg

SEQ ID NO: 338235 - DNA, 25 bp, Homo sapien
cgtttgctaatgcttacgttcacgg

SEQ ID NO: 338236 - DNA, 25 bp, Homo sapien
tgtgtcccgccctgcagatgtgcgt

SEQ ID NO: 338237 - DNA, 25 bp, Homo sapien
tcagcccagatgggccaagggctgc

SEQ ID NO: 338238 - DNA, 25 bp, Homo sapien
gaatagcctccactcaggtgtgtcc

SEQ ID NO: 338239 - DNA, 25 bp, Homo sapien
gccctgaatagcctccactcaggtg

SEQ ID NO: 338240 - DNA, 25 bp, Homo sapien
tcccgagcaactgggagccctgggc

SEQ ID NO: 338241 - DNA, 25 bp, Homo sapien
agcctccactcaggtgtgtcccgag

SEQ ID NO: 338242 - DNA, 25 bp, Homo sapien
gagttagtcgtctgttcacaaattt

SEQ ID NO: 338243 - DNA, 25 bp, Homo sapien
gaaacgatcttgctcaggtgtgcac

SEQ ID NO: 338244 - DNA, 25 bp, Homo sapien
tgagtgaagccttttcattctgagt

SEQ ID NO: 338245 - DNA, 25 bp, Homo sapien
cattctgagttagtcgtctgttcac

SEQ ID NO: 338246 - DNA, 25 bp, Homo sapien
catagaccgaagtgctgtggttaag

SEQ ID NO: 338247 - DNA, 25 bp, Homo sapien
aagagctgttactctccgaagtcag

SEQ ID NO: 338248 - DNA, 25 bp, Homo sapien
gttactctccgaagtcaggcgatct

SEQ ID NO: 338249 - DNA, 25 bp, Homo sapien
tgttacatatggtgaaatcaaggca

SEQ ID NO: 338250 - DNA, 25 bp, Homo sapien
cagtgggtgggagccagtgaggaca

SEQ ID NO: 338251 - DNA, 25 bp, Homo sapien
gacagccgtcgatggagcaaaaaga

SEQ ID NO: 338252 - DNA, 25 bp, Homo sapien
ctggtgagagactgagccgggcagt

SEQ ID NO: 338253 - DNA, 25 bp, Homo sapien
caaagaatccctctgattgccatgg

SEQ ID NO: 338254 - DNA, 25 bp, Homo sapien
gaccaacgggaggagtctgtgttac

SEQ ID NO: 338255 - DNA, 25 bp, Homo sapien
gctgaaggagactgggttgtcatca

SEQ ID NO: 338256 - DNA, 25 bp, Homo sapien
cagccaagtagggttgtccagcagg

SEQ ID NO: 338257 - DNA, 25 bp, Homo sapien
acttagatccggagtgcagagggca

SEQ ID NO: 338258 - DNA, 25 bp, Homo sapien
ctgtaaatgttaccagttgtcccca

SEQ ID NO: 338259 - DNA, 25 bp, Homo sapien
gtaaatgttaccagttgtccccaga

SEQ ID NO: 338260 - DNA, 25 bp, Homo sapien
tgtaaatgttaccagttgtccccag

SEQ ID NO: 338261 - DNA, 25 bp, Homo sapien
gccagacgggtcaccctcctggaag

SEQ ID NO: 338262 - DNA, 25 bp, Homo sapien
gctcctggccagacgggtcaccctc

SEQ ID NO: 338263 - DNA, 25 bp, Homo sapien
cctggccagacgggtcaccctcctg

SEQ ID NO: 338264 - DNA, 25 bp, Homo sapien
tggccagacgggtcaccctcctgga

SEQ ID NO: 338265 - DNA, 25 bp, Homo sapien
ttctaaacacgtactagggcagcat

SEQ ID NO: 338266 - DNA, 25 bp, Homo sapien
agcccagcccttagcacccaagggc

SEQ ID NO: 338267 - DNA, 25 bp, Homo sapien
tggccctctttagacagagtaggag

SEQ ID NO: 338268 - DNA, 25 bp, Homo sapien
acagagtaggagctcgggctaccca

SEQ ID NO: 338269 - DNA, 25 bp, Homo sapien
ggcccaggaccctcggagtgggcag

SEQ ID NO: 338270 - DNA, 25 bp, Homo sapien
aggcccaggaccctcggagtgggca

SEQ ID NO: 338271 - DNA, 25 bp, Homo sapien
ccaggaccctcggagtgggcaggcc

SEQ ID NO: 338272 - DNA, 25 bp, Homo sapien
ggaccctcggagtgggcaggcccac

SEQ ID NO: 338273 - DNA, 25 bp, Homo sapien
tccaaccaacagtgacacggcaccc

SEQ ID NO: 338274 - DNA, 25 bp, Homo sapien
aaccaacagtgacacggcaccctcc

SEQ ID NO: 338275 - DNA, 25 bp, Homo sapien
ccaacagtgacacggcaccctccac

SEQ ID NO: 338276 - DNA, 25 bp, Homo sapien
ccaaccaacagtgacacggcaccct

SEQ ID NO: 338277 - DNA, 25 bp, Homo sapien
ctggcccgtcaagaagcgaggcctg

SEQ ID NO: 338278 - DNA, 25 bp, Homo sapien
tccaaggccgcccacatcggagtcc

SEQ ID NO: 338279 - DNA, 25 bp, Homo sapien
agccatggtgcgctctggggttcct

SEQ ID NO: 338280 - DNA, 25 bp, Homo sapien
gcatctgctcatccaaggccgccca

SEQ ID NO: 338281 - DNA, 25 bp, Homo sapien
ctctgaggagccctcccaggtgggc

SEQ ID NO: 338282 - DNA, 25 bp, Homo sapien
tctgaggagccctcccaggtgggct

SEQ ID NO: 338283 - DNA, 25 bp, Homo sapien
ctggactggcatcccccccatcacc

SEQ ID NO: 338284 - DNA, 25 bp, Homo sapien
acctggactggcatcccccccatca

SEQ ID NO: 338285 - DNA, 25 bp, Homo sapien
accacctggactggcatccccccca

SEQ ID NO: 338286 - DNA, 25 bp, Homo sapien
gcccaccacctggactggcatcccc

SEQ ID NO: 338287 - DNA, 25 bp, Homo sapien
ggccagcaccccgccaaggtcctgc

SEQ ID NO: 338288 - DNA, 25 bp, Homo sapien
tccgccaggctacccggggtggcaa

SEQ ID NO: 338289 - DNA, 25 bp, Homo sapien
tcctgcacaagacgccctcctgcag

SEQ ID NO: 338290 - DNA, 25 bp, Homo sapien
gcagctccgccaggctacccggggt

SEQ ID NO: 338291 - DNA, 25 bp, Homo sapien
tccagccaccggaaggccccagctg

SEQ ID NO: 338292 - DNA, 25 bp, Homo sapien
gttccagccaccggaaggccccagc

SEQ ID NO: 338293 - DNA, 25 bp, Homo sapien
ctgagggttccagccaccggaaggc

SEQ ID NO: 338294 - DNA, 25 bp, Homo sapien
cagccaccggaaggccccagctgca

SEQ ID NO: 338295 - DNA, 25 bp, Homo sapien
cacccgtcctggaagaagtcccatg

SEQ ID NO: 338296 - DNA, 25 bp, Homo sapien
gctactcagccaaacagagccaggt

SEQ ID NO: 338297 - DNA, 25 bp, Homo sapien
tcctcactgtggaccagcatggaat

SEQ ID NO: 338298 - DNA, 25 bp, Homo sapien
aagggatctgcctgaagctactcag

SEQ ID NO: 338299 - DNA, 25 bp, Homo sapien
tcagacaggcctggataactcctgt

SEQ ID NO: 338300 - DNA, 25 bp, Homo sapien
tctccagtggcactgttttccccga

SEQ ID NO: 338301 - DNA, 25 bp, Homo sapien
cgataggtatgaatcatcttagggc

SEQ ID NO: 338302 - DNA, 25 bp, Homo sapien
tggcactgttttccccgataggtat

SEQ ID NO: 338303 - DNA, 25 bp, Homo sapien
tgtaatctcagctactcaagtggct

SEQ ID NO: 338304 - DNA, 25 bp, Homo sapien
ttagctggacgtggcagtgcacacc

SEQ ID NO: 338305 - DNA, 25 bp, Homo sapien
ctactcaagtggctgaggcaagagg

SEQ ID NO: 338306 - DNA, 25 bp, Homo sapien
attagctggacgtggcagtgcacac

SEQ ID NO: 338307 - DNA, 25 bp, Homo sapien
gtctgcctcggcctctcaaagtgct

SEQ ID NO: 338308 - DNA, 25 bp, Homo sapien
tctgcctcggcctctcaaagtgctg

SEQ ID NO: 338309 - DNA, 25 bp, Homo sapien
caacctctctcctgggttccagcaa

SEQ ID NO: 338310 - DNA, 25 bp, Homo sapien
aacctctctcctgggttccagcaat

SEQ ID NO: 338311 - DNA, 25 bp, Homo sapien
gataagaattgtgtgggatctataa

SEQ ID NO: 338312 - DNA, 25 bp, Homo sapien
gagatctttccattcacttaggctt

SEQ ID NO: 338313 - DNA, 25 bp, Homo sapien
taaatcaactgagtagcattaccat

SEQ ID NO: 338314 - DNA, 25 bp, Homo sapien
taagtattccaatccgtgaacatga

SEQ ID NO: 338315 - DNA, 25 bp, Homo sapien
tcacaggttcaagtgattctcctgc

SEQ ID NO: 338316 - DNA, 25 bp, Homo sapien
gtggcatgttctcggctcattgcag

SEQ ID NO: 338317 - DNA, 25 bp, Homo sapien
ctctgcctcacaggttcaagtgatt

SEQ ID NO: 338318 - DNA, 25 bp, Homo sapien
ttgagaccggggtcttgccctgtcg

SEQ ID NO: 338319 - DNA, 25 bp, Homo sapien
gaatggcattgatattacagggagc

SEQ ID NO: 338320 - DNA, 25 bp, Homo sapien
atttctgcgaagaatggcattgata

SEQ ID NO: 338321 - DNA, 25 bp, Homo sapien
tacagggagcccacgtagcccttta

SEQ ID NO: 338322 - DNA, 25 bp, Homo sapien
actgcgcccggtcaggcttttaatt

SEQ ID NO: 338323 - DNA, 25 bp, Homo sapien
gtgtgtgcacggctccttggtattg

SEQ ID NO: 338324 - DNA, 25 bp, Homo sapien
tgtgtgtgcacggctccttggtatt

SEQ ID NO: 338325 - DNA, 25 bp, Homo sapien
tgtgtgcacggctccttggtattgc

SEQ ID NO: 338326 - DNA, 25 bp, Homo sapien
aatgtgtgtgcacggctccttggta

SEQ ID NO: 338327 - DNA, 25 bp, Homo sapien
ggccctgggctcaggcaaaggatac

SEQ ID NO: 338328 - DNA, 25 bp, Homo sapien
gggccctgggctcaggcaaaggata

SEQ ID NO: 338329 - DNA, 25 bp, Homo sapien
ggccggcaaggaggccgcaaaggag

SEQ ID NO: 338330 - DNA, 25 bp, Homo sapien
ccacggcgacagccacggtggcagt

SEQ ID NO: 338331 - DNA, 25 bp, Homo sapien
agccacggcgacagccacggtggca

SEQ ID NO: 338332 - DNA, 25 bp, Homo sapien
gcagccacggcgacagccacggtgg

SEQ ID NO: 338333 - DNA, 25 bp, Homo sapien
cacggcgacagccacggtggcagtg

SEQ ID NO: 338334 - DNA, 25 bp, Homo sapien
tgccggctgcactggacagcccaag

SEQ ID NO: 338335 - DNA, 25 bp, Homo sapien
tggccaggtggacaggcatgtatcc

SEQ ID NO: 338336 - DNA, 25 bp, Homo sapien
atgcaggaatctcagcgtgcccagg

SEQ ID NO: 338337 - DNA, 25 bp, Homo sapien
cagggcatgggtcagcagccggtgc

SEQ ID NO: 338338 - DNA, 25 bp, Homo sapien
gaaaagctgctagaaagggaaacca

SEQ ID NO: 338339 - DNA, 25 bp, Homo sapien
gaatacactggacgtgccactcagt

SEQ ID NO: 338340 - DNA, 25 bp, Homo sapien
tgaaggttacgctacaccagggcca

SEQ ID NO: 338341 - DNA, 25 bp, Homo sapien
tgaaatggcctgcttcaatcctgga

SEQ ID NO: 338342 - DNA, 25 bp, Homo sapien
ggctgtggatgtgctgggcatgctc

SEQ ID NO: 338343 - DNA, 25 bp, Homo sapien
aggccatgctttcccgggacactgg

SEQ ID NO: 338344 - DNA, 25 bp, Homo sapien
gcccaccctagggagtcctctgcct

SEQ ID NO: 338345 - DNA, 25 bp, Homo sapien
ggcatgctcctgtctaaggccatgc

SEQ ID NO: 338346 - DNA, 25 bp, Homo sapien
cctgccaggggtccagcaacagctc

SEQ ID NO: 338347 - DNA, 25 bp, Homo sapien
tccagcaacagctccggggccagga

SEQ ID NO: 338348 - DNA, 25 bp, Homo sapien
gccaggggtccagcaacagctccgg

SEQ ID NO: 338349 - DNA, 25 bp, Homo sapien
cccccaccagccacagggtgctcat

SEQ ID NO: 338350 - DNA, 25 bp, Homo sapien
ctggggacagttggccatgggggcc

SEQ ID NO: 338351 - DNA, 25 bp, Homo sapien
cagcagcatcaggactgaggaggcc

SEQ ID NO: 338352 - DNA, 25 bp, Homo sapien
acagttggccatgggggcccctggc

SEQ ID NO: 338353 - DNA, 25 bp, Homo sapien
cagcatcaggactgaggaggccaga

SEQ ID NO: 338354 - DNA, 25 bp, Homo sapien
ttgaggacggtcaagggtggtcctg

SEQ ID NO: 338355 - DNA, 25 bp, Homo sapien
tggttgaggacggtcaagggtggtc

SEQ ID NO: 338356 - DNA, 25 bp, Homo sapien
tgaggacggtcaagggtggtcctgg

SEQ ID NO: 338357 - DNA, 25 bp, Homo sapien
cgcttggttgaggacggtcaagggt

SEQ ID NO: 338358 - DNA, 25 bp, Homo sapien
ctggcaggggacaggcatagagact

SEQ ID NO: 338359 - DNA, 25 bp, Homo sapien
tggcaggggacaggcatagagactt

SEQ ID NO: 338360 - DNA, 25 bp, Homo sapien
gtgaagggcttacccgtggacactc

SEQ ID NO: 338361 - DNA, 25 bp, Homo sapien
cctcactttcttcaatctatgaaac

SEQ ID NO: 338362 - DNA, 25 bp, Homo sapien
gacactcggaactgggacttgagcc

SEQ ID NO: 338363 - DNA, 25 bp, Homo sapien
cagctctgggcaccttagcaagggt

SEQ ID NO: 338364 - DNA, 25 bp, Homo sapien
gattcttccggtggcggatagagta

SEQ ID NO: 338365 - DNA, 25 bp, Homo sapien
gggtcccaggatctgtctggttcga

SEQ ID NO: 338366 - DNA, 25 bp, Homo sapien
cagaatggaaagacaaggacggaga

SEQ ID NO: 338367 - DNA, 25 bp, Homo sapien
tctggttcgaactcagctggtgact

SEQ ID NO: 338368 - DNA, 25 bp, Homo sapien
tagaaacaaggatatcggatgaggg

SEQ ID NO: 338369 - DNA, 25 bp, Homo sapien
gggatgattaaagggcctgctccac

SEQ ID NO: 338370 - DNA, 25 bp, Homo sapien
caaggatatcggatgagggatgatt

SEQ ID NO: 338371 - DNA, 25 bp, Homo sapien
aggcacggcgttcgaggcctcccac

SEQ ID NO: 338372 - DNA, 25 bp, Homo sapien
ggagtcaggactctagctcccgggc

SEQ ID NO: 338373 - DNA, 25 bp, Homo sapien
gagaaccctgaatccattccgcgca

SEQ ID NO: 338374 - DNA, 25 bp, Homo sapien
gcggcccgcggattagtcagcagtt

SEQ ID NO: 338375 - DNA, 25 bp, Homo sapien
cagcagttgttctagtccgggtccc

SEQ ID NO: 338376 - DNA, 25 bp, Homo sapien
gcccgagtgtcacgtcgggcgctct

SEQ ID NO: 338377 - DNA, 25 bp, Homo sapien
ccttagatgctattttggcccgagt

SEQ ID NO: 338378 - DNA, 25 bp, Homo sapien
ccgctctggccccttagatgctatt

SEQ ID NO: 338379 - DNA, 25 bp, Homo sapien
tagatgctattttggcccgagtgtc

SEQ ID NO: 338380 - DNA, 25 bp, Homo sapien
ctggcccgatggtcgcgcccggggt

SEQ ID NO: 338381 - DNA, 25 bp, Homo sapien
ccccgtggcctggcccgatggtcgc

SEQ ID NO: 338382 - DNA, 25 bp, Homo sapien
tcgcgcccggggttgcgagatttgc

SEQ ID NO: 338383 - DNA, 25 bp, Homo sapien
ggttgcgagatttgcgcctgcgcag

SEQ ID NO: 338384 - DNA, 25 bp, Homo sapien
gaaaatggcgtccacgggtgagtat

SEQ ID NO: 338385 - DNA, 25 bp, Homo sapien
cacgggtgagtatggtggaactgcg

SEQ ID NO: 338386 - DNA, 25 bp, Homo sapien
gtcgcgccggcggtagccggaacgc

SEQ ID NO: 338387 - DNA, 25 bp, Homo sapien
tatggtggaactgcggtcgcgccgg

SEQ ID NO: 338388 - DNA, 25 bp, Homo sapien
tcagaaaatcgttaactcgagatta

SEQ ID NO: 338389 - DNA, 25 bp, Homo sapien
caagcttcatttctgtgcaagaatg

SEQ ID NO: 338390 - DNA, 25 bp, Homo sapien
tatttttgtgttgagtacccttatc

SEQ ID NO: 338391 - DNA, 25 bp, Homo sapien
tttcatagttaatcaggcatgtctg

SEQ ID NO: 338392 - DNA, 25 bp, Homo sapien
cctcaggttcattccgacaggacca

SEQ ID NO: 338393 - DNA, 25 bp, Homo sapien
gctggtccatggcttacagatgtga

SEQ ID NO: 338394 - DNA, 25 bp, Homo sapien
gaagatggtgccttggttagtgcct

SEQ ID NO: 338395 - DNA, 25 bp, Homo sapien
caggcagtggtgtaaatgctggtcc

SEQ ID NO: 338396 - DNA, 25 bp, Homo sapien
taacttgaagtattgagtaactgct

SEQ ID NO: 338397 - DNA, 25 bp, Homo sapien
actgatttggcacataagcattgag

SEQ ID NO: 338398 - DNA, 25 bp, Homo sapien
tacaaaagagactaatgggtactgc

SEQ ID NO: 338399 - DNA, 25 bp, Homo sapien
ctaatgggtactgccggcattgtct

SEQ ID NO: 338400 - DNA, 25 bp, Homo sapien
cagtgtgactctagatgatctggca

SEQ ID NO: 338401 - DNA, 25 bp, Homo sapien
gatgaagactctgacaacagtgcaa

SEQ ID NO: 338402 - DNA, 25 bp, Homo sapien
ggcccacctgtagatccagatgaag

SEQ ID NO: 338403 - DNA, 25 bp, Homo sapien
tagtgatcaggtagttaagaaaccc

SEQ ID NO: 338404 - DNA, 25 bp, Homo sapien
ggctgtgccctaaagcatgggtgta

SEQ ID NO: 338405 - DNA, 25 bp, Homo sapien
aaattgataccctacgagtgaagcc

SEQ ID NO: 338406 - DNA, 25 bp, Homo sapien
gacctgtcctgtgggtgcaatgctg

SEQ ID NO: 338407 - DNA, 25 bp, Homo sapien
gggacactagtcagccattcactgg

SEQ ID NO: 338408 - DNA, 25 bp, Homo sapien
acagaggtggcttccgtggtggccg

SEQ ID NO: 338409 - DNA, 25 bp, Homo sapien
aatgttcagaggtggccgtggtgga

SEQ ID NO: 338410 - DNA, 25 bp, Homo sapien
cctcatggatcgtggtggtcccggt

SEQ ID NO: 338411 - DNA, 25 bp, Homo sapien
gccccctggacctttgatggaacag

SEQ ID NO: 338412 - DNA, 25 bp, Homo sapien
ctctaggaagcttgtgatagtggtt

SEQ ID NO: 338413 - DNA, 25 bp, Homo sapien
ttcccagcttggttggcgcaagtcc

SEQ ID NO: 338414 - DNA, 25 bp, Homo sapien
taagtaagtgctggtgaaaagcagc

SEQ ID NO: 338415 - DNA, 25 bp, Homo sapien
cgcaagtcctcatgtctctaggaag

SEQ ID NO: 338416 - DNA, 25 bp, Homo sapien
caatgggaaccccttgtgagcatgc

SEQ ID NO: 338417 - DNA, 25 bp, Homo sapien
cagagatcggccctactagatgcag

SEQ ID NO: 338418 - DNA, 25 bp, Homo sapien
caagagggcctcttaactgtaacaa

SEQ ID NO: 338419 - DNA, 25 bp, Homo sapien
tttaccttgcagaggcgagcaccgt

SEQ ID NO: 338420 - DNA, 25 bp, Homo sapien
agagcctgggttccgtccaacttca

SEQ ID NO: 338421 - DNA, 25 bp, Homo sapien
cctaagagtatcatagctcatcggg

SEQ ID NO: 338422 - DNA, 25 bp, Homo sapien
agtggatatgctgagccaggccaca

SEQ ID NO: 338423 - DNA, 25 bp, Homo sapien
ccattctgcagatggtgccactgag

SEQ ID NO: 338424 - DNA, 25 bp, Homo sapien
gagtaccagacctcatgggaccaga

SEQ ID NO: 338425 - DNA, 25 bp, Homo sapien
atgggacctctgttgtacattccgg

SEQ ID NO: 338426 - DNA, 25 bp, Homo sapien
ggcgagcccggtgttctgaagacct

SEQ ID NO: 338427 - DNA, 25 bp, Homo sapien
tattgaatgccttagaggaggccgg

SEQ ID NO: 338428 - DNA, 25 bp, Homo sapien
gtttccagtcaagttcatagccaag

SEQ ID NO: 338429 - DNA, 25 bp, Homo sapien
ctcatccaatcagggcggagacttc

SEQ ID NO: 338430 - DNA, 25 bp, Homo sapien
tatcccgtggtaggtgtggcataaa

SEQ ID NO: 338431 - DNA, 25 bp, Homo sapien
ggtccctgattgtcccagtcacaag

SEQ ID NO: 338432 - DNA, 25 bp, Homo sapien
ctgcagcgcgcgggatgcagcgccc

SEQ ID NO: 338433 - DNA, 25 bp, Homo sapien
acttggcggagcactcgaggtagcc

SEQ ID NO: 338434 - DNA, 25 bp, Homo sapien
ccagttgtacttggcggagcactcg

SEQ ID NO: 338435 - DNA, 25 bp, Homo sapien
cagctcgcggaagagacgcagcacg

SEQ ID NO: 338436 - DNA, 25 bp, Homo sapien
tcgcggaagagacgcagcacgtgcc

SEQ ID NO: 338437 - DNA, 25 bp, Homo sapien
tgcctaccacgaggatgggcgcttc

SEQ ID NO: 338438 - DNA, 25 bp, Homo sapien
aagcgcagccgctgcctgtcccgct

SEQ ID NO: 338439 - DNA, 25 bp, Homo sapien
tgtcccgcttgttgcctaccacgag

SEQ ID NO: 338440 - DNA, 25 bp, Homo sapien
agcccctgcgcactagggcggccag

SEQ ID NO: 338441 - DNA, 25 bp, Homo sapien
tgtgggccaaagagcacatacagct

SEQ ID NO: 338442 - DNA, 25 bp, Homo sapien
cccagtgggtatacacacgcaggcg

SEQ ID NO: 338443 - DNA, 25 bp, Homo sapien
gttgggagaccctacacactctcct

SEQ ID NO: 338444 - DNA, 25 bp, Homo sapien
tatacacacgcaggcgcattccctt

SEQ ID NO: 338445 - DNA, 25 bp, Homo sapien
tgcaagctccagtccttagcgtctg

SEQ ID NO: 338446 - DNA, 25 bp, Homo sapien
tcgtagacgagcacgaaggcgtccg

SEQ ID NO: 338447 - DNA, 25 bp, Homo sapien
ccgcagggccttcacgtagtcgaaa

SEQ ID NO: 338448 - DNA, 25 bp, Homo sapien
tccgggctgcagatgtcgtagacga

SEQ ID NO: 338449 - DNA, 25 bp, Homo sapien
gctttccccaactcggctcaggccg

SEQ ID NO: 338450 - DNA, 25 bp, Homo sapien
caactcggctcaggccgctctcctc

SEQ ID NO: 338451 - DNA, 25 bp, Homo sapien
tcaggccgctctcctccctagatgc

SEQ ID NO: 338452 - DNA, 25 bp, Homo sapien
tcttttcagctttccccaactcggc

SEQ ID NO: 338453 - DNA, 25 bp, Homo sapien
tcaagtcgtagacggcgccgtcgag

SEQ ID NO: 338454 - DNA, 25 bp, Homo sapien
actggcggatgatggccgtcttgcc

SEQ ID NO: 338455 - DNA, 25 bp, Homo sapien
agcaccgcgggtcggtagaggcgcg

SEQ ID NO: 338456 - DNA, 25 bp, Homo sapien
tagtcaccgaacaggaactggcgga

SEQ ID NO: 338457 - DNA, 25 bp, Homo sapien
tctcacccgctccaaaatagaagcc

SEQ ID NO: 338458 - DNA, 25 bp, Homo sapien
caggaagggtcgcaggaaggtgact

SEQ ID NO: 338459 - DNA, 25 bp, Homo sapien
agacagacagccgagtgggcagaca

SEQ ID NO: 338460 - DNA, 25 bp, Homo sapien
acagagatcccggagagggcctacc

SEQ ID NO: 338461 - DNA, 25 bp, Homo sapien
tgtgccaggcccattacctacgtga

SEQ ID NO: 338462 - DNA, 25 bp, Homo sapien
aatattcaaacagccgtcctcgagg

SEQ ID NO: 338463 - DNA, 25 bp, Homo sapien
gtgattctcgaacctacagcctcag

SEQ ID NO: 338464 - DNA, 25 bp, Homo sapien
ggtaaatggcccacactagacaata

SEQ ID NO: 338465 - DNA, 25 bp, Homo sapien
caaatcttattgcttgtcaggaggc

SEQ ID NO: 338466 - DNA, 25 bp, Homo sapien
aacacatgggatctagggactgtca

SEQ ID NO: 338467 - DNA, 25 bp, Homo sapien
tccagggagcctgtataatgacaac

SEQ ID NO: 338468 - DNA, 25 bp, Homo sapien
tccaggtcttctagctcagtgagtg

SEQ ID NO: 338469 - DNA, 25 bp, Homo sapien
agctcacatgcttggggtgtagtgg

SEQ ID NO: 338470 - DNA, 25 bp, Homo sapien
atgatgactcccactaatcacagcc

SEQ ID NO: 338471 - DNA, 25 bp, Homo sapien
ttggggtgtagtgggtccttggaca

SEQ ID NO: 338472 - DNA, 25 bp, Homo sapien
cctggacccacgaatggagggatcc

SEQ ID NO: 338473 - DNA, 25 bp, Homo sapien
gagcctcgggcctgacacactggct

SEQ ID NO: 338474 - DNA, 25 bp, Homo sapien
gatctagttaccgtagggtcagaaa

SEQ ID NO: 338475 - DNA, 25 bp, Homo sapien
ggaaaaaagtgtccgtgattgccaa

SEQ ID NO: 338476 - DNA, 25 bp, Homo sapien
atccccaaccactcggaggcagctt

SEQ ID NO: 338477 - DNA, 25 bp, Homo sapien
ttcaatcctgacattcggtggaggg

SEQ ID NO: 338478 - DNA, 25 bp, Homo sapien
cagggtccatcccatgagaggtggc

SEQ ID NO: 338479 - DNA, 25 bp, Homo sapien
cagaggcgacactgaggaatgtatc

SEQ ID NO: 338480 - DNA, 25 bp, Homo sapien
gacactacagagaaaccccgaagaa

SEQ ID NO: 338481 - DNA, 25 bp, Homo sapien
ggagcttctgcctggtcttgaccat

SEQ ID NO: 338482 - DNA, 25 bp, Homo sapien
gaggatggtctcgtaggcctggtac

SEQ ID NO: 338483 - DNA, 25 bp, Homo sapien
tacacgtgctgggacacctctggtg

SEQ ID NO: 338484 - DNA, 25 bp, Homo sapien
tctggtgctcgacacttcagggaca

SEQ ID NO: 338485 - DNA, 25 bp, Homo sapien
cttgaggatggtctcgtaggcctgg

SEQ ID NO: 338486 - DNA, 25 bp, Homo sapien
ggtagagactttgcctccgctctgg

SEQ ID NO: 338487 - DNA, 25 bp, Homo sapien
aacaatggagttccgcaggtcagca

SEQ ID NO: 338488 - DNA, 25 bp, Homo sapien
gccagccgggtgtggaccaaatata

SEQ ID NO: 338489 - DNA, 25 bp, Homo sapien
gaagcctgacagaaaatcccgaggg

SEQ ID NO: 338490 - DNA, 25 bp, Homo sapien
tgtcttatctgggtaacctgacggg

SEQ ID NO: 338491 - DNA, 25 bp, Homo sapien
cactgttccgagacccaattggtgt

SEQ ID NO: 338492 - DNA, 25 bp, Homo sapien
aacaggtctacctcaaaggctggga

SEQ ID NO: 338493 - DNA, 25 bp, Homo sapien
tcaagccaggcttgaagggacgctt

SEQ ID NO: 338494 - DNA, 25 bp, Homo sapien
ggttgcccggctggatccgcagctc

SEQ ID NO: 338495 - DNA, 25 bp, Homo sapien
gctgctctgcagcttgctgctcgca

SEQ ID NO: 338496 - DNA, 25 bp, Homo sapien
tcagcttcagggactggtagagcat

SEQ ID NO: 338497 - DNA, 25 bp, Homo sapien
ctcttggcgacagtgaagatgttgc

SEQ ID NO: 338498 - DNA, 25 bp, Homo sapien
gggtcacatggccgtgagaggcccc

SEQ ID NO: 338499 - DNA, 25 bp, Homo sapien
gtcacatggccgtgagaggccccag

SEQ ID NO: 338500 - DNA, 25 bp, Homo sapien
tcacatggccgtgagaggccccagt

SEQ ID NO: 338501 - DNA, 25 bp, Homo sapien
ggtcacatggccgtgagaggcccca

SEQ ID NO: 338502 - DNA, 25 bp, Homo sapien
tggggtcgggggctcggagtcctca

SEQ ID NO: 338503 - DNA, 25 bp, Homo sapien
ggggcagtctctgatctggaactgg

SEQ ID NO: 338504 - DNA, 25 bp, Homo sapien
ttccatgtggccaggaacatctgcc

SEQ ID NO: 338505 - DNA, 25 bp, Homo sapien
catgtggccaggaacatctgccggt

SEQ ID NO: 338506 - DNA, 25 bp, Homo sapien
gggcctcattctcattgggaatatc

SEQ ID NO: 338507 - DNA, 25 bp, Homo sapien
catcgatgttgttcttcacggccac

SEQ ID NO: 338508 - DNA, 25 bp, Homo sapien
agacatcgatgttgttcttcacggc

SEQ ID NO: 338509 - DNA, 25 bp, Homo sapien
tgtgcagtgggtacaaggtgctgaa

SEQ ID NO: 338510 - DNA, 25 bp, Homo sapien
gaagacatcgatgttgttcttcacg

SEQ ID NO: 338511 - DNA, 25 bp, Homo sapien
gggctgagtggcgcgtggacctgga

SEQ ID NO: 338512 - DNA, 25 bp, Homo sapien
ctgagtggcgcgtggacctggaggg

SEQ ID NO: 338513 - DNA, 25 bp, Homo sapien
ccatcttcatgaccgagcccaccgt

SEQ ID NO: 338514 - DNA, 25 bp, Homo sapien
atcttcatgaccgagcccaccgtgc

SEQ ID NO: 338515 - DNA, 25 bp, Homo sapien
acaggtgagctcctccgactcggga

SEQ ID NO: 338516 - DNA, 25 bp, Homo sapien
gggcctggagtataagctgcttcta

SEQ ID NO: 338517 - DNA, 25 bp, Homo sapien
gtaggcaggccttgccctgtcctgc

SEQ ID NO: 338518 - DNA, 25 bp, Homo sapien
tggttggcagggagcctctcaccgt

SEQ ID NO: 338519 - DNA, 25 bp, Homo sapien
ggatggcaaagtcggtcatgacctg

SEQ ID NO: 338520 - DNA, 25 bp, Homo sapien
tgaactggatggcaaagtcggtcat

SEQ ID NO: 338521 - DNA, 25 bp, Homo sapien
actggatggcaaagtcggtcatgac

SEQ ID NO: 338522 - DNA, 25 bp, Homo sapien
caaagtcggtcatgacctgcaaggc

SEQ ID NO: 338523 - DNA, 25 bp, Homo sapien
tgaaggtgcctgagatctccagccc

SEQ ID NO: 338524 - DNA, 25 bp, Homo sapien
ggtgaaggtgcctgagatctccagc

SEQ ID NO: 338525 - DNA, 25 bp, Homo sapien
ctggcgggtgaaggtgcctgagatc

SEQ ID NO: 338526 - DNA, 25 bp, Homo sapien
ccttagccttcatggctgggagcca

SEQ ID NO: 338527 - DNA, 25 bp, Homo sapien
gggcgggtaggtgcctcttcctgca

SEQ ID NO: 338528 - DNA, 25 bp, Homo sapien
gcccacctgagggtgctttttctct

SEQ ID NO: 338529 - DNA, 25 bp, Homo sapien
ctcaacagcccacctgagggtgctt

SEQ ID NO: 338530 - DNA, 25 bp, Homo sapien
agcccaaactcaacagcccacctga

SEQ ID NO: 338531 - DNA, 25 bp, Homo sapien
cacgccactggtcaggtcaaagagg

SEQ ID NO: 338532 - DNA, 25 bp, Homo sapien
gccactgccgatgggtgctccaaga

SEQ ID NO: 338533 - DNA, 25 bp, Homo sapien
catatgatcctgacagggtgcccac

SEQ ID NO: 338534 - DNA, 25 bp, Homo sapien
tgctccaagattggctggtactgct

SEQ ID NO: 338535 - DNA, 25 bp, Homo sapien
gctcccatctgcaccgaggaggtgg

SEQ ID NO: 338536 - DNA, 25 bp, Homo sapien
aggccaccgccaagaaggtccacag

SEQ ID NO: 338537 - DNA, 25 bp, Homo sapien
gctgtcaaggccaccgccaagaagg

SEQ ID NO: 338538 - DNA, 25 bp, Homo sapien
aggtgctccagtaggggctgtctca

SEQ ID NO: 338539 - DNA, 25 bp, Homo sapien
gccagcgtgccgatgtagcagataa

SEQ ID NO: 338540 - DNA, 25 bp, Homo sapien
cgatgaggtccgtctcttcagagat

SEQ ID NO: 338541 - DNA, 25 bp, Homo sapien
gataagctcgtctaacagtgtgggc

SEQ ID NO: 338542 - DNA, 25 bp, Homo sapien
ttatggtagacggaagccagcgtgc

SEQ ID NO: 338543 - DNA, 25 bp, Homo sapien
agaaagagtttcacaatggctgtca

SEQ ID NO: 338544 - DNA, 25 bp, Homo sapien
tgagtggccaaactgaggacctgct

SEQ ID NO: 338545 - DNA, 25 bp, Homo sapien
tctttagaaagagtttcacaatggc

SEQ ID NO: 338546 - DNA, 25 bp, Homo sapien
tgggtctctgttggcttctttagaa

SEQ ID NO: 338547 - DNA, 25 bp, Homo sapien
actttctaagtctgctgtccatggc

SEQ ID NO: 338548 - DNA, 25 bp, Homo sapien
tcctagctattcagaatcctttgag

SEQ ID NO: 338549 - DNA, 25 bp, Homo sapien
tgagaagattcaacaagacaatata

SEQ ID NO: 338550 - DNA, 25 bp, Homo sapien
cataattgtcaagcccggtgcagtg

SEQ ID NO: 338551 - DNA, 25 bp, Homo sapien
cagcagctcatctgcgttgtcgatc

SEQ ID NO: 338552 - DNA, 25 bp, Homo sapien
acaatccagatcatggcagcccggg

SEQ ID NO: 338553 - DNA, 25 bp, Homo sapien
tgtgctctcgtcatggaagccctcg

SEQ ID NO: 338554 - DNA, 25 bp, Homo sapien
gttgtcgatccgttccgcgtactcg

SEQ ID NO: 338555 - DNA, 25 bp, Homo sapien
gatgaggtcgagcagcgtgctcaca

SEQ ID NO: 338556 - DNA, 25 bp, Homo sapien
ttggtctggatgaggtcgagcagcg

SEQ ID NO: 338557 - DNA, 25 bp, Homo sapien
cgtgctcacacagcgctccgcagat

SEQ ID NO: 338558 - DNA, 25 bp, Homo sapien
cctcctggaccacatagttgacctt

SEQ ID NO: 338559 - DNA, 25 bp, Homo sapien
accttgatggcgcagcggccaatag

SEQ ID NO: 338560 - DNA, 25 bp, Homo sapien
acagccttccgtacaaagtccacat

SEQ ID NO: 338561 - DNA, 25 bp, Homo sapien
agcggccaatagcacgcacagcctt

SEQ ID NO: 338562 - DNA, 25 bp, Homo sapien
cacttctgttgcgtactctttcagc

SEQ ID NO: 338563 - DNA, 25 bp, Homo sapien
cacctgatggggcaatctgctggaa

SEQ ID NO: 338564 - DNA, 25 bp, Homo sapien
gtgaatatacacagactccctagga

SEQ ID NO: 338565 - DNA, 25 bp, Homo sapien
gatggggcaatctgctggaacactc

SEQ ID NO: 338566 - DNA, 25 bp, Homo sapien
gaatatacacagactccctaggaga

SEQ ID NO: 338567 - DNA, 25 bp, Homo sapien
gaggccaggcggatcatgatgtcca

SEQ ID NO: 338568 - DNA, 25 bp, Homo sapien
ctgggcgatgttggcctgagaggcc

SEQ ID NO: 338569 - DNA, 25 bp, Homo sapien
cggatcatgatgtccagcttctcca

SEQ ID NO: 338570 - DNA, 25 bp, Homo sapien
gcgatgttggcctgagaggccaggc

SEQ ID NO: 338571 - DNA, 25 bp, Homo sapien
gtagatagggtcgttgtacttcacg

SEQ ID NO: 338572 - DNA, 25 bp, Homo sapien
cttcatctcatgcttcaggatctca

SEQ ID NO: 338573 - DNA, 25 bp, Homo sapien
tacttcacgaagaacaccttcatct

SEQ ID NO: 338574 - DNA, 25 bp, Homo sapien
tcatctcatgcttcaggatctcagg

SEQ ID NO: 338575 - DNA, 25 bp, Homo sapien
caagctcctgggtagagggcccagc

SEQ ID NO: 338576 - DNA, 25 bp, Homo sapien
caaggctgtgactgctcctgtgtgc

SEQ ID NO: 338577 - DNA, 25 bp, Homo sapien
aatgccctccacatttgctgggaca

SEQ ID NO: 338578 - DNA, 25 bp, Homo sapien
aaaaacaaggcttaagccctgtgag

SEQ ID NO: 338579 - DNA, 25 bp, Homo sapien
agcaccttcacagcagagagcacca

SEQ ID NO: 338580 - DNA, 25 bp, Homo sapien
cagtgtgccgtagtagtccaagtcc

SEQ ID NO: 338581 - DNA, 25 bp, Homo sapien
atgagattgatgttgcgcagggcca

SEQ ID NO: 338582 - DNA, 25 bp, Homo sapien
gagagcaccacagcggagttggcat

SEQ ID NO: 338583 - DNA, 25 bp, Homo sapien
catatagttggcgaggcagtccagg

SEQ ID NO: 338584 - DNA, 25 bp, Homo sapien
actgtgggttcagatcgagcaggtt

SEQ ID NO: 338585 - DNA, 25 bp, Homo sapien
cgcggtcgtccttgggcatatagtt

SEQ ID NO: 338586 - DNA, 25 bp, Homo sapien
gcaatttctgagagcgctgccactg

SEQ ID NO: 338587 - DNA, 25 bp, Homo sapien
ttccggagtggctcgcacaggtact

SEQ ID NO: 338588 - DNA, 25 bp, Homo sapien
tgtcttgcgcacatatggatcctcg

SEQ ID NO: 338589 - DNA, 25 bp, Homo sapien
tgatcttgtcaacgcggatgcagcc

SEQ ID NO: 338590 - DNA, 25 bp, Homo sapien
tcgtccttcaggcacttccggagtg

SEQ ID NO: 338591 - DNA, 25 bp, Homo sapien
gattttctggagagtgggagccctc

SEQ ID NO: 338592 - DNA, 25 bp, Homo sapien
tacgcagggtccttagcatctgatt

SEQ ID NO: 338593 - DNA, 25 bp, Homo sapien
ggacctcacacaggatgagttacgc

SEQ ID NO: 338594 - DNA, 25 bp, Homo sapien
agtctgaaggtctggactccatcca

SEQ ID NO: 338595 - DNA, 25 bp, Homo sapien
tctgcatgcagttgaccacatcggg

SEQ ID NO: 338596 - DNA, 25 bp, Homo sapien
cacaaaggtgttgacggccataatg

SEQ ID NO: 338597 - DNA, 25 bp, Homo sapien
ggcgtaattcatcaagtagaggtat

SEQ ID NO: 338598 - DNA, 25 bp, Homo sapien
tagaggtatactagcttcttcagct

SEQ ID NO: 338599 - DNA, 25 bp, Homo sapien
tctgccttcagctcgaagatctccc

SEQ ID NO: 338600 - DNA, 25 bp, Homo sapien
gacatctttgcccacggtcatcgat

SEQ ID NO: 338601 - DNA, 25 bp, Homo sapien
tttgcccacggtcatcgatgcaatc

SEQ ID NO: 338602 - DNA, 25 bp, Homo sapien
cccacggtcatcgatgcaatcactt

SEQ ID NO: 338603 - DNA, 25 bp, Homo sapien
ctttcttggtcgtggtgaaatattt

SEQ ID NO: 338604 - DNA, 25 bp, Homo sapien
tcttggtcgtggtgaaatattttga

SEQ ID NO: 338605 - DNA, 25 bp, Homo sapien
ttcttggtcgtggtgaaatattttg

SEQ ID NO: 338606 - DNA, 25 bp, Homo sapien
tggtcccttatctgtagccaggctt

SEQ ID NO: 338607 - DNA, 25 bp, Homo sapien
ttggtcccttatctgtagccaggct

SEQ ID NO: 338608 - DNA, 25 bp, Homo sapien
tttggtcccttatctgtagccaggc

SEQ ID NO: 338609 - DNA, 25 bp, Homo sapien
gggcaggtaaatcagataatgggat

SEQ ID NO: 338610 - DNA, 25 bp, Homo sapien
taagagggataactgaagacaaaag

SEQ ID NO: 338611 - DNA, 25 bp, Homo sapien
cagacttgagagtgtaactgccaaa

SEQ ID NO: 338612 - DNA, 25 bp, Homo sapien
gggacctctgaaaatgggcaggtaa

SEQ ID NO: 338613 - DNA, 25 bp, Homo sapien
gagggccctaaattcccaggacgca

SEQ ID NO: 338614 - DNA, 25 bp, Homo sapien
ttgcctctccagaagaaaaagccgt

SEQ ID NO: 338615 - DNA, 25 bp, Homo sapien
aagaaaaagccgtcagagcctgtcc

SEQ ID NO: 338616 - DNA, 25 bp, Homo sapien
gagagctgctcggaatttcttgcct

SEQ ID NO: 338617 - DNA, 25 bp, Homo sapien
agcttagtgatgtactgagggcagc

SEQ ID NO: 338618 - DNA, 25 bp, Homo sapien
gtgatgtactgagggcagctatctc

SEQ ID NO: 338619 - DNA, 25 bp, Homo sapien
gcagctatctcctcgtgtcctttct

SEQ ID NO: 338620 - DNA, 25 bp, Homo sapien
tactgagggcagctatctcctcgtg

SEQ ID NO: 338621 - DNA, 25 bp, Homo sapien
tgctgtacctgctcttctgtgtatt

SEQ ID NO: 338622 - DNA, 25 bp, Homo sapien
cacaagatttcatgtgtacaaagct

SEQ ID NO: 338623 - DNA, 25 bp, Homo sapien
gacaagggctaatgtgagaatgaaa

SEQ ID NO: 338624 - DNA, 25 bp, Homo sapien
taagaggcaaacctaagctacggtg

SEQ ID NO: 338625 - DNA, 25 bp, Homo sapien
agctccgagtccacagggtagactg

SEQ ID NO: 338626 - DNA, 25 bp, Homo sapien
tccacagggtagactgtggtaattg

SEQ ID NO: 338627 - DNA, 25 bp, Homo sapien
gagtccacagggtagactgtggtaa

SEQ ID NO: 338628 - DNA, 25 bp, Homo sapien
tccgagtccacagggtagactgtgg

SEQ ID NO: 338629 - DNA, 25 bp, Homo sapien
ttggcaccaaaatgtccgcggcctc

SEQ ID NO: 338630 - DNA, 25 bp, Homo sapien
tcggcttggcaccaaaatgtccgcg

SEQ ID NO: 338631 - DNA, 25 bp, Homo sapien
ccgcaggtcccaatagctcccggcg

SEQ ID NO: 338632 - DNA, 25 bp, Homo sapien
ggctcggttcggcttggcaccaaaa

SEQ ID NO: 338633 - DNA, 25 bp, Homo sapien
ctgccgggcggaagtgagctgcccg

SEQ ID NO: 338634 - DNA, 25 bp, Homo sapien
cgggcggaagtgagctgcccgcgcg

SEQ ID NO: 338635 - DNA, 25 bp, Homo sapien
gggcggaagtgagctgcccgcgcgc

SEQ ID NO: 338636 - DNA, 25 bp, Homo sapien
gccgggcggaagtgagctgcccgcg

SEQ ID NO: 338637 - DNA, 25 bp, Homo sapien
gatctcagtgaatacccatctgtcc

SEQ ID NO: 338638 - DNA, 25 bp, Homo sapien
cactatgttctcctagatttggtcg

SEQ ID NO: 338639 - DNA, 25 bp, Homo sapien
gacaccggagatggtaagatgcatt

SEQ ID NO: 338640 - DNA, 25 bp, Homo sapien
tcatgacaccggagatggtaagatg

SEQ ID NO: 338641 - DNA, 25 bp, Homo sapien
acaccagcagaaattggtgagaggg

SEQ ID NO: 338642 - DNA, 25 bp, Homo sapien
tgacaccagcagaaattggtgagag

SEQ ID NO: 338643 - DNA, 25 bp, Homo sapien
ggggcagaacaggaatcaggtcccc

SEQ ID NO: 338644 - DNA, 25 bp, Homo sapien
aatgacaccagcagaaattggtgag

SEQ ID NO: 338645 - DNA, 25 bp, Homo sapien
gcttatcatatcagcaaagccagct

SEQ ID NO: 338646 - DNA, 25 bp, Homo sapien
gactcgctctttggggcttatcata

SEQ ID NO: 338647 - DNA, 25 bp, Homo sapien
cttggaagatgacgcaccaggaaga

SEQ ID NO: 338648 - DNA, 25 bp, Homo sapien
aaaactgctgatgaggccgactcgc

SEQ ID NO: 338649 - DNA, 25 bp, Homo sapien
gatggaagaacaaagatgtttctcc

SEQ ID NO: 338650 - DNA, 25 bp, Homo sapien
cttttgagatggaagaacaaagatg

SEQ ID NO: 338651 - DNA, 25 bp, Homo sapien
atggaagaacaaagatgtttctcct

SEQ ID NO: 338652 - DNA, 25 bp, Homo sapien
tctgccttcagctcgaagatctccc

SEQ ID NO: 338653 - DNA, 25 bp, Homo sapien
gacatctttgcccacggtcatcgat

SEQ ID NO: 338654 - DNA, 25 bp, Homo sapien
tttgcccacggtcatcgatgcaatc

SEQ ID NO: 338655 - DNA, 25 bp, Homo sapien
cccacggtcatcgatgcaatcactt

SEQ ID NO: 338656 - DNA, 25 bp, Homo sapien
gaagagaaagcgtaggacaaggccc

SEQ ID NO: 338657 - DNA, 25 bp, Homo sapien
aagagaaagcgtaggacaaggccca

SEQ ID NO: 338658 - DNA, 25 bp, Homo sapien
agagaaagcgtaggacaaggcccat

SEQ ID NO: 338659 - DNA, 25 bp, Homo sapien
aggaagagaaagcgtaggacaaggc

SEQ ID NO: 338660 - DNA, 25 bp, Homo sapien
tcttggtcgtggtgaaatattttga

SEQ ID NO: 338661 - DNA, 25 bp, Homo sapien
ctttcttggtcgtggtgaaatattt

SEQ ID NO: 338662 - DNA, 25 bp, Homo sapien
ttcttggtcgtggtgaaatattttg

SEQ ID NO: 338663 - DNA, 25 bp, Homo sapien
taccctgggatgaatgtgtctctga

SEQ ID NO: 338664 - DNA, 25 bp, Homo sapien
ctgacaggtaccctgggatgaatgt

SEQ ID NO: 338665 - DNA, 25 bp, Homo sapien
caggtaccctgggatgaatgtgtct

SEQ ID NO: 338666 - DNA, 25 bp, Homo sapien
tgggatgaatgtgtctctgacctca

SEQ ID NO: 338667 - DNA, 25 bp, Homo sapien
caatggggatgatgtattgtgcgcc

SEQ ID NO: 338668 - DNA, 25 bp, Homo sapien
ctctgctgcttccgctgtatcagtt

SEQ ID NO: 338669 - DNA, 25 bp, Homo sapien
cccaatggggatgatgtattgtgcg

SEQ ID NO: 338670 - DNA, 25 bp, Homo sapien
gctgcttccgctgtatcagttcatt

SEQ ID NO: 338671 - DNA, 25 bp, Homo sapien
tcccctaggaggaggtgaaatgacc

SEQ ID NO: 338672 - DNA, 25 bp, Homo sapien
tccagtctaggagtggtggcagtca

SEQ ID NO: 338673 - DNA, 25 bp, Homo sapien
caacaaaggctgtctgagtgctgcc

SEQ ID NO: 338674 - DNA, 25 bp, Homo sapien
cactgtgtgaagtactcaaggtcca

SEQ ID NO: 338675 - DNA, 25 bp, Homo sapien
gaaaaatcatctgtgcaactggccc

SEQ ID NO: 338676 - DNA, 25 bp, Homo sapien
tccaaggtgagggatctgtatacac

SEQ ID NO: 338677 - DNA, 25 bp, Homo sapien
tgacaaagctgggacacaatacctt

SEQ ID NO: 338678 - DNA, 25 bp, Homo sapien
tctctcagaagaacaaaatcaggcc

SEQ ID NO: 338679 - DNA, 25 bp, Homo sapien
agagataccctacctgctgtcagaa

SEQ ID NO: 338680 - DNA, 25 bp, Homo sapien
tatctgtcctgtgataaacccgggc

SEQ ID NO: 338681 - DNA, 25 bp, Homo sapien
tgttcaccgcaaagggaggatccat

SEQ ID NO: 338682 - DNA, 25 bp, Homo sapien
tggagcctcctaatgtccaggaccg

SEQ ID NO: 338683 - DNA, 25 bp, Homo sapien
aaaatgtgctgagctacccagggct

SEQ ID NO: 338684 - DNA, 25 bp, Homo sapien
gccaaagcaatgagccttccagtag

SEQ ID NO: 338685 - DNA, 25 bp, Homo sapien
tccctggataaagtgcaaagccctc

SEQ ID NO: 338686 - DNA, 25 bp, Homo sapien
gagccagtcccaccatgatgaagac

SEQ ID NO: 338687 - DNA, 25 bp, Homo sapien
atgctgtgcagggtagcctggctgg

SEQ ID NO: 338688 - DNA, 25 bp, Homo sapien
ctaccctctcgtggctagctgagca

SEQ ID NO: 338689 - DNA, 25 bp, Homo sapien
ggctgggcaccaccgagtgggtctg

SEQ ID NO: 338690 - DNA, 25 bp, Homo sapien
ccatcactctggcatagatgagtgg

SEQ ID NO: 338691 - DNA, 25 bp, Homo sapien
ctggcaaacccttgcgtgtcccttt

SEQ ID NO: 338692 - DNA, 25 bp, Homo sapien
ctgagggccagagtgatgaaatgat

SEQ ID NO: 338693 - DNA, 25 bp, Homo sapien
tagcagggaggtaccatttattccc

SEQ ID NO: 338694 - DNA, 25 bp, Homo sapien
tgtgagcctcagcacgaccctagca

SEQ ID NO: 338695 - DNA, 25 bp, Homo sapien
gcattcgggcgttcccactgcggaa

SEQ ID NO: 338696 - DNA, 25 bp, Homo sapien
gccggatgaagcattcgggcgttcc

SEQ ID NO: 338697 - DNA, 25 bp, Homo sapien
tcaatcttccgaggccggatgaagc

SEQ ID NO: 338698 - DNA, 25 bp, Homo sapien
ggatggctgtgacgcaggcgtgccc

SEQ ID NO: 338699 - DNA, 25 bp, Homo sapien
ggagctccagtcgcagaaccagagg

SEQ ID NO: 338700 - DNA, 25 bp, Homo sapien
aaccagaggcgaggcagtgagaacc

SEQ ID NO: 338701 - DNA, 25 bp, Homo sapien
gagaaccaggcctgccctcggtttc

SEQ ID NO: 338702 - DNA, 25 bp, Homo sapien
tgagaaccaggcctgccctcggttt

SEQ ID NO: 338703 - DNA, 25 bp, Homo sapien
tcttagagttgtggagcctagggcc

SEQ ID NO: 338704 - DNA, 25 bp, Homo sapien
gagttgtggagcctagggccgggcg

SEQ ID NO: 338705 - DNA, 25 bp, Homo sapien
ttcttagagttgtggagcctagggc

SEQ ID NO: 338706 - DNA, 25 bp, Homo sapien
ttgtggagcctagggccgggcgtgg

SEQ ID NO: 338707 - DNA, 25 bp, Homo sapien
tccgctatgggcgagctgtacgagc

SEQ ID NO: 338708 - DNA, 25 bp, Homo sapien
ggtggccacctcacgcagtgagaag

SEQ ID NO: 338709 - DNA, 25 bp, Homo sapien
tcaggccatgatgagcttcggcggc

SEQ ID NO: 338710 - DNA, 25 bp, Homo sapien
ttccactcgtggacacggacgtccg

SEQ ID NO: 338711 - DNA, 25 bp, Homo sapien
tccaggaagcacaggtaccactggg

SEQ ID NO: 338712 - DNA, 25 bp, Homo sapien
gaagatgagctaatcccattcccaa

SEQ ID NO: 338713 - DNA, 25 bp, Homo sapien
gagggaacccttagtcagtggcagc

SEQ ID NO: 338714 - DNA, 25 bp, Homo sapien
taataagggcaaccatgtcataggg

SEQ ID NO: 338715 - DNA, 25 bp, Homo sapien
aagaaagaggaggcacccaagaagg

SEQ ID NO: 338716 - DNA, 25 bp, Homo sapien
tgctgtcgaaaagcccaaagaatcc

SEQ ID NO: 338717 - DNA, 25 bp, Homo sapien
aggagaagaaggaacctgctgtcga

SEQ ID NO: 338718 - DNA, 25 bp, Homo sapien
cccaaagaaaagacagaggtagcca

SEQ ID NO: 338719 - DNA, 25 bp, Homo sapien
gtgtacattgcaccatatttggagt

SEQ ID NO: 338720 - DNA, 25 bp, Homo sapien
ggttgagtagtataccatcatatat

SEQ ID NO: 338721 - DNA, 25 bp, Homo sapien
gtacattgcaccatatttggagtct

SEQ ID NO: 338722 - DNA, 25 bp, Homo sapien
gcagtgtacattgcaccatatttgg

SEQ ID NO: 338723 - DNA, 25 bp, Homo sapien
aaagccttaattagggctgggcaca

SEQ ID NO: 338724 - DNA, 25 bp, Homo sapien
cttgggaggctgaggcaggtggatc

SEQ ID NO: 338725 - DNA, 25 bp, Homo sapien
gtggttcatgcctataatcctagca

SEQ ID NO: 338726 - DNA, 25 bp, Homo sapien
ggctgaggcaggtggatcacttgag

SEQ ID NO: 338727 - DNA, 25 bp, Homo sapien
gctagactgactaagataaaagaag

SEQ ID NO: 338728 - DNA, 25 bp, Homo sapien
atgagaaaatctggccaagtggggt

SEQ ID NO: 338729 - DNA, 25 bp, Homo sapien
caaccgtatgtccactaattcaata

SEQ ID NO: 338730 - DNA, 25 bp, Homo sapien
ggaattataaggcaatactgtgaac

SEQ ID NO: 338731 - DNA, 25 bp, Homo sapien
tataatctgccaaaagtccgtggac

SEQ ID NO: 338732 - DNA, 25 bp, Homo sapien
taaatcaggaatgtggacggcagct

SEQ ID NO: 338733 - DNA, 25 bp, Homo sapien
tcccaggtacaagagagcgacagat

SEQ ID NO: 338734 - DNA, 25 bp, Homo sapien
taaagactctactcaggccgggtgt

SEQ ID NO: 338735 - DNA, 25 bp, Homo sapien
tccaacgatcagagacaatttgtcc

SEQ ID NO: 338736 - DNA, 25 bp, Homo sapien
tttgtccatcggcaaccctgacagg

SEQ ID NO: 338737 - DNA, 25 bp, Homo sapien
taaatacaagatcatgaggacctca

SEQ ID NO: 338738 - DNA, 25 bp, Homo sapien
tgcgtagacaagaggtgagcatctc

SEQ ID NO: 338739 - DNA, 25 bp, Homo sapien
agactgcaaagccaccttgccagga

SEQ ID NO: 338740 - DNA, 25 bp, Homo sapien
ctttttcacactgtgtcacagctcc

SEQ ID NO: 338741 - DNA, 25 bp, Homo sapien
gctttttcacactgtgtcacagctc

SEQ ID NO: 338742 - DNA, 25 bp, Homo sapien
ctgcaaagccaccttgccaggaacc

SEQ ID NO: 338743 - DNA, 25 bp, Homo sapien
gggaaacaacggtctgcgcgggaga

SEQ ID NO: 338744 - DNA, 25 bp, Homo sapien
caagagtcacatgtgggccagagca

SEQ ID NO: 338745 - DNA, 25 bp, Homo sapien
caggtgacgctttttaattggctgg

SEQ ID NO: 338746 - DNA, 25 bp, Homo sapien
tggagaatatcaagagtcacatgtg

SEQ ID NO: 338747 - DNA, 25 bp, Homo sapien
gcgatggctgaagaatccctgagga

SEQ ID NO: 338748 - DNA, 25 bp, Homo sapien
gatggctgaagaatccctgaggatg

SEQ ID NO: 338749 - DNA, 25 bp, Homo sapien
tcagcgatggctgaagaatccctga

SEQ ID NO: 338750 - DNA, 25 bp, Homo sapien
cagcgatggctgaagaatccctgag

SEQ ID NO: 338751 - DNA, 25 bp, Homo sapien
tccacactgtcgtcatggctctcgg

SEQ ID NO: 338752 - DNA, 25 bp, Homo sapien
gagccgcagacacatcttctcctgg

SEQ ID NO: 338753 - DNA, 25 bp, Homo sapien
tgtagcacacattgacttcgccctc

SEQ ID NO: 338754 - DNA, 25 bp, Homo sapien
ctctcggtctccaggtaaacatcca

SEQ ID NO: 338755 - DNA, 25 bp, Homo sapien
gggcccgagcgctgatgcctctgca

SEQ ID NO: 338756 - DNA, 25 bp, Homo sapien
ttccgtccctggatgggcccgagcg

SEQ ID NO: 338757 - DNA, 25 bp, Homo sapien
gccagcatctcagcactaccttcct

SEQ ID NO: 338758 - DNA, 25 bp, Homo sapien
tgcatgtgggggaccacactggcca

SEQ ID NO: 338759 - DNA, 25 bp, Homo sapien
agggttcaacaccacagcggcctgc

SEQ ID NO: 338760 - DNA, 25 bp, Homo sapien
tcccctttccagttcaaacagagct

SEQ ID NO: 338761 - DNA, 25 bp, Homo sapien
gagtagccagggttcaacaccacag

SEQ ID NO: 338762 - DNA, 25 bp, Homo sapien
tgggatggaggagtagccagggttc

SEQ ID NO: 338763 - DNA, 25 bp, Homo sapien
tggatttatctctgttcatcaattt

SEQ ID NO: 338764 - DNA, 25 bp, Homo sapien
tctggatttatctctgttcatcaat

SEQ ID NO: 338765 - DNA, 25 bp, Homo sapien
tcctaataatcagcatacatttctg

SEQ ID NO: 338766 - DNA, 25 bp, Homo sapien
ctaataatcagcatacatttctgga

SEQ ID NO: 338767 - DNA, 25 bp, Homo sapien
cagccccggagagtgtttgattctt

SEQ ID NO: 338768 - DNA, 25 bp, Homo sapien
tctgttaagtccttgcaggactcca

SEQ ID NO: 338769 - DNA, 25 bp, Homo sapien
gagtgtttgattcttggcagcgccc

SEQ ID NO: 338770 - DNA, 25 bp, Homo sapien
tttgattcttggcagcgccctttgt

SEQ ID NO: 338771 - DNA, 25 bp, Homo sapien
ctgtgcccctttcgatgagcgccat

SEQ ID NO: 338772 - DNA, 25 bp, Homo sapien
tagtagagattggtgtccccagcca

SEQ ID NO: 338773 - DNA, 25 bp, Homo sapien
ccctttcgatgagcgccatgtagta

SEQ ID NO: 338774 - DNA, 25 bp, Homo sapien
agccagtcccgcatccacaatgtct

SEQ ID NO: 338775 - DNA, 25 bp, Homo sapien
catgtaatcctcatgggcaactgtc

SEQ ID NO: 338776 - DNA, 25 bp, Homo sapien
accaggcgagagacaaccttggcag

SEQ ID NO: 338777 - DNA, 25 bp, Homo sapien
agggaagaggtactggcaatcactg

SEQ ID NO: 338778 - DNA, 25 bp, Homo sapien
aatcactggtaactggcacaatgcc

SEQ ID NO: 338779 - DNA, 25 bp, Homo sapien
tgtgtcctggaaacccaatgccttt

SEQ ID NO: 338780 - DNA, 25 bp, Homo sapien
gatcggcagccatgtggagtctaag

SEQ ID NO: 338781 - DNA, 25 bp, Homo sapien
ggagcacggcccgatggacaaacat

SEQ ID NO: 338782 - DNA, 25 bp, Homo sapien
ggacaaacatcagtgctctggagag

SEQ ID NO: 338783 - DNA, 25 bp, Homo sapien
aggcgggactgcaccctggtcttca

SEQ ID NO: 338784 - DNA, 25 bp, Homo sapien
ctagggatgcaaactgtttgtggag

SEQ ID NO: 338785 - DNA, 25 bp, Homo sapien
gccaggcgggactgcaccctggtct

SEQ ID NO: 338786 - DNA, 25 bp, Homo sapien
atgcaaactgtttgtggagggccag

SEQ ID NO: 338787 - DNA, 25 bp, Homo sapien
tggcgctcagcgagtggtcagcaat

SEQ ID NO: 338788 - DNA, 25 bp, Homo sapien
gctcagcgagtggtcagcaatcact

SEQ ID NO: 338789 - DNA, 25 bp, Homo sapien
ctggcgctcagcgagtggtcagcaa

SEQ ID NO: 338790 - DNA, 25 bp, Homo sapien
gcgctcagcgagtggtcagcaatca

SEQ ID NO: 338791 - DNA, 25 bp, Homo sapien
tctgcacccacaaataggggtgacc

SEQ ID NO: 338792 - DNA, 25 bp, Homo sapien
tacatagtcgctcaaagtcaggatg

SEQ ID NO: 338793 - DNA, 25 bp, Homo sapien
gggtgacctagctcaagtacatagt

SEQ ID NO: 338794 - DNA, 25 bp, Homo sapien
gctcaagtacatagtcgctcaaagt

SEQ ID NO: 338795 - DNA, 25 bp, Homo sapien
ctggcaaagcccttcaactttgtca

SEQ ID NO: 338796 - DNA, 25 bp, Homo sapien
tcccatgccccacaaaccatccagt

SEQ ID NO: 338797 - DNA, 25 bp, Homo sapien
tgcaggtttggccatgttcacagcc

SEQ ID NO: 338798 - DNA, 25 bp, Homo sapien
caaagcccttcaactttgtcagttc

SEQ ID NO: 338799 - DNA, 25 bp, Homo sapien
tatcaaactgatactgattggctgg

SEQ ID NO: 338800 - DNA, 25 bp, Homo sapien
ccaggatacaagcaactcaggactg

SEQ ID NO: 338801 - DNA, 25 bp, Homo sapien
tacaagcaactcaggactgagtcag

SEQ ID NO: 338802 - DNA, 25 bp, Homo sapien
gattcggagttttctttccatgatc

SEQ ID NO: 338803 - DNA, 25 bp, Homo sapien
gggtaatgtagtaattttatcacaa

SEQ ID NO: 338804 - DNA, 25 bp, Homo sapien
gatggttcgggcacagtttgtcatt

SEQ ID NO: 338805 - DNA, 25 bp, Homo sapien
catggataacgtcaggagcaacttg

SEQ ID NO: 338806 - DNA, 25 bp, Homo sapien
cagcacgtgccggtcctgcgttttg

SEQ ID NO: 338807 - DNA, 25 bp, Homo sapien
ctgtcatgatgttgaggttcatgag

SEQ ID NO: 338808 - DNA, 25 bp, Homo sapien
gaaagtcaggtgaagcacactgtca

SEQ ID NO: 338809 - DNA, 25 bp, Homo sapien
cactgatgggggtgatcagctccat

SEQ ID NO: 338810 - DNA, 25 bp, Homo sapien
tgatgttgaggttcatgaggtagta

SEQ ID NO: 338811 - DNA, 25 bp, Homo sapien
tgaacccccagtgtgggtctccggc

SEQ ID NO: 338812 - DNA, 25 bp, Homo sapien
cacttcaggtcgagcatgacagaca

SEQ ID NO: 338813 - DNA, 25 bp, Homo sapien
tgcgtttgtcgtccaactgaacccc

SEQ ID NO: 338814 - DNA, 25 bp, Homo sapien
gacagtgggtgcctcttcagcatct

SEQ ID NO: 338815 - DNA, 25 bp, Homo sapien
tgctgcttcagctagctgggttgtc

SEQ ID NO: 338816 - DNA, 25 bp, Homo sapien
tagctgggttgtcagactcccctcc

SEQ ID NO: 338817 - DNA, 25 bp, Homo sapien
tcagctagctgggttgtcagactcc

SEQ ID NO: 338818 - DNA, 25 bp, Homo sapien
tgcttcagctagctgggttgtcaga

SEQ ID NO: 338819 - DNA, 25 bp, Homo sapien
tcttctgcttctagggaggacggca

SEQ ID NO: 338820 - DNA, 25 bp, Homo sapien
ctcttctgcttctagggaggacggc

SEQ ID NO: 338821 - DNA, 25 bp, Homo sapien
cttctgcttctagggaggacggcac

SEQ ID NO: 338822 - DNA, 25 bp, Homo sapien
tgcgaacaagcatgccccagtgcat

SEQ ID NO: 338823 - DNA, 25 bp, Homo sapien
gcttgatgcccccacaagaggaaat

SEQ ID NO: 338824 - DNA, 25 bp, Homo sapien
cagtgcatgcagctgcttgatgccc

SEQ ID NO: 338825 - DNA, 25 bp, Homo sapien
gatgcccccacaagaggaaatggtt

SEQ ID NO: 338826 - DNA, 25 bp, Homo sapien
tcctcggcatctgagtcactctcgt

SEQ ID NO: 338827 - DNA, 25 bp, Homo sapien
tcctcctcggcatctgagtcactct

SEQ ID NO: 338828 - DNA, 25 bp, Homo sapien
gctcctcctcggcatctgagtcact

SEQ ID NO: 338829 - DNA, 25 bp, Homo sapien
tgctcctcctcggcatctgagtcac

SEQ ID NO: 338830 - DNA, 25 bp, Homo sapien
tgggggacgaatcccaaccaccaca

SEQ ID NO: 338831 - DNA, 25 bp, Homo sapien
ttcgattgccacagataacgtctta

SEQ ID NO: 338832 - DNA, 25 bp, Homo sapien
cttgggagtcctctggaggtttgaa

SEQ ID NO: 338833 - DNA, 25 bp, Homo sapien
ggagtcctctggaggtttgaacaga

SEQ ID NO: 338834 - DNA, 25 bp, Homo sapien
tcgattgccacagataacgtcttat

SEQ ID NO: 338835 - DNA, 25 bp, Homo sapien
gtctagggggctgggaggatttcat

SEQ ID NO: 338836 - DNA, 25 bp, Homo sapien
ctgtctagggggctgggaggatttc

SEQ ID NO: 338837 - DNA, 25 bp, Homo sapien
ctagggggctgggaggatttcatat

SEQ ID NO: 338838 - DNA, 25 bp, Homo sapien
gggggctgggaggatttcatatgag

SEQ ID NO: 338839 - DNA, 25 bp, Homo sapien
ttccaactgattcactcggccacag

SEQ ID NO: 338840 - DNA, 25 bp, Homo sapien
gagaaatttcctgagcaggtactgc

SEQ ID NO: 338841 - DNA, 25 bp, Homo sapien
actgcttccaactgattcactcggc

SEQ ID NO: 338842 - DNA, 25 bp, Homo sapien
tcccatagccccttgtcctcaccca

SEQ ID NO: 338843 - DNA, 25 bp, Homo sapien
cacaggcctgcccatacgcagtggc

SEQ ID NO: 338844 - DNA, 25 bp, Homo sapien
gcaggtgtctggctgtctcatactg

SEQ ID NO: 338845 - DNA, 25 bp, Homo sapien
ggtcgaatggcataaacaggtactc

SEQ ID NO: 338846 - DNA, 25 bp, Homo sapien
tgagcctggtcgaatggcataaaca

SEQ ID NO: 338847 - DNA, 25 bp, Homo sapien
tgtctcatactgcttgtgagcctgg

SEQ ID NO: 338848 - DNA, 25 bp, Homo sapien
taaagtcatggggggcggtggcaaa

SEQ ID NO: 338849 - DNA, 25 bp, Homo sapien
tttaaagtcatggggggcggtggca

SEQ ID NO: 338850 - DNA, 25 bp, Homo sapien
cattttaaagtcatggggggcggtg

SEQ ID NO: 338851 - DNA, 25 bp, Homo sapien
ttaaagtcatggggggcggtggcaa

SEQ ID NO: 338852 - DNA, 25 bp, Homo sapien
ggctgtaccatacaagaatttattt

SEQ ID NO: 338853 - DNA, 25 bp, Homo sapien
aaatttaaccatgcagaggctttgg

SEQ ID NO: 338854 - DNA, 25 bp, Homo sapien
acagctctaaggctgtaccatacaa

SEQ ID NO: 338855 - DNA, 25 bp, Homo sapien
gattccatactttcatcacagctct

SEQ ID NO: 338856 - DNA, 25 bp, Homo sapien
agtggtgaaggcaaagcaaaaggcc

SEQ ID NO: 338857 - DNA, 25 bp, Homo sapien
gtgaaggcaaagcaaaaggccagag

SEQ ID NO: 338858 - DNA, 25 bp, Homo sapien
ggcaaagcaaaaggccagagggccc

SEQ ID NO: 338859 - DNA, 25 bp, Homo sapien
aaggcaaagcaaaaggccagagggc

SEQ ID NO: 338860 - DNA, 25 bp, Homo sapien
tgatgctgttgaggcggggctggag

SEQ ID NO: 338861 - DNA, 25 bp, Homo sapien
tgcatgatgctgttgaggcggggct

SEQ ID NO: 338862 - DNA, 25 bp, Homo sapien
ctgcatgatgctgttgaggcggggc

SEQ ID NO: 338863 - DNA, 25 bp, Homo sapien
catgatgctgttgaggcggggctgg

SEQ ID NO: 338864 - DNA, 25 bp, Homo sapien
gataggcactctcggtacttctctg

SEQ ID NO: 338865 - DNA, 25 bp, Homo sapien
tcttctccttgttagataggcactc

SEQ ID NO: 338866 - DNA, 25 bp, Homo sapien
ttgttagataggcactctcggtact

SEQ ID NO: 338867 - DNA, 25 bp, Homo sapien
agaatcttctccttgttagataggc

SEQ ID NO: 338868 - DNA, 25 bp, Homo sapien
tctaaactgaccagatcaatttctt

SEQ ID NO: 338869 - DNA, 25 bp, Homo sapien
cctctaaactgaccagatcaatttc

SEQ ID NO: 338870 - DNA, 25 bp, Homo sapien
agctcccagtccagacgtgccagtg

SEQ ID NO: 338871 - DNA, 25 bp, Homo sapien
cagtccagacgtgccagtgtttgct

SEQ ID NO: 338872 - DNA, 25 bp, Homo sapien
catcacctcatacaacaggttctgg

SEQ ID NO: 338873 - DNA, 25 bp, Homo sapien
ggtgatctccttctgtaggtgcatc

SEQ ID NO: 338874 - DNA, 25 bp, Homo sapien
gctgcagatgataggcatctacttt

SEQ ID NO: 338875 - DNA, 25 bp, Homo sapien
ctggagctgcagatgataggcatct

SEQ ID NO: 338876 - DNA, 25 bp, Homo sapien
ctcgtgggtctgatctcttcctttc

SEQ ID NO: 338877 - DNA, 25 bp, Homo sapien
ggatcctccgttcttctatttctat

SEQ ID NO: 338878 - DNA, 25 bp, Homo sapien
cctgatgtgggctaatcggttaagc

SEQ ID NO: 338879 - DNA, 25 bp, Homo sapien
tttagagtcatgaaatgcacacagc

SEQ ID NO: 338880 - DNA, 25 bp, Homo sapien
gtagctcctggcaggtgtacttgta

SEQ ID NO: 338881 - DNA, 25 bp, Homo sapien
agtctctgccagggtcccgcagatc

SEQ ID NO: 338882 - DNA, 25 bp, Homo sapien
tctgtagctcctggcaggtgtactt

SEQ ID NO: 338883 - DNA, 25 bp, Homo sapien
gtacttgtataactcatagtctctg

SEQ ID NO: 338884 - DNA, 25 bp, Homo sapien
ggagacacatatcatactggaatac

SEQ ID NO: 338885 - DNA, 25 bp, Homo sapien
tctctgggtaggtataatcatgtct

SEQ ID NO: 338886 - DNA, 25 bp, Homo sapien
tggaatacattctctgggtaggtat

SEQ ID NO: 338887 - DNA, 25 bp, Homo sapien
tgctgcagctaaaccagatgtggac

SEQ ID NO: 338888 - DNA, 25 bp, Homo sapien
ctttagtgaagaaacaggaatccca

SEQ ID NO: 338889 - DNA, 25 bp, Homo sapien
tttagtgaagaaacaggaatcccag

SEQ ID NO: 338890 - DNA, 25 bp, Homo sapien
gtgaagaaacaggaatcccagtcac

SEQ ID NO: 338891 - DNA, 25 bp, Homo sapien
tagtgaagaaacaggaatcccagtc

SEQ ID NO: 338892 - DNA, 25 bp, Homo sapien
tcgcttcggatcactttgggcttcc

SEQ ID NO: 338893 - DNA, 25 bp, Homo sapien
ggtgtcagatcgattccgctttcct

SEQ ID NO: 338894 - DNA, 25 bp, Homo sapien
tgggcttccgttttttgctcgattc

SEQ ID NO: 338895 - DNA, 25 bp, Homo sapien
gggctccatcgcttcggatcacttt

SEQ ID NO: 338896 - DNA, 25 bp, Homo sapien
atgaagatgacctgggactgtggct

SEQ ID NO: 338897 - DNA, 25 bp, Homo sapien
gtggcttcagatgatgcataggtga

SEQ ID NO: 338898 - DNA, 25 bp, Homo sapien
tgggctttaacacaggaggcattcc

SEQ ID NO: 338899 - DNA, 25 bp, Homo sapien
cataggtgatcttaaataatgctga

SEQ ID NO: 338900 - DNA, 25 bp, Homo sapien
gaggatgctgcagcgaacacttttc

SEQ ID NO: 338901 - DNA, 25 bp, Homo sapien
ttcggatgaggtaacagcgcagcgc

SEQ ID NO: 338902 - DNA, 25 bp, Homo sapien
aggagaagccgggtcagaccccagc

SEQ ID NO: 338903 - DNA, 25 bp, Homo sapien
gaggctccaacgtgaagcctgagga

SEQ ID NO: 338904 - DNA, 25 bp, Homo sapien
agcttgcccgcgcaccatagagaac

SEQ ID NO: 338905 - DNA, 25 bp, Homo sapien
gccactgccggaggcggagcaaagc

SEQ ID NO: 338906 - DNA, 25 bp, Homo sapien
catagagaaccggaagtaaggaagg

SEQ ID NO: 338907 - DNA, 25 bp, Homo sapien
acctggcaccgggagtaagccactg

SEQ ID NO: 338908 - DNA, 25 bp, Homo sapien
ttaccataatatgccacgccagtga

SEQ ID NO: 338909 - DNA, 25 bp, Homo sapien
taacacgaaagaacctggtagcgcg

SEQ ID NO: 338910 - DNA, 25 bp, Homo sapien
tcatctggagctagtaacacgtgtc

SEQ ID NO: 338911 - DNA, 25 bp, Homo sapien
ccagtgaaggcaacaagtcagggag

SEQ ID NO: 338912 - DNA, 25 bp, Homo sapien
agcacaagttttcctggatggtagg

SEQ ID NO: 338913 - DNA, 25 bp, Homo sapien
gcacaagttttcctggatggtaggc

SEQ ID NO: 338914 - DNA, 25 bp, Homo sapien
cacaagttttcctggatggtaggca

SEQ ID NO: 338915 - DNA, 25 bp, Homo sapien
cagaatgagggttgggctgatagaa

SEQ ID NO: 338916 - DNA, 25 bp, Homo sapien
tcaagctacccaagggttcatgatg

SEQ ID NO: 338917 - DNA, 25 bp, Homo sapien
gggtcactgaggagacccccagagt

SEQ ID NO: 338918 - DNA, 25 bp, Homo sapien
tgagggaacagggtctagcttgtat

SEQ ID NO: 338919 - DNA, 25 bp, Homo sapien
ctctgcatagaaggactggaactac

SEQ ID NO: 338920 - DNA, 25 bp, Homo sapien
tggctcagactgtccagcaagtggg

SEQ ID NO: 338921 - DNA, 25 bp, Homo sapien
aacctcctcctgaccgtggtgacga

SEQ ID NO: 338922 - DNA, 25 bp, Homo sapien
tgtgcaactaagctaaacagaggat

SEQ ID NO: 338923 - DNA, 25 bp, Homo sapien
tcagaacttgtcagccttcagttcc

SEQ ID NO: 338924 - DNA, 25 bp, Homo sapien
cagagctgtaatcctcagaacttgt

SEQ ID NO: 338925 - DNA, 25 bp, Homo sapien
tgtaatcctcagaacttgtcagcct

SEQ ID NO: 338926 - DNA, 25 bp, Homo sapien
tctgtcggggttgcctgagggagaa

SEQ ID NO: 338927 - DNA, 25 bp, Homo sapien
caaggggatcatgatcctagactcc

SEQ ID NO: 338928 - DNA, 25 bp, Homo sapien
ctagactccatgtgtcgcaccaggg

SEQ ID NO: 338929 - DNA, 25 bp, Homo sapien
actgcagaggcgagatcttcaaggg

SEQ ID NO: 338930 - DNA, 25 bp, Homo sapien
cactgcagaggcgagatcttcaagg

SEQ ID NO: 338931 - DNA, 25 bp, Homo sapien
attgccctcgtggaagggcccatga

SEQ ID NO: 338932 - DNA, 25 bp, Homo sapien
ggccccagatgctgcgacaggaatg

SEQ ID NO: 338933 - DNA, 25 bp, Homo sapien
cagatgctgcgacaggaatgtccca

SEQ ID NO: 338934 - DNA, 25 bp, Homo sapien
caggaatgtcccattgccctcgtgg

SEQ ID NO: 338935 - DNA, 25 bp, Homo sapien
ttcctccaggcagcgtttcgagtct

SEQ ID NO: 338936 - DNA, 25 bp, Homo sapien
tagtagacattttcatcccagcctc

SEQ ID NO: 338937 - DNA, 25 bp, Homo sapien
tcccgagactgcaggtctttatagg

SEQ ID NO: 338938 - DNA, 25 bp, Homo sapien
ttcgagtctcctcccgagactgcag

SEQ ID NO: 338939 - DNA, 25 bp, Homo sapien
ctgccggtacttgatggcccgagcc

SEQ ID NO: 338940 - DNA, 25 bp, Homo sapien
gtgcaccacgtagagctctcctatc

SEQ ID NO: 338941 - DNA, 25 bp, Homo sapien
tatctgtgagaagaagccgcccact

SEQ ID NO: 338942 - DNA, 25 bp, Homo sapien
tcctggttctcctgccggtacttga

SEQ ID NO: 338943 - DNA, 25 bp, Homo sapien
cagttgttcccccactcgatcatgg

SEQ ID NO: 338944 - DNA, 25 bp, Homo sapien
tccagaagctgaactcgaggagcag

SEQ ID NO: 338945 - DNA, 25 bp, Homo sapien
tcagctcatagatgttgggacccat

SEQ ID NO: 338946 - DNA, 25 bp, Homo sapien
cgctcccttcggaactccaggtact

SEQ ID NO: 338947 - DNA, 25 bp, Homo sapien
cttgagcttgtatgtcctcagctca

SEQ ID NO: 338948 - DNA, 25 bp, Homo sapien
ccacctgagaatcgccacaggtgca

SEQ ID NO: 338949 - DNA, 25 bp, Homo sapien
tgggtagccacctgagaatcgccac

SEQ ID NO: 338950 - DNA, 25 bp, Homo sapien
agtccatgagggctgggtagccacc

SEQ ID NO: 338951 - DNA, 25 bp, Homo sapien
tagccacctgagaatcgccacaggt

SEQ ID NO: 338952 - DNA, 25 bp, Homo sapien
cagcagatgacctcctcaaggttgg

SEQ ID NO: 338953 - DNA, 25 bp, Homo sapien
taggtcagtgagctgctgggacccc

SEQ ID NO: 338954 - DNA, 25 bp, Homo sapien
ttgggggtgagaggtataggtcagt

SEQ ID NO: 338955 - DNA, 25 bp, Homo sapien
cccagcagatgacctcctcaaggtt

SEQ ID NO: 338956 - DNA, 25 bp, Homo sapien
gcaaaagtactgtatggatagaaat

SEQ ID NO: 338957 - DNA, 25 bp, Homo sapien
catctgcaaaatggcctgaccctat

SEQ ID NO: 338958 - DNA, 25 bp, Homo sapien
ggatagaaatctaccaaaaccagga

SEQ ID NO: 338959 - DNA, 25 bp, Homo sapien
gtactgtatggatagaaatctacca

SEQ ID NO: 338960 - DNA, 25 bp, Homo sapien
cataagccaccatattcagtcctga

SEQ ID NO: 338961 - DNA, 25 bp, Homo sapien
agcataagccaccatattcagtcct

SEQ ID NO: 338962 - DNA, 25 bp, Homo sapien
aagccaccatattcagtcctgaatt

SEQ ID NO: 338963 - DNA, 25 bp, Homo sapien
taagccaccatattcagtcctgaat

SEQ ID NO: 338964 - DNA, 25 bp, Homo sapien
tagctggtgccaactttgatgtgtc

SEQ ID NO: 338965 - DNA, 25 bp, Homo sapien
cgtggaggaaatctcggcagccttc

SEQ ID NO: 338966 - DNA, 25 bp, Homo sapien
gtaagacaccagctcagacaagaag

SEQ ID NO: 338967 - DNA, 25 bp, Homo sapien
cactgggtaacaagacctggtttca

SEQ ID NO: 338968 - DNA, 25 bp, Homo sapien
caagactgtgccactatctgccagc

SEQ ID NO: 338969 - DNA, 25 bp, Homo sapien
gaatatcttcaactcaggaggtgga

SEQ ID NO: 338970 - DNA, 25 bp, Homo sapien
ggagaatatcttcaactcaggaggt

SEQ ID NO: 338971 - DNA, 25 bp, Homo sapien
aagactgtgccactatctgccagcc

SEQ ID NO: 338972 - DNA, 25 bp, Homo sapien
tccagttgcccacgagtgagcatgg

SEQ ID NO: 338973 - DNA, 25 bp, Homo sapien
tgggtagtcctcatccaggtgaagc

SEQ ID NO: 338974 - DNA, 25 bp, Homo sapien
ccacgagtgagcatgggtagtcctc

SEQ ID NO: 338975 - DNA, 25 bp, Homo sapien
ataccacgtgttccagttgcccacg

SEQ ID NO: 338976 - DNA, 25 bp, Homo sapien
aggtattcaggctttacattgtgaa

SEQ ID NO: 338977 - DNA, 25 bp, Homo sapien
gaacaaagagggagcggaaccagct

SEQ ID NO: 338978 - DNA, 25 bp, Homo sapien
tcccctctaacgagaagactgctct

SEQ ID NO: 338979 - DNA, 25 bp, Homo sapien
taacgagaagactgctctcaccgtc

SEQ ID NO: 338980 - DNA, 25 bp, Homo sapien
tgctttctgtacaagttctgtcccc

SEQ ID NO: 338981 - DNA, 25 bp, Homo sapien
tacaagttctgtcccctctaacgag

SEQ ID NO: 338982 - DNA, 25 bp, Homo sapien
gctgctggccctactagtgactctg

SEQ ID NO: 338983 - DNA, 25 bp, Homo sapien
ctgctgctggccctactagtgactc

SEQ ID NO: 338984 - DNA, 25 bp, Homo sapien
tggccctactagtgactctggagag

SEQ ID NO: 338985 - DNA, 25 bp, Homo sapien
tgctggccctactagtgactctgga

SEQ ID NO: 338986 - DNA, 25 bp, Homo sapien
tactgcatgttcgtcaagtgctaga

SEQ ID NO: 338987 - DNA, 25 bp, Homo sapien
gctagacacttcacaaccacggaat

SEQ ID NO: 338988 - DNA, 25 bp, Homo sapien
cctttgagcctcaacattatgtggg

SEQ ID NO: 338989 - DNA, 25 bp, Homo sapien
gaaattgcttgaaacataggctagg

SEQ ID NO: 338990 - DNA, 25 bp, Homo sapien
gaacccgaggcttaaagagtcctga

SEQ ID NO: 338991 - DNA, 25 bp, Homo sapien
ctctaggcttttcccacggtgtcag

SEQ ID NO: 338992 - DNA, 25 bp, Homo sapien
tgtgctgtaacatctcatggcaggc

SEQ ID NO: 338993 - DNA, 25 bp, Homo sapien
ggtcaccccacctacaaagtctgag

SEQ ID NO: 338994 - DNA, 25 bp, Homo sapien
catacacagtcctgagccctctgag

SEQ ID NO: 338995 - DNA, 25 bp, Homo sapien
ttccttgaccatacacagtcctgag

SEQ ID NO: 338996 - DNA, 25 bp, Homo sapien
acacagtcctgagccctctgagggt

SEQ ID NO: 338997 - DNA, 25 bp, Homo sapien
tccttgaccatacacagtcctgagc

SEQ ID NO: 338998 - DNA, 25 bp, Homo sapien
acggaggagctgactaccagaagcc

SEQ ID NO: 338999 - DNA, 25 bp, Homo sapien
tgttaaatcacaagctacgcctggg

SEQ ID NO: 339000 - DNA, 25 bp, Homo sapien
cctgtacagttcgaggtggaggaac

SEQ ID NO: 339001 - DNA, 25 bp, Homo sapien
ccaggaggccaccagttgggtgcaa

SEQ ID NO: 339002 - DNA, 25 bp, Homo sapien
gccgcgccgtcacagagatgctgca

SEQ ID NO: 339003 - DNA, 25 bp, Homo sapien
ctgcagacgcaacgtccccagcgcg

SEQ ID NO: 339004 - DNA, 25 bp, Homo sapien
gtcacagagatgctgcacagccgcg

SEQ ID NO: 339005 - DNA, 25 bp, Homo sapien
agatgctgcacagccgcggagccat

SEQ ID NO: 339006 - DNA, 25 bp, Homo sapien
ggaggcggggcgcgaataaactcca

SEQ ID NO: 339007 - DNA, 25 bp, Homo sapien
gaggcggggcgcgaataaactccac

SEQ ID NO: 339008 - DNA, 25 bp, Homo sapien
gttggagccgcaaaggttgcaggaa

SEQ ID NO: 339009 - DNA, 25 bp, Homo sapien
ggagccgcaaaggttgcaggaaggc

SEQ ID NO: 339010 - DNA, 25 bp, Homo sapien
tgtgggcgtctccaactccgcaggt

SEQ ID NO: 339011 - DNA, 25 bp, Homo sapien
tgctggacggaagtcagggttctaa

SEQ ID NO: 339012 - DNA, 25 bp, Homo sapien
tcaggatccacctcggtaaaatggg

SEQ ID NO: 339013 - DNA, 25 bp, Homo sapien
tcaggtgggcgtttcctgtgggcgt

SEQ ID NO: 339014 - DNA, 25 bp, Homo sapien
ccattggttggacatggagccctcc

SEQ ID NO: 339015 - DNA, 25 bp, Homo sapien
cacggtgagtcattcacatgcctgg

SEQ ID NO: 339016 - DNA, 25 bp, Homo sapien
caagtgatccagtaaggtgaaacct

SEQ ID NO: 339017 - DNA, 25 bp, Homo sapien
catgcctggcaagttagcgctggta

SEQ ID NO: 339018 - DNA, 25 bp, Homo sapien
tcataactctttgccgaagtccgtt

SEQ ID NO: 339019 - DNA, 25 bp, Homo sapien
tctttgccgaagtccgttatccaat

SEQ ID NO: 339020 - DNA, 25 bp, Homo sapien
actctttgccgaagtccgttatcca

SEQ ID NO: 339021 - DNA, 25 bp, Homo sapien
taactctttgccgaagtccgttatc

SEQ ID NO: 339022 - DNA, 25 bp, Homo sapien
ccattccctcagacaaatagatcat

SEQ ID NO: 339023 - DNA, 25 bp, Homo sapien
atcatccattccctcagacaaatag

SEQ ID NO: 339024 - DNA, 25 bp, Homo sapien
tgccatcatccattccctcagacaa

SEQ ID NO: 339025 - DNA, 25 bp, Homo sapien
catccattccctcagacaaatagat

SEQ ID NO: 339026 - DNA, 25 bp, Homo sapien
gtcacccagagtgcaccgggctaga

SEQ ID NO: 339027 - DNA, 25 bp, Homo sapien
ctgtcacccagagtgcaccgggcta

SEQ ID NO: 339028 - DNA, 25 bp, Homo sapien
acccagagtgcaccgggctagagtg

SEQ ID NO: 339029 - DNA, 25 bp, Homo sapien
cacccagagtgcaccgggctagagt

SEQ ID NO: 339030 - DNA, 25 bp, Homo sapien
tgagctagtgcgcccagcctggcct

SEQ ID NO: 339031 - DNA, 25 bp, Homo sapien
agctagtgcgcccagcctggccttt

SEQ ID NO: 339032 - DNA, 25 bp, Homo sapien
gagctagtgcgcccagcctggcctt

SEQ ID NO: 339033 - DNA, 25 bp, Homo sapien
cgtgagctagtgcgcccagcctggc

SEQ ID NO: 339034 - DNA, 25 bp, Homo sapien
gaggtggacctttacaggcacttgg

SEQ ID NO: 339035 - DNA, 25 bp, Homo sapien
gagacatgaatgaggtggaccttta

SEQ ID NO: 339036 - DNA, 25 bp, Homo sapien
gttttgagacatgaatgaggtggac

SEQ ID NO: 339037 - DNA, 25 bp, Homo sapien
gaatgaggtggacctttacaggcac

SEQ ID NO: 339038 - DNA, 25 bp, Homo sapien
ggcttcagaacagaactatacttga

SEQ ID NO: 339039 - DNA, 25 bp, Homo sapien
gcaggtactggatcatgatgtttca

SEQ ID NO: 339040 - DNA, 25 bp, Homo sapien
agagttggcctcagagttgaccaca

SEQ ID NO: 339041 - DNA, 25 bp, Homo sapien
aaatttaatgcacgccttgcaaagg

SEQ ID NO: 339042 - DNA, 25 bp, Homo sapien
gctgagtattcatcaggcccagggt

SEQ ID NO: 339043 - DNA, 25 bp, Homo sapien
ttgaccatctcatagttgcaggcac

SEQ ID NO: 339044 - DNA, 25 bp, Homo sapien
tagtcagaccaatagaagcaccaaa

SEQ ID NO: 339045 - DNA, 25 bp, Homo sapien
gagagagcatgagagttgttgacca

SEQ ID NO: 339046 - DNA, 25 bp, Homo sapien
gattcacagacgacatatgtggctc

SEQ ID NO: 339047 - DNA, 25 bp, Homo sapien
cacaaattcaaaggccacctgtaga

SEQ ID NO: 339048 - DNA, 25 bp, Homo sapien
gaaagccctgctaatttggatcgta

SEQ ID NO: 339049 - DNA, 25 bp, Homo sapien
tcagtgtagtctttccagaagccaa

SEQ ID NO: 339050 - DNA, 25 bp, Homo sapien
aatcccaactctcagggaggcaaga

SEQ ID NO: 339051 - DNA, 25 bp, Homo sapien
ccaactctcagggaggcaagaggtg

SEQ ID NO: 339052 - DNA, 25 bp, Homo sapien
tcccaactctcagggaggcaagagg

SEQ ID NO: 339053 - DNA, 25 bp, Homo sapien
taatcccaactctcagggaggcaag

SEQ ID NO: 339054 - DNA, 25 bp, Homo sapien
tgacagaagccctcagtgattgttc

SEQ ID NO: 339055 - DNA, 25 bp, Homo sapien
ccagagggaacaacacttatgttac

SEQ ID NO: 339056 - DNA, 25 bp, Homo sapien
tagccatcgagccagtgacagaagc

SEQ ID NO: 339057 - DNA, 25 bp, Homo sapien
tatgttactcttcctttagccatcg

SEQ ID NO: 339058 - DNA, 25 bp, Homo sapien
ggcattgataccctgatacagaaca

SEQ ID NO: 339059 - DNA, 25 bp, Homo sapien
gatacagaacagtccgcgctctgag

SEQ ID NO: 339060 - DNA, 25 bp, Homo sapien
tacagaacagtccgcgctctgagca

SEQ ID NO: 339061 - DNA, 25 bp, Homo sapien
ttggcattgataccctgatacagaa

SEQ ID NO: 339062 - DNA, 25 bp, Homo sapien
tcaaggtccagctgtggtttccact

SEQ ID NO: 339063 - DNA, 25 bp, Homo sapien
gccttgacatttatctcaagcgcca

SEQ ID NO: 339064 - DNA, 25 bp, Homo sapien
ctgtggtttccactgatggaggaac

SEQ ID NO: 339065 - DNA, 25 bp, Homo sapien
catttatctcaagcgccagcagctt

SEQ ID NO: 339066 - DNA, 25 bp, Homo sapien
ctgggcgttgtatggtagagcatct

SEQ ID NO: 339067 - DNA, 25 bp, Homo sapien
taggaactgggcgttgtatggtaga

SEQ ID NO: 339068 - DNA, 25 bp, Homo sapien
tgtatggtagagcatcttggccttg

SEQ ID NO: 339069 - DNA, 25 bp, Homo sapien
agcatcttggccttgacataaaagg

SEQ ID NO: 339070 - DNA, 25 bp, Homo sapien
tgaggcagtaaaacaccctgttcgg

SEQ ID NO: 339071 - DNA, 25 bp, Homo sapien
agagcctacaaacctgccttgcctg

SEQ ID NO: 339072 - DNA, 25 bp, Homo sapien
taggtactttaccaccatttggaga

SEQ ID NO: 339073 - DNA, 25 bp, Homo sapien
taagagactttacctggtcaagcag

SEQ ID NO: 339074 - DNA, 25 bp, Homo sapien
caggacccaacaagtggatcagagg

SEQ ID NO: 339075 - DNA, 25 bp, Homo sapien
cctgccggggctgagtctcgatgtt

SEQ ID NO: 339076 - DNA, 25 bp, Homo sapien
cagatagcaataaagcctcatagat

SEQ ID NO: 339077 - DNA, 25 bp, Homo sapien
gtgaagatgaacagtcagatagcaa

SEQ ID NO: 339078 - DNA, 25 bp, Homo sapien
caaaggcagttgaccagacttggca

SEQ ID NO: 339079 - DNA, 25 bp, Homo sapien
tgtacaccctgaggtgcttctgctt

SEQ ID NO: 339080 - DNA, 25 bp, Homo sapien
cactgtcctcgagaccctggttgta

SEQ ID NO: 339081 - DNA, 25 bp, Homo sapien
ttggcaagtcccagactggtgcagc

SEQ ID NO: 339082 - DNA, 25 bp, Homo sapien
tggattgccaaagggagcatggaca

SEQ ID NO: 339083 - DNA, 25 bp, Homo sapien
gtgcatgcgaggaattccccgccct

SEQ ID NO: 339084 - DNA, 25 bp, Homo sapien
gttgctggattgccaaagggagcat

SEQ ID NO: 339085 - DNA, 25 bp, Homo sapien
tgtgcatgcgaggaattccccgccc

SEQ ID NO: 339086 - DNA, 25 bp, Homo sapien
ccacacttggccaatgttctgtatt

SEQ ID NO: 339087 - DNA, 25 bp, Homo sapien
tgtggccagccagggcccttgagat

SEQ ID NO: 339088 - DNA, 25 bp, Homo sapien
acttggccaatgttctgtattttta

SEQ ID NO: 339089 - DNA, 25 bp, Homo sapien
gtctcaaactcacacctgggattac

SEQ ID NO: 339090 - DNA, 25 bp, Homo sapien
ccagactgcgtcctttttaagcgaa

SEQ ID NO: 339091 - DNA, 25 bp, Homo sapien
actgcccagctcatgatgtccgtga

SEQ ID NO: 339092 - DNA, 25 bp, Homo sapien
caaagagcagcgtcctgaccatggt

SEQ ID NO: 339093 - DNA, 25 bp, Homo sapien
taagcgaacattttagggcctggga

SEQ ID NO: 339094 - DNA, 25 bp, Homo sapien
aaccagctgcagtgtctaagtgttc

SEQ ID NO: 339095 - DNA, 25 bp, Homo sapien
cagctgcagtgtctaagtgttcctc

SEQ ID NO: 339096 - DNA, 25 bp, Homo sapien
ccctggagggagcagcgttggcagg

SEQ ID NO: 339097 - DNA, 25 bp, Homo sapien
agcagcgttggcagggagacagcct

SEQ ID NO: 339098 - DNA, 25 bp, Homo sapien
accgcagctcgcttccagagagatg

SEQ ID NO: 339099 - DNA, 25 bp, Homo sapien
cccagctccggtagggagaccgcag

SEQ ID NO: 339100 - DNA, 25 bp, Homo sapien
gacctctgcgccgtgatgggagcac

SEQ ID NO: 339101 - DNA, 25 bp, Homo sapien
agatggctctggacctctgcgccgt

SEQ ID NO: 339102 - DNA, 25 bp, Homo sapien
tgagcttaatgagcctgcagctggt

SEQ ID NO: 339103 - DNA, 25 bp, Homo sapien
agctggtctgtttgtccaagcccat

SEQ ID NO: 339104 - DNA, 25 bp, Homo sapien
cagctggtctgtttgtccaagccca

SEQ ID NO: 339105 - DNA, 25 bp, Homo sapien
accctgagcttaatgagcctgcagc

SEQ ID NO: 339106 - DNA, 25 bp, Homo sapien
tcagacctggagatcaagatcaagg

SEQ ID NO: 339107 - DNA, 25 bp, Homo sapien
ctgcagctagcccacttcattagag

SEQ ID NO: 339108 - DNA, 25 bp, Homo sapien
ccagttatcaaaggagacagctcag

SEQ ID NO: 339109 - DNA, 25 bp, Homo sapien
cagtccattgtatattgacagcagg

SEQ ID NO: 339110 - DNA, 25 bp, Homo sapien
gactggtatcagcatttcatgggca

SEQ ID NO: 339111 - DNA, 25 bp, Homo sapien
atcctgtgtgcgtggggttggggcc

SEQ ID NO: 339112 - DNA, 25 bp, Homo sapien
aaccccagcactgatcctgtgtgcg

SEQ ID NO: 339113 - DNA, 25 bp, Homo sapien
acaatgtcttctgaatgcctgctct

SEQ ID NO: 339114 - DNA, 25 bp, Homo sapien
tgcttggctgatgggccccgtccca

SEQ ID NO: 339115 - DNA, 25 bp, Homo sapien
aatgccagggagctcgagccaccag

SEQ ID NO: 339116 - DNA, 25 bp, Homo sapien
ggcacagagtgaggacccagaatgc

SEQ ID NO: 339117 - DNA, 25 bp, Homo sapien
caccagaagggatgatgtcccataa

SEQ ID NO: 339118 - DNA, 25 bp, Homo sapien
taacatttgcgtttatctggcaggc

SEQ ID NO: 339119 - DNA, 25 bp, Homo sapien
gatgaggatgtggtctcccgagact

SEQ ID NO: 339120 - DNA, 25 bp, Homo sapien
caagtgagtcccacaagagctatca

SEQ ID NO: 339121 - DNA, 25 bp, Homo sapien
gcaccagcgagcagcagttttctaa

SEQ ID NO: 339122 - DNA, 25 bp, Homo sapien
ctcagtttcccttgtgcaccagcga

SEQ ID NO: 339123 - DNA, 25 bp, Homo sapien
cagggagaaggtgaattttgagtaa

SEQ ID NO: 339124 - DNA, 25 bp, Homo sapien
catggtggctcccattcggtaatcc

SEQ ID NO: 339125 - DNA, 25 bp, Homo sapien
ggctctccgctcctggtgcgtggat

SEQ ID NO: 339126 - DNA, 25 bp, Homo sapien
tgtgaccttggtcaacgtccttctc

SEQ ID NO: 339127 - DNA, 25 bp, Homo sapien
ttggatcctcctggcacggaaacgg

SEQ ID NO: 339128 - DNA, 25 bp, Homo sapien
tacagttcttagttccgggctctcc

SEQ ID NO: 339129 - DNA, 25 bp, Homo sapien
tgggcatctgaggtggccctgcagc

SEQ ID NO: 339130 - DNA, 25 bp, Homo sapien
cagaagctcgtggaggatgggcatc

SEQ ID NO: 339131 - DNA, 25 bp, Homo sapien
gagacttggcctcagttcttccttc

SEQ ID NO: 339132 - DNA, 25 bp, Homo sapien
cacagggattttcaggaaaggcaga

SEQ ID NO: 339133 - DNA, 25 bp, Homo sapien
catcttcttaagaagcaggggggca

SEQ ID NO: 339134 - DNA, 25 bp, Homo sapien
gcgtagcaggaaccgggcttggctt

SEQ ID NO: 339135 - DNA, 25 bp, Homo sapien
gggcagatggtctcggagcctccat

SEQ ID NO: 339136 - DNA, 25 bp, Homo sapien
acccaggacgagggctgcacttggt

SEQ ID NO: 339137 - DNA, 25 bp, Homo sapien
cagcccacggggtactggaagacag

SEQ ID NO: 339138 - DNA, 25 bp, Homo sapien
gacagtggttctgatgggttcagcc

SEQ ID NO: 339139 - DNA, 25 bp, Homo sapien
gggggtgcccgcagggatggaggca

SEQ ID NO: 339140 - DNA, 25 bp, Homo sapien
tcctgaactggtggccagcccacgg

SEQ ID NO: 339141 - DNA, 25 bp, Homo sapien
gaataaccttcgtgtccacctgtgg

SEQ ID NO: 339142 - DNA, 25 bp, Homo sapien
tatgcacgtccacagcagagaatgc

SEQ ID NO: 339143 - DNA, 25 bp, Homo sapien
gttgcaggcagacattgagctgcga

SEQ ID NO: 339144 - DNA, 25 bp, Homo sapien
gctgcgagacaatgggaataacctt

SEQ ID NO: 339145 - DNA, 25 bp, Homo sapien
tgtcctgtgcgtgaggacaggagcc

SEQ ID NO: 339146 - DNA, 25 bp, Homo sapien
aactctgctcgtagcttctctggtg

SEQ ID NO: 339147 - DNA, 25 bp, Homo sapien
gacacgtgagccaaagccttgggga

SEQ ID NO: 339148 - DNA, 25 bp, Homo sapien
cattgaggtgcgtgtctggcacaac

SEQ ID NO: 339149 - DNA, 25 bp, Homo sapien
gggctgagctcagccgcttggctct

SEQ ID NO: 339150 - DNA, 25 bp, Homo sapien
gtcctccagatggccctcggggagc

SEQ ID NO: 339151 - DNA, 25 bp, Homo sapien
caggagcatctagtagccactccct

SEQ ID NO: 339152 - DNA, 25 bp, Homo sapien
gctcaggagcatctagtagccactc

SEQ ID NO: 339153 - DNA, 25 bp, Homo sapien
ccatgggccagccgtcctctgagag

SEQ ID NO: 339154 - DNA, 25 bp, Homo sapien
ccaccatgggccagccgtcctctga

SEQ ID NO: 339155 - DNA, 25 bp, Homo sapien
tgccccgtgctcgtcccaccatggg

SEQ ID NO: 339156 - DNA, 25 bp, Homo sapien
tctgagagcccatagccagggaaga

SEQ ID NO: 339157 - DNA, 25 bp, Homo sapien
gctcctggaaaccctgtgttggtcc

SEQ ID NO: 339158 - DNA, 25 bp, Homo sapien
tgctcctggaaaccctgtgttggtc

SEQ ID NO: 339159 - DNA, 25 bp, Homo sapien
gaaaaatgctcctggaaaccctgtg

SEQ ID NO: 339160 - DNA, 25 bp, Homo sapien
ctccacctggatgctcagctcctgc

SEQ ID NO: 339161 - DNA, 25 bp, Homo sapien
gtctcgctctgacatgtgggaaaat

SEQ ID NO: 339162 - DNA, 25 bp, Homo sapien
caggtctcgctctgacatgtgggaa

SEQ ID NO: 339163 - DNA, 25 bp, Homo sapien
cagttggagccaaagtcgcactggc

SEQ ID NO: 339164 - DNA, 25 bp, Homo sapien
tgtcagtagaaacttcctgcagggc

SEQ ID NO: 339165 - DNA, 25 bp, Homo sapien
gcagggccgcttgttctgctcatcc

SEQ ID NO: 339166 - DNA, 25 bp, Homo sapien
tgttctgctcatccagcaagatggc

SEQ ID NO: 339167 - DNA, 25 bp, Homo sapien
cctgcagggccgcttgttctgctca

SEQ ID NO: 339168 - DNA, 25 bp, Homo sapien
tatgatggcctccacaggcttggaa

SEQ ID NO: 339169 - DNA, 25 bp, Homo sapien
agcagggagccttagcgtaacacca

SEQ ID NO: 339170 - DNA, 25 bp, Homo sapien
tccctcaagtgaaatgcggagtctg

SEQ ID NO: 339171 - DNA, 25 bp, Homo sapien
aatctgggactaggtgatctcggcc

SEQ ID NO: 339172 - DNA, 25 bp, Homo sapien
gagcggtcgcagtagtcacagaagt

SEQ ID NO: 339173 - DNA, 25 bp, Homo sapien
catgtcgtaccagaccttcttggcc

SEQ ID NO: 339174 - DNA, 25 bp, Homo sapien
gcagcccgttcaggtgcttcttgcg

SEQ ID NO: 339175 - DNA, 25 bp, Homo sapien
tagtcacagaagtatcgcttcccca

SEQ ID NO: 339176 - DNA, 25 bp, Homo sapien
gaggtcaaggctccagccagctgag

SEQ ID NO: 339177 - DNA, 25 bp, Homo sapien
caaggctccagccagctgagattgc

SEQ ID NO: 339178 - DNA, 25 bp, Homo sapien
cccaaggaggtcaaggctccagcca

SEQ ID NO: 339179 - DNA, 25 bp, Homo sapien
ggctccagccagctgagattgcgcc

SEQ ID NO: 339180 - DNA, 25 bp, Homo sapien
gagaaaagagactaggactcgcccc

SEQ ID NO: 339181 - DNA, 25 bp, Homo sapien
cttccagtgcggagaaaagagacta

SEQ ID NO: 339182 - DNA, 25 bp, Homo sapien
gagactaggactcgcccctcgacgt

SEQ ID NO: 339183 - DNA, 25 bp, Homo sapien
gcccctcgacgtctcgcggaaggta

SEQ ID NO: 339184 - DNA, 25 bp, Homo sapien
gcgtcgcgtactgcttgctgggatt

SEQ ID NO: 339185 - DNA, 25 bp, Homo sapien
tcctcgcgtcgcgtactgcttgctg

SEQ ID NO: 339186 - DNA, 25 bp, Homo sapien
tgcgtcctcgcgtcgcgtactgctt

SEQ ID NO: 339187 - DNA, 25 bp, Homo sapien
gtactgcttgctgggattcgtagtc

SEQ ID NO: 339188 - DNA, 25 bp, Homo sapien
gatcaaggcgcggacgctatctacg

SEQ ID NO: 339189 - DNA, 25 bp, Homo sapien
cctcaccatcatcgtgggcgtcatg

SEQ ID NO: 339190 - DNA, 25 bp, Homo sapien
ttcgagcgcgccttcgatcaaggcg

SEQ ID NO: 339191 - DNA, 25 bp, Homo sapien
gctatctacgaccacatcaacgagg

SEQ ID NO: 339192 - DNA, 25 bp, Homo sapien
ggttctgttaaccactcccattgat

SEQ ID NO: 339193 - DNA, 25 bp, Homo sapien
actgtcccatctcttgcaagtggtt

SEQ ID NO: 339194 - DNA, 25 bp, Homo sapien
tgtccactagtgctatgctgcctgt

SEQ ID NO: 339195 - DNA, 25 bp, Homo sapien
tcccattgatctggagagacatcca

SEQ ID NO: 339196 - DNA, 25 bp, Homo sapien
cacatcaagcacaagtatgagaaca

SEQ ID NO: 339197 - DNA, 25 bp, Homo sapien
gagaacaagtagttccttggaggcc

SEQ ID NO: 339198 - DNA, 25 bp, Homo sapien
cgctgttggcaagaaacggctttac

SEQ ID NO: 339199 - DNA, 25 bp, Homo sapien
gatgctcaaggtactcttcatggac

SEQ ID NO: 339200 - DNA, 25 bp, Homo sapien
ggaatgtgggtcatggacatacaca

SEQ ID NO: 339201 - DNA, 25 bp, Homo sapien
gggaatgtgggtcatggacatacac

SEQ ID NO: 339202 - DNA, 25 bp, Homo sapien
gaatatacaggtttcctgctgtcca

SEQ ID NO: 339203 - DNA, 25 bp, Homo sapien
tttggggcgcttgccttgggactcc

SEQ ID NO: 339204 - DNA, 25 bp, Homo sapien
tgtgtttttgaatatacaggtttcc

SEQ ID NO: 339205 - DNA, 25 bp, Homo sapien
ggaagtggtgtcttgtggcccgagg

SEQ ID NO: 339206 - DNA, 25 bp, Homo sapien
gccccacggattcttcggctgtggc

SEQ ID NO: 339207 - DNA, 25 bp, Homo sapien
ggaaggtgcctgcttgccggcccca

SEQ ID NO: 339208 - DNA, 25 bp, Homo sapien
ccacggattcttcggctgtggcata

SEQ ID NO: 339209 - DNA, 25 bp, Homo sapien
atctctttcccgctagcgcagctgg

SEQ ID NO: 339210 - DNA, 25 bp, Homo sapien
ctggctggtagatgagaggcggcct

SEQ ID NO: 339211 - DNA, 25 bp, Homo sapien
tgagttgaacttggggcccctagtg

SEQ ID NO: 339212 - DNA, 25 bp, Homo sapien
gcgatgggagcacggcctggtgagt

SEQ ID NO: 339213 - DNA, 25 bp, Homo sapien
tggtagatgagaggcggccttctca

SEQ ID NO: 339214 - DNA, 25 bp, Homo sapien
ttcctgggttgtctcgcggctctgc

SEQ ID NO: 339215 - DNA, 25 bp, Homo sapien
tcctcttgcggtcggccatggttct

SEQ ID NO: 339216 - DNA, 25 bp, Homo sapien
catggttctccggttgtggttggct

SEQ ID NO: 339217 - DNA, 25 bp, Homo sapien
tgctgttgagctgtcatgccggtac

SEQ ID NO: 339218 - DNA, 25 bp, Homo sapien
tgggtgataaatcccctcctgtgtt

SEQ ID NO: 339219 - DNA, 25 bp, Homo sapien
tcaccaagtaatggttatgagtggg

SEQ ID NO: 339220 - DNA, 25 bp, Homo sapien
tgatatcagctagccctggacacgc

SEQ ID NO: 339221 - DNA, 25 bp, Homo sapien
gtgttcaccaagtaatggttatgag

SEQ ID NO: 339222 - DNA, 25 bp, Homo sapien
ctttcttggcgagaaaggccatgcg

SEQ ID NO: 339223 - DNA, 25 bp, Homo sapien
gcgagaaaggccatgcgcctggctt

SEQ ID NO: 339224 - DNA, 25 bp, Homo sapien
cactgcagggtcctgaacaaaatgg

SEQ ID NO: 339225 - DNA, 25 bp, Homo sapien
aaggccatgcgcctggcttctgcct

SEQ ID NO: 339226 - DNA, 25 bp, Homo sapien
gccccgctactcattgccgttggtg

SEQ ID NO: 339227 - DNA, 25 bp, Homo sapien
ctgagtctgtgcttgcaccgaggag

SEQ ID NO: 339228 - DNA, 25 bp, Homo sapien
cacacaaaactggtaggttttacat

SEQ ID NO: 339229 - DNA, 25 bp, Homo sapien
gatgacgagagtgggacgccatctc

SEQ ID NO: 339230 - DNA, 25 bp, Homo sapien
ctttggttctcagcacctgagggat

SEQ ID NO: 339231 - DNA, 25 bp, Homo sapien
tgcccttctctaggcactttggttc

SEQ ID NO: 339232 - DNA, 25 bp, Homo sapien
gagcctcctcgtcagcatcgtcttc

SEQ ID NO: 339233 - DNA, 25 bp, Homo sapien
agcatcgtcttcctcatcgtcgtca

SEQ ID NO: 339234 - DNA, 25 bp, Homo sapien
gccatcgtatgtgtcatcgtactca

SEQ ID NO: 339235 - DNA, 25 bp, Homo sapien
actcatcctcgtagtagacactgtg

SEQ ID NO: 339236 - DNA, 25 bp, Homo sapien
gcgcccacctggttgccatcgtatg

SEQ ID NO: 339237 - DNA, 25 bp, Homo sapien
tcagagtctgcatcattggcgccca

SEQ ID NO: 339238 - DNA, 25 bp, Homo sapien
gtagggcaggctctcgcctggctgc

SEQ ID NO: 339239 - DNA, 25 bp, Homo sapien
tagggcaggctctcgcctggctgca

SEQ ID NO: 339240 - DNA, 25 bp, Homo sapien
aggctctcgcctggctgcagtggca

SEQ ID NO: 339241 - DNA, 25 bp, Homo sapien
ggcaggctctcgcctggctgcagtg

SEQ ID NO: 339242 - DNA, 25 bp, Homo sapien
ctgcaatggcataagcatgggtctg

SEQ ID NO: 339243 - DNA, 25 bp, Homo sapien
tgtgccgccactgcacgcttgtcgt

SEQ ID NO: 339244 - DNA, 25 bp, Homo sapien
tgtcgttcagcaaactccgcgtgtt

SEQ ID NO: 339245 - DNA, 25 bp, Homo sapien
tgctcgtagcgctgccgctgtgccg

SEQ ID NO: 339246 - DNA, 25 bp, Homo sapien
accacgctgtactgctcgtagcgct

SEQ ID NO: 339247 - DNA, 25 bp, Homo sapien
tgatcccaaaagcaaactacgctaa

SEQ ID NO: 339248 - DNA, 25 bp, Homo sapien
acattgatctatttgtgctgatgcg

SEQ ID NO: 339249 - DNA, 25 bp, Homo sapien
tgctgatgcggaaagaattctcact

SEQ ID NO: 339250 - DNA, 25 bp, Homo sapien
caagcaagctacagaaaaatgcgta

SEQ ID NO: 339251 - DNA, 25 bp, Homo sapien
gaggaaactcgggtgcattgggtgg

SEQ ID NO: 339252 - DNA, 25 bp, Homo sapien
tcaagggagccatagggatatctgg

SEQ ID NO: 339253 - DNA, 25 bp, Homo sapien
acctcactacagcagccttctgtct

SEQ ID NO: 339254 - DNA, 25 bp, Homo sapien
gaagcccaactctggtcacgttaca

SEQ ID NO: 339255 - DNA, 25 bp, Homo sapien
ccaggcctgtggaatgtagcttcta

SEQ ID NO: 339256 - DNA, 25 bp, Homo sapien
aggcctgtggaatgtagcttctagc

SEQ ID NO: 339257 - DNA, 25 bp, Homo sapien
caggcctgtggaatgtagcttctag

SEQ ID NO: 339258 - DNA, 25 bp, Homo sapien
ggcctgtggaatgtagcttctagcc

SEQ ID NO: 339259 - DNA, 25 bp, Homo sapien
tgcacttgatttagaccagggagaa

SEQ ID NO: 339260 - DNA, 25 bp, Homo sapien
tggtaggagcacacccatgcatttg

SEQ ID NO: 339261 - DNA, 25 bp, Homo sapien
acacaggtagggacagtgaagcccg

SEQ ID NO: 339262 - DNA, 25 bp, Homo sapien
caagcttgttcaggtggtaggtgcc

SEQ ID NO: 339263 - DNA, 25 bp, Homo sapien
gagcaaccctcttaaggtcacacag

SEQ ID NO: 339264 - DNA, 25 bp, Homo sapien
tgggctcaacaaagtgaatcctgtt

SEQ ID NO: 339265 - DNA, 25 bp, Homo sapien
tgacatgtcgaagcagatccagcac

SEQ ID NO: 339266 - DNA, 25 bp, Homo sapien
cttaatgtgctctgcgactccccaa

SEQ ID NO: 339267 - DNA, 25 bp, Homo sapien
ccatgctggcctggaatagcggcca

SEQ ID NO: 339268 - DNA, 25 bp, Homo sapien
cggccactgatccaggataacatct

SEQ ID NO: 339269 - DNA, 25 bp, Homo sapien
tggcctggaatagcggccactgatc

SEQ ID NO: 339270 - DNA, 25 bp, Homo sapien
tggaggaccccttgtctgccccttg

SEQ ID NO: 339271 - DNA, 25 bp, Homo sapien
gtgcacctccagcttgtagtatttg

SEQ ID NO: 339272 - DNA, 25 bp, Homo sapien
gggtgaagccctaccaaaggctcag

SEQ ID NO: 339273 - DNA, 25 bp, Homo sapien
aaaatatgctggctttgtcggttca

SEQ ID NO: 339274 - DNA, 25 bp, Homo sapien
tttagctctcggtcccatgtcatgt

SEQ ID NO: 339275 - DNA, 25 bp, Homo sapien
acgttgtggcgagacgtcagcaggg

SEQ ID NO: 339276 - DNA, 25 bp, Homo sapien
gaacacatcaaactcgtcattctgg

SEQ ID NO: 339277 - DNA, 25 bp, Homo sapien
ttgcccttgtgcacccggctcaggt

SEQ ID NO: 339278 - DNA, 25 bp, Homo sapien
ttctggaagacgttgtggcgagacg

SEQ ID NO: 339279 - DNA, 25 bp, Homo sapien
tgtctaggttgcggtccagctggct

SEQ ID NO: 339280 - DNA, 25 bp, Homo sapien
ctgtctaggttgcggtccagctggc

SEQ ID NO: 339281 - DNA, 25 bp, Homo sapien
gctcctccaggatattgttgatcac

SEQ ID NO: 339282 - DNA, 25 bp, Homo sapien
agccgctcctccaggatattgttga

SEQ ID NO: 339283 - DNA, 25 bp, Homo sapien
tgctctgggtcgtagtggtagtact

SEQ ID NO: 339284 - DNA, 25 bp, Homo sapien
tcgtagtggtagtactccaggcagg

SEQ ID NO: 339285 - DNA, 25 bp, Homo sapien
ggtcgtagtggtagtactccaggca

SEQ ID NO: 339286 - DNA, 25 bp, Homo sapien
tctgggtcgtagtggtagtactcca

SEQ ID NO: 339287 - DNA, 25 bp, Homo sapien
ggtccttcacttgggagatgagaga

SEQ ID NO: 339288 - DNA, 25 bp, Homo sapien
gcagggcccacagccgcggctgctc

SEQ ID NO: 339289 - DNA, 25 bp, Homo sapien
atgagagagtccagttccaccccac

SEQ ID NO: 339290 - DNA, 25 bp, Homo sapien
tgagagagtccagttccaccccaca

SEQ ID NO: 339291 - DNA, 25 bp, Homo sapien
caccgatgggtctttagcatctgtg

SEQ ID NO: 339292 - DNA, 25 bp, Homo sapien
gctgtcaccgtgaccccgttaggct

SEQ ID NO: 339293 - DNA, 25 bp, Homo sapien
tctccggatgtgatgatgcttgact

SEQ ID NO: 339294 - DNA, 25 bp, Homo sapien
attaggctcctcaatcaccgatggg

SEQ ID NO: 339295 - DNA, 25 bp, Homo sapien
ggaggatgtaggcagtccgcgtctc

SEQ ID NO: 339296 - DNA, 25 bp, Homo sapien
gatgtaggcagtccgcgtctcgtcc

SEQ ID NO: 339297 - DNA, 25 bp, Homo sapien
ggatgtaggcagtccgcgtctcgtc

SEQ ID NO: 339298 - DNA, 25 bp, Homo sapien
aggatgtaggcagtccgcgtctcgt

SEQ ID NO: 339299 - DNA, 25 bp, Homo sapien
gggctttctgggctatatctaagtg

SEQ ID NO: 339300 - DNA, 25 bp, Homo sapien
catggttcctgccaggggctttctg

SEQ ID NO: 339301 - DNA, 25 bp, Homo sapien
tctgggctatatctaagtggtatag

SEQ ID NO: 339302 - DNA, 25 bp, Homo sapien
ctttctgggctatatctaagtggta

SEQ ID NO: 339303 - DNA, 25 bp, Homo sapien
gctgggccctgtcgtagtgggctat

SEQ ID NO: 339304 - DNA, 25 bp, Homo sapien
ctagtcaagctgggccctgtcgtag

SEQ ID NO: 339305 - DNA, 25 bp, Homo sapien
ccctgtcgtagtgggctatggtaga

SEQ ID NO: 339306 - DNA, 25 bp, Homo sapien
tcaagctgggccctgtcgtagtggg

SEQ ID NO: 339307 - DNA, 25 bp, Homo sapien
ttcggccacggggaagagtgcatca

SEQ ID NO: 339308 - DNA, 25 bp, Homo sapien
ctgcagcaagctgatgtcttcggcc

SEQ ID NO: 339309 - DNA, 25 bp, Homo sapien
agcaagctgatgtcttcggccacgg

SEQ ID NO: 339310 - DNA, 25 bp, Homo sapien
gagtgcatcatagtcccggaggaac

SEQ ID NO: 339311 - DNA, 25 bp, Homo sapien
gatgaagccctgaatgttgtcacag

SEQ ID NO: 339312 - DNA, 25 bp, Homo sapien
tgaaggaactcttcgatgaagccct

SEQ ID NO: 339313 - DNA, 25 bp, Homo sapien
gaactcttcgatgaagccctgaatg

SEQ ID NO: 339314 - DNA, 25 bp, Homo sapien
gaagatctgaaggaactcttcgatg

SEQ ID NO: 339315 - DNA, 25 bp, Homo sapien
aggcagatctggttcaggatgatgt

SEQ ID NO: 339316 - DNA, 25 bp, Homo sapien
cctctgccacaggtcaccaagaagc

SEQ ID NO: 339317 - DNA, 25 bp, Homo sapien
atgatgtggaaaatctccattagct

SEQ ID NO: 339318 - DNA, 25 bp, Homo sapien
tggaaaatctccattagcttcttcc

SEQ ID NO: 339319 - DNA, 25 bp, Homo sapien
ccatttcgggaattgctgcttcgta

SEQ ID NO: 339320 - DNA, 25 bp, Homo sapien
ttgctgcttcgtagaaggaagctag

SEQ ID NO: 339321 - DNA, 25 bp, Homo sapien
gcagactccatttcgggaattgctg

SEQ ID NO: 339322 - DNA, 25 bp, Homo sapien
tcttcttaattgcagactccatttc

SEQ ID NO: 339323 - DNA, 25 bp, Homo sapien
gtaacaaaagtcgtgcttctggaag

SEQ ID NO: 339324 - DNA, 25 bp, Homo sapien
tgtaacaaaagtcgtgcttctggaa

SEQ ID NO: 339325 - DNA, 25 bp, Homo sapien
ctgtaacaaaagtcgtgcttctgga

SEQ ID NO: 339326 - DNA, 25 bp, Homo sapien
taacaaaagtcgtgcttctggaagg

SEQ ID NO: 339327 - DNA, 25 bp, Homo sapien
aactctaaattccatgagcgcaggg

SEQ ID NO: 339328 - DNA, 25 bp, Homo sapien
ggagcacgatctgggtgagtcacct

SEQ ID NO: 339329 - DNA, 25 bp, Homo sapien
tgttctatctccagggctagggcag

SEQ ID NO: 339330 - DNA, 25 bp, Homo sapien
tccgaggcaggacaagaatattaag

SEQ ID NO: 339331 - DNA, 25 bp, Homo sapien
tcactgggggtcaatcggcccctct

SEQ ID NO: 339332 - DNA, 25 bp, Homo sapien
aggagaggcatgtcactgggggtca

SEQ ID NO: 339333 - DNA, 25 bp, Homo sapien
tctcctcaagcttctggggtgtggt

SEQ ID NO: 339334 - DNA, 25 bp, Homo sapien
tgtggtattggccccgtccccttgc

SEQ ID NO: 339335 - DNA, 25 bp, Homo sapien
caggtcactgtagtaacttggctgc

SEQ ID NO: 339336 - DNA, 25 bp, Homo sapien
aggatggtaggcagggtttcatcca

SEQ ID NO: 339337 - DNA, 25 bp, Homo sapien
catccaggtcactgtagtaacttgg

SEQ ID NO: 339338 - DNA, 25 bp, Homo sapien
tcactgtagtaacttggctgctgtg

SEQ ID NO: 339339 - DNA, 25 bp, Homo sapien
atgtgaagctgcagtgaaatatgat

SEQ ID NO: 339340 - DNA, 25 bp, Homo sapien
gggggatagctttactccaggaatg

SEQ ID NO: 339341 - DNA, 25 bp, Homo sapien
gggatagctttactccaggaatgtg

SEQ ID NO: 339342 - DNA, 25 bp, Homo sapien
ggatagctttactccaggaatgtga

SEQ ID NO: 339343 - DNA, 25 bp, Homo sapien
tgagtccctgggcactgtcaaagcg

SEQ ID NO: 339344 - DNA, 25 bp, Homo sapien
cactacctagtcattttgaggtgac

SEQ ID NO: 339345 - DNA, 25 bp, Homo sapien
gaggtgacactcatatatctgttaa

SEQ ID NO: 339346 - DNA, 25 bp, Homo sapien
tgcaacctttagtttggcatgtggg

SEQ ID NO: 339347 - DNA, 25 bp, Homo sapien
gaggtccaggatctttggaatgtca

SEQ ID NO: 339348 - DNA, 25 bp, Homo sapien
gaggatttctccaaacgcagaaggg

SEQ ID NO: 339349 - DNA, 25 bp, Homo sapien
gttgccttttccaaagagcacgcag

SEQ ID NO: 339350 - DNA, 25 bp, Homo sapien
tgtcaaagaggaagttattgtagag

SEQ ID NO: 339351 - DNA, 25 bp, Homo sapien
tgtttttgtgtctctagactaaaca

SEQ ID NO: 339352 - DNA, 25 bp, Homo sapien
ttttgtgtctctagactaaacatcc

SEQ ID NO: 339353 - DNA, 25 bp, Homo sapien
tatgtttttgtgtctctagactaaa

SEQ ID NO: 339354 - DNA, 25 bp, Homo sapien
tttttgtgtctctagactaaacatc

SEQ ID NO: 339355 - DNA, 25 bp, Homo sapien
tctgtagagtctcgtcaaagatcac

SEQ ID NO: 339356 - DNA, 25 bp, Homo sapien
acacttcgatggaggcgcttctgca

SEQ ID NO: 339357 - DNA, 25 bp, Homo sapien
acatgcggaggaaggtgagaaaaac

SEQ ID NO: 339358 - DNA, 25 bp, Homo sapien
ggtaggagtccaggcacttctgtag

SEQ ID NO: 339359 - DNA, 25 bp, Homo sapien
tactcctccactagggcgggaatgt

SEQ ID NO: 339360 - DNA, 25 bp, Homo sapien
tcattggctacgaaggtggcgcgtt

SEQ ID NO: 339361 - DNA, 25 bp, Homo sapien
cagaatttatcgtgaggcaaggcca

SEQ ID NO: 339362 - DNA, 25 bp, Homo sapien
aaaataccggtctgccttctgctcg

SEQ ID NO: 339363 - DNA, 25 bp, Homo sapien
tgagctgcctgggactacactccca

SEQ ID NO: 339364 - DNA, 25 bp, Homo sapien
agaaggtgagctgcctgggactaca

SEQ ID NO: 339365 - DNA, 25 bp, Homo sapien
aaggtgagctgcctgggactacact

SEQ ID NO: 339366 - DNA, 25 bp, Homo sapien
ggtgagctgcctgggactacactcc

SEQ ID NO: 339367 - DNA, 25 bp, Homo sapien
gcaatgtgtcagctcttatcaacca

SEQ ID NO: 339368 - DNA, 25 bp, Homo sapien
taagaggtcagcctcctcaagaacc

SEQ ID NO: 339369 - DNA, 25 bp, Homo sapien
taagtctcagcgtagaatcacaagt

SEQ ID NO: 339370 - DNA, 25 bp, Homo sapien
ctacataacgggtgctttctctggg

SEQ ID NO: 339371 - DNA, 25 bp, Homo sapien
tgtgggtaccacaaggattcttcaa

SEQ ID NO: 339372 - DNA, 25 bp, Homo sapien
actgtagagcctgtgggtaccacaa

SEQ ID NO: 339373 - DNA, 25 bp, Homo sapien
aaggattcttcaaggccacctctca

SEQ ID NO: 339374 - DNA, 25 bp, Homo sapien
aggccacctctcatgtgggtctgca

SEQ ID NO: 339375 - DNA, 25 bp, Homo sapien
tatctgttggcactttacctcttcc

SEQ ID NO: 339376 - DNA, 25 bp, Homo sapien
tctgctggctgaaacaagttcaaaa

SEQ ID NO: 339377 - DNA, 25 bp, Homo sapien
ggccaggctactcattctcccgaca

SEQ ID NO: 339378 - DNA, 25 bp, Homo sapien
caactgtcaggagccgaaatacatc

SEQ ID NO: 339379 - DNA, 25 bp, Homo sapien
acacacacaccaggctactcattct

SEQ ID NO: 339380 - DNA, 25 bp, Homo sapien
ctactcattcttctgacacacacac

SEQ ID NO: 339381 - DNA, 25 bp, Homo sapien
acacacaccaggctactcattcttc

SEQ ID NO: 339382 - DNA, 25 bp, Homo sapien
acacaccaggctactcattcttctg

SEQ ID NO: 339383 - DNA, 25 bp, Homo sapien
catctaaatcaccaagtgagcacaa

SEQ ID NO: 339384 - DNA, 25 bp, Homo sapien
gagcacaaaacaaaggaagtgacag

SEQ ID NO: 339385 - DNA, 25 bp, Homo sapien
taaatcaccaagtgagcacaaaaca

SEQ ID NO: 339386 - DNA, 25 bp, Homo sapien
gcacaaaacaaaggaagtgacagct

SEQ ID NO: 339387 - DNA, 25 bp, Homo sapien
tggaggataagggacggcttcccag

SEQ ID NO: 339388 - DNA, 25 bp, Homo sapien
ggctccaagcattcgaggataagga

SEQ ID NO: 339389 - DNA, 25 bp, Homo sapien
agagcaagcagacttcctccaaggc

SEQ ID NO: 339390 - DNA, 25 bp, Homo sapien
gataagggacggcttcccagagcaa

SEQ ID NO: 339391 - DNA, 25 bp, Homo sapien
tgcagacctattaaatgacctatgg

SEQ ID NO: 339392 - DNA, 25 bp, Homo sapien
tgagccaaagcttacactgcagacc

SEQ ID NO: 339393 - DNA, 25 bp, Homo sapien
aacatgggtcataacaaaagggcac

SEQ ID NO: 339394 - DNA, 25 bp, Homo sapien
tcccagctggattaggagctcatct

SEQ ID NO: 339395 - DNA, 25 bp, Homo sapien
tgagcagactttctgtacagatctg

SEQ ID NO: 339396 - DNA, 25 bp, Homo sapien
ggcattgagcagactttctgtacag

SEQ ID NO: 339397 - DNA, 25 bp, Homo sapien
tgaatggaggctgactggacgtggt

SEQ ID NO: 339398 - DNA, 25 bp, Homo sapien
agactttctgtacagatctgctggc

SEQ ID NO: 339399 - DNA, 25 bp, Homo sapien
gctattcaaatagatcctcaaccaa

SEQ ID NO: 339400 - DNA, 25 bp, Homo sapien
tatcttagtacaatctttcaggagc

SEQ ID NO: 339401 - DNA, 25 bp, Homo sapien
tcaaccaacattagctctaccaatt

SEQ ID NO: 339402 - DNA, 25 bp, Homo sapien
gggacaaatatagggtggacacata

SEQ ID NO: 339403 - DNA, 25 bp, Homo sapien
ggaaaatcatactcgaccacccaag

SEQ ID NO: 339404 - DNA, 25 bp, Homo sapien
tgtgcgcctggcactggaaatcagg

SEQ ID NO: 339405 - DNA, 25 bp, Homo sapien
tataactgctctatatctgtgctgg

SEQ ID NO: 339406 - DNA, 25 bp, Homo sapien
tttctgagagcctcctgtgcgcctg

SEQ ID NO: 339407 - DNA, 25 bp, Homo sapien
catgttcatagcctccttatttttc

SEQ ID NO: 339408 - DNA, 25 bp, Homo sapien
atgttcatagcctccttatttttca

SEQ ID NO: 339409 - DNA, 25 bp, Homo sapien
cttgtgggtgatctggagttggtcc

SEQ ID NO: 339410 - DNA, 25 bp, Homo sapien
cctgtcttcgggtccttgtgggtga

SEQ ID NO: 339411 - DNA, 25 bp, Homo sapien
tcttcgggtccttgtgggtgatctg

SEQ ID NO: 339412 - DNA, 25 bp, Homo sapien
tcagctttcctgtcttcgggtcctt

SEQ ID NO: 339413 - DNA, 25 bp, Homo sapien
gaagcttcaacctctcgccttagga

SEQ ID NO: 339414 - DNA, 25 bp, Homo sapien
tcaattgtagaagaaatacttcccc

SEQ ID NO: 339415 - DNA, 25 bp, Homo sapien
cctactaacccagccaaagtgactt

SEQ ID NO: 339416 - DNA, 25 bp, Homo sapien
tcctgttgtggttcaggacctggtt

SEQ ID NO: 339417 - DNA, 25 bp, Homo sapien
gttcttactacatcactcgggctgg

SEQ ID NO: 339418 - DNA, 25 bp, Homo sapien
gaatgactacatatgaggacactcc

SEQ ID NO: 339419 - DNA, 25 bp, Homo sapien
cacaggattggtacagaggtggcct

SEQ ID NO: 339420 - DNA, 25 bp, Homo sapien
gctctgtgagctcagtagcctgtga

SEQ ID NO: 339421 - DNA, 25 bp, Homo sapien
ggcagatccaaggtctcctgtcttg

SEQ ID NO: 339422 - DNA, 25 bp, Homo sapien
tccaaggtctcctgtcttgctgtcc

SEQ ID NO: 339423 - DNA, 25 bp, Homo sapien
atccaaggtctcctgtcttgctgtc

SEQ ID NO: 339424 - DNA, 25 bp, Homo sapien
agtggcagatccaaggtctcctgtc

SEQ ID NO: 339425 - DNA, 25 bp, Homo sapien
gattaaactgtcacctcttgagcct

SEQ ID NO: 339426 - DNA, 25 bp, Homo sapien
aaaggctagaacagactcaatgaca

SEQ ID NO: 339427 - DNA, 25 bp, Homo sapien
caatgacaacatgaagagagacaga

SEQ ID NO: 339428 - DNA, 25 bp, Homo sapien
cagaagggacatacgtgttaaatga

SEQ ID NO: 339429 - DNA, 25 bp, Homo sapien
taagagaggaccagtctgcctagtc

SEQ ID NO: 339430 - DNA, 25 bp, Homo sapien
tgtgaagatccccaccctagaagga

SEQ ID NO: 339431 - DNA, 25 bp, Homo sapien
tcttgataatagagactggccaggg

SEQ ID NO: 339432 - DNA, 25 bp, Homo sapien
gaaccttggttctggcctgttataa

SEQ ID NO: 339433 - DNA, 25 bp, Homo sapien
ctgttccagctctaggatcccagca

SEQ ID NO: 339434 - DNA, 25 bp, Homo sapien
taggatcccagcagatcagacacac

SEQ ID NO: 339435 - DNA, 25 bp, Homo sapien
tcccagcagatcagacacacatggt

SEQ ID NO: 339436 - DNA, 25 bp, Homo sapien
tgttccagctctaggatcccagcag

SEQ ID NO: 339437 - DNA, 25 bp, Homo sapien
taccatgttcagatgtccaaagagg

SEQ ID NO: 339438 - DNA, 25 bp, Homo sapien
gggccctgatttgctcaaggtaaat

SEQ ID NO: 339439 - DNA, 25 bp, Homo sapien
ctctagccatgctggaaagtgagct

SEQ ID NO: 339440 - DNA, 25 bp, Homo sapien
agaagtctaaatgactgacaggccc

SEQ ID NO: 339441 - DNA, 25 bp, Homo sapien
ccgccgaccacggtgacagctccct

SEQ ID NO: 339442 - DNA, 25 bp, Homo sapien
gaccacggtgacagctccctgagcg

SEQ ID NO: 339443 - DNA, 25 bp, Homo sapien
gccgccgccgaccacggtgacagct

SEQ ID NO: 339444 - DNA, 25 bp, Homo sapien
gccgaccacggtgacagctccctga

SEQ ID NO: 339445 - DNA, 25 bp, Homo sapien
gacccgcaggcccaatactttttgc

SEQ ID NO: 339446 - DNA, 25 bp, Homo sapien
acttccccgggctgaaagcttgctc

SEQ ID NO: 339447 - DNA, 25 bp, Homo sapien
gacaatcctttagctccgtaacaga

SEQ ID NO: 339448 - DNA, 25 bp, Homo sapien
tgtgtcctcctcctaatagggccct

SEQ ID NO: 339449 - DNA, 25 bp, Homo sapien
cctcttggccattgagtgattctgc

SEQ ID NO: 339450 - DNA, 25 bp, Homo sapien
ctacaagtctacaccatgggttggg

SEQ ID NO: 339451 - DNA, 25 bp, Homo sapien
cattgagtgattctgcaaatgagag

SEQ ID NO: 339452 - DNA, 25 bp, Homo sapien
agcatcagggccattgagtggtgcc

SEQ ID NO: 339453 - DNA, 25 bp, Homo sapien
cccggctcggcgtcgggagcgcgct

SEQ ID NO: 339454 - DNA, 25 bp, Homo sapien
gcggagggggagactgtgccgtgga

SEQ ID NO: 339455 - DNA, 25 bp, Homo sapien
gtcccagcggctcaggcgctgccca

SEQ ID NO: 339456 - DNA, 25 bp, Homo sapien
gtcctccgtctcctcggcgggtgag

SEQ ID NO: 339457 - DNA, 25 bp, Homo sapien
agggggagactgtgccgtggagggc

SEQ ID NO: 339458 - DNA, 25 bp, Homo sapien
cggcggctgtcgccgccagggggag

SEQ ID NO: 339459 - DNA, 25 bp, Homo sapien
acataactggcaagaattggtatga

SEQ ID NO: 339460 - DNA, 25 bp, Homo sapien
tataacttagttgcagaagagaaat

SEQ ID NO: 339461 - DNA, 25 bp, Homo sapien
tatttaattgtttagactgattcca

SEQ ID NO: 339462 - DNA, 25 bp, Homo sapien
gaattggtatgaagacaagatggtt

SEQ ID NO: 339463 - DNA, 25 bp, Homo sapien
cattcttgtgcagggaccacgctaa

SEQ ID NO: 339464 - DNA, 25 bp, Homo sapien
gaaagatggaaagcctcaccaattt

SEQ ID NO: 339465 - DNA, 25 bp, Homo sapien
aagaaagatggaaagcctcaccaat

SEQ ID NO: 339466 - DNA, 25 bp, Homo sapien
catgtcattcttgtgcagggaccac

SEQ ID NO: 339467 - DNA, 25 bp, Homo sapien
tttattcattatgaagagaaaccag

SEQ ID NO: 339468 - DNA, 25 bp, Homo sapien
aaaggcaaaaagatttattcattat

SEQ ID NO: 339469 - DNA, 25 bp, Homo sapien
ttattcattatgaagagaaaccaga

SEQ ID NO: 339470 - DNA, 25 bp, Homo sapien
ggcaaaaagatttattcattatgaa

SEQ ID NO: 339471 - DNA, 25 bp, Homo sapien
tttaaactgtccaattttatgtgca

SEQ ID NO: 339472 - DNA, 25 bp, Homo sapien
tggtgaagtggtttaaactgtccaa

SEQ ID NO: 339473 - DNA, 25 bp, Homo sapien
atggatttctcacgtatctggtgaa

SEQ ID NO: 339474 - DNA, 25 bp, Homo sapien
tatctggtgaagtggtttaaactgt

SEQ ID NO: 339475 - DNA, 25 bp, Homo sapien
cacctgaccctggaatggcagttgt

SEQ ID NO: 339476 - DNA, 25 bp, Homo sapien
tttgagcagggagtaagactaacct

SEQ ID NO: 339477 - DNA, 25 bp, Homo sapien
ccacagtagctgaatgtagccatgc

SEQ ID NO: 339478 - DNA, 25 bp, Homo sapien
aagtcacactaggagcgttgagccc

SEQ ID NO: 339479 - DNA, 25 bp, Homo sapien
ctgttggacgtacatctacttggga

SEQ ID NO: 339480 - DNA, 25 bp, Homo sapien
tgttaaagccagcatatcatagctc

SEQ ID NO: 339481 - DNA, 25 bp, Homo sapien
gcatatcatagctcgataacttcat

SEQ ID NO: 339482 - DNA, 25 bp, Homo sapien
gttggacgtacatctacttgggagg

SEQ ID NO: 339483 - DNA, 25 bp, Homo sapien
gattatgctagcagatatggcagaa

SEQ ID NO: 339484 - DNA, 25 bp, Homo sapien
aaagtattaagaagctgttagtgcc

SEQ ID NO: 339485 - DNA, 25 bp, Homo sapien
tacctgtgcactacactaccagtgc

SEQ ID NO: 339486 - DNA, 25 bp, Homo sapien
caggatgaagagactcggcacagcc

SEQ ID NO: 339487 - DNA, 25 bp, Homo sapien
ttcacatcaagttcaaggagtctct

SEQ ID NO: 339488 - DNA, 25 bp, Homo sapien
gtaagtgattaccagctgttctccc

SEQ ID NO: 339489 - DNA, 25 bp, Homo sapien
gggccgtgccgaggatgccatcatt

SEQ ID NO: 339490 - DNA, 25 bp, Homo sapien
tccttgaacttcatggagagagcac

SEQ ID NO: 339491 - DNA, 25 bp, Homo sapien
tttggattgatgctcttcagggtgt

SEQ ID NO: 339492 - DNA, 25 bp, Homo sapien
agcactgaatgtgtttgatgcattg

SEQ ID NO: 339493 - DNA, 25 bp, Homo sapien
aaaagcattgtaaggtgagattgcg

SEQ ID NO: 339494 - DNA, 25 bp, Homo sapien
tgaggaattggttgtagcactgaat

SEQ ID NO: 339495 - DNA, 25 bp, Homo sapien
gtagcaaaggctaatccatttcccc

SEQ ID NO: 339496 - DNA, 25 bp, Homo sapien
tcccaggccccatgactgagatttc

SEQ ID NO: 339497 - DNA, 25 bp, Homo sapien
cagcagctgctaagagcattagctg

SEQ ID NO: 339498 - DNA, 25 bp, Homo sapien
aaagctcactctaatcctatcccag

SEQ ID NO: 339499 - DNA, 25 bp, Homo sapien
gcggttgctgtgcactcagatgcca

SEQ ID NO: 339500 - DNA, 25 bp, Homo sapien
cagtttcgttaatcagaagctgcag

SEQ ID NO: 339501 - DNA, 25 bp, Homo sapien
tgccagatccgggaaagtaagtcct

SEQ ID NO: 339502 - DNA, 25 bp, Homo sapien
ccatgtgggctttaagttcaacgta

SEQ ID NO: 339503 - DNA, 25 bp, Homo sapien
tccagcctggatgacagggcaagac

SEQ ID NO: 339504 - DNA, 25 bp, Homo sapien
ggttgcagtgatccaagatccattg

SEQ ID NO: 339505 - DNA, 25 bp, Homo sapien
tgcagtgatccaagatccattgcac

SEQ ID NO: 339506 - DNA, 25 bp, Homo sapien
cagtgatccaagatccattgcactc

SEQ ID NO: 339507 - DNA, 25 bp, Homo sapien
tgggccaggctgtgtagcacttccc

SEQ ID NO: 339508 - DNA, 25 bp, Homo sapien
gacccagattgtcttgggctccttt

SEQ ID NO: 339509 - DNA, 25 bp, Homo sapien
gagtgggtagccgtcatgttgtccc

SEQ ID NO: 339510 - DNA, 25 bp, Homo sapien
ccatttttaacttgacccagattgt

SEQ ID NO: 339511 - DNA, 25 bp, Homo sapien
gggaatgcttaagctctggccctgc

SEQ ID NO: 339512 - DNA, 25 bp, Homo sapien
gcagttccctgaccaagggcaaggt

SEQ ID NO: 339513 - DNA, 25 bp, Homo sapien
gtgctttgtaatcttggcatccatg

SEQ ID NO: 339514 - DNA, 25 bp, Homo sapien
tgtggttaaggcgtggcccagaagg

SEQ ID NO: 339515 - DNA, 25 bp, Homo sapien
ttctatgaattagaatgttactgtg

SEQ ID NO: 339516 - DNA, 25 bp, Homo sapien
ctatgaattagaatgttactgtggt

SEQ ID NO: 339517 - DNA, 25 bp, Homo sapien
tattctatgaattagaatgttactg

SEQ ID NO: 339518 - DNA, 25 bp, Homo sapien
gaattagaatgttactgtggtagat

SEQ ID NO: 339519 - DNA, 25 bp, Homo sapien
gaaaacataacccatgaggctcaga

SEQ ID NO: 339520 - DNA, 25 bp, Homo sapien
gctcagatgctgttgaagaaataaa

SEQ ID NO: 339521 - DNA, 25 bp, Homo sapien
gcttgcctattgtaacagcattggt

SEQ ID NO: 339522 - DNA, 25 bp, Homo sapien
cagcattggttctgctgtagcctcg

SEQ ID NO: 339523 - DNA, 25 bp, Homo sapien
gcaacagcatccctcctcttaccca

SEQ ID NO: 339524 - DNA, 25 bp, Homo sapien
agtatagtctccatgggaggcagca

SEQ ID NO: 339525 - DNA, 25 bp, Homo sapien
cagcaggaatcctgcttgtctgcca

SEQ ID NO: 339526 - DNA, 25 bp, Homo sapien
tgccatgcagcctggcagctccaag

SEQ ID NO: 339527 - DNA, 25 bp, Homo sapien
ctgaacttcccaaatacaaacctct

SEQ ID NO: 339528 - DNA, 25 bp, Homo sapien
tacaaacctcttgatggatgcccat

SEQ ID NO: 339529 - DNA, 25 bp, Homo sapien
gccagtgatccctgaacttcccaaa

SEQ ID NO: 339530 - DNA, 25 bp, Homo sapien
tccatgtgggccagtgtctggatgt

SEQ ID NO: 339531 - DNA, 25 bp, Homo sapien
gatccattaattcttggtgtgccaa

SEQ ID NO: 339532 - DNA, 25 bp, Homo sapien
ttcattgatccattaattcttggtg

SEQ ID NO: 339533 - DNA, 25 bp, Homo sapien
tcttggtgtgccaatttgtgtttca

SEQ ID NO: 339534 - DNA, 25 bp, Homo sapien
aggcagtcgccggcgcctgagggag

SEQ ID NO: 339535 - DNA, 25 bp, Homo sapien
gagggagcccccactgtgccttgcg

SEQ ID NO: 339536 - DNA, 25 bp, Homo sapien
gggcccaggcagtcgccggcgcctg

SEQ ID NO: 339537 - DNA, 25 bp, Homo sapien
atagtcagcttcctcctggtagtaa

SEQ ID NO: 339538 - DNA, 25 bp, Homo sapien
gctactctggttggtgtcctatgtc

SEQ ID NO: 339539 - DNA, 25 bp, Homo sapien
ctctggttggtgtcctatgtctaac

SEQ ID NO: 339540 - DNA, 25 bp, Homo sapien
tactctggttggtgtcctatgtcta

SEQ ID NO: 339541 - DNA, 25 bp, Homo sapien
ctggctactctggttggtgtcctat

SEQ ID NO: 339542 - DNA, 25 bp, Homo sapien
ccatctgcagggatatggaggagtt

SEQ ID NO: 339543 - DNA, 25 bp, Homo sapien
catctgcagggatatggaggagtta

SEQ ID NO: 339544 - DNA, 25 bp, Homo sapien
atctgcagggatatggaggagttac

SEQ ID NO: 339545 - DNA, 25 bp, Homo sapien
tgtttatacgcatctggacactgat

SEQ ID NO: 339546 - DNA, 25 bp, Homo sapien
ggacactgatgatggagtggtccat

SEQ ID NO: 339547 - DNA, 25 bp, Homo sapien
ctcatgccgtatgcggtcatccctg

SEQ ID NO: 339548 - DNA, 25 bp, Homo sapien
agagatgtgccgctgcgtcccagga

SEQ ID NO: 339549 - DNA, 25 bp, Homo sapien
tgcagcccgaggatgcactggccag

SEQ ID NO: 339550 - DNA, 25 bp, Homo sapien
gcagcccgaggatgcactggccagc

SEQ ID NO: 339551 - DNA, 25 bp, Homo sapien
ctgcagcccgaggatgcactggcca

SEQ ID NO: 339552 - DNA, 25 bp, Homo sapien
tccaagtacttgatgccagtgtcca

SEQ ID NO: 339553 - DNA, 25 bp, Homo sapien
tctccaagtacttgatgccagtgtc

SEQ ID NO: 339554 - DNA, 25 bp, Homo sapien
aagtacttgatgccagtgtccaccc

SEQ ID NO: 339555 - DNA, 25 bp, Homo sapien
caagtacttgatgccagtgtccacc

SEQ ID NO: 339556 - DNA, 25 bp, Homo sapien
agctgtgtcatacttctactctcaa

SEQ ID NO: 339557 - DNA, 25 bp, Homo sapien
cctgcagctgtgtcatacttctact

SEQ ID NO: 339558 - DNA, 25 bp, Homo sapien
tcatacttctactctcaaacaggtc

SEQ ID NO: 339559 - DNA, 25 bp, Homo sapien
tgtgtcatacttctactctcaaaca

SEQ ID NO: 339560 - DNA, 25 bp, Homo sapien
acaggtccatggggttcatccgtag

SEQ ID NO: 339561 - DNA, 25 bp, Homo sapien
ctcgaacaggtccatggggttcatc

SEQ ID NO: 339562 - DNA, 25 bp, Homo sapien
cgaacaggtccatggggttcatccg

SEQ ID NO: 339563 - DNA, 25 bp, Homo sapien
gaacaggtccatggggttcatccgt

SEQ ID NO: 339564 - DNA, 25 bp, Homo sapien
agtcgggaccgatgaagagtcctgt

SEQ ID NO: 339565 - DNA, 25 bp, Homo sapien
cacagcccatatgaggggcccttgt

SEQ ID NO: 339566 - DNA, 25 bp, Homo sapien
ctggaagtcgggaccgatgaagagt

SEQ ID NO: 339567 - DNA, 25 bp, Homo sapien
gaagtcgggaccgatgaagagtcct

SEQ ID NO: 339568 - DNA, 25 bp, Homo sapien
tgccatgctcacgtgttctgtagct

SEQ ID NO: 339569 - DNA, 25 bp, Homo sapien
gtagcttccactactggcctattta

SEQ ID NO: 339570 - DNA, 25 bp, Homo sapien
tatggcctccattgcagagggccag

SEQ ID NO: 339571 - DNA, 25 bp, Homo sapien
gtcctgctctccaaagctgttgaac

SEQ ID NO: 339572 - DNA, 25 bp, Homo sapien
tagtggttatgacaatttggctagc

SEQ ID NO: 339573 - DNA, 25 bp, Homo sapien
gcacttagcaaatgataagcattca

SEQ ID NO: 339574 - DNA, 25 bp, Homo sapien
tctttgtactttcctagcacttagc

SEQ ID NO: 339575 - DNA, 25 bp, Homo sapien
gacatgtggcctaattgctgtagtg

SEQ ID NO: 339576 - DNA, 25 bp, Homo sapien
catgttctcgccaacttgaatagtt

SEQ ID NO: 339577 - DNA, 25 bp, Homo sapien
atgttctcgccaacttgaatagttt

SEQ ID NO: 339578 - DNA, 25 bp, Homo sapien
aagccccggagcaggctgtcgttgt

SEQ ID NO: 339579 - DNA, 25 bp, Homo sapien
cctgaccgaaggtcgcgtcgggtca

SEQ ID NO: 339580 - DNA, 25 bp, Homo sapien
caggctgtcgttgtataggtggccc

SEQ ID NO: 339581 - DNA, 25 bp, Homo sapien
agtgtgcagcccgtggctgagaggc

SEQ ID NO: 339582 - DNA, 25 bp, Homo sapien
attctccccagccattgaggttttc

SEQ ID NO: 339583 - DNA, 25 bp, Homo sapien
tctccccagccattgaggttttctg

SEQ ID NO: 339584 - DNA, 25 bp, Homo sapien
agattctccccagccattgaggttt

SEQ ID NO: 339585 - DNA, 25 bp, Homo sapien
cagattctccccagccattgaggtt

SEQ ID NO: 339586 - DNA, 25 bp, Homo sapien
gagctgccaccccggcctatatttt

SEQ ID NO: 339587 - DNA, 25 bp, Homo sapien
tcatctaggttaatctctgttgctg

SEQ ID NO: 339588 - DNA, 25 bp, Homo sapien
acatggaggtatagatatctcttcc

SEQ ID NO: 339589 - DNA, 25 bp, Homo sapien
gctgcccttcctagcttttaataac

SEQ ID NO: 339590 - DNA, 25 bp, Homo sapien
gcggatgtgtgttcccacctttttc

SEQ ID NO: 339591 - DNA, 25 bp, Homo sapien
ttggtgcggatgtgtgttcccacct

SEQ ID NO: 339592 - DNA, 25 bp, Homo sapien
tgggatgctgcccatacagggtgaa

SEQ ID NO: 339593 - DNA, 25 bp, Homo sapien
tgcccatacagggtgaagccacaca

SEQ ID NO: 339594 - DNA, 25 bp, Homo sapien
ctgcgatggcagctgggcctgggct

SEQ ID NO: 339595 - DNA, 25 bp, Homo sapien
gcgatggcagctgggcctgggcttg

SEQ ID NO: 339596 - DNA, 25 bp, Homo sapien
gatggcagctgggcctgggcttgct

SEQ ID NO: 339597 - DNA, 25 bp, Homo sapien
ggcagctgggcctgggcttgctcac

SEQ ID NO: 339598 - DNA, 25 bp, Homo sapien
tggctgtaggataaagcagaaccat

SEQ ID NO: 339599 - DNA, 25 bp, Homo sapien
gcccatggctgtaggataaagcaga

SEQ ID NO: 339600 - DNA, 25 bp, Homo sapien
tcctgtatcctacatggctttgctg

SEQ ID NO: 339601 - DNA, 25 bp, Homo sapien
tactgaatgttccacgcctttcctg

SEQ ID NO: 339602 - DNA, 25 bp, Homo sapien
tgatcatggcagaggacattccagg

SEQ ID NO: 339603 - DNA, 25 bp, Homo sapien
tccagtatggtagcatcagaaattc

SEQ ID NO: 339604 - DNA, 25 bp, Homo sapien
tctcatccttggtagctttttcaaa

SEQ ID NO: 339605 - DNA, 25 bp, Homo sapien
aattttagcacctttctcatccttg

SEQ ID NO: 339606 - DNA, 25 bp, Homo sapien
ccatggagaggataaacagataggc

SEQ ID NO: 339607 - DNA, 25 bp, Homo sapien
accatggagaggataaacagatagg

SEQ ID NO: 339608 - DNA, 25 bp, Homo sapien
caccatggagaggataaacagatag

SEQ ID NO: 339609 - DNA, 25 bp, Homo sapien
acaccatggagaggataaacagata

SEQ ID NO: 339610 - DNA, 25 bp, Homo sapien
tcaatgtgaacttaaatcatggtct

SEQ ID NO: 339611 - DNA, 25 bp, Homo sapien
aagtcttccatgtgtaattgttgca

SEQ ID NO: 339612 - DNA, 25 bp, Homo sapien
catggtctgctattttttagccatg

SEQ ID NO: 339613 - DNA, 25 bp, Homo sapien
tagtgtcaattgtaagaagtcttcc

SEQ ID NO: 339614 - DNA, 25 bp, Homo sapien
ttaatcaggcatttttgccctgaac

SEQ ID NO: 339615 - DNA, 25 bp, Homo sapien
tccttgagtcctggcgatgagtgtc

SEQ ID NO: 339616 - DNA, 25 bp, Homo sapien
tcctggcgatgagtgtctttcccat

SEQ ID NO: 339617 - DNA, 25 bp, Homo sapien
tgagtcctggcgatgagtgtctttc

SEQ ID NO: 339618 - DNA, 25 bp, Homo sapien
tttgattccttgagtcctggcgatg

SEQ ID NO: 339619 - DNA, 25 bp, Homo sapien
ggtgctttcacatcataccaatctt

SEQ ID NO: 339620 - DNA, 25 bp, Homo sapien
agcaggtgctttcacatcataccaa

SEQ ID NO: 339621 - DNA, 25 bp, Homo sapien
caggtgctttcacatcataccaatc

SEQ ID NO: 339622 - DNA, 25 bp, Homo sapien
ctgaacatagcaggtgctttcacat

SEQ ID NO: 339623 - DNA, 25 bp, Homo sapien
cactgtgggtcacccacacttgtga

SEQ ID NO: 339624 - DNA, 25 bp, Homo sapien
gttactccatttggcactgactccc

SEQ ID NO: 339625 - DNA, 25 bp, Homo sapien
ccaactctggcattcccactgtggg

SEQ ID NO: 339626 - DNA, 25 bp, Homo sapien
cacacttgtgatgccctcgttactc

SEQ ID NO: 339627 - DNA, 25 bp, Homo sapien
caaagctgggttagagatgaggcac

SEQ ID NO: 339628 - DNA, 25 bp, Homo sapien
tgtgggaccaaaatgtgccctgcct

SEQ ID NO: 339629 - DNA, 25 bp, Homo sapien
cactttgccataaggaaagcgggtc

SEQ ID NO: 339630 - DNA, 25 bp, Homo sapien
aattactggccaggtaggacgcgag

SEQ ID NO: 339631 - DNA, 25 bp, Homo sapien
ctattctggaaatctaggttggttt

SEQ ID NO: 339632 - DNA, 25 bp, Homo sapien
gaggtggtagaacgatctattctgg

SEQ ID NO: 339633 - DNA, 25 bp, Homo sapien
aagcctggggagtagattagatgac

SEQ ID NO: 339634 - DNA, 25 bp, Homo sapien
tttgacaccgtgctgcctaaagcct

SEQ ID NO: 339635 - DNA, 25 bp, Homo sapien
tagcttaagctgtgaacgtttggtt

SEQ ID NO: 339636 - DNA, 25 bp, Homo sapien
gctgtgaacgtttggttttggtgtc

SEQ ID NO: 339637 - DNA, 25 bp, Homo sapien
gatcagttagcttaagctgtgaacg

SEQ ID NO: 339638 - DNA, 25 bp, Homo sapien
tctccaagacatactgatcagttag

SEQ ID NO: 339639 - DNA, 25 bp, Homo sapien
cactggctgggtccgatgaaaggaa

SEQ ID NO: 339640 - DNA, 25 bp, Homo sapien
ggtccgatgaaaggaagtcctgaac

SEQ ID NO: 339641 - DNA, 25 bp, Homo sapien
ttgggaatgggttctgtgcaaggca

SEQ ID NO: 339642 - DNA, 25 bp, Homo sapien
gaagtcctgaactgttcaggcagcc

SEQ ID NO: 339643 - DNA, 25 bp, Homo sapien
gctgagctgccggcacgcctcctat

SEQ ID NO: 339644 - DNA, 25 bp, Homo sapien
gagctgccggcacgcctcctatcac

SEQ ID NO: 339645 - DNA, 25 bp, Homo sapien
gagaaacagaggtatcctgtcactg

SEQ ID NO: 339646 - DNA, 25 bp, Homo sapien
tcagtcagacagcattgtgttgggg

SEQ ID NO: 339647 - DNA, 25 bp, Homo sapien
atcgcggtggccagcgtcagcgttt

SEQ ID NO: 339648 - DNA, 25 bp, Homo sapien
gccagcgtcatcaccatcgcggtgg

SEQ ID NO: 339649 - DNA, 25 bp, Homo sapien
gcgtttgacaaaggaagtactcagt

SEQ ID NO: 339650 - DNA, 25 bp, Homo sapien
gtactcagttacaattaccttcctg

SEQ ID NO: 339651 - DNA, 25 bp, Homo sapien
tagtctagcttctggtctagctcct

SEQ ID NO: 339652 - DNA, 25 bp, Homo sapien
ggtctagctccttccataaaagcag

SEQ ID NO: 339653 - DNA, 25 bp, Homo sapien
gacttgttggccctagtctagcttc

SEQ ID NO: 339654 - DNA, 25 bp, Homo sapien
ccttggaagattcttacagaggcct

SEQ ID NO: 339655 - DNA, 25 bp, Homo sapien
ttgggcactggtgattctctcatct

SEQ ID NO: 339656 - DNA, 25 bp, Homo sapien
tagggcctactctcctccagtataa

SEQ ID NO: 339657 - DNA, 25 bp, Homo sapien
gctatcagccattgcacttagggcc

SEQ ID NO: 339658 - DNA, 25 bp, Homo sapien
cagctgggttggctccttctagagg

SEQ ID NO: 339659 - DNA, 25 bp, Homo sapien
caatccttggtgattcttggcacgc

SEQ ID NO: 339660 - DNA, 25 bp, Homo sapien
gagtcagttggaatgtttggacatc

SEQ ID NO: 339661 - DNA, 25 bp, Homo sapien
ctcagcggctgtggtaccaggagct

SEQ ID NO: 339662 - DNA, 25 bp, Homo sapien
ccagctcagcggctgtggtaccagg

SEQ ID NO: 339663 - DNA, 25 bp, Homo sapien
tgagtcagttggaatgtttggacat

SEQ ID NO: 339664 - DNA, 25 bp, Homo sapien
gaagatgatgatagtccttccccag

SEQ ID NO: 339665 - DNA, 25 bp, Homo sapien
taaaaagtgagtgcgctcacgcctg

SEQ ID NO: 339666 - DNA, 25 bp, Homo sapien
tgggcactgagtagacagtagtgaa

SEQ ID NO: 339667 - DNA, 25 bp, Homo sapien
cagatgcctttgtgcaggccgacaa

SEQ ID NO: 339668 - DNA, 25 bp, Homo sapien
ggatggcaggaatcagggaactgag

SEQ ID NO: 339669 - DNA, 25 bp, Homo sapien
aattccatagtctgggcaaaggctt

SEQ ID NO: 339670 - DNA, 25 bp, Homo sapien
tggagagcgttccaagcgcctggaa

SEQ ID NO: 339671 - DNA, 25 bp, Homo sapien
gcttggatccgactaggatggaaag

SEQ ID NO: 339672 - DNA, 25 bp, Homo sapien
tgtattgtttgaccctcacagccac

SEQ ID NO: 339673 - DNA, 25 bp, Homo sapien
gccagagcccatgcgaggctctcgg

SEQ ID NO: 339674 - DNA, 25 bp, Homo sapien
catgcgaggctctcggcacgaccat

SEQ ID NO: 339675 - DNA, 25 bp, Homo sapien
aggccctcggttggcatcctccccg

SEQ ID NO: 339676 - DNA, 25 bp, Homo sapien
gagcccatgcgaggctctcggcacg

SEQ ID NO: 339677 - DNA, 25 bp, Homo sapien
cctaaaattccagcattagtcactc

SEQ ID NO: 339678 - DNA, 25 bp, Homo sapien
ttagtcactcgtttgccgtagggca

SEQ ID NO: 339679 - DNA, 25 bp, Homo sapien
tccagcattagtcactcgtttgccg

SEQ ID NO: 339680 - DNA, 25 bp, Homo sapien
tactccccatgttccccggtgccta

SEQ ID NO: 339681 - DNA, 25 bp, Homo sapien
cagctgcgggttcgggacaggacgc

SEQ ID NO: 339682 - DNA, 25 bp, Homo sapien
aaactctggcccattttgccaaggg

SEQ ID NO: 339683 - DNA, 25 bp, Homo sapien
ctccagctggggtcaggtccgcctg

SEQ ID NO: 339684 - DNA, 25 bp, Homo sapien
gggtccgagctacaccctgcaggaa

SEQ ID NO: 339685 - DNA, 25 bp, Homo sapien
tccccaggccgttggcaaagacatt

SEQ ID NO: 339686 - DNA, 25 bp, Homo sapien
cacgaacttccccaggccgttggca

SEQ ID NO: 339687 - DNA, 25 bp, Homo sapien
gggcacccaaaatggtaccaggcat

SEQ ID NO: 339688 - DNA, 25 bp, Homo sapien
aaaatggtaccaggcattatcggga

SEQ ID NO: 339689 - DNA, 25 bp, Homo sapien
aagagcccttggcggctgcttggat

SEQ ID NO: 339690 - DNA, 25 bp, Homo sapien
ggaagagcccttggcggctgcttgg

SEQ ID NO: 339691 - DNA, 25 bp, Homo sapien
ctgcttggaagagcccttggcggct

SEQ ID NO: 339692 - DNA, 25 bp, Homo sapien
ttggaagagcccttggcggctgctt

SEQ ID NO: 339693 - DNA, 25 bp, Homo sapien
ggctgcagcccagcgtggctgcctg

SEQ ID NO: 339694 - DNA, 25 bp, Homo sapien
ggtctggcccgggagcgagggacag

SEQ ID NO: 339695 - DNA, 25 bp, Homo sapien
cctgtggtctggcccgggagcgagg

SEQ ID NO: 339696 - DNA, 25 bp, Homo sapien
tctggcccgggagcgagggacagac

SEQ ID NO: 339697 - DNA, 25 bp, Homo sapien
gcctccctcgggggttccctgctgc

SEQ ID NO: 339698 - DNA, 25 bp, Homo sapien
cagtgcctccctcgggggttccctg

SEQ ID NO: 339699 - DNA, 25 bp, Homo sapien
cctccctcgggggttccctgctgct

SEQ ID NO: 339700 - DNA, 25 bp, Homo sapien
tgcctccctcgggggttccctgctg

SEQ ID NO: 339701 - DNA, 25 bp, Homo sapien
tgagacgcattctgcttggaccatc

SEQ ID NO: 339702 - DNA, 25 bp, Homo sapien
gagcgggattcacgaggcatttcta

SEQ ID NO: 339703 - DNA, 25 bp, Homo sapien
acagctgagctcatgaaaagggtca

SEQ ID NO: 339704 - DNA, 25 bp, Homo sapien
taattccttcggacaaccttgtgaa

SEQ ID NO: 339705 - DNA, 25 bp, Homo sapien
tggagggtgacccaataaccaatta

SEQ ID NO: 339706 - DNA, 25 bp, Homo sapien
ccacaaagtgattgtttttgcctct

SEQ ID NO: 339707 - DNA, 25 bp, Homo sapien
cctgaggaacgagagatgaaagcgc

SEQ ID NO: 339708 - DNA, 25 bp, Homo sapien
caaggtcgcgccatgttgttgaatg

SEQ ID NO: 339709 - DNA, 25 bp, Homo sapien
tcctgggatcttgctaatgtgtacg

SEQ ID NO: 339710 - DNA, 25 bp, Homo sapien
tgcagtcccttcatgttacagagag

SEQ ID NO: 339711 - DNA, 25 bp, Homo sapien
gattcggttcccaaataggcagcgg

SEQ ID NO: 339712 - DNA, 25 bp, Homo sapien
gaccttggcagctggtatcttacag

SEQ ID NO: 339713 - DNA, 25 bp, Homo sapien
gcacgtggtttcatggctctgagcc

SEQ ID NO: 339714 - DNA, 25 bp, Homo sapien
taaacacttcaagtgcccctgggca

SEQ ID NO: 339715 - DNA, 25 bp, Homo sapien
gagggaatgagctgagatatcacac

SEQ ID NO: 339716 - DNA, 25 bp, Homo sapien
ttgggagggaatgagctgagatatc

SEQ ID NO: 339717 - DNA, 25 bp, Homo sapien
gttgggagggaatgagctgagatat

SEQ ID NO: 339718 - DNA, 25 bp, Homo sapien
gggagggaatgagctgagatatcac

SEQ ID NO: 339719 - DNA, 25 bp, Homo sapien
tgggggcaccccatgatctagacac

SEQ ID NO: 339720 - DNA, 25 bp, Homo sapien
ttggccaaaataccacctaactgcc

SEQ ID NO: 339721 - DNA, 25 bp, Homo sapien
ccatgatctagacaccacccacctt

SEQ ID NO: 339722 - DNA, 25 bp, Homo sapien
tttacctctgagcaatccatctctc

SEQ ID NO: 339723 - DNA, 25 bp, Homo sapien
gaaatcatgccaggtcagacgcaca

SEQ ID NO: 339724 - DNA, 25 bp, Homo sapien
atcttgtcggaggaacttggaggcc

SEQ ID NO: 339725 - DNA, 25 bp, Homo sapien
tcagtatgaaacatccccacagggt

SEQ ID NO: 339726 - DNA, 25 bp, Homo sapien
tgttccagggcgctatttcagaggc

SEQ ID NO: 339727 - DNA, 25 bp, Homo sapien
tggaagacatccttacccgaggtgt

SEQ ID NO: 339728 - DNA, 25 bp, Homo sapien
gatgatctgcttatacttccccagg

SEQ ID NO: 339729 - DNA, 25 bp, Homo sapien
tgctaaggaggcctcgcaggatgtc

SEQ ID NO: 339730 - DNA, 25 bp, Homo sapien
tgccaaggtacacgactatgcggta

SEQ ID NO: 339731 - DNA, 25 bp, Homo sapien
ggaaaactcggtgtctagccctagc

SEQ ID NO: 339732 - DNA, 25 bp, Homo sapien
acaagataagaagtgccaggtcccc

SEQ ID NO: 339733 - DNA, 25 bp, Homo sapien
tgtttccccatctagcgcatgagga

SEQ ID NO: 339734 - DNA, 25 bp, Homo sapien
tgcactcacaatgttccgggacgcc

SEQ ID NO: 339735 - DNA, 25 bp, Homo sapien
aataaagagggcattggcactgcca

SEQ ID NO: 339736 - DNA, 25 bp, Homo sapien
tatggcacaggtggcgttgacaggg

SEQ ID NO: 339737 - DNA, 25 bp, Homo sapien
ccattgagctgtgccagttggctcc

SEQ ID NO: 339738 - DNA, 25 bp, Homo sapien
agttggctcctgatctggttcatga

SEQ ID NO: 339739 - DNA, 25 bp, Homo sapien
tgcagcccaaatctccgaagccagg

SEQ ID NO: 339740 - DNA, 25 bp, Homo sapien
attgcagcccaaatctccgaagcca

SEQ ID NO: 339741 - DNA, 25 bp, Homo sapien
cccattgcagcccaaatctccgaag

SEQ ID NO: 339742 - DNA, 25 bp, Homo sapien
aaatctccgaagccaggcacccatg

SEQ ID NO: 339743 - DNA, 25 bp, Homo sapien
gcctgtgttgtaagacagaaacagc

SEQ ID NO: 339744 - DNA, 25 bp, Homo sapien
cctgatttatatactggagcctgtg

SEQ ID NO: 339745 - DNA, 25 bp, Homo sapien
tttcagaggttcatgctcaaatggg

SEQ ID NO: 339746 - DNA, 25 bp, Homo sapien
tggaggaaacctcagatgccggcag

SEQ ID NO: 339747 - DNA, 25 bp, Homo sapien
gctccgaggggaacacgttgcccag

SEQ ID NO: 339748 - DNA, 25 bp, Homo sapien
taaagtggaactgaacatgggcgct

SEQ ID NO: 339749 - DNA, 25 bp, Homo sapien
tccaatctgcacattgccactgggc

SEQ ID NO: 339750 - DNA, 25 bp, Homo sapien
ccggcgtggactttagacggtcata

SEQ ID NO: 339751 - DNA, 25 bp, Homo sapien
tttgtgctccccaagtgctctgggc

SEQ ID NO: 339752 - DNA, 25 bp, Homo sapien
gtttgtgctccccaagtgctctggg

SEQ ID NO: 339753 - DNA, 25 bp, Homo sapien
tcaggcattctgtgtgggcagccag

SEQ ID NO: 339754 - DNA, 25 bp, Homo sapien
cagctctccgggcattggggaattc

SEQ ID NO: 339755 - DNA, 25 bp, Homo sapien
tctccgggcattggggaattcccca

SEQ ID NO: 339756 - DNA, 25 bp, Homo sapien
cattggggaattccccaagaccagc

SEQ ID NO: 339757 - DNA, 25 bp, Homo sapien
cccaagaccagcgacccagaaacag

SEQ ID NO: 339758 - DNA, 25 bp, Homo sapien
gaaaatgagcagagccctcaggtgg

SEQ ID NO: 339759 - DNA, 25 bp, Homo sapien
aaatgagcagagccctcaggtgggc

SEQ ID NO: 339760 - DNA, 25 bp, Homo sapien
tggaaaatgagcagagccctcaggt

SEQ ID NO: 339761 - DNA, 25 bp, Homo sapien
ctggaaaatgagcagagccctcagg

SEQ ID NO: 339762 - DNA, 25 bp, Homo sapien
ccagtctctggcagcgaccagcagt

SEQ ID NO: 339763 - DNA, 25 bp, Homo sapien
cagtctctggcagcgaccagcagta

SEQ ID NO: 339764 - DNA, 25 bp, Homo sapien
ctctggcagcgaccagcagtatccc

SEQ ID NO: 339765 - DNA, 25 bp, Homo sapien
gtctctggcagcgaccagcagtatc

SEQ ID NO: 339766 - DNA, 25 bp, Homo sapien
aggcctttctttcgtactccaccag

SEQ ID NO: 339767 - DNA, 25 bp, Homo sapien
ctcaccacagggtgcgggaagagga

SEQ ID NO: 339768 - DNA, 25 bp, Homo sapien
cagggtgcgggaagaggaagtggcc

SEQ ID NO: 339769 - DNA, 25 bp, Homo sapien
actccaccagggagtctttcatcct

SEQ ID NO: 339770 - DNA, 25 bp, Homo sapien
cagggacaaagctgatgtcagaggc

SEQ ID NO: 339771 - DNA, 25 bp, Homo sapien
agcggcccctattaaataatcatgg

SEQ ID NO: 339772 - DNA, 25 bp, Homo sapien
cagaggcgagctgacagctttcttc

SEQ ID NO: 339773 - DNA, 25 bp, Homo sapien
cacagcggcccctattaaataatca

SEQ ID NO: 339774 - DNA, 25 bp, Homo sapien
tcagctgttgaggtctccccaaagt

SEQ ID NO: 339775 - DNA, 25 bp, Homo sapien
tctcagctgttgaggtctccccaaa

SEQ ID NO: 339776 - DNA, 25 bp, Homo sapien
agctgttgaggtctccccaaagtcc

SEQ ID NO: 339777 - DNA, 25 bp, Homo sapien
ctcagctgttgaggtctccccaaag

SEQ ID NO: 339778 - DNA, 25 bp, Homo sapien
cagagggaggacagtggcctgtgcc

SEQ ID NO: 339779 - DNA, 25 bp, Homo sapien
agggaggacagtggcctgtgccacc

SEQ ID NO: 339780 - DNA, 25 bp, Homo sapien
gcagagggaggacagtggcctgtgc

SEQ ID NO: 339781 - DNA, 25 bp, Homo sapien
gggctggcagcaggagacccctgca

SEQ ID NO: 339782 - DNA, 25 bp, Homo sapien
gagctaacttgacaaacaggacggg

SEQ ID NO: 339783 - DNA, 25 bp, Homo sapien
cgcgggaggctcttgctaggtactt

SEQ ID NO: 339784 - DNA, 25 bp, Homo sapien
gcacctgtctaggatgggctccctg

SEQ ID NO: 339785 - DNA, 25 bp, Homo sapien
caaaagatggccgttatggtaggac

SEQ ID NO: 339786 - DNA, 25 bp, Homo sapien
taaattagtcatgtccctccaagga

SEQ ID NO: 339787 - DNA, 25 bp, Homo sapien
gagcaatggctcctgcgtgagaaaa

SEQ ID NO: 339788 - DNA, 25 bp, Homo sapien
gcaacggccctgcaagtcatgagag

SEQ ID NO: 339789 - DNA, 25 bp, Homo sapien
gaatcaatggaaagtcggtcccgcg

SEQ ID NO: 339790 - DNA, 25 bp, Homo sapien
ttcctggagggtctggtcctgcgca

SEQ ID NO: 339791 - DNA, 25 bp, Homo sapien
gcagctgtcccctggtcatgagtct

SEQ ID NO: 339792 - DNA, 25 bp, Homo sapien
ttgcctttcctggagggtctggtcc

SEQ ID NO: 339793 - DNA, 25 bp, Homo sapien
ggtcatgagtctcttgcctttcctg

SEQ ID NO: 339794 - DNA, 25 bp, Homo sapien
gaggcgctgctctaagtcggccagt

SEQ ID NO: 339795 - DNA, 25 bp, Homo sapien
gctctctcagtttaggaacatccag

SEQ ID NO: 339796 - DNA, 25 bp, Homo sapien
cagccgtgtctgagttgtccagcag

SEQ ID NO: 339797 - DNA, 25 bp, Homo sapien
agatgttgttcctgagcccgaggat

SEQ ID NO: 339798 - DNA, 25 bp, Homo sapien
agcagctgcctatagccgccatgct

SEQ ID NO: 339799 - DNA, 25 bp, Homo sapien
tgtcctgcatgagatctgtctgctt

SEQ ID NO: 339800 - DNA, 25 bp, Homo sapien
aaggagcacgcggtactctttcgag

SEQ ID NO: 339801 - DNA, 25 bp, Homo sapien
cctgcatgagatctgtctgcttctg

SEQ ID NO: 339802 - DNA, 25 bp, Homo sapien
ctgtagatgacgtcatatggctgtg

SEQ ID NO: 339803 - DNA, 25 bp, Homo sapien
ctatggcgcaatggcccggaaggca

SEQ ID NO: 339804 - DNA, 25 bp, Homo sapien
ccaggtatctgctgccgggctctgg

SEQ ID NO: 339805 - DNA, 25 bp, Homo sapien
gacaccatcgttcccgtcctaagaa

SEQ ID NO: 339806 - DNA, 25 bp, Homo sapien
cgtgggcagacccagcaggcgggtt

SEQ ID NO: 339807 - DNA, 25 bp, Homo sapien
cggcacccgtgggcagacccagcag

SEQ ID NO: 339808 - DNA, 25 bp, Homo sapien
cacccgtgggcagacccagcaggcg

SEQ ID NO: 339809 - DNA, 25 bp, Homo sapien
cccgtgggcagacccagcaggcggg

SEQ ID NO: 339810 - DNA, 25 bp, Homo sapien
gtcctctgtgtgagcagtaccccca

SEQ ID NO: 339811 - DNA, 25 bp, Homo sapien
tcctctgtgtgagcagtacccccat

SEQ ID NO: 339812 - DNA, 25 bp, Homo sapien
gcgattggccaacacctcatgaggt

SEQ ID NO: 339813 - DNA, 25 bp, Homo sapien
cagccctacgcccaaggatgatgta

SEQ ID NO: 339814 - DNA, 25 bp, Homo sapien
gaattcgttcttcgaggtcagccct

SEQ ID NO: 339815 - DNA, 25 bp, Homo sapien
ggatgatgtaaaaccgcagcctcag

SEQ ID NO: 339816 - DNA, 25 bp, Homo sapien
ccagtcttggcccaggagccattgg

SEQ ID NO: 339817 - DNA, 25 bp, Homo sapien
cagtcttggcccaggagccattggc

SEQ ID NO: 339818 - DNA, 25 bp, Homo sapien
ttggcctcacaggacacggtggttg

SEQ ID NO: 339819 - DNA, 25 bp, Homo sapien
gccattggcctcacaggacacggtg

SEQ ID NO: 339820 - DNA, 25 bp, Homo sapien
aagatgctaaacaccagggaaatgc

SEQ ID NO: 339821 - DNA, 25 bp, Homo sapien
ttacaagtgctaacgaggagatgga

SEQ ID NO: 339822 - DNA, 25 bp, Homo sapien
ggaatctacaatgaatggtgccacc

SEQ ID NO: 339823 - DNA, 25 bp, Homo sapien
ctagggtggctataatcaaaggtag

SEQ ID NO: 339824 - DNA, 25 bp, Homo sapien
gcaaccgaatccaaagatcctcaga

SEQ ID NO: 339825 - DNA, 25 bp, Homo sapien
gatcctcagacaaggccccaccact

SEQ ID NO: 339826 - DNA, 25 bp, Homo sapien
aaccgaatccaaagatcctcagaca

SEQ ID NO: 339827 - DNA, 25 bp, Homo sapien
tggcctggaaacccccgctgctgct

SEQ ID NO: 339828 - DNA, 25 bp, Homo sapien
catgcccaatgggttgtccagaact

SEQ ID NO: 339829 - DNA, 25 bp, Homo sapien
tactggtcccagtcctaagcattga

SEQ ID NO: 339830 - DNA, 25 bp, Homo sapien
cagaactgatgttgccaagtggctt

SEQ ID NO: 339831 - DNA, 25 bp, Homo sapien
tatcgggaatatttctggagcaacc

SEQ ID NO: 339832 - DNA, 25 bp, Homo sapien
aggagcaacaggctagcccagctgg

SEQ ID NO: 339833 - DNA, 25 bp, Homo sapien
tatgtttaggtatgtaagcactcgc

SEQ ID NO: 339834 - DNA, 25 bp, Homo sapien
tgacgttcatacgacaaccaaatcg

SEQ ID NO: 339835 - DNA, 25 bp, Homo sapien
agccacatgcccagcgattttaaaa

SEQ ID NO: 339836 - DNA, 25 bp, Homo sapien
gctcctgtgatctgtagcccgaggc

SEQ ID NO: 339837 - DNA, 25 bp, Homo sapien
ctgtgatctgtagcccgaggcccca

SEQ ID NO: 339838 - DNA, 25 bp, Homo sapien
tcctgtgatctgtagcccgaggccc

SEQ ID NO: 339839 - DNA, 25 bp, Homo sapien
ggctcctgtgatctgtagcccgagg

SEQ ID NO: 339840 - DNA, 25 bp, Homo sapien
cagggactgtgcaaacgccgaggct

SEQ ID NO: 339841 - DNA, 25 bp, Homo sapien
actgtcaggactcacctggccaggg

SEQ ID NO: 339842 - DNA, 25 bp, Homo sapien
ccaccagaggcagaacggaggtcag

SEQ ID NO: 339843 - DNA, 25 bp, Homo sapien
tgttcccctgcatgggcagacacgc

SEQ ID NO: 339844 - DNA, 25 bp, Homo sapien
tgtccgcgtaaaagccggtgcctgc

SEQ ID NO: 339845 - DNA, 25 bp, Homo sapien
ttacatacagagagcggaacgaggg

SEQ ID NO: 339846 - DNA, 25 bp, Homo sapien
tgtgagtgtacacaggtgtccgcgt

SEQ ID NO: 339847 - DNA, 25 bp, Homo sapien
gggctcgttccagagcttaaggaaa

SEQ ID NO: 339848 - DNA, 25 bp, Homo sapien
atgacgctgccgataccgtcctcgg

SEQ ID NO: 339849 - DNA, 25 bp, Homo sapien
aggacctcgatgacgctgccgatac

SEQ ID NO: 339850 - DNA, 25 bp, Homo sapien
cgctggaggacctcgatgacgctgc

SEQ ID NO: 339851 - DNA, 25 bp, Homo sapien
cgccgctggaggacctcgatgacgc

SEQ ID NO: 339852 - DNA, 25 bp, Homo sapien
ctcctgccgcccacatttctgggcc

SEQ ID NO: 339853 - DNA, 25 bp, Homo sapien
gaaggtgctgatgtagtaggcagag

SEQ ID NO: 339854 - DNA, 25 bp, Homo sapien
agccaggggacctgcaatctgtgcc

SEQ ID NO: 339855 - DNA, 25 bp, Homo sapien
aatctgtgccacgatgccacattca

SEQ ID NO: 339856 - DNA, 25 bp, Homo sapien
aagttgaaggtgctgatgtagtagg

SEQ ID NO: 339857 - DNA, 25 bp, Homo sapien
gctgtccaccgatgcgcaccatcct

SEQ ID NO: 339858 - DNA, 25 bp, Homo sapien
aggggctgtccaccgatgcgcacca

SEQ ID NO: 339859 - DNA, 25 bp, Homo sapien
accgatgcgcaccatcctccacagc

SEQ ID NO: 339860 - DNA, 25 bp, Homo sapien
caccgatgcgcaccatcctccacag

SEQ ID NO: 339861 - DNA, 25 bp, Homo sapien
gaaggcaaagaacgtgatggagctg

SEQ ID NO: 339862 - DNA, 25 bp, Homo sapien
atggagatataaccctcgatgaggg

SEQ ID NO: 339863 - DNA, 25 bp, Homo sapien
tgtgtttcagcatccatgacaatgg

SEQ ID NO: 339864 - DNA, 25 bp, Homo sapien
gttcaggactgctagaggctgcctc

SEQ ID NO: 339865 - DNA, 25 bp, Homo sapien
caagagaggacaagcaagaggtgca

SEQ ID NO: 339866 - DNA, 25 bp, Homo sapien
gaggacaatgaacccagcctgtgcc

SEQ ID NO: 339867 - DNA, 25 bp, Homo sapien
caaaggattccacggtgagagggcc

SEQ ID NO: 339868 - DNA, 25 bp, Homo sapien
cacaagtgagcatcatgggctgcca

SEQ ID NO: 339869 - DNA, 25 bp, Homo sapien
tgggctctggatgggatgcaccgtg

SEQ ID NO: 339870 - DNA, 25 bp, Homo sapien
acacagaagcggttctgtgggctct

SEQ ID NO: 339871 - DNA, 25 bp, Homo sapien
atggctggaagcgtctcagggtcca

SEQ ID NO: 339872 - DNA, 25 bp, Homo sapien
agtagaagaggacatctatgagggt

SEQ ID NO: 339873 - DNA, 25 bp, Homo sapien
ttgctggaatcatccctcgtcacag

SEQ ID NO: 339874 - DNA, 25 bp, Homo sapien
tgagtgcggggaaagccattgctgg

SEQ ID NO: 339875 - DNA, 25 bp, Homo sapien
gctgagtgcggggaaagccattgct

SEQ ID NO: 339876 - DNA, 25 bp, Homo sapien
ctggaatcatccctcgtcacaggca

SEQ ID NO: 339877 - DNA, 25 bp, Homo sapien
ggccagcgtgtggatcaccacggac

SEQ ID NO: 339878 - DNA, 25 bp, Homo sapien
tggatcaccacggacaggtcctgct

SEQ ID NO: 339879 - DNA, 25 bp, Homo sapien
ctcgcggtaaatgtcgaactcctgg

SEQ ID NO: 339880 - DNA, 25 bp, Homo sapien
cgtgtggatcaccacggacaggtcc

SEQ ID NO: 339881 - DNA, 25 bp, Homo sapien
cgaacgggcgatcttggtgacccca

SEQ ID NO: 339882 - DNA, 25 bp, Homo sapien
agctacttgcaggaactcagatggg

SEQ ID NO: 339883 - DNA, 25 bp, Homo sapien
caccgctgtgagacgacacgttcag

SEQ ID NO: 339884 - DNA, 25 bp, Homo sapien
acagacacgtggtgctcggccagtg

SEQ ID NO: 339885 - DNA, 25 bp, Homo sapien
ctcctcgtccaccataagcgtgtaa

SEQ ID NO: 339886 - DNA, 25 bp, Homo sapien
caccataagcgtgtaatcctcaggg

SEQ ID NO: 339887 - DNA, 25 bp, Homo sapien
tcgtccaccataagcgtgtaatcct

SEQ ID NO: 339888 - DNA, 25 bp, Homo sapien
tccaccataagcgtgtaatcctcag

SEQ ID NO: 339889 - DNA, 25 bp, Homo sapien
ccagcccctatctgcgctcccgaac

SEQ ID NO: 339890 - DNA, 25 bp, Homo sapien
ctaatcctccgaccctggcccggag

SEQ ID NO: 339891 - DNA, 25 bp, Homo sapien
cttacggcgatcctaatcctccgac

SEQ ID NO: 339892 - DNA, 25 bp, Homo sapien
ggcgatcctaatcctccgaccctgg

SEQ ID NO: 339893 - DNA, 25 bp, Homo sapien
cacccggtgttctaggatgtgcagc

SEQ ID NO: 339894 - DNA, 25 bp, Homo sapien
gaagagcagcttgatgagcgggtgg

SEQ ID NO: 339895 - DNA, 25 bp, Homo sapien
cacccgcacccggtgttctaggatg

SEQ ID NO: 339896 - DNA, 25 bp, Homo sapien
ggtgttctaggatgtgcagctccat

SEQ ID NO: 339897 - DNA, 25 bp, Homo sapien
ggtggtgcccgagccttaaaggagc

SEQ ID NO: 339898 - DNA, 25 bp, Homo sapien
tggtgcccgagccttaaaggagccg

SEQ ID NO: 339899 - DNA, 25 bp, Homo sapien
caactagacccaggccgcacgggag

SEQ ID NO: 339900 - DNA, 25 bp, Homo sapien
cgccgccaactagacccaggccgca

SEQ ID NO: 339901 - DNA, 25 bp, Homo sapien
caggcagaatctgtgttggaccagc

SEQ ID NO: 339902 - DNA, 25 bp, Homo sapien
tcatgaaccgtgtagttatatggag

SEQ ID NO: 339903 - DNA, 25 bp, Homo sapien
ggcagaatctgtgttggaccagcca

SEQ ID NO: 339904 - DNA, 25 bp, Homo sapien
tgtggaatgtcagttcatgaaccgt

SEQ ID NO: 339905 - DNA, 25 bp, Homo sapien
gatggtgaaggttgtagggcaggcc

SEQ ID NO: 339906 - DNA, 25 bp, Homo sapien
tgagacctggggagccaaatcctga

SEQ ID NO: 339907 - DNA, 25 bp, Homo sapien
aggttctgcatccaagatagccttg

SEQ ID NO: 339908 - DNA, 25 bp, Homo sapien
tcactctcttgggacgtcaagctct

SEQ ID NO: 339909 - DNA, 25 bp, Homo sapien
tggcgctctgtcacgggcaactcca

SEQ ID NO: 339910 - DNA, 25 bp, Homo sapien
ggtgttcgcgctcaatctggcgctc

SEQ ID NO: 339911 - DNA, 25 bp, Homo sapien
cagcgccgcagctgaatgaggtgtt

SEQ ID NO: 339912 - DNA, 25 bp, Homo sapien
cagctgaatgaggtgttcgcgctca

SEQ ID NO: 339913 - DNA, 25 bp, Homo sapien
gtctagtcccaagctgcagtcacga

SEQ ID NO: 339914 - DNA, 25 bp, Homo sapien
ggtgagctggacacttgagacccac

SEQ ID NO: 339915 - DNA, 25 bp, Homo sapien
agtcacgagccccacagctgagtgc

SEQ ID NO: 339916 - DNA, 25 bp, Homo sapien
gagacccaccgcctcagaggataaa

SEQ ID NO: 339917 - DNA, 25 bp, Homo sapien
aggggagttgcttagtgattctgcc

SEQ ID NO: 339918 - DNA, 25 bp, Homo sapien
tttaaggggagttgcttagtgattc

SEQ ID NO: 339919 - DNA, 25 bp, Homo sapien
taaggggagttgcttagtgattctg

SEQ ID NO: 339920 - DNA, 25 bp, Homo sapien
ctccacctgggtgggtgactttaag

SEQ ID NO: 339921 - DNA, 25 bp, Homo sapien
ccctccccatgataaggggcaggca

SEQ ID NO: 339922 - DNA, 25 bp, Homo sapien
tccctccccatgataaggggcaggc

SEQ ID NO: 339923 - DNA, 25 bp, Homo sapien
cctccccatgataaggggcaggcat

SEQ ID NO: 339924 - DNA, 25 bp, Homo sapien
aggctccgcagtcgctcgatggtct

SEQ ID NO: 339925 - DNA, 25 bp, Homo sapien
gctgaggctccgcagtcgctcgatg

SEQ ID NO: 339926 - DNA, 25 bp, Homo sapien
tccgcagtcgctcgatggtctcgta

SEQ ID NO: 339927 - DNA, 25 bp, Homo sapien
gcagtcgctcgatggtctcgtactg

SEQ ID NO: 339928 - DNA, 25 bp, Homo sapien
gggggatgggcagtaagtacaagga

SEQ ID NO: 339929 - DNA, 25 bp, Homo sapien
tgggggatgggcagtaagtacaagg

SEQ ID NO: 339930 - DNA, 25 bp, Homo sapien
ctgctggggacaggggtgctccccc

SEQ ID NO: 339931 - DNA, 25 bp, Homo sapien
gacaggggtgctccccccaagccca

SEQ ID NO: 339932 - DNA, 25 bp, Homo sapien
ctgcaaagagaggccccactgtggg

SEQ ID NO: 339933 - DNA, 25 bp, Homo sapien
aagagaggccccactgtgggctgct

SEQ ID NO: 339934 - DNA, 25 bp, Homo sapien
agctccagggcaaggttcgggagaa

SEQ ID NO: 339935 - DNA, 25 bp, Homo sapien
tcgatcttctgacggctgaggtgct

SEQ ID NO: 339936 - DNA, 25 bp, Homo sapien
ggcgacaccttctgcaacagcgaga

SEQ ID NO: 339937 - DNA, 25 bp, Homo sapien
ccattctgtcatatagaggagcggg

SEQ ID NO: 339938 - DNA, 25 bp, Homo sapien
tgcttgtgggccaccggcgacacct

SEQ ID NO: 339939 - DNA, 25 bp, Homo sapien
ctcgctgtagtagccgggcaggtac

SEQ ID NO: 339940 - DNA, 25 bp, Homo sapien
cagtttctcgctgtagtagccgggc

SEQ ID NO: 339941 - DNA, 25 bp, Homo sapien
tacttctcacagatctgtaccaggc

SEQ ID NO: 339942 - DNA, 25 bp, Homo sapien
gggcaggtacttctcacagatctgt

SEQ ID NO: 339943 - DNA, 25 bp, Homo sapien
atgagcaagacagcggcaatgggcg

SEQ ID NO: 339944 - DNA, 25 bp, Homo sapien
tgtaggccttcagcacacggaatag

SEQ ID NO: 339945 - DNA, 25 bp, Homo sapien
tcagcaggcatatgcatgagcaaga

SEQ ID NO: 339946 - DNA, 25 bp, Homo sapien
ctcctcgggccggtacagcgtgtag

SEQ ID NO: 339947 - DNA, 25 bp, Homo sapien
ggaactgccggtgcaggtcacgctc

SEQ ID NO: 339948 - DNA, 25 bp, Homo sapien
gcaggtcacgctcaatcacgtccag

SEQ ID NO: 339949 - DNA, 25 bp, Homo sapien
tgccggtgcaggtcacgctcaatca

SEQ ID NO: 339950 - DNA, 25 bp, Homo sapien
aatgggaactgccggtgcaggtcac

SEQ ID NO: 339951 - DNA, 25 bp, Homo sapien
tactggcgccatcataaggtgaagc

SEQ ID NO: 339952 - DNA, 25 bp, Homo sapien
gaggtagcctactgagcccaggaaa

SEQ ID NO: 339953 - DNA, 25 bp, Homo sapien
gatgcggcccctcgaaatggaagag

SEQ ID NO: 339954 - DNA, 25 bp, Homo sapien
ggtattttactctggccagccatgg

SEQ ID NO: 339955 - DNA, 25 bp, Homo sapien
tgcccttttggcaccgcagacgaat

SEQ ID NO: 339956 - DNA, 25 bp, Homo sapien
tccagggttctgctgtaacttcacc

SEQ ID NO: 339957 - DNA, 25 bp, Homo sapien
ccccgcagagaaggcgggatgccct

SEQ ID NO: 339958 - DNA, 25 bp, Homo sapien
tcaccttgcctcctgacaggtactg

SEQ ID NO: 339959 - DNA, 25 bp, Homo sapien
ccaatgcgtggtgggccctcagtgc

SEQ ID NO: 339960 - DNA, 25 bp, Homo sapien
ccctctgccaatgcgtggtgggccc

SEQ ID NO: 339961 - DNA, 25 bp, Homo sapien
gaggactttcgccgggcaaggtggc

SEQ ID NO: 339962 - DNA, 25 bp, Homo sapien
tctgccaatgcgtggtgggccctca

SEQ ID NO: 339963 - DNA, 25 bp, Homo sapien
ttgttgagcatgtccagccacttgg

SEQ ID NO: 339964 - DNA, 25 bp, Homo sapien
tcagcacctccaggggtacttcctc

SEQ ID NO: 339965 - DNA, 25 bp, Homo sapien
gccacttggactccctctgcctcag

SEQ ID NO: 339966 - DNA, 25 bp, Homo sapien
ttgagcatgtccagccacttggact

SEQ ID NO: 339967 - DNA, 25 bp, Homo sapien
ccctggcttcattcccagccgccag

SEQ ID NO: 339968 - DNA, 25 bp, Homo sapien
aagcaaaggccctggcttcattccc

SEQ ID NO: 339969 - DNA, 25 bp, Homo sapien
tggcttcattcccagccgccagcct

SEQ ID NO: 339970 - DNA, 25 bp, Homo sapien
gccagcctggtcagacctccattct

SEQ ID NO: 339971 - DNA, 25 bp, Homo sapien
tacaccctaagcagaaagtctgagg

SEQ ID NO: 339972 - DNA, 25 bp, Homo sapien
gccatctactaactgggagaccatg

SEQ ID NO: 339973 - DNA, 25 bp, Homo sapien
aataaatgtgtacaagggcccagcc

SEQ ID NO: 339974 - DNA, 25 bp, Homo sapien
ggcagggcatgattaccaccatttt

SEQ ID NO: 339975 - DNA, 25 bp, Homo sapien
tctctggcctggtaccagctctaga

SEQ ID NO: 339976 - DNA, 25 bp, Homo sapien
tatcaggtgggtaaagcatagtaag

SEQ ID NO: 339977 - DNA, 25 bp, Homo sapien
tatgctcctctaccttgatatcagg

SEQ ID NO: 339978 - DNA, 25 bp, Homo sapien
tttcattaagtgttgtcagcagtga

SEQ ID NO: 339979 - DNA, 25 bp, Homo sapien
ggtctatatcctgagcctagcacag

SEQ ID NO: 339980 - DNA, 25 bp, Homo sapien
taaggcatagggttaaggtctccag

SEQ ID NO: 339981 - DNA, 25 bp, Homo sapien
ggtctccagatctccgttcagcagt

SEQ ID NO: 339982 - DNA, 25 bp, Homo sapien
tccacggtcagtctcaggatgtcag

SEQ ID NO: 339983 - DNA, 25 bp, Homo sapien
tcatctccggatgccactggtggtg

SEQ ID NO: 339984 - DNA, 25 bp, Homo sapien
gccttctcacaggttttgtcccagc

SEQ ID NO: 339985 - DNA, 25 bp, Homo sapien
ttgccttctcacaggttttgtccca

SEQ ID NO: 339986 - DNA, 25 bp, Homo sapien
tggtggtgccccttgtaagtgctga

SEQ ID NO: 339987 - DNA, 25 bp, Homo sapien
ctaggtgaggtcaaacaagcctcca

SEQ ID NO: 339988 - DNA, 25 bp, Homo sapien
cagaataaaggtgctaggtgaggtc

SEQ ID NO: 339989 - DNA, 25 bp, Homo sapien
cctccagttgccaagtgcctcccct

SEQ ID NO: 339990 - DNA, 25 bp, Homo sapien
tgaggtcaaacaagcctccagttgc

SEQ ID NO: 339991 - DNA, 25 bp, Homo sapien
aggtaggttttccatgtcctcaggc

SEQ ID NO: 339992 - DNA, 25 bp, Homo sapien
ggtaggttttccatgtcctcaggcc

SEQ ID NO: 339993 - DNA, 25 bp, Homo sapien
aaggtaggttttccatgtcctcagg

SEQ ID NO: 339994 - DNA, 25 bp, Homo sapien
ccagagctgtgacaacgcagagtca

SEQ ID NO: 339995 - DNA, 25 bp, Homo sapien
caaagaaccccttgatgtgcccggg

SEQ ID NO: 339996 - DNA, 25 bp, Homo sapien
caaagccacttcagctagtccagag

SEQ ID NO: 339997 - DNA, 25 bp, Homo sapien
ccagaatggactctgtaagaggcca

SEQ ID NO: 339998 - DNA, 25 bp, Homo sapien
gccaccaaaccggatattccttcga

SEQ ID NO: 339999 - DNA, 25 bp, Homo sapien
ccaccaaaccggatattccttcgag

SEQ ID NO: 340000 - DNA, 25 bp, Homo sapien
caccaaaccggatattccttcgagg

SEQ ID NO: 340001 - DNA, 25 bp, Homo sapien
tccgcctcccaagctcaagcgattc

SEQ ID NO: 340002 - DNA, 25 bp, Homo sapien
cagtggcatgacctcaactcattac

SEQ ID NO: 340003 - DNA, 25 bp, Homo sapien
ggcatgacctcaactcattacaacc

SEQ ID NO: 340004 - DNA, 25 bp, Homo sapien
gtggcatgacctcaactcattacaa

SEQ ID NO: 340005 - DNA, 25 bp, Homo sapien
gtagctaatagtcacctcagtaagg

SEQ ID NO: 340006 - DNA, 25 bp, Homo sapien
catgagggctaacgtttcacttctc

SEQ ID NO: 340007 - DNA, 25 bp, Homo sapien
catctccacagtacccatgagggct

SEQ ID NO: 340008 - DNA, 25 bp, Homo sapien
tggcccagggtagctgaaatggacc

SEQ ID NO: 340009 - DNA, 25 bp, Homo sapien
tagccttcaaccacgagactgggtt

SEQ ID NO: 340010 - DNA, 25 bp, Homo sapien
tagaacatggactcctagccttcaa

SEQ ID NO: 340011 - DNA, 25 bp, Homo sapien
ttaagtagggaacatcgaagctttc

SEQ ID NO: 340012 - DNA, 25 bp, Homo sapien
gagattttaggttgactgacaggct

SEQ ID NO: 340013 - DNA, 25 bp, Homo sapien
gcccttctccgacccttccatgagg

SEQ ID NO: 340014 - DNA, 25 bp, Homo sapien
gggcccttctccgacccttccatga

SEQ ID NO: 340015 - DNA, 25 bp, Homo sapien
aagctgtgtatgagcggataggggg

SEQ ID NO: 340016 - DNA, 25 bp, Homo sapien
tatgagcggatagggggcccttctc

SEQ ID NO: 340017 - DNA, 25 bp, Homo sapien
gagcccacgatgaagccgaacttgt

SEQ ID NO: 340018 - DNA, 25 bp, Homo sapien
tcggcgaagccgttggcctccgagt

SEQ ID NO: 340019 - DNA, 25 bp, Homo sapien
cagacccgagagagctgagttcgtc

SEQ ID NO: 340020 - DNA, 25 bp, Homo sapien
ccgaacttgtcgatgcggcgctcgg

SEQ ID NO: 340021 - DNA, 25 bp, Homo sapien
cgggcgcgcgcggcccattctctcc

SEQ ID NO: 340022 - DNA, 25 bp, Homo sapien
gggcgcgcgcggcccattctctccg

SEQ ID NO: 340023 - DNA, 25 bp, Homo sapien
gcgggcgcgcgcggcccattctctc

SEQ ID NO: 340024 - DNA, 25 bp, Homo sapien
gcgcgcggcccattctctccgttgc

SEQ ID NO: 340025 - DNA, 25 bp, Homo sapien
gcggccacctcagccgccctgctgc

SEQ ID NO: 340026 - DNA, 25 bp, Homo sapien
ggccacctcagccgccctgctgccg

SEQ ID NO: 340027 - DNA, 25 bp, Homo sapien
agcggccacctcagccgccctgctg

SEQ ID NO: 340028 - DNA, 25 bp, Homo sapien
gccacctcagccgccctgctgccgc

SEQ ID NO: 340029 - DNA, 25 bp, Homo sapien
tctctagagggcagctcaaagggcc

SEQ ID NO: 340030 - DNA, 25 bp, Homo sapien
caaataaaaggcactgggaactctc

SEQ ID NO: 340031 - DNA, 25 bp, Homo sapien
catggacaagcaaccagtagtgggc

SEQ ID NO: 340032 - DNA, 25 bp, Homo sapien
cataaaactggtactgactctgggt

SEQ ID NO: 340033 - DNA, 25 bp, Homo sapien
gttttattagacaacccatgtcaag

SEQ ID NO: 340034 - DNA, 25 bp, Homo sapien
catattctattagccaagtgccacc

SEQ ID NO: 340035 - DNA, 25 bp, Homo sapien
gacaatatcagccatattctattag

SEQ ID NO: 340036 - DNA, 25 bp, Homo sapien
cccatgtcaaggtacaaaatgatta

SEQ ID NO: 340037 - DNA, 25 bp, Homo sapien
aaacccagctactcttaccaatgtg

SEQ ID NO: 340038 - DNA, 25 bp, Homo sapien
taagagcgaaacaaatatgcaggca

SEQ ID NO: 340039 - DNA, 25 bp, Homo sapien
gaatgtcctcaaatcgagaccctaa

SEQ ID NO: 340040 - DNA, 25 bp, Homo sapien
cctgggctctcagttgctaatgggc

SEQ ID NO: 340041 - DNA, 25 bp, Homo sapien
catgttgtagtaagccagtgagttg

SEQ ID NO: 340042 - DNA, 25 bp, Homo sapien
gactgcgccattggccatgttgtag

SEQ ID NO: 340043 - DNA, 25 bp, Homo sapien
ttgagggccaggtggatgactgcgc

SEQ ID NO: 340044 - DNA, 25 bp, Homo sapien
agttggaatctttgatgaagatacc

SEQ ID NO: 340045 - DNA, 25 bp, Homo sapien
gcttccatgacagatttagcttctg

SEQ ID NO: 340046 - DNA, 25 bp, Homo sapien
cagagccttgcattgttgggcacac

SEQ ID NO: 340047 - DNA, 25 bp, Homo sapien
gccagcatcatgacttctaggatgg

SEQ ID NO: 340048 - DNA, 25 bp, Homo sapien
ggatggattcagatggccacaccca

SEQ ID NO: 340049 - DNA, 25 bp, Homo sapien
atgcctgtggcttcatgaatcttca

SEQ ID NO: 340050 - DNA, 25 bp, Homo sapien
tgcctgtggcttcatgaatcttcac

SEQ ID NO: 340051 - DNA, 25 bp, Homo sapien
gaatcttcaccttaatgacagagac

SEQ ID NO: 340052 - DNA, 25 bp, Homo sapien
tcatgaatcttcaccttaatgacag

SEQ ID NO: 340053 - DNA, 25 bp, Homo sapien
agtttccattccgtcttatcctgca

SEQ ID NO: 340054 - DNA, 25 bp, Homo sapien
acctggactttgatggacactggac

SEQ ID NO: 340055 - DNA, 25 bp, Homo sapien
ttccgtcttatcctgcatgttgggc

SEQ ID NO: 340056 - DNA, 25 bp, Homo sapien
tgttgggcacctggactttgatgga

SEQ ID NO: 340057 - DNA, 25 bp, Homo sapien
ctggcatgaggctgtcctctgtctt

SEQ ID NO: 340058 - DNA, 25 bp, Homo sapien
tctggcatgaggctgtcctctgtct

SEQ ID NO: 340059 - DNA, 25 bp, Homo sapien
tgccacaggtggagcaggcacaaag

SEQ ID NO: 340060 - DNA, 25 bp, Homo sapien
ggatgcacagggggcattggggctg

SEQ ID NO: 340061 - DNA, 25 bp, Homo sapien
aggtgccacaggtggagcaggcaca

SEQ ID NO: 340062 - DNA, 25 bp, Homo sapien
acaggtgccacaggtggagcaggca

SEQ ID NO: 340063 - DNA, 25 bp, Homo sapien
ggcatgggcaccacgttgattctgg

SEQ ID NO: 340064 - DNA, 25 bp, Homo sapien
gattctgggcgcgtggatgatgggc

SEQ ID NO: 340065 - DNA, 25 bp, Homo sapien
gcatgacgggtactgcggagacaac

SEQ ID NO: 340066 - DNA, 25 bp, Homo sapien
ggcagccggaccacagatgccattg

SEQ ID NO: 340067 - DNA, 25 bp, Homo sapien
gtggcggtggctgttgagggatttc

SEQ ID NO: 340068 - DNA, 25 bp, Homo sapien
tggccttgtgaatggcctcaatctg

SEQ ID NO: 340069 - DNA, 25 bp, Homo sapien
aggcctttggccttgtgaatggcct

SEQ ID NO: 340070 - DNA, 25 bp, Homo sapien
tggtcggggcactgaagtgatgggt

SEQ ID NO: 340071 - DNA, 25 bp, Homo sapien
tctacaccgaagatgtcagtacgcc

SEQ ID NO: 340072 - DNA, 25 bp, Homo sapien
accgaagatgtcagtacgccgctca

SEQ ID NO: 340073 - DNA, 25 bp, Homo sapien
tcctcaccgatcttcttaccaatgg

SEQ ID NO: 340074 - DNA, 25 bp, Homo sapien
ctgtttcctctacaccgaagatgtc

SEQ ID NO: 340075 - DNA, 25 bp, Homo sapien
gtcaagaagtccaatgcgcatgtgt

SEQ ID NO: 340076 - DNA, 25 bp, Homo sapien
tggtgcgtacacctcatcatcgctc

SEQ ID NO: 340077 - DNA, 25 bp, Homo sapien
cgcatgtgttcctgcattttgctgg

SEQ ID NO: 340078 - DNA, 25 bp, Homo sapien
gcttctcacggatggagcgatcccg

SEQ ID NO: 340079 - DNA, 25 bp, Homo sapien
ctttgggatcataatccttgcggac

SEQ ID NO: 340080 - DNA, 25 bp, Homo sapien
tgggatcataatccttgcggacaat

SEQ ID NO: 340081 - DNA, 25 bp, Homo sapien
gacttggtctggagttgggggcaga

SEQ ID NO: 340082 - DNA, 25 bp, Homo sapien
gatcataatccttgcggacaatgac

SEQ ID NO: 340083 - DNA, 25 bp, Homo sapien
tccatctcaacttcctcactctccc

SEQ ID NO: 340084 - DNA, 25 bp, Homo sapien
tttcatagcgctcctgaatgaggat

SEQ ID NO: 340085 - DNA, 25 bp, Homo sapien
tgaatgaggattcgggcccccagct

SEQ ID NO: 340086 - DNA, 25 bp, Homo sapien
tcctcatcagactcgacctccatct

SEQ ID NO: 340087 - DNA, 25 bp, Homo sapien
tgctcattgggttggaagtccactg

SEQ ID NO: 340088 - DNA, 25 bp, Homo sapien
tcattgggttggaagtccactgttt

SEQ ID NO: 340089 - DNA, 25 bp, Homo sapien
cttgctcattgggttggaagtccac

SEQ ID NO: 340090 - DNA, 25 bp, Homo sapien
tgggttggaagtccactgtttccac

SEQ ID NO: 340091 - DNA, 25 bp, Homo sapien
ctgagcataggccacccgctccttc

SEQ ID NO: 340092 - DNA, 25 bp, Homo sapien
gagcataggccacccgctccttctc

SEQ ID NO: 340093 - DNA, 25 bp, Homo sapien
tgagcataggccacccgctccttct

SEQ ID NO: 340094 - DNA, 25 bp, Homo sapien
ttggcccattccactcggtaacaca

SEQ ID NO: 340095 - DNA, 25 bp, Homo sapien
tggcccattccactcggtaacacac

SEQ ID NO: 340096 - DNA, 25 bp, Homo sapien
tttggcccattccactcggtaacac

SEQ ID NO: 340097 - DNA, 25 bp, Homo sapien
tcagcgcctccttcggaacagaatg

SEQ ID NO: 340098 - DNA, 25 bp, Homo sapien
tatggcatttgcacctggttccacc

SEQ ID NO: 340099 - DNA, 25 bp, Homo sapien
tctgctcctgatgaggctaccacct

SEQ ID NO: 340100 - DNA, 25 bp, Homo sapien
gatgggaaacagcttggtgctacgc

SEQ ID NO: 340101 - DNA, 25 bp, Homo sapien
accagtaactggttgcaagaaatgc

SEQ ID NO: 340102 - DNA, 25 bp, Homo sapien
agtaactggttgcaagaaatgctat

SEQ ID NO: 340103 - DNA, 25 bp, Homo sapien
ccaccagtaactggttgcaagaaat

SEQ ID NO: 340104 - DNA, 25 bp, Homo sapien
ccagtaactggttgcaagaaatgct

SEQ ID NO: 340105 - DNA, 25 bp, Homo sapien
ctctttcttgagctttgaaaataaa

SEQ ID NO: 340106 - DNA, 25 bp, Homo sapien
ataaacctttgggtggaatcaagat

SEQ ID NO: 340107 - DNA, 25 bp, Homo sapien
ggggttttcagcctctttcttgagc

SEQ ID NO: 340108 - DNA, 25 bp, Homo sapien
cttgagctttgaaaataaacctttg

SEQ ID NO: 340109 - DNA, 25 bp, Homo sapien
tacaacgcagtacaaagaggcagcc

SEQ ID NO: 340110 - DNA, 25 bp, Homo sapien
accactcaaagttggcaccatgaac

SEQ ID NO: 340111 - DNA, 25 bp, Homo sapien
ttcctgggcctgtgataaagcacag

SEQ ID NO: 340112 - DNA, 25 bp, Homo sapien
caactgtcagtgctttacaacgcag

SEQ ID NO: 340113 - DNA, 25 bp, Homo sapien
caccacatccaagtcgaaggctgag

SEQ ID NO: 340114 - DNA, 25 bp, Homo sapien
tgctgtgggcggagaaagtcaaact

SEQ ID NO: 340115 - DNA, 25 bp, Homo sapien
tctttgggcacgatggtctcttgga

SEQ ID NO: 340116 - DNA, 25 bp, Homo sapien
cagctgggtcagaaactggcgccca

SEQ ID NO: 340117 - DNA, 25 bp, Homo sapien
gggttgttgatctcgttctgtcgga

SEQ ID NO: 340118 - DNA, 25 bp, Homo sapien
gggatggcggcggacggctcctgag

SEQ ID NO: 340119 - DNA, 25 bp, Homo sapien
cggtagtaggcatggtaagggtcat

SEQ ID NO: 340120 - DNA, 25 bp, Homo sapien
gaactcgctgaccttgtggcggtag

SEQ ID NO: 340121 - DNA, 25 bp, Homo sapien
gaggatctctgaccaatgcccattc

SEQ ID NO: 340122 - DNA, 25 bp, Homo sapien
aggaggaacccggagcaattcccat

SEQ ID NO: 340123 - DNA, 25 bp, Homo sapien
ttccatctgaggtggcggctagcac

SEQ ID NO: 340124 - DNA, 25 bp, Homo sapien
tagcacctgcatggaactgtaggaa

SEQ ID NO: 340125 - DNA, 25 bp, Homo sapien
ccatctgtgatgaagcagctttcca

SEQ ID NO: 340126 - DNA, 25 bp, Homo sapien
catttgaggctcttggaatgtggtc

SEQ ID NO: 340127 - DNA, 25 bp, Homo sapien
tattgcctaccccagtgccatgttg

SEQ ID NO: 340128 - DNA, 25 bp, Homo sapien
aaaacccttgtgctgattcagtgct

SEQ ID NO: 340129 - DNA, 25 bp, Homo sapien
ctggcagtcttgtcaacaatatttc

SEQ ID NO: 340130 - DNA, 25 bp, Homo sapien
agctggcagtcttgtcaacaatatt

SEQ ID NO: 340131 - DNA, 25 bp, Homo sapien
atccccacaactggcttagaaggtg

SEQ ID NO: 340132 - DNA, 25 bp, Homo sapien
tggcttagaaggtgcagaatcctcc

SEQ ID NO: 340133 - DNA, 25 bp, Homo sapien
cagacttccctcaggttagaaccct

SEQ ID NO: 340134 - DNA, 25 bp, Homo sapien
gtccctggttcagagcaggttctcc

SEQ ID NO: 340135 - DNA, 25 bp, Homo sapien
caggttagaaccctctacttcagaa

SEQ ID NO: 340136 - DNA, 25 bp, Homo sapien
tcttaagttcactgcacctgcaggg

SEQ ID NO: 340137 - DNA, 25 bp, Homo sapien
tttcgctaccagaacaccaccatag

SEQ ID NO: 340138 - DNA, 25 bp, Homo sapien
gaccacttagagaatcccgttcagg

SEQ ID NO: 340139 - DNA, 25 bp, Homo sapien
cccgttcagggtggctcatttcgct

SEQ ID NO: 340140 - DNA, 25 bp, Homo sapien
tattcctgtgcgagtaaggagcgcc

SEQ ID NO: 340141 - DNA, 25 bp, Homo sapien
tttgggctccgtgggcacgggcggc

SEQ ID NO: 340142 - DNA, 25 bp, Homo sapien
gcaccgcctgcacgggtccggccgg

SEQ ID NO: 340143 - DNA, 25 bp, Homo sapien
gggctccgtgggcacgggcggcggc

SEQ ID NO: 340144 - DNA, 25 bp, Homo sapien
ggcgggggcaccgcctgcacgggtc

SEQ ID NO: 340145 - DNA, 25 bp, Homo sapien
actgcgacgctcagggctgccagtc

SEQ ID NO: 340146 - DNA, 25 bp, Homo sapien
gactgcgacgctcagggctgccagt

SEQ ID NO: 340147 - DNA, 25 bp, Homo sapien
gcgacgctcagggctgccagtccgc

SEQ ID NO: 340148 - DNA, 25 bp, Homo sapien
tgcgacgctcagggctgccagtccg

SEQ ID NO: 340149 - DNA, 25 bp, Homo sapien
ttgcggccgcgaaggtacgactggc

SEQ ID NO: 340150 - DNA, 25 bp, Homo sapien
agtacgacgagctcgcaagatggcg

SEQ ID NO: 340151 - DNA, 25 bp, Homo sapien
ggcggcggccgagcgagttgcggcc

SEQ ID NO: 340152 - DNA, 25 bp, Homo sapien
tcggtgtcggtgagcggtgccgcct

SEQ ID NO: 340153 - DNA, 25 bp, Homo sapien
ggaccgtcccctcgccgtgacgcgc

SEQ ID NO: 340154 - DNA, 25 bp, Homo sapien
ccgcggcgtccgacgccgttgccaa

SEQ ID NO: 340155 - DNA, 25 bp, Homo sapien
gcaccgcggcgtccgacgccgttgc

SEQ ID NO: 340156 - DNA, 25 bp, Homo sapien
cgccgtgacgcgcttcccgcccctc

SEQ ID NO: 340157 - DNA, 25 bp, Homo sapien
agacacgaaggctgaagccgcgacg

SEQ ID NO: 340158 - DNA, 25 bp, Homo sapien
ggcagttccgggagccgaccagaca

SEQ ID NO: 340159 - DNA, 25 bp, Homo sapien
ctgaagccgcgacgccgaagacagg

SEQ ID NO: 340160 - DNA, 25 bp, Homo sapien
gagccgaccagacacgaaggctgaa

SEQ ID NO: 340161 - DNA, 25 bp, Homo sapien
tggcttctctgtcaccgctggtgac

SEQ ID NO: 340162 - DNA, 25 bp, Homo sapien
actgagtcattatttgccagtgagc

SEQ ID NO: 340163 - DNA, 25 bp, Homo sapien
caataggtcttaatgcaagttttca

SEQ ID NO: 340164 - DNA, 25 bp, Homo sapien
ttcctctcttgcactttagaagtca

SEQ ID NO: 340165 - DNA, 25 bp, Homo sapien
cattagagacaaagttcctggcacc

SEQ ID NO: 340166 - DNA, 25 bp, Homo sapien
tcatctatcaagtggaggctccggg

SEQ ID NO: 340167 - DNA, 25 bp, Homo sapien
taaccatcctggagctagaacggga

SEQ ID NO: 340168 - DNA, 25 bp, Homo sapien
ggtccagtaagcaagagcccagtaa

SEQ ID NO: 340169 - DNA, 25 bp, Homo sapien
tgtcctggaccccatggcataggag

SEQ ID NO: 340170 - DNA, 25 bp, Homo sapien
gaggcaggtcatagccccatagcta

SEQ ID NO: 340171 - DNA, 25 bp, Homo sapien
tagctgctcgtgagacatcatccag

SEQ ID NO: 340172 - DNA, 25 bp, Homo sapien
taggagtgctaggtacccatcttgg

SEQ ID NO: 340173 - DNA, 25 bp, Homo sapien
ttctaaggtcctgtcccattgggca

SEQ ID NO: 340174 - DNA, 25 bp, Homo sapien
taagtgcagcaagaagcctcgtcag

SEQ ID NO: 340175 - DNA, 25 bp, Homo sapien
aagctggtgtgcctcccttctaagg

SEQ ID NO: 340176 - DNA, 25 bp, Homo sapien
aacgggcggctccaatcaatgctgt

SEQ ID NO: 340177 - DNA, 25 bp, Homo sapien
tattcattagctcccagttctggca

SEQ ID NO: 340178 - DNA, 25 bp, Homo sapien
aaattgaggcatctaccaggttgcg

SEQ ID NO: 340179 - DNA, 25 bp, Homo sapien
gccagaaggcctgtgctcaagtcca

SEQ ID NO: 340180 - DNA, 25 bp, Homo sapien
gaagaggccgtcaggtagagcacct

SEQ ID NO: 340181 - DNA, 25 bp, Homo sapien
tgtaaggagggcagactcacgtcac

SEQ ID NO: 340182 - DNA, 25 bp, Homo sapien
tgcttgaggaccaaaggcaacaggc

SEQ ID NO: 340183 - DNA, 25 bp, Homo sapien
ggaagggtccatccccatgtgcaga

SEQ ID NO: 340184 - DNA, 25 bp, Homo sapien
tgtggcttcgagtatcccggtcagc

SEQ ID NO: 340185 - DNA, 25 bp, Homo sapien
gtgcttacagggcagcacccggagc

SEQ ID NO: 340186 - DNA, 25 bp, Homo sapien
ggtccacacagtctcggtgaaactc

SEQ ID NO: 340187 - DNA, 25 bp, Homo sapien
aggtctgctggagcatcagccaggg

SEQ ID NO: 340188 - DNA, 25 bp, Homo sapien
tcggtgaaactcgtgcttacagggc

SEQ ID NO: 340189 - DNA, 25 bp, Homo sapien
tgttgcagaagtagtccaggcacac

SEQ ID NO: 340190 - DNA, 25 bp, Homo sapien
ctgtttgttgcagaagtagtccagg

SEQ ID NO: 340191 - DNA, 25 bp, Homo sapien
tttgttgcagaagtagtccaggcac

SEQ ID NO: 340192 - DNA, 25 bp, Homo sapien
tgtttgttgcagaagtagtccaggc

SEQ ID NO: 340193 - DNA, 25 bp, Homo sapien
agcacccggatctgggaggccctgc

SEQ ID NO: 340194 - DNA, 25 bp, Homo sapien
gtcttgagggatgccagtctccgca

SEQ ID NO: 340195 - DNA, 25 bp, Homo sapien
tgctcagccggcagcgccgtgtctt

SEQ ID NO: 340196 - DNA, 25 bp, Homo sapien
gccgtgtcttgagggatgccagtct

SEQ ID NO: 340197 - DNA, 25 bp, Homo sapien
tgggcctggaccacgaggcctgtgc

SEQ ID NO: 340198 - DNA, 25 bp, Homo sapien
tcccgctggctctgccgcgacgcct

SEQ ID NO: 340199 - DNA, 25 bp, Homo sapien
gctctgccgcgacgcctgccgctgg

SEQ ID NO: 340200 - DNA, 25 bp, Homo sapien
gaccacgaggcctgtgcacaggagc

SEQ ID NO: 340201 - DNA, 25 bp, Homo sapien
cagacagggactctccgctggtgat

SEQ ID NO: 340202 - DNA, 25 bp, Homo sapien
cctccatagccatccttggagaggc

SEQ ID NO: 340203 - DNA, 25 bp, Homo sapien
tccactcgatattggcagacaggga

SEQ ID NO: 340204 - DNA, 25 bp, Homo sapien
cacaggtggtccacaaggtcaactt

SEQ ID NO: 340205 - DNA, 25 bp, Homo sapien
aggatacctacgactgtcgcccctg

SEQ ID NO: 340206 - DNA, 25 bp, Homo sapien
tggccttacactttgccccaggcct

SEQ ID NO: 340207 - DNA, 25 bp, Homo sapien
tgcaggaaaaggatacctacgactg

SEQ ID NO: 340208 - DNA, 25 bp, Homo sapien
gaaaaggatacctacgactgtcgcc

SEQ ID NO: 340209 - DNA, 25 bp, Homo sapien
acattggaggaataatggaggacga

SEQ ID NO: 340210 - DNA, 25 bp, Homo sapien
ggaggaataatggaggacgatcact

SEQ ID NO: 340211 - DNA, 25 bp, Homo sapien
gcaatgcatccaacagcttggtgac

SEQ ID NO: 340212 - DNA, 25 bp, Homo sapien
caatgcatccaacagcttggtgaca

SEQ ID NO: 340213 - DNA, 25 bp, Homo sapien
ccacgttgtggttcaggatgagaag

SEQ ID NO: 340214 - DNA, 25 bp, Homo sapien
cacgttgtggttcaggatgagaaga

SEQ ID NO: 340215 - DNA, 25 bp, Homo sapien
ctctcggaccacgttgtggttcagg

SEQ ID NO: 340216 - DNA, 25 bp, Homo sapien
cggaccacgttgtggttcaggatga

SEQ ID NO: 340217 - DNA, 25 bp, Homo sapien
tccttgcccacgtatgccactgcaa

SEQ ID NO: 340218 - DNA, 25 bp, Homo sapien
gcctgcgggccactgcccttattct

SEQ ID NO: 340219 - DNA, 25 bp, Homo sapien
gaccagggccttgggataggcctgc

SEQ ID NO: 340220 - DNA, 25 bp, Homo sapien
cctgctcggcatccacgatgtccat

SEQ ID NO: 340221 - DNA, 25 bp, Homo sapien
gcgccgggtcggcttcggagccgat

SEQ ID NO: 340222 - DNA, 25 bp, Homo sapien
gagccgatcctgacgccctccagga

SEQ ID NO: 340223 - DNA, 25 bp, Homo sapien
caggggcgccgggtcggcttcggag

SEQ ID NO: 340224 - DNA, 25 bp, Homo sapien
gtcggcttcggagccgatcctgacg

SEQ ID NO: 340225 - DNA, 25 bp, Homo sapien
ggcggcggcgatctcagcgcggggc

SEQ ID NO: 340226 - DNA, 25 bp, Homo sapien
ggcggcgatctcagcgcggggcgag

SEQ ID NO: 340227 - DNA, 25 bp, Homo sapien
ggcgatctcagcgcggggcgagcgg

SEQ ID NO: 340228 - DNA, 25 bp, Homo sapien
gcggcgatctcagcgcggggcgagc

SEQ ID NO: 340229 - DNA, 25 bp, Homo sapien
gcgagctggcccaacagtggggcca

SEQ ID NO: 340230 - DNA, 25 bp, Homo sapien
acccggcgagctggcccaacagtgg

SEQ ID NO: 340231 - DNA, 25 bp, Homo sapien
ggcgagctggcccaacagtggggcc

SEQ ID NO: 340232 - DNA, 25 bp, Homo sapien
cggacccggcgagctggcccaacag

SEQ ID NO: 340233 - DNA, 25 bp, Homo sapien
tggtggccgcggagagctcaggtgc

SEQ ID NO: 340234 - DNA, 25 bp, Homo sapien
gagagctcaggtgcccgcggctgag

SEQ ID NO: 340235 - DNA, 25 bp, Homo sapien
ccctggtggccgcggagagctcagg

SEQ ID NO: 340236 - DNA, 25 bp, Homo sapien
gccgcggagagctcaggtgcccgcg

SEQ ID NO: 340237 - DNA, 25 bp, Homo sapien
agaggaggtgcttcggcagcggacg

SEQ ID NO: 340238 - DNA, 25 bp, Homo sapien
cttcggcagcggacgcgtcagcggg

SEQ ID NO: 340239 - DNA, 25 bp, Homo sapien
cagagagaggaggtgcttcggcagc

SEQ ID NO: 340240 - DNA, 25 bp, Homo sapien
ggtgcttcggcagcggacgcgtcag

SEQ ID NO: 340241 - DNA, 25 bp, Homo sapien
gccgagatcgcgccattggaatcca

SEQ ID NO: 340242 - DNA, 25 bp, Homo sapien
cgagatcgcgccattggaatccagc

SEQ ID NO: 340243 - DNA, 25 bp, Homo sapien
ctgggcgacaagagtgaaactccgt

SEQ ID NO: 340244 - DNA, 25 bp, Homo sapien
gggcgacaagagtgaaactccgtct

SEQ ID NO: 340245 - DNA, 25 bp, Homo sapien
cccgtgaagaggcttgcttctccat

SEQ ID NO: 340246 - DNA, 25 bp, Homo sapien
ttttttcatatgtgggaaagcactc

SEQ ID NO: 340247 - DNA, 25 bp, Homo sapien
tgtgggaaagcactcttcataagct

SEQ ID NO: 340248 - DNA, 25 bp, Homo sapien
tgcaaggatgcaccctgtaatcagc

SEQ ID NO: 340249 - DNA, 25 bp, Homo sapien
ccgcagcttaactgtggcatgggct

SEQ ID NO: 340250 - DNA, 25 bp, Homo sapien
ggtgagcgtcatgcccacaaatgga

SEQ ID NO: 340251 - DNA, 25 bp, Homo sapien
aaggacttctcggtgctaggcactg

SEQ ID NO: 340252 - DNA, 25 bp, Homo sapien
acagggcagatgcaaagtagccgca

SEQ ID NO: 340253 - DNA, 25 bp, Homo sapien
tttcactgagaggacggaagacctt

SEQ ID NO: 340254 - DNA, 25 bp, Homo sapien
gaggaactggccctatcatgggaat

SEQ ID NO: 340255 - DNA, 25 bp, Homo sapien
gaccctgaagttacaatagctgccc

SEQ ID NO: 340256 - DNA, 25 bp, Homo sapien
gaagcttcgacctgcagaagtcgga

SEQ ID NO: 340257 - DNA, 25 bp, Homo sapien
tagaaatgagttgaccacagcagag

SEQ ID NO: 340258 - DNA, 25 bp, Homo sapien
gctttgggatttcctagaccagtga

SEQ ID NO: 340259 - DNA, 25 bp, Homo sapien
tgagtggaccaccatggctagaaat

SEQ ID NO: 340260 - DNA, 25 bp, Homo sapien
tgtgcccaccagaccacaaaggtga

SEQ ID NO: 340261 - DNA, 25 bp, Homo sapien
tgactcgcctagaccacaattctgg

SEQ ID NO: 340262 - DNA, 25 bp, Homo sapien
taggtccggccctaactagctctga

SEQ ID NO: 340263 - DNA, 25 bp, Homo sapien
gcttctgaagtaggacagcctgaca

SEQ ID NO: 340264 - DNA, 25 bp, Homo sapien
gatgcacagtgcaatcatttggcct

SEQ ID NO: 340265 - DNA, 25 bp, Homo sapien
gcccctgctagtgtgctggctcacg

SEQ ID NO: 340266 - DNA, 25 bp, Homo sapien
actgcggcagatggagggtcaaaca

SEQ ID NO: 340267 - DNA, 25 bp, Homo sapien
ttatcccgaaacactgaagcgtctt

SEQ ID NO: 340268 - DNA, 25 bp, Homo sapien
agtttctctgcatgtttgaggaaaa

SEQ ID NO: 340269 - DNA, 25 bp, Homo sapien
gaagaatcctcctggccttatccca

SEQ ID NO: 340270 - DNA, 25 bp, Homo sapien
aagaatcctcctggccttatcccaa

SEQ ID NO: 340271 - DNA, 25 bp, Homo sapien
ctgctttttgttgcctcagttattc

SEQ ID NO: 340272 - DNA, 25 bp, Homo sapien
gttgcctcagttattctctctgtaa

SEQ ID NO: 340273 - DNA, 25 bp, Homo sapien
caggagttgcatggtctttggtccc

SEQ ID NO: 340274 - DNA, 25 bp, Homo sapien
tgtgctagagtcaaactctcctaga

SEQ ID NO: 340275 - DNA, 25 bp, Homo sapien
gctctatatagtaggcataggcagg

SEQ ID NO: 340276 - DNA, 25 bp, Homo sapien
acactggcttgtaccccagggcctg

SEQ ID NO: 340277 - DNA, 25 bp, Homo sapien
cactagggttatggcgaaatcttac

SEQ ID NO: 340278 - DNA, 25 bp, Homo sapien
gaaccagggtctcgatttctggcct

SEQ ID NO: 340279 - DNA, 25 bp, Homo sapien
tgaaacatatcagccctgaccaggt

SEQ ID NO: 340280 - DNA, 25 bp, Homo sapien
cacttagctgttcagacacgagggc

SEQ ID NO: 340281 - DNA, 25 bp, Homo sapien
aagggatgttctcccataaagtagc

SEQ ID NO: 340282 - DNA, 25 bp, Homo sapien
gacatcagagaatcctagagtcctg

SEQ ID NO: 340283 - DNA, 25 bp, Homo sapien
tagagtcctgatccagaacctcttg

SEQ ID NO: 340284 - DNA, 25 bp, Homo sapien
gtagcttatgtagacatcaagacag

SEQ ID NO: 340285 - DNA, 25 bp, Homo sapien
ttacaaatagggatgcaacgagcat

SEQ ID NO: 340286 - DNA, 25 bp, Homo sapien
cattaggacaagcaccagagtggta

SEQ ID NO: 340287 - DNA, 25 bp, Homo sapien
gcaacttgttttggcctcaggacac

SEQ ID NO: 340288 - DNA, 25 bp, Homo sapien
caaactcatcgcaggatttcaggaa

SEQ ID NO: 340289 - DNA, 25 bp, Homo sapien
gcaatgtggaacagacggaaactcc

SEQ ID NO: 340290 - DNA, 25 bp, Homo sapien
gtcaggcagaacaaatgcagcaatg

SEQ ID NO: 340291 - DNA, 25 bp, Homo sapien
tcaggcagaacaaatgcagcaatgt

SEQ ID NO: 340292 - DNA, 25 bp, Homo sapien
aagtcaggcagaacaaatgcagcaa

SEQ ID NO: 340293 - DNA, 25 bp, Homo sapien
gaagctcatcttgcgaagctgaggg

SEQ ID NO: 340294 - DNA, 25 bp, Homo sapien
tgagggagctcagggcaaaggccag

SEQ ID NO: 340295 - DNA, 25 bp, Homo sapien
tgccagaacgctcaggacatcccgg

SEQ ID NO: 340296 - DNA, 25 bp, Homo sapien
accacaggtgctgggctttagagaa

SEQ ID NO: 340297 - DNA, 25 bp, Homo sapien
cagtctgtaaaacccgagcctggga

SEQ ID NO: 340298 - DNA, 25 bp, Homo sapien
ggaatttgcagacgctccctgctgg

SEQ ID NO: 340299 - DNA, 25 bp, Homo sapien
taaagagatgctggataagcccgag

SEQ ID NO: 340300 - DNA, 25 bp, Homo sapien
tcagtcctgggagcgattagcgcca

SEQ ID NO: 340301 - DNA, 25 bp, Homo sapien
ggaaaattacatcctcccatggagg

SEQ ID NO: 340302 - DNA, 25 bp, Homo sapien
ttgacagagtcaccccatggtggta

SEQ ID NO: 340303 - DNA, 25 bp, Homo sapien
gggcaaggaataggcccaagatcac

SEQ ID NO: 340304 - DNA, 25 bp, Homo sapien
aggagtgcagtaccagggacacctc

SEQ ID NO: 340305 - DNA, 25 bp, Homo sapien
atagcctgcccacggatgagctcag

SEQ ID NO: 340306 - DNA, 25 bp, Homo sapien
gctgaagatacaaggccagtgcctt

SEQ ID NO: 340307 - DNA, 25 bp, Homo sapien
tgagctcagccctccgtttgtttgt

SEQ ID NO: 340308 - DNA, 25 bp, Homo sapien
ctatttctgtcacctgtaggctgaa

SEQ ID NO: 340309 - DNA, 25 bp, Homo sapien
caggaggcggtattacaaggcaact

SEQ ID NO: 340310 - DNA, 25 bp, Homo sapien
gaggcggtattacaaggcaactgag

SEQ ID NO: 340311 - DNA, 25 bp, Homo sapien
gcaggaggcggtattacaaggcaac

SEQ ID NO: 340312 - DNA, 25 bp, Homo sapien
tataggcaggaggcggtattacaag

SEQ ID NO: 340313 - DNA, 25 bp, Homo sapien
tatgattatgccagatgtgactgcc

SEQ ID NO: 340314 - DNA, 25 bp, Homo sapien
tgagcgtgcaagtcagacaaagcct

SEQ ID NO: 340315 - DNA, 25 bp, Homo sapien
cactaacgtcacagagtcaggagga

SEQ ID NO: 340316 - DNA, 25 bp, Homo sapien
aagttgctcacagccatacggaagg

SEQ ID NO: 340317 - DNA, 25 bp, Homo sapien
ttatcatatttctgcatgccctcgt

SEQ ID NO: 340318 - DNA, 25 bp, Homo sapien
gcatgccctcgtcagggagcaggac

SEQ ID NO: 340319 - DNA, 25 bp, Homo sapien
gtgaagctgaccttcttggcgtgga

SEQ ID NO: 340320 - DNA, 25 bp, Homo sapien
agctgaccttcttggcgtggacaaa

SEQ ID NO: 340321 - DNA, 25 bp, Homo sapien
ataggtgttgtcgaagcgtaggaca

SEQ ID NO: 340322 - DNA, 25 bp, Homo sapien
tataggtgttgtcgaagcgtaggac

SEQ ID NO: 340323 - DNA, 25 bp, Homo sapien
taggtgttgtcgaagcgtaggacat

SEQ ID NO: 340324 - DNA, 25 bp, Homo sapien
ctataggtgttgtcgaagcgtagga

SEQ ID NO: 340325 - DNA, 25 bp, Homo sapien
gctttactggcatcgagaacaatgg

SEQ ID NO: 340326 - DNA, 25 bp, Homo sapien
aggcatggctttactggcatcgaga

SEQ ID NO: 340327 - DNA, 25 bp, Homo sapien
cgagaacaatggtcattacatccca

SEQ ID NO: 340328 - DNA, 25 bp, Homo sapien
ggcatcgagaacaatggtcattaca

SEQ ID NO: 340329 - DNA, 25 bp, Homo sapien
gagccaggtcccagctggggcagac

SEQ ID NO: 340330 - DNA, 25 bp, Homo sapien
caggtcccagctggggcagacttac

SEQ ID NO: 340331 - DNA, 25 bp, Homo sapien
gccaggtcccagctggggcagactt

SEQ ID NO: 340332 - DNA, 25 bp, Homo sapien
tcagagccaggtcccagctggggca

SEQ ID NO: 340333 - DNA, 25 bp, Homo sapien
cgatgtccgcaccatcagatgagaa

SEQ ID NO: 340334 - DNA, 25 bp, Homo sapien
ggaaaactccgaagccgatgtccgc

SEQ ID NO: 340335 - DNA, 25 bp, Homo sapien
gcgttatagcgctggctgggtagaa

SEQ ID NO: 340336 - DNA, 25 bp, Homo sapien
atcctcgggcaccatgtgggcgtta

SEQ ID NO: 340337 - DNA, 25 bp, Homo sapien
tgatgagccgcggttgatctgcacc

SEQ ID NO: 340338 - DNA, 25 bp, Homo sapien
tggtcccgcacgtacatggacttgg

SEQ ID NO: 340339 - DNA, 25 bp, Homo sapien
tcgtattccacttggtgtgatgagc

SEQ ID NO: 340340 - DNA, 25 bp, Homo sapien
gatctgcaccgagtgctcgtactga

SEQ ID NO: 340341 - DNA, 25 bp, Homo sapien
tcccatctgggtcagtcagggtgcc

SEQ ID NO: 340342 - DNA, 25 bp, Homo sapien
ttcccatctgggtcagtcagggtgc

SEQ ID NO: 340343 - DNA, 25 bp, Homo sapien
ttcctcaggactgatgagtttcagc

SEQ ID NO: 340344 - DNA, 25 bp, Homo sapien
tcatgaggttgtagcccacagggaa

SEQ ID NO: 340345 - DNA, 25 bp, Homo sapien
cacaataattttcctgcgagtgtcc

SEQ ID NO: 340346 - DNA, 25 bp, Homo sapien
cttcatgaggttgtagcccacaggg

SEQ ID NO: 340347 - DNA, 25 bp, Homo sapien
aattttcctgcgagtgtcctcactc

SEQ ID NO: 340348 - DNA, 25 bp, Homo sapien
taattctcttcaaggaggccaaaga

SEQ ID NO: 340349 - DNA, 25 bp, Homo sapien
ggaaccaagagagatcccttcagag

SEQ ID NO: 340350 - DNA, 25 bp, Homo sapien
ctgtggaaccaagagagatcccttc

SEQ ID NO: 340351 - DNA, 25 bp, Homo sapien
cttcagagagcacatcacatcttct

SEQ ID NO: 340352 - DNA, 25 bp, Homo sapien
aagagagatcccttcagagagcaca

SEQ ID NO: 340353 - DNA, 25 bp, Homo sapien
caaatatcatcacgatggtctcaat

SEQ ID NO: 340354 - DNA, 25 bp, Homo sapien
caggccctcacagtcaaatatcatc

SEQ ID NO: 340355 - DNA, 25 bp, Homo sapien
tcctggtacacttctaccagaggtt

SEQ ID NO: 340356 - DNA, 25 bp, Homo sapien
acacttctaccagaggtttccagaa

SEQ ID NO: 340357 - DNA, 25 bp, Homo sapien
ctgcccccagccatccaccccacct

SEQ ID NO: 340358 - DNA, 25 bp, Homo sapien
cccccagccatccaccccacctggc

SEQ ID NO: 340359 - DNA, 25 bp, Homo sapien
tccaccccacctggcctggacctca

SEQ ID NO: 340360 - DNA, 25 bp, Homo sapien
ccaccccacctggcctggacctcac

SEQ ID NO: 340361 - DNA, 25 bp, Homo sapien
ccccaggcatgtacttctggatcac

SEQ ID NO: 340362 - DNA, 25 bp, Homo sapien
gagcaaccccttgggatcaagtggc

SEQ ID NO: 340363 - DNA, 25 bp, Homo sapien
gcaggtcctgcttggtgactgagaa

SEQ ID NO: 340364 - DNA, 25 bp, Homo sapien
cacactcatgcaggatgcgctcaca

SEQ ID NO: 340365 - DNA, 25 bp, Homo sapien
actgaggtgtttggcggtgttggct

SEQ ID NO: 340366 - DNA, 25 bp, Homo sapien
cttgagtggtacgtccgtgaaagac

SEQ ID NO: 340367 - DNA, 25 bp, Homo sapien
tacgtccgtgaaagactgaggtgtt

SEQ ID NO: 340368 - DNA, 25 bp, Homo sapien
tggtacgtccgtgaaagactgaggt

SEQ ID NO: 340369 - DNA, 25 bp, Homo sapien
caatcaaggatatggtcaatatcca

SEQ ID NO: 340370 - DNA, 25 bp, Homo sapien
ggatatggtcaatatccatggtctt

SEQ ID NO: 340371 - DNA, 25 bp, Homo sapien
tgccaatcaaggatatggtcaatat

SEQ ID NO: 340372 - DNA, 25 bp, Homo sapien
tcaaggatatggtcaatatccatgg

SEQ ID NO: 340373 - DNA, 25 bp, Homo sapien
gagtggtaagatcccactgggctcc

SEQ ID NO: 340374 - DNA, 25 bp, Homo sapien
aaatgagtggtaagatcccactggg

SEQ ID NO: 340375 - DNA, 25 bp, Homo sapien
agggaaatgagtggtaagatcccac

SEQ ID NO: 340376 - DNA, 25 bp, Homo sapien
tgagtggtaagatcccactgggctc

SEQ ID NO: 340377 - DNA, 25 bp, Homo sapien
cttgcggagcaaagcctccgacttc

SEQ ID NO: 340378 - DNA, 25 bp, Homo sapien
tgcggagcaaagcctccgacttctg

SEQ ID NO: 340379 - DNA, 25 bp, Homo sapien
gcggagcaaagcctccgacttctgc

SEQ ID NO: 340380 - DNA, 25 bp, Homo sapien
ttgcggagcaaagcctccgacttct

SEQ ID NO: 340381 - DNA, 25 bp, Homo sapien
aggaagcacatcctggacgttttct

SEQ ID NO: 340382 - DNA, 25 bp, Homo sapien
gcacatcctggacgttttctcggaa

SEQ ID NO: 340383 - DNA, 25 bp, Homo sapien
ctcggagccagcgtagaaggaaata

SEQ ID NO: 340384 - DNA, 25 bp, Homo sapien
aggaaataatcatcagggttgggca

SEQ ID NO: 340385 - DNA, 25 bp, Homo sapien
caggtaaacctctctggttctggct

SEQ ID NO: 340386 - DNA, 25 bp, Homo sapien
gctgccaggtaaacctctctggttc

SEQ ID NO: 340387 - DNA, 25 bp, Homo sapien
aggtaaacctctctggttctggctc

SEQ ID NO: 340388 - DNA, 25 bp, Homo sapien
ctggctgccaggtaaacctctctgg

SEQ ID NO: 340389 - DNA, 25 bp, Homo sapien
tcaggtctccaactcggccgctcat

SEQ ID NO: 340390 - DNA, 25 bp, Homo sapien
tggtggccactataggcaagaggcc

SEQ ID NO: 340391 - DNA, 25 bp, Homo sapien
ggccactataggcaagaggccaagc

SEQ ID NO: 340392 - DNA, 25 bp, Homo sapien
ccactataggcaagaggccaagcct

SEQ ID NO: 340393 - DNA, 25 bp, Homo sapien
aggagtggtggccactataggcaag

SEQ ID NO: 340394 - DNA, 25 bp, Homo sapien
ccagtgctcatagaagaagcgtaat

SEQ ID NO: 340395 - DNA, 25 bp, Homo sapien
gtgctcatagaagaagcgtaataac

SEQ ID NO: 340396 - DNA, 25 bp, Homo sapien
aaaccagtgctcatagaagaagcgt

SEQ ID NO: 340397 - DNA, 25 bp, Homo sapien
aaccagtgctcatagaagaagcgta

SEQ ID NO: 340398 - DNA, 25 bp, Homo sapien
cctgctcaggtcgtttctgccttca

SEQ ID NO: 340399 - DNA, 25 bp, Homo sapien
ggtgccttattggacacatcctggt

SEQ ID NO: 340400 - DNA, 25 bp, Homo sapien
ccgcagagagtgagatcctcctggg

SEQ ID NO: 340401 - DNA, 25 bp, Homo sapien
gatgctgtccacaatcaggactgcc

SEQ ID NO: 340402 - DNA, 25 bp, Homo sapien
tttcagtgggaccaggttcccaggc

SEQ ID NO: 340403 - DNA, 25 bp, Homo sapien
cagtgggaccaggttcccaggccct

SEQ ID NO: 340404 - DNA, 25 bp, Homo sapien
tggtttcagtgggaccaggttccca

SEQ ID NO: 340405 - DNA, 25 bp, Homo sapien
gtgggaccaggttcccaggccctgc

SEQ ID NO: 340406 - DNA, 25 bp, Homo sapien
aagggttggatcacttcagggatga

SEQ ID NO: 340407 - DNA, 25 bp, Homo sapien
gagctcagagtcatcaggttcctgc

SEQ ID NO: 340408 - DNA, 25 bp, Homo sapien
gggtcccttgactcatcaatatctc

SEQ ID NO: 340409 - DNA, 25 bp, Homo sapien
catcaatatctctagagccagagag

SEQ ID NO: 340410 - DNA, 25 bp, Homo sapien
tggtaccgccatccagagagggtga

SEQ ID NO: 340411 - DNA, 25 bp, Homo sapien
tctggagaagtttggcccctaggcg

SEQ ID NO: 340412 - DNA, 25 bp, Homo sapien
gggttgatgacctcagtttcttgga

SEQ ID NO: 340413 - DNA, 25 bp, Homo sapien
ttccagtagggatctggagaagttt

SEQ ID NO: 340414 - DNA, 25 bp, Homo sapien
ttcttgggtctctctgaagtagtgg

SEQ ID NO: 340415 - DNA, 25 bp, Homo sapien
ctcttcttgggtctctctgaagtag

SEQ ID NO: 340416 - DNA, 25 bp, Homo sapien
gggtctctctgaagtagtgggtcat

SEQ ID NO: 340417 - DNA, 25 bp, Homo sapien
ttgggtctctctgaagtagtgggtc

SEQ ID NO: 340418 - DNA, 25 bp, Homo sapien
gaacttggcttcaaccggcctggaa

SEQ ID NO: 340419 - DNA, 25 bp, Homo sapien
gatctaaaacgaggtcaggctgcct

SEQ ID NO: 340420 - DNA, 25 bp, Homo sapien
ggaaaacacgcccatgggtccttga

SEQ ID NO: 340421 - DNA, 25 bp, Homo sapien
aaagtaaccttccaatgagcccatg

SEQ ID NO: 340422 - DNA, 25 bp, Homo sapien
taggaaataccagtgagttgttacc

SEQ ID NO: 340423 - DNA, 25 bp, Homo sapien
gtgagttgttaccagcgttgcccca

SEQ ID NO: 340424 - DNA, 25 bp, Homo sapien
tgtgtacacagttatccatgaagaa

SEQ ID NO: 340425 - DNA, 25 bp, Homo sapien
ttgttaccagcgttgccccaggctg

SEQ ID NO: 340426 - DNA, 25 bp, Homo sapien
atcatcccgcacatccgacagctct

SEQ ID NO: 340427 - DNA, 25 bp, Homo sapien
gccatcatcccgcacatccgacagc

SEQ ID NO: 340428 - DNA, 25 bp, Homo sapien
tcctgtctggaaggctcgcctgcca

SEQ ID NO: 340429 - DNA, 25 bp, Homo sapien
tcgcctgccatcatcccgcacatcc

SEQ ID NO: 340430 - DNA, 25 bp, Homo sapien
cggttaatacagttgggtcagccca

SEQ ID NO: 340431 - DNA, 25 bp, Homo sapien
gcagaacaaacttggatgggcccca

SEQ ID NO: 340432 - DNA, 25 bp, Homo sapien
cttggacaaagcatacgtgacccct

SEQ ID NO: 340433 - DNA, 25 bp, Homo sapien
caggcctgaagctgtgatgtccaca

SEQ ID NO: 340434 - DNA, 25 bp, Homo sapien
tcctcagaggccttgtcgggaagca

SEQ ID NO: 340435 - DNA, 25 bp, Homo sapien
gggtctcatcgccttgagactctgc

SEQ ID NO: 340436 - DNA, 25 bp, Homo sapien
cctcagaggccttgtcgggaagcag

SEQ ID NO: 340437 - DNA, 25 bp, Homo sapien
ggggagggtctcatcgccttgagac

SEQ ID NO: 340438 - DNA, 25 bp, Homo sapien
gcttcttggcatgcatccggctgta

SEQ ID NO: 340439 - DNA, 25 bp, Homo sapien
cttggcatgcatccggctgtaggtg

SEQ ID NO: 340440 - DNA, 25 bp, Homo sapien
ttcttggcatgcatccggctgtagg

SEQ ID NO: 340441 - DNA, 25 bp, Homo sapien
gagcttcttggcatgcatccggctg

SEQ ID NO: 340442 - DNA, 25 bp, Homo sapien
gatggagaggtgatcagggagcaca

SEQ ID NO: 340443 - DNA, 25 bp, Homo sapien
tgcagtgatggagaggtgatcaggg

SEQ ID NO: 340444 - DNA, 25 bp, Homo sapien
gaggtgatcagggagcacaaacccc

SEQ ID NO: 340445 - DNA, 25 bp, Homo sapien
atcagggagcacaaaccccgcacat

SEQ ID NO: 340446 - DNA, 25 bp, Homo sapien
cgtcatctccctagcactctgctgc

SEQ ID NO: 340447 - DNA, 25 bp, Homo sapien
ccatgtgggcattgtagcgctggct

SEQ ID NO: 340448 - DNA, 25 bp, Homo sapien
tcaggaaaaccccaaagccgatgtc

SEQ ID NO: 340449 - DNA, 25 bp, Homo sapien
tcctcaggcaccatgtgggcattgt

SEQ ID NO: 340450 - DNA, 25 bp, Homo sapien
gcacaggtagtagctcttgggcacc

SEQ ID NO: 340451 - DNA, 25 bp, Homo sapien
ggcccacggacctcgtgtgctcata

SEQ ID NO: 340452 - DNA, 25 bp, Homo sapien
ccgggaacaggatctcgttctccac

SEQ ID NO: 340453 - DNA, 25 bp, Homo sapien
acacagcccgggaacaggatctcgt

SEQ ID NO: 340454 - DNA, 25 bp, Homo sapien
ttggtcaggcacttggggttgccat

SEQ ID NO: 340455 - DNA, 25 bp, Homo sapien
gccatcggggtcagtcatggtcccc

SEQ ID NO: 340456 - DNA, 25 bp, Homo sapien
tgccatcggggtcagtcatggtccc

SEQ ID NO: 340457 - DNA, 25 bp, Homo sapien
gttgccatcggggtcagtcatggtc

SEQ ID NO: 340458 - DNA, 25 bp, Homo sapien
gtctaggacccaaggcattgcccgt

SEQ ID NO: 340459 - DNA, 25 bp, Homo sapien
agagagggactccaaagggactcag

SEQ ID NO: 340460 - DNA, 25 bp, Homo sapien
gaacctgatatgtcctgggcgtgct

SEQ ID NO: 340461 - DNA, 25 bp, Homo sapien
cattgcccgtgcgtgtggaggctca

SEQ ID NO: 340462 - DNA, 25 bp, Homo sapien
cgacttgaccaagttgaaggccacg

SEQ ID NO: 340463 - DNA, 25 bp, Homo sapien
tgtctcctcactcatgaacgacttg

SEQ ID NO: 340464 - DNA, 25 bp, Homo sapien
cactcatgaacgacttgaccaagtt

SEQ ID NO: 340465 - DNA, 25 bp, Homo sapien
ctgcgtgtctcctcactcatgaacg

SEQ ID NO: 340466 - DNA, 25 bp, Homo sapien
aaacacatgtaaatctcttgagaag

SEQ ID NO: 340467 - DNA, 25 bp, Homo sapien
ctgaaacacatgtaaatctcttgag

SEQ ID NO: 340468 - DNA, 25 bp, Homo sapien
tgaaacacatgtaaatctcttgaga

SEQ ID NO: 340469 - DNA, 25 bp, Homo sapien
gaaacacatgtaaatctcttgagaa

SEQ ID NO: 340470 - DNA, 25 bp, Homo sapien
taatttgcttccaggatgctaaaaa

SEQ ID NO: 340471 - DNA, 25 bp, Homo sapien
aatttgcttccaggatgctaaaaaa

SEQ ID NO: 340472 - DNA, 25 bp, Homo sapien
ctctttgtgttaatcttgctcccct

SEQ ID NO: 340473 - DNA, 25 bp, Homo sapien
ttcacagctagggctcacagctggg

SEQ ID NO: 340474 - DNA, 25 bp, Homo sapien
gggtggtctctaggccagcatcatt

SEQ ID NO: 340475 - DNA, 25 bp, Homo sapien
taggccagcatcattggctggtctg

SEQ ID NO: 340476 - DNA, 25 bp, Homo sapien
agcccctccatgtcaaacaccatca

SEQ ID NO: 340477 - DNA, 25 bp, Homo sapien
catcagcgccatctcgatcttcctg

SEQ ID NO: 340478 - DNA, 25 bp, Homo sapien
gcgccatctcgatcttcctgcccag

SEQ ID NO: 340479 - DNA, 25 bp, Homo sapien
atgtcaaacaccatcagcgccatct

SEQ ID NO: 340480 - DNA, 25 bp, Homo sapien
cacagactttgatgcgcttccggat

SEQ ID NO: 340481 - DNA, 25 bp, Homo sapien
acagggcagccttcgtagtcgtagc

SEQ ID NO: 340482 - DNA, 25 bp, Homo sapien
caatgatgttgaagtacacagggca

SEQ ID NO: 340483 - DNA, 25 bp, Homo sapien
aagaccacccgagtcatacagctgg

SEQ ID NO: 340484 - DNA, 25 bp, Homo sapien
tcagggggctgccatgtgacaatgt

SEQ ID NO: 340485 - DNA, 25 bp, Homo sapien
gggctgccatgtgacaatgttgtcc

SEQ ID NO: 340486 - DNA, 25 bp, Homo sapien
ccaggtcttgttgcttccggaactc

SEQ ID NO: 340487 - DNA, 25 bp, Homo sapien
ggtcttgttgcttccggaactccat

SEQ ID NO: 340488 - DNA, 25 bp, Homo sapien
ggctctcagagcgtggggacaggag

SEQ ID NO: 340489 - DNA, 25 bp, Homo sapien
acaggaggtgggctggggggacttg

SEQ ID NO: 340490 - DNA, 25 bp, Homo sapien
aggctctcagagcgtggggacagga

SEQ ID NO: 340491 - DNA, 25 bp, Homo sapien
ctctcagagcgtggggacaggaggt

SEQ ID NO: 340492 - DNA, 25 bp, Homo sapien
ccttcggagcatgtcttcggatttc

SEQ ID NO: 340493 - DNA, 25 bp, Homo sapien
ttcggagcatgtcttcggatttctg

SEQ ID NO: 340494 - DNA, 25 bp, Homo sapien
cggagcatgtcttcggatttctgca

SEQ ID NO: 340495 - DNA, 25 bp, Homo sapien
ggagcatgtcttcggatttctgcag

SEQ ID NO: 340496 - DNA, 25 bp, Homo sapien
atcagcattgggcagtatgggcagc

SEQ ID NO: 340497 - DNA, 25 bp, Homo sapien
catcagcattgggcagtatgggcag

SEQ ID NO: 340498 - DNA, 25 bp, Homo sapien
tcatcagcattgggcagtatgggca

SEQ ID NO: 340499 - DNA, 25 bp, Homo sapien
gtcatcagcattgggcagtatgggc

SEQ ID NO: 340500 - DNA, 25 bp, Homo sapien
caccagaagaccatgcagggtgctg

SEQ ID NO: 340501 - DNA, 25 bp, Homo sapien
tgggagtgccctacacactggactc

SEQ ID NO: 340502 - DNA, 25 bp, Homo sapien
gctgccctgaacgactttgccatct

SEQ ID NO: 340503 - DNA, 25 bp, Homo sapien
tgatggtcggcggagctctcatgac

SEQ ID NO: 340504 - DNA, 25 bp, Homo sapien
gctgggggctcaggtccccgactcg

SEQ ID NO: 340505 - DNA, 25 bp, Homo sapien
cctggccagcgcttcctgctgctgg

SEQ ID NO: 340506 - DNA, 25 bp, Homo sapien
tcaggtccccgactcggctgctcat

SEQ ID NO: 340507 - DNA, 25 bp, Homo sapien
ctggccagcgcttcctgctgctggg

SEQ ID NO: 340508 - DNA, 25 bp, Homo sapien
ggtgcccgcgggcgcagaaaggctc

SEQ ID NO: 340509 - DNA, 25 bp, Homo sapien
gtgcccgcgggcgcagaaaggctca

SEQ ID NO: 340510 - DNA, 25 bp, Homo sapien
ccgccgcctggccttgtatccgctg

SEQ ID NO: 340511 - DNA, 25 bp, Homo sapien
gttggaaggataagaggacgcaccc

SEQ ID NO: 340512 - DNA, 25 bp, Homo sapien
ggattagggatgtgaaccaccatac

SEQ ID NO: 340513 - DNA, 25 bp, Homo sapien
cctgccctcaagatggttggaagga

SEQ ID NO: 340514 - DNA, 25 bp, Homo sapien
tgctcactgactgataggacagcct

SEQ ID NO: 340515 - DNA, 25 bp, Homo sapien
tggcctgccaactgaagagaactcc

SEQ ID NO: 340516 - DNA, 25 bp, Homo sapien
ccggtggcctgccaactgaagagaa

SEQ ID NO: 340517 - DNA, 25 bp, Homo sapien
atgctgacagccctcattaaagccg

SEQ ID NO: 340518 - DNA, 25 bp, Homo sapien
tcatttgccacaggtcccatgctga

SEQ ID NO: 340519 - DNA, 25 bp, Homo sapien
caccacatttgccatgctcatcgtg

SEQ ID NO: 340520 - DNA, 25 bp, Homo sapien
ttgccatgctcatcgtggtacccat

SEQ ID NO: 340521 - DNA, 25 bp, Homo sapien
catttgccatgctcatcgtggtacc

SEQ ID NO: 340522 - DNA, 25 bp, Homo sapien
cccgttaactctcaccacatttgcc

SEQ ID NO: 340523 - DNA, 25 bp, Homo sapien
gatcgcaggacagcactctagtagg

SEQ ID NO: 340524 - DNA, 25 bp, Homo sapien
tctagtaggactgtgggctgacacc

SEQ ID NO: 340525 - DNA, 25 bp, Homo sapien
tcagatgctataacagtgggaggga

SEQ ID NO: 340526 - DNA, 25 bp, Homo sapien
gaggttttgctaatcctggagggcc

SEQ ID NO: 340527 - DNA, 25 bp, Homo sapien
tgtcccagccgttcctgaggagtgg

SEQ ID NO: 340528 - DNA, 25 bp, Homo sapien
ttgctttgctgtgaccatcgggcca

SEQ ID NO: 340529 - DNA, 25 bp, Homo sapien
tctgggagcagtacctccacggtgt

SEQ ID NO: 340530 - DNA, 25 bp, Homo sapien
tgatgcgtttagaatgaaccaggct

SEQ ID NO: 340531 - DNA, 25 bp, Homo sapien
gaggcaggtgagaatcccatcttca

SEQ ID NO: 340532 - DNA, 25 bp, Homo sapien
tcaggcaccatgtgggcattgtagc

SEQ ID NO: 340533 - DNA, 25 bp, Homo sapien
ccatgtgggcattgtagcgctggct

SEQ ID NO: 340534 - DNA, 25 bp, Homo sapien
ctgtcatctccctagccctctgccg

SEQ ID NO: 340535 - DNA, 25 bp, Homo sapien
gcacaggtagtagctcttgggcacc

SEQ ID NO: 340536 - DNA, 25 bp, Homo sapien
ccgggaacaggatctcgttctccac

SEQ ID NO: 340537 - DNA, 25 bp, Homo sapien
acacagcccgggaacaggatctcgt

SEQ ID NO: 340538 - DNA, 25 bp, Homo sapien
ggcccacggacctcgtgtgctcata

SEQ ID NO: 340539 - DNA, 25 bp, Homo sapien
ttggtcaggcacttggggttgccat

SEQ ID NO: 340540 - DNA, 25 bp, Homo sapien
gccatcggggtcagtcatggtcccc

SEQ ID NO: 340541 - DNA, 25 bp, Homo sapien
tgccatcggggtcagtcatggtccc

SEQ ID NO: 340542 - DNA, 25 bp, Homo sapien
gttgccatcggggtcagtcatggtc

SEQ ID NO: 340543 - DNA, 25 bp, Homo sapien
tttgtcagctcctgcttccagttgt

SEQ ID NO: 340544 - DNA, 25 bp, Homo sapien
ttttgtcagctcctgcttccagttg

SEQ ID NO: 340545 - DNA, 25 bp, Homo sapien
ctcaacaccagttgggtgccctaca

SEQ ID NO: 340546 - DNA, 25 bp, Homo sapien
ggtgccctacaccttcggatgcagg

SEQ ID NO: 340547 - DNA, 25 bp, Homo sapien
cagttgggtgccctacaccttcgga

SEQ ID NO: 340548 - DNA, 25 bp, Homo sapien
cctacaccttcggatgcaggaacca

SEQ ID NO: 340549 - DNA, 25 bp, Homo sapien
ccaggttgaaggctacggcgaatag

SEQ ID NO: 340550 - DNA, 25 bp, Homo sapien
tcatgtaagacttgaccaggttgaa

SEQ ID NO: 340551 - DNA, 25 bp, Homo sapien
ctgcgtgtctcttcactcatgtaag

SEQ ID NO: 340552 - DNA, 25 bp, Homo sapien
ggttgaaggctacggcgaatagctt

SEQ ID NO: 340553 - DNA, 25 bp, Homo sapien
aattaaactcttcaagatctcaggg

SEQ ID NO: 340554 - DNA, 25 bp, Homo sapien
cagggtaatttgcttcaagtgctga

SEQ ID NO: 340555 - DNA, 25 bp, Homo sapien
tctcacaacaattaaactcttcaag

SEQ ID NO: 340556 - DNA, 25 bp, Homo sapien
caagatctcagggtaatttgcttca

SEQ ID NO: 340557 - DNA, 25 bp, Homo sapien
aaactgagatattgtccgggcgtgg

SEQ ID NO: 340558 - DNA, 25 bp, Homo sapien
cattcacgactgtggaaggttccct

SEQ ID NO: 340559 - DNA, 25 bp, Homo sapien
aaggttccctcccacgtgagtcaga

SEQ ID NO: 340560 - DNA, 25 bp, Homo sapien
ggcctagtgccgattcttgacagat

SEQ ID NO: 340561 - DNA, 25 bp, Homo sapien
gcccagcccttcgagaccaaaaata

SEQ ID NO: 340562 - DNA, 25 bp, Homo sapien
ttcctggcttccacagatccctcag

SEQ ID NO: 340563 - DNA, 25 bp, Homo sapien
ccttcgagaccaaaaatagctatga

SEQ ID NO: 340564 - DNA, 25 bp, Homo sapien
tcctggagaagctctattcctggct

SEQ ID NO: 340565 - DNA, 25 bp, Homo sapien
ccgtcgtggccgcatatgccgttag

SEQ ID NO: 340566 - DNA, 25 bp, Homo sapien
cgcagctccggaagctgtccctgag

SEQ ID NO: 340567 - DNA, 25 bp, Homo sapien
cctgagcaactcctgtttggaggct

SEQ ID NO: 340568 - DNA, 25 bp, Homo sapien
cgttagcgttgtacagcctgaccac

SEQ ID NO: 340569 - DNA, 25 bp, Homo sapien
gggctgccaggcaaggatgttggcc

SEQ ID NO: 340570 - DNA, 25 bp, Homo sapien
ctgccaggcaaggatgttggccagg

SEQ ID NO: 340571 - DNA, 25 bp, Homo sapien
ggggctgccaggcaaggatgttggc

SEQ ID NO: 340572 - DNA, 25 bp, Homo sapien
gggggctgccaggcaaggatgttgg

SEQ ID NO: 340573 - DNA, 25 bp, Homo sapien
cttcctcagcatgtcctctgatttc

SEQ ID NO: 340574 - DNA, 25 bp, Homo sapien
agctttgtctcctgttacccagagg

SEQ ID NO: 340575 - DNA, 25 bp, Homo sapien
caatggctgagatatccggagaccc

SEQ ID NO: 340576 - DNA, 25 bp, Homo sapien
gagacccaggaacactggacacagg

SEQ ID NO: 340577 - DNA, 25 bp, Homo sapien
cacaatggctgagatatccggagac

SEQ ID NO: 340578 - DNA, 25 bp, Homo sapien
tggctgagatatccggagacccagg

SEQ ID NO: 340579 - DNA, 25 bp, Homo sapien
tcaagagagatagcctagccaggca

SEQ ID NO: 340580 - DNA, 25 bp, Homo sapien
gcgagcgagcaagcctaatttccct

SEQ ID NO: 340581 - DNA, 25 bp, Homo sapien
ccagtgcctggtacagaataagtgc

SEQ ID NO: 340582 - DNA, 25 bp, Homo sapien
gagtcacccatgctcgctaaactga

SEQ ID NO: 340583 - DNA, 25 bp, Homo sapien
tcaggattgggcagcgcagatagca

SEQ ID NO: 340584 - DNA, 25 bp, Homo sapien
gtcatcaggattgggcagcgcagat

SEQ ID NO: 340585 - DNA, 25 bp, Homo sapien
atcaggattgggcagcgcagatagc

SEQ ID NO: 340586 - DNA, 25 bp, Homo sapien
gtagtcatcaggattgggcagcgca

SEQ ID NO: 340587 - DNA, 25 bp, Homo sapien
tgggaagcgggagtagccgcgcggc

SEQ ID NO: 340588 - DNA, 25 bp, Homo sapien
tccccaggccaccttaagaggacga

SEQ ID NO: 340589 - DNA, 25 bp, Homo sapien
gcagcgctgacctcagaaaaacaag

SEQ ID NO: 340590 - DNA, 25 bp, Homo sapien
taagaggacgatgtagccagctcgc

SEQ ID NO: 340591 - DNA, 25 bp, Homo sapien
gcgacttctcctgcgatgggctcag

SEQ ID NO: 340592 - DNA, 25 bp, Homo sapien
ttctcctgcgatgggctcaggtcac

SEQ ID NO: 340593 - DNA, 25 bp, Homo sapien
acttctcctgcgatgggctcaggtc

SEQ ID NO: 340594 - DNA, 25 bp, Homo sapien
gccagcgacttctcctgcgatgggc

SEQ ID NO: 340595 - DNA, 25 bp, Homo sapien
cacaacatcaaattcctttacttct

SEQ ID NO: 340596 - DNA, 25 bp, Homo sapien
acatcaaattcctttacttctgagg

SEQ ID NO: 340597 - DNA, 25 bp, Homo sapien
caaattcctttacttctgaggtctc

SEQ ID NO: 340598 - DNA, 25 bp, Homo sapien
ttaaggggaggcagaaatagaacat

SEQ ID NO: 340599 - DNA, 25 bp, Homo sapien
ctcggttaggccctctctgtgttca

SEQ ID NO: 340600 - DNA, 25 bp, Homo sapien
tagttaaatactgatctcggttagg

SEQ ID NO: 340601 - DNA, 25 bp, Homo sapien
aggcaagccgctgggcggtgggacg

SEQ ID NO: 340602 - DNA, 25 bp, Homo sapien
gagcgagcaggcaggcaagccgctg

SEQ ID NO: 340603 - DNA, 25 bp, Homo sapien
ttggcgccgaggtccatcaggtact

SEQ ID NO: 340604 - DNA, 25 bp, Homo sapien
gatgctcttcttgaggttgtagccc

SEQ ID NO: 340605 - DNA, 25 bp, Homo sapien
tcaccaccgcaggaaatcgcgaatg

SEQ ID NO: 340606 - DNA, 25 bp, Homo sapien
gatggtccgcatgcgctcgttggca

SEQ ID NO: 340607 - DNA, 25 bp, Homo sapien
agcacagcaggtccttcagcagcac

SEQ ID NO: 340608 - DNA, 25 bp, Homo sapien
ttcagcagcaccagcgactcgtcga

SEQ ID NO: 340609 - DNA, 25 bp, Homo sapien
agcagcaccagcgactcgtcgaagt

SEQ ID NO: 340610 - DNA, 25 bp, Homo sapien
gcagcaccagcgactcgtcgaagta

SEQ ID NO: 340611 - DNA, 25 bp, Homo sapien
tcgtagtagcgatccgggtcttgca

SEQ ID NO: 340612 - DNA, 25 bp, Homo sapien
tagcccaggtcgaagaagagcaggt

SEQ ID NO: 340613 - DNA, 25 bp, Homo sapien
tcttgcaggaactcggtcagcttgt

SEQ ID NO: 340614 - DNA, 25 bp, Homo sapien
ctcttgaaggagcaccaggtggaag

SEQ ID NO: 340615 - DNA, 25 bp, Homo sapien
gcacctcgtcgtagtggaagcgcat

SEQ ID NO: 340616 - DNA, 25 bp, Homo sapien
gaacttgagccggtgcttctggccg

SEQ ID NO: 340617 - DNA, 25 bp, Homo sapien
tagtcgaagtcattgcggccgttag

SEQ ID NO: 340618 - DNA, 25 bp, Homo sapien
caccgtgatgaagatggcgttggtc

SEQ ID NO: 340619 - DNA, 25 bp, Homo sapien
cactgcctctggctcgagtgcaggt

SEQ ID NO: 340620 - DNA, 25 bp, Homo sapien
cttcaagaacacgatgttgcgccgc

SEQ ID NO: 340621 - DNA, 25 bp, Homo sapien
cgccgagccgttggcccggatcact

SEQ ID NO: 340622 - DNA, 25 bp, Homo sapien
aggtggagagcaggacgctgcggcc

SEQ ID NO: 340623 - DNA, 25 bp, Homo sapien
aggaaactagtgaagagcgcgccca

SEQ ID NO: 340624 - DNA, 25 bp, Homo sapien
gcacggcataggagtacaccagcag

SEQ ID NO: 340625 - DNA, 25 bp, Homo sapien
cccttagccatggactcccagggct

SEQ ID NO: 340626 - DNA, 25 bp, Homo sapien
accagcagcaggaaactagtgaaga

SEQ ID NO: 340627 - DNA, 25 bp, Homo sapien
tgcagagacggtgggtgaagcaact

SEQ ID NO: 340628 - DNA, 25 bp, Homo sapien
gcccaggcctggcagttgagccctg

SEQ ID NO: 340629 - DNA, 25 bp, Homo sapien
gcactggagagatagactgacaacc

SEQ ID NO: 340630 - DNA, 25 bp, Homo sapien
gatagactgacaaccacctggaaag

SEQ ID NO: 340631 - DNA, 25 bp, Homo sapien
gcctgagttccagtgagccatgact

SEQ ID NO: 340632 - DNA, 25 bp, Homo sapien
agcctgagttccagtgagccatgac

SEQ ID NO: 340633 - DNA, 25 bp, Homo sapien
gagcctgagttccagtgagccatga

SEQ ID NO: 340634 - DNA, 25 bp, Homo sapien
gtggaggcgctgaggttcaggccca

SEQ ID NO: 340635 - DNA, 25 bp, Homo sapien
ggaggctgcaatagtggaggcgctg

SEQ ID NO: 340636 - DNA, 25 bp, Homo sapien
tgcaatagtggaggcgctgaggttc

SEQ ID NO: 340637 - DNA, 25 bp, Homo sapien
caaggtaccttctggaatcagggag

SEQ ID NO: 340638 - DNA, 25 bp, Homo sapien
ccaactcccaggctgcctctgcgat

SEQ ID NO: 340639 - DNA, 25 bp, Homo sapien
tggctgcccctttctacccactgcc

SEQ ID NO: 340640 - DNA, 25 bp, Homo sapien
caggctgcctctgcgatcactggga

SEQ ID NO: 340641 - DNA, 25 bp, Homo sapien
ggctggctgcccctttctacccact

SEQ ID NO: 340642 - DNA, 25 bp, Homo sapien
cagcctgatgacccccatgggcacc

SEQ ID NO: 340643 - DNA, 25 bp, Homo sapien
agcctgatgacccccatgggcacct

SEQ ID NO: 340644 - DNA, 25 bp, Homo sapien
ccagcctgatgacccccatgggcac

SEQ ID NO: 340645 - DNA, 25 bp, Homo sapien
gcctgatgacccccatgggcacctg

SEQ ID NO: 340646 - DNA, 25 bp, Homo sapien
tgcagccgggcccagaattccattt

SEQ ID NO: 340647 - DNA, 25 bp, Homo sapien
tgtgcatcattctctcaggttaatc

SEQ ID NO: 340648 - DNA, 25 bp, Homo sapien
gcagccgggcccagaattccatttg

SEQ ID NO: 340649 - DNA, 25 bp, Homo sapien
acccagtcaaagtgaagcaaggagc

SEQ ID NO: 340650 - DNA, 25 bp, Homo sapien
ctcactgggcggcggggcgcacccg

SEQ ID NO: 340651 - DNA, 25 bp, Homo sapien
cgcccgctcccggccaggtgccgcc

SEQ ID NO: 340652 - DNA, 25 bp, Homo sapien
cgctcactgggcggcggggcgcacc

SEQ ID NO: 340653 - DNA, 25 bp, Homo sapien
gcgctcactgggcggcggggcgcac

SEQ ID NO: 340654 - DNA, 25 bp, Homo sapien
gaatcacgggtccaactgtgtggga

SEQ ID NO: 340655 - DNA, 25 bp, Homo sapien
agctccatccaagggaagcgagggc

SEQ ID NO: 340656 - DNA, 25 bp, Homo sapien
ctcctgggagcagagaatcaggctg

SEQ ID NO: 340657 - DNA, 25 bp, Homo sapien
ggtccatcacacttaggtcctctgg

SEQ ID NO: 340658 - DNA, 25 bp, Homo sapien
ttcttggccttcttctcagacctca

SEQ ID NO: 340659 - DNA, 25 bp, Homo sapien
gccttcttggccttcttctcagacc

SEQ ID NO: 340660 - DNA, 25 bp, Homo sapien
ccttcttggccttcttctcagacct

SEQ ID NO: 340661 - DNA, 25 bp, Homo sapien
tcttggccttcttctcagacctcac

SEQ ID NO: 340662 - DNA, 25 bp, Homo sapien
tcatcgtgggctttccgcttctccg

SEQ ID NO: 340663 - DNA, 25 bp, Homo sapien
cgcctcatcgtgggctttccgcttc

SEQ ID NO: 340664 - DNA, 25 bp, Homo sapien
tttccgcttctccgccagcttgttg

SEQ ID NO: 340665 - DNA, 25 bp, Homo sapien
ttccgcttctccgccagcttgttgg

SEQ ID NO: 340666 - DNA, 25 bp, Homo sapien
tggtgagaaaacatgcgctagccct

SEQ ID NO: 340667 - DNA, 25 bp, Homo sapien
cctgggaaagctggatgccactaga

SEQ ID NO: 340668 - DNA, 25 bp, Homo sapien
catgggcccacaaatctcgagataa

SEQ ID NO: 340669 - DNA, 25 bp, Homo sapien
tacctgacccacttcatggtgagaa

SEQ ID NO: 340670 - DNA, 25 bp, Homo sapien
ctcggatttttcgcctcttgccaaa

SEQ ID NO: 340671 - DNA, 25 bp, Homo sapien
cggatttttcgcctcttgccaaaca

SEQ ID NO: 340672 - DNA, 25 bp, Homo sapien
tctcggatttttcgcctcttgccaa

SEQ ID NO: 340673 - DNA, 25 bp, Homo sapien
ctctcggatttttcgcctcttgcca

SEQ ID NO: 340674 - DNA, 25 bp, Homo sapien
tggctcctgaccttctaggccagag

SEQ ID NO: 340675 - DNA, 25 bp, Homo sapien
aggcaccaagcagggctgcttccca

SEQ ID NO: 340676 - DNA, 25 bp, Homo sapien
gcaggttctcccgacctccacagtc

SEQ ID NO: 340677 - DNA, 25 bp, Homo sapien
ggccaagccccgcattgcagctccc

SEQ ID NO: 340678 - DNA, 25 bp, Homo sapien
cttcccctccatcctctgctcttcc

SEQ ID NO: 340679 - DNA, 25 bp, Homo sapien
ccctccatcctctgctcttccaggg

SEQ ID NO: 340680 - DNA, 25 bp, Homo sapien
cccctccatcctctgctcttccagg

SEQ ID NO: 340681 - DNA, 25 bp, Homo sapien
tcccctccatcctctgctcttccag

SEQ ID NO: 340682 - DNA, 25 bp, Homo sapien
caccatcaccttcgttgttgtcgtc

SEQ ID NO: 340683 - DNA, 25 bp, Homo sapien
catcaccttcgttgttgtcgtcctc

SEQ ID NO: 340684 - DNA, 25 bp, Homo sapien
tcaccttcgttgttgtcgtcctctt

SEQ ID NO: 340685 - DNA, 25 bp, Homo sapien
atcaccatcaccttcgttgttgtcg

SEQ ID NO: 340686 - DNA, 25 bp, Homo sapien
caatgtcctctgaatgccctgggaa

SEQ ID NO: 340687 - DNA, 25 bp, Homo sapien
ctagagaaagccaatgtcctctgaa

SEQ ID NO: 340688 - DNA, 25 bp, Homo sapien
tctggcagggtgacaacaggcccag

SEQ ID NO: 340689 - DNA, 25 bp, Homo sapien
gaatgccctgggaatctactgtctc

SEQ ID NO: 340690 - DNA, 25 bp, Homo sapien
gatgtcccaattgtggccctctctt

SEQ ID NO: 340691 - DNA, 25 bp, Homo sapien
cctgccgtctttagccatgggcagt

SEQ ID NO: 340692 - DNA, 25 bp, Homo sapien
gggatgtcccaattgtggccctctc

SEQ ID NO: 340693 - DNA, 25 bp, Homo sapien
gccgtctttagccatgggcagttca

SEQ ID NO: 340694 - DNA, 25 bp, Homo sapien
acaggtgacttcaaagggctttctg

SEQ ID NO: 340695 - DNA, 25 bp, Homo sapien
ctaagggaaacagccagcgtgggcc

SEQ ID NO: 340696 - DNA, 25 bp, Homo sapien
gctttccaccttggcagctaaggga

SEQ ID NO: 340697 - DNA, 25 bp, Homo sapien
gagctctgtcgcctccaatgtaaac

SEQ ID NO: 340698 - DNA, 25 bp, Homo sapien
aaggagcctggcgttcactgagtca

SEQ ID NO: 340699 - DNA, 25 bp, Homo sapien
tccttctcggtcacaaagggtgaaa

SEQ ID NO: 340700 - DNA, 25 bp, Homo sapien
gagaagtactctgccacggggagaa

SEQ ID NO: 340701 - DNA, 25 bp, Homo sapien
gcttcagcttctcaggtggaacgta

SEQ ID NO: 340702 - DNA, 25 bp, Homo sapien
caggcaaaaacgagtcacagagggc

SEQ ID NO: 340703 - DNA, 25 bp, Homo sapien
tgagacaggatacccagaaatccgg

SEQ ID NO: 340704 - DNA, 25 bp, Homo sapien
ggtcctgctgcatcgcagggccttt

SEQ ID NO: 340705 - DNA, 25 bp, Homo sapien
agaaatccggacgaggacccttgag

SEQ ID NO: 340706 - DNA, 25 bp, Homo sapien
gtctgtgacgtcataggtggcccca

SEQ ID NO: 340707 - DNA, 25 bp, Homo sapien
tggccccaatgcacaaagatttgtc

SEQ ID NO: 340708 - DNA, 25 bp, Homo sapien
gccaatgactgaggtctgctgccca

SEQ ID NO: 340709 - DNA, 25 bp, Homo sapien
caggccggtcgacaatctgatgggt

SEQ ID NO: 340710 - DNA, 25 bp, Homo sapien
aaggccagggcctcacggggcacct

SEQ ID NO: 340711 - DNA, 25 bp, Homo sapien
agggcctcacggggcacctctcggt

SEQ ID NO: 340712 - DNA, 25 bp, Homo sapien
ccctcaaaaagcttcttgtgcttct

SEQ ID NO: 340713 - DNA, 25 bp, Homo sapien
acctctcggttcaggaagaacttca

SEQ ID NO: 340714 - DNA, 25 bp, Homo sapien
cccatcggtgggaaactcatccacc

SEQ ID NO: 340715 - DNA, 25 bp, Homo sapien
cggtgggaaactcatccacctcggc

SEQ ID NO: 340716 - DNA, 25 bp, Homo sapien
catcggtgggaaactcatccacctc

SEQ ID NO: 340717 - DNA, 25 bp, Homo sapien
tcggtgggaaactcatccacctcgg

SEQ ID NO: 340718 - DNA, 25 bp, Homo sapien
actctcggagtccaacgcgtaggtg

SEQ ID NO: 340719 - DNA, 25 bp, Homo sapien
atacaactctcggagtccaacgcgt

SEQ ID NO: 340720 - DNA, 25 bp, Homo sapien
acaactctcggagtccaacgcgtag

SEQ ID NO: 340721 - DNA, 25 bp, Homo sapien
tccatacaactctcggagtccaacg

SEQ ID NO: 340722 - DNA, 25 bp, Homo sapien
ttgagcaactggtaaaggcggaagt

SEQ ID NO: 340723 - DNA, 25 bp, Homo sapien
taaaggcggaagttgacaaagccca

SEQ ID NO: 340724 - DNA, 25 bp, Homo sapien
atagtggaggttgagcaactggtaa

SEQ ID NO: 340725 - DNA, 25 bp, Homo sapien
gcaactggtaaaggcggaagttgac

SEQ ID NO: 340726 - DNA, 25 bp, Homo sapien
tgggagaaggcatagggagtgatcc

SEQ ID NO: 340727 - DNA, 25 bp, Homo sapien
ggcatagggagtgatccacacgatg

SEQ ID NO: 340728 - DNA, 25 bp, Homo sapien
aaggcatagggagtgatccacacga

SEQ ID NO: 340729 - DNA, 25 bp, Homo sapien
agaaggcatagggagtgatccacac

SEQ ID NO: 340730 - DNA, 25 bp, Homo sapien
tgcatgaactccacagtgagccggc

SEQ ID NO: 340731 - DNA, 25 bp, Homo sapien
cacgggcagcgataatgtagtgcat

SEQ ID NO: 340732 - DNA, 25 bp, Homo sapien
gctgaatggtctgcacgtggcactt

SEQ ID NO: 340733 - DNA, 25 bp, Homo sapien
cagggcatcgatgaacgtgggatac

SEQ ID NO: 340734 - DNA, 25 bp, Homo sapien
acttaaccaggatgcgcccactagg

SEQ ID NO: 340735 - DNA, 25 bp, Homo sapien
ggaaccacttaaccaggatgcgccc

SEQ ID NO: 340736 - DNA, 25 bp, Homo sapien
ggaggaaccacttaaccaggatgcg

SEQ ID NO: 340737 - DNA, 25 bp, Homo sapien
ctaggaggaaccacttaaccaggat

SEQ ID NO: 340738 - DNA, 25 bp, Homo sapien
cacagacactctacagggaggtcca

SEQ ID NO: 340739 - DNA, 25 bp, Homo sapien
tggaaaatgggaaaccgaagctgcc

SEQ ID NO: 340740 - DNA, 25 bp, Homo sapien
cagcacttatgactgggcctggcca

SEQ ID NO: 340741 - DNA, 25 bp, Homo sapien
cagccttgacccacgtgcggatttt

SEQ ID NO: 340742 - DNA, 25 bp, Homo sapien
gagtcagaagtctgccaggtcttca

SEQ ID NO: 340743 - DNA, 25 bp, Homo sapien
cctctgatgaggcagcagaacagct

SEQ ID NO: 340744 - DNA, 25 bp, Homo sapien
tccatgagaccagacattgccaagg

SEQ ID NO: 340745 - DNA, 25 bp, Homo sapien
tcaaacccatgccaagatgcaagaa

SEQ ID NO: 340746 - DNA, 25 bp, Homo sapien
tgcttggattgtgcttccgcgggct

SEQ ID NO: 340747 - DNA, 25 bp, Homo sapien
ggctggctcaaacgtctcccttcag

SEQ ID NO: 340748 - DNA, 25 bp, Homo sapien
tattgtatccctggtgctagggcag

SEQ ID NO: 340749 - DNA, 25 bp, Homo sapien
agtgtcctgaggaaagcccggctca

SEQ ID NO: 340750 - DNA, 25 bp, Homo sapien
gctctacagtgttccactcgctctt

SEQ ID NO: 340751 - DNA, 25 bp, Homo sapien
gtgttccactcgctcttcccataag

SEQ ID NO: 340752 - DNA, 25 bp, Homo sapien
tcttcccataagccttccggagctt

SEQ ID NO: 340753 - DNA, 25 bp, Homo sapien
tcctttaaacgctctacagtgttcc

SEQ ID NO: 340754 - DNA, 25 bp, Homo sapien
tgataaggtaaaacgttcgggctgc

SEQ ID NO: 340755 - DNA, 25 bp, Homo sapien
aacgttcgggctgctgtagaaccct

SEQ ID NO: 340756 - DNA, 25 bp, Homo sapien
cgggctgctgtagaacccttgttaa

SEQ ID NO: 340757 - DNA, 25 bp, Homo sapien
cgttcgggctgctgtagaacccttg

SEQ ID NO: 340758 - DNA, 25 bp, Homo sapien
cttccgggctttgttccgggtgatg

SEQ ID NO: 340759 - DNA, 25 bp, Homo sapien
tccgggctttgttccgggtgatgta

SEQ ID NO: 340760 - DNA, 25 bp, Homo sapien
cgggctttgttccgggtgatgtagt

SEQ ID NO: 340761 - DNA, 25 bp, Homo sapien
ccgggctttgttccgggtgatgtag

SEQ ID NO: 340762 - DNA, 25 bp, Homo sapien
ccttgcggctgtcagcatagggaac

SEQ ID NO: 340763 - DNA, 25 bp, Homo sapien
cttgcggctgtcagcatagggaaca

SEQ ID NO: 340764 - DNA, 25 bp, Homo sapien
gccgcgcgtacagggagctccactt

SEQ ID NO: 340765 - DNA, 25 bp, Homo sapien
cgttgaggagccgactagggccgcg

SEQ ID NO: 340766 - DNA, 25 bp, Homo sapien
gtgccctgccaaggaccccgaggac

SEQ ID NO: 340767 - DNA, 25 bp, Homo sapien
ctagggccgcgcgtacagggagctc

SEQ ID NO: 340768 - DNA, 25 bp, Homo sapien
tggatatacaggcttttctgtaatc

SEQ ID NO: 340769 - DNA, 25 bp, Homo sapien
caaacgtggatatacaggcttttct

SEQ ID NO: 340770 - DNA, 25 bp, Homo sapien
cgtggatatacaggcttttctgtaa

SEQ ID NO: 340771 - DNA, 25 bp, Homo sapien
aacgtggatatacaggcttttctgt

SEQ ID NO: 340772 - DNA, 25 bp, Homo sapien
tcaaggtaacggttgctaagcgtcg

SEQ ID NO: 340773 - DNA, 25 bp, Homo sapien
taagcgtcgtcagacttcggctgcc

SEQ ID NO: 340774 - DNA, 25 bp, Homo sapien
tgtgagcctcgttgcatgttgggac

SEQ ID NO: 340775 - DNA, 25 bp, Homo sapien
tccatggtgcgcgataggattgcgt

SEQ ID NO: 340776 - DNA, 25 bp, Homo sapien
ggaactatagtgatctggctgaaca

SEQ ID NO: 340777 - DNA, 25 bp, Homo sapien
ttaggctagtcctcgccaagtcagc

SEQ ID NO: 340778 - DNA, 25 bp, Homo sapien
tctggacggcaaagtggacctagag

SEQ ID NO: 340779 - DNA, 25 bp, Homo sapien
caagcaggctccaagtatcacaggg

SEQ ID NO: 340780 - DNA, 25 bp, Homo sapien
tcagaagtgactctctggaaggatg

SEQ ID NO: 340781 - DNA, 25 bp, Homo sapien
aagtgactctctggaaggatgctgc

SEQ ID NO: 340782 - DNA, 25 bp, Homo sapien
ctggaaggatgctgctgcttctcac

SEQ ID NO: 340783 - DNA, 25 bp, Homo sapien
gaagtgactctctggaaggatgctg

SEQ ID NO: 340784 - DNA, 25 bp, Homo sapien
ataacgaaggctatcctccatggcc

SEQ ID NO: 340785 - DNA, 25 bp, Homo sapien
gacgataacgaaggctatcctccat

SEQ ID NO: 340786 - DNA, 25 bp, Homo sapien
cagaggctgacgataacgaaggcta

SEQ ID NO: 340787 - DNA, 25 bp, Homo sapien
gctgacgataacgaaggctatcctc

SEQ ID NO: 340788 - DNA, 25 bp, Homo sapien
tggaaataggaatcataatagttgt

SEQ ID NO: 340789 - DNA, 25 bp, Homo sapien
ctggaaataggaatcataatagttg

SEQ ID NO: 340790 - DNA, 25 bp, Homo sapien
gttccctacctccaggagggctgct

SEQ ID NO: 340791 - DNA, 25 bp, Homo sapien
gaatggcctcaagatgtctcacatg

SEQ ID NO: 340792 - DNA, 25 bp, Homo sapien
agacaggcacggtcggacagacttg

SEQ ID NO: 340793 - DNA, 25 bp, Homo sapien
tctttaagcaggaacgtgaatggcc

SEQ ID NO: 340794 - DNA, 25 bp, Homo sapien
tgacaggcgagctgatctcatagac

SEQ ID NO: 340795 - DNA, 25 bp, Homo sapien
gccaacatgccgacagatttactga

SEQ ID NO: 340796 - DNA, 25 bp, Homo sapien
atttactgatggctctgacaggcga

SEQ ID NO: 340797 - DNA, 25 bp, Homo sapien
tctcatagactggttgggctgcctg

SEQ ID NO: 340798 - DNA, 25 bp, Homo sapien
gatgatgattcttggcggttacaca

SEQ ID NO: 340799 - DNA, 25 bp, Homo sapien
gaagacctcaacttgttacaatgac

SEQ ID NO: 340800 - DNA, 25 bp, Homo sapien
ccaattttgggtcatccatcctcaa

SEQ ID NO: 340801 - DNA, 25 bp, Homo sapien
attacgatgccaaaaattgctgggc

SEQ ID NO: 340802 - DNA, 25 bp, Homo sapien
ctgttttctagtgcccagtcagttc

SEQ ID NO: 340803 - DNA, 25 bp, Homo sapien
gctgttttctagtgcccagtcagtt

SEQ ID NO: 340804 - DNA, 25 bp, Homo sapien
atgggtcttgaggacaccccagtat

SEQ ID NO: 340805 - DNA, 25 bp, Homo sapien
cttgaggacaccccagtatttgtca

SEQ ID NO: 340806 - DNA, 25 bp, Homo sapien
ggtcttgaggacaccccagtatttg

SEQ ID NO: 340807 - DNA, 25 bp, Homo sapien
tgggtcttgaggacaccccagtatt

SEQ ID NO: 340808 - DNA, 25 bp, Homo sapien
gcccggccatcccatgagctgtttc

SEQ ID NO: 340809 - DNA, 25 bp, Homo sapien
gcgcccggccatcccatgagctgtt

SEQ ID NO: 340810 - DNA, 25 bp, Homo sapien
cgcgcccggccatcccatgagctgt

SEQ ID NO: 340811 - DNA, 25 bp, Homo sapien
cgcccggccatcccatgagctgttt

SEQ ID NO: 340812 - DNA, 25 bp, Homo sapien
ctcttctcctccagggtggctgtca

SEQ ID NO: 340813 - DNA, 25 bp, Homo sapien
ttcctcttctcctccagggtggctg

SEQ ID NO: 340814 - DNA, 25 bp, Homo sapien
ttattctggtagtggatcttggcct

SEQ ID NO: 340815 - DNA, 25 bp, Homo sapien
tcttctcctccagggtggctgtcac

SEQ ID NO: 340816 - DNA, 25 bp, Homo sapien
ttccagccaactttgtgatccagct

SEQ ID NO: 340817 - DNA, 25 bp, Homo sapien
acttccagccaactttgtgatccag

SEQ ID NO: 340818 - DNA, 25 bp, Homo sapien
tccagccaactttgtgatccagctg

SEQ ID NO: 340819 - DNA, 25 bp, Homo sapien
gtacttccagccaactttgtgatcc

SEQ ID NO: 340820 - DNA, 25 bp, Homo sapien
ctttttcgtcatagggtggtgggat

SEQ ID NO: 340821 - DNA, 25 bp, Homo sapien
acctgctttttcgtcatagggtggt

SEQ ID NO: 340822 - DNA, 25 bp, Homo sapien
ctgctttttcgtcatagggtggtgg

SEQ ID NO: 340823 - DNA, 25 bp, Homo sapien
gctttttcgtcatagggtggtggga

SEQ ID NO: 340824 - DNA, 25 bp, Homo sapien
cttccttggtctcgcggggcagcat

SEQ ID NO: 340825 - DNA, 25 bp, Homo sapien
cctggcttccttggtctcgcggggc

SEQ ID NO: 340826 - DNA, 25 bp, Homo sapien
catgcctcggggtccgccagaagat

SEQ ID NO: 340827 - DNA, 25 bp, Homo sapien
gggcagcatgcctcggggtccgcca

SEQ ID NO: 340828 - DNA, 25 bp, Homo sapien
gcccagaagtggtaggtgcctcggg

SEQ ID NO: 340829 - DNA, 25 bp, Homo sapien
gtgggggcccagaagtggtaggtgc

SEQ ID NO: 340830 - DNA, 25 bp, Homo sapien
agaagtggtaggtgcctcgggaagg

SEQ ID NO: 340831 - DNA, 25 bp, Homo sapien
gctgttcatccacttgtggaggaag

SEQ ID NO: 340832 - DNA, 25 bp, Homo sapien
atactgatgcccccgcagtgtacga

SEQ ID NO: 340833 - DNA, 25 bp, Homo sapien
ctgatgcccccgcagtgtacgacca

SEQ ID NO: 340834 - DNA, 25 bp, Homo sapien
agaaatactgatgcccccgcagtgt

SEQ ID NO: 340835 - DNA, 25 bp, Homo sapien
ccagaaatactgatgcccccgcagt

SEQ ID NO: 340836 - DNA, 25 bp, Homo sapien
gaagcccaggagatagctttgacca

SEQ ID NO: 340837 - DNA, 25 bp, Homo sapien
aggaagcccaggagatagctttgac

SEQ ID NO: 340838 - DNA, 25 bp, Homo sapien
agcccaggagatagctttgaccatt

SEQ ID NO: 340839 - DNA, 25 bp, Homo sapien
cccaggagatagctttgaccattga

SEQ ID NO: 340840 - DNA, 25 bp, Homo sapien
tctgctccctacactgctatgaaga

SEQ ID NO: 340841 - DNA, 25 bp, Homo sapien
gttcaatcctcgttgtccatatgag

SEQ ID NO: 340842 - DNA, 25 bp, Homo sapien
tagaaagaaccaagacgaccttgtg

SEQ ID NO: 340843 - DNA, 25 bp, Homo sapien
cagccgcctgggaaaggagttccct

SEQ ID NO: 340844 - DNA, 25 bp, Homo sapien
ggcacgtctagcatgtctcccagaa

SEQ ID NO: 340845 - DNA, 25 bp, Homo sapien
tattgggtcacgatccagaggtgga

SEQ ID NO: 340846 - DNA, 25 bp, Homo sapien
tacccaggaactagctagaaggagc

SEQ ID NO: 340847 - DNA, 25 bp, Homo sapien
cacttggactctaagggcatttgga

SEQ ID NO: 340848 - DNA, 25 bp, Homo sapien
agatttaaaaaataggccaggcgcg

SEQ ID NO: 340849 - DNA, 25 bp, Homo sapien
ctttgggaggccgagtcaggtggat

SEQ ID NO: 340850 - DNA, 25 bp, Homo sapien
gtggctcatgcctgtaatcccagta

SEQ ID NO: 340851 - DNA, 25 bp, Homo sapien
tatggtgagacgctgtctctaaaaa

SEQ ID NO: 340852 - DNA, 25 bp, Homo sapien
ccaatttctagctaaagggtcagga

SEQ ID NO: 340853 - DNA, 25 bp, Homo sapien
tcacatgcatggacctgaccctaag

SEQ ID NO: 340854 - DNA, 25 bp, Homo sapien
tgaactattaggcagaacacccagg

SEQ ID NO: 340855 - DNA, 25 bp, Homo sapien
taaaactctgacaaagcggaatcct

SEQ ID NO: 340856 - DNA, 25 bp, Homo sapien
caggctaaataagaattttagaact

SEQ ID NO: 340857 - DNA, 25 bp, Homo sapien
ctttatatgacaaaggagactgcag

SEQ ID NO: 340858 - DNA, 25 bp, Homo sapien
gatgtaacttatgcagatgtaactg

SEQ ID NO: 340859 - DNA, 25 bp, Homo sapien
tatgacaaaggagactgcagatgta

SEQ ID NO: 340860 - DNA, 25 bp, Homo sapien
caagacggaagctctcaaaaggctc

SEQ ID NO: 340861 - DNA, 25 bp, Homo sapien
catgatgagagctgccatttgcgct

SEQ ID NO: 340862 - DNA, 25 bp, Homo sapien
gatgtgaacaatcctgaattccagg

SEQ ID NO: 340863 - DNA, 25 bp, Homo sapien
tgagaggaaccgctgagacctgatg

SEQ ID NO: 340864 - DNA, 25 bp, Homo sapien
ggaattgtagcagattcattcctgg

SEQ ID NO: 340865 - DNA, 25 bp, Homo sapien
taccatgatgcttaaggctctggct

SEQ ID NO: 340866 - DNA, 25 bp, Homo sapien
catgtgcaatgggtgctgccctctt

SEQ ID NO: 340867 - DNA, 25 bp, Homo sapien
taagaagcgcaagaggtaccatgat

SEQ ID NO: 340868 - DNA, 25 bp, Homo sapien
tgtatcaacaaaagtagaatgttca

SEQ ID NO: 340869 - DNA, 25 bp, Homo sapien
aagctacagcaactcttttttgtgc

SEQ ID NO: 340870 - DNA, 25 bp, Homo sapien
ggtgtaagatcaacaatagatctgt

SEQ ID NO: 340871 - DNA, 25 bp, Homo sapien
ttttttgtgctcataaaaggcatca

SEQ ID NO: 340872 - DNA, 25 bp, Homo sapien
ctctgactccaatgcaggggctcgt

SEQ ID NO: 340873 - DNA, 25 bp, Homo sapien
tctgactccaatgcaggggctcgtg

SEQ ID NO: 340874 - DNA, 25 bp, Homo sapien
tagatgtcagggatcattcccactg

SEQ ID NO: 340875 - DNA, 25 bp, Homo sapien
aatcatcaaacggacttccttctca

SEQ ID NO: 340876 - DNA, 25 bp, Homo sapien
gatgtcagggatcattcccactggg

SEQ ID NO: 340877 - DNA, 25 bp, Homo sapien
agtggaatcatcaaacggacttcct

SEQ ID NO: 340878 - DNA, 25 bp, Homo sapien
tgtgcacagtgttcttgccaaacaa

SEQ ID NO: 340879 - DNA, 25 bp, Homo sapien
tgcacagtgttcttgccaaacaatt

SEQ ID NO: 340880 - DNA, 25 bp, Homo sapien
gtgcacagtgttcttgccaaacaat

SEQ ID NO: 340881 - DNA, 25 bp, Homo sapien
catgtgcacagtgttcttgccaaac

SEQ ID NO: 340882 - DNA, 25 bp, Homo sapien
gcaaagtacggccctgcttcatctc

SEQ ID NO: 340883 - DNA, 25 bp, Homo sapien
cagcagggacatggcgtggtacttc

SEQ ID NO: 340884 - DNA, 25 bp, Homo sapien
tgatgggccggcatgacttggtcca

SEQ ID NO: 340885 - DNA, 25 bp, Homo sapien
tacttcatgaggtaggcgaggcaca

SEQ ID NO: 340886 - DNA, 25 bp, Homo sapien
caggtacctgcatgtactggatatc

SEQ ID NO: 340887 - DNA, 25 bp, Homo sapien
caaagaagtcacagagacgtgagtt

SEQ ID NO: 340888 - DNA, 25 bp, Homo sapien
ctggatatcctcatacaaggtgttc

SEQ ID NO: 340889 - DNA, 25 bp, Homo sapien
agtcagccacaggtacctgcatgta

SEQ ID NO: 340890 - DNA, 25 bp, Homo sapien
tgagcttgttgttggcggccacacc

SEQ ID NO: 340891 - DNA, 25 bp, Homo sapien
gacattgatgaccatggtgatctgg

SEQ ID NO: 340892 - DNA, 25 bp, Homo sapien
gatctggttgctagacagcatgagc

SEQ ID NO: 340893 - DNA, 25 bp, Homo sapien
acaccattgctgatatacaggcttt

SEQ ID NO: 340894 - DNA, 25 bp, Homo sapien
agtcagcgaagcacgaaggctgcgt

SEQ ID NO: 340895 - DNA, 25 bp, Homo sapien
gaagcacgaaggctgcgtctttctg

SEQ ID NO: 340896 - DNA, 25 bp, Homo sapien
tcagcgaagcacgaaggctgcgtct

SEQ ID NO: 340897 - DNA, 25 bp, Homo sapien
cggtgggtcagtggtcagcagtcag

SEQ ID NO: 340898 - DNA, 25 bp, Homo sapien
gagcattcattagactctcggaccc

SEQ ID NO: 340899 - DNA, 25 bp, Homo sapien
gctcagtcgccgctaagtaattggg

SEQ ID NO: 340900 - DNA, 25 bp, Homo sapien
cgcagaccgtgcagtcgtcggtgct

SEQ ID NO: 340901 - DNA, 25 bp, Homo sapien
gaggttcagccgcagatctgcttcc

SEQ ID NO: 340902 - DNA, 25 bp, Homo sapien
cagcgtgtctccagaattccaggga

SEQ ID NO: 340903 - DNA, 25 bp, Homo sapien
gaaatgactcccaacagctatgact

SEQ ID NO: 340904 - DNA, 25 bp, Homo sapien
caagcgctgtgtccccacaagtagg

SEQ ID NO: 340905 - DNA, 25 bp, Homo sapien
gaatgagttctctggcagcgtgtct

SEQ ID NO: 340906 - DNA, 25 bp, Homo sapien
ttaaacgagataatccacgtaaaga

SEQ ID NO: 340907 - DNA, 25 bp, Homo sapien
gaaattaaacgagataatccacgta

SEQ ID NO: 340908 - DNA, 25 bp, Homo sapien
aaacgagataatccacgtaaagagt

SEQ ID NO: 340909 - DNA, 25 bp, Homo sapien
gtgaaattaaacgagataatccacg

SEQ ID NO: 340910 - DNA, 25 bp, Homo sapien
gtcataaagcaaagaagccgacctt

SEQ ID NO: 340911 - DNA, 25 bp, Homo sapien
cgagagcgaagcatcacttctaggg

SEQ ID NO: 340912 - DNA, 25 bp, Homo sapien
tcaaagcaacctaatcagaccggcg

SEQ ID NO: 340913 - DNA, 25 bp, Homo sapien
tagggagtcgcaaagaccacctgaa

SEQ ID NO: 340914 - DNA, 25 bp, Homo sapien
gccttaggcaaggttcttcgggaga

SEQ ID NO: 340915 - DNA, 25 bp, Homo sapien
gagagacagtctcaccgcttccgta

SEQ ID NO: 340916 - DNA, 25 bp, Homo sapien
ggttcgctcaggaagtagccgcttg

SEQ ID NO: 340917 - DNA, 25 bp, Homo sapien
cctgtgccgggtcttcagagaaatc

SEQ ID NO: 340918 - DNA, 25 bp, Homo sapien
gaagcgcgccatccccttcggagtt

SEQ ID NO: 340919 - DNA, 25 bp, Homo sapien
gagttgaccgaccaccaagctcttc

SEQ ID NO: 340920 - DNA, 25 bp, Homo sapien
gctcttccgcccacaggtgttgtca

SEQ ID NO: 340921 - DNA, 25 bp, Homo sapien
gccgaagcagagaccgtggcctgaa

SEQ ID NO: 340922 - DNA, 25 bp, Homo sapien
cagaacaggtgtcggaggcagtttc

SEQ ID NO: 340923 - DNA, 25 bp, Homo sapien
gaggcagtgccaagatcggaacctg

SEQ ID NO: 340924 - DNA, 25 bp, Homo sapien
gcgggctctcgtcgctgttcacggt

SEQ ID NO: 340925 - DNA, 25 bp, Homo sapien
tcggaacctgtgtccgagacgacgt

SEQ ID NO: 340926 - DNA, 25 bp, Homo sapien
gggagcgcgacctttctcagacccg

SEQ ID NO: 340927 - DNA, 25 bp, Homo sapien
atcgctgccagcgttaaagcccctg

SEQ ID NO: 340928 - DNA, 25 bp, Homo sapien
ccgagtcaggatcgctgccagcgtt

SEQ ID NO: 340929 - DNA, 25 bp, Homo sapien
gcccttcactaaggccgcatcggag

SEQ ID NO: 340930 - DNA, 25 bp, Homo sapien
tactacaggtatggaagcgccaggg

SEQ ID NO: 340931 - DNA, 25 bp, Homo sapien
gagggctggcttctcaagtggacca

SEQ ID NO: 340932 - DNA, 25 bp, Homo sapien
caatggtttgctctcttactacagg

SEQ ID NO: 340933 - DNA, 25 bp, Homo sapien
tggaccaactatctgaagggctacc

SEQ ID NO: 340934 - DNA, 25 bp, Homo sapien
ggcaatgtggctggcgaagaaggaa

SEQ ID NO: 340935 - DNA, 25 bp, Homo sapien
aatgtggctggcgaagaaggaatca

SEQ ID NO: 340936 - DNA, 25 bp, Homo sapien
tgggcaatgtggctggcgaagaagg

SEQ ID NO: 340937 - DNA, 25 bp, Homo sapien
caatgtggctggcgaagaaggaatc

SEQ ID NO: 340938 - DNA, 25 bp, Homo sapien
gacaccatggccaagtttggcatct

SEQ ID NO: 340939 - DNA, 25 bp, Homo sapien
tcaaggggacaccatggccaagttt

SEQ ID NO: 340940 - DNA, 25 bp, Homo sapien
tgatacatcctcagtagcttggttt

SEQ ID NO: 340941 - DNA, 25 bp, Homo sapien
ctggagtagtacttgccactgatac

SEQ ID NO: 340942 - DNA, 25 bp, Homo sapien
ggagacctgtagaaagactttgtca

SEQ ID NO: 340943 - DNA, 25 bp, Homo sapien
taatgcttagactccagactgggct

SEQ ID NO: 340944 - DNA, 25 bp, Homo sapien
gtaatcatcattatctcaaagctgg

SEQ ID NO: 340945 - DNA, 25 bp, Homo sapien
caaagctggtttgatgacataggtc

SEQ ID NO: 340946 - DNA, 25 bp, Homo sapien
ggccaacactggtgtaatacacagg

SEQ ID NO: 340947 - DNA, 25 bp, Homo sapien
taatgcaagtgacccaaacggagat

SEQ ID NO: 340948 - DNA, 25 bp, Homo sapien
gtgacacgaaaggtgcaggccaaca

SEQ ID NO: 340949 - DNA, 25 bp, Homo sapien
agatcaatggcaagtgggtccatgg

SEQ ID NO: 340950 - DNA, 25 bp, Homo sapien
gcagtcctctcaacattatccctgg

SEQ ID NO: 340951 - DNA, 25 bp, Homo sapien
ttctctttcagccttagtttgtgct

SEQ ID NO: 340952 - DNA, 25 bp, Homo sapien
tcaacattatccctggcttcaggct

SEQ ID NO: 340953 - DNA, 25 bp, Homo sapien
ccttagtttgtgctcggtggcagtg

SEQ ID NO: 340954 - DNA, 25 bp, Homo sapien
ctgtgtggcaggaccagtagctcat

SEQ ID NO: 340955 - DNA, 25 bp, Homo sapien
tcacccattggaacaagcatttctt

SEQ ID NO: 340956 - DNA, 25 bp, Homo sapien
gagcctacggacagtccggtacagc

SEQ ID NO: 340957 - DNA, 25 bp, Homo sapien
tatggatcacccattggaacaagca

SEQ ID NO: 340958 - DNA, 25 bp, Homo sapien
ggtacagctgtgtatggatcaccca

SEQ ID NO: 340959 - DNA, 25 bp, Homo sapien
tctctcactggttcttgacatttca

SEQ ID NO: 340960 - DNA, 25 bp, Homo sapien
cagcctccagtgcattcttagcttc

SEQ ID NO: 340961 - DNA, 25 bp, Homo sapien
caagctgctttgaacaccctagata

SEQ ID NO: 340962 - DNA, 25 bp, Homo sapien
gatatgccaagtggtttctctcact

SEQ ID NO: 340963 - DNA, 25 bp, Homo sapien
cctgcaggtgcgctccttttcctag

SEQ ID NO: 340964 - DNA, 25 bp, Homo sapien
tgcaggtgcgctccttttcctaggt

SEQ ID NO: 340965 - DNA, 25 bp, Homo sapien
tggcatttcatgatgctgaaccttg

SEQ ID NO: 340966 - DNA, 25 bp, Homo sapien
gatgctgaaccttgcgccattcctg

SEQ ID NO: 340967 - DNA, 25 bp, Homo sapien
tctgggctatgctgtccagagcaga

SEQ ID NO: 340968 - DNA, 25 bp, Homo sapien
ctgggctatgctgtccagagcagac

SEQ ID NO: 340969 - DNA, 25 bp, Homo sapien
ctctctgggctatgctgtccagagc

SEQ ID NO: 340970 - DNA, 25 bp, Homo sapien
tctctgggctatgctgtccagagca

SEQ ID NO: 340971 - DNA, 25 bp, Homo sapien
tgggcagccacagccattaatctca

SEQ ID NO: 340972 - DNA, 25 bp, Homo sapien
aaccgcacaggtagcctctcctggg

SEQ ID NO: 340973 - DNA, 25 bp, Homo sapien
tgagtgcagatgcatgcctggacaa

SEQ ID NO: 340974 - DNA, 25 bp, Homo sapien
cacggccatgagcttcagccggaag

SEQ ID NO: 340975 - DNA, 25 bp, Homo sapien
tgtccattctttgcagggcccgtca

SEQ ID NO: 340976 - DNA, 25 bp, Homo sapien
ctggttgcagctgtgtccattcttt

SEQ ID NO: 340977 - DNA, 25 bp, Homo sapien
gtccattctttgcagggcccgtcac

SEQ ID NO: 340978 - DNA, 25 bp, Homo sapien
ctgtgtccattctttgcagggcccg

SEQ ID NO: 340979 - DNA, 25 bp, Homo sapien
gggtgcgccaaatgatccagcccct

SEQ ID NO: 340980 - DNA, 25 bp, Homo sapien
tgctcctccgcctcataggaattgt

SEQ ID NO: 340981 - DNA, 25 bp, Homo sapien
attgtgccacgggtgcgccaaatga

SEQ ID NO: 340982 - DNA, 25 bp, Homo sapien
gctcctccgcctcataggaattgtg

SEQ ID NO: 340983 - DNA, 25 bp, Homo sapien
tgtcagtactggtattttccagatc

SEQ ID NO: 340984 - DNA, 25 bp, Homo sapien
ttgtcagtactggtattttccagat

SEQ ID NO: 340985 - DNA, 25 bp, Homo sapien
gtcagtactggtattttccagatct

SEQ ID NO: 340986 - DNA, 25 bp, Homo sapien
tcactgcaacctctcggattcaagt

SEQ ID NO: 340987 - DNA, 25 bp, Homo sapien
actgcgcccagccacaatgttgcat

SEQ ID NO: 340988 - DNA, 25 bp, Homo sapien
tgcaacctctcggattcaagtgatt

SEQ ID NO: 340989 - DNA, 25 bp, Homo sapien
ccactgcgcccagccacaatgttgc

SEQ ID NO: 340990 - DNA, 25 bp, Homo sapien
tgttcaaaggcctgggcaaatacct

SEQ ID NO: 340991 - DNA, 25 bp, Homo sapien
ggagttgtgttcaaaggcctgggca

SEQ ID NO: 340992 - DNA, 25 bp, Homo sapien
cctgggcaaataccttgtgaccaga

SEQ ID NO: 340993 - DNA, 25 bp, Homo sapien
agcagaactaagggagcccagctcc

SEQ ID NO: 340994 - DNA, 25 bp, Homo sapien
cccgcgtgccccttagctctcaagg

SEQ ID NO: 340995 - DNA, 25 bp, Homo sapien
acaggtgcaccagccacggcagcgg

SEQ ID NO: 340996 - DNA, 25 bp, Homo sapien
agggtctcagaggtgaccccgattt

SEQ ID NO: 340997 - DNA, 25 bp, Homo sapien
tgaccccgatttcctggaatcaccg

SEQ ID NO: 340998 - DNA, 25 bp, Homo sapien
agataaagcaacgccgagcttgttg

SEQ ID NO: 340999 - DNA, 25 bp, Homo sapien
ttgagataaagcaacgccgagcttg

SEQ ID NO: 341000 - DNA, 25 bp, Homo sapien
gagataaagcaacgccgagcttgtt

SEQ ID NO: 341001 - DNA, 25 bp, Homo sapien
tgagataaagcaacgccgagcttgt

SEQ ID NO: 341002 - DNA, 25 bp, Homo sapien
agctgtgcacgcgtccgtgcaagcc

SEQ ID NO: 341003 - DNA, 25 bp, Homo sapien
tgggacacggcctccgtgcgctcct

SEQ ID NO: 341004 - DNA, 25 bp, Homo sapien
tagcgccccgccgattggaggctgc

SEQ ID NO: 341005 - DNA, 25 bp, Homo sapien
ggaaatgaagggacgcggctgctgg

SEQ ID NO: 341006 - DNA, 25 bp, Homo sapien
aggtcaggcggttaggttctttgca

SEQ ID NO: 341007 - DNA, 25 bp, Homo sapien
gcaacggtgcatcggcctctgtgag

SEQ ID NO: 341008 - DNA, 25 bp, Homo sapien
ttggtggcaacggtgcatcggcctc

SEQ ID NO: 341009 - DNA, 25 bp, Homo sapien
gcggttaggttctttgcacagaccc

SEQ ID NO: 341010 - DNA, 25 bp, Homo sapien
taaccgcgtgttggttgaatggatg

SEQ ID NO: 341011 - DNA, 25 bp, Homo sapien
atggcctggggacccgctgaactct

SEQ ID NO: 341012 - DNA, 25 bp, Homo sapien
ctggggacccgctgaactcttgagg

SEQ ID NO: 341013 - DNA, 25 bp, Homo sapien
ccccagcatttaaccgcgtgttggt

SEQ ID NO: 341014 - DNA, 25 bp, Homo sapien
tagctctttctggtgatgatctgac

SEQ ID NO: 341015 - DNA, 25 bp, Homo sapien
gtagctctttctggtgatgatctga

SEQ ID NO: 341016 - DNA, 25 bp, Homo sapien
gacccctggtagctctttctggtga

SEQ ID NO: 341017 - DNA, 25 bp, Homo sapien
cctgacccctggtagctctttctgg

SEQ ID NO: 341018 - DNA, 25 bp, Homo sapien
ggccaagcagaacaagtgaccagga

SEQ ID NO: 341019 - DNA, 25 bp, Homo sapien
ccaagcagaacaagtgaccaggaag

SEQ ID NO: 341020 - DNA, 25 bp, Homo sapien
gccaagcagaacaagtgaccaggaa

SEQ ID NO: 341021 - DNA, 25 bp, Homo sapien
caagcagaacaagtgaccaggaagc

SEQ ID NO: 341022 - DNA, 25 bp, Homo sapien
cctggtagggcggaagccctgcacc

SEQ ID NO: 341023 - DNA, 25 bp, Homo sapien
cttggtaataggtgtccctggtagg

SEQ ID NO: 341024 - DNA, 25 bp, Homo sapien
ctggtagggcggaagccctgcaccc

SEQ ID NO: 341025 - DNA, 25 bp, Homo sapien
cctggccttggtaataggtgtccct

SEQ ID NO: 341026 - DNA, 25 bp, Homo sapien
gacccctcctgtgtctggtcagagg

SEQ ID NO: 341027 - DNA, 25 bp, Homo sapien
gaagacctcgcagactctccttctc

SEQ ID NO: 341028 - DNA, 25 bp, Homo sapien
tgttcttttggaagctcgccgaaga

SEQ ID NO: 341029 - DNA, 25 bp, Homo sapien
cttttggaagctcgccgaagacctc

SEQ ID NO: 341030 - DNA, 25 bp, Homo sapien
ccagtcctgcatacttgaacttcgc

SEQ ID NO: 341031 - DNA, 25 bp, Homo sapien
cttgcccattcccagtcctgcatac

SEQ ID NO: 341032 - DNA, 25 bp, Homo sapien
cattcccagtcctgcatacttgaac

SEQ ID NO: 341033 - DNA, 25 bp, Homo sapien
cagtcctgcatacttgaacttcgct

SEQ ID NO: 341034 - DNA, 25 bp, Homo sapien
gcctggcccagaactgccgcctccc

SEQ ID NO: 341035 - DNA, 25 bp, Homo sapien
ctggcccagaactgccgcctcccca

SEQ ID NO: 341036 - DNA, 25 bp, Homo sapien
gataatgagcgtctcagctggctgc

SEQ ID NO: 341037 - DNA, 25 bp, Homo sapien
cagagtcagccctgagtgacggaag

SEQ ID NO: 341038 - DNA, 25 bp, Homo sapien
tgtgtttacgaagccatcagaacag

SEQ ID NO: 341039 - DNA, 25 bp, Homo sapien
caaacctgctggtgttagcctgcca

SEQ ID NO: 341040 - DNA, 25 bp, Homo sapien
cacagccatgacatagctcttggga

SEQ ID NO: 341041 - DNA, 25 bp, Homo sapien
cgatctagctctgtgaatagagatt

SEQ ID NO: 341042 - DNA, 25 bp, Homo sapien
gaaaggcgggacagctcaaaagcaa

SEQ ID NO: 341043 - DNA, 25 bp, Homo sapien
tggcacttggttgagttgtctaaag

SEQ ID NO: 341044 - DNA, 25 bp, Homo sapien
caagatgcacattcgcttctgagtg

SEQ ID NO: 341045 - DNA, 25 bp, Homo sapien
ttattgcgattcctagggtaaccgc

SEQ ID NO: 341046 - DNA, 25 bp, Homo sapien
tggctgcacagtacgaagaggaatg

SEQ ID NO: 341047 - DNA, 25 bp, Homo sapien
ctgaaagggcctatagcgtgctgaa

SEQ ID NO: 341048 - DNA, 25 bp, Homo sapien
taccgactcatggatgcaactctga

SEQ ID NO: 341049 - DNA, 25 bp, Homo sapien
tttggccgggatggtgactcaacgc

SEQ ID NO: 341050 - DNA, 25 bp, Homo sapien
tgtagtaaaccctaatggaagcctc

SEQ ID NO: 341051 - DNA, 25 bp, Homo sapien
gatttagagcgtagcatacagacca

SEQ ID NO: 341052 - DNA, 25 bp, Homo sapien
cctggacgacgagtgaaattctgtc

SEQ ID NO: 341053 - DNA, 25 bp, Homo sapien
taaaccccagtaacatgaagcaacg

SEQ ID NO: 341054 - DNA, 25 bp, Homo sapien
tgaaggaatatatacagtagctaaa

SEQ ID NO: 341055 - DNA, 25 bp, Homo sapien
actgtggtacattcgcatgaaggaa

SEQ ID NO: 341056 - DNA, 25 bp, Homo sapien
gcaacgtaggtaaatcttagcaata

SEQ ID NO: 341057 - DNA, 25 bp, Homo sapien
gtattgcgttggcttccaacaaaaa

SEQ ID NO: 341058 - DNA, 25 bp, Homo sapien
tgagttctgtattgcgttggcttcc

SEQ ID NO: 341059 - DNA, 25 bp, Homo sapien
cattggcccgactccaggtgtttcc

SEQ ID NO: 341060 - DNA, 25 bp, Homo sapien
ttccccagaggatcggaggtggcca

SEQ ID NO: 341061 - DNA, 25 bp, Homo sapien
tacagagctgtggaatgtacctctc

SEQ ID NO: 341062 - DNA, 25 bp, Homo sapien
ttagtcctaaaagttcatcacaggg

SEQ ID NO: 341063 - DNA, 25 bp, Homo sapien
tgttagcgagcaccttttgaccagt

SEQ ID NO: 341064 - DNA, 25 bp, Homo sapien
tgagtttggccctcatgtgagctgt

SEQ ID NO: 341065 - DNA, 25 bp, Homo sapien
aacagcccgggatcattattcaaca

SEQ ID NO: 341066 - DNA, 25 bp, Homo sapien
gcaggactggcaactaccggtgagt

SEQ ID NO: 341067 - DNA, 25 bp, Homo sapien
cagcagccgcaagacaaactaaagg

SEQ ID NO: 341068 - DNA, 25 bp, Homo sapien
tccacgcatatcagaaacagcccgg

SEQ ID NO: 341069 - DNA, 25 bp, Homo sapien
aaaagacttcccattccagtgtggc

SEQ ID NO: 341070 - DNA, 25 bp, Homo sapien
aacaggctgtccagatcaattggca

SEQ ID NO: 341071 - DNA, 25 bp, Homo sapien
gactcgccgttatcttgaggagcca

SEQ ID NO: 341072 - DNA, 25 bp, Homo sapien
cacaggttagtggtacaaagtcaca

SEQ ID NO: 341073 - DNA, 25 bp, Homo sapien
taagtcaaaccaaggtgcgaccacc

SEQ ID NO: 341074 - DNA, 25 bp, Homo sapien
aaaaagtatggtctcacaggcacag

SEQ ID NO: 341075 - DNA, 25 bp, Homo sapien
tataaacttaaggaagattcaaaga

SEQ ID NO: 341076 - DNA, 25 bp, Homo sapien
aaacacaaatgtcccgtgtaagtca

SEQ ID NO: 341077 - DNA, 25 bp, Homo sapien
taggcgtccagctcatcatctgtgt

SEQ ID NO: 341078 - DNA, 25 bp, Homo sapien
aatgtaggcgtccagctcatcatct

SEQ ID NO: 341079 - DNA, 25 bp, Homo sapien
tgtaggcgtccagctcatcatctgt

SEQ ID NO: 341080 - DNA, 25 bp, Homo sapien
caatgtaggcgtccagctcatcatc

SEQ ID NO: 341081 - DNA, 25 bp, Homo sapien
cagaaagtgattggggggctcacct

SEQ ID NO: 341082 - DNA, 25 bp, Homo sapien
gggtagggatcaactgggggccaga

SEQ ID NO: 341083 - DNA, 25 bp, Homo sapien
agcagggtagggatcaactgggggc

SEQ ID NO: 341084 - DNA, 25 bp, Homo sapien
ggccagaaagtgattggggggctca

SEQ ID NO: 341085 - DNA, 25 bp, Homo sapien
ggagccctacttcatattgcttgaa

SEQ ID NO: 341086 - DNA, 25 bp, Homo sapien
cacggctctggtaggaattgcacag

SEQ ID NO: 341087 - DNA, 25 bp, Homo sapien
tgcaggagtgccacgatgttggtcc

SEQ ID NO: 341088 - DNA, 25 bp, Homo sapien
ttcctctcggaggtgcgcaggcttt

SEQ ID NO: 341089 - DNA, 25 bp, Homo sapien
gaggaaaagatattagctcatctga

SEQ ID NO: 341090 - DNA, 25 bp, Homo sapien
gctcatctgaattcatagcactcag

SEQ ID NO: 341091 - DNA, 25 bp, Homo sapien
cagaggaaaagatattagctcatct

SEQ ID NO: 341092 - DNA, 25 bp, Homo sapien
tgaattcatagcactcagctgcttc

SEQ ID NO: 341093 - DNA, 25 bp, Homo sapien
tgtcaggctcaatgcggaggcattc

SEQ ID NO: 341094 - DNA, 25 bp, Homo sapien
tctggacaagcaggtcgatggtctc

SEQ ID NO: 341095 - DNA, 25 bp, Homo sapien
tcaaggctctgatgttccggagaag

SEQ ID NO: 341096 - DNA, 25 bp, Homo sapien
cgatggtctcgtgattggtgctcag

SEQ ID NO: 341097 - DNA, 25 bp, Homo sapien
tctgtgggcacgtagtcaaacttca

SEQ ID NO: 341098 - DNA, 25 bp, Homo sapien
cagcggtctcttggtgtcgtgtctg

SEQ ID NO: 341099 - DNA, 25 bp, Homo sapien
tccacggctgtgacacggcccgtgt

SEQ ID NO: 341100 - DNA, 25 bp, Homo sapien
gtgtaccactccctgttcacacgca

SEQ ID NO: 341101 - DNA, 25 bp, Homo sapien
ctctcttgaggtcagccgagtcctc

SEQ ID NO: 341102 - DNA, 25 bp, Homo sapien
tgagctctcttgaggtcagccgagt

SEQ ID NO: 341103 - DNA, 25 bp, Homo sapien
ctgagctctcttgaggtcagccgag

SEQ ID NO: 341104 - DNA, 25 bp, Homo sapien
ttgaggtcagccgagtcctcttccc

SEQ ID NO: 341105 - DNA, 25 bp, Homo sapien
atctgccccgcttgcacctctcctt

SEQ ID NO: 341106 - DNA, 25 bp, Homo sapien
ttcacaacaaatctgccccgcttgc

SEQ ID NO: 341107 - DNA, 25 bp, Homo sapien
gacactccgcttccgactaggggta

SEQ ID NO: 341108 - DNA, 25 bp, Homo sapien
ctcatcagaaactgcgacactccgc

SEQ ID NO: 341109 - DNA, 25 bp, Homo sapien
cccgggctgccaaagcagggagctt

SEQ ID NO: 341110 - DNA, 25 bp, Homo sapien
tcttgacgagagtgttggcaggctt

SEQ ID NO: 341111 - DNA, 25 bp, Homo sapien
gacgctgaggtctacgcacaggttc

SEQ ID NO: 341112 - DNA, 25 bp, Homo sapien
tggagcagcctagatgtgctggcct

SEQ ID NO: 341113 - DNA, 25 bp, Homo sapien
acttccaagggcaatttcttcaggt

SEQ ID NO: 341114 - DNA, 25 bp, Homo sapien
tattttagtatacttgagcaaactt

SEQ ID NO: 341115 - DNA, 25 bp, Homo sapien
gatgaagttgtttgcatattttagt

SEQ ID NO: 341116 - DNA, 25 bp, Homo sapien
attttagtatacttgagcaaacttt

SEQ ID NO: 341117 - DNA, 25 bp, Homo sapien
atattttagtatacttgagcaaact

SEQ ID NO: 341118 - DNA, 25 bp, Homo sapien
atgtcctttctgaatgttcccaggg

SEQ ID NO: 341119 - DNA, 25 bp, Homo sapien
tgcttctcttcctgcgtcttcatgt

SEQ ID NO: 341120 - DNA, 25 bp, Homo sapien
tctcctgctgctggcgaattttctc

SEQ ID NO: 341121 - DNA, 25 bp, Homo sapien
tctgcttttgttcagaagcctcaca

SEQ ID NO: 341122 - DNA, 25 bp, Homo sapien
ggtgtcagggtaatctttttccaca

SEQ ID NO: 341123 - DNA, 25 bp, Homo sapien
gggagggttctccatttcagacaca

SEQ ID NO: 341124 - DNA, 25 bp, Homo sapien
ggagggttctccatttcagacacaa

SEQ ID NO: 341125 - DNA, 25 bp, Homo sapien
gagggttctccatttcagacacaaa

SEQ ID NO: 341126 - DNA, 25 bp, Homo sapien
cggcgtttgtaacgcagctcactgg

SEQ ID NO: 341127 - DNA, 25 bp, Homo sapien
gttccagttggcagagaggtagcca

SEQ ID NO: 341128 - DNA, 25 bp, Homo sapien
caaactcatcccagaacttgatgat

SEQ ID NO: 341129 - DNA, 25 bp, Homo sapien
tttccatagctctccggcgtttgta

SEQ ID NO: 341130 - DNA, 25 bp, Homo sapien
aggcccagcagcccagccccattac

SEQ ID NO: 341131 - DNA, 25 bp, Homo sapien
attcaggtgaagagaaaaggcagag

SEQ ID NO: 341132 - DNA, 25 bp, Homo sapien
cagaggcccagcagcccagccccat

SEQ ID NO: 341133 - DNA, 25 bp, Homo sapien
aaaggcagaggcccagcagcccagc

SEQ ID NO: 341134 - DNA, 25 bp, Homo sapien
ccggtactccttggcatcagcaaag

SEQ ID NO: 341135 - DNA, 25 bp, Homo sapien
tttgttgtgtgtaggctccaggacc

SEQ ID NO: 341136 - DNA, 25 bp, Homo sapien
tccttccaatactgcgccaggtgct

SEQ ID NO: 341137 - DNA, 25 bp, Homo sapien
gaccaggtagggcacatcaacaacc

SEQ ID NO: 341138 - DNA, 25 bp, Homo sapien
atacattttgatcagtcggctacag

SEQ ID NO: 341139 - DNA, 25 bp, Homo sapien
tgatcagtcggctacagttgtagat

SEQ ID NO: 341140 - DNA, 25 bp, Homo sapien
acagttgtagatgaacatgccatcc

SEQ ID NO: 341141 - DNA, 25 bp, Homo sapien
tgccatccagatcccggtgttcaat

SEQ ID NO: 341142 - DNA, 25 bp, Homo sapien
cctcttcttgacatcggcttctctg

SEQ ID NO: 341143 - DNA, 25 bp, Homo sapien
tgacatcggcttctctgcgcagagt

SEQ ID NO: 341144 - DNA, 25 bp, Homo sapien
tgttctggacctgtcgcaacatcac

SEQ ID NO: 341145 - DNA, 25 bp, Homo sapien
tctgcgcagagtgatggctctgttc

SEQ ID NO: 341146 - DNA, 25 bp, Homo sapien
tgaggtctccacctaggcgtacttc

SEQ ID NO: 341147 - DNA, 25 bp, Homo sapien
tacttctaatgtccgagctttgctc

SEQ ID NO: 341148 - DNA, 25 bp, Homo sapien
ctaatgtccgagctttgctctctgc

SEQ ID NO: 341149 - DNA, 25 bp, Homo sapien
cacctaggcgtacttctaatgtccg

SEQ ID NO: 341150 - DNA, 25 bp, Homo sapien
cccaactcctgcacccagagtggca

SEQ ID NO: 341151 - DNA, 25 bp, Homo sapien
actcctgcacccagagtggcattac

SEQ ID NO: 341152 - DNA, 25 bp, Homo sapien
agatgcacacccccccaactcctgc

SEQ ID NO: 341153 - DNA, 25 bp, Homo sapien
caactcctgcacccagagtggcatt

SEQ ID NO: 341154 - DNA, 25 bp, Homo sapien
aaacggcttgacgtgtacttgtaca

SEQ ID NO: 341155 - DNA, 25 bp, Homo sapien
ctcctgctccgcacgggtcttgaaa

SEQ ID NO: 341156 - DNA, 25 bp, Homo sapien
tgctccgcacgggtcttgaaacggc

SEQ ID NO: 341157 - DNA, 25 bp, Homo sapien
cacgggtcttgaaacggcttgacgt

SEQ ID NO: 341158 - DNA, 25 bp, Homo sapien
ataggcacggaacgagcgccgctct

SEQ ID NO: 341159 - DNA, 25 bp, Homo sapien
gatcaatatagagcacagcggcata

SEQ ID NO: 341160 - DNA, 25 bp, Homo sapien
gatgaagatcctcatccggggatca

SEQ ID NO: 341161 - DNA, 25 bp, Homo sapien
gcacagcggcataggcacggaacga

SEQ ID NO: 341162 - DNA, 25 bp, Homo sapien
agtttgagattgaagatgatcacca

SEQ ID NO: 341163 - DNA, 25 bp, Homo sapien
ctcttggatttgagattatgtctag

SEQ ID NO: 341164 - DNA, 25 bp, Homo sapien
gacgtctctgccatctggatatctc

SEQ ID NO: 341165 - DNA, 25 bp, Homo sapien
agattatgtctagttctggctctcc

SEQ ID NO: 341166 - DNA, 25 bp, Homo sapien
tacattgtctgtgacaggttcccgg

SEQ ID NO: 341167 - DNA, 25 bp, Homo sapien
tcccgggtccgagcattccaggtgg

SEQ ID NO: 341168 - DNA, 25 bp, Homo sapien
cagtgcggaatggagagtacttata

SEQ ID NO: 341169 - DNA, 25 bp, Homo sapien
caggaatcttcataaactgggtcat

SEQ ID NO: 341170 - DNA, 25 bp, Homo sapien
tctgtggaagttgcggatttctttc

SEQ ID NO: 341171 - DNA, 25 bp, Homo sapien
gaagttgcggatttctttccacaga

SEQ ID NO: 341172 - DNA, 25 bp, Homo sapien
tggaagttgcggatttctttccaca

SEQ ID NO: 341173 - DNA, 25 bp, Homo sapien
ctgcttctgtggaagttgcggattt

SEQ ID NO: 341174 - DNA, 25 bp, Homo sapien
gaaaaccgcctgggcagactcagga

SEQ ID NO: 341175 - DNA, 25 bp, Homo sapien
ctgggcagactcaggaaatgaggac

SEQ ID NO: 341176 - DNA, 25 bp, Homo sapien
gactcaggaaatgaggactggtgat

SEQ ID NO: 341177 - DNA, 25 bp, Homo sapien
accgcctgggcagactcaggaaatg

SEQ ID NO: 341178 - DNA, 25 bp, Homo sapien
catgaaacgtgcgagacaggaagag

SEQ ID NO: 341179 - DNA, 25 bp, Homo sapien
gaacaggataaaatccttcccaatg

SEQ ID NO: 341180 - DNA, 25 bp, Homo sapien
tcttcctcatgaaacgtgcgagaca

SEQ ID NO: 341181 - DNA, 25 bp, Homo sapien
aaaatccttcccaatgcgcattgag

SEQ ID NO: 341182 - DNA, 25 bp, Homo sapien
ccattcccgtactgcccaatctgag

SEQ ID NO: 341183 - DNA, 25 bp, Homo sapien
gagtagactcaggtgttcgcttggc

SEQ ID NO: 341184 - DNA, 25 bp, Homo sapien
ctgcccaatctgagtagactcaggt

SEQ ID NO: 341185 - DNA, 25 bp, Homo sapien
aggtgttcgcttggccgacttccca

SEQ ID NO: 341186 - DNA, 25 bp, Homo sapien
cattcctgctccatcatccaaaaag

SEQ ID NO: 341187 - DNA, 25 bp, Homo sapien
ttcctgctccatcatccaaaaagca

SEQ ID NO: 341188 - DNA, 25 bp, Homo sapien
ttggatccattcctgctccatcatc

SEQ ID NO: 341189 - DNA, 25 bp, Homo sapien
gatccattcctgctccatcatccaa

SEQ ID NO: 341190 - DNA, 25 bp, Homo sapien
tcctcctcgaaggtcctctcgtctt

SEQ ID NO: 341191 - DNA, 25 bp, Homo sapien
aatcctcctcgaaggtcctctcgtc

SEQ ID NO: 341192 - DNA, 25 bp, Homo sapien
aaatcctcctcgaaggtcctctcgt

SEQ ID NO: 341193 - DNA, 25 bp, Homo sapien
cctcctcgaaggtcctctcgtcttt

SEQ ID NO: 341194 - DNA, 25 bp, Homo sapien
gactcaaactgggtcaggtacagag

SEQ ID NO: 341195 - DNA, 25 bp, Homo sapien
gcagtgcctctaatcagagtctggg

SEQ ID NO: 341196 - DNA, 25 bp, Homo sapien
gaaagtacaagggtgaggatcttcc

SEQ ID NO: 341197 - DNA, 25 bp, Homo sapien
gaatccaaatgagacgtggcaatca

SEQ ID NO: 341198 - DNA, 25 bp, Homo sapien
cattgccctggcatcacgaaaagga

SEQ ID NO: 341199 - DNA, 25 bp, Homo sapien
cagctgtgcttcatatcctgggaac

SEQ ID NO: 341200 - DNA, 25 bp, Homo sapien
caaagccaatctgaaagtctgcaca

SEQ ID NO: 341201 - DNA, 25 bp, Homo sapien
ccccagaaggtcaagaaagtcaaca

SEQ ID NO: 341202 - DNA, 25 bp, Homo sapien
gctatggtgcttagtgcttctatca

SEQ ID NO: 341203 - DNA, 25 bp, Homo sapien
gtgcttagtgcttctatcacaccat

SEQ ID NO: 341204 - DNA, 25 bp, Homo sapien
tccaaaatgctatggtgcttagtgc

SEQ ID NO: 341205 - DNA, 25 bp, Homo sapien
aatccttaactgtcttgactgttcc

SEQ ID NO: 341206 - DNA, 25 bp, Homo sapien
ccaccaaatgtagtaggagacagca

SEQ ID NO: 341207 - DNA, 25 bp, Homo sapien
taacaggagttgtactgagcacaga

SEQ ID NO: 341208 - DNA, 25 bp, Homo sapien
catctgtgcattgattaaataagcc

SEQ ID NO: 341209 - DNA, 25 bp, Homo sapien
gacttgaccattacgatttgtacct

SEQ ID NO: 341210 - DNA, 25 bp, Homo sapien
aatatctattctggtggcatcagca

SEQ ID NO: 341211 - DNA, 25 bp, Homo sapien
tatcaaccagttcagcaagggcacc

SEQ ID NO: 341212 - DNA, 25 bp, Homo sapien
gcaagggcaccaaacaagaattcgt

SEQ ID NO: 341213 - DNA, 25 bp, Homo sapien
gcattatcaaccagttcagcaaggg

SEQ ID NO: 341214 - DNA, 25 bp, Homo sapien
caccaaacaagaattcgtgagtggt

SEQ ID NO: 341215 - DNA, 25 bp, Homo sapien
tcctaataaaaagccatggttataa

SEQ ID NO: 341216 - DNA, 25 bp, Homo sapien
catttgcattgtttttatactactc

SEQ ID NO: 341217 - DNA, 25 bp, Homo sapien
ttatactactcaaggctttccagag

SEQ ID NO: 341218 - DNA, 25 bp, Homo sapien
aaaatcttaaaaccaccatttgcat

SEQ ID NO: 341219 - DNA, 25 bp, Homo sapien
acagcacccggcctagaaattcttt

SEQ ID NO: 341220 - DNA, 25 bp, Homo sapien
cttcacagacctaaacatcctttgc

SEQ ID NO: 341221 - DNA, 25 bp, Homo sapien
acatcctttgcatgtgatccaagaa

SEQ ID NO: 341222 - DNA, 25 bp, Homo sapien
agacctaaacatcctttgcatgtga

SEQ ID NO: 341223 - DNA, 25 bp, Homo sapien
cccagaaatatatgcccaagatgtt

SEQ ID NO: 341224 - DNA, 25 bp, Homo sapien
tgactaaatgtgccaacaaaaataa

SEQ ID NO: 341225 - DNA, 25 bp, Homo sapien
agtgactaaatgtgccaacaaaaat

SEQ ID NO: 341226 - DNA, 25 bp, Homo sapien
acccagaaatatatgcccaagatgt

SEQ ID NO: 341227 - DNA, 25 bp, Homo sapien
ctttacacacaggtggttcatcttc

SEQ ID NO: 341228 - DNA, 25 bp, Homo sapien
tttacacacaggtggttcatcttcc

SEQ ID NO: 341229 - DNA, 25 bp, Homo sapien
catttggcgatccaatagagcagta

SEQ ID NO: 341230 - DNA, 25 bp, Homo sapien
aaagttttgacgctactggacagcc

SEQ ID NO: 341231 - DNA, 25 bp, Homo sapien
tactggttacctcagtggcacctag

SEQ ID NO: 341232 - DNA, 25 bp, Homo sapien
gagtgggcatatggattaaacctga

SEQ ID NO: 341233 - DNA, 25 bp, Homo sapien
taatgatatcgatttcccaggattc

SEQ ID NO: 341234 - DNA, 25 bp, Homo sapien
tgactgcaataaggtctccagccct

SEQ ID NO: 341235 - DNA, 25 bp, Homo sapien
gctgagctcgattcagactgctgta

SEQ ID NO: 341236 - DNA, 25 bp, Homo sapien
ccttcacccgctaactgggaaatat

SEQ ID NO: 341237 - DNA, 25 bp, Homo sapien
gtggtttatgactgctccatcttca

SEQ ID NO: 341238 - DNA, 25 bp, Homo sapien
ccttgagtgggtggtttatgactgc

SEQ ID NO: 341239 - DNA, 25 bp, Homo sapien
tgagtctcgtgtggatggtcctgaa

SEQ ID NO: 341240 - DNA, 25 bp, Homo sapien
tcagacaatctgagtctcgtgtgga

SEQ ID NO: 341241 - DNA, 25 bp, Homo sapien
ctgtcaggaaatttaccaacgcgga

SEQ ID NO: 341242 - DNA, 25 bp, Homo sapien
tgtcaggaaatttaccaacgcggaa

SEQ ID NO: 341243 - DNA, 25 bp, Homo sapien
caagaccggagaccaagatgtcgac

SEQ ID NO: 341244 - DNA, 25 bp, Homo sapien
ccaggattcttaaacaggcccaaga

SEQ ID NO: 341245 - DNA, 25 bp, Homo sapien
gaaaaagctcctaggcactcacgat

SEQ ID NO: 341246 - DNA, 25 bp, Homo sapien
tgtcttcgccacacgtgatgccagg

SEQ ID NO: 341247 - DNA, 25 bp, Homo sapien
ctgcggtgcggaccggaggagccat

SEQ ID NO: 341248 - DNA, 25 bp, Homo sapien
gacgcagccgggacggtagctgcgg

SEQ ID NO: 341249 - DNA, 25 bp, Homo sapien
acggtagctgcggtgcggaccggag

SEQ ID NO: 341250 - DNA, 25 bp, Homo sapien
ggccgagcgacgcagccgggacggt

SEQ ID NO: 341251 - DNA, 25 bp, Homo sapien
tcaggcccctaaatcgaagaagccc

SEQ ID NO: 341252 - DNA, 25 bp, Homo sapien
cgagcgatcggttggcggctctttc

SEQ ID NO: 341253 - DNA, 25 bp, Homo sapien
ctggtagggcgaaggaacgggcgtg

SEQ ID NO: 341254 - DNA, 25 bp, Homo sapien
acgggcgtgcggtcgatcgagcgat

SEQ ID NO: 341255 - DNA, 25 bp, Homo sapien
caccagttggcggagtgaccttagg

SEQ ID NO: 341256 - DNA, 25 bp, Homo sapien
ggaatgatgatccatcgctagcaag

SEQ ID NO: 341257 - DNA, 25 bp, Homo sapien
caatggcacccagtgtaaagcagct

SEQ ID NO: 341258 - DNA, 25 bp, Homo sapien
cattttgaagccctgtttgagtccc

SEQ ID NO: 341259 - DNA, 25 bp, Homo sapien
gaaagagcttgtcacgatgcggcag

SEQ ID NO: 341260 - DNA, 25 bp, Homo sapien
gatagcagactccttgaaagcaggg

SEQ ID NO: 341261 - DNA, 25 bp, Homo sapien
gagacaacgactgagcaagcactac

SEQ ID NO: 341262 - DNA, 25 bp, Homo sapien
ctggacctggaacccgaaagagctt

SEQ ID NO: 341263 - DNA, 25 bp, Homo sapien
tcagcctacagacctggtacctgga

SEQ ID NO: 341264 - DNA, 25 bp, Homo sapien
gatttttgcccgagatgattcctac

SEQ ID NO: 341265 - DNA, 25 bp, Homo sapien
tcctgattgctgagtgttcacctgg

SEQ ID NO: 341266 - DNA, 25 bp, Homo sapien
tgctgacagcagacccacttagagt

SEQ ID NO: 341267 - DNA, 25 bp, Homo sapien
tcaaccagtagcagttatattgccc

SEQ ID NO: 341268 - DNA, 25 bp, Homo sapien
tccaagataaatgagctaataagct

SEQ ID NO: 341269 - DNA, 25 bp, Homo sapien
caagcgacaatctttgaacacccct

SEQ ID NO: 341270 - DNA, 25 bp, Homo sapien
tggcatatctgcctattctccagaa

SEQ ID NO: 341271 - DNA, 25 bp, Homo sapien
tgagctactcgaatgaatgcactgg

SEQ ID NO: 341272 - DNA, 25 bp, Homo sapien
tacatctcgtcaaacaaggcctagg

SEQ ID NO: 341273 - DNA, 25 bp, Homo sapien
cagtcaatttaaaggccagctatcc

SEQ ID NO: 341274 - DNA, 25 bp, Homo sapien
aataaaatctggttgactagcctcc

SEQ ID NO: 341275 - DNA, 25 bp, Homo sapien
ctgaaagctgatgtacctgactggc

SEQ ID NO: 341276 - DNA, 25 bp, Homo sapien
tattctggctattggtatggctggc

SEQ ID NO: 341277 - DNA, 25 bp, Homo sapien
gatgatcatctgctcgagtctaaaa

SEQ ID NO: 341278 - DNA, 25 bp, Homo sapien
taagccctatggattaacccctgag

SEQ ID NO: 341279 - DNA, 25 bp, Homo sapien
gaaggaccattgctgcatactcctt

SEQ ID NO: 341280 - DNA, 25 bp, Homo sapien
cagagtaggcctctattcctgtatg

SEQ ID NO: 341281 - DNA, 25 bp, Homo sapien
ccttgaccagcaacttttttgaaga

SEQ ID NO: 341282 - DNA, 25 bp, Homo sapien
gcatactccttgaccagcaactttt

SEQ ID NO: 341283 - DNA, 25 bp, Homo sapien
tctctccttcagtagtgcagaaatg

SEQ ID NO: 341284 - DNA, 25 bp, Homo sapien
ggaatacagcagttcgaaagccgcg

SEQ ID NO: 341285 - DNA, 25 bp, Homo sapien
gctgactcaaattgcctcacagaat

SEQ ID NO: 341286 - DNA, 25 bp, Homo sapien
gagtccgattcaccagtacacacag

SEQ ID NO: 341287 - DNA, 25 bp, Homo sapien
aagaaaccatgccagctgttaccat

SEQ ID NO: 341288 - DNA, 25 bp, Homo sapien
cttcagatcagcaggacagttgggc

SEQ ID NO: 341289 - DNA, 25 bp, Homo sapien
gtagtttttaattgcccagcatccg

SEQ ID NO: 341290 - DNA, 25 bp, Homo sapien
gacaggacaaacttatctctcatgg

SEQ ID NO: 341291 - DNA, 25 bp, Homo sapien
taacagggcctaccatgtagagaat

SEQ ID NO: 341292 - DNA, 25 bp, Homo sapien
tggacagtctgacccaaccttgagc

SEQ ID NO: 341293 - DNA, 25 bp, Homo sapien
gaatcctgatgacagcgtttgtgcc

SEQ ID NO: 341294 - DNA, 25 bp, Homo sapien
tgcctgaagctagaatatcccctgg

SEQ ID NO: 341295 - DNA, 25 bp, Homo sapien
ctccttgagcgtccagctggccttg

SEQ ID NO: 341296 - DNA, 25 bp, Homo sapien
tcaggtctccttgagcgtccagctg

SEQ ID NO: 341297 - DNA, 25 bp, Homo sapien
aggtctccttgagcgtccagctggc

SEQ ID NO: 341298 - DNA, 25 bp, Homo sapien
gtctccttgagcgtccagctggcct

SEQ ID NO: 341299 - DNA, 25 bp, Homo sapien
aggacctactaggttcctaactgtg

SEQ ID NO: 341300 - DNA, 25 bp, Homo sapien
aaatagatttgggtcagaggacacc

SEQ ID NO: 341301 - DNA, 25 bp, Homo sapien
tttaaagtagggctgacacaattct

SEQ ID NO: 341302 - DNA, 25 bp, Homo sapien
gcctgctcagcctctgtttaccaga

SEQ ID NO: 341303 - DNA, 25 bp, Homo sapien
acagggcgggcaggctcagccacag

SEQ ID NO: 341304 - DNA, 25 bp, Homo sapien
ggaagagaggacagggcgggcaggc

SEQ ID NO: 341305 - DNA, 25 bp, Homo sapien
ggacagggcgggcaggctcagccac

SEQ ID NO: 341306 - DNA, 25 bp, Homo sapien
gaggacagggcgggcaggctcagcc

SEQ ID NO: 341307 - DNA, 25 bp, Homo sapien
ccagagccggtgatgcaagcacagc

SEQ ID NO: 341308 - DNA, 25 bp, Homo sapien
agccagagccggtgatgcaagcaca

SEQ ID NO: 341309 - DNA, 25 bp, Homo sapien
gtttgcactgcacgtcggagccaga

SEQ ID NO: 341310 - DNA, 25 bp, Homo sapien
ttgcactgcacgtcggagccagagc

SEQ ID NO: 341311 - DNA, 25 bp, Homo sapien
taggatgggacagtaatggacgctc

SEQ ID NO: 341312 - DNA, 25 bp, Homo sapien
ggaaactggagactggagtgcaccc

SEQ ID NO: 341313 - DNA, 25 bp, Homo sapien
caagaatcggaagacacagtgtacc

SEQ ID NO: 341314 - DNA, 25 bp, Homo sapien
tggtggcagcaagaactacgggttc

SEQ ID NO: 341315 - DNA, 25 bp, Homo sapien
tggaagccccagcatgcctgattca

SEQ ID NO: 341316 - DNA, 25 bp, Homo sapien
cgagatggcggacgaggccttagct

SEQ ID NO: 341317 - DNA, 25 bp, Homo sapien
gagggagcccttcggaagctggtaa

SEQ ID NO: 341318 - DNA, 25 bp, Homo sapien
tctcaccagaaaggaaccgacggag

SEQ ID NO: 341319 - DNA, 25 bp, Homo sapien
tggtactgaagcctagtccctccca

SEQ ID NO: 341320 - DNA, 25 bp, Homo sapien
ccacctgtttaaacagtaactgctg

SEQ ID NO: 341321 - DNA, 25 bp, Homo sapien
ccatgcctggtactgaagcctagtc

SEQ ID NO: 341322 - DNA, 25 bp, Homo sapien
agaggcagggtcaatccagggtacc

SEQ ID NO: 341323 - DNA, 25 bp, Homo sapien
ctttacctagaagacaagtgaccca

SEQ ID NO: 341324 - DNA, 25 bp, Homo sapien
tttactttacctagaagacaagtga

SEQ ID NO: 341325 - DNA, 25 bp, Homo sapien
ttacctagaagacaagtgacccacc

SEQ ID NO: 341326 - DNA, 25 bp, Homo sapien
tagaagacaagtgacccaccccact

SEQ ID NO: 341327 - DNA, 25 bp, Homo sapien
ggcactctgcctgtatgttctcgga

SEQ ID NO: 341328 - DNA, 25 bp, Homo sapien
cagtcagttcgaccttccctcagga

SEQ ID NO: 341329 - DNA, 25 bp, Homo sapien
tcggaccagcgcattagactctctg

SEQ ID NO: 341330 - DNA, 25 bp, Homo sapien
tatcaccgcaggatgtgtgcagcct

SEQ ID NO: 341331 - DNA, 25 bp, Homo sapien
ccaggcctggttcccgcacatcctc

SEQ ID NO: 341332 - DNA, 25 bp, Homo sapien
caggcctggttcccgcacatcctca

SEQ ID NO: 341333 - DNA, 25 bp, Homo sapien
cctctcttaagcgaggctcgggcgg

SEQ ID NO: 341334 - DNA, 25 bp, Homo sapien
ggttatcagacccacactggaggct

SEQ ID NO: 341335 - DNA, 25 bp, Homo sapien
tagggctggaaccaactaagggctc

SEQ ID NO: 341336 - DNA, 25 bp, Homo sapien
tctcttcagactaggacaagctggc

SEQ ID NO: 341337 - DNA, 25 bp, Homo sapien
tactggctcccgtctggttatcaga

SEQ ID NO: 341338 - DNA, 25 bp, Homo sapien
agatctggcagagcggcggcgcatc

SEQ ID NO: 341339 - DNA, 25 bp, Homo sapien
ccatccgggaactgcagcggcagga

SEQ ID NO: 341340 - DNA, 25 bp, Homo sapien
gcgcatccgctcagccatccgggaa

SEQ ID NO: 341341 - DNA, 25 bp, Homo sapien
gctggaggtcacagcagatctggca

SEQ ID NO: 341342 - DNA, 25 bp, Homo sapien
ctgggaggttgtacagcgggcgtcc

SEQ ID NO: 341343 - DNA, 25 bp, Homo sapien
tgtacagcgggcgtcccaacagtgg

SEQ ID NO: 341344 - DNA, 25 bp, Homo sapien
tcccaacagtggctcaagagaggac

SEQ ID NO: 341345 - DNA, 25 bp, Homo sapien
acagcaaggggctagcggcacacag

SEQ ID NO: 341346 - DNA, 25 bp, Homo sapien
ttcctcattccagcgggctggctct

SEQ ID NO: 341347 - DNA, 25 bp, Homo sapien
ctctgtgcgggatcgtgtccacaag

SEQ ID NO: 341348 - DNA, 25 bp, Homo sapien
tggctgctaggctccaggatggcac

SEQ ID NO: 341349 - DNA, 25 bp, Homo sapien
gtgtccacaagttcacatctgattc

SEQ ID NO: 341350 - DNA, 25 bp, Homo sapien
cccgggatgctgagcgcttcattct

SEQ ID NO: 341351 - DNA, 25 bp, Homo sapien
ggacgggcatcggctctcagcaaga

SEQ ID NO: 341352 - DNA, 25 bp, Homo sapien
gatgctgagcgcttcattctgtctc

SEQ ID NO: 341353 - DNA, 25 bp, Homo sapien
caggagggaatttagtggagctggg

SEQ ID NO: 341354 - DNA, 25 bp, Homo sapien
tcgggcgccgccttgcggtagaagc

SEQ ID NO: 341355 - DNA, 25 bp, Homo sapien
ggtcagcgtggtccgaagtttcctc

SEQ ID NO: 341356 - DNA, 25 bp, Homo sapien
agctcctgcactagcgcattgatct

SEQ ID NO: 341357 - DNA, 25 bp, Homo sapien
atctcttcgcgggtcatttcactga

SEQ ID NO: 341358 - DNA, 25 bp, Homo sapien
ggggtcagcaggctgggcctcgcct

SEQ ID NO: 341359 - DNA, 25 bp, Homo sapien
ctgggcctcgcctctggcctcgccc

SEQ ID NO: 341360 - DNA, 25 bp, Homo sapien
ggtcagcaggctgggcctcgcctct

SEQ ID NO: 341361 - DNA, 25 bp, Homo sapien
ggcggggtcagcaggctgggcctcg

SEQ ID NO: 341362 - DNA, 25 bp, Homo sapien
agttcctcgtagcggcggcccagca

SEQ ID NO: 341363 - DNA, 25 bp, Homo sapien
tctagttcctcgtagcggcggccca

SEQ ID NO: 341364 - DNA, 25 bp, Homo sapien
ctctagttcctcgtagcggcggccc

SEQ ID NO: 341365 - DNA, 25 bp, Homo sapien
ctagttcctcgtagcggcggcccag

SEQ ID NO: 341366 - DNA, 25 bp, Homo sapien
gaggtggtggtttccgcagccttac

SEQ ID NO: 341367 - DNA, 25 bp, Homo sapien
tctgaagttacgtggagattctccc

SEQ ID NO: 341368 - DNA, 25 bp, Homo sapien
tccattctgtggcagtcatcactag

SEQ ID NO: 341369 - DNA, 25 bp, Homo sapien
gcagccttactgatgggaacagcat

SEQ ID NO: 341370 - DNA, 25 bp, Homo sapien
gaatggaatgtcctgcgtgacgaaa

SEQ ID NO: 341371 - DNA, 25 bp, Homo sapien
ggaatgtcctgcgtgacgaaagcct

SEQ ID NO: 341372 - DNA, 25 bp, Homo sapien
tgtcctgcgtgacgaaagccttcac

SEQ ID NO: 341373 - DNA, 25 bp, Homo sapien
tagaatggaatgtcctgcgtgacga

SEQ ID NO: 341374 - DNA, 25 bp, Homo sapien
ggaggaaccagagcatcagagacca

SEQ ID NO: 341375 - DNA, 25 bp, Homo sapien
aaccagagcatcagagaccatgacc

SEQ ID NO: 341376 - DNA, 25 bp, Homo sapien
ggaaccagagcatcagagaccatga

SEQ ID NO: 341377 - DNA, 25 bp, Homo sapien
catgacctcagtctactcgaggtac

SEQ ID NO: 341378 - DNA, 25 bp, Homo sapien
agtccttcacgtttattccagtcac

SEQ ID NO: 341379 - DNA, 25 bp, Homo sapien
tccccaaagccatacttccttatcc

SEQ ID NO: 341380 - DNA, 25 bp, Homo sapien
ggagtccttcacgtttattccagtc

SEQ ID NO: 341381 - DNA, 25 bp, Homo sapien
gagtccttcacgtttattccagtca

SEQ ID NO: 341382 - DNA, 25 bp, Homo sapien
atccccggatcagcagttcccaagg

SEQ ID NO: 341383 - DNA, 25 bp, Homo sapien
agttgggtcgggctgtgagttatcc

SEQ ID NO: 341384 - DNA, 25 bp, Homo sapien
gagttatccccggatcagcagttcc

SEQ ID NO: 341385 - DNA, 25 bp, Homo sapien
ttgggtcgggctgtgagttatcccc

SEQ ID NO: 341386 - DNA, 25 bp, Homo sapien
cagaagggggaactgtgtatacagg

SEQ ID NO: 341387 - DNA, 25 bp, Homo sapien
gcagaagggggaactgtgtatacag

SEQ ID NO: 341388 - DNA, 25 bp, Homo sapien
cattggagacacctaccatctggtc

SEQ ID NO: 341389 - DNA, 25 bp, Homo sapien
acatagcaagacagggactccgaac

SEQ ID NO: 341390 - DNA, 25 bp, Homo sapien
gatccctgaaatctcacagtggagg

SEQ ID NO: 341391 - DNA, 25 bp, Homo sapien
gagtcataggccacgagaagagtta

SEQ ID NO: 341392 - DNA, 25 bp, Homo sapien
gcttccacggtggatgctggggcca

SEQ ID NO: 341393 - DNA, 25 bp, Homo sapien
tcaggcttccacggtggatgctggg

SEQ ID NO: 341394 - DNA, 25 bp, Homo sapien
aggcttccacggtggatgctggggc

SEQ ID NO: 341395 - DNA, 25 bp, Homo sapien
ttccacggtggatgctggggccatc

SEQ ID NO: 341396 - DNA, 25 bp, Homo sapien
gactcgcggttcgaggtggtcttgg

SEQ ID NO: 341397 - DNA, 25 bp, Homo sapien
ccgggacggacggtgctcccatggg

SEQ ID NO: 341398 - DNA, 25 bp, Homo sapien
gggaaagcagggagactcgcggttc

SEQ ID NO: 341399 - DNA, 25 bp, Homo sapien
ggaacaggagggatggtcccggcgc

SEQ ID NO: 341400 - DNA, 25 bp, Homo sapien
tcagacggttccagtccggccggta

SEQ ID NO: 341401 - DNA, 25 bp, Homo sapien
gccacaagcgccgcgagaagcagca

SEQ ID NO: 341402 - DNA, 25 bp, Homo sapien
ccgggcgcgggttaggccgctcaga

SEQ ID NO: 341403 - DNA, 25 bp, Homo sapien
gcagcagcgccagcggaggcaacag

SEQ ID NO: 341404 - DNA, 25 bp, Homo sapien
gggacccggccgcagatgatgcgca

SEQ ID NO: 341405 - DNA, 25 bp, Homo sapien
cgggacccggccgcagatgatgcgc

SEQ ID NO: 341406 - DNA, 25 bp, Homo sapien
gacccggccgcagatgatgcgcaag

SEQ ID NO: 341407 - DNA, 25 bp, Homo sapien
ggacccggccgcagatgatgcgcaa

SEQ ID NO: 341408 - DNA, 25 bp, Homo sapien
ctggaggcgaacctccgagtcgctg

SEQ ID NO: 341409 - DNA, 25 bp, Homo sapien
cgctagaggcccagtcccgctggag

SEQ ID NO: 341410 - DNA, 25 bp, Homo sapien
agcgctcggtctccgccccaggact

SEQ ID NO: 341411 - DNA, 25 bp, Homo sapien
ccccactcccgctagaggcccagtc

SEQ ID NO: 341412 - DNA, 25 bp, Homo sapien
tagaggcccagtcccgctggagacc

SEQ ID NO: 341413 - DNA, 25 bp, Homo sapien
tggagtttctgagccgaacctgcga

SEQ ID NO: 341414 - DNA, 25 bp, Homo sapien
ttttgtcgaccgaggatgtggacgc

SEQ ID NO: 341415 - DNA, 25 bp, Homo sapien
actttcccaggtccgagagtgtcga

SEQ ID NO: 341416 - DNA, 25 bp, Homo sapien
agagtgtcgacgctccttttgtcga

SEQ ID NO: 341417 - DNA, 25 bp, Homo sapien
ttcgatttggcagcacggactctcc

SEQ ID NO: 341418 - DNA, 25 bp, Homo sapien
gaattatccactgcctctccaggag

SEQ ID NO: 341419 - DNA, 25 bp, Homo sapien
tggctgtgtaatccctgggcctcgg

SEQ ID NO: 341420 - DNA, 25 bp, Homo sapien
tcctctgtcgggaagaattatccac

SEQ ID NO: 341421 - DNA, 25 bp, Homo sapien
gtatgtgaagttccctggcaaggcc

SEQ ID NO: 341422 - DNA, 25 bp, Homo sapien
catgcttcagtctaacctacggagg

SEQ ID NO: 341423 - DNA, 25 bp, Homo sapien
tcatacatagctcaaggttacccag

SEQ ID NO: 341424 - DNA, 25 bp, Homo sapien
tcacaggtgagcgaactgaggcctt

SEQ ID NO: 341425 - DNA, 25 bp, Homo sapien
atcctggagctggtgtcgcctctgc

SEQ ID NO: 341426 - DNA, 25 bp, Homo sapien
ggcactggttgtagaatgacatggg

SEQ ID NO: 341427 - DNA, 25 bp, Homo sapien
gctggtgtcgcctctgctgaagcct

SEQ ID NO: 341428 - DNA, 25 bp, Homo sapien
ctgatggccctagggtctctggaac

SEQ ID NO: 341429 - DNA, 25 bp, Homo sapien
gcagctcccaaagcatgttggtaac

SEQ ID NO: 341430 - DNA, 25 bp, Homo sapien
cttgaagcaggttgtgcccagcagc

SEQ ID NO: 341431 - DNA, 25 bp, Homo sapien
ccagcttgaagcaggttgtgcccag

SEQ ID NO: 341432 - DNA, 25 bp, Homo sapien
aaagcatgttggtaacctcgggtgg

SEQ ID NO: 341433 - DNA, 25 bp, Homo sapien
agaacagaggcaggctcaggccggg

SEQ ID NO: 341434 - DNA, 25 bp, Homo sapien
gcaggctcaggccggggcagggcct

SEQ ID NO: 341435 - DNA, 25 bp, Homo sapien
tgagaacagaggcaggctcaggccg

SEQ ID NO: 341436 - DNA, 25 bp, Homo sapien
gcagggccttgccagccaggggccc

SEQ ID NO: 341437 - DNA, 25 bp, Homo sapien
agcagctggaactcgatttcccggg

SEQ ID NO: 341438 - DNA, 25 bp, Homo sapien
tgctcacactggtccaggtggcggc

SEQ ID NO: 341439 - DNA, 25 bp, Homo sapien
tttcccggggcccaatctggtgctc

SEQ ID NO: 341440 - DNA, 25 bp, Homo sapien
tgagcagctggaactcgatttcccg

SEQ ID NO: 341441 - DNA, 25 bp, Homo sapien
ggcgcttggaccctttctgatgtgg

SEQ ID NO: 341442 - DNA, 25 bp, Homo sapien
gcctgggagagaccatagggtcctg

SEQ ID NO: 341443 - DNA, 25 bp, Homo sapien
cctgaggttttaggccaccctgtgg

SEQ ID NO: 341444 - DNA, 25 bp, Homo sapien
ttccgaaggtgctgcttctgtcgag

SEQ ID NO: 341445 - DNA, 25 bp, Homo sapien
ccaggaggcattgtagaaggtcctg

SEQ ID NO: 341446 - DNA, 25 bp, Homo sapien
gcattgtagaaggtcctgggctgca

SEQ ID NO: 341447 - DNA, 25 bp, Homo sapien
gggcactgtgccgtacatcctacac

SEQ ID NO: 341448 - DNA, 25 bp, Homo sapien
tgggctgcaggcgagcgaggggcac

SEQ ID NO: 341449 - DNA, 25 bp, Homo sapien
ccgccccaccagtaccacgccacac

SEQ ID NO: 341450 - DNA, 25 bp, Homo sapien
aaagcaggggatctccagcacgttg

SEQ ID NO: 341451 - DNA, 25 bp, Homo sapien
cacgatgtccgagatggagtcgtgc

SEQ ID NO: 341452 - DNA, 25 bp, Homo sapien
gttgaagaaggccacgcccacgatg

SEQ ID NO: 341453 - DNA, 25 bp, Homo sapien
ctgattctgtaggcattgctgaaac

SEQ ID NO: 341454 - DNA, 25 bp, Homo sapien
tgtggaatcggtagtttcggatgcc

SEQ ID NO: 341455 - DNA, 25 bp, Homo sapien
ctggtgtcacagtcacagtgggaga

SEQ ID NO: 341456 - DNA, 25 bp, Homo sapien
gttcccggcaacagagatcaggtcc

SEQ ID NO: 341457 - DNA, 25 bp, Homo sapien
tgtactgcaagggtgagatgttctg

SEQ ID NO: 341458 - DNA, 25 bp, Homo sapien
tctcctcaagcgctcggcatgcctc

SEQ ID NO: 341459 - DNA, 25 bp, Homo sapien
ttctctcgctggtgccctccaccag

SEQ ID NO: 341460 - DNA, 25 bp, Homo sapien
agcgctcggcatgcctcccactgac

SEQ ID NO: 341461 - DNA, 25 bp, Homo sapien
ccagctccgaggagttcccagcaga

SEQ ID NO: 341462 - DNA, 25 bp, Homo sapien
agctacatgactgcagcctcctatg

SEQ ID NO: 341463 - DNA, 25 bp, Homo sapien
cagggacggccttggtcaagtggca

SEQ ID NO: 341464 - DNA, 25 bp, Homo sapien
gaagctcaggtaccccagtgggttg

SEQ ID NO: 341465 - DNA, 25 bp, Homo sapien
cctcctatgcgcatcccagcgggca

SEQ ID NO: 341466 - DNA, 25 bp, Homo sapien
ctgtaccagcggagggcaggggagc

SEQ ID NO: 341467 - DNA, 25 bp, Homo sapien
caggaagcccagcatcccaaacagc

SEQ ID NO: 341468 - DNA, 25 bp, Homo sapien
gaagcccagcatcccaaacagccct

SEQ ID NO: 341469 - DNA, 25 bp, Homo sapien
gcatcccaaacagccctgcctgaac

SEQ ID NO: 341470 - DNA, 25 bp, Homo sapien
caccagccgggcaggacgctgattg

SEQ ID NO: 341471 - DNA, 25 bp, Homo sapien
tgcggcgggaccaatgaatggagct

SEQ ID NO: 341472 - DNA, 25 bp, Homo sapien
ctgagcagtggaacggaagcggagc

SEQ ID NO: 341473 - DNA, 25 bp, Homo sapien
tgatcttgggcttgtaaccgaatcc

SEQ ID NO: 341474 - DNA, 25 bp, Homo sapien
atgcctactggcgtccctctagcaa

SEQ ID NO: 341475 - DNA, 25 bp, Homo sapien
tggatcagcaatatcccagggtctt

SEQ ID NO: 341476 - DNA, 25 bp, Homo sapien
tatgattaacgcagaaagaagggac

SEQ ID NO: 341477 - DNA, 25 bp, Homo sapien
cttggtggatgcattcctggtggaa

SEQ ID NO: 341478 - DNA, 25 bp, Homo sapien
ctccagtaatgctcttctctgtgga

SEQ ID NO: 341479 - DNA, 25 bp, Homo sapien
gctccagtaatgctcttctctgtgg

SEQ ID NO: 341480 - DNA, 25 bp, Homo sapien
tgggacggggcctgctaatccacca

SEQ ID NO: 341481 - DNA, 25 bp, Homo sapien
caactcctgggacggggcctgctaa

SEQ ID NO: 341482 - DNA, 25 bp, Homo sapien
cctgctaatccaccaggagcctggg

SEQ ID NO: 341483 - DNA, 25 bp, Homo sapien
gggcctgctaatccaccaggagcct

SEQ ID NO: 341484 - DNA, 25 bp, Homo sapien
cagctgccctaacaactccagggcc

SEQ ID NO: 341485 - DNA, 25 bp, Homo sapien
tgccctaacaactccagggcctcct

SEQ ID NO: 341486 - DNA, 25 bp, Homo sapien
cctcctgcagctccagcaagtggta

SEQ ID NO: 341487 - DNA, 25 bp, Homo sapien
ctcctgcagctccagcaagtggtac

SEQ ID NO: 341488 - DNA, 25 bp, Homo sapien
agcaacaccagaccccaaaagtgct

SEQ ID NO: 341489 - DNA, 25 bp, Homo sapien
tgtcaaacgccttaaagatgccaaa

SEQ ID NO: 341490 - DNA, 25 bp, Homo sapien
ctggttgcttcacgttctttggctt

SEQ ID NO: 341491 - DNA, 25 bp, Homo sapien
gtcaaacgccttaaagatgccaaag

SEQ ID NO: 341492 - DNA, 25 bp, Homo sapien
ctgctgcagccttgctactcgtgcc

SEQ ID NO: 341493 - DNA, 25 bp, Homo sapien
gcttcaccaaatcccgtgtccacag

SEQ ID NO: 341494 - DNA, 25 bp, Homo sapien
acagtcgtgattgctgcttcaccaa

SEQ ID NO: 341495 - DNA, 25 bp, Homo sapien
tcgtgcttcttaagacctgggggaa

SEQ ID NO: 341496 - DNA, 25 bp, Homo sapien
cgcggcgttagtattggccgtgtac

SEQ ID NO: 341497 - DNA, 25 bp, Homo sapien
ccaacagattgacgcggcgttagta

SEQ ID NO: 341498 - DNA, 25 bp, Homo sapien
gccgtgtacccgaaaaactgattga

SEQ ID NO: 341499 - DNA, 25 bp, Homo sapien
aactgattgactgggctggcgttaa

SEQ ID NO: 341500 - DNA, 25 bp, Homo sapien
ctgtgcggaggcaggtatgtgaggg

SEQ ID NO: 341501 - DNA, 25 bp, Homo sapien
tgtgcggaggcaggtatgtgagggg

SEQ ID NO: 341502 - DNA, 25 bp, Homo sapien
cccgaaaagaggacgagctggcgtt

SEQ ID NO: 341503 - DNA, 25 bp, Homo sapien
gccttgcgaaagagaagggctccca

SEQ ID NO: 341504 - DNA, 25 bp, Homo sapien
tcctttcgaggcatgggcactgatt

SEQ ID NO: 341505 - DNA, 25 bp, Homo sapien
agctggcgttgtggttctgcgtccc

SEQ ID NO: 341506 - DNA, 25 bp, Homo sapien
ccatccttcttttcaaggactttgg

SEQ ID NO: 341507 - DNA, 25 bp, Homo sapien
accatccttcttttcaaggactttg

SEQ ID NO: 341508 - DNA, 25 bp, Homo sapien
cccggcctgcatttgcactaaaatt

SEQ ID NO: 341509 - DNA, 25 bp, Homo sapien
ccacacccggcctgcatttgcacta

SEQ ID NO: 341510 - DNA, 25 bp, Homo sapien
acacccggcctgcatttgcactaaa

SEQ ID NO: 341511 - DNA, 25 bp, Homo sapien
cacccggcctgcatttgcactaaaa

SEQ ID NO: 341512 - DNA, 25 bp, Homo sapien
ggtgatctgtctgcctcagcctccc

SEQ ID NO: 341513 - DNA, 25 bp, Homo sapien
cagggttgctctatgttggtcaagc

SEQ ID NO: 341514 - DNA, 25 bp, Homo sapien
agctggtctggaactcccggcctca

SEQ ID NO: 341515 - DNA, 25 bp, Homo sapien
gacagggttgctctatgttggtcaa

SEQ ID NO: 341516 - DNA, 25 bp, Homo sapien
cattgttttgtcaagtatataccgg

SEQ ID NO: 341517 - DNA, 25 bp, Homo sapien
cttaattggttagatcttgtcaaac

SEQ ID NO: 341518 - DNA, 25 bp, Homo sapien
ttagctcaacctcaggtaaaatatg

SEQ ID NO: 341519 - DNA, 25 bp, Homo sapien
tcagaatatcttagaggtctttagc

SEQ ID NO: 341520 - DNA, 25 bp, Homo sapien
gccgttgcacttcagttgggcgaca

SEQ ID NO: 341521 - DNA, 25 bp, Homo sapien
cgcctcgcaagcttaagcgattctc

SEQ ID NO: 341522 - DNA, 25 bp, Homo sapien
tcctgactgtctggggctacaggtg

SEQ ID NO: 341523 - DNA, 25 bp, Homo sapien
acttccgcctcgcaagcttaagcga

SEQ ID NO: 341524 - DNA, 25 bp, Homo sapien
ttccgcctcgcaagcttaagcgatt

SEQ ID NO: 341525 - DNA, 25 bp, Homo sapien
gaaaaggtattcagccacagcgtgg

SEQ ID NO: 341526 - DNA, 25 bp, Homo sapien
gcctcataggttaatgtgaccgtcc

SEQ ID NO: 341527 - DNA, 25 bp, Homo sapien
ggtgcatccctgagcaaatctgcta

SEQ ID NO: 341528 - DNA, 25 bp, Homo sapien
gattacatatccaacagcggttcca

SEQ ID NO: 341529 - DNA, 25 bp, Homo sapien
gaagcagaacggttagtcctcagga

SEQ ID NO: 341530 - DNA, 25 bp, Homo sapien
cacacgtacagtgctgaaacccaga

SEQ ID NO: 341531 - DNA, 25 bp, Homo sapien
tcccaggagccattagattcaacca

SEQ ID NO: 341532 - DNA, 25 bp, Homo sapien
gatgaaacaattgcaccttcccaag

SEQ ID NO: 341533 - DNA, 25 bp, Homo sapien
ccaccgctgtaaacactctataact

SEQ ID NO: 341534 - DNA, 25 bp, Homo sapien
gaatatcgccaccgctgtaaacact

SEQ ID NO: 341535 - DNA, 25 bp, Homo sapien
cgctgtaaacactctataacttcag

SEQ ID NO: 341536 - DNA, 25 bp, Homo sapien
atatcgccaccgctgtaaacactct

SEQ ID NO: 341537 - DNA, 25 bp, Homo sapien
tttggcctcagagaacaacttgaat

SEQ ID NO: 341538 - DNA, 25 bp, Homo sapien
ctttggcctcagagaacaacttgaa

SEQ ID NO: 341539 - DNA, 25 bp, Homo sapien
acaacttgaatgacttcctggtttc

SEQ ID NO: 341540 - DNA, 25 bp, Homo sapien
agaacaacttgaatgacttcctggt

SEQ ID NO: 341541 - DNA, 25 bp, Homo sapien
gaatactgccgaagctgagactgac

SEQ ID NO: 341542 - DNA, 25 bp, Homo sapien
cagagaacatacagccgagaatact

SEQ ID NO: 341543 - DNA, 25 bp, Homo sapien
taaaactatgttcatctgcctctct

SEQ ID NO: 341544 - DNA, 25 bp, Homo sapien
tctccctaaaactatgttcatctgc

SEQ ID NO: 341545 - DNA, 25 bp, Homo sapien
cacccttgtggactaggaccaggtc

SEQ ID NO: 341546 - DNA, 25 bp, Homo sapien
tcagatggactcaacagaaatgggt

SEQ ID NO: 341547 - DNA, 25 bp, Homo sapien
tcatatgccgaatccacttggtagg

SEQ ID NO: 341548 - DNA, 25 bp, Homo sapien
tctctagagagaattggtgggaccc

SEQ ID NO: 341549 - DNA, 25 bp, Homo sapien
gagaattgtgctcgcctttgtcttt

SEQ ID NO: 341550 - DNA, 25 bp, Homo sapien
cggcatccggtttgaattagagcag

SEQ ID NO: 341551 - DNA, 25 bp, Homo sapien
caggaaggaagagaattgtgctcgc

SEQ ID NO: 341552 - DNA, 25 bp, Homo sapien
tccggtttgaattagagcaggaagg

SEQ ID NO: 341553 - DNA, 25 bp, Homo sapien
gggcggggccgcgtctcgggagcga

SEQ ID NO: 341554 - DNA, 25 bp, Homo sapien
gcacctcgaggggacgccgctcgca

SEQ ID NO: 341555 - DNA, 25 bp, Homo sapien
ccgctcgcactagggggcgccaggg

SEQ ID NO: 341556 - DNA, 25 bp, Homo sapien
aggggacgccgctcgcactaggggg

SEQ ID NO: 341557 - DNA, 25 bp, Homo sapien
tgccaggtgtggtttggtcctccca

SEQ ID NO: 341558 - DNA, 25 bp, Homo sapien
gcgccgtaggcggtgcatcccgttc

SEQ ID NO: 341559 - DNA, 25 bp, Homo sapien
ggcgtcggcgggcagtcccctgtgc

SEQ ID NO: 341560 - DNA, 25 bp, Homo sapien
taggcggtgcatcccgttcgcgcct

SEQ ID NO: 341561 - DNA, 25 bp, Homo sapien
gggtccaccagggtcagcgtccaga

SEQ ID NO: 341562 - DNA, 25 bp, Homo sapien
ctgggtccaccagggtcagcgtcca

SEQ ID NO: 341563 - DNA, 25 bp, Homo sapien
ctctgggtccaccagggtcagcgtc

SEQ ID NO: 341564 - DNA, 25 bp, Homo sapien
gtccaccagggtcagcgtccagaag

SEQ ID NO: 341565 - DNA, 25 bp, Homo sapien
cagcataaaaaggccctagggtagg

SEQ ID NO: 341566 - DNA, 25 bp, Homo sapien
gctgacccctggagataagtaaaag

SEQ ID NO: 341567 - DNA, 25 bp, Homo sapien
tagtgcctttgagccttggagctgg

SEQ ID NO: 341568 - DNA, 25 bp, Homo sapien
aaaatgcaagtttatgctgacccct

SEQ ID NO: 341569 - DNA, 25 bp, Homo sapien
taaaacttaacgagtttgcatgtca

SEQ ID NO: 341570 - DNA, 25 bp, Homo sapien
gggagtctaacccagagctgagata

SEQ ID NO: 341571 - DNA, 25 bp, Homo sapien
agctgagatagcttgcagtgtggat

SEQ ID NO: 341572 - DNA, 25 bp, Homo sapien
tagcttgcagtgtggatgagccagc

SEQ ID NO: 341573 - DNA, 25 bp, Homo sapien
ccagctgagtacagcagatagggaa

SEQ ID NO: 341574 - DNA, 25 bp, Homo sapien
agtgaagtgaaattgtgggagtgga

SEQ ID NO: 341575 - DNA, 25 bp, Homo sapien
taaacactattgtacttggaccagc

SEQ ID NO: 341576 - DNA, 25 bp, Homo sapien
tacttgtaaacactattgtacttgg

SEQ ID NO: 341577 - DNA, 25 bp, Homo sapien
ggctagtgaagtgaaattgtgggag

SEQ ID NO: 341578 - DNA, 25 bp, Homo sapien
gtatctggggcaatcctttctgatg

SEQ ID NO: 341579 - DNA, 25 bp, Homo sapien
tgtatctggggcaatcctttctgat

SEQ ID NO: 341580 - DNA, 25 bp, Homo sapien
acctttgattctggctgtggccttc

SEQ ID NO: 341581 - DNA, 25 bp, Homo sapien
tgcctggccagtgcaacccccattt

SEQ ID NO: 341582 - DNA, 25 bp, Homo sapien
ttatactaaaacaggaaggcccaga

SEQ ID NO: 341583 - DNA, 25 bp, Homo sapien
gtgcttgggattacggaagtaagcc

SEQ ID NO: 341584 - DNA, 25 bp, Homo sapien
agtgcttgggattacggaagtaagc

SEQ ID NO: 341585 - DNA, 25 bp, Homo sapien
tctggccatgactgggacttaacag

SEQ ID NO: 341586 - DNA, 25 bp, Homo sapien
tggctcccacctcaaaaagttgtta

SEQ ID NO: 341587 - DNA, 25 bp, Homo sapien
ggataaagttcggagtcaggctgct

SEQ ID NO: 341588 - DNA, 25 bp, Homo sapien
taaatgccagcttcacttaccagcc

SEQ ID NO: 341589 - DNA, 25 bp, Homo sapien
cacagaatgtctacacctctttgga

SEQ ID NO: 341590 - DNA, 25 bp, Homo sapien
gattagggtcattcaccaagaaaac

SEQ ID NO: 341591 - DNA, 25 bp, Homo sapien
tacagaggaagaagttgaagcccag

SEQ ID NO: 341592 - DNA, 25 bp, Homo sapien
caaaagctaggcctagattagggtc

SEQ ID NO: 341593 - DNA, 25 bp, Homo sapien
ctgactttgtgatctgcctgcttca

SEQ ID NO: 341594 - DNA, 25 bp, Homo sapien
acaggcgcacacccccactcctggc

SEQ ID NO: 341595 - DNA, 25 bp, Homo sapien
ccgaggagctgttactacaggcgca

SEQ ID NO: 341596 - DNA, 25 bp, Homo sapien
gctaattttatgtgttttagtagag

SEQ ID NO: 341597 - DNA, 25 bp, Homo sapien
ggcctatatgacctgtgatttttaa

SEQ ID NO: 341598 - DNA, 25 bp, Homo sapien
accatgactggcctgattgactgat

SEQ ID NO: 341599 - DNA, 25 bp, Homo sapien
tatgcctggcctatatgacctgtga

SEQ ID NO: 341600 - DNA, 25 bp, Homo sapien
aaaagaatgctttgtgacatgtgga

SEQ ID NO: 341601 - DNA, 25 bp, Homo sapien
caattgagtggccacgacagtctgt

SEQ ID NO: 341602 - DNA, 25 bp, Homo sapien
tacagaaaaagtgccttgacctgtg

SEQ ID NO: 341603 - DNA, 25 bp, Homo sapien
tgctctagagccatatgtaccaggt

SEQ ID NO: 341604 - DNA, 25 bp, Homo sapien
gacagtctgtatggcctgcagagcc

SEQ ID NO: 341605 - DNA, 25 bp, Homo sapien
gcctgcttgttcttacacatcctag

SEQ ID NO: 341606 - DNA, 25 bp, Homo sapien
agggctgggcctctatcttatctca

SEQ ID NO: 341607 - DNA, 25 bp, Homo sapien
tcctagatgcacagtaactatttcc

SEQ ID NO: 341608 - DNA, 25 bp, Homo sapien
ccccataaggttgagaatttacctg

SEQ ID NO: 341609 - DNA, 25 bp, Homo sapien
aatagaagctattaccgtgatccag

SEQ ID NO: 341610 - DNA, 25 bp, Homo sapien
gagatgtgaataactacaatgatgg

SEQ ID NO: 341611 - DNA, 25 bp, Homo sapien
ccgtgatccaggtaagagatgtgaa

SEQ ID NO: 341612 - DNA, 25 bp, Homo sapien
agatgagggaactccagattgggaa

SEQ ID NO: 341613 - DNA, 25 bp, Homo sapien
gactgttcatgtggctgtctagcta

SEQ ID NO: 341614 - DNA, 25 bp, Homo sapien
gataaggggcagatgagactcagaa

SEQ ID NO: 341615 - DNA, 25 bp, Homo sapien
agtggcttgcacatggtcgataagg

SEQ ID NO: 341616 - DNA, 25 bp, Homo sapien
agagactgttcatgtggctgtctag

SEQ ID NO: 341617 - DNA, 25 bp, Homo sapien
taacccagctctcagtggatacagg

SEQ ID NO: 341618 - DNA, 25 bp, Homo sapien
agacacagacaaggcagggtaggat

SEQ ID NO: 341619 - DNA, 25 bp, Homo sapien
tgaacacctctgttcagagcactgg

SEQ ID NO: 341620 - DNA, 25 bp, Homo sapien
gagcagatgctgatttggaacactt

SEQ ID NO: 341621 - DNA, 25 bp, Homo sapien
gagggcccagtgaggcgccaaggga

SEQ ID NO: 341622 - DNA, 25 bp, Homo sapien
cagtgaggcgccaagggaaggtcac

SEQ ID NO: 341623 - DNA, 25 bp, Homo sapien
ggagcagctcacgcgcctctacgac

SEQ ID NO: 341624 - DNA, 25 bp, Homo sapien
agctcacgcgcctctacgactgcca

SEQ ID NO: 341625 - DNA, 25 bp, Homo sapien
ctttataggccaaggaccgcagtcc

SEQ ID NO: 341626 - DNA, 25 bp, Homo sapien
taacaccagtgtaaaagcttgagga

SEQ ID NO: 341627 - DNA, 25 bp, Homo sapien
tagggtacgcctttggtgcagctca

SEQ ID NO: 341628 - DNA, 25 bp, Homo sapien
ccagcggtccacattagagttgaaa

SEQ ID NO: 341629 - DNA, 25 bp, Homo sapien
taaatatggtcgtcagagcaggcct

SEQ ID NO: 341630 - DNA, 25 bp, Homo sapien
tgtgagcatgcagtacggcctgacc

SEQ ID NO: 341631 - DNA, 25 bp, Homo sapien
gaggtaccggtaacattatgcccat

SEQ ID NO: 341632 - DNA, 25 bp, Homo sapien
taaagacgattgttcagggtaccag

SEQ ID NO: 341633 - DNA, 25 bp, Homo sapien
cccttaatatgtggtggaacaggcc

SEQ ID NO: 341634 - DNA, 25 bp, Homo sapien
gagactggctgagaacttacggaca

SEQ ID NO: 341635 - DNA, 25 bp, Homo sapien
tctgttactcatactcgggtgggct

SEQ ID NO: 341636 - DNA, 25 bp, Homo sapien
gacagtgtggcttgtcacaggccta

SEQ ID NO: 341637 - DNA, 25 bp, Homo sapien
gactgactatgaccttttcctggcc

SEQ ID NO: 341638 - DNA, 25 bp, Homo sapien
ggagtacgcattgctggcagaacca

SEQ ID NO: 341639 - DNA, 25 bp, Homo sapien
tgcttgagaggagaagaccagtttc

SEQ ID NO: 341640 - DNA, 25 bp, Homo sapien
tgttcctgaggctgataacctgtgg

SEQ ID NO: 341641 - DNA, 25 bp, Homo sapien
actaacaccaagagaccacctgagg

SEQ ID NO: 341642 - DNA, 25 bp, Homo sapien
cacctgaggtctaggtccccaaagc

SEQ ID NO: 341643 - DNA, 25 bp, Homo sapien
tgcaggtgtcagaatgaggtatata

SEQ ID NO: 341644 - DNA, 25 bp, Homo sapien
gatggctccatagaaagccccacta

SEQ ID NO: 341645 - DNA, 25 bp, Homo sapien
cagaggtcagtagggagttccatcc

SEQ ID NO: 341646 - DNA, 25 bp, Homo sapien
agtagcttgcttacgaccttgggca

SEQ ID NO: 341647 - DNA, 25 bp, Homo sapien
ggccccacagtataattcccatagg

SEQ ID NO: 341648 - DNA, 25 bp, Homo sapien
gaaatgttgcgctccgtcaggaagc

SEQ ID NO: 341649 - DNA, 25 bp, Homo sapien
gaataacagtgtatgccactcaagc

SEQ ID NO: 341650 - DNA, 25 bp, Homo sapien
ataacagtgtatgccactcaagccc

SEQ ID NO: 341651 - DNA, 25 bp, Homo sapien
atgaataacagtgtatgccactcaa

SEQ ID NO: 341652 - DNA, 25 bp, Homo sapien
agtggagactgaggccatcttagta

SEQ ID NO: 341653 - DNA, 25 bp, Homo sapien
ctccccgtctatccctggttcagtt

SEQ ID NO: 341654 - DNA, 25 bp, Homo sapien
ccgtctatccctggttcagttccag

SEQ ID NO: 341655 - DNA, 25 bp, Homo sapien
tccaggggtgcaggcaatgtttgga

SEQ ID NO: 341656 - DNA, 25 bp, Homo sapien
tcagttccaggggtgcaggcaatgt

SEQ ID NO: 341657 - DNA, 25 bp, Homo sapien
caaaatctgctccaagggatggaca

SEQ ID NO: 341658 - DNA, 25 bp, Homo sapien
gatggacaaggagcactgttaggac

SEQ ID NO: 341659 - DNA, 25 bp, Homo sapien
cacaaagtggtagttcctcctagct

SEQ ID NO: 341660 - DNA, 25 bp, Homo sapien
cttactaggattcgccaaaaaagcg

SEQ ID NO: 341661 - DNA, 25 bp, Homo sapien
ctcctgagggtcaactggagtctgg

SEQ ID NO: 341662 - DNA, 25 bp, Homo sapien
cagacaagggcagagtgattcgctg

SEQ ID NO: 341663 - DNA, 25 bp, Homo sapien
cacatactttctgatcatgctgttc

SEQ ID NO: 341664 - DNA, 25 bp, Homo sapien
ggtgtggaccacgacagtcttctca

SEQ ID NO: 341665 - DNA, 25 bp, Homo sapien
gacctaacccataaagttgtccaga

SEQ ID NO: 341666 - DNA, 25 bp, Homo sapien
gacctgatcatcctgctgtgagaca

SEQ ID NO: 341667 - DNA, 25 bp, Homo sapien
tctactaaatgtcagctacaggctt

SEQ ID NO: 341668 - DNA, 25 bp, Homo sapien
gagaactatctgaacttcggaccta

SEQ ID NO: 341669 - DNA, 25 bp, Homo sapien
ctagactaccaggacaaagacccgg

SEQ ID NO: 341670 - DNA, 25 bp, Homo sapien
tttgaacccagtcttagcaccggca

SEQ ID NO: 341671 - DNA, 25 bp, Homo sapien
cagactggccatttgaacctcgtgg

SEQ ID NO: 341672 - DNA, 25 bp, Homo sapien
tggcagagctcaaggcttacagtac

SEQ ID NO: 341673 - DNA, 25 bp, Homo sapien
tgcggaacaagaacatccctcacaa

SEQ ID NO: 341674 - DNA, 25 bp, Homo sapien
catttgtaaaatgcggaacaagaac

SEQ ID NO: 341675 - DNA, 25 bp, Homo sapien
gaacatccctcacaaggcttttaag

SEQ ID NO: 341676 - DNA, 25 bp, Homo sapien
gcttttaagtgaggtgtaaaggcac

SEQ ID NO: 341677 - DNA, 25 bp, Homo sapien
catcttgcttccttttgggtaagaa

SEQ ID NO: 341678 - DNA, 25 bp, Homo sapien
gaaagccacaaagtttgactttgtg

SEQ ID NO: 341679 - DNA, 25 bp, Homo sapien
aacatcttgcttccttttgggtaag

SEQ ID NO: 341680 - DNA, 25 bp, Homo sapien
aagaaagccacaaagtttgactttg

SEQ ID NO: 341681 - DNA, 25 bp, Homo sapien
caagatgatgccagctccgatggca

SEQ ID NO: 341682 - DNA, 25 bp, Homo sapien
catcatggtaatgcccagcacgtag

SEQ ID NO: 341683 - DNA, 25 bp, Homo sapien
cttgtaggagtagcccaagatgatg

SEQ ID NO: 341684 - DNA, 25 bp, Homo sapien
tgatgatcaccatcatggtaatgcc

SEQ ID NO: 341685 - DNA, 25 bp, Homo sapien
gcagggcgttggcaggagcgaacac

SEQ ID NO: 341686 - DNA, 25 bp, Homo sapien
tgccgcctcactccgagcgggcagg

SEQ ID NO: 341687 - DNA, 25 bp, Homo sapien
cttggagttcatccgcacccgctgg

SEQ ID NO: 341688 - DNA, 25 bp, Homo sapien
ggctgatcccaatcactggctgcac

SEQ ID NO: 341689 - DNA, 25 bp, Homo sapien
atttctgtcgtgaaggctggcaggg

SEQ ID NO: 341690 - DNA, 25 bp, Homo sapien
ctggatttctgtcgtgaaggctggc

SEQ ID NO: 341691 - DNA, 25 bp, Homo sapien
tggatttctgtcgtgaaggctggca

SEQ ID NO: 341692 - DNA, 25 bp, Homo sapien
tcctggatttctgtcgtgaaggctg

SEQ ID NO: 341693 - DNA, 25 bp, Homo sapien
ggaaacagctctcatcagggactgc

SEQ ID NO: 341694 - DNA, 25 bp, Homo sapien
aaatgagagaggaaggccgtaggga

SEQ ID NO: 341695 - DNA, 25 bp, Homo sapien
ttagggtagatgaaggtgggtcacc

SEQ ID NO: 341696 - DNA, 25 bp, Homo sapien
tcatcagggactgccctgagtgaat

SEQ ID NO: 341697 - DNA, 25 bp, Homo sapien
gcaaacggtcaataaacgctgaggg

SEQ ID NO: 341698 - DNA, 25 bp, Homo sapien
gagaatcactgtaacgcggaaggcg

SEQ ID NO: 341699 - DNA, 25 bp, Homo sapien
aatgttttactttgtgccgggagcg

SEQ ID NO: 341700 - DNA, 25 bp, Homo sapien
tcaaacgacttcttcccgcggtgtg

SEQ ID NO: 341701 - DNA, 25 bp, Homo sapien
tgtcagcgccaggagcggggattcc

SEQ ID NO: 341702 - DNA, 25 bp, Homo sapien
cctgtcagcgccaggagcggggatt

SEQ ID NO: 341703 - DNA, 25 bp, Homo sapien
tcagcgccaggagcggggattcccg

SEQ ID NO: 341704 - DNA, 25 bp, Homo sapien
agccgcttcctgtcagcgccaggag

SEQ ID NO: 341705 - DNA, 25 bp, Homo sapien
tccgggtttcggcagtaactgtgat

SEQ ID NO: 341706 - DNA, 25 bp, Homo sapien
agcgcaggtcctcgcaaggccgttt

SEQ ID NO: 341707 - DNA, 25 bp, Homo sapien
tcgcaaggccgtttctcagggacgc

SEQ ID NO: 341708 - DNA, 25 bp, Homo sapien
cctcgccactgacgtagcaccaggg

SEQ ID NO: 341709 - DNA, 25 bp, Homo sapien
agttgaggcagcggaggcccggcgc

SEQ ID NO: 341710 - DNA, 25 bp, Homo sapien
aggtggccgttgtcccagaaacagc

SEQ ID NO: 341711 - DNA, 25 bp, Homo sapien
ggacacagaatagcgggcagcgaac

SEQ ID NO: 341712 - DNA, 25 bp, Homo sapien
cgggctgaacctcagcctggttagg

SEQ ID NO: 341713 - DNA, 25 bp, Homo sapien
aagaagcccccggacacagaatagc

SEQ ID NO: 341714 - DNA, 25 bp, Homo sapien
gcagcgaacggaagacgcccagcgt

SEQ ID NO: 341715 - DNA, 25 bp, Homo sapien
gcttctgctaggagcatgttgctga

SEQ ID NO: 341716 - DNA, 25 bp, Homo sapien
tccagatccataggcttctgctagg

SEQ ID NO: 341717 - DNA, 25 bp, Homo sapien
tgacgaggaatgcttgtacccaggc

SEQ ID NO: 341718 - DNA, 25 bp, Homo sapien
gcatgttgctgacgaggaatgcttg

SEQ ID NO: 341719 - DNA, 25 bp, Homo sapien
gatatgcaggttgtgcttagcagcc

SEQ ID NO: 341720 - DNA, 25 bp, Homo sapien
tagcagccgatcagtttgagacctg

SEQ ID NO: 341721 - DNA, 25 bp, Homo sapien
tgaacgaccagtgtttaaccgaggc

SEQ ID NO: 341722 - DNA, 25 bp, Homo sapien
tagggagctatgcacccaggaggaa

SEQ ID NO: 341723 - DNA, 25 bp, Homo sapien
ctggcttcttctactaagcatgatg

SEQ ID NO: 341724 - DNA, 25 bp, Homo sapien
agtaaatactgatctctttgtattt

SEQ ID NO: 341725 - DNA, 25 bp, Homo sapien
ttatttgttattgtcccaagtgttc

SEQ ID NO: 341726 - DNA, 25 bp, Homo sapien
ggcttcttctactaagcatgatgtt

SEQ ID NO: 341727 - DNA, 25 bp, Homo sapien
tgaataacatagataaggagcccct

SEQ ID NO: 341728 - DNA, 25 bp, Homo sapien
tcccatagcaaatagggtgtcctgt

SEQ ID NO: 341729 - DNA, 25 bp, Homo sapien
actctttaggaattttgcatgggca

SEQ ID NO: 341730 - DNA, 25 bp, Homo sapien
tgtacccctatctaaaggatcagga

SEQ ID NO: 341731 - DNA, 25 bp, Homo sapien
tcagatcaattcacatcacaaggtc

SEQ ID NO: 341732 - DNA, 25 bp, Homo sapien
ttttaatacagtctgatcagatcaa

SEQ ID NO: 341733 - DNA, 25 bp, Homo sapien
tttttaatacagtctgatcagatca

SEQ ID NO: 341734 - DNA, 25 bp, Homo sapien
cagatcaattcacatcacaaggtca

SEQ ID NO: 341735 - DNA, 25 bp, Homo sapien
ccttaaaaacagttgggcatccgca

SEQ ID NO: 341736 - DNA, 25 bp, Homo sapien
aaaatgctcgcctccaagcagggct

SEQ ID NO: 341737 - DNA, 25 bp, Homo sapien
ggtacacaatgtccctacctgccgg

SEQ ID NO: 341738 - DNA, 25 bp, Homo sapien
tactaaccctaatgtgtgactgcgg

SEQ ID NO: 341739 - DNA, 25 bp, Homo sapien
gactgaacaatctgaaacccaaagg

SEQ ID NO: 341740 - DNA, 25 bp, Homo sapien
tctactaaagatgacgcaaatgccg

SEQ ID NO: 341741 - DNA, 25 bp, Homo sapien
cccaaaggactcgaggagagacatg

SEQ ID NO: 341742 - DNA, 25 bp, Homo sapien
gacttagagcggaagaagctcccac

SEQ ID NO: 341743 - DNA, 25 bp, Homo sapien
tcaatcggatcctgatgtgagcatt

SEQ ID NO: 341744 - DNA, 25 bp, Homo sapien
aatcggatcctgatgtgagcatttc

SEQ ID NO: 341745 - DNA, 25 bp, Homo sapien
tcggatcctgatgtgagcatttctg

SEQ ID NO: 341746 - DNA, 25 bp, Homo sapien
cggatcctgatgtgagcatttctgg

SEQ ID NO: 341747 - DNA, 25 bp, Homo sapien
ctgtggagggcagccattggccagc

SEQ ID NO: 341748 - DNA, 25 bp, Homo sapien
gtggagggcagccattggccagcca

SEQ ID NO: 341749 - DNA, 25 bp, Homo sapien
ggagggcagccattggccagccact

SEQ ID NO: 341750 - DNA, 25 bp, Homo sapien
agggcagccattggccagccactgc

SEQ ID NO: 341751 - DNA, 25 bp, Homo sapien
ccggcccactgggtcaaaagaggag

SEQ ID NO: 341752 - DNA, 25 bp, Homo sapien
ccaccggcccactgggtcaaaagag

SEQ ID NO: 341753 - DNA, 25 bp, Homo sapien
ggagaaagcattcagccgcagctcc

SEQ ID NO: 341754 - DNA, 25 bp, Homo sapien
ggcccactgggtcaaaagaggagaa

SEQ ID NO: 341755 - DNA, 25 bp, Homo sapien
tgccactcagatctctgagtctcct

SEQ ID NO: 341756 - DNA, 25 bp, Homo sapien
tcactgccctggagtgagataccca

SEQ ID NO: 341757 - DNA, 25 bp, Homo sapien
tgcgcagagaagcaaagtgcagagc

SEQ ID NO: 341758 - DNA, 25 bp, Homo sapien
tggagtgagatacccactgtgactt

SEQ ID NO: 341759 - DNA, 25 bp, Homo sapien
gtcctggcgcagtggaacgctgctc

SEQ ID NO: 341760 - DNA, 25 bp, Homo sapien
tggaacgctgctcccccattcagga

SEQ ID NO: 341761 - DNA, 25 bp, Homo sapien
gccataggtcctggcgcagtggaac

SEQ ID NO: 341762 - DNA, 25 bp, Homo sapien
tttgttgccataggtcctggcgcag

SEQ ID NO: 341763 - DNA, 25 bp, Homo sapien
aacatggacctttaagtaggaggca

SEQ ID NO: 341764 - DNA, 25 bp, Homo sapien
atggacctttaagtaggaggcagag

SEQ ID NO: 341765 - DNA, 25 bp, Homo sapien
taacatggacctttaagtaggaggc

SEQ ID NO: 341766 - DNA, 25 bp, Homo sapien
catggacctttaagtaggaggcaga

SEQ ID NO: 341767 - DNA, 25 bp, Homo sapien
gatccacgagatatctcaggctggg

SEQ ID NO: 341768 - DNA, 25 bp, Homo sapien
agaacacatcttgggccaacttcca

SEQ ID NO: 341769 - DNA, 25 bp, Homo sapien
ccagatgcttcggtcagtctgatcc

SEQ ID NO: 341770 - DNA, 25 bp, Homo sapien
tcggtcagtctgatccacgagatat

SEQ ID NO: 341771 - DNA, 25 bp, Homo sapien
gatgtttggcctgtgatccagaccc

SEQ ID NO: 341772 - DNA, 25 bp, Homo sapien
tctgagtacccagcatgggttggac

SEQ ID NO: 341773 - DNA, 25 bp, Homo sapien
tacccagcatgggttggaccagcac

SEQ ID NO: 341774 - DNA, 25 bp, Homo sapien
cgctctggctctggaacccagagat

SEQ ID NO: 341775 - DNA, 25 bp, Homo sapien
gaagctcctgtcagcaatgggctct

SEQ ID NO: 341776 - DNA, 25 bp, Homo sapien
gtatgaagctgcaaggagggaccca

SEQ ID NO: 341777 - DNA, 25 bp, Homo sapien
cgtggacctcggcacatgaacacag

SEQ ID NO: 341778 - DNA, 25 bp, Homo sapien
tacaaagtgcaaggatagagtctcc

SEQ ID NO: 341779 - DNA, 25 bp, Homo sapien
tgggacttcccattctaagcacccc

SEQ ID NO: 341780 - DNA, 25 bp, Homo sapien
aagaggtagcaaatagctagttggg

SEQ ID NO: 341781 - DNA, 25 bp, Homo sapien
gggtgatgaaggtgtttatcattca

SEQ ID NO: 341782 - DNA, 25 bp, Homo sapien
caaatagctagttgggtgatgaagg

SEQ ID NO: 341783 - DNA, 25 bp, Homo sapien
gcctcccatacacgctcaggcccat

SEQ ID NO: 341784 - DNA, 25 bp, Homo sapien
ctaggcctcccatacacgctcaggc

SEQ ID NO: 341785 - DNA, 25 bp, Homo sapien
aggcctcccatacacgctcaggccc

SEQ ID NO: 341786 - DNA, 25 bp, Homo sapien
taggcctcccatacacgctcaggcc

SEQ ID NO: 341787 - DNA, 25 bp, Homo sapien
tggaagtgaggaaacagtgggcaga

SEQ ID NO: 341788 - DNA, 25 bp, Homo sapien
ctggaagtgaggaaacagtgggcag

SEQ ID NO: 341789 - DNA, 25 bp, Homo sapien
agtgaggaaacagtgggcagattac

SEQ ID NO: 341790 - DNA, 25 bp, Homo sapien
gaagtgaggaaacagtgggcagatt

SEQ ID NO: 341791 - DNA, 25 bp, Homo sapien
cagacggtctcgggtggcaaaagaa

SEQ ID NO: 341792 - DNA, 25 bp, Homo sapien
caggtgggagcgcagacggtctcgg

SEQ ID NO: 341793 - DNA, 25 bp, Homo sapien
gtatgctgcccgcaagtacttccca

SEQ ID NO: 341794 - DNA, 25 bp, Homo sapien
gccatgtatgctgcccgcaagtact

SEQ ID NO: 341795 - DNA, 25 bp, Homo sapien
cagataagctggtggctagttccca

SEQ ID NO: 341796 - DNA, 25 bp, Homo sapien
tctgcggagtgctaaagggcacacc

SEQ ID NO: 341797 - DNA, 25 bp, Homo sapien
ggcacaccaataaggatccgaggga

SEQ ID NO: 341798 - DNA, 25 bp, Homo sapien
tctagaaaccccaggcctatgggaa

SEQ ID NO: 341799 - DNA, 25 bp, Homo sapien
tgcctcagatatcccggcggggctg

SEQ ID NO: 341800 - DNA, 25 bp, Homo sapien
gggctgggcagaagagagtgttgct

SEQ ID NO: 341801 - DNA, 25 bp, Homo sapien
gtcaggaaccgaatgggacgacctc

SEQ ID NO: 341802 - DNA, 25 bp, Homo sapien
ccatgatggcaggtcgctaggaaga

SEQ ID NO: 341803 - DNA, 25 bp, Homo sapien
ggacccaggaggagctctaactgag

SEQ ID NO: 341804 - DNA, 25 bp, Homo sapien
ggaagagtggttggctggaccacca

SEQ ID NO: 341805 - DNA, 25 bp, Homo sapien
tgccctaagctgaggggacccagga

SEQ ID NO: 341806 - DNA, 25 bp, Homo sapien
agctctaactgaggtcagaaaaggg

SEQ ID NO: 341807 - DNA, 25 bp, Homo sapien
aaggagccggcaaacaccaggagag

SEQ ID NO: 341808 - DNA, 25 bp, Homo sapien
cgggtctcccaacacaacatctgtg

SEQ ID NO: 341809 - DNA, 25 bp, Homo sapien
ccaggaccaagcaaccaggaaggag

SEQ ID NO: 341810 - DNA, 25 bp, Homo sapien
gtgatacggcccaccatccaaggag

SEQ ID NO: 341811 - DNA, 25 bp, Homo sapien
tgcgaccgtgagaacagcatcatct

SEQ ID NO: 341812 - DNA, 25 bp, Homo sapien
tcaaggctgcgaccgtgagaacagc

SEQ ID NO: 341813 - DNA, 25 bp, Homo sapien
ctggctcaaggctgcgaccgtgaga

SEQ ID NO: 341814 - DNA, 25 bp, Homo sapien
cagaggggaggtgtgcaaagcggtg

SEQ ID NO: 341815 - DNA, 25 bp, Homo sapien
tgaggccgctcagaagtgtgcacct

SEQ ID NO: 341816 - DNA, 25 bp, Homo sapien
gatatgtccgttcaagtgatcaggc

SEQ ID NO: 341817 - DNA, 25 bp, Homo sapien
tgacacttgtgaggccgctcagaag

SEQ ID NO: 341818 - DNA, 25 bp, Homo sapien
aagtgtgcacctgcttgatatgtcc

SEQ ID NO: 341819 - DNA, 25 bp, Homo sapien
cagcagtggagccttaagtccccag

SEQ ID NO: 341820 - DNA, 25 bp, Homo sapien
gctgcctgaccggtaagactggttc

SEQ ID NO: 341821 - DNA, 25 bp, Homo sapien
gattcattgtccagactaaagcccc

SEQ ID NO: 341822 - DNA, 25 bp, Homo sapien
ggcagccaatgaatgccacccggat

SEQ ID NO: 341823 - DNA, 25 bp, Homo sapien
tttcaggactaagataacgtgtggc

SEQ ID NO: 341824 - DNA, 25 bp, Homo sapien
gcctggtgccggaaacacaaaggga

SEQ ID NO: 341825 - DNA, 25 bp, Homo sapien
cagtagggcacacttagcgtcaaaa

SEQ ID NO: 341826 - DNA, 25 bp, Homo sapien
cctggcatggttctataaggtcaaa

SEQ ID NO: 341827 - DNA, 25 bp, Homo sapien
tgtaggcgaagtccagaatgtcccc

SEQ ID NO: 341828 - DNA, 25 bp, Homo sapien
tcatgggaccgcacatggtaggaca

SEQ ID NO: 341829 - DNA, 25 bp, Homo sapien
aaagagcattatatcggcgcgggca

SEQ ID NO: 341830 - DNA, 25 bp, Homo sapien
tagaccgcatggaaggatgcctgcc

SEQ ID NO: 341831 - DNA, 25 bp, Homo sapien
cggggcgcagcagacgtgtccacac

SEQ ID NO: 341832 - DNA, 25 bp, Homo sapien
gaagcggggcgcagcagacgtgtcc

SEQ ID NO: 341833 - DNA, 25 bp, Homo sapien
tcccactagcccggccgctgcacct

SEQ ID NO: 341834 - DNA, 25 bp, Homo sapien
gggcgcagcagacgtgtccacactc

SEQ ID NO: 341835 - DNA, 25 bp, Homo sapien
gcgagcgaagaggtgcgcccctcct

SEQ ID NO: 341836 - DNA, 25 bp, Homo sapien
gtgccggcccgaggctctgtagtct

SEQ ID NO: 341837 - DNA, 25 bp, Homo sapien
ccagcccggatcagactgtctagac

SEQ ID NO: 341838 - DNA, 25 bp, Homo sapien
ctgtagtctcgcaggtgcgccgagt

SEQ ID NO: 341839 - DNA, 25 bp, Homo sapien
ggcgcgcacgggggcggtggcgcgg

SEQ ID NO: 341840 - DNA, 25 bp, Homo sapien
acaaaaggcgaaggcgaaggcggcg

SEQ ID NO: 341841 - DNA, 25 bp, Homo sapien
gcggggcgcgcacgggggcggtggc

SEQ ID NO: 341842 - DNA, 25 bp, Homo sapien
gtcccggagcctggagggcggtggc

SEQ ID NO: 341843 - DNA, 25 bp, Homo sapien
cgtgtgttcggagcggaggaaagat

SEQ ID NO: 341844 - DNA, 25 bp, Homo sapien
gccccgggctccgtgtgttcggagc

SEQ ID NO: 341845 - DNA, 25 bp, Homo sapien
aggcccttcctcaggccgggagaag

SEQ ID NO: 341846 - DNA, 25 bp, Homo sapien
gcggcggcagagtaggcccttcctc

SEQ ID NO: 341847 - DNA, 25 bp, Homo sapien
acaggccgaacctccggagctgctt

SEQ ID NO: 341848 - DNA, 25 bp, Homo sapien
gaaattcccagaagtcgcctgcgac

SEQ ID NO: 341849 - DNA, 25 bp, Homo sapien
gagctgcttctgcacccggtacatt

SEQ ID NO: 341850 - DNA, 25 bp, Homo sapien
gcacccggtacattgatcgatctga

SEQ ID NO: 341851 - DNA, 25 bp, Homo sapien
gcacgtctgtccagttgcaaaacat

SEQ ID NO: 341852 - DNA, 25 bp, Homo sapien
cactagcacctagtacattcacaat

SEQ ID NO: 341853 - DNA, 25 bp, Homo sapien
cattcactagcacctagtacattca

SEQ ID NO: 341854 - DNA, 25 bp, Homo sapien
ttgtgcaaccagcacgtctgtccag

SEQ ID NO: 341855 - DNA, 25 bp, Homo sapien
gtgcacaagtatgtatttgagtgcc

SEQ ID NO: 341856 - DNA, 25 bp, Homo sapien
ttatgactggctgaatgatacacca

SEQ ID NO: 341857 - DNA, 25 bp, Homo sapien
ggttattatggatagtgcaactatg

SEQ ID NO: 341858 - DNA, 25 bp, Homo sapien
gggtcatatgatggttctatgtata

SEQ ID NO: 341859 - DNA, 25 bp, Homo sapien
ggcactgtcacgtctacaggaccca

SEQ ID NO: 341860 - DNA, 25 bp, Homo sapien
tgtcacgtctacaggacccaaaagt

SEQ ID NO: 341861 - DNA, 25 bp, Homo sapien
cactgtcacgtctacaggacccaaa

SEQ ID NO: 341862 - DNA, 25 bp, Homo sapien
gggcactgtcacgtctacaggaccc

SEQ ID NO: 341863 - DNA, 25 bp, Homo sapien
ggaaagtccaaagataatcagatat

SEQ ID NO: 341864 - DNA, 25 bp, Homo sapien
cttgatcgagccactgccaggcctg

SEQ ID NO: 341865 - DNA, 25 bp, Homo sapien
aagtccaaagataatcagatatcat

SEQ ID NO: 341866 - DNA, 25 bp, Homo sapien
gaaagtccaaagataatcagatatc

SEQ ID NO: 341867 - DNA, 25 bp, Homo sapien
gtatatgtgctgctgaagcaagcac

SEQ ID NO: 341868 - DNA, 25 bp, Homo sapien
ctctgtatcattccaattttagtat

SEQ ID NO: 341869 - DNA, 25 bp, Homo sapien
tggaacatttcatgaatttgcatca

SEQ ID NO: 341870 - DNA, 25 bp, Homo sapien
cttgcacaggggccatgctaatctt

SEQ ID NO: 341871 - DNA, 25 bp, Homo sapien
agtgttaacttatctgcaggcctca

SEQ ID NO: 341872 - DNA, 25 bp, Homo sapien
ctattgacagttcagggccccaagg

SEQ ID NO: 341873 - DNA, 25 bp, Homo sapien
taagtacttcaagttaggataggcc

SEQ ID NO: 341874 - DNA, 25 bp, Homo sapien
aaggagcacctactcacagagcagt

SEQ ID NO: 341875 - DNA, 25 bp, Homo sapien
tgcctccaggatttaagtgattctt

SEQ ID NO: 341876 - DNA, 25 bp, Homo sapien
tgattcttctaccgcagcctctcaa

SEQ ID NO: 341877 - DNA, 25 bp, Homo sapien
tcttctaccgcagcctctcaagtag

SEQ ID NO: 341878 - DNA, 25 bp, Homo sapien
agtgattcttctaccgcagcctctc

SEQ ID NO: 341879 - DNA, 25 bp, Homo sapien
ttatttttgtagatggattctcgct

SEQ ID NO: 341880 - DNA, 25 bp, Homo sapien
aggtgtccactaccatggccagcta

SEQ ID NO: 341881 - DNA, 25 bp, Homo sapien
ttacaggtgtccactaccatggcca

SEQ ID NO: 341882 - DNA, 25 bp, Homo sapien
atttatttttgtagatggattctcg

SEQ ID NO: 341883 - DNA, 25 bp, Homo sapien
aataagatatgcaggcacaaaagac

SEQ ID NO: 341884 - DNA, 25 bp, Homo sapien
aaataagatatgcaggcacaaaaga

SEQ ID NO: 341885 - DNA, 25 bp, Homo sapien
aaaataagatatgcaggcacaaaag

SEQ ID NO: 341886 - DNA, 25 bp, Homo sapien
cattttagccttcccacttagtatt

SEQ ID NO: 341887 - DNA, 25 bp, Homo sapien
gccactacagggttcattttagcct

SEQ ID NO: 341888 - DNA, 25 bp, Homo sapien
tacagggttcattttagccttccca

SEQ ID NO: 341889 - DNA, 25 bp, Homo sapien
atcatgcccggccactacagggttc

SEQ ID NO: 341890 - DNA, 25 bp, Homo sapien
tccagtggcgtaatcgtggttcact

SEQ ID NO: 341891 - DNA, 25 bp, Homo sapien
gagtccagtggcgtaatcgtggttc

SEQ ID NO: 341892 - DNA, 25 bp, Homo sapien
aattattgcacaactatctttttgg

SEQ ID NO: 341893 - DNA, 25 bp, Homo sapien
tttctttaattattgcacaactatc

SEQ ID NO: 341894 - DNA, 25 bp, Homo sapien
tgccggacgaaccacaacagcgttc

SEQ ID NO: 341895 - DNA, 25 bp, Homo sapien
gatggaggcacccaaactggaactt

SEQ ID NO: 341896 - DNA, 25 bp, Homo sapien
ggtatatacggtgaagcagctacag

SEQ ID NO: 341897 - DNA, 25 bp, Homo sapien
tgtcgaactgcataaaagatctggt

SEQ ID NO: 341898 - DNA, 25 bp, Homo sapien
ggatggagtagtccctgagaaaatc

SEQ ID NO: 341899 - DNA, 25 bp, Homo sapien
cattatttcagtatggatggagtag

SEQ ID NO: 341900 - DNA, 25 bp, Homo sapien
aagggagggtatggacatgtaagta

SEQ ID NO: 341901 - DNA, 25 bp, Homo sapien
aataattaaagaatatgggcagaag

SEQ ID NO: 341902 - DNA, 25 bp, Homo sapien
ggaatgctgcctagggtatggccac

SEQ ID NO: 341903 - DNA, 25 bp, Homo sapien
tattgggaatgctgcctagggtatg

SEQ ID NO: 341904 - DNA, 25 bp, Homo sapien
tatgtttggtattgggaatgctgcc

SEQ ID NO: 341905 - DNA, 25 bp, Homo sapien
ctgcctagggtatggccactgtgga

SEQ ID NO: 341906 - DNA, 25 bp, Homo sapien
tagctgcatttagcagaaagtgcta

SEQ ID NO: 341907 - DNA, 25 bp, Homo sapien
taactagttagaacacgtttagctg

SEQ ID NO: 341908 - DNA, 25 bp, Homo sapien
acttaagcggctgaaatggaaggga

SEQ ID NO: 341909 - DNA, 25 bp, Homo sapien
tattacaagtaaacagatccattgt

SEQ ID NO: 341910 - DNA, 25 bp, Homo sapien
gacactcagtagctatctcctaggg

SEQ ID NO: 341911 - DNA, 25 bp, Homo sapien
ccatgatatgctttgtggtcctcag

SEQ ID NO: 341912 - DNA, 25 bp, Homo sapien
gattgcttgtgaactcatctcgtgc

SEQ ID NO: 341913 - DNA, 25 bp, Homo sapien
tagagtctggcttaaaagacactca

SEQ ID NO: 341914 - DNA, 25 bp, Homo sapien
gataagtggaagaggatacacagga

SEQ ID NO: 341915 - DNA, 25 bp, Homo sapien
tattaacgttggttcaacatgaagg

SEQ ID NO: 341916 - DNA, 25 bp, Homo sapien
gaggatacacaggaaaggtggaact

SEQ ID NO: 341917 - DNA, 25 bp, Homo sapien
attgacacttgggactgcgttccag

SEQ ID NO: 341918 - DNA, 25 bp, Homo sapien
aacatactgagcatagcttggctgg

SEQ ID NO: 341919 - DNA, 25 bp, Homo sapien
cacagtgcccaatttccatgggttt

SEQ ID NO: 341920 - DNA, 25 bp, Homo sapien
aaacttcagatcacttccttaaagg

SEQ ID NO: 341921 - DNA, 25 bp, Homo sapien
tggttagaaattaggaagactagct

SEQ ID NO: 341922 - DNA, 25 bp, Homo sapien
aaaatccaaactgttgacacaggcc

SEQ ID NO: 341923 - DNA, 25 bp, Homo sapien
tacaaaagttgtttatacacaggtc

SEQ ID NO: 341924 - DNA, 25 bp, Homo sapien
gtacagctgtatagttcaaaaaagc

SEQ ID NO: 341925 - DNA, 25 bp, Homo sapien
gacacaggcctaactaatatcagct

SEQ ID NO: 341926 - DNA, 25 bp, Homo sapien
taatgcggaccacaccagatgcatg

SEQ ID NO: 341927 - DNA, 25 bp, Homo sapien
gacaatgtacactccactcgactgg

SEQ ID NO: 341928 - DNA, 25 bp, Homo sapien
cagagtgctccaaagtaaaagccca

SEQ ID NO: 341929 - DNA, 25 bp, Homo sapien
gatgcatgggttccaccaaacagct

SEQ ID NO: 341930 - DNA, 25 bp, Homo sapien
cagtgtgccaccacaggtccgggct

SEQ ID NO: 341931 - DNA, 25 bp, Homo sapien
cacaggtccgggcttagttgagtct

SEQ ID NO: 341932 - DNA, 25 bp, Homo sapien
ggcttagttgagtctgcctgccctg

SEQ ID NO: 341933 - DNA, 25 bp, Homo sapien
tgccaccacaggtccgggcttagtt

SEQ ID NO: 341934 - DNA, 25 bp, Homo sapien
cggtattccaattcatctacactga

SEQ ID NO: 341935 - DNA, 25 bp, Homo sapien
gcctgaccggctgggcacgttctga

SEQ ID NO: 341936 - DNA, 25 bp, Homo sapien
gccaaaccatttggcaaggcccaca

SEQ ID NO: 341937 - DNA, 25 bp, Homo sapien
tacactgataactttggcgggcatg

SEQ ID NO: 341938 - DNA, 25 bp, Homo sapien
gctgctgttgcaccattgccagatg

SEQ ID NO: 341939 - DNA, 25 bp, Homo sapien
taagagagggtgactagcagcaggt

SEQ ID NO: 341940 - DNA, 25 bp, Homo sapien
tgttccaggacgagggtttaagaga

SEQ ID NO: 341941 - DNA, 25 bp, Homo sapien
ctagcagcaggtaaagggtaaaagg

SEQ ID NO: 341942 - DNA, 25 bp, Homo sapien
aatgactcaagtccatcccaggagg

SEQ ID NO: 341943 - DNA, 25 bp, Homo sapien
atgactcaagtccatcccaggagga

SEQ ID NO: 341944 - DNA, 25 bp, Homo sapien
tgtaaatgactcaagtccatcccag

SEQ ID NO: 341945 - DNA, 25 bp, Homo sapien
ctgtaaatgactcaagtccatccca

SEQ ID NO: 341946 - DNA, 25 bp, Homo sapien
tctgtaccaaccctgggtgaagctg

SEQ ID NO: 341947 - DNA, 25 bp, Homo sapien
tgtggatgtactccctgggccagca

SEQ ID NO: 341948 - DNA, 25 bp, Homo sapien
tgagcaggcctaaccatagggacat

SEQ ID NO: 341949 - DNA, 25 bp, Homo sapien
gaagagtctcgatcggcactgggta

SEQ ID NO: 341950 - DNA, 25 bp, Homo sapien
cacagaaccatagtccagagaagct

SEQ ID NO: 341951 - DNA, 25 bp, Homo sapien
cagagaagctagtggtcttgcccag

SEQ ID NO: 341952 - DNA, 25 bp, Homo sapien
catactttcttgagcagtgccctta

SEQ ID NO: 341953 - DNA, 25 bp, Homo sapien
ggtcagcgctcaggcccatgttttc

SEQ ID NO: 341954 - DNA, 25 bp, Homo sapien
catcttacgaatcactgaggtaggg

SEQ ID NO: 341955 - DNA, 25 bp, Homo sapien
tctcgtacatcttacgaatcactga

SEQ ID NO: 341956 - DNA, 25 bp, Homo sapien
tctttgctctcgtacatcttacgaa

SEQ ID NO: 341957 - DNA, 25 bp, Homo sapien
tttctctttgctctcgtacatctta

SEQ ID NO: 341958 - DNA, 25 bp, Homo sapien
gtgaatccgaatttgtgaactcccc

SEQ ID NO: 341959 - DNA, 25 bp, Homo sapien
cagccttagtttatatcactgagac

SEQ ID NO: 341960 - DNA, 25 bp, Homo sapien
gaactcccctgcaagtttcaataga

SEQ ID NO: 341961 - DNA, 25 bp, Homo sapien
cacgcccagctggaatgaaacattt

SEQ ID NO: 341962 - DNA, 25 bp, Homo sapien
gaaggaactcaaggacatttagggc

SEQ ID NO: 341963 - DNA, 25 bp, Homo sapien
tactaggtcagttatttccgtggaa

SEQ ID NO: 341964 - DNA, 25 bp, Homo sapien
cacaaccaaacagggagaagcctta

SEQ ID NO: 341965 - DNA, 25 bp, Homo sapien
ttagggcacacagtggtacaatcca

SEQ ID NO: 341966 - DNA, 25 bp, Homo sapien
gggaagaggaattccctcgatgcac

SEQ ID NO: 341967 - DNA, 25 bp, Homo sapien
aattccctcgatgcacgggtgctgg

SEQ ID NO: 341968 - DNA, 25 bp, Homo sapien
ctcgatgcacgggtgctggtgactt

SEQ ID NO: 341969 - DNA, 25 bp, Homo sapien
tggtgacttggtcactcgctgttgc

SEQ ID NO: 341970 - DNA, 25 bp, Homo sapien
catcaaaacattaagtaccgagtat

SEQ ID NO: 341971 - DNA, 25 bp, Homo sapien
tgttgcaactatcgaaaaagagaag

SEQ ID NO: 341972 - DNA, 25 bp, Homo sapien
taaactatagtgttcagggatgtgc

SEQ ID NO: 341973 - DNA, 25 bp, Homo sapien
tgagtagttaacaaggaagtttgcc

SEQ ID NO: 341974 - DNA, 25 bp, Homo sapien
tggccaaaaaactgctgatgtagca

SEQ ID NO: 341975 - DNA, 25 bp, Homo sapien
agggagtttgataagaacattgaat

SEQ ID NO: 341976 - DNA, 25 bp, Homo sapien
gtcagctctggccaaaaaactgctg

SEQ ID NO: 341977 - DNA, 25 bp, Homo sapien
tgtagcaaacctgcatcaagggagt

SEQ ID NO: 341978 - DNA, 25 bp, Homo sapien
ctgcctgtacagcaaggtcatgtgg

SEQ ID NO: 341979 - DNA, 25 bp, Homo sapien
gggctcatgggtttgcgcatgcctt

SEQ ID NO: 341980 - DNA, 25 bp, Homo sapien
ttgcgcatgccttggaatggatctc

SEQ ID NO: 341981 - DNA, 25 bp, Homo sapien
ttggaatggatctccgagtagctgc

SEQ ID NO: 341982 - DNA, 25 bp, Homo sapien
gaatggatctccgagtagctgctgt

SEQ ID NO: 341983 - DNA, 25 bp, Homo sapien
caattggtgatggtattcttgggcg

SEQ ID NO: 341984 - DNA, 25 bp, Homo sapien
ttcttgggcgaaggtagtcagctga

SEQ ID NO: 341985 - DNA, 25 bp, Homo sapien
cagctgaggctgctcgagtttgaaa

SEQ ID NO: 341986 - DNA, 25 bp, Homo sapien
ctgaggctgctcgagtttgaaacac

SEQ ID NO: 341987 - DNA, 25 bp, Homo sapien
agatgttgtaggctccaagctcccc

SEQ ID NO: 341988 - DNA, 25 bp, Homo sapien
ccagtaaagatgttgtaggctccaa

SEQ ID NO: 341989 - DNA, 25 bp, Homo sapien
agctccccataaggccactcagaag

SEQ ID NO: 341990 - DNA, 25 bp, Homo sapien
ggtctctgaactggttgacccagaa

SEQ ID NO: 341991 - DNA, 25 bp, Homo sapien
tctcagcaggggacatcaaatggct

SEQ ID NO: 341992 - DNA, 25 bp, Homo sapien
ctcagcaggggacatcaaatggctt

SEQ ID NO: 341993 - DNA, 25 bp, Homo sapien
aatctcagcaggggacatcaaatgg

SEQ ID NO: 341994 - DNA, 25 bp, Homo sapien
tggaatctcagcaggggacatcaaa

SEQ ID NO: 341995 - DNA, 25 bp, Homo sapien
gggatggaaagaccgttcacatgta

SEQ ID NO: 341996 - DNA, 25 bp, Homo sapien
tgttccgctctcatcacacaggtct

SEQ ID NO: 341997 - DNA, 25 bp, Homo sapien
tgtacatgcaaagtcccctcagaga

SEQ ID NO: 341998 - DNA, 25 bp, Homo sapien
gtcacagaaaacttagaccaacgtg

SEQ ID NO: 341999 - DNA, 25 bp, Homo sapien
tatgacaacctaaatggatggaggc

SEQ ID NO: 342000 - DNA, 25 bp, Homo sapien
gtcaaagtccaaagcagtgtctagg

SEQ ID NO: 342001 - DNA, 25 bp, Homo sapien
ggtgtagtttcccttccactagatg

SEQ ID NO: 342002 - DNA, 25 bp, Homo sapien
cacgtagctcgaactataggtgtac

SEQ ID NO: 342003 - DNA, 25 bp, Homo sapien
gactttgggctgagaaggcaaagtc

SEQ ID NO: 342004 - DNA, 25 bp, Homo sapien
ctttgggctgagaaggcaaagtccc

SEQ ID NO: 342005 - DNA, 25 bp, Homo sapien
tttgggctgagaaggcaaagtccca

SEQ ID NO: 342006 - DNA, 25 bp, Homo sapien
gctgactttgggctgagaaggcaaa

SEQ ID NO: 342007 - DNA, 25 bp, Homo sapien
tgttgaacgcagtcatgtctccgtc

SEQ ID NO: 342008 - DNA, 25 bp, Homo sapien
ctgccatgaagggagttgaattctt

SEQ ID NO: 342009 - DNA, 25 bp, Homo sapien
tgctggtcaaccttcaagcccttca

SEQ ID NO: 342010 - DNA, 25 bp, Homo sapien
tggttacggcactcaaggtctcttc

SEQ ID NO: 342011 - DNA, 25 bp, Homo sapien
caaattgtgtactaagagatggcat

SEQ ID NO: 342012 - DNA, 25 bp, Homo sapien
ggaattctctttggctagtatgaca

SEQ ID NO: 342013 - DNA, 25 bp, Homo sapien
gagaacgtccaggttaaatcaagca

SEQ ID NO: 342014 - DNA, 25 bp, Homo sapien
gggaccacaactatgaagtgctatt

SEQ ID NO: 342015 - DNA, 25 bp, Homo sapien
ataggagcaaagtaattccccgagt

SEQ ID NO: 342016 - DNA, 25 bp, Homo sapien
tttcagcatggtcttccaatggtat

SEQ ID NO: 342017 - DNA, 25 bp, Homo sapien
ggtcttccaatggtataggagcaaa

SEQ ID NO: 342018 - DNA, 25 bp, Homo sapien
cagcatggtcttccaatggtatagg

SEQ ID NO: 342019 - DNA, 25 bp, Homo sapien
ctgtccaggagagaggatggcttgc

SEQ ID NO: 342020 - DNA, 25 bp, Homo sapien
aggagagaggatggcttgctccaga

SEQ ID NO: 342021 - DNA, 25 bp, Homo sapien
ccaggagagaggatggcttgctcca

SEQ ID NO: 342022 - DNA, 25 bp, Homo sapien
tccaggagagaggatggcttgctcc

SEQ ID NO: 342023 - DNA, 25 bp, Homo sapien
agggcagaatctgaagccattttac

SEQ ID NO: 342024 - DNA, 25 bp, Homo sapien
cttcaagggcagaatctgaagccat

SEQ ID NO: 342025 - DNA, 25 bp, Homo sapien
caagggcagaatctgaagccatttt

SEQ ID NO: 342026 - DNA, 25 bp, Homo sapien
tcaagggcagaatctgaagccattt

SEQ ID NO: 342027 - DNA, 25 bp, Homo sapien
tctagctcttcatgtggtgttgacc

SEQ ID NO: 342028 - DNA, 25 bp, Homo sapien
gagaaccacctactgaaccgactgg

SEQ ID NO: 342029 - DNA, 25 bp, Homo sapien
gatctgctcgggttagagaaccacc

SEQ ID NO: 342030 - DNA, 25 bp, Homo sapien
gacccaagactgctggatcggcttc

SEQ ID NO: 342031 - DNA, 25 bp, Homo sapien
gacagcatcccttggcacttcctga

SEQ ID NO: 342032 - DNA, 25 bp, Homo sapien
agcatggcaccttatcaaggttaaa

SEQ ID NO: 342033 - DNA, 25 bp, Homo sapien
ctgtgcaaggatgacctccacttca

SEQ ID NO: 342034 - DNA, 25 bp, Homo sapien
tcagccgcaggctcctgtgcaagga

SEQ ID NO: 342035 - DNA, 25 bp, Homo sapien
gccagtcagttcgatggtttcagac

SEQ ID NO: 342036 - DNA, 25 bp, Homo sapien
tctacgctcaccaaagacacgctta

SEQ ID NO: 342037 - DNA, 25 bp, Homo sapien
ttccttcacagaggctgtccgtcgc

SEQ ID NO: 342038 - DNA, 25 bp, Homo sapien
tcagactgacttgtgggtccagcag

SEQ ID NO: 342039 - DNA, 25 bp, Homo sapien
tctcaagtcccgcaggtccttatcg

SEQ ID NO: 342040 - DNA, 25 bp, Homo sapien
gctaagacggtgatccttctcaaag

SEQ ID NO: 342041 - DNA, 25 bp, Homo sapien
aaggtccgggcagagattatcctcc

SEQ ID NO: 342042 - DNA, 25 bp, Homo sapien
ttgtccttgaagtccctctctcggt

SEQ ID NO: 342043 - DNA, 25 bp, Homo sapien
gaagcccatcactatctttctctaa

SEQ ID NO: 342044 - DNA, 25 bp, Homo sapien
gcagacgaagcccatcactatcttt

SEQ ID NO: 342045 - DNA, 25 bp, Homo sapien
catcactatctttctctaatggact

SEQ ID NO: 342046 - DNA, 25 bp, Homo sapien
gtccaccaagcagacgaagcccatc

SEQ ID NO: 342047 - DNA, 25 bp, Homo sapien
tcttctttcacacgctctcgtggat

SEQ ID NO: 342048 - DNA, 25 bp, Homo sapien
gctgagaacaacatctaagtcatct

SEQ ID NO: 342049 - DNA, 25 bp, Homo sapien
ggctgagaacaacatctaagtcatc

SEQ ID NO: 342050 - DNA, 25 bp, Homo sapien
ctgagaacaacatctaagtcatctt

SEQ ID NO: 342051 - DNA, 25 bp, Homo sapien
ctggaaggacgtgggaaagacaaag

SEQ ID NO: 342052 - DNA, 25 bp, Homo sapien
tagagagaggcatgccacttctcag

SEQ ID NO: 342053 - DNA, 25 bp, Homo sapien
agactttccactggtgagctccgcc

SEQ ID NO: 342054 - DNA, 25 bp, Homo sapien
cagggaaggccggtctgtatccaac

SEQ ID NO: 342055 - DNA, 25 bp, Homo sapien
tccgccctgaagctgggtagagaga

SEQ ID NO: 342056 - DNA, 25 bp, Homo sapien
ttttcagaaaggcatgaaggcctct

SEQ ID NO: 342057 - DNA, 25 bp, Homo sapien
tttcagaaaggcatgaaggcctctg

SEQ ID NO: 342058 - DNA, 25 bp, Homo sapien
tcagaaaggcatgaaggcctctgtt

SEQ ID NO: 342059 - DNA, 25 bp, Homo sapien
ttcagaaaggcatgaaggcctctgt

SEQ ID NO: 342060 - DNA, 25 bp, Homo sapien
ccagctccatgagagaatttagccc

SEQ ID NO: 342061 - DNA, 25 bp, Homo sapien
cacatataacggatgcctcagggca

SEQ ID NO: 342062 - DNA, 25 bp, Homo sapien
ggcatgaagacttctgcagacccaa

SEQ ID NO: 342063 - DNA, 25 bp, Homo sapien
caaggatgtacttagctggtatgca

SEQ ID NO: 342064 - DNA, 25 bp, Homo sapien
tgtgatgcttaagtgaacagatgta

SEQ ID NO: 342065 - DNA, 25 bp, Homo sapien
acatgcttagcatacataggtgtga

SEQ ID NO: 342066 - DNA, 25 bp, Homo sapien
tgttgactttacatgcttagcatac

SEQ ID NO: 342067 - DNA, 25 bp, Homo sapien
tccagttttcgttgttgactttaca

SEQ ID NO: 342068 - DNA, 25 bp, Homo sapien
tagtgaaatggcgcgatgatggctc

SEQ ID NO: 342069 - DNA, 25 bp, Homo sapien
caggcaatacgccaccatacctagc

SEQ ID NO: 342070 - DNA, 25 bp, Homo sapien
tctctcacctcagtcccctgtgtag

SEQ ID NO: 342071 - DNA, 25 bp, Homo sapien
actgcagcctcaaacgattctctca

SEQ ID NO: 342072 - DNA, 25 bp, Homo sapien
ttcttcaggtcaaggaaagcatctc

SEQ ID NO: 342073 - DNA, 25 bp, Homo sapien
aggaggcttcttcaggtcaaggaaa

SEQ ID NO: 342074 - DNA, 25 bp, Homo sapien
tctgtttcacccatacttctcctat

SEQ ID NO: 342075 - DNA, 25 bp, Homo sapien
tttgtatagcgatgggggcatttgg

SEQ ID NO: 342076 - DNA, 25 bp, Homo sapien
gctccttggtctacaatgctctgca

SEQ ID NO: 342077 - DNA, 25 bp, Homo sapien
ctccttggtctacaatgctctgcac

SEQ ID NO: 342078 - DNA, 25 bp, Homo sapien
tcaccgagaacagtaagttttcaga

SEQ ID NO: 342079 - DNA, 25 bp, Homo sapien
gataaatcggcacaaaattgtcacc

SEQ ID NO: 342080 - DNA, 25 bp, Homo sapien
ctggaagataaatcggcacaaaatt

SEQ ID NO: 342081 - DNA, 25 bp, Homo sapien
ggcacaaaattgtcaccgagaacag

SEQ ID NO: 342082 - DNA, 25 bp, Homo sapien
tgggaacccgcgaagtctgttggaa

SEQ ID NO: 342083 - DNA, 25 bp, Homo sapien
ttaggctgggaacccgcgaagtctg

SEQ ID NO: 342084 - DNA, 25 bp, Homo sapien
tagaagactggttaggctgggaacc

SEQ ID NO: 342085 - DNA, 25 bp, Homo sapien
gcgaagtctgttggaaagtgcctgt

SEQ ID NO: 342086 - DNA, 25 bp, Homo sapien
gccccttgttatccggcgatcaggg

SEQ ID NO: 342087 - DNA, 25 bp, Homo sapien
ttgttatccggcgatcagggactgg

SEQ ID NO: 342088 - DNA, 25 bp, Homo sapien
aatggacggcgccagctgccccttg

SEQ ID NO: 342089 - DNA, 25 bp, Homo sapien
cagctgccccttgttatccggcgat

SEQ ID NO: 342090 - DNA, 25 bp, Homo sapien
cagctccgaaacttggcttccccgg

SEQ ID NO: 342091 - DNA, 25 bp, Homo sapien
caaggaaagggcgagcaccggcttc

SEQ ID NO: 342092 - DNA, 25 bp, Homo sapien
gccgatggcaaggaaagggcgagca

SEQ ID NO: 342093 - DNA, 25 bp, Homo sapien
gagcaccggcttcagctccgaaact

SEQ ID NO: 342094 - DNA, 25 bp, Homo sapien
cgggcgcttcaagctggagctagcg

SEQ ID NO: 342095 - DNA, 25 bp, Homo sapien
cgcttcaagctggagctagcgcagg

SEQ ID NO: 342096 - DNA, 25 bp, Homo sapien
aagctggagctagcgcaggcccgca

SEQ ID NO: 342097 - DNA, 25 bp, Homo sapien
cttcaagctggagctagcgcaggcc

SEQ ID NO: 342098 - DNA, 25 bp, Homo sapien
cccgcagccttcgctctcgcgcccc

SEQ ID NO: 342099 - DNA, 25 bp, Homo sapien
gcggccctttgcctcggccgccgct

SEQ ID NO: 342100 - DNA, 25 bp, Homo sapien
cgcagccttcgctctcgcgccccca

SEQ ID NO: 342101 - DNA, 25 bp, Homo sapien
gccgctcggcggccctttgcctcgg

SEQ ID NO: 342102 - DNA, 25 bp, Homo sapien
cgcgcccggatgtgaggtggctgca

SEQ ID NO: 342103 - DNA, 25 bp, Homo sapien
tgccgggcgaaaaagaagcatcgcc

SEQ ID NO: 342104 - DNA, 25 bp, Homo sapien
gccgcgcgcccggatgtgaggtggc

SEQ ID NO: 342105 - DNA, 25 bp, Homo sapien
aaaaagaagcatcgccgcgcgcttc

SEQ ID NO: 342106 - DNA, 25 bp, Homo sapien
gaacctcatctttagtgctcggccg

SEQ ID NO: 342107 - DNA, 25 bp, Homo sapien
tgtctaagaggagcagtagcaagct

SEQ ID NO: 342108 - DNA, 25 bp, Homo sapien
tgggcgggtcatactccacgggttc

SEQ ID NO: 342109 - DNA, 25 bp, Homo sapien
caaggagataaagaaccctcggtgg

SEQ ID NO: 342110 - DNA, 25 bp, Homo sapien
agtttatagaaatatagagttgacc

SEQ ID NO: 342111 - DNA, 25 bp, Homo sapien
catctgtattgtactgagttctcca

SEQ ID NO: 342112 - DNA, 25 bp, Homo sapien
tccattttgcctataaaattattag

SEQ ID NO: 342113 - DNA, 25 bp, Homo sapien
tgatatttgtgatgccatttgaaaa

SEQ ID NO: 342114 - DNA, 25 bp, Homo sapien
gactgcccctcagagagtaaactac

SEQ ID NO: 342115 - DNA, 25 bp, Homo sapien
aacggcatgaaacaagtgggtgccc

SEQ ID NO: 342116 - DNA, 25 bp, Homo sapien
taaactactagcttgacttgaatgg

SEQ ID NO: 342117 - DNA, 25 bp, Homo sapien
gtgggtgccctagcgaattattata

SEQ ID NO: 342118 - DNA, 25 bp, Homo sapien
tatctctgcagtgaggtatccaagg

SEQ ID NO: 342119 - DNA, 25 bp, Homo sapien
tctgtgagcgggaaacaaccacctt

SEQ ID NO: 342120 - DNA, 25 bp, Homo sapien
tccaaggatggctgcactgttcaca

SEQ ID NO: 342121 - DNA, 25 bp, Homo sapien
tgaatatggcccacccggaactgta

SEQ ID NO: 342122 - DNA, 25 bp, Homo sapien
aaatggaggtgtgggtattcagtcc

SEQ ID NO: 342123 - DNA, 25 bp, Homo sapien
tattcagtcctagcagccttcatga

SEQ ID NO: 342124 - DNA, 25 bp, Homo sapien
caacgcctgcaggtcgaaatggagg

SEQ ID NO: 342125 - DNA, 25 bp, Homo sapien
tagcttcatatatggcttgggtagc

SEQ ID NO: 342126 - DNA, 25 bp, Homo sapien
acatagctgcaagagtggtaagaca

SEQ ID NO: 342127 - DNA, 25 bp, Homo sapien
gacatagataagatcatgacactcc

SEQ ID NO: 342128 - DNA, 25 bp, Homo sapien
taaagttaaccctgcttggtatgtc

SEQ ID NO: 342129 - DNA, 25 bp, Homo sapien
cctctgcccttgacacactggatgt

SEQ ID NO: 342130 - DNA, 25 bp, Homo sapien
gttcaccctggtggaatgtgttaaa

SEQ ID NO: 342131 - DNA, 25 bp, Homo sapien
tgttaaaaggacgtaatgaactgct

SEQ ID NO: 342132 - DNA, 25 bp, Homo sapien
cgaacatatcaagtttgtggcaatg

SEQ ID NO: 342133 - DNA, 25 bp, Homo sapien
gattatacctacctcttaacaggat

SEQ ID NO: 342134 - DNA, 25 bp, Homo sapien
atcctttcagatactcaggctgtcc

SEQ ID NO: 342135 - DNA, 25 bp, Homo sapien
agatactcaggctgtccattgcctc

SEQ ID NO: 342136 - DNA, 25 bp, Homo sapien
cctttcagatactcaggctgtccat

SEQ ID NO: 342137 - DNA, 25 bp, Homo sapien
atactcaggctgtccattgcctcag

SEQ ID NO: 342138 - DNA, 25 bp, Homo sapien
tccacacatggaacagactctggcg

SEQ ID NO: 342139 - DNA, 25 bp, Homo sapien
tgtcctcagtgcaagagcaacacgt

SEQ ID NO: 342140 - DNA, 25 bp, Homo sapien
cacgtttccacaggtatgttgcgca

SEQ ID NO: 342141 - DNA, 25 bp, Homo sapien
gatggcgccaccaggaaaatgtcct

SEQ ID NO: 342142 - DNA, 25 bp, Homo sapien
cttggcagacattcttaagtgtcat

SEQ ID NO: 342143 - DNA, 25 bp, Homo sapien
aaggagtgtgttcttgcccaggccc

SEQ ID NO: 342144 - DNA, 25 bp, Homo sapien
gaattagctgaggtgcctctccctg

SEQ ID NO: 342145 - DNA, 25 bp, Homo sapien
ttcaacatgcagcaacctcagagct

SEQ ID NO: 342146 - DNA, 25 bp, Homo sapien
ccgtgactcagctgcactcagtggt

SEQ ID NO: 342147 - DNA, 25 bp, Homo sapien
cactagcagagtccagggtgatgcg

SEQ ID NO: 342148 - DNA, 25 bp, Homo sapien
gcagcaggagcgttaaggccaaaaa

SEQ ID NO: 342149 - DNA, 25 bp, Homo sapien
ggcctgcgttcctgataaactggga

SEQ ID NO: 342150 - DNA, 25 bp, Homo sapien
ggtgatgcgttcagccacaagcaca

SEQ ID NO: 342151 - DNA, 25 bp, Homo sapien
atttgtaggcagaaggaacgggata

SEQ ID NO: 342152 - DNA, 25 bp, Homo sapien
tgtttggaaaagatcccttagcagc

SEQ ID NO: 342153 - DNA, 25 bp, Homo sapien
gaacaggtggtagccgaatcattca

SEQ ID NO: 342154 - DNA, 25 bp, Homo sapien
gaatcattcaagtcctacctggtca

SEQ ID NO: 342155 - DNA, 25 bp, Homo sapien
tccccaaagcggattttctgtcctg

SEQ ID NO: 342156 - DNA, 25 bp, Homo sapien
gcttccccaaagcggattttctgtc

SEQ ID NO: 342157 - DNA, 25 bp, Homo sapien
tctctattggtgtgcgtcacgaagc

SEQ ID NO: 342158 - DNA, 25 bp, Homo sapien
ccaggttgaactcgcccaggtgctc

SEQ ID NO: 342159 - DNA, 25 bp, Homo sapien
gaagtcattgtaggagcccttgctg

SEQ ID NO: 342160 - DNA, 25 bp, Homo sapien
ccaggtgctcgcccttacgcatggg

SEQ ID NO: 342161 - DNA, 25 bp, Homo sapien
gacaaggcaggtagacccaagaggt

SEQ ID NO: 342162 - DNA, 25 bp, Homo sapien
aggtggagcggccattctcaggaca

SEQ ID NO: 342163 - DNA, 25 bp, Homo sapien
caaggccgttggtcacaaactgaca

SEQ ID NO: 342164 - DNA, 25 bp, Homo sapien
tgccaggcaaggaggttaattccct

SEQ ID NO: 342165 - DNA, 25 bp, Homo sapien
gtcaaagtagatgcgaatggagccc

SEQ ID NO: 342166 - DNA, 25 bp, Homo sapien
tagatgcgaatggagcccacgttgg

SEQ ID NO: 342167 - DNA, 25 bp, Homo sapien
ccggtcaaagtagatgcgaatggag

SEQ ID NO: 342168 - DNA, 25 bp, Homo sapien
gaatggagcccacgttggtggcccc

SEQ ID NO: 342169 - DNA, 25 bp, Homo sapien
aagagctctttgatccagcgagcca

SEQ ID NO: 342170 - DNA, 25 bp, Homo sapien
aggaccacccgctcgttatggcaga

SEQ ID NO: 342171 - DNA, 25 bp, Homo sapien
tcgttatggcagaagagctctttga

SEQ ID NO: 342172 - DNA, 25 bp, Homo sapien
atccagcgagccatgccagggttca

SEQ ID NO: 342173 - DNA, 25 bp, Homo sapien
gacccaaagggactcatggcctgtt

SEQ ID NO: 342174 - DNA, 25 bp, Homo sapien
gcctgcataaagcagtcaactcctg

SEQ ID NO: 342175 - DNA, 25 bp, Homo sapien
gctgagagcctctatatgaagccca

SEQ ID NO: 342176 - DNA, 25 bp, Homo sapien
tccaaatgctgagctgactgggccc

SEQ ID NO: 342177 - DNA, 25 bp, Homo sapien
tgacacagtgatagagctcattccc

SEQ ID NO: 342178 - DNA, 25 bp, Homo sapien
tccccaggggccaggtagatgacac

SEQ ID NO: 342179 - DNA, 25 bp, Homo sapien
gagtggaagcagtggtagtccccag

SEQ ID NO: 342180 - DNA, 25 bp, Homo sapien
gggacacagtccagtcggtggggga

SEQ ID NO: 342181 - DNA, 25 bp, Homo sapien
agcagggctgcctagccccgcctgt

SEQ ID NO: 342182 - DNA, 25 bp, Homo sapien
tagccccgcctgtgcagtgacccac

SEQ ID NO: 342183 - DNA, 25 bp, Homo sapien
acatggattctcagggaggccccac

SEQ ID NO: 342184 - DNA, 25 bp, Homo sapien
tgtggtctgcacatggattctcagg

SEQ ID NO: 342185 - DNA, 25 bp, Homo sapien
agttcttcacctgcccaaagttgag

SEQ ID NO: 342186 - DNA, 25 bp, Homo sapien
aagttgaggatccttccatccgatg

SEQ ID NO: 342187 - DNA, 25 bp, Homo sapien
tctgtgcacatacgcgggcccagga

SEQ ID NO: 342188 - DNA, 25 bp, Homo sapien
ggcccaggaacgactccagggagta

SEQ ID NO: 342189 - DNA, 25 bp, Homo sapien
cccttccagatacgctggagaccag

SEQ ID NO: 342190 - DNA, 25 bp, Homo sapien
tccagatacgctggagaccaggggg

SEQ ID NO: 342191 - DNA, 25 bp, Homo sapien
ccttccagatacgctggagaccagg

SEQ ID NO: 342192 - DNA, 25 bp, Homo sapien
cttccagatacgctggagaccaggg

SEQ ID NO: 342193 - DNA, 25 bp, Homo sapien
ccaaacgtccagatgtacaggctgt

SEQ ID NO: 342194 - DNA, 25 bp, Homo sapien
gcgcgttggcactgacttgtacaaa

SEQ ID NO: 342195 - DNA, 25 bp, Homo sapien
tggcagctccacctgattgaggcga

SEQ ID NO: 342196 - DNA, 25 bp, Homo sapien
agcttgcgccggaagaactcgctga

SEQ ID NO: 342197 - DNA, 25 bp, Homo sapien
gggtcggaaacggatctgatcctaa

SEQ ID NO: 342198 - DNA, 25 bp, Homo sapien
cattagcccagctctcacttcaggg

SEQ ID NO: 342199 - DNA, 25 bp, Homo sapien
cagtgtgtgaccctagccacggtga

SEQ ID NO: 342200 - DNA, 25 bp, Homo sapien
tgcacctgccacacggagtgctgga

SEQ ID NO: 342201 - DNA, 25 bp, Homo sapien
aagtctacagcccaaagtgtgtccc

SEQ ID NO: 342202 - DNA, 25 bp, Homo sapien
caacagggattttcagatgcaggtc

SEQ ID NO: 342203 - DNA, 25 bp, Homo sapien
ggaggataccctgagcaccaacagg

SEQ ID NO: 342204 - DNA, 25 bp, Homo sapien
gaggaggctcccaagtgcatggaac

SEQ ID NO: 342205 - DNA, 25 bp, Homo sapien
cacctaagacagacgatggcctggg

SEQ ID NO: 342206 - DNA, 25 bp, Homo sapien
gcctggggacaagcactgggtccca

SEQ ID NO: 342207 - DNA, 25 bp, Homo sapien
ggagcacctaagacagacgatggcc

SEQ ID NO: 342208 - DNA, 25 bp, Homo sapien
aagagaagtcatcccctcaggcccc

SEQ ID NO: 342209 - DNA, 25 bp, Homo sapien
gtgctgctgccactgtagaagctgc

SEQ ID NO: 342210 - DNA, 25 bp, Homo sapien
aggtgctgctgccactgtagaagct

SEQ ID NO: 342211 - DNA, 25 bp, Homo sapien
ttcaggtgctgctgccactgtagaa

SEQ ID NO: 342212 - DNA, 25 bp, Homo sapien
tcaggtgctgctgccactgtagaag

SEQ ID NO: 342213 - DNA, 25 bp, Homo sapien
ccccaaggtgtaaaactgatttcat

SEQ ID NO: 342214 - DNA, 25 bp, Homo sapien
cccaaggtgtaaaactgatttcatt

SEQ ID NO: 342215 - DNA, 25 bp, Homo sapien
caactccccaaggtgtaaaactgat

SEQ ID NO: 342216 - DNA, 25 bp, Homo sapien
tccccaaggtgtaaaactgatttca

SEQ ID NO: 342217 - DNA, 25 bp, Homo sapien
agggctatgtgagcccaggcccttc

SEQ ID NO: 342218 - DNA, 25 bp, Homo sapien
tgcccagtcacacagaagggctatg

SEQ ID NO: 342219 - DNA, 25 bp, Homo sapien
cagaagggctatgtgagcccaggcc

SEQ ID NO: 342220 - DNA, 25 bp, Homo sapien
cacacagaagggctatgtgagccca

SEQ ID NO: 342221 - DNA, 25 bp, Homo sapien
tggcatcccggaattaatttggctt

SEQ ID NO: 342222 - DNA, 25 bp, Homo sapien
catgtgactgtcaaaggcccaggaa

SEQ ID NO: 342223 - DNA, 25 bp, Homo sapien
gagaggacaagccagttcccttgcc

SEQ ID NO: 342224 - DNA, 25 bp, Homo sapien
aatccccagactgggttccttccag

SEQ ID NO: 342225 - DNA, 25 bp, Homo sapien
tgcttctgacagctcgccaccacct

SEQ ID NO: 342226 - DNA, 25 bp, Homo sapien
cccggaccccctgaagatgtagcgg

SEQ ID NO: 342227 - DNA, 25 bp, Homo sapien
tgcccaccaatgaaccttccgaccc

SEQ ID NO: 342228 - DNA, 25 bp, Homo sapien
gcctgcccggaagggaggtccgagc

SEQ ID NO: 342229 - DNA, 25 bp, Homo sapien
caggaggtagtagaggacggtcaag

SEQ ID NO: 342230 - DNA, 25 bp, Homo sapien
atcccacccggctgagcggtctgag

SEQ ID NO: 342231 - DNA, 25 bp, Homo sapien
ctgagggcgccgaagggcaggaggt

SEQ ID NO: 342232 - DNA, 25 bp, Homo sapien
tcagagcgggtctggacatgcagct

SEQ ID NO: 342233 - DNA, 25 bp, Homo sapien
gctgcctctggctagcggactcatt

SEQ ID NO: 342234 - DNA, 25 bp, Homo sapien
tggctagcggactcatttcccaggc

SEQ ID NO: 342235 - DNA, 25 bp, Homo sapien
cctgtctacccacccttggcaagct

SEQ ID NO: 342236 - DNA, 25 bp, Homo sapien
ccagggcaggattcctcctgtctac

SEQ ID NO: 342237 - DNA, 25 bp, Homo sapien
gggcagccgcaagaggagagtcagg

SEQ ID NO: 342238 - DNA, 25 bp, Homo sapien
gaggactgggaatgtgggggcagcc

SEQ ID NO: 342239 - DNA, 25 bp, Homo sapien
ccagcaagggcctccaggcccaagc

SEQ ID NO: 342240 - DNA, 25 bp, Homo sapien
gctgcggggcacctctcagctgcag

SEQ ID NO: 342241 - DNA, 25 bp, Homo sapien
gcagggtgtagggcctgcctcacat

SEQ ID NO: 342242 - DNA, 25 bp, Homo sapien
agcagggtgtagggcctgcctcaca

SEQ ID NO: 342243 - DNA, 25 bp, Homo sapien
gagcagggtgtagggcctgcctcac

SEQ ID NO: 342244 - DNA, 25 bp, Homo sapien
cgaggccgctggatgtgaactctga

SEQ ID NO: 342245 - DNA, 25 bp, Homo sapien
gctctccgactcagggtgctcaggc

SEQ ID NO: 342246 - DNA, 25 bp, Homo sapien
aactctgaccttccggaggtcgtgg

SEQ ID NO: 342247 - DNA, 25 bp, Homo sapien
actgcgaggccgctggatgtgaact

SEQ ID NO: 342248 - DNA, 25 bp, Homo sapien
tggtccttgccgcgcctctgactga

SEQ ID NO: 342249 - DNA, 25 bp, Homo sapien
catttcgccgcgcggagctctggtc

SEQ ID NO: 342250 - DNA, 25 bp, Homo sapien
gccgcgcctctgactgacacatcat

SEQ ID NO: 342251 - DNA, 25 bp, Homo sapien
tcgccgcgcggagctctggtccttg

SEQ ID NO: 342252 - DNA, 25 bp, Homo sapien
agtctcggtggctcacagggtgcag

SEQ ID NO: 342253 - DNA, 25 bp, Homo sapien
gcgccgcttcctgggtttggttcag

SEQ ID NO: 342254 - DNA, 25 bp, Homo sapien
tcacagggtgcagaatagagggtca

SEQ ID NO: 342255 - DNA, 25 bp, Homo sapien
tcctgggtttggttcagtctcggtg

SEQ ID NO: 342256 - DNA, 25 bp, Homo sapien
tgcccggtccagtaagccatgacag

SEQ ID NO: 342257 - DNA, 25 bp, Homo sapien
gggctgcccggtccagtaagccatg

SEQ ID NO: 342258 - DNA, 25 bp, Homo sapien
aagcccctgcactaaagcccactgt

SEQ ID NO: 342259 - DNA, 25 bp, Homo sapien
cacacctgctcaggtcacctgctca

SEQ ID NO: 342260 - DNA, 25 bp, Homo sapien
aggcccatagacagccccagtgtcc

SEQ ID NO: 342261 - DNA, 25 bp, Homo sapien
gcccattgcatctcaaggccgaggc

SEQ ID NO: 342262 - DNA, 25 bp, Homo sapien
cagcatcctcccttgggaaggtgcc

SEQ ID NO: 342263 - DNA, 25 bp, Homo sapien
aaggtgccggcaccaggagattggc

SEQ ID NO: 342264 - DNA, 25 bp, Homo sapien
ggcagggcgtccttgcccatttaga

SEQ ID NO: 342265 - DNA, 25 bp, Homo sapien
tgagcaccgtctgtccctctcagag

SEQ ID NO: 342266 - DNA, 25 bp, Homo sapien
gtgtcagtgcctccatatcaccagc

SEQ ID NO: 342267 - DNA, 25 bp, Homo sapien
tcttctaaaacaagcgccgagacca

SEQ ID NO: 342268 - DNA, 25 bp, Homo sapien
aggaacccaaacttgcgcggagtga

SEQ ID NO: 342269 - DNA, 25 bp, Homo sapien
gatgaaataagaggggcttaggtgg

SEQ ID NO: 342270 - DNA, 25 bp, Homo sapien
gaacccaaacttgcgcggagtgacc

SEQ ID NO: 342271 - DNA, 25 bp, Homo sapien
gcttaggtggcagttctaaaacagg

SEQ ID NO: 342272 - DNA, 25 bp, Homo sapien
ccggagtatatgtagctttgcagct

SEQ ID NO: 342273 - DNA, 25 bp, Homo sapien
cttgtgtgttcagccaaggaccctg

SEQ ID NO: 342274 - DNA, 25 bp, Homo sapien
tcaagccttagcaaggcggagcagg

SEQ ID NO: 342275 - DNA, 25 bp, Homo sapien
cctgctgtctgatgggaagcgcctg

SEQ ID NO: 342276 - DNA, 25 bp, Homo sapien
gggccgcgtcgtcacagctgggaga

SEQ ID NO: 342277 - DNA, 25 bp, Homo sapien
cctgcgaccgaaggccctagaaggg

SEQ ID NO: 342278 - DNA, 25 bp, Homo sapien
gactcgctcaaccttgtccgcgggg

SEQ ID NO: 342279 - DNA, 25 bp, Homo sapien
ggaaaaaaagcccacgactcgctca

SEQ ID NO: 342280 - DNA, 25 bp, Homo sapien
actgtcacgggaggaccccactcaa

SEQ ID NO: 342281 - DNA, 25 bp, Homo sapien
tcctcagtctgtccgctggtctgtg

SEQ ID NO: 342282 - DNA, 25 bp, Homo sapien
gacccaacactaggcagactcagga

SEQ ID NO: 342283 - DNA, 25 bp, Homo sapien
tgtgagccgcctgtctgcagcccgt

SEQ ID NO: 342284 - DNA, 25 bp, Homo sapien
gcccaagcaagtgccacatgacaag

SEQ ID NO: 342285 - DNA, 25 bp, Homo sapien
ctggatccagcccaagcaagtgcca

SEQ ID NO: 342286 - DNA, 25 bp, Homo sapien
tggatccagcccaagcaagtgccac

SEQ ID NO: 342287 - DNA, 25 bp, Homo sapien
ggatccagcccaagcaagtgccaca

SEQ ID NO: 342288 - DNA, 25 bp, Homo sapien
gaagaagacagatagggtcctcctc

SEQ ID NO: 342289 - DNA, 25 bp, Homo sapien
ggaagaagacagatagggtcctcct

SEQ ID NO: 342290 - DNA, 25 bp, Homo sapien
ccagctgagtaaggcctttcctgca

SEQ ID NO: 342291 - DNA, 25 bp, Homo sapien
gctcagacaggagtgagcatacctg

SEQ ID NO: 342292 - DNA, 25 bp, Homo sapien
aaggaagcagcgctcagacaggagt

SEQ ID NO: 342293 - DNA, 25 bp, Homo sapien
gtgagcatacctgcaagcccagctg

SEQ ID NO: 342294 - DNA, 25 bp, Homo sapien
ccctaaactggcaacagtcatctaa

SEQ ID NO: 342295 - DNA, 25 bp, Homo sapien
tctctcactggccctaaactggcaa

SEQ ID NO: 342296 - DNA, 25 bp, Homo sapien
taaactggcaacagtcatctaaccc

SEQ ID NO: 342297 - DNA, 25 bp, Homo sapien
aaactggcaacagtcatctaaccct

SEQ ID NO: 342298 - DNA, 25 bp, Homo sapien
actctgaaccggaccctcctctgta

SEQ ID NO: 342299 - DNA, 25 bp, Homo sapien
ctcctgcaccagctcgcggcagcca

SEQ ID NO: 342300 - DNA, 25 bp, Homo sapien
cctgcaccagctcgcggcagccaca

SEQ ID NO: 342301 - DNA, 25 bp, Homo sapien
tcacgccactctgaaccggaccctc

SEQ ID NO: 342302 - DNA, 25 bp, Homo sapien
gggaagaggtcaacttttggatcca

SEQ ID NO: 342303 - DNA, 25 bp, Homo sapien
cccggcactggctatcttgaatcag

SEQ ID NO: 342304 - DNA, 25 bp, Homo sapien
tgagagacccattcaggcactcacg

SEQ ID NO: 342305 - DNA, 25 bp, Homo sapien
cactcacgctgggacgtgcatgtca

SEQ ID NO: 342306 - DNA, 25 bp, Homo sapien
tgcaagcaaaagtgtccaccaaatg

SEQ ID NO: 342307 - DNA, 25 bp, Homo sapien
ctaactgcaagcaaaagtgtccacc

SEQ ID NO: 342308 - DNA, 25 bp, Homo sapien
aaagtgtccaccaaatgccctgggt

SEQ ID NO: 342309 - DNA, 25 bp, Homo sapien
caagcaaaagtgtccaccaaatgcc

SEQ ID NO: 342310 - DNA, 25 bp, Homo sapien
caggcctctatgtcaacagccaaag

SEQ ID NO: 342311 - DNA, 25 bp, Homo sapien
gcctctatgtcaacagccaaagcca

SEQ ID NO: 342312 - DNA, 25 bp, Homo sapien
tgagcacaggcctctatgtcaacag

SEQ ID NO: 342313 - DNA, 25 bp, Homo sapien
ctgagcacaggcctctatgtcaaca

SEQ ID NO: 342314 - DNA, 25 bp, Homo sapien
gctgatacggtaactgagatggcta

SEQ ID NO: 342315 - DNA, 25 bp, Homo sapien
tcatgctcaactaacggataaaaga

SEQ ID NO: 342316 - DNA, 25 bp, Homo sapien
gcaccagaataccacgacagctgat

SEQ ID NO: 342317 - DNA, 25 bp, Homo sapien
tctcttcggcaatccaaattgccag

SEQ ID NO: 342318 - DNA, 25 bp, Homo sapien
tactctccagccttagcacagcaag

SEQ ID NO: 342319 - DNA, 25 bp, Homo sapien
ggcacatacctacagtccactactg

SEQ ID NO: 342320 - DNA, 25 bp, Homo sapien
gcgaagtggcacatacctacagtcc

SEQ ID NO: 342321 - DNA, 25 bp, Homo sapien
catacctacagtccactactgggaa

SEQ ID NO: 342322 - DNA, 25 bp, Homo sapien
tccacatctgatgtcatgtgacagg

SEQ ID NO: 342323 - DNA, 25 bp, Homo sapien
ccacatctgatgtcatgtgacaggt

SEQ ID NO: 342324 - DNA, 25 bp, Homo sapien
cacatctgatgtcatgtgacaggtc

SEQ ID NO: 342325 - DNA, 25 bp, Homo sapien
acccgcaggctatgtgtagaaggta

SEQ ID NO: 342326 - DNA, 25 bp, Homo sapien
gccaggtaggatggtacacgcttat

SEQ ID NO: 342327 - DNA, 25 bp, Homo sapien
cccgcaggctatgtgtagaaggtat

SEQ ID NO: 342328 - DNA, 25 bp, Homo sapien
gatggtacacgcttatattcccagc

SEQ ID NO: 342329 - DNA, 25 bp, Homo sapien
tagctgggcataacggcaggtgcct

SEQ ID NO: 342330 - DNA, 25 bp, Homo sapien
aagattgcgccattgccttccagcc

SEQ ID NO: 342331 - DNA, 25 bp, Homo sapien
tgaggtgggagacgcttgaaccggg

SEQ ID NO: 342332 - DNA, 25 bp, Homo sapien
gtaatcccatctactgggaaggctg

SEQ ID NO: 342333 - DNA, 25 bp, Homo sapien
tgtatggccagttgactaagtcacg

SEQ ID NO: 342334 - DNA, 25 bp, Homo sapien
taggcacatggacatacagggcaag

SEQ ID NO: 342335 - DNA, 25 bp, Homo sapien
tacgaacaggccaaagggtaggcac

SEQ ID NO: 342336 - DNA, 25 bp, Homo sapien
ttcacacagctactgcggagcatgg

SEQ ID NO: 342337 - DNA, 25 bp, Homo sapien
ccagtgaccagcaagtttgggtgga

SEQ ID NO: 342338 - DNA, 25 bp, Homo sapien
ggtaccctgcatacccgccgcctgt

SEQ ID NO: 342339 - DNA, 25 bp, Homo sapien
caggggcagtgtggatttttctggc

SEQ ID NO: 342340 - DNA, 25 bp, Homo sapien
tacttctcatactgccggtaccctg

SEQ ID NO: 342341 - DNA, 25 bp, Homo sapien
tgtaataaaaaacaggacaatttca

SEQ ID NO: 342342 - DNA, 25 bp, Homo sapien
aaaggctctaaaaggcagcttccgt

SEQ ID NO: 342343 - DNA, 25 bp, Homo sapien
tcagggcagtgatctcacagggatg

SEQ ID NO: 342344 - DNA, 25 bp, Homo sapien
cagcttccgtaagggctgtagggat

SEQ ID NO: 342345 - DNA, 25 bp, Homo sapien
ttggctcagggcagtgatctcacag

SEQ ID NO: 342346 - DNA, 25 bp, Homo sapien
gcatagcactattgtagctaacatg

SEQ ID NO: 342347 - DNA, 25 bp, Homo sapien
agcactattgtagctaacatgatga

SEQ ID NO: 342348 - DNA, 25 bp, Homo sapien
gcagcatagcactattgtagctaac

SEQ ID NO: 342349 - DNA, 25 bp, Homo sapien
tagcactattgtagctaacatgatg

SEQ ID NO: 342350 - DNA, 25 bp, Homo sapien
tcatttacatgtctcacaaataggc

SEQ ID NO: 342351 - DNA, 25 bp, Homo sapien
tgtctcacaaataggcactggttta

SEQ ID NO: 342352 - DNA, 25 bp, Homo sapien
gttttcatttacatgtctcacaaat

SEQ ID NO: 342353 - DNA, 25 bp, Homo sapien
tacatgtctcacaaataggcactgg

SEQ ID NO: 342354 - DNA, 25 bp, Homo sapien
agcctcctctcatcatttaaaaaaa

SEQ ID NO: 342355 - DNA, 25 bp, Homo sapien
cctcctctcatcatttaaaaaaatt

SEQ ID NO: 342356 - DNA, 25 bp, Homo sapien
gcctcctctcatcatttaaaaaaat

SEQ ID NO: 342357 - DNA, 25 bp, Homo sapien
tcctctcatcatttaaaaaaattat

SEQ ID NO: 342358 - DNA, 25 bp, Homo sapien
agagacagctggactcagaagaccc

SEQ ID NO: 342359 - DNA, 25 bp, Homo sapien
tctcattaactccaaagagagacag

SEQ ID NO: 342360 - DNA, 25 bp, Homo sapien
tccgggctctgctacaaactggcta

SEQ ID NO: 342361 - DNA, 25 bp, Homo sapien
cctgagagaaagatcgtcgcgtgag

SEQ ID NO: 342362 - DNA, 25 bp, Homo sapien
aaggtagtctctccgcgctgctata

SEQ ID NO: 342363 - DNA, 25 bp, Homo sapien
gcgagcccgcgacacagaaacatct

SEQ ID NO: 342364 - DNA, 25 bp, Homo sapien
tcctaagctcgaggtgaaggtggct

SEQ ID NO: 342365 - DNA, 25 bp, Homo sapien
ccagcttggtccaggttgccccacg

SEQ ID NO: 342366 - DNA, 25 bp, Homo sapien
ggcgcgaccccgtgcagtaatccca

SEQ ID NO: 342367 - DNA, 25 bp, Homo sapien
atcggtgccccacggacgtcgccat

SEQ ID NO: 342368 - DNA, 25 bp, Homo sapien
cccgtgcagtaatcccagacatcgg

SEQ ID NO: 342369 - DNA, 25 bp, Homo sapien
gcagtaatcccagacatcggtgccc

SEQ ID NO: 342370 - DNA, 25 bp, Homo sapien
tgctccttctcagcgtgccacgccc

SEQ ID NO: 342371 - DNA, 25 bp, Homo sapien
cttgtctgctccttctcagcgtgcc

SEQ ID NO: 342372 - DNA, 25 bp, Homo sapien
gtctgctccttctcagcgtgccacg

SEQ ID NO: 342373 - DNA, 25 bp, Homo sapien
ttgtctgctccttctcagcgtgcca

SEQ ID NO: 342374 - DNA, 25 bp, Homo sapien
gttttaggaagaccacttaggcagc

SEQ ID NO: 342375 - DNA, 25 bp, Homo sapien
tgcagtgtttcagcgaccatttcaa

SEQ ID NO: 342376 - DNA, 25 bp, Homo sapien
atctttatttggagacgagggcaac

SEQ ID NO: 342377 - DNA, 25 bp, Homo sapien
taaggagtggttctgacaagtgcaa

SEQ ID NO: 342378 - DNA, 25 bp, Homo sapien
aagtgcccggtttcgctgtcagtgc

SEQ ID NO: 342379 - DNA, 25 bp, Homo sapien
tatccgaataccaggaagtgcccgg

SEQ ID NO: 342380 - DNA, 25 bp, Homo sapien
tatggatagcttctcggatggcccc

SEQ ID NO: 342381 - DNA, 25 bp, Homo sapien
cagtgctcgggcagctagaatccag

SEQ ID NO: 342382 - DNA, 25 bp, Homo sapien
caaggagcccttttctgacacgaat

SEQ ID NO: 342383 - DNA, 25 bp, Homo sapien
catggaatctgagagcacactgcac

SEQ ID NO: 342384 - DNA, 25 bp, Homo sapien
ttgattatgagacggaattccagcc

SEQ ID NO: 342385 - DNA, 25 bp, Homo sapien
taagttcagttgtggcaaggagccc

SEQ ID NO: 342386 - DNA, 25 bp, Homo sapien
tagtctgcaacctgtccagtaggag

SEQ ID NO: 342387 - DNA, 25 bp, Homo sapien
cattcagagctggtacggaagcctg

SEQ ID NO: 342388 - DNA, 25 bp, Homo sapien
cagaatttcaacgacgggcagggct

SEQ ID NO: 342389 - DNA, 25 bp, Homo sapien
tgtctctgggaaacatagccgccac

SEQ ID NO: 342390 - DNA, 25 bp, Homo sapien
tcaatgatcgggagagaaacctgct

SEQ ID NO: 342391 - DNA, 25 bp, Homo sapien
cacaaatactgtgggtcagcctgta

SEQ ID NO: 342392 - DNA, 25 bp, Homo sapien
tcagcagtaaaagtagaggaccctc

SEQ ID NO: 342393 - DNA, 25 bp, Homo sapien
tacactcacatcaataggtcctggg

SEQ ID NO: 342394 - DNA, 25 bp, Homo sapien
agcatccagctctcgactctgcaca

SEQ ID NO: 342395 - DNA, 25 bp, Homo sapien
cagttccattagtttctgtatcaaa

SEQ ID NO: 342396 - DNA, 25 bp, Homo sapien
tctgggccctggtaaagctgcctgc

SEQ ID NO: 342397 - DNA, 25 bp, Homo sapien
tcaacagcctgatgattgttcctgc

SEQ ID NO: 342398 - DNA, 25 bp, Homo sapien
cgggactgtaaaatcctgaaattct

SEQ ID NO: 342399 - DNA, 25 bp, Homo sapien
gttggctgattgagattagtgtacc

SEQ ID NO: 342400 - DNA, 25 bp, Homo sapien
gattagtgtaccatttcgttccttg

SEQ ID NO: 342401 - DNA, 25 bp, Homo sapien
cgagctctcctctttcgcgggactg

SEQ ID NO: 342402 - DNA, 25 bp, Homo sapien
ttggtatatatctcttctaaactaa

SEQ ID NO: 342403 - DNA, 25 bp, Homo sapien
tataattcttgttggtatatatctc

SEQ ID NO: 342404 - DNA, 25 bp, Homo sapien
ttcttgttggtatatatctcttcta

SEQ ID NO: 342405 - DNA, 25 bp, Homo sapien
tttgcaggaggagatttataattct

SEQ ID NO: 342406 - DNA, 25 bp, Homo sapien
catagttaactcctgttgtagcatg

SEQ ID NO: 342407 - DNA, 25 bp, Homo sapien
cctggctgaataatacgccatctat

SEQ ID NO: 342408 - DNA, 25 bp, Homo sapien
cagcactggtaaccactaaactact

SEQ ID NO: 342409 - DNA, 25 bp, Homo sapien
cacaaccagccttaaaacactttca

SEQ ID NO: 342410 - DNA, 25 bp, Homo sapien
cccaaaagtccagtttatgtcagag

SEQ ID NO: 342411 - DNA, 25 bp, Homo sapien
gagctgaactcatacagtacgtagt

SEQ ID NO: 342412 - DNA, 25 bp, Homo sapien
gccttccagagtgtacaactgttgt

SEQ ID NO: 342413 - DNA, 25 bp, Homo sapien
tatgtcagagctcacccttgttgtt

SEQ ID NO: 342414 - DNA, 25 bp, Homo sapien
ggtaagattaggatctggcctagga

SEQ ID NO: 342415 - DNA, 25 bp, Homo sapien
aggaatggttttccggatgcgaatc

SEQ ID NO: 342416 - DNA, 25 bp, Homo sapien
gcgaatctgtgagactttctttggc

SEQ ID NO: 342417 - DNA, 25 bp, Homo sapien
cccatgggggtaagattaggatctg

SEQ ID NO: 342418 - DNA, 25 bp, Homo sapien
gctgacagctgattctgctaccaag

SEQ ID NO: 342419 - DNA, 25 bp, Homo sapien
cagctgattctgctaccaagcaaga

SEQ ID NO: 342420 - DNA, 25 bp, Homo sapien
tccaatccacgaacctggaactcag

SEQ ID NO: 342421 - DNA, 25 bp, Homo sapien
gctcatccaatccacgaacctggaa

SEQ ID NO: 342422 - DNA, 25 bp, Homo sapien
caaggcagggaatggaggctccagc

SEQ ID NO: 342423 - DNA, 25 bp, Homo sapien
gtaccaaggcagggaatggaggctc

SEQ ID NO: 342424 - DNA, 25 bp, Homo sapien
accaaggcagggaatggaggctcca

SEQ ID NO: 342425 - DNA, 25 bp, Homo sapien
ctttggtaccaaggcagggaatgga

SEQ ID NO: 342426 - DNA, 25 bp, Homo sapien
aagaagatatgagaggggttccctt

SEQ ID NO: 342427 - DNA, 25 bp, Homo sapien
tttctacttccagcacattcaactt

SEQ ID NO: 342428 - DNA, 25 bp, Homo sapien
tctacttccagcacattcaacttct

SEQ ID NO: 342429 - DNA, 25 bp, Homo sapien
tacttccagcacattcaacttcttc

SEQ ID NO: 342430 - DNA, 25 bp, Homo sapien
caagaggtcaaagtcatgccacaga

SEQ ID NO: 342431 - DNA, 25 bp, Homo sapien
tctgagagacatagatcaggtttac

SEQ ID NO: 342432 - DNA, 25 bp, Homo sapien
tcaggtttacaaggacaagaggtca

SEQ ID NO: 342433 - DNA, 25 bp, Homo sapien
gatccacaccacctatgtatgcact

SEQ ID NO: 342434 - DNA, 25 bp, Homo sapien
tgactgccgctggtgttatatgtag

SEQ ID NO: 342435 - DNA, 25 bp, Homo sapien
tctgactgccgctggtgttatatgt

SEQ ID NO: 342436 - DNA, 25 bp, Homo sapien
gccgctggtgttatatgtagcttcc

SEQ ID NO: 342437 - DNA, 25 bp, Homo sapien
actgccgctggtgttatatgtagct

SEQ ID NO: 342438 - DNA, 25 bp, Homo sapien
cctggaagaggcacatatggtaaca

SEQ ID NO: 342439 - DNA, 25 bp, Homo sapien
gcctggaagaggcacatatggtaac

SEQ ID NO: 342440 - DNA, 25 bp, Homo sapien
ctggaagaggcacatatggtaacat

SEQ ID NO: 342441 - DNA, 25 bp, Homo sapien
gcccggaagatcaagactgaagtaa

SEQ ID NO: 342442 - DNA, 25 bp, Homo sapien
gaatatattataccactcagttgtg

SEQ ID NO: 342443 - DNA, 25 bp, Homo sapien
gcctgagtatcagggcaagacccca

SEQ ID NO: 342444 - DNA, 25 bp, Homo sapien
ggtattagcacatgatagccccaag

SEQ ID NO: 342445 - DNA, 25 bp, Homo sapien
tccaaatggataggactctgcccac

SEQ ID NO: 342446 - DNA, 25 bp, Homo sapien
gaagagatttcgaaggagcagacag

SEQ ID NO: 342447 - DNA, 25 bp, Homo sapien
gacagaaggaccatgctggctccaa

SEQ ID NO: 342448 - DNA, 25 bp, Homo sapien
gcccagacttggttgccgcttgcag

SEQ ID NO: 342449 - DNA, 25 bp, Homo sapien
gctggagaccgtaaccctttcaggc

SEQ ID NO: 342450 - DNA, 25 bp, Homo sapien
gctatggaggctggagaccgtaacc

SEQ ID NO: 342451 - DNA, 25 bp, Homo sapien
ctttcaggccctgtgtaaactgggt

SEQ ID NO: 342452 - DNA, 25 bp, Homo sapien
tcaggccctgtgtaaactgggtcat

SEQ ID NO: 342453 - DNA, 25 bp, Homo sapien
ttttttgtccagattcggtaacatc

SEQ ID NO: 342454 - DNA, 25 bp, Homo sapien
agaagctccgtttttttgtccagat

SEQ ID NO: 342455 - DNA, 25 bp, Homo sapien
agctccgtttttttgtccagattcg

SEQ ID NO: 342456 - DNA, 25 bp, Homo sapien
tggagaagctccgtttttttgtcca

SEQ ID NO: 342457 - DNA, 25 bp, Homo sapien
agaaccaaacagcagggacggcatc

SEQ ID NO: 342458 - DNA, 25 bp, Homo sapien
cagggcaaccgtgggacaagaagaa

SEQ ID NO: 342459 - DNA, 25 bp, Homo sapien
ctagaagtgtgtgaaggccaaggac

SEQ ID NO: 342460 - DNA, 25 bp, Homo sapien
tggtctggactatggcagtgcctcc

SEQ ID NO: 342461 - DNA, 25 bp, Homo sapien
cttttatatctgaggcgcttgtagc

SEQ ID NO: 342462 - DNA, 25 bp, Homo sapien
ggatgaaaatccgtccaggagtctt

SEQ ID NO: 342463 - DNA, 25 bp, Homo sapien
aaatatggattcagctgctctgtgc

SEQ ID NO: 342464 - DNA, 25 bp, Homo sapien
gaagttcagaggaacaccgtcggta

SEQ ID NO: 342465 - DNA, 25 bp, Homo sapien
caaggacttgtgcatgactcagtgt

SEQ ID NO: 342466 - DNA, 25 bp, Homo sapien
gagatgttgctcacgggatcgccat

SEQ ID NO: 342467 - DNA, 25 bp, Homo sapien
cagaggaattctcgtgagggtgaca

SEQ ID NO: 342468 - DNA, 25 bp, Homo sapien
caggttctaatcgtgtaggtgcaga

SEQ ID NO: 342469 - DNA, 25 bp, Homo sapien
tttatcttgctgtccataatggcta

SEQ ID NO: 342470 - DNA, 25 bp, Homo sapien
ttcatcatggcaagacatcgactct

SEQ ID NO: 342471 - DNA, 25 bp, Homo sapien
aactcagagtttggttctagtcttg

SEQ ID NO: 342472 - DNA, 25 bp, Homo sapien
agctttcatcatggcaagacatcga

SEQ ID NO: 342473 - DNA, 25 bp, Homo sapien
tagattagatgccttcacgtccagc

SEQ ID NO: 342474 - DNA, 25 bp, Homo sapien
gagctgaccagcagatccttttggt

SEQ ID NO: 342475 - DNA, 25 bp, Homo sapien
tatgtgcagcatccagttctctccg

SEQ ID NO: 342476 - DNA, 25 bp, Homo sapien
cataacagtaggagactggtccaac

SEQ ID NO: 342477 - DNA, 25 bp, Homo sapien
tatcctgagattgaacgctgtgaca

SEQ ID NO: 342478 - DNA, 25 bp, Homo sapien
tctcttatttgagcgcagcctggaa

SEQ ID NO: 342479 - DNA, 25 bp, Homo sapien
ccttggcagcagtgatcacggtgct

SEQ ID NO: 342480 - DNA, 25 bp, Homo sapien
tctatgacagagaccacttgaggaa

SEQ ID NO: 342481 - DNA, 25 bp, Homo sapien
aatgggaatggtttgtatatcagca

SEQ ID NO: 342482 - DNA, 25 bp, Homo sapien
tcttgagaattaagggacacttgtt

SEQ ID NO: 342483 - DNA, 25 bp, Homo sapien
taaatgcagtagagagtcagttggc

SEQ ID NO: 342484 - DNA, 25 bp, Homo sapien
gacatctgctctaccctctaatgga

SEQ ID NO: 342485 - DNA, 25 bp, Homo sapien
acttaatatattgggctctacaggg

SEQ ID NO: 342486 - DNA, 25 bp, Homo sapien
caacagagcagtaccttgcttgggt

SEQ ID NO: 342487 - DNA, 25 bp, Homo sapien
cacaggctatgctctgttcatctaa

SEQ ID NO: 342488 - DNA, 25 bp, Homo sapien
tacaggacttatttgatcctctggc

SEQ ID NO: 342489 - DNA, 25 bp, Homo sapien
tgtacttcggcggattttagcagag

SEQ ID NO: 342490 - DNA, 25 bp, Homo sapien
ggaattcaccgcatccagctgagag

SEQ ID NO: 342491 - DNA, 25 bp, Homo sapien
tggtcctcagggtttgtcaagttac

SEQ ID NO: 342492 - DNA, 25 bp, Homo sapien
tcactcctaggaatcaaaagccgtt

SEQ ID NO: 342493 - DNA, 25 bp, Homo sapien
cagggaggtccacatgtgaaagttc

SEQ ID NO: 342494 - DNA, 25 bp, Homo sapien
cttagaaaatcttcagggaggtcca

SEQ ID NO: 342495 - DNA, 25 bp, Homo sapien
aaatcttcagggaggtccacatgtg

SEQ ID NO: 342496 - DNA, 25 bp, Homo sapien
tgtgaaagttctttgctggactgca

SEQ ID NO: 342497 - DNA, 25 bp, Homo sapien
cccattctttcaggataggtaatca

SEQ ID NO: 342498 - DNA, 25 bp, Homo sapien
taatgtgggctaccctccccattgg

SEQ ID NO: 342499 - DNA, 25 bp, Homo sapien
tatccttcccatgtgtacttgtgta

SEQ ID NO: 342500 - DNA, 25 bp, Homo sapien
cacatcccagttgtctagttagtta

SEQ ID NO: 342501 - DNA, 25 bp, Homo sapien
gagggttctcttataattcctgcct

SEQ ID NO: 342502 - DNA, 25 bp, Homo sapien
ctgactcgggctagtcttttcttca

SEQ ID NO: 342503 - DNA, 25 bp, Homo sapien
tgactcgggctagtcttttcttcag

SEQ ID NO: 342504 - DNA, 25 bp, Homo sapien
ccctcagagggttctcttataattc

SEQ ID NO: 342505 - DNA, 25 bp, Homo sapien
tttgccctatccaagatcccagatg

SEQ ID NO: 342506 - DNA, 25 bp, Homo sapien
gagtctctactccagatgacagcat

SEQ ID NO: 342507 - DNA, 25 bp, Homo sapien
gagtataattcctgtaccacggcag

SEQ ID NO: 342508 - DNA, 25 bp, Homo sapien
tcaagtggaactggctgagtctcta

SEQ ID NO: 342509 - DNA, 25 bp, Homo sapien
cagattatggagtcaagtcttttac

SEQ ID NO: 342510 - DNA, 25 bp, Homo sapien
gagtcaagtcttttacatcaaatga

SEQ ID NO: 342511 - DNA, 25 bp, Homo sapien
cagatgcagattatggagtcaagtc

SEQ ID NO: 342512 - DNA, 25 bp, Homo sapien
tatggagtcaagtcttttacatcaa

SEQ ID NO: 342513 - DNA, 25 bp, Homo sapien
ctagagtaccatggtgcaatcgttc

SEQ ID NO: 342514 - DNA, 25 bp, Homo sapien
gagtaccatggtgcaatcgttcctc

SEQ ID NO: 342515 - DNA, 25 bp, Homo sapien
gtaccatggtgcaatcgttcctcac

SEQ ID NO: 342516 - DNA, 25 bp, Homo sapien
accatggtgcaatcgttcctcaccg

SEQ ID NO: 342517 - DNA, 25 bp, Homo sapien
aattttgtatgtcttgttatgttgc

SEQ ID NO: 342518 - DNA, 25 bp, Homo sapien
tgtagataattttgtatgtcttgtt

SEQ ID NO: 342519 - DNA, 25 bp, Homo sapien
gataattttgtatgtcttgttatgt

SEQ ID NO: 342520 - DNA, 25 bp, Homo sapien
tttgtagataattttgtatgtcttg

SEQ ID NO: 342521 - DNA, 25 bp, Homo sapien
aacttattttcagctcagtagctca

SEQ ID NO: 342522 - DNA, 25 bp, Homo sapien
gacagaacccgattttgagaagaca

SEQ ID NO: 342523 - DNA, 25 bp, Homo sapien
gaaatacatctctacagccgggcgt

SEQ ID NO: 342524 - DNA, 25 bp, Homo sapien
cagtagctcacaccatctatcaaaa

SEQ ID NO: 342525 - DNA, 25 bp, Homo sapien
ctaaaaacctgacaaagtggcaact

SEQ ID NO: 342526 - DNA, 25 bp, Homo sapien
caataatgaccaggccctcagaagc

SEQ ID NO: 342527 - DNA, 25 bp, Homo sapien
aaaaccgtgtgcctcaataatcccg

SEQ ID NO: 342528 - DNA, 25 bp, Homo sapien
ctgttaataacactaggcgctgcca

SEQ ID NO: 342529 - DNA, 25 bp, Homo sapien
aagaatatggaatcgcccacttggg

SEQ ID NO: 342530 - DNA, 25 bp, Homo sapien
gggcatctctaaccagtcaggaaga

SEQ ID NO: 342531 - DNA, 25 bp, Homo sapien
caggtctcactttctcttaagagca

SEQ ID NO: 342532 - DNA, 25 bp, Homo sapien
tttttgtcactacagtaagtcaggg

SEQ ID NO: 342533 - DNA, 25 bp, Homo sapien
cgtcggagccatgactcggagaagc

SEQ ID NO: 342534 - DNA, 25 bp, Homo sapien
gaccaacggatgagcgctaagaaag

SEQ ID NO: 342535 - DNA, 25 bp, Homo sapien
taagaaagagcgtacgcctccgata

SEQ ID NO: 342536 - DNA, 25 bp, Homo sapien
gagaagccgcttttctctagcgacg

SEQ ID NO: 342537 - DNA, 25 bp, Homo sapien
cggcccgcgcttgcccagccagctc

SEQ ID NO: 342538 - DNA, 25 bp, Homo sapien
gcggcccgcgcttgcccagccagct

SEQ ID NO: 342539 - DNA, 25 bp, Homo sapien
ccgcggcccgcgcttgcccagccag

SEQ ID NO: 342540 - DNA, 25 bp, Homo sapien
ctccgcggcccgcgcttgcccagcc

SEQ ID NO: 342541 - DNA, 25 bp, Homo sapien
gccgacagaggccgggggcgctccg

SEQ ID NO: 342542 - DNA, 25 bp, Homo sapien
agccgacagaggccgggggcgctcc

SEQ ID NO: 342543 - DNA, 25 bp, Homo sapien
gagccgacagaggccgggggcgctc

SEQ ID NO: 342544 - DNA, 25 bp, Homo sapien
ctgagcctacggagccgacagaggc

SEQ ID NO: 342545 - DNA, 25 bp, Homo sapien
ggcgcgtgccacattgcctgggtaa

SEQ ID NO: 342546 - DNA, 25 bp, Homo sapien
aactgggagacagtcaccattactt

SEQ ID NO: 342547 - DNA, 25 bp, Homo sapien
ggaactgggagacagtcaccattac

SEQ ID NO: 342548 - DNA, 25 bp, Homo sapien
aggcgcgtgccacattgcctgggta

SEQ ID NO: 342549 - DNA, 25 bp, Homo sapien
atactttatagtcttggcggaattt

SEQ ID NO: 342550 - DNA, 25 bp, Homo sapien
tgtgggtcttgtgtaagaaagcact

SEQ ID NO: 342551 - DNA, 25 bp, Homo sapien
tgtgatgtagttagatctactcatc

SEQ ID NO: 342552 - DNA, 25 bp, Homo sapien
tctaccccagagttacagatgtgta

SEQ ID NO: 342553 - DNA, 25 bp, Homo sapien
tgaggatcatcttggtttcgcaggg

SEQ ID NO: 342554 - DNA, 25 bp, Homo sapien
gaggatctgcacctgaacccttaag

SEQ ID NO: 342555 - DNA, 25 bp, Homo sapien
tgagctctttacatcaggcagcaca

SEQ ID NO: 342556 - DNA, 25 bp, Homo sapien
tttttggccactgaccccgtgtgca

SEQ ID NO: 342557 - DNA, 25 bp, Homo sapien
catatacttggtggctttttatata

SEQ ID NO: 342558 - DNA, 25 bp, Homo sapien
tatacttggtggctttttatatatg

SEQ ID NO: 342559 - DNA, 25 bp, Homo sapien
ttcatatacttggtggctttttata

SEQ ID NO: 342560 - DNA, 25 bp, Homo sapien
ctttcatatacttggtggcttttta

SEQ ID NO: 342561 - DNA, 25 bp, Homo sapien
gccctcatctccataccctaaagtg

SEQ ID NO: 342562 - DNA, 25 bp, Homo sapien
tatagcattcgggtctcagcctgcc

SEQ ID NO: 342563 - DNA, 25 bp, Homo sapien
tccagtggcctttattaccccaaga

SEQ ID NO: 342564 - DNA, 25 bp, Homo sapien
tttattaccccaagatctggtcact

SEQ ID NO: 342565 - DNA, 25 bp, Homo sapien
tcatcagtttgactcctggaagagg

SEQ ID NO: 342566 - DNA, 25 bp, Homo sapien
tacttacgccacttttcacattcag

SEQ ID NO: 342567 - DNA, 25 bp, Homo sapien
gaggcagctgttgattcctctctgc

SEQ ID NO: 342568 - DNA, 25 bp, Homo sapien
ttcctgttggtcaccgccctgcagt

SEQ ID NO: 342569 - DNA, 25 bp, Homo sapien
tggccccgctgtgacgtcaattacg

SEQ ID NO: 342570 - DNA, 25 bp, Homo sapien
cctttccaaggtgaagcggtgaccg

SEQ ID NO: 342571 - DNA, 25 bp, Homo sapien
tcaatggaatgtacccaggagcccc

SEQ ID NO: 342572 - DNA, 25 bp, Homo sapien
tgcattttgcgcagtgaaggccaca

SEQ ID NO: 342573 - DNA, 25 bp, Homo sapien
gaggtctttgcatagtggtgctccc

SEQ ID NO: 342574 - DNA, 25 bp, Homo sapien
caggactcggagaagatgttgctaa

SEQ ID NO: 342575 - DNA, 25 bp, Homo sapien
ggtgctccctgtgtgattgaagaaa

SEQ ID NO: 342576 - DNA, 25 bp, Homo sapien
tgaggctagcgagatgcattcagtc

SEQ ID NO: 342577 - DNA, 25 bp, Homo sapien
tcttcgctccaggtcttgacatggt

SEQ ID NO: 342578 - DNA, 25 bp, Homo sapien
gcagccctgttgtatcctcttgagt

SEQ ID NO: 342579 - DNA, 25 bp, Homo sapien
gccttaaccaagagacagcgtagta

SEQ ID NO: 342580 - DNA, 25 bp, Homo sapien
cgtagtagcaaactgctggcccaca

SEQ ID NO: 342581 - DNA, 25 bp, Homo sapien
ggcaaaatatcctagactttcagag

SEQ ID NO: 342582 - DNA, 25 bp, Homo sapien
gtcttccagtggcaaaatatcctag

SEQ ID NO: 342583 - DNA, 25 bp, Homo sapien
gacattgtctgctggtcttccagtg

SEQ ID NO: 342584 - DNA, 25 bp, Homo sapien
ctgctggtcttccagtggcaaaata

SEQ ID NO: 342585 - DNA, 25 bp, Homo sapien
tctggctttgtgtgcgaagacccct

SEQ ID NO: 342586 - DNA, 25 bp, Homo sapien
gacctgaagtctgcaattccgatct

SEQ ID NO: 342587 - DNA, 25 bp, Homo sapien
ggttttctctgccacgacctgaagt

SEQ ID NO: 342588 - DNA, 25 bp, Homo sapien
taagtggcgccctgtctcagctggt

SEQ ID NO: 342589 - DNA, 25 bp, Homo sapien
tggtctttgtctgggattttatatc

SEQ ID NO: 342590 - DNA, 25 bp, Homo sapien
tttatatcagtgacagactgtagcg

SEQ ID NO: 342591 - DNA, 25 bp, Homo sapien
gactgtagcgtcacacttttccaga

SEQ ID NO: 342592 - DNA, 25 bp, Homo sapien
cagtccggaactgactcccttaaag

SEQ ID NO: 342593 - DNA, 25 bp, Homo sapien
tgctgaacctagtacgacaaactgg

SEQ ID NO: 342594 - DNA, 25 bp, Homo sapien
gggcacaccctaatgtccagtatga

SEQ ID NO: 342595 - DNA, 25 bp, Homo sapien
tagacgacacaccatcttttaaggg

SEQ ID NO: 342596 - DNA, 25 bp, Homo sapien
cacctgtaattgcacttagggcaca

SEQ ID NO: 342597 - DNA, 25 bp, Homo sapien
gtgtatcctgacagcgccatgtgtg

SEQ ID NO: 342598 - DNA, 25 bp, Homo sapien
ctggactgatggttgctttgagccc

SEQ ID NO: 342599 - DNA, 25 bp, Homo sapien
gattagaaagaattagccaaccagg

SEQ ID NO: 342600 - DNA, 25 bp, Homo sapien
tgatacagagagacaacttgctcct

SEQ ID NO: 342601 - DNA, 25 bp, Homo sapien
ttgataagacctctttcttccttgc

SEQ ID NO: 342602 - DNA, 25 bp, Homo sapien
tgaaagcctgccactccaggtcttc

SEQ ID NO: 342603 - DNA, 25 bp, Homo sapien
catgatgcgatgttgtcttcaagac

SEQ ID NO: 342604 - DNA, 25 bp, Homo sapien
gccaggtagcctttgctcaatcacc

SEQ ID NO: 342605 - DNA, 25 bp, Homo sapien
taacctgtcaactggcggtgtgacc

SEQ ID NO: 342606 - DNA, 25 bp, Homo sapien
acctgacagtcatgcagccttgggc

SEQ ID NO: 342607 - DNA, 25 bp, Homo sapien
tttcaactgctctgggaaggtcccc

SEQ ID NO: 342608 - DNA, 25 bp, Homo sapien
aaagagaaatggctgaaaggaatcc

SEQ ID NO: 342609 - DNA, 25 bp, Homo sapien
ttcccagggacagcatactttgtag

SEQ ID NO: 342610 - DNA, 25 bp, Homo sapien
gtagctctcatttccaggcctacac

SEQ ID NO: 342611 - DNA, 25 bp, Homo sapien
ccagggacagcatactttgtagctc

SEQ ID NO: 342612 - DNA, 25 bp, Homo sapien
gacagcatactttgtagctctcatt

SEQ ID NO: 342613 - DNA, 25 bp, Homo sapien
tacagttcaggaaacggcctcagag

SEQ ID NO: 342614 - DNA, 25 bp, Homo sapien
acagtcgcgtggcatggtgcacctg

SEQ ID NO: 342615 - DNA, 25 bp, Homo sapien
tacgacttttcttaggcctgtgctg

SEQ ID NO: 342616 - DNA, 25 bp, Homo sapien
taagtggctctatctctcccggcct

SEQ ID NO: 342617 - DNA, 25 bp, Homo sapien
aagcaaatatcatcggcccttgtcc

SEQ ID NO: 342618 - DNA, 25 bp, Homo sapien
ccacctggcagtcaggtgagcttgc

SEQ ID NO: 342619 - DNA, 25 bp, Homo sapien
gggctcgaaggtgctcgccatgctc

SEQ ID NO: 342620 - DNA, 25 bp, Homo sapien
tcaggtgagcttgcaagtgtgaaga

SEQ ID NO: 342621 - DNA, 25 bp, Homo sapien
tatcacgtctactgccagcctggcg

SEQ ID NO: 342622 - DNA, 25 bp, Homo sapien
tctatcacgtctactgccagcctgg

SEQ ID NO: 342623 - DNA, 25 bp, Homo sapien
gttcggccgtcatccgccccagcgg

SEQ ID NO: 342624 - DNA, 25 bp, Homo sapien
agcctggcgcccaaaggttcggccg

SEQ ID NO: 342625 - DNA, 25 bp, Homo sapien
cacaggataggtctgcagtgcgact

SEQ ID NO: 342626 - DNA, 25 bp, Homo sapien
tgcagtgcgactcaggctcccgcgg

SEQ ID NO: 342627 - DNA, 25 bp, Homo sapien
ctttcaggtcacaggataggtctgc

SEQ ID NO: 342628 - DNA, 25 bp, Homo sapien
actgggagtttctttcaggtcacag

SEQ ID NO: 342629 - DNA, 25 bp, Homo sapien
cagaggggacaacgatgctgacccg

SEQ ID NO: 342630 - DNA, 25 bp, Homo sapien
ggtggcgctcggccagcacagctgt

SEQ ID NO: 342631 - DNA, 25 bp, Homo sapien
gggacaacgatgctgacccgctcct

SEQ ID NO: 342632 - DNA, 25 bp, Homo sapien
tgacccgctcctgaggtggcgctcg

SEQ ID NO: 342633 - DNA, 25 bp, Homo sapien
tggatgcccaattggtagagtgcac

SEQ ID NO: 342634 - DNA, 25 bp, Homo sapien
tgcccaattggtagagtgcactaca

SEQ ID NO: 342635 - DNA, 25 bp, Homo sapien
gatacctctactgatcagcgcaaga

SEQ ID NO: 342636 - DNA, 25 bp, Homo sapien
tacctctactgatcagcgcaagagt

SEQ ID NO: 342637 - DNA, 25 bp, Homo sapien
cagatcttgccttgggtcttgggcc

SEQ ID NO: 342638 - DNA, 25 bp, Homo sapien
tctttgggagctcttctcttttgcc

SEQ ID NO: 342639 - DNA, 25 bp, Homo sapien
ggtaacagttgtgtctttgggagct

SEQ ID NO: 342640 - DNA, 25 bp, Homo sapien
tggcgtcatcccagatcttgccttg

SEQ ID NO: 342641 - DNA, 25 bp, Homo sapien
tacacacctggttcatctggacacg

SEQ ID NO: 342642 - DNA, 25 bp, Homo sapien
ccagattggtccagtgcggctacat

SEQ ID NO: 342643 - DNA, 25 bp, Homo sapien
tctggacacgctcaggttatgtgac

SEQ ID NO: 342644 - DNA, 25 bp, Homo sapien
tgtctgcttctcaattgagtccctg

SEQ ID NO: 342645 - DNA, 25 bp, Homo sapien
tgttcaagatgatgcttttgcatct

SEQ ID NO: 342646 - DNA, 25 bp, Homo sapien
tccttcttggagcagctggatgttc

SEQ ID NO: 342647 - DNA, 25 bp, Homo sapien
agctggatgttcaagatgatgcttt

SEQ ID NO: 342648 - DNA, 25 bp, Homo sapien
tggatgttcaagatgatgcttttgc

SEQ ID NO: 342649 - DNA, 25 bp, Homo sapien
catgcctgatatgggagaactgctt

SEQ ID NO: 342650 - DNA, 25 bp, Homo sapien
tccttgagggccagttcctttaata

SEQ ID NO: 342651 - DNA, 25 bp, Homo sapien
tcttgagcacaggtagctgctggtg

SEQ ID NO: 342652 - DNA, 25 bp, Homo sapien
gcttgtacttcttgagcacaggtag

SEQ ID NO: 342653 - DNA, 25 bp, Homo sapien
ggatggaacctgaagcgttgacagc

SEQ ID NO: 342654 - DNA, 25 bp, Homo sapien
tccagctgtgtcagactcaggttct

SEQ ID NO: 342655 - DNA, 25 bp, Homo sapien
gttctggatggaacctgaagcgttg

SEQ ID NO: 342656 - DNA, 25 bp, Homo sapien
tcaggttctggatggaacctgaagc

SEQ ID NO: 342657 - DNA, 25 bp, Homo sapien
gagtgccgtggtgaggtcctcagca

SEQ ID NO: 342658 - DNA, 25 bp, Homo sapien
aggtgagtgccgtggtgaggtcctc

SEQ ID NO: 342659 - DNA, 25 bp, Homo sapien
gtggtgaggtcctcagcagtgcctg

SEQ ID NO: 342660 - DNA, 25 bp, Homo sapien
tgtgggccacctcctctcgggagct

SEQ ID NO: 342661 - DNA, 25 bp, Homo sapien
ggtctgtggggtaacagtcacactg

SEQ ID NO: 342662 - DNA, 25 bp, Homo sapien
agctgaggtctgtggggtaacagtc

SEQ ID NO: 342663 - DNA, 25 bp, Homo sapien
ggagctgaggtctgtggggtaacag

SEQ ID NO: 342664 - DNA, 25 bp, Homo sapien
tgaggtctgtggggtaacagtcaca

SEQ ID NO: 342665 - DNA, 25 bp, Homo sapien
gaagccagtctgggatttgaggtct

SEQ ID NO: 342666 - DNA, 25 bp, Homo sapien
ccagtctgggatttgaggtctagag

SEQ ID NO: 342667 - DNA, 25 bp, Homo sapien
gatttgaggtctagaggatgaggca

SEQ ID NO: 342668 - DNA, 25 bp, Homo sapien
gccagtctgggatttgaggtctaga

SEQ ID NO: 342669 - DNA, 25 bp, Homo sapien
aagaggtatctccatcaagctgcag

SEQ ID NO: 342670 - DNA, 25 bp, Homo sapien
aaggagatcgccattatccccagca

SEQ ID NO: 342671 - DNA, 25 bp, Homo sapien
tagaaaagtactacacacgcctggg

SEQ ID NO: 342672 - DNA, 25 bp, Homo sapien
aacaagcgcgtgtgcaaggagatcg

SEQ ID NO: 342673 - DNA, 25 bp, Homo sapien
tgccaccctgccttgatttgaggaa

SEQ ID NO: 342674 - DNA, 25 bp, Homo sapien
gattcttacccctcatatttgacag

SEQ ID NO: 342675 - DNA, 25 bp, Homo sapien
cttgatttgaggaatggccagggat

SEQ ID NO: 342676 - DNA, 25 bp, Homo sapien
tgaactgagggcagatggaaccaaa

SEQ ID NO: 342677 - DNA, 25 bp, Homo sapien
cactaaagccggagaagtcctagaa

SEQ ID NO: 342678 - DNA, 25 bp, Homo sapien
catggtgactgagaatgtgagcctc

SEQ ID NO: 342679 - DNA, 25 bp, Homo sapien
tgatgggttcattgagccgagaccg

SEQ ID NO: 342680 - DNA, 25 bp, Homo sapien
cagatgcagcagatggattgaccca

SEQ ID NO: 342681 - DNA, 25 bp, Homo sapien
gaggtaatcttcatatctctccttt

SEQ ID NO: 342682 - DNA, 25 bp, Homo sapien
aggtaatcttcatatctctcctttg

SEQ ID NO: 342683 - DNA, 25 bp, Homo sapien
agaggtaatcttcatatctctcctt

SEQ ID NO: 342684 - DNA, 25 bp, Homo sapien
ggtaatcttcatatctctcctttgc

SEQ ID NO: 342685 - DNA, 25 bp, Homo sapien
cacttggtgacgtagaaaacaacat

SEQ ID NO: 342686 - DNA, 25 bp, Homo sapien
aaaggaaaacgccatgaggatcgga

SEQ ID NO: 342687 - DNA, 25 bp, Homo sapien
tgtcaaacagtgatcaagtcactgg

SEQ ID NO: 342688 - DNA, 25 bp, Homo sapien
tgaggatcggatcatgctgggccct

SEQ ID NO: 342689 - DNA, 25 bp, Homo sapien
cgatggcaatcgaatatgatattcc

SEQ ID NO: 342690 - DNA, 25 bp, Homo sapien
cctggtggacgatggcaatcgaata

SEQ ID NO: 342691 - DNA, 25 bp, Homo sapien
ctagggtccatgatccactaagacc

SEQ ID NO: 342692 - DNA, 25 bp, Homo sapien
gatccactaagacctggtggacgat

SEQ ID NO: 342693 - DNA, 25 bp, Homo sapien
tttctcttccagacaaagaaatgca

SEQ ID NO: 342694 - DNA, 25 bp, Homo sapien
tctcttccagacaaagaaatgcatc

SEQ ID NO: 342695 - DNA, 25 bp, Homo sapien
tcttccagacaaagaaatgcatctt

SEQ ID NO: 342696 - DNA, 25 bp, Homo sapien
ttccagacaaagaaatgcatcttac

SEQ ID NO: 342697 - DNA, 25 bp, Homo sapien
cctgatgtcatgaagtcttcaagag

SEQ ID NO: 342698 - DNA, 25 bp, Homo sapien
tccgatgtcatgaagtcttcaagac

SEQ ID NO: 342699 - DNA, 25 bp, Homo sapien
tagtgacagtcagtgcattggtgct

SEQ ID NO: 342700 - DNA, 25 bp, Homo sapien
aggagaacatagtgacagtcagtgc

SEQ ID NO: 342701 - DNA, 25 bp, Homo sapien
gacagtcagtgcattggtgctgctg

SEQ ID NO: 342702 - DNA, 25 bp, Homo sapien
gaacatagtgacagtcagtgcattg

SEQ ID NO: 342703 - DNA, 25 bp, Homo sapien
gaagtacattcgtggctgcctagat

SEQ ID NO: 342704 - DNA, 25 bp, Homo sapien
gctgaatcacttacgttaaatgggt

SEQ ID NO: 342705 - DNA, 25 bp, Homo sapien
tgaaatagtcaccttaagaaccagt

SEQ ID NO: 342706 - DNA, 25 bp, Homo sapien
gagccttggctttctagctagagca

SEQ ID NO: 342707 - DNA, 25 bp, Homo sapien
gtggtcgtgcttggcctcagatatt

SEQ ID NO: 342708 - DNA, 25 bp, Homo sapien
tggtcgtgcttggcctcagatattt

SEQ ID NO: 342709 - DNA, 25 bp, Homo sapien
ggtcgtgcttggcctcagatatttc

SEQ ID NO: 342710 - DNA, 25 bp, Homo sapien
ggtggtcgtgcttggcctcagatat

SEQ ID NO: 342711 - DNA, 25 bp, Homo sapien
attctcctccacaccgccgtgtgca

SEQ ID NO: 342712 - DNA, 25 bp, Homo sapien
tattctcctccacaccgccgtgtgc

SEQ ID NO: 342713 - DNA, 25 bp, Homo sapien
atattctcctccacaccgccgtgtg

SEQ ID NO: 342714 - DNA, 25 bp, Homo sapien
ttctcctccacaccgccgtgtgcag

SEQ ID NO: 342715 - DNA, 25 bp, Homo sapien
ggtggtcgtgcttggcctcaggtat

SEQ ID NO: 342716 - DNA, 25 bp, Homo sapien
ggtcgtgcttggcctcaggtatttc

SEQ ID NO: 342717 - DNA, 25 bp, Homo sapien
tggtcgtgcttggcctcaggtattt

SEQ ID NO: 342718 - DNA, 25 bp, Homo sapien
gtggtcgtgcttggcctcaggtatt

SEQ ID NO: 342719 - DNA, 25 bp, Homo sapien
acaccgccgtgtgcagacgcctgca

SEQ ID NO: 342720 - DNA, 25 bp, Homo sapien
cacaccgccgtgtgcagacgcctgc

SEQ ID NO: 342721 - DNA, 25 bp, Homo sapien
ccacaccgccgtgtgcagacgcctg

SEQ ID NO: 342722 - DNA, 25 bp, Homo sapien
caccgccgtgtgcagacgcctgcac

SEQ ID NO: 342723 - DNA, 25 bp, Homo sapien
tatattttctagaggccaaatcccg

SEQ ID NO: 342724 - DNA, 25 bp, Homo sapien
ccagcgcttggagcgggcgtccaaa

SEQ ID NO: 342725 - DNA, 25 bp, Homo sapien
aatcccgtgccgtctccatattatt

SEQ ID NO: 342726 - DNA, 25 bp, Homo sapien
tattatttttaaccagcgcttggag

SEQ ID NO: 342727 - DNA, 25 bp, Homo sapien
caaatccaatttggcaggctttgca

SEQ ID NO: 342728 - DNA, 25 bp, Homo sapien
agctttcaaatccaatttggcaggc

SEQ ID NO: 342729 - DNA, 25 bp, Homo sapien
tcagcatcttcggcgtcttcgggag

SEQ ID NO: 342730 - DNA, 25 bp, Homo sapien
gtctcaggaatctcacactcatggc

SEQ ID NO: 342731 - DNA, 25 bp, Homo sapien
tacggccagctaccgactgaaggct

SEQ ID NO: 342732 - DNA, 25 bp, Homo sapien
aggacagaatgtagtcggagctcct

SEQ ID NO: 342733 - DNA, 25 bp, Homo sapien
cttctacggccagctaccgactgaa

SEQ ID NO: 342734 - DNA, 25 bp, Homo sapien
agaatgtagtcggagctcctcctcc

SEQ ID NO: 342735 - DNA, 25 bp, Homo sapien
gaacagtaaatatctggcaagcctg

SEQ ID NO: 342736 - DNA, 25 bp, Homo sapien
tatcagaaagtaaaggtagacgtca

SEQ ID NO: 342737 - DNA, 25 bp, Homo sapien
cccaagtttccatgacggctcaaga

SEQ ID NO: 342738 - DNA, 25 bp, Homo sapien
taatcctgagtaatcttgatcccca

SEQ ID NO: 342739 - DNA, 25 bp, Homo sapien
ggctcttggaggtgctaaaccagcc

SEQ ID NO: 342740 - DNA, 25 bp, Homo sapien
caaagagttgaccatcatagaagct

SEQ ID NO: 342741 - DNA, 25 bp, Homo sapien
ggtttcaccaaagagttgaccatca

SEQ ID NO: 342742 - DNA, 25 bp, Homo sapien
catagaagctcggaggctcttggag

SEQ ID NO: 342743 - DNA, 25 bp, Homo sapien
tccactcctcgaatggcctcagttt

SEQ ID NO: 342744 - DNA, 25 bp, Homo sapien
cacctctgttcttgttacacttgtc

SEQ ID NO: 342745 - DNA, 25 bp, Homo sapien
tgacttgccgcgtgtccagagagag

SEQ ID NO: 342746 - DNA, 25 bp, Homo sapien
ttctgttctgatcccatttgggtgt

SEQ ID NO: 342747 - DNA, 25 bp, Homo sapien
gtatcacggctgaagcgttggtcat

SEQ ID NO: 342748 - DNA, 25 bp, Homo sapien
tctgtatcacggctgaagcgttggt

SEQ ID NO: 342749 - DNA, 25 bp, Homo sapien
ctcctccgtctgtatcacggctgaa

SEQ ID NO: 342750 - DNA, 25 bp, Homo sapien
tccgtctgtatcacggctgaagcgt

SEQ ID NO: 342751 - DNA, 25 bp, Homo sapien
tctttcacgtgggtgtgccgtgctg

SEQ ID NO: 342752 - DNA, 25 bp, Homo sapien
tcatgtttggcacacgagtctttca

SEQ ID NO: 342753 - DNA, 25 bp, Homo sapien
cgtgctggcacgatggctttttgca

SEQ ID NO: 342754 - DNA, 25 bp, Homo sapien
cacgagtctttcacgtgggtgtgcc

SEQ ID NO: 342755 - DNA, 25 bp, Homo sapien
ctccgccaagcgctgcctgtagcac

SEQ ID NO: 342756 - DNA, 25 bp, Homo sapien
acagccatctgggaaccgcgaccgc

SEQ ID NO: 342757 - DNA, 25 bp, Homo sapien
gccgacagctgacctccaggcaccg

SEQ ID NO: 342758 - DNA, 25 bp, Homo sapien
gaccgcgcactgacacacgcagtgg

SEQ ID NO: 342759 - DNA, 25 bp, Homo sapien
ctgcacggtggtttggaggggaagg

SEQ ID NO: 342760 - DNA, 25 bp, Homo sapien
taatacttaggactctataatctaa

SEQ ID NO: 342761 - DNA, 25 bp, Homo sapien
taagtacaatcaagaaatgtcccat

SEQ ID NO: 342762 - DNA, 25 bp, Homo sapien
aattagattaagtacaatcaagaaa

SEQ ID NO: 342763 - DNA, 25 bp, Homo sapien
taatgcttttacgaagtagagcgtt

SEQ ID NO: 342764 - DNA, 25 bp, Homo sapien
aaaaaggaaacgttctgcatgccca

SEQ ID NO: 342765 - DNA, 25 bp, Homo sapien
ggacacgtcaaatctctcggcaagg

SEQ ID NO: 342766 - DNA, 25 bp, Homo sapien
aaaaatccccactcgctgtaacttg

SEQ ID NO: 342767 - DNA, 25 bp, Homo sapien
ctgaatgtatagacatgggaaccac

SEQ ID NO: 342768 - DNA, 25 bp, Homo sapien
atccacactccagggacattggttt

SEQ ID NO: 342769 - DNA, 25 bp, Homo sapien
agcagacgggacagctgcttgcttc

SEQ ID NO: 342770 - DNA, 25 bp, Homo sapien
ctgagcagacgggacagctgcttgc

SEQ ID NO: 342771 - DNA, 25 bp, Homo sapien
agatagtctgagcagacgggacagc

SEQ ID NO: 342772 - DNA, 25 bp, Homo sapien
ttgtgacaagtgacaaccttttcat

SEQ ID NO: 342773 - DNA, 25 bp, Homo sapien
gaggtgaaagcctgttagttgtgac

SEQ ID NO: 342774 - DNA, 25 bp, Homo sapien
gagtacaaacactcaagcacatccc

SEQ ID NO: 342775 - DNA, 25 bp, Homo sapien
cagagatttgaagttctattgggaa

SEQ ID NO: 342776 - DNA, 25 bp, Homo sapien
ccagctgcttccactgggcgctcag

SEQ ID NO: 342777 - DNA, 25 bp, Homo sapien
cttctgctggaagctcctctgtcct

SEQ ID NO: 342778 - DNA, 25 bp, Homo sapien
agctgcttccactgggcgctcaggt

SEQ ID NO: 342779 - DNA, 25 bp, Homo sapien
ctcttctgctggaagctcctctgtc

SEQ ID NO: 342780 - DNA, 25 bp, Homo sapien
tgggtcacgcccttccacaccctct

SEQ ID NO: 342781 - DNA, 25 bp, Homo sapien
tattggtgagattcccacctcccac

SEQ ID NO: 342782 - DNA, 25 bp, Homo sapien
acgagggccttttattggtgagatt

SEQ ID NO: 342783 - DNA, 25 bp, Homo sapien
ttccacaccctctaacctgatgagg

SEQ ID NO: 342784 - DNA, 25 bp, Homo sapien
ataggtttgtcaatgcccagattaa

SEQ ID NO: 342785 - DNA, 25 bp, Homo sapien
tgtcaatgcccagattaatcacagg

SEQ ID NO: 342786 - DNA, 25 bp, Homo sapien
ttatttgccctgctcaggagaaact

SEQ ID NO: 342787 - DNA, 25 bp, Homo sapien
tcaggaagatttggtcattgataat

SEQ ID NO: 342788 - DNA, 25 bp, Homo sapien
tttcctgaatcacggctgcaagtgg

SEQ ID NO: 342789 - DNA, 25 bp, Homo sapien
gtttggctttcctgaatcacggctg

SEQ ID NO: 342790 - DNA, 25 bp, Homo sapien
ggtttggctttcctgaatcacggct

SEQ ID NO: 342791 - DNA, 25 bp, Homo sapien
tggctttcctgaatcacggctgcaa

SEQ ID NO: 342792 - DNA, 25 bp, Homo sapien
gcgtcaggatgatgcgtggcaggca

SEQ ID NO: 342793 - DNA, 25 bp, Homo sapien
cggttgagggtctgttgtctgtaca

SEQ ID NO: 342794 - DNA, 25 bp, Homo sapien
tgtctgtacaaaagcccagggccta

SEQ ID NO: 342795 - DNA, 25 bp, Homo sapien
agccagagccggactgcgtcaggat

SEQ ID NO: 342796 - DNA, 25 bp, Homo sapien
caccccctcggtcactctgttcccg

SEQ ID NO: 342797 - DNA, 25 bp, Homo sapien
cagcccaaggccaccccctcggtca

SEQ ID NO: 342798 - DNA, 25 bp, Homo sapien
cctcggtcactctgttcccgtcctc

SEQ ID NO: 342799 - DNA, 25 bp, Homo sapien
aaggccaccccctcggtcactctgt

SEQ ID NO: 342800 - DNA, 25 bp, Homo sapien
ccacactgctgtgtctcatgagtgg

SEQ ID NO: 342801 - DNA, 25 bp, Homo sapien
ggagctccaagccaaaaggccacac

SEQ ID NO: 342802 - DNA, 25 bp, Homo sapien
tcatgagtggcttctacccgggagc

SEQ ID NO: 342803 - DNA, 25 bp, Homo sapien
tgagtggcttctacccgggagctgt

SEQ ID NO: 342804 - DNA, 25 bp, Homo sapien
ctcaggctccttatcaccatcatgt

SEQ ID NO: 342805 - DNA, 25 bp, Homo sapien
tcatggtgccacaggctctagcctc

SEQ ID NO: 342806 - DNA, 25 bp, Homo sapien
ggcatccgggcagacaaagccagaa

SEQ ID NO: 342807 - DNA, 25 bp, Homo sapien
cctccagcccgtggcatgtagctcc

SEQ ID NO: 342808 - DNA, 25 bp, Homo sapien
ttctcagggcactgggcatccgggc

SEQ ID NO: 342809 - DNA, 25 bp, Homo sapien
aggagcagcagaaactcaaccccag

SEQ ID NO: 342810 - DNA, 25 bp, Homo sapien
tggctgcactcctcgggaagcagga

SEQ ID NO: 342811 - DNA, 25 bp, Homo sapien
cctggctgcactcctcgggaagcag

SEQ ID NO: 342812 - DNA, 25 bp, Homo sapien
gcaggagcagcagaaactcaacccc

SEQ ID NO: 342813 - DNA, 25 bp, Homo sapien
ccaagtgccggttcccgttcctgat

SEQ ID NO: 342814 - DNA, 25 bp, Homo sapien
tgtagcctcctcgtgtccactactg

SEQ ID NO: 342815 - DNA, 25 bp, Homo sapien
cgtgtccactactgcgtgccccggg

SEQ ID NO: 342816 - DNA, 25 bp, Homo sapien
gtgccggttcccgttcctgatgcct

SEQ ID NO: 342817 - DNA, 25 bp, Homo sapien
ctgccgcgctcaggaaatgctgtgc

SEQ ID NO: 342818 - DNA, 25 bp, Homo sapien
agtacatgcagcacccaatggcgct

SEQ ID NO: 342819 - DNA, 25 bp, Homo sapien
tgacgcctggagtaggtcacccaac

SEQ ID NO: 342820 - DNA, 25 bp, Homo sapien
tactcgccgcggcagtgtagcgata

SEQ ID NO: 342821 - DNA, 25 bp, Homo sapien
cagtagcggacatcatggagtgaca

SEQ ID NO: 342822 - DNA, 25 bp, Homo sapien
ggtgtcaggaagaggtaccggcact

SEQ ID NO: 342823 - DNA, 25 bp, Homo sapien
tgtcaggaagaggtaccggcacttg

SEQ ID NO: 342824 - DNA, 25 bp, Homo sapien
caggaagaggtaccggcacttgggt

SEQ ID NO: 342825 - DNA, 25 bp, Homo sapien
caagtggcaagtggtgctgcttccc

SEQ ID NO: 342826 - DNA, 25 bp, Homo sapien
agtggcaagtggtgctgcttcccaa

SEQ ID NO: 342827 - DNA, 25 bp, Homo sapien
agggacattgccgtggctgttctgt

SEQ ID NO: 342828 - DNA, 25 bp, Homo sapien
cccaagggacattgccgtggctgtt

SEQ ID NO: 342829 - DNA, 25 bp, Homo sapien
gaggccacgtgctgtctaaatatgt

SEQ ID NO: 342830 - DNA, 25 bp, Homo sapien
taaatatgtccgcaggcactcagtg

SEQ ID NO: 342831 - DNA, 25 bp, Homo sapien
gaattttacatagaatcttcccatg

SEQ ID NO: 342832 - DNA, 25 bp, Homo sapien
cctgggagggccctatgggctcttt

SEQ ID NO: 342833 - DNA, 25 bp, Homo sapien
accagagcagcgatgtagcccagca

SEQ ID NO: 342834 - DNA, 25 bp, Homo sapien
ttcaccagagcagcgatgtagccca

SEQ ID NO: 342835 - DNA, 25 bp, Homo sapien
agcagcgatgtagcccagcaagggc

SEQ ID NO: 342836 - DNA, 25 bp, Homo sapien
gcagggacagagacgcaaggtctgg

SEQ ID NO: 342837 - DNA, 25 bp, Homo sapien
ccctgtggagctcagtctcagccat

SEQ ID NO: 342838 - DNA, 25 bp, Homo sapien
gaaagaaagtccctgtggagctcag

SEQ ID NO: 342839 - DNA, 25 bp, Homo sapien
gcagaaagaaagtccctgtggagct

SEQ ID NO: 342840 - DNA, 25 bp, Homo sapien
agtccctgtggagctcagtctcagc

SEQ ID NO: 342841 - DNA, 25 bp, Homo sapien
ccagggatcaaggatggagcttcca

SEQ ID NO: 342842 - DNA, 25 bp, Homo sapien
gggatcaaggatggagcttccattt

SEQ ID NO: 342843 - DNA, 25 bp, Homo sapien
gggaccagccgggcctcactggcca

SEQ ID NO: 342844 - DNA, 25 bp, Homo sapien
cagggatcaaggatggagcttccat

SEQ ID NO: 342845 - DNA, 25 bp, Homo sapien
aagttagtgacagtagatgagagga

SEQ ID NO: 342846 - DNA, 25 bp, Homo sapien
taacttgtcaacacttctttgggaa

SEQ ID NO: 342847 - DNA, 25 bp, Homo sapien
tctacagacccaagggcattgtttg

SEQ ID NO: 342848 - DNA, 25 bp, Homo sapien
gccctcttccatgtttcttacgtaa

SEQ ID NO: 342849 - DNA, 25 bp, Homo sapien
tgggaactacaatccatgatgagag

SEQ ID NO: 342850 - DNA, 25 bp, Homo sapien
tcgcttcacaggagaagtcactgtg

SEQ ID NO: 342851 - DNA, 25 bp, Homo sapien
taatggacccgcagttcagcatggc

SEQ ID NO: 342852 - DNA, 25 bp, Homo sapien
tccacattgttgcaagtggcaggat

SEQ ID NO: 342853 - DNA, 25 bp, Homo sapien
cactaaaattatcctttggttcatt

SEQ ID NO: 342854 - DNA, 25 bp, Homo sapien
tcactaaaattatcctttggttcat

SEQ ID NO: 342855 - DNA, 25 bp, Homo sapien
atcactaaaattatcctttggttca

SEQ ID NO: 342856 - DNA, 25 bp, Homo sapien
tattcattattctaatggctcagat

SEQ ID NO: 342857 - DNA, 25 bp, Homo sapien
ttcattattctaatggctcagatag

SEQ ID NO: 342858 - DNA, 25 bp, Homo sapien
cattattctaatggctcagatagag

SEQ ID NO: 342859 - DNA, 25 bp, Homo sapien
gaattattcattattctaatggctc

SEQ ID NO: 342860 - DNA, 25 bp, Homo sapien
tccacgagggcctctcagacgtgtc

SEQ ID NO: 342861 - DNA, 25 bp, Homo sapien
tagccgtgaataaagaccaccacag

SEQ ID NO: 342862 - DNA, 25 bp, Homo sapien
gatgttcactattgtcctccacgag

SEQ ID NO: 342863 - DNA, 25 bp, Homo sapien
tgcaaaccgcagaacaagtcataag

SEQ ID NO: 342864 - DNA, 25 bp, Homo sapien
cgctcctctgtactgttccgaagaa

SEQ ID NO: 342865 - DNA, 25 bp, Homo sapien
gcatctatatcgattcgctcctctg

SEQ ID NO: 342866 - DNA, 25 bp, Homo sapien
tgttccgaagaacccagcacaggcg

SEQ ID NO: 342867 - DNA, 25 bp, Homo sapien
ttctgcatctatatcgattcgctcc

SEQ ID NO: 342868 - DNA, 25 bp, Homo sapien
tgaggcccattgcaagtccaaccat

SEQ ID NO: 342869 - DNA, 25 bp, Homo sapien
tctgttatcatacgaatgaggccca

SEQ ID NO: 342870 - DNA, 25 bp, Homo sapien
gaaaagtacagatagtgcactccac

SEQ ID NO: 342871 - DNA, 25 bp, Homo sapien
ttactgggagccaagcaactccctg

SEQ ID NO: 342872 - DNA, 25 bp, Homo sapien
gaggcccaaggtagctagaaattga

SEQ ID NO: 342873 - DNA, 25 bp, Homo sapien
gaaacttgtaccagtgggacccaca

SEQ ID NO: 342874 - DNA, 25 bp, Homo sapien
cacaatgctcacaacagttaataga

SEQ ID NO: 342875 - DNA, 25 bp, Homo sapien
agacagctgcaattggaggcccaag

SEQ ID NO: 342876 - DNA, 25 bp, Homo sapien
gagctctttctccgacgcttgcttc

SEQ ID NO: 342877 - DNA, 25 bp, Homo sapien
tccgacgcttgcttccgcatcttgg

SEQ ID NO: 342878 - DNA, 25 bp, Homo sapien
cgtccagctatcaggagctctttct

SEQ ID NO: 342879 - DNA, 25 bp, Homo sapien
gtccagctatcaggagctctttctc

SEQ ID NO: 342880 - DNA, 25 bp, Homo sapien
tatgcgtagttggtgcagccaacat

SEQ ID NO: 342881 - DNA, 25 bp, Homo sapien
cagtgtttcacgcattcagaaggta

SEQ ID NO: 342882 - DNA, 25 bp, Homo sapien
catcaacgccacagtgtttcacgca

SEQ ID NO: 342883 - DNA, 25 bp, Homo sapien
gaaggtaccacacatgctaccatat

SEQ ID NO: 342884 - DNA, 25 bp, Homo sapien
gatcatccccggcatcaccatgagg

SEQ ID NO: 342885 - DNA, 25 bp, Homo sapien
ttcacgtgagacatgtccttgccac

SEQ ID NO: 342886 - DNA, 25 bp, Homo sapien
cacataatgcaagcggccttcacgt

SEQ ID NO: 342887 - DNA, 25 bp, Homo sapien
cagcagcttcaggtaagcacacata

SEQ ID NO: 342888 - DNA, 25 bp, Homo sapien
tccgcccgaggtgtgtagcaactgg

SEQ ID NO: 342889 - DNA, 25 bp, Homo sapien
taattcctggccatggaatgtcccc

SEQ ID NO: 342890 - DNA, 25 bp, Homo sapien
ggtggcattcacgtacttctcggta

SEQ ID NO: 342891 - DNA, 25 bp, Homo sapien
ccccagtcacagcatctcggaagat

SEQ ID NO: 342892 - DNA, 25 bp, Homo sapien
tcgctgcaacctccgatttccgggt

SEQ ID NO: 342893 - DNA, 25 bp, Homo sapien
cctccgatttccgggttcacaccat

SEQ ID NO: 342894 - DNA, 25 bp, Homo sapien
gcaacctccgatttccgggttcaca

SEQ ID NO: 342895 - DNA, 25 bp, Homo sapien
ctcgctgcaacctccgatttccggg

SEQ ID NO: 342896 - DNA, 25 bp, Homo sapien
catgagaataaaagagccaatcagc

SEQ ID NO: 342897 - DNA, 25 bp, Homo sapien
gaataaaagagccaatcagcatgat

SEQ ID NO: 342898 - DNA, 25 bp, Homo sapien
gagaataaaagagccaatcagcatg

SEQ ID NO: 342899 - DNA, 25 bp, Homo sapien
taaaagagccaatcagcatgatgat

SEQ ID NO: 342900 - DNA, 25 bp, Homo sapien
cttcaccactgggttctcctccacc

SEQ ID NO: 342901 - DNA, 25 bp, Homo sapien
cactgggttctcctccacccacaac

SEQ ID NO: 342902 - DNA, 25 bp, Homo sapien
ttcaccactgggttctcctccaccc

SEQ ID NO: 342903 - DNA, 25 bp, Homo sapien
caccactgggttctcctccacccac

SEQ ID NO: 342904 - DNA, 25 bp, Homo sapien
tggaaatgacccagtagaagacatc

SEQ ID NO: 342905 - DNA, 25 bp, Homo sapien
gacccagtagaagacatcaaaagct

SEQ ID NO: 342906 - DNA, 25 bp, Homo sapien
atgacccagtagaagacatcaaaag

SEQ ID NO: 342907 - DNA, 25 bp, Homo sapien
gaaatgacccagtagaagacatcaa

SEQ ID NO: 342908 - DNA, 25 bp, Homo sapien
gcttgatgaatatggctccagcaaa

SEQ ID NO: 342909 - DNA, 25 bp, Homo sapien
cagtggtggtgtaaacagcagtcat

SEQ ID NO: 342910 - DNA, 25 bp, Homo sapien
tgccaggtaaaggtccaatcccaag

SEQ ID NO: 342911 - DNA, 25 bp, Homo sapien
cagtcatagccaagaggatgaagat

SEQ ID NO: 342912 - DNA, 25 bp, Homo sapien
tgaagctaaaatgccaggaggctct

SEQ ID NO: 342913 - DNA, 25 bp, Homo sapien
ctcttgaagctaaaatgccaggagg

SEQ ID NO: 342914 - DNA, 25 bp, Homo sapien
ttgaagctaaaatgccaggaggctc

SEQ ID NO: 342915 - DNA, 25 bp, Homo sapien
tcttgaagctaaaatgccaggaggc

SEQ ID NO: 342916 - DNA, 25 bp, Homo sapien
tggagaggtagacctggagtcgctc

SEQ ID NO: 342917 - DNA, 25 bp, Homo sapien
aggtagacctggagtcgctccccac

SEQ ID NO: 342918 - DNA, 25 bp, Homo sapien
cgcttcttgagatattccggcatgg

SEQ ID NO: 342919 - DNA, 25 bp, Homo sapien
gctccccaccaaaccgcttcttgag

SEQ ID NO: 342920 - DNA, 25 bp, Homo sapien
tagatagggacaaagatccacccaa

SEQ ID NO: 342921 - DNA, 25 bp, Homo sapien
gatagggacaaagatccacccaaga

SEQ ID NO: 342922 - DNA, 25 bp, Homo sapien
tgtagatagggacaaagatccaccc

SEQ ID NO: 342923 - DNA, 25 bp, Homo sapien
ccccgacttgatgtagatagggaca

SEQ ID NO: 342924 - DNA, 25 bp, Homo sapien
tgctgccgatgttactggcaaagag

SEQ ID NO: 342925 - DNA, 25 bp, Homo sapien
ttacggtggcgactcctgaagctgc

SEQ ID NO: 342926 - DNA, 25 bp, Homo sapien
acatagtggttgctgccgatgttac

SEQ ID NO: 342927 - DNA, 25 bp, Homo sapien
tcaaatgttacggtggcgactcctg

SEQ ID NO: 342928 - DNA, 25 bp, Homo sapien
accaggccatatcacgaccagcgag

SEQ ID NO: 342929 - DNA, 25 bp, Homo sapien
tacctcggttggtcttcagcatcgc

SEQ ID NO: 342930 - DNA, 25 bp, Homo sapien
gaagcctcctatagtacctcggttg

SEQ ID NO: 342931 - DNA, 25 bp, Homo sapien
acgaccagcgaggaagaagcctcct

SEQ ID NO: 342932 - DNA, 25 bp, Homo sapien
atgacaatgactgagatgtcagcag

SEQ ID NO: 342933 - DNA, 25 bp, Homo sapien
agcagcatttcggatgtggtcagac

SEQ ID NO: 342934 - DNA, 25 bp, Homo sapien
agatgtcagcagcatttcggatgtg

SEQ ID NO: 342935 - DNA, 25 bp, Homo sapien
tgctggggctaaccgtactggccat

SEQ ID NO: 342936 - DNA, 25 bp, Homo sapien
ctttatataagttctgggttaatga

SEQ ID NO: 342937 - DNA, 25 bp, Homo sapien
cattccacgcatgagccatctttat

SEQ ID NO: 342938 - DNA, 25 bp, Homo sapien
cacgcatgagccatctttatataag

SEQ ID NO: 342939 - DNA, 25 bp, Homo sapien
ggcagtgctatacccattccacgca

SEQ ID NO: 342940 - DNA, 25 bp, Homo sapien
ctccaaacagaagtatgtacccact

SEQ ID NO: 342941 - DNA, 25 bp, Homo sapien
cattcaggttctttctatacttggc

SEQ ID NO: 342942 - DNA, 25 bp, Homo sapien
tattccaatactcatatataccaca

SEQ ID NO: 342943 - DNA, 25 bp, Homo sapien
tacagtgttatgcagccattaccac

SEQ ID NO: 342944 - DNA, 25 bp, Homo sapien
gaggaagtatggttgattccaaaat

SEQ ID NO: 342945 - DNA, 25 bp, Homo sapien
tcaacgtcactaatcgtcgggaaaa

SEQ ID NO: 342946 - DNA, 25 bp, Homo sapien
ttctatttcttacccacttattctg

SEQ ID NO: 342947 - DNA, 25 bp, Homo sapien
gaatagaggaagtatggttgattcc

SEQ ID NO: 342948 - DNA, 25 bp, Homo sapien
tcggaaaacggatggagacaaatcc

SEQ ID NO: 342949 - DNA, 25 bp, Homo sapien
gacaaatccaggtatgggaccagga

SEQ ID NO: 342950 - DNA, 25 bp, Homo sapien
gcaatgaggtctacgagaggagtta

SEQ ID NO: 342951 - DNA, 25 bp, Homo sapien
aaagaaacaagccactctccatatc

SEQ ID NO: 342952 - DNA, 25 bp, Homo sapien
ctaggggcaggtgggtaaatgcagc

SEQ ID NO: 342953 - DNA, 25 bp, Homo sapien
cttctaggggcaggtgggtaaatgc

SEQ ID NO: 342954 - DNA, 25 bp, Homo sapien
ggcaggtgggtaaatgcagcctcag

SEQ ID NO: 342955 - DNA, 25 bp, Homo sapien
ggtgggtaaatgcagcctcaggggc

SEQ ID NO: 342956 - DNA, 25 bp, Homo sapien
ccagctccccgactggcggctggtg

SEQ ID NO: 342957 - DNA, 25 bp, Homo sapien
cagctccccgactggcggctggtgt

SEQ ID NO: 342958 - DNA, 25 bp, Homo sapien
agctccccgactggcggctggtgtt

SEQ ID NO: 342959 - DNA, 25 bp, Homo sapien
aactctttcgctctgttccacaatg

SEQ ID NO: 342960 - DNA, 25 bp, Homo sapien
ctcactggctcctggcgacagactg

SEQ ID NO: 342961 - DNA, 25 bp, Homo sapien
accccgtgggcatcaatggccctgt

SEQ ID NO: 342962 - DNA, 25 bp, Homo sapien
gggtgctgcggctgcaccccgtggg

SEQ ID NO: 342963 - DNA, 25 bp, Homo sapien
ccaaaatagaacatgtgctgcgatt

SEQ ID NO: 342964 - DNA, 25 bp, Homo sapien
caggaagcctatgagccacctggga

SEQ ID NO: 342965 - DNA, 25 bp, Homo sapien
tagtacccctcatagtttgttgtag

SEQ ID NO: 342966 - DNA, 25 bp, Homo sapien
ggaaatgccaaatactgttacagat

SEQ ID NO: 342967 - DNA, 25 bp, Homo sapien
tatttgccagccactcggttatttt

SEQ ID NO: 342968 - DNA, 25 bp, Homo sapien
cattcatgtcacgtcttgctgcctc

SEQ ID NO: 342969 - DNA, 25 bp, Homo sapien
ccgcactgggggtttggcttgaata

SEQ ID NO: 342970 - DNA, 25 bp, Homo sapien
gcttgaatatttgccagccactcgg

SEQ ID NO: 342971 - DNA, 25 bp, Homo sapien
tgattcatgggaaggtgggacgtcc

SEQ ID NO: 342972 - DNA, 25 bp, Homo sapien
gggtgattcatgggaaggtgggacg

SEQ ID NO: 342973 - DNA, 25 bp, Homo sapien
attcatgggaaggtgggacgtccag

SEQ ID NO: 342974 - DNA, 25 bp, Homo sapien
ctggggtgattcatgggaaggtggg

SEQ ID NO: 342975 - DNA, 25 bp, Homo sapien
ccactgtgcagagcctaagaatatt

SEQ ID NO: 342976 - DNA, 25 bp, Homo sapien
tattgcagttgtcctaaccctactc

SEQ ID NO: 342977 - DNA, 25 bp, Homo sapien
tggagagcactaggcagttcacttg

SEQ ID NO: 342978 - DNA, 25 bp, Homo sapien
caggtatagacctgatggagagcac

SEQ ID NO: 342979 - DNA, 25 bp, Homo sapien
gtggctatctagtgtctcttaaaag

SEQ ID NO: 342980 - DNA, 25 bp, Homo sapien
gacttcatagtcaatgctgggtagc

SEQ ID NO: 342981 - DNA, 25 bp, Homo sapien
tcccttggactcctagcttgcctag

SEQ ID NO: 342982 - DNA, 25 bp, Homo sapien
tgggaccatgggcttgcttcttaca

SEQ ID NO: 342983 - DNA, 25 bp, Homo sapien
tgcgccggggtcaactgttctattt

SEQ ID NO: 342984 - DNA, 25 bp, Homo sapien
agtcaaacttgtgtatcaacttggg

SEQ ID NO: 342985 - DNA, 25 bp, Homo sapien
cattagttttcagtcaaacttgtgt

SEQ ID NO: 342986 - DNA, 25 bp, Homo sapien
ttaatttgtgagaagtatggctgac

SEQ ID NO: 342987 - DNA, 25 bp, Homo sapien
ctttcccttatcaaactgcttttgc

SEQ ID NO: 342988 - DNA, 25 bp, Homo sapien
tgtaagacttaggtacttacctcaa

SEQ ID NO: 342989 - DNA, 25 bp, Homo sapien
tgttggaaagcctatctttccctta

SEQ ID NO: 342990 - DNA, 25 bp, Homo sapien
cctttaacagggtctctcacagagc

SEQ ID NO: 342991 - DNA, 25 bp, Homo sapien
gctttagtgaaacaataggtcagag

SEQ ID NO: 342992 - DNA, 25 bp, Homo sapien
ttttgagtctctgatcagccagcct

SEQ ID NO: 342993 - DNA, 25 bp, Homo sapien
catgacacagcttcagaagatcctc

SEQ ID NO: 342994 - DNA, 25 bp, Homo sapien
ctcacgacacgtgtccaaggtggct

SEQ ID NO: 342995 - DNA, 25 bp, Homo sapien
ttttgattctgtgctcagggatggc

SEQ ID NO: 342996 - DNA, 25 bp, Homo sapien
tttgattctgtgctcagggatggcg

SEQ ID NO: 342997 - DNA, 25 bp, Homo sapien
gacagcggcctgtgggggagtcagt

SEQ ID NO: 342998 - DNA, 25 bp, Homo sapien
cccacagccctagtctgtttgacat

SEQ ID NO: 342999 - DNA, 25 bp, Homo sapien
agccacacccacagccctagtctgt

SEQ ID NO: 343000 - DNA, 25 bp, Homo sapien
gggagtcagtgtcaggctcagccac

SEQ ID NO: 343001 - DNA, 25 bp, Homo sapien
cagaggacacacatgtttattaagc

SEQ ID NO: 343002 - DNA, 25 bp, Homo sapien
tcagaggacacacatgtttattaag

SEQ ID NO: 343003 - DNA, 25 bp, Homo sapien
ggctgtccctggcatctctgtagaa

SEQ ID NO: 343004 - DNA, 25 bp, Homo sapien
ctgtccctggcatctctgtagaagt

SEQ ID NO: 343005 - DNA, 25 bp, Homo sapien
gtccctggcatctctgtagaagttg

SEQ ID NO: 343006 - DNA, 25 bp, Homo sapien
cggctgtccctggcatctctgtaga

SEQ ID NO: 343007 - DNA, 25 bp, Homo sapien
ccaggctggagatacgctgatgact

SEQ ID NO: 343008 - DNA, 25 bp, Homo sapien
tctgacctcaggaaatacaactcca

SEQ ID NO: 343009 - DNA, 25 bp, Homo sapien
tctgatggccaacgtgtctactcga

SEQ ID NO: 343010 - DNA, 25 bp, Homo sapien
ggtccacactagcaggattcttgca

SEQ ID NO: 343011 - DNA, 25 bp, Homo sapien
gcttccacattgcacagccttctgg

SEQ ID NO: 343012 - DNA, 25 bp, Homo sapien
gcaagcacgccttggtcacatgcgg

SEQ ID NO: 343013 - DNA, 25 bp, Homo sapien
gaaggaatctttggcaaatgtcaac

SEQ ID NO: 343014 - DNA, 25 bp, Homo sapien
agtagccccgggaacgcttccacat

SEQ ID NO: 343015 - DNA, 25 bp, Homo sapien
taggcactctgcaggtcgccttgcc

SEQ ID NO: 343016 - DNA, 25 bp, Homo sapien
acggagagcactcgcctgccctgat

SEQ ID NO: 343017 - DNA, 25 bp, Homo sapien
gtcacgtgtcctcctaggcactctg

SEQ ID NO: 343018 - DNA, 25 bp, Homo sapien
ccctgatgcgggagtcacgtgtcct

SEQ ID NO: 343019 - DNA, 25 bp, Homo sapien
cagagcacctggcaatttgaataac

SEQ ID NO: 343020 - DNA, 25 bp, Homo sapien
tgaataacaatgaaagcttccagaa

SEQ ID NO: 343021 - DNA, 25 bp, Homo sapien
cagaccctctgtgacaataaccctt

SEQ ID NO: 343022 - DNA, 25 bp, Homo sapien
taagtgggaaggtaacagagcacct

SEQ ID NO: 343023 - DNA, 25 bp, Homo sapien
gattaactggctaggcctgctgcca

SEQ ID NO: 343024 - DNA, 25 bp, Homo sapien
tttctaagggattctcacagggacc

SEQ ID NO: 343025 - DNA, 25 bp, Homo sapien
tggtatgtccacacaatgcaatggg

SEQ ID NO: 343026 - DNA, 25 bp, Homo sapien
caaggaacgctacctcaatacggag

SEQ ID NO: 343027 - DNA, 25 bp, Homo sapien
caaaatatcttgctgggccatctag

SEQ ID NO: 343028 - DNA, 25 bp, Homo sapien
tgggatgtcccttccaaggttaggc

SEQ ID NO: 343029 - DNA, 25 bp, Homo sapien
tctgattctacattgaggcctgtgg

SEQ ID NO: 343030 - DNA, 25 bp, Homo sapien
tattgagtcgggagaaaacattcac

SEQ ID NO: 343031 - DNA, 25 bp, Homo sapien
gacgtgggcatgggaagcaagggac

SEQ ID NO: 343032 - DNA, 25 bp, Homo sapien
gggaagcaagggacatcgcaggagc

SEQ ID NO: 343033 - DNA, 25 bp, Homo sapien
agcaagggacatcgcaggagcgaca

SEQ ID NO: 343034 - DNA, 25 bp, Homo sapien
tcgcaggagcgacaggcggagggca

SEQ ID NO: 343035 - DNA, 25 bp, Homo sapien
ttgtctttctcagcggccttctaat

SEQ ID NO: 343036 - DNA, 25 bp, Homo sapien
tgtttgtctttctcagcggccttct

SEQ ID NO: 343037 - DNA, 25 bp, Homo sapien
gttgttgaatacttctgtaatccta

SEQ ID NO: 343038 - DNA, 25 bp, Homo sapien
tctcagcggccttctaatactctct

SEQ ID NO: 343039 - DNA, 25 bp, Homo sapien
actccagcgctgagtctttagtctc

SEQ ID NO: 343040 - DNA, 25 bp, Homo sapien
tgagtctttagtctccatggccgcc

SEQ ID NO: 343041 - DNA, 25 bp, Homo sapien
aggcgagcggtggtgccacaagctc

SEQ ID NO: 343042 - DNA, 25 bp, Homo sapien
agcgctgagtctttagtctccatgg

SEQ ID NO: 343043 - DNA, 25 bp, Homo sapien
cagcttcatccaggaagtagtcagc

SEQ ID NO: 343044 - DNA, 25 bp, Homo sapien
agcttcatccaggaagtagtcagca

SEQ ID NO: 343045 - DNA, 25 bp, Homo sapien
tctccacagtgctctcttgtgtgtg

SEQ ID NO: 343046 - DNA, 25 bp, Homo sapien
tcttctccacagtgctctcttgtgt

SEQ ID NO: 343047 - DNA, 25 bp, Homo sapien
tccacagtgctctcttgtgtgtgac

SEQ ID NO: 343048 - DNA, 25 bp, Homo sapien
acagtgctctcttgtgtgtgacctt

SEQ ID NO: 343049 - DNA, 25 bp, Homo sapien
aggacctccactggtcgggtgtcag

SEQ ID NO: 343050 - DNA, 25 bp, Homo sapien
caggacctccactggtcgggtgtca

SEQ ID NO: 343051 - DNA, 25 bp, Homo sapien
aggacgggaacagagtgaccaaggg

SEQ ID NO: 343052 - DNA, 25 bp, Homo sapien
cctcagaggaggacgggaacagagt

SEQ ID NO: 343053 - DNA, 25 bp, Homo sapien
agacacagcagtgtggccttttggc

SEQ ID NO: 343054 - DNA, 25 bp, Homo sapien
cagagtgaccaagggggtggccttg

SEQ ID NO: 343055 - DNA, 25 bp, Homo sapien
catggtgtctgccttcagagaccct

SEQ ID NO: 343056 - DNA, 25 bp, Homo sapien
acgacctcaggagcgtccgaagtgg

SEQ ID NO: 343057 - DNA, 25 bp, Homo sapien
atcacacagaatcggcaagaccttg

SEQ ID NO: 343058 - DNA, 25 bp, Homo sapien
ccttgccgagagatttgacgtgtcc

SEQ ID NO: 343059 - DNA, 25 bp, Homo sapien
cacagtggatatgaccttggatgcc

SEQ ID NO: 343060 - DNA, 25 bp, Homo sapien
tcctttgatgaactcaggcactact

SEQ ID NO: 343061 - DNA, 25 bp, Homo sapien
gatgaactcaggcactactgatgct

SEQ ID NO: 343062 - DNA, 25 bp, Homo sapien
ttgatgaactcaggcactactgatg

SEQ ID NO: 343063 - DNA, 25 bp, Homo sapien
tgcaaagggaagatccagctgacca

SEQ ID NO: 343064 - DNA, 25 bp, Homo sapien
ggtgtagaggctatatcttcttaaa

SEQ ID NO: 343065 - DNA, 25 bp, Homo sapien
catgtgcctcttggtgtagaggcta

SEQ ID NO: 343066 - DNA, 25 bp, Homo sapien
cagagtccaggttgtgtcatgtgcc

SEQ ID NO: 343067 - DNA, 25 bp, Homo sapien
gtgcacccggtggtttgcccagagt

SEQ ID NO: 343068 - DNA, 25 bp, Homo sapien
agtagagattttagcaacagttgcc

SEQ ID NO: 343069 - DNA, 25 bp, Homo sapien
tcaggcaaagccctcataacttggc

SEQ ID NO: 343070 - DNA, 25 bp, Homo sapien
ggcgctaggcttaaaacccaggtga

SEQ ID NO: 343071 - DNA, 25 bp, Homo sapien
aaagatgtgcccacttttagtagag

SEQ ID NO: 343072 - DNA, 25 bp, Homo sapien
catttactgtgttccttggggtcac

SEQ ID NO: 343073 - DNA, 25 bp, Homo sapien
cttggtaacagagaaggggtcctca

SEQ ID NO: 343074 - DNA, 25 bp, Homo sapien
agagaaggggtcctcacttgcccac

SEQ ID NO: 343075 - DNA, 25 bp, Homo sapien
gaatccaccttccattgatcttctg

SEQ ID NO: 343076 - DNA, 25 bp, Homo sapien
cactctttggaatccaccttccatt

SEQ ID NO: 343077 - DNA, 25 bp, Homo sapien
gcaggaactcaggttccccataaga

SEQ ID NO: 343078 - DNA, 25 bp, Homo sapien
gaactcaggttccccataagaaaga

SEQ ID NO: 343079 - DNA, 25 bp, Homo sapien
ctcaggttccccataagaaagacca

SEQ ID NO: 343080 - DNA, 25 bp, Homo sapien
tcaggttccccataagaaagaccag

SEQ ID NO: 343081 - DNA, 25 bp, Homo sapien
cacagacagtggcagttaggaccga

SEQ ID NO: 343082 - DNA, 25 bp, Homo sapien
cataaccatggtgataggagcatca

SEQ ID NO: 343083 - DNA, 25 bp, Homo sapien
gaaaatgacagcaagcatgttcaac

SEQ ID NO: 343084 - DNA, 25 bp, Homo sapien
taggaccgagggcaagatataccca

SEQ ID NO: 343085 - DNA, 25 bp, Homo sapien
tttcttctctgtggtagaaatttgt

SEQ ID NO: 343086 - DNA, 25 bp, Homo sapien
ctaatatttcttctctgtggtagaa

SEQ ID NO: 343087 - DNA, 25 bp, Homo sapien
tcttctctgtggtagaaatttgttc

SEQ ID NO: 343088 - DNA, 25 bp, Homo sapien
tatttcttctctgtggtagaaattt

SEQ ID NO: 343089 - DNA, 25 bp, Homo sapien
accctcctgataccccctctcctgt

SEQ ID NO: 343090 - DNA, 25 bp, Homo sapien
gctgccttcaggctctttgttgaac

SEQ ID NO: 343091 - DNA, 25 bp, Homo sapien
cagccatcaaccctcctgatacccc

SEQ ID NO: 343092 - DNA, 25 bp, Homo sapien
tcctccagatccctgggatcagcca

SEQ ID NO: 343093 - DNA, 25 bp, Homo sapien
ctgacttgacacttacacttcactt

SEQ ID NO: 343094 - DNA, 25 bp, Homo sapien
ttgacacttacacttcacttgttca

SEQ ID NO: 343095 - DNA, 25 bp, Homo sapien
acttgacacttacacttcacttgtt

SEQ ID NO: 343096 - DNA, 25 bp, Homo sapien
tgacacttacacttcacttgttcaa

SEQ ID NO: 343097 - DNA, 25 bp, Homo sapien
tctcttctcaattctccatagaatg

SEQ ID NO: 343098 - DNA, 25 bp, Homo sapien
cactttctggctcaaaaaatactct

SEQ ID NO: 343099 - DNA, 25 bp, Homo sapien
ctttctggctcaaaaaatactctct

SEQ ID NO: 343100 - DNA, 25 bp, Homo sapien
agcactttctggctcaaaaaatact

SEQ ID NO: 343101 - DNA, 25 bp, Homo sapien
cacaaaggacgactcttcagccagg

SEQ ID NO: 343102 - DNA, 25 bp, Homo sapien
gtgtgtacacaaaggacgactcttc

SEQ ID NO: 343103 - DNA, 25 bp, Homo sapien
aaaggacgactcttcagccaggaaa

SEQ ID NO: 343104 - DNA, 25 bp, Homo sapien
tcttcagccaggaaaattcgatgac

SEQ ID NO: 343105 - DNA, 25 bp, Homo sapien
gacttacagggtgcgaacattccag

SEQ ID NO: 343106 - DNA, 25 bp, Homo sapien
tgtcttgaggatgtcaccgaagccc

SEQ ID NO: 343107 - DNA, 25 bp, Homo sapien
tatcaccgtgccagacttcatggag

SEQ ID NO: 343108 - DNA, 25 bp, Homo sapien
tgtttaccaggtgaatgtccatccc

SEQ ID NO: 343109 - DNA, 25 bp, Homo sapien
tccagtagagcgcataagcaggtca

SEQ ID NO: 343110 - DNA, 25 bp, Homo sapien
gttctgggactaggatgacatagcc

SEQ ID NO: 343111 - DNA, 25 bp, Homo sapien
cagagctggagttttgatgggcaac

SEQ ID NO: 343112 - DNA, 25 bp, Homo sapien
agttgtagatggcaccttaggtccc

SEQ ID NO: 343113 - DNA, 25 bp, Homo sapien
caaagtgtgcagctgtaactgctca

SEQ ID NO: 343114 - DNA, 25 bp, Homo sapien
tctgtttacattccgagaggtgtca

SEQ ID NO: 343115 - DNA, 25 bp, Homo sapien
tgtaactgctcacgccaaaatggct

SEQ ID NO: 343116 - DNA, 25 bp, Homo sapien
ggcacattgcccacctttggaaagg

SEQ ID NO: 343117 - DNA, 25 bp, Homo sapien
tcaaggcgggacaagttgcaaagtg

SEQ ID NO: 343118 - DNA, 25 bp, Homo sapien
tagggatgggtagatgtcaaactgc

SEQ ID NO: 343119 - DNA, 25 bp, Homo sapien
ttattttacaagcacgggcccctga

SEQ ID NO: 343120 - DNA, 25 bp, Homo sapien
gacacctctcggaatgtaaacagag

SEQ ID NO: 343121 - DNA, 25 bp, Homo sapien
aaggcagtttgacatctacccatcc

SEQ ID NO: 343122 - DNA, 25 bp, Homo sapien
ctttccaaaggtgggcaatgtgcct

SEQ ID NO: 343123 - DNA, 25 bp, Homo sapien
ccattttggcgtgagcagttacagc

SEQ ID NO: 343124 - DNA, 25 bp, Homo sapien
gatggctaaagatcagtatgactgc

SEQ ID NO: 343125 - DNA, 25 bp, Homo sapien
atgctggaatcagcaagaaagccat

SEQ ID NO: 343126 - DNA, 25 bp, Homo sapien
tgtggtaaatacctgccatgatgct

SEQ ID NO: 343127 - DNA, 25 bp, Homo sapien
gctcctgagtcctataagaatgtga

SEQ ID NO: 343128 - DNA, 25 bp, Homo sapien
cctgagtcctataagaatgtgacag

SEQ ID NO: 343129 - DNA, 25 bp, Homo sapien
gagtcctataagaatgtgacagatg

SEQ ID NO: 343130 - DNA, 25 bp, Homo sapien
tgatgctggaatcagcaagaaagcc

SEQ ID NO: 343131 - DNA, 25 bp, Homo sapien
tcacattcttataggactcaggagc

SEQ ID NO: 343132 - DNA, 25 bp, Homo sapien
agcatcatggcaggtatttaccaca

SEQ ID NO: 343133 - DNA, 25 bp, Homo sapien
catctgtcacattcttataggactc

SEQ ID NO: 343134 - DNA, 25 bp, Homo sapien
atggctttcttgctgattccagcat

SEQ ID NO: 343135 - DNA, 25 bp, Homo sapien
tgtcacattcttataggactcagga

SEQ ID NO: 343136 - DNA, 25 bp, Homo sapien
ggctttcttgctgattccagcatca

SEQ ID NO: 343137 - DNA, 25 bp, Homo sapien
gccagtaattctaccatcaagagat

SEQ ID NO: 343138 - DNA, 25 bp, Homo sapien
gaaggtactacatgttcattccaga

SEQ ID NO: 343139 - DNA, 25 bp, Homo sapien
gaaccgtacgggaatcagcatggat

SEQ ID NO: 343140 - DNA, 25 bp, Homo sapien
ctaacatatgatggttgggtgccgt

SEQ ID NO: 343141 - DNA, 25 bp, Homo sapien
ggatggcctaagcttgtattgacag

SEQ ID NO: 343142 - DNA, 25 bp, Homo sapien
tgggtgccgtttcttccaatcaggt

SEQ ID NO: 343143 - DNA, 25 bp, Homo sapien
tgtcaatacaagcttaggccatcca

SEQ ID NO: 343144 - DNA, 25 bp, Homo sapien
tccatgctgattcccgtacggttct

SEQ ID NO: 343145 - DNA, 25 bp, Homo sapien
gaaacggcacccaaccatcatatgt

SEQ ID NO: 343146 - DNA, 25 bp, Homo sapien
tctggaatgaacatgtagtaccttc

SEQ ID NO: 343147 - DNA, 25 bp, Homo sapien
aagtaagcctgatgttggtcagtgc

SEQ ID NO: 343148 - DNA, 25 bp, Homo sapien
gaacctgattggaagaaacggcacc

SEQ ID NO: 343149 - DNA, 25 bp, Homo sapien
caggatgtcttagacaaattggcag

SEQ ID NO: 343150 - DNA, 25 bp, Homo sapien
gaattgcgatccgtgttgcctcacc

SEQ ID NO: 343151 - DNA, 25 bp, Homo sapien
tggcagatatgggaattgcgatccg

SEQ ID NO: 343152 - DNA, 25 bp, Homo sapien
atccgtgttgcctcacccaaactgg

SEQ ID NO: 343153 - DNA, 25 bp, Homo sapien
ggccgtgcattgtcccgagcaaaat

SEQ ID NO: 343154 - DNA, 25 bp, Homo sapien
gagcaaaatctcgacgtaatttaga

SEQ ID NO: 343155 - DNA, 25 bp, Homo sapien
gccaatttgtctaagacatcctgga

SEQ ID NO: 343156 - DNA, 25 bp, Homo sapien
ggtgaggcaacacggatcgcaattc

SEQ ID NO: 343157 - DNA, 25 bp, Homo sapien
ccagtttgggtgaggcaacacggat

SEQ ID NO: 343158 - DNA, 25 bp, Homo sapien
gattttgctcgggacaatgcacggc

SEQ ID NO: 343159 - DNA, 25 bp, Homo sapien
aaattacgtcgagattttgctcggg

SEQ ID NO: 343160 - DNA, 25 bp, Homo sapien
cggatcgcaattcccatatctgcca

SEQ ID NO: 343161 - DNA, 25 bp, Homo sapien
tactgtgtaaatgggcaatgctgtg

SEQ ID NO: 343162 - DNA, 25 bp, Homo sapien
cagaagcaaccttaagtactgtgta

SEQ ID NO: 343163 - DNA, 25 bp, Homo sapien
gcaaccttaagtactgtgtaaatgg

SEQ ID NO: 343164 - DNA, 25 bp, Homo sapien
ctctcatcttctaagcccaggggtc

SEQ ID NO: 343165 - DNA, 25 bp, Homo sapien
accttaagtactgtgtaaatgggca

SEQ ID NO: 343166 - DNA, 25 bp, Homo sapien
tgtaaatgggcaatgctgtgttcta

SEQ ID NO: 343167 - DNA, 25 bp, Homo sapien
catttacacagtacttaaggttgct

SEQ ID NO: 343168 - DNA, 25 bp, Homo sapien
tagaacacagcattgcccatttaca

SEQ ID NO: 343169 - DNA, 25 bp, Homo sapien
tacacagtacttaaggttgcttctg

SEQ ID NO: 343170 - DNA, 25 bp, Homo sapien
cacagcattgcccatttacacagta

SEQ ID NO: 343171 - DNA, 25 bp, Homo sapien
gacccctgggcttagaagatgagag

SEQ ID NO: 343172 - DNA, 25 bp, Homo sapien
tgcccatttacacagtacttaaggt

SEQ ID NO: 343173 - DNA, 25 bp, Homo sapien
cctttggaacaacctgtcatggagc

SEQ ID NO: 343174 - DNA, 25 bp, Homo sapien
ctttggaacaacctgtcatggagcg

SEQ ID NO: 343175 - DNA, 25 bp, Homo sapien
ctggcactgaacagggcatgactga

SEQ ID NO: 343176 - DNA, 25 bp, Homo sapien
gacctttggaacaacctgtcatgga

SEQ ID NO: 343177 - DNA, 25 bp, Homo sapien
actggcactgaacagggcatgactg

SEQ ID NO: 343178 - DNA, 25 bp, Homo sapien
gagacctttggaacaacctgtcatg

SEQ ID NO: 343179 - DNA, 25 bp, Homo sapien
tcagtcatgccctgttcagtgccag

SEQ ID NO: 343180 - DNA, 25 bp, Homo sapien
tccatgacaggttgttccaaaggtc

SEQ ID NO: 343181 - DNA, 25 bp, Homo sapien
catgacaggttgttccaaaggtctc

SEQ ID NO: 343182 - DNA, 25 bp, Homo sapien
cagtcatgccctgttcagtgccagt

SEQ ID NO: 343183 - DNA, 25 bp, Homo sapien
gctccatgacaggttgttccaaagg

SEQ ID NO: 343184 - DNA, 25 bp, Homo sapien
cgctccatgacaggttgttccaaag

SEQ ID NO: 343185 - DNA, 25 bp, Homo sapien
tcccctcattgctgttgattaccaa

SEQ ID NO: 343186 - DNA, 25 bp, Homo sapien
acaggaagggatccacccgcgcttt

SEQ ID NO: 343187 - DNA, 25 bp, Homo sapien
gacttggacctacatgtgatctatg

SEQ ID NO: 343188 - DNA, 25 bp, Homo sapien
cacaacccctgatgacttggaccta

SEQ ID NO: 343189 - DNA, 25 bp, Homo sapien
gaacggacactgttagtacacagga

SEQ ID NO: 343190 - DNA, 25 bp, Homo sapien
gatgtttctcacaacattgccaaag

SEQ ID NO: 343191 - DNA, 25 bp, Homo sapien
ccttcctgtgtactaacagtgtccg

SEQ ID NO: 343192 - DNA, 25 bp, Homo sapien
catcatagatcacatgtaggtccaa

SEQ ID NO: 343193 - DNA, 25 bp, Homo sapien
aaagcgcgggtggatcccttcctgt

SEQ ID NO: 343194 - DNA, 25 bp, Homo sapien
ctttggcaatgttgtgagaaacatc

SEQ ID NO: 343195 - DNA, 25 bp, Homo sapien
tgtactaacagtgtccgttcctttc

SEQ ID NO: 343196 - DNA, 25 bp, Homo sapien
tcacatgtaggtccaagtcatcagg

SEQ ID NO: 343197 - DNA, 25 bp, Homo sapien
caatgatcggcagttggcttgtgct

SEQ ID NO: 343198 - DNA, 25 bp, Homo sapien
cagttggcttgtgctcgaatcgctt

SEQ ID NO: 343199 - DNA, 25 bp, Homo sapien
gagacaagattatagtcaatgatcg

SEQ ID NO: 343200 - DNA, 25 bp, Homo sapien
caagattatagtcaatgatcggcag

SEQ ID NO: 343201 - DNA, 25 bp, Homo sapien
ttgtgctcgaatcgcttccccagag

SEQ ID NO: 343202 - DNA, 25 bp, Homo sapien
tgatcggcagttggcttgtgctcga

SEQ ID NO: 343203 - DNA, 25 bp, Homo sapien
tgcctgggtcaaccgctcttccatg

SEQ ID NO: 343204 - DNA, 25 bp, Homo sapien
aactatgcctgggtcaaccgctctt

SEQ ID NO: 343205 - DNA, 25 bp, Homo sapien
aaccgctcttccatgaccttcttaa

SEQ ID NO: 343206 - DNA, 25 bp, Homo sapien
tgggtcaaccgctcttccatgacct

SEQ ID NO: 343207 - DNA, 25 bp, Homo sapien
cagctgctgggaactatgcctgggt

SEQ ID NO: 343208 - DNA, 25 bp, Homo sapien
ttccatgaccttcttaacccgtcag

SEQ ID NO: 343209 - DNA, 25 bp, Homo sapien
acccaggcatagttcccagcagctg

SEQ ID NO: 343210 - DNA, 25 bp, Homo sapien
catggaagagcggttgacccaggca

SEQ ID NO: 343211 - DNA, 25 bp, Homo sapien
gaagagcggttgacccaggcatagt

SEQ ID NO: 343212 - DNA, 25 bp, Homo sapien
ctgacgggttaagaaggtcatggaa

SEQ ID NO: 343213 - DNA, 25 bp, Homo sapien
ttaagaaggtcatggaagagcggtt

SEQ ID NO: 343214 - DNA, 25 bp, Homo sapien
aaggtcatggaagagcggttgaccc

SEQ ID NO: 343215 - DNA, 25 bp, Homo sapien
gggaagcgattcgagcacaagccaa

SEQ ID NO: 343216 - DNA, 25 bp, Homo sapien
ctctggggaagcgattcgagcacaa

SEQ ID NO: 343217 - DNA, 25 bp, Homo sapien
gagcacaagccaactgccgatcatt

SEQ ID NO: 343218 - DNA, 25 bp, Homo sapien
attcgagcacaagccaactgccgat

SEQ ID NO: 343219 - DNA, 25 bp, Homo sapien
gccgatcattgactataatcttgtc

SEQ ID NO: 343220 - DNA, 25 bp, Homo sapien
gaagcgattcgagcacaagccaact

SEQ ID NO: 343221 - DNA, 25 bp, Homo sapien
ctggtttggactttgtggctcttgt

SEQ ID NO: 343222 - DNA, 25 bp, Homo sapien
agctaactggtttggactttgtggc

SEQ ID NO: 343223 - DNA, 25 bp, Homo sapien
taactggtttggactttgtggctct

SEQ ID NO: 343224 - DNA, 25 bp, Homo sapien
tttggactttgtggctcttgttcca

SEQ ID NO: 343225 - DNA, 25 bp, Homo sapien
ggtttggactttgtggctcttgttc

SEQ ID NO: 343226 - DNA, 25 bp, Homo sapien
gctaactggtttggactttgtggct

SEQ ID NO: 343227 - DNA, 25 bp, Homo sapien
agccacaaagtccaaaccagttagc

SEQ ID NO: 343228 - DNA, 25 bp, Homo sapien
gccacaaagtccaaaccagttagct

SEQ ID NO: 343229 - DNA, 25 bp, Homo sapien
tggaacaagagccacaaagtccaaa

SEQ ID NO: 343230 - DNA, 25 bp, Homo sapien
acaagagccacaaagtccaaaccag

SEQ ID NO: 343231 - DNA, 25 bp, Homo sapien
gaacaagagccacaaagtccaaacc

SEQ ID NO: 343232 - DNA, 25 bp, Homo sapien
gagccacaaagtccaaaccagttag

SEQ ID NO: 343233 - DNA, 25 bp, Homo sapien
ttgaatgtagcctacctttctgcag

SEQ ID NO: 343234 - DNA, 25 bp, Homo sapien
ggaatgaatttgaatgtagcctacc

SEQ ID NO: 343235 - DNA, 25 bp, Homo sapien
caagtacgtcttgactgagcaaata

SEQ ID NO: 343236 - DNA, 25 bp, Homo sapien
attctcaagtacgtcttgactgagc

SEQ ID NO: 343237 - DNA, 25 bp, Homo sapien
gagcaaatagatgaactcagaaaca

SEQ ID NO: 343238 - DNA, 25 bp, Homo sapien
aagtacgtcttgactgagcaaatag

SEQ ID NO: 343239 - DNA, 25 bp, Homo sapien
tgtttctgagttcatctatttgctc

SEQ ID NO: 343240 - DNA, 25 bp, Homo sapien
ggtaggctacattcaaattcattcc

SEQ ID NO: 343241 - DNA, 25 bp, Homo sapien
ctgcagaaaggtaggctacattcaa

SEQ ID NO: 343242 - DNA, 25 bp, Homo sapien
tatttgctcagtcaagacgtacttg

SEQ ID NO: 343243 - DNA, 25 bp, Homo sapien
gctcagtcaagacgtacttgagaat

SEQ ID NO: 343244 - DNA, 25 bp, Homo sapien
gaaaggtaggctacattcaaattca

SEQ ID NO: 343245 - DNA, 25 bp, Homo sapien
gtgtgtgtgatgatccacagtggaa

SEQ ID NO: 343246 - DNA, 25 bp, Homo sapien
ggcttgggccaccaagtagccacag

SEQ ID NO: 343247 - DNA, 25 bp, Homo sapien
aggcttgggccaccaagtagccaca

SEQ ID NO: 343248 - DNA, 25 bp, Homo sapien
tgtgtgtgatgatccacagtggaag

SEQ ID NO: 343249 - DNA, 25 bp, Homo sapien
agaggcttgggccaccaagtagcca

SEQ ID NO: 343250 - DNA, 25 bp, Homo sapien
gaggcttgggccaccaagtagccac

SEQ ID NO: 343251 - DNA, 25 bp, Homo sapien
tggctacttggtggcccaagcctct

SEQ ID NO: 343252 - DNA, 25 bp, Homo sapien
cttccactgtggatcatcacacaca

SEQ ID NO: 343253 - DNA, 25 bp, Homo sapien
ctgtggctacttggtggcccaagcc

SEQ ID NO: 343254 - DNA, 25 bp, Homo sapien
gtggctacttggtggcccaagcctc

SEQ ID NO: 343255 - DNA, 25 bp, Homo sapien
tgtggctacttggtggcccaagcct

SEQ ID NO: 343256 - DNA, 25 bp, Homo sapien
ttccactgtggatcatcacacacac

SEQ ID NO: 343257 - DNA, 25 bp, Homo sapien
aaaatgggcatcgaccataagggac

SEQ ID NO: 343258 - DNA, 25 bp, Homo sapien
aaaaaatgggcatcgaccataaggg

SEQ ID NO: 343259 - DNA, 25 bp, Homo sapien
tgctaaaaaaatgggcatcgaccat

SEQ ID NO: 343260 - DNA, 25 bp, Homo sapien
atgcagaaatccaggttgtggatga

SEQ ID NO: 343261 - DNA, 25 bp, Homo sapien
aaaaatgggcatcgaccataaggga

SEQ ID NO: 343262 - DNA, 25 bp, Homo sapien
gctaaaaaaatgggcatcgaccata

SEQ ID NO: 343263 - DNA, 25 bp, Homo sapien
tcatccacaacctggatttctgcat

SEQ ID NO: 343264 - DNA, 25 bp, Homo sapien
cccttatggtcgatgcccatttttt

SEQ ID NO: 343265 - DNA, 25 bp, Homo sapien
tatggtcgatgcccatttttttagc

SEQ ID NO: 343266 - DNA, 25 bp, Homo sapien
tcccttatggtcgatgcccattttt

SEQ ID NO: 343267 - DNA, 25 bp, Homo sapien
atggtcgatgcccatttttttagca

SEQ ID NO: 343268 - DNA, 25 bp, Homo sapien
gtcccttatggtcgatgcccatttt

SEQ ID NO: 343269 - DNA, 25 bp, Homo sapien
ctacagatggtatccatgagataag

SEQ ID NO: 343270 - DNA, 25 bp, Homo sapien
tgaaattacagctagttgtgaaggc

SEQ ID NO: 343271 - DNA, 25 bp, Homo sapien
cagatggtatccatgagataagaat

SEQ ID NO: 343272 - DNA, 25 bp, Homo sapien
aattacagctagttgtgaaggcttt

SEQ ID NO: 343273 - DNA, 25 bp, Homo sapien
agtgtgacacgtgggcaagactgtc

SEQ ID NO: 343274 - DNA, 25 bp, Homo sapien
tttgacagtctacagatggtatcca

SEQ ID NO: 343275 - DNA, 25 bp, Homo sapien
tggataccatctgtagactgtcaaa

SEQ ID NO: 343276 - DNA, 25 bp, Homo sapien
attcttatctcatggataccatctg

SEQ ID NO: 343277 - DNA, 25 bp, Homo sapien
cttatctcatggataccatctgtag

SEQ ID NO: 343278 - DNA, 25 bp, Homo sapien
tcacaactagctgtaatttcaaaca

SEQ ID NO: 343279 - DNA, 25 bp, Homo sapien
gacagtcttgcccacgtgtcacact

SEQ ID NO: 343280 - DNA, 25 bp, Homo sapien
aaagccttcacaactagctgtaatt

SEQ ID NO: 343281 - DNA, 25 bp, Homo sapien
actgcgaggagtacggaaggatgct

SEQ ID NO: 343282 - DNA, 25 bp, Homo sapien
caataaagtttctgcaagggcgaag

SEQ ID NO: 343283 - DNA, 25 bp, Homo sapien
gctgaccccaataaagtttctgcaa

SEQ ID NO: 343284 - DNA, 25 bp, Homo sapien
ctgaagacaaggagcactgcgagga

SEQ ID NO: 343285 - DNA, 25 bp, Homo sapien
gggcgaagaaaagaggccttcctca

SEQ ID NO: 343286 - DNA, 25 bp, Homo sapien
aagggtatgcctgggctgaagacaa

SEQ ID NO: 343287 - DNA, 25 bp, Homo sapien
tcctcgcagtgctccttgtcttcag

SEQ ID NO: 343288 - DNA, 25 bp, Homo sapien
tttcttcgcccttgcagaaacttta

SEQ ID NO: 343289 - DNA, 25 bp, Homo sapien
gtactcctcgcagtgctccttgtct

SEQ ID NO: 343290 - DNA, 25 bp, Homo sapien
ttgtcttcagcccaggcataccctt

SEQ ID NO: 343291 - DNA, 25 bp, Homo sapien
tgaggaaggcctcttttcttcgccc

SEQ ID NO: 343292 - DNA, 25 bp, Homo sapien
tcgcccttgcagaaactttattggg

SEQ ID NO: 343293 - DNA, 25 bp, Homo sapien
tgtctgtttaatcactacctcatgg

SEQ ID NO: 343294 - DNA, 25 bp, Homo sapien
aatgatgtctaatagggcatttatc

SEQ ID NO: 343295 - DNA, 25 bp, Homo sapien
gagcagtataaatgtcaagtagaac

SEQ ID NO: 343296 - DNA, 25 bp, Homo sapien
tatgactgcattcctcaaaaaacca

SEQ ID NO: 343297 - DNA, 25 bp, Homo sapien
tctgccctttaaggatgtggtcatc

SEQ ID NO: 343298 - DNA, 25 bp, Homo sapien
tttgaaaattaacaaggagcagtat

SEQ ID NO: 343299 - DNA, 25 bp, Homo sapien
gagatgactagcaccttttatactt

SEQ ID NO: 343300 - DNA, 25 bp, Homo sapien
ctgtgagatgactagcaccttttat

SEQ ID NO: 343301 - DNA, 25 bp, Homo sapien
gactagcaccttttatacttatcca

SEQ ID NO: 343302 - DNA, 25 bp, Homo sapien
gatgactagcaccttttatacttat

SEQ ID NO: 343303 - DNA, 25 bp, Homo sapien
gtgagatgactagcaccttttatac

SEQ ID NO: 343304 - DNA, 25 bp, Homo sapien
actagcaccttttatacttatccag

SEQ ID NO: 343305 - DNA, 25 bp, Homo sapien
agtataaaaggtgctagtcatctca

SEQ ID NO: 343306 - DNA, 25 bp, Homo sapien
ctggataagtataaaaggtgctagt

SEQ ID NO: 343307 - DNA, 25 bp, Homo sapien
ataaaaggtgctagtcatctcacag

SEQ ID NO: 343308 - DNA, 25 bp, Homo sapien
ggataagtataaaaggtgctagtca

SEQ ID NO: 343309 - DNA, 25 bp, Homo sapien
tataaaaggtgctagtcatctcaca

SEQ ID NO: 343310 - DNA, 25 bp, Homo sapien
taagtataaaaggtgctagtcatct

SEQ ID NO: 343311 - DNA, 25 bp, Homo sapien
tggttttttgaggaatgcagtcata

SEQ ID NO: 343312 - DNA, 25 bp, Homo sapien
gatgaccacatccttaaagggcaga

SEQ ID NO: 343313 - DNA, 25 bp, Homo sapien
ccatgaggtagtgattaaacagaca

SEQ ID NO: 343314 - DNA, 25 bp, Homo sapien
tatactgctccttgttaattttcaa

SEQ ID NO: 343315 - DNA, 25 bp, Homo sapien
taaaatgataaatgccctattagac

SEQ ID NO: 343316 - DNA, 25 bp, Homo sapien
gttctacttgacatttatactgctc

SEQ ID NO: 343317 - DNA, 25 bp, Homo sapien
aagattaaagcttgtaccctctaag

SEQ ID NO: 343318 - DNA, 25 bp, Homo sapien
tacctggttgaattagtcgttagag

SEQ ID NO: 343319 - DNA, 25 bp, Homo sapien
tacgtgtacctcagcttcaaaatgg

SEQ ID NO: 343320 - DNA, 25 bp, Homo sapien
gctggaccttggatgaagattaaag

SEQ ID NO: 343321 - DNA, 25 bp, Homo sapien
tcaaaatggaggtgccgtaagccac

SEQ ID NO: 343322 - DNA, 25 bp, Homo sapien
gcctgaggaattctagataccttca

SEQ ID NO: 343323 - DNA, 25 bp, Homo sapien
taacgactaattcaaccaggtacac

SEQ ID NO: 343324 - DNA, 25 bp, Homo sapien
gctttaatcttcatccaaggtccag

SEQ ID NO: 343325 - DNA, 25 bp, Homo sapien
cattttgaagctgaggtacacgtac

SEQ ID NO: 343326 - DNA, 25 bp, Homo sapien
tgaaggtatctagaattcctcaggc

SEQ ID NO: 343327 - DNA, 25 bp, Homo sapien
agttctgagtggcttacggcacctc

SEQ ID NO: 343328 - DNA, 25 bp, Homo sapien
taatcagctatcactctctaacgac

SEQ ID NO: 343329 - DNA, 25 bp, Homo sapien
gctatagtgtatctctcagatggcc

SEQ ID NO: 343330 - DNA, 25 bp, Homo sapien
tgggagggataataaccacatgacc

SEQ ID NO: 343331 - DNA, 25 bp, Homo sapien
gattttaccgtgtcatagcttatgc

SEQ ID NO: 343332 - DNA, 25 bp, Homo sapien
tagcttatgcaaagcagtgcaccct

SEQ ID NO: 343333 - DNA, 25 bp, Homo sapien
tctatgtgtaaggtgctgagcatca

SEQ ID NO: 343334 - DNA, 25 bp, Homo sapien
tttttaagcatgaggtacagcccat

SEQ ID NO: 343335 - DNA, 25 bp, Homo sapien
tgactaatgtctccaataaatgggc

SEQ ID NO: 343336 - DNA, 25 bp, Homo sapien
gatgctcagcaccttacacatagaa

SEQ ID NO: 343337 - DNA, 25 bp, Homo sapien
aatgggctgtacctcatgcttaaaa

SEQ ID NO: 343338 - DNA, 25 bp, Homo sapien
tctatggccatctgagagatacact

SEQ ID NO: 343339 - DNA, 25 bp, Homo sapien
ccagtgctatcattcaaagaggaag

SEQ ID NO: 343340 - DNA, 25 bp, Homo sapien
gctttgcataagctatgacacggta

SEQ ID NO: 343341 - DNA, 25 bp, Homo sapien
aaggtgtcatcccaatgaatgccaa

SEQ ID NO: 343342 - DNA, 25 bp, Homo sapien
tgcccaagctatgtttgaccacatt

SEQ ID NO: 343343 - DNA, 25 bp, Homo sapien
gggtcaaaaggtgtcatcccaatga

SEQ ID NO: 343344 - DNA, 25 bp, Homo sapien
gtccgcttgctaagaaccaatttag

SEQ ID NO: 343345 - DNA, 25 bp, Homo sapien
tggtgtcgggtttgacatcaactgt

SEQ ID NO: 343346 - DNA, 25 bp, Homo sapien
catcaactgtggtgtccgcttgcta

SEQ ID NO: 343347 - DNA, 25 bp, Homo sapien
taaattggttcttagcaagcggaca

SEQ ID NO: 343348 - DNA, 25 bp, Homo sapien
acagttgatgtcaaacccgacacca

SEQ ID NO: 343349 - DNA, 25 bp, Homo sapien
ttggcattcattgggatgacacctt

SEQ ID NO: 343350 - DNA, 25 bp, Homo sapien
aatgtggtcaaacatagcttgggca

SEQ ID NO: 343351 - DNA, 25 bp, Homo sapien
tagcaagcggacaccacagttgatg

SEQ ID NO: 343352 - DNA, 25 bp, Homo sapien
cattgggatgacaccttttgacccc

SEQ ID NO: 343353 - DNA, 25 bp, Homo sapien
gaacaaagatgttatgtcatatagc

SEQ ID NO: 343354 - DNA, 25 bp, Homo sapien
cccagggtctctggaccatactaaa

SEQ ID NO: 343355 - DNA, 25 bp, Homo sapien
aaatctcactgtacagtcatgggag

SEQ ID NO: 343356 - DNA, 25 bp, Homo sapien
aatgaatcttacacacctgaaatgg

SEQ ID NO: 343357 - DNA, 25 bp, Homo sapien
gaccatactaaagaacccactcata

SEQ ID NO: 343358 - DNA, 25 bp, Homo sapien
ataaaaactagacctagcactttgg

SEQ ID NO: 343359 - DNA, 25 bp, Homo sapien
tatgagtgggttctttagtatggtc

SEQ ID NO: 343360 - DNA, 25 bp, Homo sapien
tctcaaaagctatatgacataacat

SEQ ID NO: 343361 - DNA, 25 bp, Homo sapien
aaaatatcctcttatatgagtgggt

SEQ ID NO: 343362 - DNA, 25 bp, Homo sapien
ggaagaccatttcaggtgtgtaaga

SEQ ID NO: 343363 - DNA, 25 bp, Homo sapien
tattctcccatgactgtacagtgag

SEQ ID NO: 343364 - DNA, 25 bp, Homo sapien
tttagtatggtccagagaccctggg

SEQ ID NO: 343365 - DNA, 25 bp, Homo sapien
caaactttttgcactcgggaccact

SEQ ID NO: 343366 - DNA, 25 bp, Homo sapien
gcattgtagtacagccaagcagtgc

SEQ ID NO: 343367 - DNA, 25 bp, Homo sapien
ccagatatgtgagccctacatgtag

SEQ ID NO: 343368 - DNA, 25 bp, Homo sapien
gctgagcggtaaagcaggcatcaaa

SEQ ID NO: 343369 - DNA, 25 bp, Homo sapien
gttgtttcagaccaatcccctgctg

SEQ ID NO: 343370 - DNA, 25 bp, Homo sapien
tctgctaaggcagtaagaatttgcg

SEQ ID NO: 343371 - DNA, 25 bp, Homo sapien
tacatgtagggctcacatatctgga

SEQ ID NO: 343372 - DNA, 25 bp, Homo sapien
gaaatttgatgcctgctttaccgct

SEQ ID NO: 343373 - DNA, 25 bp, Homo sapien
gctttaccgctcagcatgtggtcag

SEQ ID NO: 343374 - DNA, 25 bp, Homo sapien
tattactaaagtggtcccgagtgca

SEQ ID NO: 343375 - DNA, 25 bp, Homo sapien
tggctgtactacaatgcaagtgcac

SEQ ID NO: 343376 - DNA, 25 bp, Homo sapien
aaatgtatactctgcactgcttggc

SEQ ID NO: 343377 - DNA, 25 bp, Homo sapien
tttgctattgggaacatggcagcct

SEQ ID NO: 343378 - DNA, 25 bp, Homo sapien
caggatatgggtttgctattgggaa

SEQ ID NO: 343379 - DNA, 25 bp, Homo sapien
gaccctgaagcagtagtatccccag

SEQ ID NO: 343380 - DNA, 25 bp, Homo sapien
ggatatgggtttgctattgggaaca

SEQ ID NO: 343381 - DNA, 25 bp, Homo sapien
gaatgaccctgaagcagtagtatcc

SEQ ID NO: 343382 - DNA, 25 bp, Homo sapien
tgggtttgctattgggaacatggca

SEQ ID NO: 343383 - DNA, 25 bp, Homo sapien
tgttcccaatagcaaacccatatcc

SEQ ID NO: 343384 - DNA, 25 bp, Homo sapien
ggatactactgcttcagggtcattc

SEQ ID NO: 343385 - DNA, 25 bp, Homo sapien
gggatactactgcttcagggtcatt

SEQ ID NO: 343386 - DNA, 25 bp, Homo sapien
aggctgccatgttcccaatagcaaa

SEQ ID NO: 343387 - DNA, 25 bp, Homo sapien
ttcccaatagcaaacccatatcctg

SEQ ID NO: 343388 - DNA, 25 bp, Homo sapien
gccatgttcccaatagcaaacccat

SEQ ID NO: 343389 - DNA, 25 bp, Homo sapien
tcttaaagtccattgaatggatgaa

SEQ ID NO: 343390 - DNA, 25 bp, Homo sapien
aatggccatgcctgatagtggtgtc

SEQ ID NO: 343391 - DNA, 25 bp, Homo sapien
tggacagccagacataaccatgaag

SEQ ID NO: 343392 - DNA, 25 bp, Homo sapien
gagtcagagttcagaactttaatca

SEQ ID NO: 343393 - DNA, 25 bp, Homo sapien
gacataaccatgaagccaggctcag

SEQ ID NO: 343394 - DNA, 25 bp, Homo sapien
gacctttggacagccagacataacc

SEQ ID NO: 343395 - DNA, 25 bp, Homo sapien
ctgagcctggcttcatggttatgtc

SEQ ID NO: 343396 - DNA, 25 bp, Homo sapien
gcttcatggttatgtctggctgtcc

SEQ ID NO: 343397 - DNA, 25 bp, Homo sapien
ttcatccattcaatggactttaaga

SEQ ID NO: 343398 - DNA, 25 bp, Homo sapien
tgacaccactatcaggcatggccat

SEQ ID NO: 343399 - DNA, 25 bp, Homo sapien
gattaaagttctgaactctgactca

SEQ ID NO: 343400 - DNA, 25 bp, Homo sapien
ggttatgtctggctgtccaaaggtc

SEQ ID NO: 343401 - DNA, 25 bp, Homo sapien
gccatgaaacagattggcaatgtgg

SEQ ID NO: 343402 - DNA, 25 bp, Homo sapien
agattggcaatgtggcagccctgcc

SEQ ID NO: 343403 - DNA, 25 bp, Homo sapien
cagattggcaatgtggcagccctgc

SEQ ID NO: 343404 - DNA, 25 bp, Homo sapien
agccatgaaacagattggcaatgtg

SEQ ID NO: 343405 - DNA, 25 bp, Homo sapien
gcagggctgccacattgccaatctg

SEQ ID NO: 343406 - DNA, 25 bp, Homo sapien
ccacattgccaatctgtttcatggc

SEQ ID NO: 343407 - DNA, 25 bp, Homo sapien
cacattgccaatctgtttcatggct

SEQ ID NO: 343408 - DNA, 25 bp, Homo sapien
ggcagggctgccacattgccaatct

SEQ ID NO: 343409 - DNA, 25 bp, Homo sapien
ttttctatgtgaatgatgctctgga

SEQ ID NO: 343410 - DNA, 25 bp, Homo sapien
gttttctatgtgaatgatgctctgg

SEQ ID NO: 343411 - DNA, 25 bp, Homo sapien
tttctatgtgaatgatgctctggag

SEQ ID NO: 343412 - DNA, 25 bp, Homo sapien
ccagagcatcattcacatagaaaac

SEQ ID NO: 343413 - DNA, 25 bp, Homo sapien
ctccagagcatcattcacatagaaa

SEQ ID NO: 343414 - DNA, 25 bp, Homo sapien
tccagagcatcattcacatagaaaa

SEQ ID NO: 343415 - DNA, 25 bp, Homo sapien
gatcagtctcataaacgtatcgtga

SEQ ID NO: 343416 - DNA, 25 bp, Homo sapien
catttgctgggactggaattcacct

SEQ ID NO: 343417 - DNA, 25 bp, Homo sapien
aggttttcagcattcagtatcgcat

SEQ ID NO: 343418 - DNA, 25 bp, Homo sapien
aaccacgaggacaagctaagtgcgg

SEQ ID NO: 343419 - DNA, 25 bp, Homo sapien
ctaagtgcggtggatatgggaatct

SEQ ID NO: 343420 - DNA, 25 bp, Homo sapien
tccaaagcgttttcacagatcagtc

SEQ ID NO: 343421 - DNA, 25 bp, Homo sapien
tcagtatcgcatgttggtttttaat

SEQ ID NO: 343422 - DNA, 25 bp, Homo sapien
gtcatttcttgcagtagcgcagggc

SEQ ID NO: 343423 - DNA, 25 bp, Homo sapien
ttaatattcacttcacagaaggacc

SEQ ID NO: 343424 - DNA, 25 bp, Homo sapien
aaagcgatgtcatttcttgcagtag

SEQ ID NO: 343425 - DNA, 25 bp, Homo sapien
tcgaggatctgtcggtgacatagct

SEQ ID NO: 343426 - DNA, 25 bp, Homo sapien
ttcacagaaggacctcgaggatctg

SEQ ID NO: 343427 - DNA, 25 bp, Homo sapien
cctcgaggtccttctgtgaagtgaa

SEQ ID NO: 343428 - DNA, 25 bp, Homo sapien
attaaaaaccaacatgcgatactga

SEQ ID NO: 343429 - DNA, 25 bp, Homo sapien
tatgtcaccgacagatcctcgaggt

SEQ ID NO: 343430 - DNA, 25 bp, Homo sapien
gccctgcgctactgcaagaaatgac

SEQ ID NO: 343431 - DNA, 25 bp, Homo sapien
tactgcaagaaatgacatcgcttta

SEQ ID NO: 343432 - DNA, 25 bp, Homo sapien
tgacatcgctttattaaaaaccaac

SEQ ID NO: 343433 - DNA, 25 bp, Homo sapien
tatttagattcccatatccaccgca

SEQ ID NO: 343434 - DNA, 25 bp, Homo sapien
gaggtgaattccagtcccagcaaat

SEQ ID NO: 343435 - DNA, 25 bp, Homo sapien
gactgatctgtgaaaacgctttgga

SEQ ID NO: 343436 - DNA, 25 bp, Homo sapien
caccgcacttagcttgtcctcgtgg

SEQ ID NO: 343437 - DNA, 25 bp, Homo sapien
tcacgatacgtttatgagactgatc

SEQ ID NO: 343438 - DNA, 25 bp, Homo sapien
tgaacgtaaaacagctcacgatacg

SEQ ID NO: 343439 - DNA, 25 bp, Homo sapien
ggatcaagaagggcttcgtgcccaa

SEQ ID NO: 343440 - DNA, 25 bp, Homo sapien
gaggatcaagaagggcttcgtgccc

SEQ ID NO: 343441 - DNA, 25 bp, Homo sapien
cagctataatgatgagctgcagttc

SEQ ID NO: 343442 - DNA, 25 bp, Homo sapien
gagtcgcagctataatgatgagctg

SEQ ID NO: 343443 - DNA, 25 bp, Homo sapien
atgagtcgcagctataatgatgagc

SEQ ID NO: 343444 - DNA, 25 bp, Homo sapien
gctataatgatgagctgcagttctt

SEQ ID NO: 343445 - DNA, 25 bp, Homo sapien
aagaactgcagctcatcattatagc

SEQ ID NO: 343446 - DNA, 25 bp, Homo sapien
gggcacgaagcccttcttgatcctc

SEQ ID NO: 343447 - DNA, 25 bp, Homo sapien
gaactgcagctcatcattatagctg

SEQ ID NO: 343448 - DNA, 25 bp, Homo sapien
cagctcatcattatagctgcgactc

SEQ ID NO: 343449 - DNA, 25 bp, Homo sapien
gctcatcattatagctgcgactcat

SEQ ID NO: 343450 - DNA, 25 bp, Homo sapien
ttgggcacgaagcccttcttgatcc

SEQ ID NO: 343451 - DNA, 25 bp, Homo sapien
ctcttcaaagcggagccgggagttt

SEQ ID NO: 343452 - DNA, 25 bp, Homo sapien
agcggagccgggagtttttgctaca

SEQ ID NO: 343453 - DNA, 25 bp, Homo sapien
tcaaagcggagccgggagtttttgc

SEQ ID NO: 343454 - DNA, 25 bp, Homo sapien
cggagccgggagtttttgctacagt

SEQ ID NO: 343455 - DNA, 25 bp, Homo sapien
caaagcggagccgggagtttttgct

SEQ ID NO: 343456 - DNA, 25 bp, Homo sapien
gcggagccgggagtttttgctacag

SEQ ID NO: 343457 - DNA, 25 bp, Homo sapien
gcaaaaactcccggctccgctttga

SEQ ID NO: 343458 - DNA, 25 bp, Homo sapien
tgtagcaaaaactcccggctccgct

SEQ ID NO: 343459 - DNA, 25 bp, Homo sapien
ctgtagcaaaaactcccggctccgc

SEQ ID NO: 343460 - DNA, 25 bp, Homo sapien
aaactcccggctccgctttgaagag

SEQ ID NO: 343461 - DNA, 25 bp, Homo sapien
agcaaaaactcccggctccgctttg

SEQ ID NO: 343462 - DNA, 25 bp, Homo sapien
actgtagcaaaaactcccggctccg

SEQ ID NO: 343463 - DNA, 25 bp, Homo sapien
gtgctctgagaagccggactacgcg

SEQ ID NO: 343464 - DNA, 25 bp, Homo sapien
gcggtgctctgagaagccggactac

SEQ ID NO: 343465 - DNA, 25 bp, Homo sapien
cggtgctctgagaagccggactacg

SEQ ID NO: 343466 - DNA, 25 bp, Homo sapien
ggtgctctgagaagccggactacgc

SEQ ID NO: 343467 - DNA, 25 bp, Homo sapien
tctgagaagccggactacgcggcag

SEQ ID NO: 343468 - DNA, 25 bp, Homo sapien
tgctctgagaagccggactacgcgg

SEQ ID NO: 343469 - DNA, 25 bp, Homo sapien
gcgtagtccggcttctcagagcacc

SEQ ID NO: 343470 - DNA, 25 bp, Homo sapien
ccgcgtagtccggcttctcagagca

SEQ ID NO: 343471 - DNA, 25 bp, Homo sapien
cgtagtccggcttctcagagcaccg

SEQ ID NO: 343472 - DNA, 25 bp, Homo sapien
ctgccgcgtagtccggcttctcaga

SEQ ID NO: 343473 - DNA, 25 bp, Homo sapien
gtagtccggcttctcagagcaccgc

SEQ ID NO: 343474 - DNA, 25 bp, Homo sapien
cgcgtagtccggcttctcagagcac

SEQ ID NO: 343475 - DNA, 25 bp, Homo sapien
tcacaagggctttacaattccagtg

SEQ ID NO: 343476 - DNA, 25 bp, Homo sapien
tacagacttagagttgcttacccac

SEQ ID NO: 343477 - DNA, 25 bp, Homo sapien
tacccacctggtcagaagtacatgc

SEQ ID NO: 343478 - DNA, 25 bp, Homo sapien
cactagagggcctaagggatttcca

SEQ ID NO: 343479 - DNA, 25 bp, Homo sapien
ccactgtctgcttatcaggttcaga

SEQ ID NO: 343480 - DNA, 25 bp, Homo sapien
cactgtctgcttatcaggttcagac

SEQ ID NO: 343481 - DNA, 25 bp, Homo sapien
ctccactgtctgcttatcaggttca

SEQ ID NO: 343482 - DNA, 25 bp, Homo sapien
tcaggtcggtggaaatcaaaaggaa

SEQ ID NO: 343483 - DNA, 25 bp, Homo sapien
ggatgtttcatacttcaggtcggtg

SEQ ID NO: 343484 - DNA, 25 bp, Homo sapien
catacgtggaaacttggctgctgct

SEQ ID NO: 343485 - DNA, 25 bp, Homo sapien
cttcccatacgtggaaacttggctg

SEQ ID NO: 343486 - DNA, 25 bp, Homo sapien
aaagaaatgggtcagttaagaggtg

SEQ ID NO: 343487 - DNA, 25 bp, Homo sapien
aagaaatgggtcagttaagaggtga

SEQ ID NO: 343488 - DNA, 25 bp, Homo sapien
agaaatgggtcagttaagaggtgag

SEQ ID NO: 343489 - DNA, 25 bp, Homo sapien
ggacagaggaaatccttgctgcaat

SEQ ID NO: 343490 - DNA, 25 bp, Homo sapien
agaatttgtgtggattggacagagg

SEQ ID NO: 343491 - DNA, 25 bp, Homo sapien
gaattgacgaataagaatttgtgtg

SEQ ID NO: 343492 - DNA, 25 bp, Homo sapien
acagaggaaatccttgctgcaattt

SEQ ID NO: 343493 - DNA, 25 bp, Homo sapien
gccagtgggaggactccaaagtgaa

SEQ ID NO: 343494 - DNA, 25 bp, Homo sapien
aagtgaagaatggacgatagaatat

SEQ ID NO: 343495 - DNA, 25 bp, Homo sapien
cagtgggaggactccaaagtgaaga

SEQ ID NO: 343496 - DNA, 25 bp, Homo sapien
gacgatagaatattttcaaacctca

SEQ ID NO: 343497 - DNA, 25 bp, Homo sapien
gctgcgattggactctggcaaagca

SEQ ID NO: 343498 - DNA, 25 bp, Homo sapien
ctcaatgttgctgcgattggactct

SEQ ID NO: 343499 - DNA, 25 bp, Homo sapien
gttgctgcgattggactctggcaaa

SEQ ID NO: 343500 - DNA, 25 bp, Homo sapien
aatgttgctgcgattggactctggc

SEQ ID NO: 343501 - DNA, 25 bp, Homo sapien
agagcaccagaagtctgcccagcgg

SEQ ID NO: 343502 - DNA, 25 bp, Homo sapien
cagcggagaatttccaggagactgc

SEQ ID NO: 343503 - DNA, 25 bp, Homo sapien
gagactgctgggcaacagacaacaa

SEQ ID NO: 343504 - DNA, 25 bp, Homo sapien
caagccagaggtcctaatttcaggg

SEQ ID NO: 343505 - DNA, 25 bp, Homo sapien
tcccaaaataaccaggccaacactg

SEQ ID NO: 343506 - DNA, 25 bp, Homo sapien
ttgtcccaaaataaccaggccaaca

SEQ ID NO: 343507 - DNA, 25 bp, Homo sapien
tgtcccaaaataaccaggccaacac

SEQ ID NO: 343508 - DNA, 25 bp, Homo sapien
agggctgggacaagatgtagatctc

SEQ ID NO: 343509 - DNA, 25 bp, Homo sapien
ggctctgtggccatgatcctcacca

SEQ ID NO: 343510 - DNA, 25 bp, Homo sapien
agttcttgggttgggtgagcatcat

SEQ ID NO: 343511 - DNA, 25 bp, Homo sapien
aacgatggtttcaactgtggagttc

SEQ ID NO: 343512 - DNA, 25 bp, Homo sapien
tgagagttttgaacaaaatggttgg

SEQ ID NO: 343513 - DNA, 25 bp, Homo sapien
gagagttttgaacaaaatggttgga

SEQ ID NO: 343514 - DNA, 25 bp, Homo sapien
aatgagcaaaggacgcagatttaaa

SEQ ID NO: 343515 - DNA, 25 bp, Homo sapien
atgagcaaaggacgcagatttaaag

SEQ ID NO: 343516 - DNA, 25 bp, Homo sapien
aaatgagcaaaggacgcagatttaa

SEQ ID NO: 343517 - DNA, 25 bp, Homo sapien
gcgattccaatgtagagcatggagt

SEQ ID NO: 343518 - DNA, 25 bp, Homo sapien
gtgaggttttccagtgggtagaata

SEQ ID NO: 343519 - DNA, 25 bp, Homo sapien
ttccaatgtagagcatggagttgct

SEQ ID NO: 343520 - DNA, 25 bp, Homo sapien
tcggcgattccaatgtagagcatgg

SEQ ID NO: 343521 - DNA, 25 bp, Homo sapien
cagcagagtgtagttgtcaatcttg

SEQ ID NO: 343522 - DNA, 25 bp, Homo sapien
cagagtgtagttgtcaatcttggtt

SEQ ID NO: 343523 - DNA, 25 bp, Homo sapien
tggagaactgattagggagtaatcc

SEQ ID NO: 343524 - DNA, 25 bp, Homo sapien
tagggagtaatccagcagagtgtag

SEQ ID NO: 343525 - DNA, 25 bp, Homo sapien
taaaggcatagtataatatatgaat

SEQ ID NO: 343526 - DNA, 25 bp, Homo sapien
ttaaaggcatagtataatatatgaa

SEQ ID NO: 343527 - DNA, 25 bp, Homo sapien
cttcacttgcaataatgggacagag

SEQ ID NO: 343528 - DNA, 25 bp, Homo sapien
gcatttagcgctttgacttcacttg

SEQ ID NO: 343529 - DNA, 25 bp, Homo sapien
agcgctttgacttcacttgcaataa

SEQ ID NO: 343530 - DNA, 25 bp, Homo sapien
gaggttggcatttagcgctttgact

SEQ ID NO: 343531 - DNA, 25 bp, Homo sapien
tgctggagctgctgtatctttcctg

SEQ ID NO: 343532 - DNA, 25 bp, Homo sapien
gagctgctgtatctttcctgactgc

SEQ ID NO: 343533 - DNA, 25 bp, Homo sapien
ctggagctgctgtatctttcctgac

SEQ ID NO: 343534 - DNA, 25 bp, Homo sapien
gctgggggtgccgccagcttgccat

SEQ ID NO: 343535 - DNA, 25 bp, Homo sapien
catttcatttaagttctttaaaatg

SEQ ID NO: 343536 - DNA, 25 bp, Homo sapien
ggctcagcaaaggagttatacagaa

SEQ ID NO: 343537 - DNA, 25 bp, Homo sapien
gctcagcaaaggagttatacagaac

SEQ ID NO: 343538 - DNA, 25 bp, Homo sapien
gggctcagcaaaggagttatacaga

SEQ ID NO: 343539 - DNA, 25 bp, Homo sapien
ctcagcaaaggagttatacagaaca

SEQ ID NO: 343540 - DNA, 25 bp, Homo sapien
taatgataccggtaaagtagactcc

SEQ ID NO: 343541 - DNA, 25 bp, Homo sapien
ttctccggaaaatgagacgtgggca

SEQ ID NO: 343542 - DNA, 25 bp, Homo sapien
gcaatcttggagcttcagggtagga

SEQ ID NO: 343543 - DNA, 25 bp, Homo sapien
gactccggagagaaacagatcagcc

SEQ ID NO: 343544 - DNA, 25 bp, Homo sapien
tggagactcgaacccccagtctgtg

SEQ ID NO: 343545 - DNA, 25 bp, Homo sapien
tgctgatgttggcagtgccatggtt

SEQ ID NO: 343546 - DNA, 25 bp, Homo sapien
ccatggttggttagcgctttgattc

SEQ ID NO: 343547 - DNA, 25 bp, Homo sapien
tttgattcccactccaggcacaaaa

SEQ ID NO: 343548 - DNA, 25 bp, Homo sapien
ccagaaacaagaagttagggcgact

SEQ ID NO: 343549 - DNA, 25 bp, Homo sapien
cagaaacaagaagttagggcgactc

SEQ ID NO: 343550 - DNA, 25 bp, Homo sapien
gaagttagggcgactcttccagcac

SEQ ID NO: 343551 - DNA, 25 bp, Homo sapien
gttagggcgactcttccagcacatc

SEQ ID NO: 343552 - DNA, 25 bp, Homo sapien
gcttcttataagaggcaaaatgctc

SEQ ID NO: 343553 - DNA, 25 bp, Homo sapien
ttcttataagaggcaaaatgctctt

SEQ ID NO: 343554 - DNA, 25 bp, Homo sapien
cttcttataagaggcaaaatgctct

SEQ ID NO: 343555 - DNA, 25 bp, Homo sapien
ttcaagagactcagaaccgcttaaa

SEQ ID NO: 343556 - DNA, 25 bp, Homo sapien
tcaagagactcagaaccgcttaaat

SEQ ID NO: 343557 - DNA, 25 bp, Homo sapien
cttttagcatttgctcaatcatctt

SEQ ID NO: 343558 - DNA, 25 bp, Homo sapien
ttttagcatttgctcaatcatcttc

SEQ ID NO: 343559 - DNA, 25 bp, Homo sapien
gatgagacatagagattccacagga

SEQ ID NO: 343560 - DNA, 25 bp, Homo sapien
atccttgccttgattccagggtaaa

SEQ ID NO: 343561 - DNA, 25 bp, Homo sapien
agtgccctctgagtaatccttgcct

SEQ ID NO: 343562 - DNA, 25 bp, Homo sapien
tgagaggatgagacatagagattcc

SEQ ID NO: 343563 - DNA, 25 bp, Homo sapien
tttcttgatcctttagttgcccttg

SEQ ID NO: 343564 - DNA, 25 bp, Homo sapien
gcccttggaggttagtcaaggtgtc

SEQ ID NO: 343565 - DNA, 25 bp, Homo sapien
ctgcaggagctagatccagctgatc

SEQ ID NO: 343566 - DNA, 25 bp, Homo sapien
caggagctagatccagctgatcttc

SEQ ID NO: 343567 - DNA, 25 bp, Homo sapien
ggagatcatggctggcagagacctg

SEQ ID NO: 343568 - DNA, 25 bp, Homo sapien
gagatcatggctggcagagacctga

SEQ ID NO: 343569 - DNA, 25 bp, Homo sapien
agatcatggctggcagagacctgaa

SEQ ID NO: 343570 - DNA, 25 bp, Homo sapien
tccaccttgcgccttaaactcagct

SEQ ID NO: 343571 - DNA, 25 bp, Homo sapien
agctggagagcaccttcgattctct

SEQ ID NO: 343572 - DNA, 25 bp, Homo sapien
ccaaagctggagagcaccttcgatt

SEQ ID NO: 343573 - DNA, 25 bp, Homo sapien
ttgaagctgatgtgttctccacctt

SEQ ID NO: 343574 - DNA, 25 bp, Homo sapien
tggaacggatggaaagctcatgtga

SEQ ID NO: 343575 - DNA, 25 bp, Homo sapien
aacaaacggagaggcccgaaggctg

SEQ ID NO: 343576 - DNA, 25 bp, Homo sapien
atggaaagctcatgtgaatagagaa

SEQ ID NO: 343577 - DNA, 25 bp, Homo sapien
aggcccgaaggctgcaatgaagttg

SEQ ID NO: 343578 - DNA, 25 bp, Homo sapien
gatgacattccagcgcctaatatac

SEQ ID NO: 343579 - DNA, 25 bp, Homo sapien
tgaactacaaggatcccctcactgg

SEQ ID NO: 343580 - DNA, 25 bp, Homo sapien
catccacagattcagagcattcttc

SEQ ID NO: 343581 - DNA, 25 bp, Homo sapien
tcttcactccagaataatgagcaac

SEQ ID NO: 343582 - DNA, 25 bp, Homo sapien
gaccttgtatcaatcagctgactgt

SEQ ID NO: 343583 - DNA, 25 bp, Homo sapien
ggcaagtgccacattcattagagac

SEQ ID NO: 343584 - DNA, 25 bp, Homo sapien
gataatgcgcatatggcagagggca

SEQ ID NO: 343585 - DNA, 25 bp, Homo sapien
gggcacaggtttctatccctcagaa

SEQ ID NO: 343586 - DNA, 25 bp, Homo sapien
tgcgcccgaccgagttgaacattta

SEQ ID NO: 343587 - DNA, 25 bp, Homo sapien
cgtcaaggaccagtttttgcccctg

SEQ ID NO: 343588 - DNA, 25 bp, Homo sapien
aatgtcagactaggccagagtttct

SEQ ID NO: 343589 - DNA, 25 bp, Homo sapien
tatgtactgtgaccctttgaaggat

SEQ ID NO: 343590 - DNA, 25 bp, Homo sapien
taagcttcatatacctgtgcctgtg

SEQ ID NO: 343591 - DNA, 25 bp, Homo sapien
tatctgacgtagaaacgagctggca

SEQ ID NO: 343592 - DNA, 25 bp, Homo sapien
cattggaactgaaactacggatctt

SEQ ID NO: 343593 - DNA, 25 bp, Homo sapien
gaactgctttcatggttgagaccaa

SEQ ID NO: 343594 - DNA, 25 bp, Homo sapien
aatccacaatatgtctgaggtgtgc

SEQ ID NO: 343595 - DNA, 25 bp, Homo sapien
attagaactaaagggaaacatccag

SEQ ID NO: 343596 - DNA, 25 bp, Homo sapien
gcattggtttgggactaaatccaca

SEQ ID NO: 343597 - DNA, 25 bp, Homo sapien
tgaggtgtgcctatagatctttact

SEQ ID NO: 343598 - DNA, 25 bp, Homo sapien
tgagaccacgctttgatccagttgg

SEQ ID NO: 343599 - DNA, 25 bp, Homo sapien
gagagttgcactcccagaaaccttt

SEQ ID NO: 343600 - DNA, 25 bp, Homo sapien
tgatggccggctgtcattcatgtga

SEQ ID NO: 343601 - DNA, 25 bp, Homo sapien
cagatttccctttagacccagcagg

SEQ ID NO: 343602 - DNA, 25 bp, Homo sapien
ggccatttggtattagggactcctg

SEQ ID NO: 343603 - DNA, 25 bp, Homo sapien
agcagcgctctgtcttctaataaag

SEQ ID NO: 343604 - DNA, 25 bp, Homo sapien
tgaagcaatgctgttgaaaggccat

SEQ ID NO: 343605 - DNA, 25 bp, Homo sapien
tatcagagaacatagcataggcaga

SEQ ID NO: 343606 - DNA, 25 bp, Homo sapien
caagagagtttagagtgccacagca

SEQ ID NO: 343607 - DNA, 25 bp, Homo sapien
ttagtttaggatatcagcagtggcc

SEQ ID NO: 343608 - DNA, 25 bp, Homo sapien
gcttaaatgtcactcctggccgggc

SEQ ID NO: 343609 - DNA, 25 bp, Homo sapien
tgccatatgcatgagcagtgctcct

SEQ ID NO: 343610 - DNA, 25 bp, Homo sapien
taatgagcttaacccgtgactaacc

SEQ ID NO: 343611 - DNA, 25 bp, Homo sapien
tacaaggtctaagtgtccacagctc

SEQ ID NO: 343612 - DNA, 25 bp, Homo sapien
cgtccatggaaacgggagcctctgt

SEQ ID NO: 343613 - DNA, 25 bp, Homo sapien
gctctagactcagtgaaagaccgtg

SEQ ID NO: 343614 - DNA, 25 bp, Homo sapien
gaggctgtgctgtttggaactctgc

SEQ ID NO: 343615 - DNA, 25 bp, Homo sapien
ggctgtgctgtttggaactctgctg

SEQ ID NO: 343616 - DNA, 25 bp, Homo sapien
aggctgtgctgtttggaactctgct

SEQ ID NO: 343617 - DNA, 25 bp, Homo sapien
tctgtggctggtagagctgtccgct

SEQ ID NO: 343618 - DNA, 25 bp, Homo sapien
cattttatcgcgctgacgggaggaa

SEQ ID NO: 343619 - DNA, 25 bp, Homo sapien
catagttttctaggagggctgagct

SEQ ID NO: 343620 - DNA, 25 bp, Homo sapien
tagcttgccagatgagaacttccag

SEQ ID NO: 343621 - DNA, 25 bp, Homo sapien
gattgttgaagagggacgattgcca

SEQ ID NO: 343622 - DNA, 25 bp, Homo sapien
tgacaaagatgcaggttctgggtcc

SEQ ID NO: 343623 - DNA, 25 bp, Homo sapien
cacaggttgagaaactttgtccagc

SEQ ID NO: 343624 - DNA, 25 bp, Homo sapien
ttgtaactagctctgcccatggccg

SEQ ID NO: 343625 - DNA, 25 bp, Homo sapien
gaagcaaagttctaccggattataa

SEQ ID NO: 343626 - DNA, 25 bp, Homo sapien
taaaaggtacccacatctgatattt

SEQ ID NO: 343627 - DNA, 25 bp, Homo sapien
tattttgaatttcacctcccgtctc

SEQ ID NO: 343628 - DNA, 25 bp, Homo sapien
tctcttttccctatgccccacttgg

SEQ ID NO: 343629 - DNA, 25 bp, Homo sapien
ggaacagaatgggtacaggagccct

SEQ ID NO: 343630 - DNA, 25 bp, Homo sapien
gataatcggttcctgggtcaaaggc

SEQ ID NO: 343631 - DNA, 25 bp, Homo sapien
gaatgtgaaaactagccactcgcag

SEQ ID NO: 343632 - DNA, 25 bp, Homo sapien
tcttgagcgtggatggaactagcgt

SEQ ID NO: 343633 - DNA, 25 bp, Homo sapien
cctcaggttgcggatggtttcagcc

SEQ ID NO: 343634 - DNA, 25 bp, Homo sapien
agccttggcctcgtcttcacttggg

SEQ ID NO: 343635 - DNA, 25 bp, Homo sapien
ttcacttggggtcccacgctgggag

SEQ ID NO: 343636 - DNA, 25 bp, Homo sapien
tgggaggtgtcggatgtgctgaggc

SEQ ID NO: 343637 - DNA, 25 bp, Homo sapien
cagcctgtagcaactgcttgctgag

SEQ ID NO: 343638 - DNA, 25 bp, Homo sapien
gctgagcacttcccctgtgctaggg

SEQ ID NO: 343639 - DNA, 25 bp, Homo sapien
tgagtgcttcctaaatgccagcctg

SEQ ID NO: 343640 - DNA, 25 bp, Homo sapien
aagacgaatatgattcaggccctgc

SEQ ID NO: 343641 - DNA, 25 bp, Homo sapien
tgctgggaggtactacggccctgca

SEQ ID NO: 343642 - DNA, 25 bp, Homo sapien
ggtgctggcttcttggactcttcac

SEQ ID NO: 343643 - DNA, 25 bp, Homo sapien
tcaccctgctgggaggtactacggc

SEQ ID NO: 343644 - DNA, 25 bp, Homo sapien
tgggaggtactacggccctgcacag

SEQ ID NO: 343645 - DNA, 25 bp, Homo sapien
ggagagcctggtgacctttgctgct

SEQ ID NO: 343646 - DNA, 25 bp, Homo sapien
tgcccgggatagctgcggagagcct

SEQ ID NO: 343647 - DNA, 25 bp, Homo sapien
ctgcggagagcctggtgacctttgc

SEQ ID NO: 343648 - DNA, 25 bp, Homo sapien
ggatagctgcggagagcctggtgac

SEQ ID NO: 343649 - DNA, 25 bp, Homo sapien
tcaggggctgctggccttgtgggga

SEQ ID NO: 343650 - DNA, 25 bp, Homo sapien
gggctgctggccttgtggggagagc

SEQ ID NO: 343651 - DNA, 25 bp, Homo sapien
aggggctgctggccttgtggggaga

SEQ ID NO: 343652 - DNA, 25 bp, Homo sapien
gctgctggccttgtggggagagcct

SEQ ID NO: 343653 - DNA, 25 bp, Homo sapien
ctgaggagactgagcttggcgaggg

SEQ ID NO: 343654 - DNA, 25 bp, Homo sapien
tgttgggaggggcttccagatctct

SEQ ID NO: 343655 - DNA, 25 bp, Homo sapien
ctgttgggaggggcttccagatctc

SEQ ID NO: 343656 - DNA, 25 bp, Homo sapien
ggagactgagcttggcgagggcctc

SEQ ID NO: 343657 - DNA, 25 bp, Homo sapien
tcacttgacctagagaggtcagtag

SEQ ID NO: 343658 - DNA, 25 bp, Homo sapien
tagggaagataccattcttctcacc

SEQ ID NO: 343659 - DNA, 25 bp, Homo sapien
gggcacacaggcttccacaagcaag

SEQ ID NO: 343660 - DNA, 25 bp, Homo sapien
gggatgttgtagccacccagaaatg

SEQ ID NO: 343661 - DNA, 25 bp, Homo sapien
aaataatatctctttatcaagcatg

SEQ ID NO: 343662 - DNA, 25 bp, Homo sapien
taatatctctttatcaagcatgttt

SEQ ID NO: 343663 - DNA, 25 bp, Homo sapien
aataatatctctttatcaagcatgt

SEQ ID NO: 343664 - DNA, 25 bp, Homo sapien
aatatctctttatcaagcatgtttt

SEQ ID NO: 343665 - DNA, 25 bp, Homo sapien
ctgggcttgccctggggatttcgct

SEQ ID NO: 343666 - DNA, 25 bp, Homo sapien
tgccctggggatttcgctgatttaa

SEQ ID NO: 343667 - DNA, 25 bp, Homo sapien
atttcgctgatttaatctgtggagc

SEQ ID NO: 343668 - DNA, 25 bp, Homo sapien
gggatttcgctgatttaatctgtgg

SEQ ID NO: 343669 - DNA, 25 bp, Homo sapien
tttttctggtgtcccctggactcac

SEQ ID NO: 343670 - DNA, 25 bp, Homo sapien
gtgagtccaggggacaccagaaaaa

SEQ ID NO: 343671 - DNA, 25 bp, Homo sapien
tttggagacaacaaggtcggccatc

SEQ ID NO: 343672 - DNA, 25 bp, Homo sapien
caatcagcggcattgagctgtccat

SEQ ID NO: 343673 - DNA, 25 bp, Homo sapien
catgctctccaatcagcggcattga

SEQ ID NO: 343674 - DNA, 25 bp, Homo sapien
tcctggcatcgggagctggctcatt

SEQ ID NO: 343675 - DNA, 25 bp, Homo sapien
gaggaagggagagctgagggacccc

SEQ ID NO: 343676 - DNA, 25 bp, Homo sapien
cccccatgccaggagagatggcggt

SEQ ID NO: 343677 - DNA, 25 bp, Homo sapien
ccccatgccaggagagatggcggtt

SEQ ID NO: 343678 - DNA, 25 bp, Homo sapien
ggagagctgagggacccccatgcca

SEQ ID NO: 343679 - DNA, 25 bp, Homo sapien
tgtcaccccttgcttactatgtctc

SEQ ID NO: 343680 - DNA, 25 bp, Homo sapien
gcactgtcaccccttgcttactatg

SEQ ID NO: 343681 - DNA, 25 bp, Homo sapien
ggtttcacacgggacagcttatcca

SEQ ID NO: 343682 - DNA, 25 bp, Homo sapien
ggacagcttatccacggcactgtca

SEQ ID NO: 343683 - DNA, 25 bp, Homo sapien
ttgtactgtgtccacctggcttggg

SEQ ID NO: 343684 - DNA, 25 bp, Homo sapien
gctgagacccggagaggtaggggct

SEQ ID NO: 343685 - DNA, 25 bp, Homo sapien
tgaaagctgagacccggagaggtag

SEQ ID NO: 343686 - DNA, 25 bp, Homo sapien
agttgtactgtgtccacctggcttg

SEQ ID NO: 343687 - DNA, 25 bp, Homo sapien
aaggcctgggtgtgaacaccctcct

SEQ ID NO: 343688 - DNA, 25 bp, Homo sapien
tccaaggcctgggtgtgaacaccct

SEQ ID NO: 343689 - DNA, 25 bp, Homo sapien
tgaacaccctcctggcatgactggg

SEQ ID NO: 343690 - DNA, 25 bp, Homo sapien
tgggtgtgaacaccctcctggcatg

SEQ ID NO: 343691 - DNA, 25 bp, Homo sapien
aaggagggggctggacgcggcactg

SEQ ID NO: 343692 - DNA, 25 bp, Homo sapien
gtgtcctggccttgtgtcagcaccg

SEQ ID NO: 343693 - DNA, 25 bp, Homo sapien
cttgtgtcagcaccgcccatggaag

SEQ ID NO: 343694 - DNA, 25 bp, Homo sapien
gagggggctggacgcggcactggag

SEQ ID NO: 343695 - DNA, 25 bp, Homo sapien
aggccgccaaacatttccgagcagc

SEQ ID NO: 343696 - DNA, 25 bp, Homo sapien
agaagatggccacgactgtcccgtg

SEQ ID NO: 343697 - DNA, 25 bp, Homo sapien
agagaagatggccacgactgtcccg

SEQ ID NO: 343698 - DNA, 25 bp, Homo sapien
ccatagagaagatggccacgactgt

SEQ ID NO: 343699 - DNA, 25 bp, Homo sapien
ttccggaagggccatagagaagatg

SEQ ID NO: 343700 - DNA, 25 bp, Homo sapien
agcctgtgttggccttccagttccc

SEQ ID NO: 343701 - DNA, 25 bp, Homo sapien
tggcagagcctgtgttggccttcca

SEQ ID NO: 343702 - DNA, 25 bp, Homo sapien
gcctgtgttggccttccagttccca

SEQ ID NO: 343703 - DNA, 25 bp, Homo sapien
gagcctgtgttggccttccagttcc

SEQ ID NO: 343704 - DNA, 25 bp, Homo sapien
tacttggagtcgatgaaggcctcgg

SEQ ID NO: 343705 - DNA, 25 bp, Homo sapien
cgaccacgctggtgatgtcctggaa

SEQ ID NO: 343706 - DNA, 25 bp, Homo sapien
caattttctggatgcggatgtcgta

SEQ ID NO: 343707 - DNA, 25 bp, Homo sapien
taggttttggccatggcgaccacgc

SEQ ID NO: 343708 - DNA, 25 bp, Homo sapien
cggaagtgtctagctgtccacagca

SEQ ID NO: 343709 - DNA, 25 bp, Homo sapien
cagagtgggctacctcggaagtgtc

SEQ ID NO: 343710 - DNA, 25 bp, Homo sapien
ggcaccttggtttcctagacagccc

SEQ ID NO: 343711 - DNA, 25 bp, Homo sapien
tccttggtggccttggaaagaacca

SEQ ID NO: 343712 - DNA, 25 bp, Homo sapien
cagggagcttactatcaggcagggc

SEQ ID NO: 343713 - DNA, 25 bp, Homo sapien
gcttgaatatctccaatagcaggga

SEQ ID NO: 343714 - DNA, 25 bp, Homo sapien
ccaacccgggatgggaaagtcatct

SEQ ID NO: 343715 - DNA, 25 bp, Homo sapien
gaatggccctcgttattctatggag

SEQ ID NO: 343716 - DNA, 25 bp, Homo sapien
gtagctgagactacaggcatgtgcc

SEQ ID NO: 343717 - DNA, 25 bp, Homo sapien
tagcttcaacctcctgggctcaagc

SEQ ID NO: 343718 - DNA, 25 bp, Homo sapien
caatcctcctgccgcagcctcccca

SEQ ID NO: 343719 - DNA, 25 bp, Homo sapien
gatcatggcttactgtagcttcaac

SEQ ID NO: 343720 - DNA, 25 bp, Homo sapien
gcgatatgtaacaaatgtaagcctc

SEQ ID NO: 343721 - DNA, 25 bp, Homo sapien
tcctatagaggacactgcgatatgt

SEQ ID NO: 343722 - DNA, 25 bp, Homo sapien
taacatgattcagtctccctaagag

SEQ ID NO: 343723 - DNA, 25 bp, Homo sapien
ttatgtctggatatagatgtggccc

SEQ ID NO: 343724 - DNA, 25 bp, Homo sapien
ggacaggcaaggctgttagaatctt

SEQ ID NO: 343725 - DNA, 25 bp, Homo sapien
gacaggcaaggctgttagaatcttc

SEQ ID NO: 343726 - DNA, 25 bp, Homo sapien
gggacaggcaaggctgttagaatct

SEQ ID NO: 343727 - DNA, 25 bp, Homo sapien
gaggaagtcactctgttttggtggt

SEQ ID NO: 343728 - DNA, 25 bp, Homo sapien
agaggaagtcactctgttttggtgg

SEQ ID NO: 343729 - DNA, 25 bp, Homo sapien
ggaagtcactctgttttggtggtac

SEQ ID NO: 343730 - DNA, 25 bp, Homo sapien
aagtcactctgttttggtggtacaa

SEQ ID NO: 343731 - DNA, 25 bp, Homo sapien
gtaacaaacccattgtctgcatcat

SEQ ID NO: 343732 - DNA, 25 bp, Homo sapien
aatgtaacaaacccattgtctgcat

SEQ ID NO: 343733 - DNA, 25 bp, Homo sapien
taacaaacccattgtctgcatcatc

SEQ ID NO: 343734 - DNA, 25 bp, Homo sapien
tgtaacaaacccattgtctgcatca

SEQ ID NO: 343735 - DNA, 25 bp, Homo sapien
cgtgtgcaagatgctggcgctgctg

SEQ ID NO: 343736 - DNA, 25 bp, Homo sapien
taagccagcgtgtgcaagatgctgg

SEQ ID NO: 343737 - DNA, 25 bp, Homo sapien
tggaaacatcgcctggaggagcggc

SEQ ID NO: 343738 - DNA, 25 bp, Homo sapien
tctcatcacccggaacagacagggg

SEQ ID NO: 343739 - DNA, 25 bp, Homo sapien
gtaagacatgggcttacaacatggc

SEQ ID NO: 343740 - DNA, 25 bp, Homo sapien
cctttcgccttctgacacagttgaa

SEQ ID NO: 343741 - DNA, 25 bp, Homo sapien
gacatgggcttacaacatggctgtg

SEQ ID NO: 343742 - DNA, 25 bp, Homo sapien
ctgtggagccacagccattaaacct

SEQ ID NO: 343743 - DNA, 25 bp, Homo sapien
tggagagatgttctgtgcaccagga

SEQ ID NO: 343744 - DNA, 25 bp, Homo sapien
tagttagcaattccaggtaggattt

SEQ ID NO: 343745 - DNA, 25 bp, Homo sapien
catagagaatgattagttagcaatt

SEQ ID NO: 343746 - DNA, 25 bp, Homo sapien
caattccaggtaggatttggcaagg

SEQ ID NO: 343747 - DNA, 25 bp, Homo sapien
ccagcgtgggcatgtcccagcttga

SEQ ID NO: 343748 - DNA, 25 bp, Homo sapien
tgggcatgtcccagcttgactacca

SEQ ID NO: 343749 - DNA, 25 bp, Homo sapien
gcttgactaccaccgggaagtgtgg

SEQ ID NO: 343750 - DNA, 25 bp, Homo sapien
ctttcccattccagcgtgggcatgt

SEQ ID NO: 343751 - DNA, 25 bp, Homo sapien
tctacccctttgcaacatgccagcc

SEQ ID NO: 343752 - DNA, 25 bp, Homo sapien
caaacacagacaggtcacagaggac

SEQ ID NO: 343753 - DNA, 25 bp, Homo sapien
cccacttcccaagctgttcaaatgg

SEQ ID NO: 343754 - DNA, 25 bp, Homo sapien
aatgggtgtcgaaggccattcccac

SEQ ID NO: 343755 - DNA, 25 bp, Homo sapien
gggcatccaggtacgacagggacag

SEQ ID NO: 343756 - DNA, 25 bp, Homo sapien
aggtacgacagggacagcttctcag

SEQ ID NO: 343757 - DNA, 25 bp, Homo sapien
agggcatccaggtacgacagggaca

SEQ ID NO: 343758 - DNA, 25 bp, Homo sapien
caggtacgacagggacagcttctca

SEQ ID NO: 343759 - DNA, 25 bp, Homo sapien
ggccacttgtgttaaatgatggtac

SEQ ID NO: 343760 - DNA, 25 bp, Homo sapien
ttgctgggccacttgtgttaaatga

SEQ ID NO: 343761 - DNA, 25 bp, Homo sapien
tgtgttaaatgatggtactgcagct

SEQ ID NO: 343762 - DNA, 25 bp, Homo sapien
atgatggtactgcagctttaggagg

SEQ ID NO: 343763 - DNA, 25 bp, Homo sapien
tctatcaaactcttgaaagacagaa

SEQ ID NO: 343764 - DNA, 25 bp, Homo sapien
ctctatcaaactcttgaaagacaga

SEQ ID NO: 343765 - DNA, 25 bp, Homo sapien
ggctgaatttggggccattagtgaa

SEQ ID NO: 343766 - DNA, 25 bp, Homo sapien
gaatttggggccattagtgaagccc

SEQ ID NO: 343767 - DNA, 25 bp, Homo sapien
ggggccattagtgaagcccagggct

SEQ ID NO: 343768 - DNA, 25 bp, Homo sapien
tggggccattagtgaagcccagggc

SEQ ID NO: 343769 - DNA, 25 bp, Homo sapien
ccgagtccggttattgcttttctga

SEQ ID NO: 343770 - DNA, 25 bp, Homo sapien
ggacagtgacatcatcgctccctcc

SEQ ID NO: 343771 - DNA, 25 bp, Homo sapien
aactgtttggacttctgccttgaaa

SEQ ID NO: 343772 - DNA, 25 bp, Homo sapien
cctcttccgagtccggttattgctt

SEQ ID NO: 343773 - DNA, 25 bp, Homo sapien
tgcaccacacccatggataaagatt

SEQ ID NO: 343774 - DNA, 25 bp, Homo sapien
aaagatttcggcgatgactccagga

SEQ ID NO: 343775 - DNA, 25 bp, Homo sapien
gcctttggtcgctgggcacctgctg

SEQ ID NO: 343776 - DNA, 25 bp, Homo sapien
gtactctgattgttggtgccctgca

SEQ ID NO: 343777 - DNA, 25 bp, Homo sapien
caatgttgacgccatgtgaggattc

SEQ ID NO: 343778 - DNA, 25 bp, Homo sapien
caacagataaagatatcgataaccg

SEQ ID NO: 343779 - DNA, 25 bp, Homo sapien
agatatcgataaccgtaagtcaagg

SEQ ID NO: 343780 - DNA, 25 bp, Homo sapien
tgtgaggattcaagcaagagcaaga

SEQ ID NO: 343781 - DNA, 25 bp, Homo sapien
tggggggtggcagtgcggcgggcgg

SEQ ID NO: 343782 - DNA, 25 bp, Homo sapien
gtcgttgtgtaagtggggggtggca

SEQ ID NO: 343783 - DNA, 25 bp, Homo sapien
ggcagtgcggcgggcgggtaacttc

SEQ ID NO: 343784 - DNA, 25 bp, Homo sapien
gggtggcagtgcggcgggcgggtaa

SEQ ID NO: 343785 - DNA, 25 bp, Homo sapien
caaatctttagttacaagctggaag

SEQ ID NO: 343786 - DNA, 25 bp, Homo sapien
tgtaagctgtgctggccgctggtca

SEQ ID NO: 343787 - DNA, 25 bp, Homo sapien
agatgccgggctgttccccctgtaa

SEQ ID NO: 343788 - DNA, 25 bp, Homo sapien
ttagttacaagctggaagatgccgg

SEQ ID NO: 343789 - DNA, 25 bp, Homo sapien
ctttgaatcctgatggtgcccttga

SEQ ID NO: 343790 - DNA, 25 bp, Homo sapien
gctctttgaatcctgatggtgccct

SEQ ID NO: 343791 - DNA, 25 bp, Homo sapien
ttcaaagctctttgaatcctgatgg

SEQ ID NO: 343792 - DNA, 25 bp, Homo sapien
agctcccagtataagtcacctcctt

SEQ ID NO: 343793 - DNA, 25 bp, Homo sapien
gagaggccacatagtggggtggtta

SEQ ID NO: 343794 - DNA, 25 bp, Homo sapien
ctgggagaggccacatagtggggtg

SEQ ID NO: 343795 - DNA, 25 bp, Homo sapien
ggccacatagtggggtggttaagag

SEQ ID NO: 343796 - DNA, 25 bp, Homo sapien
gaggccacatagtggggtggttaag

SEQ ID NO: 343797 - DNA, 25 bp, Homo sapien
tggaggggaacagagctggatgatc

SEQ ID NO: 343798 - DNA, 25 bp, Homo sapien
gggaacagagctggatgatcagggc

SEQ ID NO: 343799 - DNA, 25 bp, Homo sapien
gaacagagctggatgatcagggcca

SEQ ID NO: 343800 - DNA, 25 bp, Homo sapien
gaggggaacagagctggatgatcag

SEQ ID NO: 343801 - DNA, 25 bp, Homo sapien
gacaagagcggtgtgttaagggtgg

SEQ ID NO: 343802 - DNA, 25 bp, Homo sapien
caagagcggtgtgttaagggtggta

SEQ ID NO: 343803 - DNA, 25 bp, Homo sapien
cagacaagagcggtgtgttaagggt

SEQ ID NO: 343804 - DNA, 25 bp, Homo sapien
aagagcggtgtgttaagggtggtat

SEQ ID NO: 343805 - DNA, 25 bp, Homo sapien
ttttcccttaaggtatcgatgtaga

SEQ ID NO: 343806 - DNA, 25 bp, Homo sapien
tatcgatgtagaaggaatctgacat

SEQ ID NO: 343807 - DNA, 25 bp, Homo sapien
cccttaaggtatcgatgtagaagga

SEQ ID NO: 343808 - DNA, 25 bp, Homo sapien
taaggtatcgatgtagaaggaatct

SEQ ID NO: 343809 - DNA, 25 bp, Homo sapien
tattttcgatggtgtggctaacatt

SEQ ID NO: 343810 - DNA, 25 bp, Homo sapien
ggtgtggctaacattcttgcccctc

SEQ ID NO: 343811 - DNA, 25 bp, Homo sapien
ctgggtagggttgttattttcgatg

SEQ ID NO: 343812 - DNA, 25 bp, Homo sapien
ttccttgagttaggaggtctccagc

SEQ ID NO: 343813 - DNA, 25 bp, Homo sapien
cttgtctgacatggaagggaaccag

SEQ ID NO: 343814 - DNA, 25 bp, Homo sapien
gggaaccagaggctcccataagcca

SEQ ID NO: 343815 - DNA, 25 bp, Homo sapien
ggaagggaaccagaggctcccataa

SEQ ID NO: 343816 - DNA, 25 bp, Homo sapien
cacttcttgtctgacatggaaggga

SEQ ID NO: 343817 - DNA, 25 bp, Homo sapien
ttgcgagcataccacatgacaggcg

SEQ ID NO: 343818 - DNA, 25 bp, Homo sapien
taaaaaagggacgttgagctggagc

SEQ ID NO: 343819 - DNA, 25 bp, Homo sapien
gacaggcgctattcggacttcacat

SEQ ID NO: 343820 - DNA, 25 bp, Homo sapien
gaacctacttgagggacaggcgtcc

SEQ ID NO: 343821 - DNA, 25 bp, Homo sapien
ctgtcattctcttttgtccagttgg

SEQ ID NO: 343822 - DNA, 25 bp, Homo sapien
gtcattctcttttgtccagttggcg

SEQ ID NO: 343823 - DNA, 25 bp, Homo sapien
cattctcttttgtccagttggcgcc

SEQ ID NO: 343824 - DNA, 25 bp, Homo sapien
ttctcttttgtccagttggcgccat

SEQ ID NO: 343825 - DNA, 25 bp, Homo sapien
tgtcaacaccaacatcctcaaagag

SEQ ID NO: 343826 - DNA, 25 bp, Homo sapien
tttcttgtcaacaccaacatcctca

SEQ ID NO: 343827 - DNA, 25 bp, Homo sapien
caacaccaacatcctcaaagagcat

SEQ ID NO: 343828 - DNA, 25 bp, Homo sapien
ttcttgtcaacaccaacatcctcaa

SEQ ID NO: 343829 - DNA, 25 bp, Homo sapien
catttgctacattcttagcagggcc

SEQ ID NO: 343830 - DNA, 25 bp, Homo sapien
tgcatttgctacattcttagcaggg

SEQ ID NO: 343831 - DNA, 25 bp, Homo sapien
gcatttgctacattcttagcagggc

SEQ ID NO: 343832 - DNA, 25 bp, Homo sapien
agggtacgtaggatgttctttggca

SEQ ID NO: 343833 - DNA, 25 bp, Homo sapien
aaaggtggtcatgctttgaaaaggg

SEQ ID NO: 343834 - DNA, 25 bp, Homo sapien
ggcaaaggtggtcatgctttgaaaa

SEQ ID NO: 343835 - DNA, 25 bp, Homo sapien
caaaggtggtcatgctttgaaaagg

SEQ ID NO: 343836 - DNA, 25 bp, Homo sapien
ttggaaatttatcccttacagcttc

SEQ ID NO: 343837 - DNA, 25 bp, Homo sapien
attaccttgattatttaccttgtct

SEQ ID NO: 343838 - DNA, 25 bp, Homo sapien
ttatcccttacagcttccacagtag

SEQ ID NO: 343839 - DNA, 25 bp, Homo sapien
accttgattatttaccttgtctata

SEQ ID NO: 343840 - DNA, 25 bp, Homo sapien
aataattcatgaccatatcaatggt

SEQ ID NO: 343841 - DNA, 25 bp, Homo sapien
ttcatgaccatatcaatggtgtggt

SEQ ID NO: 343842 - DNA, 25 bp, Homo sapien
gaccatatcaatggtgtggtcctgc

SEQ ID NO: 343843 - DNA, 25 bp, Homo sapien
catgaccatatcaatggtgtggtcc

SEQ ID NO: 343844 - DNA, 25 bp, Homo sapien
cccagccgctccatttgattttgat

SEQ ID NO: 343845 - DNA, 25 bp, Homo sapien
tcttcctatcccctctctctcctct

SEQ ID NO: 343846 - DNA, 25 bp, Homo sapien
gccaacttatatccactctattctc

SEQ ID NO: 343847 - DNA, 25 bp, Homo sapien
cttatcagaattgtgtacaaagttc

SEQ ID NO: 343848 - DNA, 25 bp, Homo sapien
gaattgtgtacaaagttctgccaac

SEQ ID NO: 343849 - DNA, 25 bp, Homo sapien
aaatctcttaccgtttctttcacag

SEQ ID NO: 343850 - DNA, 25 bp, Homo sapien
agctagtgttttataaataataact

SEQ ID NO: 343851 - DNA, 25 bp, Homo sapien
gtttgtttttcttcatcattagaaa

SEQ ID NO: 343852 - DNA, 25 bp, Homo sapien
ttgtttttcttcatcattagaaagt

SEQ ID NO: 343853 - DNA, 25 bp, Homo sapien
agtgttttataaataataactcttg

SEQ ID NO: 343854 - DNA, 25 bp, Homo sapien
cagccttggcgctagacgctctgaa

SEQ ID NO: 343855 - DNA, 25 bp, Homo sapien
gacattcagccttggcgctagacgc

SEQ ID NO: 343856 - DNA, 25 bp, Homo sapien
gacgctctgaaacttggccgggctt

SEQ ID NO: 343857 - DNA, 25 bp, Homo sapien
cactgaaccagacattcagccttgg

SEQ ID NO: 343858 - DNA, 25 bp, Homo sapien
ggaaggacttttgccgcaggctgca

SEQ ID NO: 343859 - DNA, 25 bp, Homo sapien
ggatgcatgatgactccgtgcggaa

SEQ ID NO: 343860 - DNA, 25 bp, Homo sapien
cagccatttcctggcgtgggatgca

SEQ ID NO: 343861 - DNA, 25 bp, Homo sapien
gactccgtgcggaaggacttttgcc

SEQ ID NO: 343862 - DNA, 25 bp, Homo sapien
cttgccaaccaatctgattggccaa

SEQ ID NO: 343863 - DNA, 25 bp, Homo sapien
tctgattggccaaaatggacttctt

SEQ ID NO: 343864 - DNA, 25 bp, Homo sapien
tcacccttgccaaccaatctgattg

SEQ ID NO: 343865 - DNA, 25 bp, Homo sapien
acccttgccaaccaatctgattggc

SEQ ID NO: 343866 - DNA, 25 bp, Homo sapien
ttctcggaaatgcttgcttccagga

SEQ ID NO: 343867 - DNA, 25 bp, Homo sapien
atcttctcggaaatgcttgcttcca

SEQ ID NO: 343868 - DNA, 25 bp, Homo sapien
ttcaaacatcttctcggaaatgctt

SEQ ID NO: 343869 - DNA, 25 bp, Homo sapien
caaacatcttctcggaaatgcttgc

SEQ ID NO: 343870 - DNA, 25 bp, Homo sapien
tcagtgggctccagcatattgctga

SEQ ID NO: 343871 - DNA, 25 bp, Homo sapien
cctagttcctccgtggtcaggtaca

SEQ ID NO: 343872 - DNA, 25 bp, Homo sapien
attttctgcccctagttcctccgtg

SEQ ID NO: 343873 - DNA, 25 bp, Homo sapien
ttgcttctcatgcaagccttcagtg

SEQ ID NO: 343874 - DNA, 25 bp, Homo sapien
tagtttgagcccatgtgtagctggc

SEQ ID NO: 343875 - DNA, 25 bp, Homo sapien
tacccctagttacatggctgatgga

SEQ ID NO: 343876 - DNA, 25 bp, Homo sapien
gtaatacagtgtcccttcaaagtcc

SEQ ID NO: 343877 - DNA, 25 bp, Homo sapien
tttcatgctatgagccacgtcaagc

SEQ ID NO: 343878 - DNA, 25 bp, Homo sapien
gaggaaaggccaggatcccaagctc

SEQ ID NO: 343879 - DNA, 25 bp, Homo sapien
aggccaggatcccaagctcagggaa

SEQ ID NO: 343880 - DNA, 25 bp, Homo sapien
tcacttccccaggtgaggaaaggcc

SEQ ID NO: 343881 - DNA, 25 bp, Homo sapien
aaaggccaggatcccaagctcaggg

SEQ ID NO: 343882 - DNA, 25 bp, Homo sapien
gttaaaattagctctgggaactgga

SEQ ID NO: 343883 - DNA, 25 bp, Homo sapien
ctcagaacaagccagtcccaagaag

SEQ ID NO: 343884 - DNA, 25 bp, Homo sapien
tcactcagaacaagccagtcccaag

SEQ ID NO: 343885 - DNA, 25 bp, Homo sapien
aatgtcggggtcttcaaggagcagc

SEQ ID NO: 343886 - DNA, 25 bp, Homo sapien
cttctcactcctcccgggatatctc

SEQ ID NO: 343887 - DNA, 25 bp, Homo sapien
gccaagtccttgaggccgatcagtg

SEQ ID NO: 343888 - DNA, 25 bp, Homo sapien
cgatcagtgggaatttccccctgta

SEQ ID NO: 343889 - DNA, 25 bp, Homo sapien
ctcccgggatatctctggccaagtc

SEQ ID NO: 343890 - DNA, 25 bp, Homo sapien
ctggtaaccacagaacaaggtggct

SEQ ID NO: 343891 - DNA, 25 bp, Homo sapien
taaccacagaacaaggtggctgagg

SEQ ID NO: 343892 - DNA, 25 bp, Homo sapien
tggtaaccacagaacaaggtggctg

SEQ ID NO: 343893 - DNA, 25 bp, Homo sapien
ccacagaacaaggtggctgaggatt

SEQ ID NO: 343894 - DNA, 25 bp, Homo sapien
gttgggtatccacagtagaccattt

SEQ ID NO: 343895 - DNA, 25 bp, Homo sapien
tctgatagacagttgggtatccaca

SEQ ID NO: 343896 - DNA, 25 bp, Homo sapien
tagacagttgggtatccacagtaga

SEQ ID NO: 343897 - DNA, 25 bp, Homo sapien
gtgcaattctgatagacagttgggt

SEQ ID NO: 343898 - DNA, 25 bp, Homo sapien
acatcatattcggtgtacatgactg

SEQ ID NO: 343899 - DNA, 25 bp, Homo sapien
tcatattcggtgtacatgactggcc

SEQ ID NO: 343900 - DNA, 25 bp, Homo sapien
atattcggtgtacatgactggccat

SEQ ID NO: 343901 - DNA, 25 bp, Homo sapien
cacactgatgcccaaatacatctac

SEQ ID NO: 343902 - DNA, 25 bp, Homo sapien
atgggggaggaaaggttgcttctat

SEQ ID NO: 343903 - DNA, 25 bp, Homo sapien
gcactaccctaagtggcttattctg

SEQ ID NO: 343904 - DNA, 25 bp, Homo sapien
ccctctgcactaccctaagtggctt

SEQ ID NO: 343905 - DNA, 25 bp, Homo sapien
tctgcactaccctaagtggcttatt

SEQ ID NO: 343906 - DNA, 25 bp, Homo sapien
actaccctaagtggcttattctggg

SEQ ID NO: 343907 - DNA, 25 bp, Homo sapien
cctgtttccatcacaacacaatgac

SEQ ID NO: 343908 - DNA, 25 bp, Homo sapien
tattcccatgggagccagtatcagg

SEQ ID NO: 343909 - DNA, 25 bp, Homo sapien
cacaatgacggatgatattcccatg

SEQ ID NO: 343910 - DNA, 25 bp, Homo sapien
tacgctgagtgaagcggaatcccta

SEQ ID NO: 343911 - DNA, 25 bp, Homo sapien
taccgtgatgtccttgctagcgact

SEQ ID NO: 343912 - DNA, 25 bp, Homo sapien
tagtaccatcaagggtccaggttgg

SEQ ID NO: 343913 - DNA, 25 bp, Homo sapien
tccaggttgggcaagtactcgaacc

SEQ ID NO: 343914 - DNA, 25 bp, Homo sapien
tagcgactcctccacgctttagtac

SEQ ID NO: 343915 - DNA, 25 bp, Homo sapien
ggacgccatgtctggtctgtgcttt

SEQ ID NO: 343916 - DNA, 25 bp, Homo sapien
tgctggaatttcacgggctgaagct

SEQ ID NO: 343917 - DNA, 25 bp, Homo sapien
cagctcactggtgtgggacgccatg

SEQ ID NO: 343918 - DNA, 25 bp, Homo sapien
gtgctttgctgaactgtgctggaat

SEQ ID NO: 343919 - DNA, 25 bp, Homo sapien
attcactcttatctgactcctccat

SEQ ID NO: 343920 - DNA, 25 bp, Homo sapien
gaattcactcttatctgactcctcc

SEQ ID NO: 343921 - DNA, 25 bp, Homo sapien
tttaggaattcactcttatctgact

SEQ ID NO: 343922 - DNA, 25 bp, Homo sapien
aattcactcttatctgactcctcca

SEQ ID NO: 343923 - DNA, 25 bp, Homo sapien
tgggtcagagacacccagtggccca

SEQ ID NO: 343924 - DNA, 25 bp, Homo sapien
gaggacccagcggcaagcaccggtc

SEQ ID NO: 343925 - DNA, 25 bp, Homo sapien
gtttgggtcagagacacccagtggc

SEQ ID NO: 343926 - DNA, 25 bp, Homo sapien
agggcgcagacgagaaggggcacga

SEQ ID NO: 343927 - DNA, 25 bp, Homo sapien
ctttttggagggccgatgaggtaat

SEQ ID NO: 343928 - DNA, 25 bp, Homo sapien
gcccacggcggcattattccctata

SEQ ID NO: 343929 - DNA, 25 bp, Homo sapien
gaggtaatgcggctctgccattggt

SEQ ID NO: 343930 - DNA, 25 bp, Homo sapien
cctataaggatctgaacgatccggg

SEQ ID NO: 343931 - DNA, 25 bp, Homo sapien
cggcagcagcggcaatgaccccttg

SEQ ID NO: 343932 - DNA, 25 bp, Homo sapien
cagcagcggcaatgaccccttggct

SEQ ID NO: 343933 - DNA, 25 bp, Homo sapien
caactttggagaggcgagcagcagc

SEQ ID NO: 343934 - DNA, 25 bp, Homo sapien
cggcgcgcacggcaactttggagag

SEQ ID NO: 343935 - DNA, 25 bp, Homo sapien
tagtggatttcaagccagccagcgg

SEQ ID NO: 343936 - DNA, 25 bp, Homo sapien
gaggctggcctctgcgcttaagtat

SEQ ID NO: 343937 - DNA, 25 bp, Homo sapien
gttataaataacctcgaggctggcc

SEQ ID NO: 343938 - DNA, 25 bp, Homo sapien
gcaagagattcgcaggtagggctca

SEQ ID NO: 343939 - DNA, 25 bp, Homo sapien
gagagatgaatgtgcatccagatgc

SEQ ID NO: 343940 - DNA, 25 bp, Homo sapien
taagtcccgtggtcagttacctgat

SEQ ID NO: 343941 - DNA, 25 bp, Homo sapien
aacactagttactctgcgctgtggg

SEQ ID NO: 343942 - DNA, 25 bp, Homo sapien
tagagcatcatgtaggaagccagca

SEQ ID NO: 343943 - DNA, 25 bp, Homo sapien
ttctgccacctgacacaatgcctgg

SEQ ID NO: 343944 - DNA, 25 bp, Homo sapien
gcttgaagacctatgtatgggctcg

SEQ ID NO: 343945 - DNA, 25 bp, Homo sapien
caaactatggccctgggtgtccaca

SEQ ID NO: 343946 - DNA, 25 bp, Homo sapien
taggcaccatgattgcacagacacg

SEQ ID NO: 343947 - DNA, 25 bp, Homo sapien
agcttttgagaggtcagcatgcccc

SEQ ID NO: 343948 - DNA, 25 bp, Homo sapien
cagggcgaaaccactccaagaggtg

SEQ ID NO: 343949 - DNA, 25 bp, Homo sapien
taaacttgatgtctcctcagagcac

SEQ ID NO: 343950 - DNA, 25 bp, Homo sapien
tggcagtaagcaagtcggcgcctct

SEQ ID NO: 343951 - DNA, 25 bp, Homo sapien
catttggatacatgcaatcctaaag

SEQ ID NO: 343952 - DNA, 25 bp, Homo sapien
tttggatacatgcaatcctaaagtc

SEQ ID NO: 343953 - DNA, 25 bp, Homo sapien
ttggatacatgcaatcctaaagtct

SEQ ID NO: 343954 - DNA, 25 bp, Homo sapien
ccatttggatacatgcaatcctaaa

SEQ ID NO: 343955 - DNA, 25 bp, Homo sapien
cacctaagaaatggcactgtcccat

SEQ ID NO: 343956 - DNA, 25 bp, Homo sapien
gtctttatcactagcctcagggagt

SEQ ID NO: 343957 - DNA, 25 bp, Homo sapien
cagggagtagaagcccacctaagaa

SEQ ID NO: 343958 - DNA, 25 bp, Homo sapien
tatcactagcctcagggagtagaag

SEQ ID NO: 343959 - DNA, 25 bp, Homo sapien
tctctgatcccagctcaggcaggat

SEQ ID NO: 343960 - DNA, 25 bp, Homo sapien
ttattactgaatccccaagacatgg

SEQ ID NO: 343961 - DNA, 25 bp, Homo sapien
caataaacactatggcagagaggga

SEQ ID NO: 343962 - DNA, 25 bp, Homo sapien
tgcccaaccatgaccagaaggtcct

SEQ ID NO: 343963 - DNA, 25 bp, Homo sapien
cagcaggtctagcaaggagtgcctt

SEQ ID NO: 343964 - DNA, 25 bp, Homo sapien
cagaggagtcagcaggtctagcaag

SEQ ID NO: 343965 - DNA, 25 bp, Homo sapien
agtcagcaggtctagcaaggagtgc

SEQ ID NO: 343966 - DNA, 25 bp, Homo sapien
gcagaggagtcagcaggtctagcaa

SEQ ID NO: 343967 - DNA, 25 bp, Homo sapien
aatgtcggtattcggcctctccaga

SEQ ID NO: 343968 - DNA, 25 bp, Homo sapien
ctctatgccatgtgctggagtccca

SEQ ID NO: 343969 - DNA, 25 bp, Homo sapien
caatcattaaagaacacgtgctgga

SEQ ID NO: 343970 - DNA, 25 bp, Homo sapien
tctatggaacaaggactcctgaccc

SEQ ID NO: 343971 - DNA, 25 bp, Homo sapien
tgaaacggacaagagagaagggccc

SEQ ID NO: 343972 - DNA, 25 bp, Homo sapien
ttgacatcaacgaaaagggcctttg

SEQ ID NO: 343973 - DNA, 25 bp, Homo sapien
ggagtgcatgttaacggtctggcct

SEQ ID NO: 343974 - DNA, 25 bp, Homo sapien
gacaggctttgaactgggactcctt

SEQ ID NO: 343975 - DNA, 25 bp, Homo sapien
gttattcatctttaggcagtcagtg

SEQ ID NO: 343976 - DNA, 25 bp, Homo sapien
ttaggcagtcagtgtagtaaaggag

SEQ ID NO: 343977 - DNA, 25 bp, Homo sapien
tttgaaagttattcatctttaggca

SEQ ID NO: 343978 - DNA, 25 bp, Homo sapien
catctttaggcagtcagtgtagtaa

SEQ ID NO: 343979 - DNA, 25 bp, Homo sapien
cctgtaggtcgcgtctatgatggca

SEQ ID NO: 343980 - DNA, 25 bp, Homo sapien
gaaacatcagctcccaatgcactgg

SEQ ID NO: 343981 - DNA, 25 bp, Homo sapien
tagtaaggattgttgccccaggtgg

SEQ ID NO: 343982 - DNA, 25 bp, Homo sapien
taatcggctgcctccatgatgacca

SEQ ID NO: 343983 - DNA, 25 bp, Homo sapien
gagagtcggagatgatgcagcacac

SEQ ID NO: 343984 - DNA, 25 bp, Homo sapien
ttcaggatcagtcaaaggcagcaag

SEQ ID NO: 343985 - DNA, 25 bp, Homo sapien
cccagtgatgcttgtgttgaccaga

SEQ ID NO: 343986 - DNA, 25 bp, Homo sapien
ggctactgcagctggtaccgaggat

SEQ ID NO: 343987 - DNA, 25 bp, Homo sapien
tccctgcggagtcgataaattagca

SEQ ID NO: 343988 - DNA, 25 bp, Homo sapien
tgttctgtgtcactcggccctgggt

SEQ ID NO: 343989 - DNA, 25 bp, Homo sapien
gaggcacctgaagtttccctgcgga

SEQ ID NO: 343990 - DNA, 25 bp, Homo sapien
taacctcaaggtctcgcatggtggg

SEQ ID NO: 343991 - DNA, 25 bp, Homo sapien
taaatttcgtagcactgtttacagt

SEQ ID NO: 343992 - DNA, 25 bp, Homo sapien
gtcctgaaacccagaagtgatggag

SEQ ID NO: 343993 - DNA, 25 bp, Homo sapien
aagagatctcgaaccctgtctagaa

SEQ ID NO: 343994 - DNA, 25 bp, Homo sapien
tccctttagccagtctgctgtcctg

SEQ ID NO: 343995 - DNA, 25 bp, Homo sapien
ttattctgttcccaaagacgcattc

SEQ ID NO: 343996 - DNA, 25 bp, Homo sapien
tattctgttcccaaagacgcattcc

SEQ ID NO: 343997 - DNA, 25 bp, Homo sapien
aaatcaggttccacaaaaggctcaa

SEQ ID NO: 343998 - DNA, 25 bp, Homo sapien
tgaaatcaggttccacaaaaggctc

SEQ ID NO: 343999 - DNA, 25 bp, Homo sapien
acaaccaatgcaaatcaaatattaa

SEQ ID NO: 344000 - DNA, 25 bp, Homo sapien
tcaacaaccaatgcaaatcaaatat

SEQ ID NO: 344001 - DNA, 25 bp, Homo sapien
atttgccctattgcctgaatttcac

SEQ ID NO: 344002 - DNA, 25 bp, Homo sapien
tttataatcagcctctggttctaac

SEQ ID NO: 344003 - DNA, 25 bp, Homo sapien
ctccaagttccaaggaatgtggttc

SEQ ID NO: 344004 - DNA, 25 bp, Homo sapien
tggttctaacatgcccccagaacgt

SEQ ID NO: 344005 - DNA, 25 bp, Homo sapien
cgtggtcagtgtacaacccctagag

SEQ ID NO: 344006 - DNA, 25 bp, Homo sapien
tccaaagagaccgaggacaagtcat

SEQ ID NO: 344007 - DNA, 25 bp, Homo sapien
aggacactgtgactccgccttagag

SEQ ID NO: 344008 - DNA, 25 bp, Homo sapien
tggagagacgacttcccttaggaaa

SEQ ID NO: 344009 - DNA, 25 bp, Homo sapien
ttctcaggacccagggaatggaaga

SEQ ID NO: 344010 - DNA, 25 bp, Homo sapien
acaagcgggaacttctcaggaccca

SEQ ID NO: 344011 - DNA, 25 bp, Homo sapien
ggaaaaatgtttgctccacaagcgg

SEQ ID NO: 344012 - DNA, 25 bp, Homo sapien
tggaagatcttaatgagctgagaga

SEQ ID NO: 344013 - DNA, 25 bp, Homo sapien
gatgaccaggctgcggtagtcttcc

SEQ ID NO: 344014 - DNA, 25 bp, Homo sapien
gacggagtagagagagttgacagca

SEQ ID NO: 344015 - DNA, 25 bp, Homo sapien
agccctccatactgcaggccgatga

SEQ ID NO: 344016 - DNA, 25 bp, Homo sapien
caggatgaagtctggcttgaaggat

SEQ ID NO: 344017 - DNA, 25 bp, Homo sapien
gagaaagccaacagcagtgttacca

SEQ ID NO: 344018 - DNA, 25 bp, Homo sapien
gaaagccaacagcagtgttaccaca

SEQ ID NO: 344019 - DNA, 25 bp, Homo sapien
tgagaaagccaacagcagtgttacc

SEQ ID NO: 344020 - DNA, 25 bp, Homo sapien
ctgagaaagccaacagcagtgttac

SEQ ID NO: 344021 - DNA, 25 bp, Homo sapien
cagggcatccggccacagcttgctg

SEQ ID NO: 344022 - DNA, 25 bp, Homo sapien
cttgctggggatgatagcactgact

SEQ ID NO: 344023 - DNA, 25 bp, Homo sapien
gatagcactgacttgcagggcggca

SEQ ID NO: 344024 - DNA, 25 bp, Homo sapien
gggacattgatgaaacaccagggca

SEQ ID NO: 344025 - DNA, 25 bp, Homo sapien
cccaagagccaggttggcaaagggt

SEQ ID NO: 344026 - DNA, 25 bp, Homo sapien
gtccccaagagccaggttggcaaag

SEQ ID NO: 344027 - DNA, 25 bp, Homo sapien
attttgttcacatgctgagacccat

SEQ ID NO: 344028 - DNA, 25 bp, Homo sapien
tggtccccaagagccaggttggcaa

SEQ ID NO: 344029 - DNA, 25 bp, Homo sapien
tgcgaaggctccagactttctgacg

SEQ ID NO: 344030 - DNA, 25 bp, Homo sapien
ccagagctgattccagccaggcctg

SEQ ID NO: 344031 - DNA, 25 bp, Homo sapien
tccagccaggcctgcgaaggctcca

SEQ ID NO: 344032 - DNA, 25 bp, Homo sapien
aggctccagactttctgacgtccat

SEQ ID NO: 344033 - DNA, 25 bp, Homo sapien
gagacttcacgttttctcttaattg

SEQ ID NO: 344034 - DNA, 25 bp, Homo sapien
ttctcttaattgtctccacactctt

SEQ ID NO: 344035 - DNA, 25 bp, Homo sapien
cgggcaaagagacttcacgttttct

SEQ ID NO: 344036 - DNA, 25 bp, Homo sapien
gtcaacgggcaaagagacttcacgt

SEQ ID NO: 344037 - DNA, 25 bp, Homo sapien
tgttagatagtgtgggaaatcagtg

SEQ ID NO: 344038 - DNA, 25 bp, Homo sapien
tgaagtgtctgatgtgtagtgcatg

SEQ ID NO: 344039 - DNA, 25 bp, Homo sapien
tagtgcatggctaagaataatcctg

SEQ ID NO: 344040 - DNA, 25 bp, Homo sapien
taaatgatccatagtataaacctcc

SEQ ID NO: 344041 - DNA, 25 bp, Homo sapien
aggccacaagcatgcgcttcgcaca

SEQ ID NO: 344042 - DNA, 25 bp, Homo sapien
atgcgcttcgcacatcagcagcagc

SEQ ID NO: 344043 - DNA, 25 bp, Homo sapien
cactgacgatcaagttttgacaact

SEQ ID NO: 344044 - DNA, 25 bp, Homo sapien
gaaaagaattgagctctccaggcca

SEQ ID NO: 344045 - DNA, 25 bp, Homo sapien
tagagttaagtagcggtgacaggcc

SEQ ID NO: 344046 - DNA, 25 bp, Homo sapien
catgggcacccatgagggaggtaca

SEQ ID NO: 344047 - DNA, 25 bp, Homo sapien
taggcggcatgctaaaccctgggaa

SEQ ID NO: 344048 - DNA, 25 bp, Homo sapien
cacaatatgatacactgaggttcgc

SEQ ID NO: 344049 - DNA, 25 bp, Homo sapien
cacgtatgatatgtgccgctggtca

SEQ ID NO: 344050 - DNA, 25 bp, Homo sapien
accacaggtgctgcacgtatgatat

SEQ ID NO: 344051 - DNA, 25 bp, Homo sapien
gctggtcattactactgcaaccaca

SEQ ID NO: 344052 - DNA, 25 bp, Homo sapien
gatatgtgccgctggtcattactac

SEQ ID NO: 344053 - DNA, 25 bp, Homo sapien
ccccggtcacataggcagctaggtt

SEQ ID NO: 344054 - DNA, 25 bp, Homo sapien
cataggcagctaggttcaactctga

SEQ ID NO: 344055 - DNA, 25 bp, Homo sapien
ggtcccatttctcacgacctgcatg

SEQ ID NO: 344056 - DNA, 25 bp, Homo sapien
actttggtcccatttctcacgacct

SEQ ID NO: 344057 - DNA, 25 bp, Homo sapien
gaacctggggcagctaacgctggac

SEQ ID NO: 344058 - DNA, 25 bp, Homo sapien
taatttcagtggtgatttgccgttc

SEQ ID NO: 344059 - DNA, 25 bp, Homo sapien
taacgctggactgtaatttcagtgg

SEQ ID NO: 344060 - DNA, 25 bp, Homo sapien
tggtgatttgccgttcctcctttgg

SEQ ID NO: 344061 - DNA, 25 bp, Homo sapien
cttgctcagtagaagcactcggcat

SEQ ID NO: 344062 - DNA, 25 bp, Homo sapien
tcttgctcagtagaagcactcggca

SEQ ID NO: 344063 - DNA, 25 bp, Homo sapien
gaaatcttgctcagtagaagcactc

SEQ ID NO: 344064 - DNA, 25 bp, Homo sapien
aatcttgctcagtagaagcactcgg

SEQ ID NO: 344065 - DNA, 25 bp, Homo sapien
caggtgaggacctactacttcctac

SEQ ID NO: 344066 - DNA, 25 bp, Homo sapien
taccctccatatgatccagtctgca

SEQ ID NO: 344067 - DNA, 25 bp, Homo sapien
gcagacctcgccttcttgttctaga

SEQ ID NO: 344068 - DNA, 25 bp, Homo sapien
tactgggacctccaagaatacggcc

SEQ ID NO: 344069 - DNA, 25 bp, Homo sapien
agaggcctggccggacttgtgcttc

SEQ ID NO: 344070 - DNA, 25 bp, Homo sapien
aggcctggccggacttgtgcttcca

SEQ ID NO: 344071 - DNA, 25 bp, Homo sapien
agcagactcgtgctctctgggaatg

SEQ ID NO: 344072 - DNA, 25 bp, Homo sapien
gcagactcgtgctctctgggaatga

SEQ ID NO: 344073 - DNA, 25 bp, Homo sapien
gggagccagtgagagaccaaagcaa

SEQ ID NO: 344074 - DNA, 25 bp, Homo sapien
ccctggtgctgcctaaagactttgg

SEQ ID NO: 344075 - DNA, 25 bp, Homo sapien
aataagcaaattaagacgagtaatc

SEQ ID NO: 344076 - DNA, 25 bp, Homo sapien
gcctgcaccgtggagagctaaggga

SEQ ID NO: 344077 - DNA, 25 bp, Homo sapien
ggatactgctgtgagggccccgcag

SEQ ID NO: 344078 - DNA, 25 bp, Homo sapien
actgctgtgagggccccgcagagcc

SEQ ID NO: 344079 - DNA, 25 bp, Homo sapien
gcagagccagtagggcattctgggt

SEQ ID NO: 344080 - DNA, 25 bp, Homo sapien
cagagccagtagggcattctgggta

SEQ ID NO: 344081 - DNA, 25 bp, Homo sapien
tgtaaaagttgaggcaagcagtttt

SEQ ID NO: 344082 - DNA, 25 bp, Homo sapien
gctccactcggatctcaatctctcc

SEQ ID NO: 344083 - DNA, 25 bp, Homo sapien
ctccactcggatctcaatctctcca

SEQ ID NO: 344084 - DNA, 25 bp, Homo sapien
tgctccactcggatctcaatctctc

SEQ ID NO: 344085 - DNA, 25 bp, Homo sapien
ctgctccactcggatctcaatctct

SEQ ID NO: 344086 - DNA, 25 bp, Homo sapien
cagaggtgcatattgagacacatcc

SEQ ID NO: 344087 - DNA, 25 bp, Homo sapien
gaggtgcatattgagacacatcctc

SEQ ID NO: 344088 - DNA, 25 bp, Homo sapien
gtgcatattgagacacatcctcagc

SEQ ID NO: 344089 - DNA, 25 bp, Homo sapien
cccagaggtgcatattgagacacat

SEQ ID NO: 344090 - DNA, 25 bp, Homo sapien
gattctactggaaggccctggacca

SEQ ID NO: 344091 - DNA, 25 bp, Homo sapien
agagaaacgtctgtcttcctgagaa

SEQ ID NO: 344092 - DNA, 25 bp, Homo sapien
caaaacctgattctactggaaggcc

SEQ ID NO: 344093 - DNA, 25 bp, Homo sapien
actggaaggccctggaccaggaatg

SEQ ID NO: 344094 - DNA, 25 bp, Homo sapien
tatctgggcgttgcaggtccgtcat

SEQ ID NO: 344095 - DNA, 25 bp, Homo sapien
ggtccgtcatatagccattaggcag

SEQ ID NO: 344096 - DNA, 25 bp, Homo sapien
gggcatcatcgatcaccaacaggat

SEQ ID NO: 344097 - DNA, 25 bp, Homo sapien
tcctgggtctttgaacaatgggcgt

SEQ ID NO: 344098 - DNA, 25 bp, Homo sapien
cccagacgtgtgtaggtgaggccca

SEQ ID NO: 344099 - DNA, 25 bp, Homo sapien
gatgactggctcctacccagacgtg

SEQ ID NO: 344100 - DNA, 25 bp, Homo sapien
tacagggagtggtaggactttagcc

SEQ ID NO: 344101 - DNA, 25 bp, Homo sapien
gggattttgcgcaaccagcagtcag

SEQ ID NO: 344102 - DNA, 25 bp, Homo sapien
agaagtgagcctgctggatcatatg

SEQ ID NO: 344103 - DNA, 25 bp, Homo sapien
atggccaattctttaagaggataag

SEQ ID NO: 344104 - DNA, 25 bp, Homo sapien
tgttatgcataaaagtggataattt

SEQ ID NO: 344105 - DNA, 25 bp, Homo sapien
gaggataagtactaaatctttataa

SEQ ID NO: 344106 - DNA, 25 bp, Homo sapien
gtggataatttacatgataaatgaa

SEQ ID NO: 344107 - DNA, 25 bp, Homo sapien
tggacgagactatccaaaaggagca

SEQ ID NO: 344108 - DNA, 25 bp, Homo sapien
aaggagcagactattttaaacggcg

SEQ ID NO: 344109 - DNA, 25 bp, Homo sapien
aacaaagacgtgaagaatccagaga

SEQ ID NO: 344110 - DNA, 25 bp, Homo sapien
gaacttactgtacagggcgaatttg

SEQ ID NO: 344111 - DNA, 25 bp, Homo sapien
ttaatctgatggcaagacaaggtgc

SEQ ID NO: 344112 - DNA, 25 bp, Homo sapien
caaggtgcggatgagagggattctg

SEQ ID NO: 344113 - DNA, 25 bp, Homo sapien
gacacaggatatcgctccaatgcca

SEQ ID NO: 344114 - DNA, 25 bp, Homo sapien
gacaggacacaggatatcgctccaa

SEQ ID NO: 344115 - DNA, 25 bp, Homo sapien
agctttctgatgctccggcctccat

SEQ ID NO: 344116 - DNA, 25 bp, Homo sapien
ctgatcagaattcttccacggccct

SEQ ID NO: 344117 - DNA, 25 bp, Homo sapien
cagagggacctgatcactgatcaga

SEQ ID NO: 344118 - DNA, 25 bp, Homo sapien
tgatcactgatcagaattcttccac

SEQ ID NO: 344119 - DNA, 25 bp, Homo sapien
cgcggcgcccgccagtcgatccgct

SEQ ID NO: 344120 - DNA, 25 bp, Homo sapien
cccggtggtgcctcggcgcggcgcc

SEQ ID NO: 344121 - DNA, 25 bp, Homo sapien
ccagtcgatccgctccgggtcccgg

SEQ ID NO: 344122 - DNA, 25 bp, Homo sapien
gcccgccagtcgatccgctccgggt

SEQ ID NO: 344123 - DNA, 25 bp, Homo sapien
cctccataatcatgaccgcaatgtg

SEQ ID NO: 344124 - DNA, 25 bp, Homo sapien
ccataatcatgaccgcaatgtgagt

SEQ ID NO: 344125 - DNA, 25 bp, Homo sapien
taatcatgaccgcaatgtgagtcat

SEQ ID NO: 344126 - DNA, 25 bp, Homo sapien
ttcctccataatcatgaccgcaatg

SEQ ID NO: 344127 - DNA, 25 bp, Homo sapien
ccaattctgtaggagcccttggctg

SEQ ID NO: 344128 - DNA, 25 bp, Homo sapien
gagtggagcaatcactgcacggctg

SEQ ID NO: 344129 - DNA, 25 bp, Homo sapien
tgtaagaaacatcccgttgcgcctg

SEQ ID NO: 344130 - DNA, 25 bp, Homo sapien
gctgaaactgcgaggagcttcccga

SEQ ID NO: 344131 - DNA, 25 bp, Homo sapien
aaatgtaagccagatgatgtctgag

SEQ ID NO: 344132 - DNA, 25 bp, Homo sapien
aatgtaagccagatgatgtctgagt

SEQ ID NO: 344133 - DNA, 25 bp, Homo sapien
ctgagagtctaccttttctcagttg

SEQ ID NO: 344134 - DNA, 25 bp, Homo sapien
tacttggcaatggagacaactgtct

SEQ ID NO: 344135 - DNA, 25 bp, Homo sapien
ggtaggtcccacatcaggcggtgct

SEQ ID NO: 344136 - DNA, 25 bp, Homo sapien
tgcctgccaggataaatgacggctc

SEQ ID NO: 344137 - DNA, 25 bp, Homo sapien
gaacaagtgtggagatcagcaacct

SEQ ID NO: 344138 - DNA, 25 bp, Homo sapien
gtgcaatcttgacttgctgtaactt

SEQ ID NO: 344139 - DNA, 25 bp, Homo sapien
aatcttgacttgctgtaacttccgc

SEQ ID NO: 344140 - DNA, 25 bp, Homo sapien
tgcaatcttgacttgctgtaacttc

SEQ ID NO: 344141 - DNA, 25 bp, Homo sapien
gcaatcttgacttgctgtaacttcc

SEQ ID NO: 344142 - DNA, 25 bp, Homo sapien
tctcatcccaagcacaggtaagcac

SEQ ID NO: 344143 - DNA, 25 bp, Homo sapien
aaattaccacgaactctcatcccaa

SEQ ID NO: 344144 - DNA, 25 bp, Homo sapien
aaaattaccacgaactctcatccca

SEQ ID NO: 344145 - DNA, 25 bp, Homo sapien
tcatcccaagcacaggtaagcacat

SEQ ID NO: 344146 - DNA, 25 bp, Homo sapien
actacctgagtgacgggaccaatcg

SEQ ID NO: 344147 - DNA, 25 bp, Homo sapien
atagatgctttgattttaccccaga

SEQ ID NO: 344148 - DNA, 25 bp, Homo sapien
ggaccaatcgtatcccaaacctcag

SEQ ID NO: 344149 - DNA, 25 bp, Homo sapien
aaagatggcaactatagacaacggg

SEQ ID NO: 344150 - DNA, 25 bp, Homo sapien
gaatgaaattagactcttatctgac

SEQ ID NO: 344151 - DNA, 25 bp, Homo sapien
tgattacagaatacacagtgaggga

SEQ ID NO: 344152 - DNA, 25 bp, Homo sapien
gagttaagtgtaacacctgaaacca

SEQ ID NO: 344153 - DNA, 25 bp, Homo sapien
catgcctatgttgtctactaatctt

SEQ ID NO: 344154 - DNA, 25 bp, Homo sapien
aatgtgagatacatgtatatagaac

SEQ ID NO: 344155 - DNA, 25 bp, Homo sapien
gatttcctacatgtgtatattgcat

SEQ ID NO: 344156 - DNA, 25 bp, Homo sapien
aagtctgggctgttagtgattcacc

SEQ ID NO: 344157 - DNA, 25 bp, Homo sapien
tttagaatattcaccagaatagtga

SEQ ID NO: 344158 - DNA, 25 bp, Homo sapien
cagacatctgagcatgcaaggtagc

SEQ ID NO: 344159 - DNA, 25 bp, Homo sapien
gctgctaaacctcgtcaggagcttg

SEQ ID NO: 344160 - DNA, 25 bp, Homo sapien
gcaaggtagcaaggagaaatttcga

SEQ ID NO: 344161 - DNA, 25 bp, Homo sapien
tctaaagcaggtacagacatctgag

SEQ ID NO: 344162 - DNA, 25 bp, Homo sapien
ctgaaacccactccaggcaaaagtg

SEQ ID NO: 344163 - DNA, 25 bp, Homo sapien
attccaatagtaaataatgtggtca

SEQ ID NO: 344164 - DNA, 25 bp, Homo sapien
ttccaatagtaaataatgtggtcat

SEQ ID NO: 344165 - DNA, 25 bp, Homo sapien
cattccaatagtaaataatgtggtc

SEQ ID NO: 344166 - DNA, 25 bp, Homo sapien
ggaaaaatggaacaacgcgtggaca

SEQ ID NO: 344167 - DNA, 25 bp, Homo sapien
agtagagctgctagatctgaaatgc

SEQ ID NO: 344168 - DNA, 25 bp, Homo sapien
tgggtgaggatgtctccaaaacaat

SEQ ID NO: 344169 - DNA, 25 bp, Homo sapien
tctcatatagcaggaaaggagtaga

SEQ ID NO: 344170 - DNA, 25 bp, Homo sapien
cacttgggtcattgaatccacaatt

SEQ ID NO: 344171 - DNA, 25 bp, Homo sapien
ccacttgggtcattgaatccacaat

SEQ ID NO: 344172 - DNA, 25 bp, Homo sapien
tttctgggagtacacggaacagtta

SEQ ID NO: 344173 - DNA, 25 bp, Homo sapien
gttgctggtgctacgactgggcctc

SEQ ID NO: 344174 - DNA, 25 bp, Homo sapien
tgaaagccccatagccagtcatcac

SEQ ID NO: 344175 - DNA, 25 bp, Homo sapien
tttctgttgaaagccccatagccag

SEQ ID NO: 344176 - DNA, 25 bp, Homo sapien
tcctctctgtgtcagacttgtaaga

SEQ ID NO: 344177 - DNA, 25 bp, Homo sapien
gtcagacttgtaagaggacctccaa

SEQ ID NO: 344178 - DNA, 25 bp, Homo sapien
acctgggaatacgatgggatatcac

SEQ ID NO: 344179 - DNA, 25 bp, Homo sapien
caagccctgctgtatctccctatat

SEQ ID NO: 344180 - DNA, 25 bp, Homo sapien
tgagagtgatcagccgattgtgacc

SEQ ID NO: 344181 - DNA, 25 bp, Homo sapien
gagtgatcagccgattgtgacccag

SEQ ID NO: 344182 - DNA, 25 bp, Homo sapien
tctgagagtgatcagccgattgtga

SEQ ID NO: 344183 - DNA, 25 bp, Homo sapien
gatcagccgattgtgacccagtacc

SEQ ID NO: 344184 - DNA, 25 bp, Homo sapien
cagtagcttcctgcaagagtgggag

SEQ ID NO: 344185 - DNA, 25 bp, Homo sapien
tgggatctaacttcaggcaaaaggg

SEQ ID NO: 344186 - DNA, 25 bp, Homo sapien
tatgtcaaggtgtgtctcagtagct

SEQ ID NO: 344187 - DNA, 25 bp, Homo sapien
tgcaatttagctctctatgtcaagg

SEQ ID NO: 344188 - DNA, 25 bp, Homo sapien
tattaaatgcagctttcgctggtca

SEQ ID NO: 344189 - DNA, 25 bp, Homo sapien
ccagcagagggtagggcattaactc

SEQ ID NO: 344190 - DNA, 25 bp, Homo sapien
agggtagggcattaactcttgttct

SEQ ID NO: 344191 - DNA, 25 bp, Homo sapien
tcacattgcaactcaatacaaacag

SEQ ID NO: 344192 - DNA, 25 bp, Homo sapien
gggctgcatagctaacctctgggaa

SEQ ID NO: 344193 - DNA, 25 bp, Homo sapien
tatcggccgaagatgcttgacctcc

SEQ ID NO: 344194 - DNA, 25 bp, Homo sapien
gaaagttcttcgaaaggcctgagag

SEQ ID NO: 344195 - DNA, 25 bp, Homo sapien
gtttgccctccgtttgaatgcccag

SEQ ID NO: 344196 - DNA, 25 bp, Homo sapien
gaacggaacttggtaatgtcgaagc

SEQ ID NO: 344197 - DNA, 25 bp, Homo sapien
tgtgagatatttcagggcagcaaag

SEQ ID NO: 344198 - DNA, 25 bp, Homo sapien
tgcggtattgcttgttggaacggaa

SEQ ID NO: 344199 - DNA, 25 bp, Homo sapien
tagcggcgggacatgtcctgctgaa

SEQ ID NO: 344200 - DNA, 25 bp, Homo sapien
acatctttatcgcaggtcacactgt

SEQ ID NO: 344201 - DNA, 25 bp, Homo sapien
acactgtcacccagtattctcaact

SEQ ID NO: 344202 - DNA, 25 bp, Homo sapien
cactgtcacccagtattctcaactt

SEQ ID NO: 344203 - DNA, 25 bp, Homo sapien
tctttatcgcaggtcacactgtcac

SEQ ID NO: 344204 - DNA, 25 bp, Homo sapien
tgaaggagttcgtgattaaacacag

SEQ ID NO: 344205 - DNA, 25 bp, Homo sapien
cctgtaggtcccatgaagctcaaaa

SEQ ID NO: 344206 - DNA, 25 bp, Homo sapien
aatgtgtgctgatccttggtttcac

SEQ ID NO: 344207 - DNA, 25 bp, Homo sapien
gctcaatacgtatcagttggatgaa

SEQ ID NO: 344208 - DNA, 25 bp, Homo sapien
ggcagtcacgtctcacaacaacata

SEQ ID NO: 344209 - DNA, 25 bp, Homo sapien
caacatacggctcaaaatcggcctc

SEQ ID NO: 344210 - DNA, 25 bp, Homo sapien
cactcaacccggtaaggcgtggtgg

SEQ ID NO: 344211 - DNA, 25 bp, Homo sapien
tgcgtggcctttcgtccagacgtgg

SEQ ID NO: 344212 - DNA, 25 bp, Homo sapien
acagcaactccgcttttgacttggg

SEQ ID NO: 344213 - DNA, 25 bp, Homo sapien
tggcaagatcgagctggatgacaga

SEQ ID NO: 344214 - DNA, 25 bp, Homo sapien
gtccccatgtccagcattgacagca

SEQ ID NO: 344215 - DNA, 25 bp, Homo sapien
aaggacagccggtagcgcagtgtct

SEQ ID NO: 344216 - DNA, 25 bp, Homo sapien
ctttgggtctcagggtcatcatggc

SEQ ID NO: 344217 - DNA, 25 bp, Homo sapien
tcagggtcatcatggctgtctgttt

SEQ ID NO: 344218 - DNA, 25 bp, Homo sapien
ggtcatcatggctgtctgtttccat

SEQ ID NO: 344219 - DNA, 25 bp, Homo sapien
gggtcatcatggctgtctgtttcca

SEQ ID NO: 344220 - DNA, 25 bp, Homo sapien
tctgagatacagaaagcagcctttc

SEQ ID NO: 344221 - DNA, 25 bp, Homo sapien
ctctgagatacagaaagcagccttt

SEQ ID NO: 344222 - DNA, 25 bp, Homo sapien
agctcccagtagagagggggtggtt

SEQ ID NO: 344223 - DNA, 25 bp, Homo sapien
cagctcccagtagagagggggtggt

SEQ ID NO: 344224 - DNA, 25 bp, Homo sapien
ccagtagagagggggtggttgggat

SEQ ID NO: 344225 - DNA, 25 bp, Homo sapien
ctcccagtagagagggggtggttgg

SEQ ID NO: 344226 - DNA, 25 bp, Homo sapien
tgactgactttcagcccactggatg

SEQ ID NO: 344227 - DNA, 25 bp, Homo sapien
gctggtaaccatttgggacctcttg

SEQ ID NO: 344228 - DNA, 25 bp, Homo sapien
ggatgactgactttcagcccactgg

SEQ ID NO: 344229 - DNA, 25 bp, Homo sapien
tcttgtggcccctactcctcgggca

SEQ ID NO: 344230 - DNA, 25 bp, Homo sapien
ttaacctcaactcccaccagtgatg

SEQ ID NO: 344231 - DNA, 25 bp, Homo sapien
gcacaaggggcatccactggtaacg

SEQ ID NO: 344232 - DNA, 25 bp, Homo sapien
cagtgatgctatggtgtgcacaagg

SEQ ID NO: 344233 - DNA, 25 bp, Homo sapien
cccaccagtgatgctatggtgtgca

SEQ ID NO: 344234 - DNA, 25 bp, Homo sapien
cagacaggaacatgtagggagtgct

SEQ ID NO: 344235 - DNA, 25 bp, Homo sapien
tagaactggccctccttgtacacga

SEQ ID NO: 344236 - DNA, 25 bp, Homo sapien
gatgtgcttcatggccacgttgcgc

SEQ ID NO: 344237 - DNA, 25 bp, Homo sapien
ttgtggcggctcataagcacctcag

SEQ ID NO: 344238 - DNA, 25 bp, Homo sapien
acagtgaagcgctctcgccggaact

SEQ ID NO: 344239 - DNA, 25 bp, Homo sapien
acagctgagcgaccagggtgacgtc

SEQ ID NO: 344240 - DNA, 25 bp, Homo sapien
tgacgtccgtgctgtctgctgcagg

SEQ ID NO: 344241 - DNA, 25 bp, Homo sapien
caggctcatactcgtagtgcaggaa

SEQ ID NO: 344242 - DNA, 25 bp, Homo sapien
tttcaaatcctaacctaggcttgct

SEQ ID NO: 344243 - DNA, 25 bp, Homo sapien
gcttgcttattgctgactgcgtggc

SEQ ID NO: 344244 - DNA, 25 bp, Homo sapien
aagcctctgttggatgtcctcagcc

SEQ ID NO: 344245 - DNA, 25 bp, Homo sapien
gatccatcttggatgttcagcaagc

SEQ ID NO: 344246 - DNA, 25 bp, Homo sapien
ccacaggactctggggcaaccagaa

SEQ ID NO: 344247 - DNA, 25 bp, Homo sapien
gcaaccagaagccatccttgaactt

SEQ ID NO: 344248 - DNA, 25 bp, Homo sapien
ggggcaaccagaagccatccttgaa

SEQ ID NO: 344249 - DNA, 25 bp, Homo sapien
ctgtccacaggactctggggcaacc

SEQ ID NO: 344250 - DNA, 25 bp, Homo sapien
tctccctagttgtgtaaaatgccct

SEQ ID NO: 344251 - DNA, 25 bp, Homo sapien
tcctggtctccagtgctcatgttgc

SEQ ID NO: 344252 - DNA, 25 bp, Homo sapien
caggtcctcgagtgatcatgcttgt

SEQ ID NO: 344253 - DNA, 25 bp, Homo sapien
tcatttgactctcaactcccagcag

SEQ ID NO: 344254 - DNA, 25 bp, Homo sapien
ctgtggttcaggagtgcaatgttta

SEQ ID NO: 344255 - DNA, 25 bp, Homo sapien
gagctgtggttcaggagtgcaatgt

SEQ ID NO: 344256 - DNA, 25 bp, Homo sapien
cagagctgtggttcaggagtgcaat

SEQ ID NO: 344257 - DNA, 25 bp, Homo sapien
acagagctgtggttcaggagtgcaa

SEQ ID NO: 344258 - DNA, 25 bp, Homo sapien
cctgtgctctggtacatgaacttcc

SEQ ID NO: 344259 - DNA, 25 bp, Homo sapien
cctcagaggtgaacagtacaaagtc

SEQ ID NO: 344260 - DNA, 25 bp, Homo sapien
cctatgttaggacggagaacctcag

SEQ ID NO: 344261 - DNA, 25 bp, Homo sapien
gagaaactccaagcttctcagcaca

SEQ ID NO: 344262 - DNA, 25 bp, Homo sapien
ccagtggcgatccactgtgacttgg

SEQ ID NO: 344263 - DNA, 25 bp, Homo sapien
gccagagccagtggcgatccactgt

SEQ ID NO: 344264 - DNA, 25 bp, Homo sapien
agagagcaggggcgcactgtgacca

SEQ ID NO: 344265 - DNA, 25 bp, Homo sapien
agagccagtggcgatccactgtgac

SEQ ID NO: 344266 - DNA, 25 bp, Homo sapien
ttgcgaaaaaactccacatgcttgt

SEQ ID NO: 344267 - DNA, 25 bp, Homo sapien
aagattgccgtcatactccaggaag

SEQ ID NO: 344268 - DNA, 25 bp, Homo sapien
agccaaacagttcccgcctcagaag

SEQ ID NO: 344269 - DNA, 25 bp, Homo sapien
tcaggtagaggttgcgaaaaaactc

SEQ ID NO: 344270 - DNA, 25 bp, Homo sapien
acagtccccagagaaccctccatgg

SEQ ID NO: 344271 - DNA, 25 bp, Homo sapien
gcacagtccccagagaaccctccat

SEQ ID NO: 344272 - DNA, 25 bp, Homo sapien
agtccccagagaaccctccatggga

SEQ ID NO: 344273 - DNA, 25 bp, Homo sapien
ctgagcacagtccccagagaaccct

SEQ ID NO: 344274 - DNA, 25 bp, Homo sapien
gggatcgtgtcgtctttgcgaatga

SEQ ID NO: 344275 - DNA, 25 bp, Homo sapien
tcgtctttgcgaatgattccggtgc

SEQ ID NO: 344276 - DNA, 25 bp, Homo sapien
ttgcgaatgattccggtgcttgcca

SEQ ID NO: 344277 - DNA, 25 bp, Homo sapien
gaatgattccggtgcttgccaagtg

SEQ ID NO: 344278 - DNA, 25 bp, Homo sapien
caggaaggttgatggatgtggatct

SEQ ID NO: 344279 - DNA, 25 bp, Homo sapien
aggaaggttgatggatgtggatctg

SEQ ID NO: 344280 - DNA, 25 bp, Homo sapien
ggaaggttgatggatgtggatctga

SEQ ID NO: 344281 - DNA, 25 bp, Homo sapien
cgcaagccgtctgttagctcatcaa

SEQ ID NO: 344282 - DNA, 25 bp, Homo sapien
cgtctgttagctcatcaagcctcat

SEQ ID NO: 344283 - DNA, 25 bp, Homo sapien
gccgtctgttagctcatcaagcctc

SEQ ID NO: 344284 - DNA, 25 bp, Homo sapien
aagccgtctgttagctcatcaagcc

SEQ ID NO: 344285 - DNA, 25 bp, Homo sapien
ttaccaatgaagaaggctggatgaa

SEQ ID NO: 344286 - DNA, 25 bp, Homo sapien
cttaccaatgaagaaggctggatga

SEQ ID NO: 344287 - DNA, 25 bp, Homo sapien
taccaatgaagaaggctggatgaaa

SEQ ID NO: 344288 - DNA, 25 bp, Homo sapien
accaatgaagaaggctggatgaaaa

SEQ ID NO: 344289 - DNA, 25 bp, Homo sapien
cttgtgatgtgaatcaagtctgtgg

SEQ ID NO: 344290 - DNA, 25 bp, Homo sapien
gctcagtgcttgtgatgtgaatcaa

SEQ ID NO: 344291 - DNA, 25 bp, Homo sapien
ttgtgatgtgaatcaagtctgtgga

SEQ ID NO: 344292 - DNA, 25 bp, Homo sapien
catgctcagtgcttgtgatgtgaat

SEQ ID NO: 344293 - DNA, 25 bp, Homo sapien
gatgacttagtcctctcacttggaa

SEQ ID NO: 344294 - DNA, 25 bp, Homo sapien
cctgcccaaggaggtagaggctaag

SEQ ID NO: 344295 - DNA, 25 bp, Homo sapien
acttaggccaatgcatgaatcccag

SEQ ID NO: 344296 - DNA, 25 bp, Homo sapien
gacttttcacaatactcagggctgg

SEQ ID NO: 344297 - DNA, 25 bp, Homo sapien
ggacttattgtatggtgggttttga

SEQ ID NO: 344298 - DNA, 25 bp, Homo sapien
gaaatcaatttaccttgttagttga

SEQ ID NO: 344299 - DNA, 25 bp, Homo sapien
agaattaagtttctatggcacatag

SEQ ID NO: 344300 - DNA, 25 bp, Homo sapien
cagtttccgttaacctatcgatgac

SEQ ID NO: 344301 - DNA, 25 bp, Homo sapien
ccgtatcaaggtcattagtgggaga

SEQ ID NO: 344302 - DNA, 25 bp, Homo sapien
ggactctttctgtacataaggcagc

SEQ ID NO: 344303 - DNA, 25 bp, Homo sapien
ccactgggctgtacgaaggcaggta

SEQ ID NO: 344304 - DNA, 25 bp, Homo sapien
ggcaggtatcttgtccagcccactg

SEQ ID NO: 344305 - DNA, 25 bp, Homo sapien
ctctttctcgtgtagtccttgcact

SEQ ID NO: 344306 - DNA, 25 bp, Homo sapien
tccactctttctcgtgtagtccttg

SEQ ID NO: 344307 - DNA, 25 bp, Homo sapien
actctttctcgtgtagtccttgcac

SEQ ID NO: 344308 - DNA, 25 bp, Homo sapien
cactctttctcgtgtagtccttgca

SEQ ID NO: 344309 - DNA, 25 bp, Homo sapien
ctctggagatatgagcaggggagga

SEQ ID NO: 344310 - DNA, 25 bp, Homo sapien
tggagaggggcagcaaggatgtttt

SEQ ID NO: 344311 - DNA, 25 bp, Homo sapien
agaggggcagcaaggatgttttggg

SEQ ID NO: 344312 - DNA, 25 bp, Homo sapien
ctgtggagaggggcagcaaggatgt

SEQ ID NO: 344313 - DNA, 25 bp, Homo sapien
gaggggcagcaaggatgttttgggg

SEQ ID NO: 344314 - DNA, 25 bp, Homo sapien
gggtctcagagtcctggtcaaagtg

SEQ ID NO: 344315 - DNA, 25 bp, Homo sapien
aggccaatctgggtctcagagtcct

SEQ ID NO: 344316 - DNA, 25 bp, Homo sapien
gccaatctgggtctcagagtcctgg

SEQ ID NO: 344317 - DNA, 25 bp, Homo sapien
tctcagagtcctggtcaaagtgcat

SEQ ID NO: 344318 - DNA, 25 bp, Homo sapien
tatgcatggtatgagacagggatcc

SEQ ID NO: 344319 - DNA, 25 bp, Homo sapien
ttccaactaattgcacggccctgag

SEQ ID NO: 344320 - DNA, 25 bp, Homo sapien
tctgaagtcttaaggccagtttccc

SEQ ID NO: 344321 - DNA, 25 bp, Homo sapien
ttaacatgctgaatgacacgtggat

SEQ ID NO: 344322 - DNA, 25 bp, Homo sapien
tactaaggaccatgtattcccctgc

SEQ ID NO: 344323 - DNA, 25 bp, Homo sapien
gaaggcctgggataactctctcctt

SEQ ID NO: 344324 - DNA, 25 bp, Homo sapien
gtttatcttgaaggcctacaaaggc

SEQ ID NO: 344325 - DNA, 25 bp, Homo sapien
ccatgtaaccaagaaacttcccgtg

SEQ ID NO: 344326 - DNA, 25 bp, Homo sapien
tcagggtagcttacttccttgtgtg

SEQ ID NO: 344327 - DNA, 25 bp, Homo sapien
gcagtctttcagatttaactccagt

SEQ ID NO: 344328 - DNA, 25 bp, Homo sapien
tatctggtaagtccaatatttgcag

SEQ ID NO: 344329 - DNA, 25 bp, Homo sapien
tttgctcccacacatgtaatttcag

SEQ ID NO: 344330 - DNA, 25 bp, Homo sapien
ccatgtggctcacccagaaaatgct

SEQ ID NO: 344331 - DNA, 25 bp, Homo sapien
caacaatattggatggaagggcttc

SEQ ID NO: 344332 - DNA, 25 bp, Homo sapien
tcaagggagtggctaggtaacagac

SEQ ID NO: 344333 - DNA, 25 bp, Homo sapien
gaactgaataaatgccgatggaagg

SEQ ID NO: 344334 - DNA, 25 bp, Homo sapien
acacgtctctgtagcactgctcgga

SEQ ID NO: 344335 - DNA, 25 bp, Homo sapien
ctttagatcagacacgtctctgtag

SEQ ID NO: 344336 - DNA, 25 bp, Homo sapien
tgctcggagcgggtgtggtctgaca

SEQ ID NO: 344337 - DNA, 25 bp, Homo sapien
ggttttgtttgatgacggcattgaa

SEQ ID NO: 344338 - DNA, 25 bp, Homo sapien
tccctctctgcggtcagcctccaca

SEQ ID NO: 344339 - DNA, 25 bp, Homo sapien
taaggatgtagagagcatgcccatg

SEQ ID NO: 344340 - DNA, 25 bp, Homo sapien
ctggtcagctaaggatgtagagagc

SEQ ID NO: 344341 - DNA, 25 bp, Homo sapien
tgtagagagcatgcccatgagctcc

SEQ ID NO: 344342 - DNA, 25 bp, Homo sapien
cgctccttgtcttgaaacatcttca

SEQ ID NO: 344343 - DNA, 25 bp, Homo sapien
agagcttagctagggtgcagcttcc

SEQ ID NO: 344344 - DNA, 25 bp, Homo sapien
taatcttgattcatgtctcgagagc

SEQ ID NO: 344345 - DNA, 25 bp, Homo sapien
tgcagcttccaaagttggaccggga

SEQ ID NO: 344346 - DNA, 25 bp, Homo sapien
taagtttgcatcgatgtgggaaccg

SEQ ID NO: 344347 - DNA, 25 bp, Homo sapien
ctgggccataggcaagctgctcttg

SEQ ID NO: 344348 - DNA, 25 bp, Homo sapien
gaatgtcacacgtgtgctcggctga

SEQ ID NO: 344349 - DNA, 25 bp, Homo sapien
cattagaactaataaagaccctgtg

SEQ ID NO: 344350 - DNA, 25 bp, Homo sapien
cacaggttattcctataaccaatat

SEQ ID NO: 344351 - DNA, 25 bp, Homo sapien
acatcctcataggtcctgcattcag

SEQ ID NO: 344352 - DNA, 25 bp, Homo sapien
gttattcctataaccaatatcctca

SEQ ID NO: 344353 - DNA, 25 bp, Homo sapien
aaccaatatcctcacatcctcatag

SEQ ID NO: 344354 - DNA, 25 bp, Homo sapien
gcctggcattcgctgctgcctgatc

SEQ ID NO: 344355 - DNA, 25 bp, Homo sapien
ggtgccaaaaagcttgactttggcc

SEQ ID NO: 344356 - DNA, 25 bp, Homo sapien
tggtgccaaaaagcttgactttggc

SEQ ID NO: 344357 - DNA, 25 bp, Homo sapien
tggcctttgcctggcattcgctgct

SEQ ID NO: 344358 - DNA, 25 bp, Homo sapien
ccagccagatgacctctgattctta

SEQ ID NO: 344359 - DNA, 25 bp, Homo sapien
cccagccagatgacctctgattctt

SEQ ID NO: 344360 - DNA, 25 bp, Homo sapien
gccagatgacctctgattcttatga

SEQ ID NO: 344361 - DNA, 25 bp, Homo sapien
agatgacctctgattcttatgacaa

SEQ ID NO: 344362 - DNA, 25 bp, Homo sapien
tgtttcctcagtatattcgcccggc

SEQ ID NO: 344363 - DNA, 25 bp, Homo sapien
acccagcgtgggacatacaaaaatg

SEQ ID NO: 344364 - DNA, 25 bp, Homo sapien
ttggctcaataagcaaagcagaacg

SEQ ID NO: 344365 - DNA, 25 bp, Homo sapien
ccttgagccttgctagaggtgagtc

SEQ ID NO: 344366 - DNA, 25 bp, Homo sapien
tggaaaacggaatagcatggaggct

SEQ ID NO: 344367 - DNA, 25 bp, Homo sapien
cagacattgccggtgtcccatgggt

SEQ ID NO: 344368 - DNA, 25 bp, Homo sapien
aaatttcccacgagcaaccatgaga

SEQ ID NO: 344369 - DNA, 25 bp, Homo sapien
taagtgcccgtagaacctcctggct

SEQ ID NO: 344370 - DNA, 25 bp, Homo sapien
ggatcccaggttgaccaataaggca

SEQ ID NO: 344371 - DNA, 25 bp, Homo sapien
gacactgtcccatgcactttgaaaa

SEQ ID NO: 344372 - DNA, 25 bp, Homo sapien
ggacttggaccaaagactgttcaac

SEQ ID NO: 344373 - DNA, 25 bp, Homo sapien
aaaatatgagctataggatcccagg

SEQ ID NO: 344374 - DNA, 25 bp, Homo sapien
agtagcccatggcagtactgccaag

SEQ ID NO: 344375 - DNA, 25 bp, Homo sapien
aggctttcagctggccgactactct

SEQ ID NO: 344376 - DNA, 25 bp, Homo sapien
gcagtactgccaagcaggctttcag

SEQ ID NO: 344377 - DNA, 25 bp, Homo sapien
gaataagctttggttgggtcactga

SEQ ID NO: 344378 - DNA, 25 bp, Homo sapien
cattgccttccacggtttgctctaa

SEQ ID NO: 344379 - DNA, 25 bp, Homo sapien
ccatggtatctgactgtactgccca

SEQ ID NO: 344380 - DNA, 25 bp, Homo sapien
gagccagtccttgagcattccaatt

SEQ ID NO: 344381 - DNA, 25 bp, Homo sapien
tttgctctaacctcagaggtgagcc

SEQ ID NO: 344382 - DNA, 25 bp, Homo sapien
gcagagcggttggaaactgacccgt

SEQ ID NO: 344383 - DNA, 25 bp, Homo sapien
tgacagcttcttgcatctaggagat

SEQ ID NO: 344384 - DNA, 25 bp, Homo sapien
caagactgtgaaagacgcctgtaat

SEQ ID NO: 344385 - DNA, 25 bp, Homo sapien
aactgacccgtttctgtgcaagact

SEQ ID NO: 344386 - DNA, 25 bp, Homo sapien
caagagcttcatgctaggatctgcc

SEQ ID NO: 344387 - DNA, 25 bp, Homo sapien
ttgtggccatgtaggctttggaaaa

SEQ ID NO: 344388 - DNA, 25 bp, Homo sapien
ttatccatccgaagctgcggtggct

SEQ ID NO: 344389 - DNA, 25 bp, Homo sapien
taagttgggaacagctctagtaaaa

SEQ ID NO: 344390 - DNA, 25 bp, Homo sapien
ggagaccttagcaaaccccagtcaa

SEQ ID NO: 344391 - DNA, 25 bp, Homo sapien
ctttctgaccaaagggcttgggaga

SEQ ID NO: 344392 - DNA, 25 bp, Homo sapien
gcttgggagaccttagcaaacccca

SEQ ID NO: 344393 - DNA, 25 bp, Homo sapien
ttttccagtcggtaaatctcattcc

SEQ ID NO: 344394 - DNA, 25 bp, Homo sapien
agactgccacagcccaacggttact

SEQ ID NO: 344395 - DNA, 25 bp, Homo sapien
tgccacagcccaacggttactctac

SEQ ID NO: 344396 - DNA, 25 bp, Homo sapien
gatctggattagaggtcaggagagg

SEQ ID NO: 344397 - DNA, 25 bp, Homo sapien
catactgataaagatatccaatagg

SEQ ID NO: 344398 - DNA, 25 bp, Homo sapien
ccaagggctggccatgggcggtgat

SEQ ID NO: 344399 - DNA, 25 bp, Homo sapien
ccatgggcggtgatttttccacagg

SEQ ID NO: 344400 - DNA, 25 bp, Homo sapien
gctggccatgggcggtgatttttcc

SEQ ID NO: 344401 - DNA, 25 bp, Homo sapien
ggccatgggcggtgatttttccaca

SEQ ID NO: 344402 - DNA, 25 bp, Homo sapien
aatttacactcttgtactgttggcc

SEQ ID NO: 344403 - DNA, 25 bp, Homo sapien
gaatttacactcttgtactgttggc

SEQ ID NO: 344404 - DNA, 25 bp, Homo sapien
atttacactcttgtactgttggcca

SEQ ID NO: 344405 - DNA, 25 bp, Homo sapien
cttgctcatatagctctcccttggc

SEQ ID NO: 344406 - DNA, 25 bp, Homo sapien
caggcacgccaatcctcttaaaaaa

SEQ ID NO: 344407 - DNA, 25 bp, Homo sapien
tgcattgcttttgatagtaccactt

SEQ ID NO: 344408 - DNA, 25 bp, Homo sapien
tagtaccacttaaccctctcaggca

SEQ ID NO: 344409 - DNA, 25 bp, Homo sapien
tctcaggcacgccaatcctcttaaa

SEQ ID NO: 344410 - DNA, 25 bp, Homo sapien
tattcttaagcctgatccttgggca

SEQ ID NO: 344411 - DNA, 25 bp, Homo sapien
tcagaacagctactgatgagagagg

SEQ ID NO: 344412 - DNA, 25 bp, Homo sapien
ggatgaaattcaagccaggacttac

SEQ ID NO: 344413 - DNA, 25 bp, Homo sapien
agagaggccctccttgcatggcgaa

SEQ ID NO: 344414 - DNA, 25 bp, Homo sapien
taagctggtccatagtggctctggg

SEQ ID NO: 344415 - DNA, 25 bp, Homo sapien
tataaagccttcctcggttgtgtcg

SEQ ID NO: 344416 - DNA, 25 bp, Homo sapien
ttaacagtgacaggcatcagcatcc

SEQ ID NO: 344417 - DNA, 25 bp, Homo sapien
gaaatttgcctgtcttagccttggg

SEQ ID NO: 344418 - DNA, 25 bp, Homo sapien
ccggaagggcccctcattcctctcg

SEQ ID NO: 344419 - DNA, 25 bp, Homo sapien
aagggcccctcattcctctcgtcca

SEQ ID NO: 344420 - DNA, 25 bp, Homo sapien
ggaagggcccctcattcctctcgtc

SEQ ID NO: 344421 - DNA, 25 bp, Homo sapien
agggcccctcattcctctcgtccat

SEQ ID NO: 344422 - DNA, 25 bp, Homo sapien
gattcttcggctcggtgacaattgc

SEQ ID NO: 344423 - DNA, 25 bp, Homo sapien
caaaaggtgctctccaaaggtatac

SEQ ID NO: 344424 - DNA, 25 bp, Homo sapien
ccagatcataagcaaggagggcaga

SEQ ID NO: 344425 - DNA, 25 bp, Homo sapien
tagcagaacgtgcacacaggacctt

SEQ ID NO: 344426 - DNA, 25 bp, Homo sapien
ttttacatatcgaaatactgatcca

SEQ ID NO: 344427 - DNA, 25 bp, Homo sapien
cattcatgtctgtgggccattattt

SEQ ID NO: 344428 - DNA, 25 bp, Homo sapien
tttaatctatggtgcacattttttc

SEQ ID NO: 344429 - DNA, 25 bp, Homo sapien
catatcgaaatactgatccatgatt

SEQ ID NO: 344430 - DNA, 25 bp, Homo sapien
tcacggcaggtatatcactaatttt

SEQ ID NO: 344431 - DNA, 25 bp, Homo sapien
tctcatgcaccctatgaatttttca

SEQ ID NO: 344432 - DNA, 25 bp, Homo sapien
cagtaaagccatactaaagcagata

SEQ ID NO: 344433 - DNA, 25 bp, Homo sapien
gaaacaccaccattcacggcaggta

SEQ ID NO: 344434 - DNA, 25 bp, Homo sapien
accttgcccgttagaacaactgcca

SEQ ID NO: 344435 - DNA, 25 bp, Homo sapien
cattcaaggtggatattccccgggt

SEQ ID NO: 344436 - DNA, 25 bp, Homo sapien
tggatgagcagagatttcattcaag

SEQ ID NO: 344437 - DNA, 25 bp, Homo sapien
cttgcccgttagaacaactgccaac

SEQ ID NO: 344438 - DNA, 25 bp, Homo sapien
tggcaccttctctacctgatgctgg

SEQ ID NO: 344439 - DNA, 25 bp, Homo sapien
gactcttgtccctattgaggtgttg

SEQ ID NO: 344440 - DNA, 25 bp, Homo sapien
caggacttacgtggcctggaagcaa

SEQ ID NO: 344441 - DNA, 25 bp, Homo sapien
tgcatgcgggatggacaggacttac

SEQ ID NO: 344442 - DNA, 25 bp, Homo sapien
ggaaagtgggccactggcttgtaga

SEQ ID NO: 344443 - DNA, 25 bp, Homo sapien
ttaaactgatggaggcaggaaagtg

SEQ ID NO: 344444 - DNA, 25 bp, Homo sapien
caggaaagtgggccactggcttgta

SEQ ID NO: 344445 - DNA, 25 bp, Homo sapien
gaggcaggaaagtgggccactggct

SEQ ID NO: 344446 - DNA, 25 bp, Homo sapien
tgaaaagccgcgacacgggcctcat

SEQ ID NO: 344447 - DNA, 25 bp, Homo sapien
tccttgagcatacggggtgcggaca

SEQ ID NO: 344448 - DNA, 25 bp, Homo sapien
cggacagtgaaaagccgcgacacgg

SEQ ID NO: 344449 - DNA, 25 bp, Homo sapien
gtgcggacagtgaaaagccgcgaca

SEQ ID NO: 344450 - DNA, 25 bp, Homo sapien
aaatgaaatgaccactccatgtctc

SEQ ID NO: 344451 - DNA, 25 bp, Homo sapien
tcatcactataaactagggacaaaa

SEQ ID NO: 344452 - DNA, 25 bp, Homo sapien
cagcctgctattttcttaggcaaat

SEQ ID NO: 344453 - DNA, 25 bp, Homo sapien
gactggcccagagtaagggctatgt

SEQ ID NO: 344454 - DNA, 25 bp, Homo sapien
ggaaatggaattgtgccttgtccct

SEQ ID NO: 344455 - DNA, 25 bp, Homo sapien
caaattgcaagatttcctttagcct

SEQ ID NO: 344456 - DNA, 25 bp, Homo sapien
ataacagtaacagtccttcaggcag

SEQ ID NO: 344457 - DNA, 25 bp, Homo sapien
attgcaagatttcctttagcctcaa

SEQ ID NO: 344458 - DNA, 25 bp, Homo sapien
tattgacttataggcatgaggagtc

SEQ ID NO: 344459 - DNA, 25 bp, Homo sapien
gcgcgggacaccatgtttggctaca

SEQ ID NO: 344460 - DNA, 25 bp, Homo sapien
tcaccacgactggactaaaatatgt

SEQ ID NO: 344461 - DNA, 25 bp, Homo sapien
gtcagttcctacagcatcttacgca

SEQ ID NO: 344462 - DNA, 25 bp, Homo sapien
aagatgcgtaacaccaactcacggg

SEQ ID NO: 344463 - DNA, 25 bp, Homo sapien
tcatttggatacagcaacagggcaa

SEQ ID NO: 344464 - DNA, 25 bp, Homo sapien
taatcatattcgcaggcaagcactg

SEQ ID NO: 344465 - DNA, 25 bp, Homo sapien
tagttcccgcattggttcaagatgc

SEQ ID NO: 344466 - DNA, 25 bp, Homo sapien
tttaaactgagcaatcaatcccaac

SEQ ID NO: 344467 - DNA, 25 bp, Homo sapien
ccctgaacatagtatgtgctacata

SEQ ID NO: 344468 - DNA, 25 bp, Homo sapien
aagccatacatctcttgaggccaca

SEQ ID NO: 344469 - DNA, 25 bp, Homo sapien
tctgcactaggcacagaagccatac

SEQ ID NO: 344470 - DNA, 25 bp, Homo sapien
aaacaaggttgtctgaatgggcatc

SEQ ID NO: 344471 - DNA, 25 bp, Homo sapien
gacttcatgtcagctatttgggaga

SEQ ID NO: 344472 - DNA, 25 bp, Homo sapien
taaggtactcacaggctgaagaggg

SEQ ID NO: 344473 - DNA, 25 bp, Homo sapien
catagggaccagcttttgcaatggc

SEQ ID NO: 344474 - DNA, 25 bp, Homo sapien
taactgctaccagatctgtctccag

SEQ ID NO: 344475 - DNA, 25 bp, Homo sapien
gccttggacagtgtttcatgccgga

SEQ ID NO: 344476 - DNA, 25 bp, Homo sapien
cattagttgaactctcatgggaacc

SEQ ID NO: 344477 - DNA, 25 bp, Homo sapien
caatctagcatgatttggaagccaa

SEQ ID NO: 344478 - DNA, 25 bp, Homo sapien
ggaatgcaactgacatagggaacac

SEQ ID NO: 344479 - DNA, 25 bp, Homo sapien
gactgattagtatgacctggtcagt

SEQ ID NO: 344480 - DNA, 25 bp, Homo sapien
gcacgctaaatccttcatgacctag

SEQ ID NO: 344481 - DNA, 25 bp, Homo sapien
gacctagctcctacctacttttcga

SEQ ID NO: 344482 - DNA, 25 bp, Homo sapien
tctcttcacggatatgcagatgagc

SEQ ID NO: 344483 - DNA, 25 bp, Homo sapien
taatttccaccaggacctactctgg

SEQ ID NO: 344484 - DNA, 25 bp, Homo sapien
taaggaccctgcatacatacctctg

SEQ ID NO: 344485 - DNA, 25 bp, Homo sapien
tgctaccatgggatatgacctgtgg

SEQ ID NO: 344486 - DNA, 25 bp, Homo sapien
tatggagagtaggagtaaccctgac

SEQ ID NO: 344487 - DNA, 25 bp, Homo sapien
taagagtggacatgaacctgtgcaa

SEQ ID NO: 344488 - DNA, 25 bp, Homo sapien
gcaatttgaaaagaccctacaggta

SEQ ID NO: 344489 - DNA, 25 bp, Homo sapien
tggagaaaccccgtactaaggcaga

SEQ ID NO: 344490 - DNA, 25 bp, Homo sapien
acattattgtacagccccaatggct

SEQ ID NO: 344491 - DNA, 25 bp, Homo sapien
tctacattattgtacagccccaatg

SEQ ID NO: 344492 - DNA, 25 bp, Homo sapien
tacattattgtacagccccaatggc

SEQ ID NO: 344493 - DNA, 25 bp, Homo sapien
ctacattattgtacagccccaatgg

SEQ ID NO: 344494 - DNA, 25 bp, Homo sapien
caggctcccagtggcagagtagttg

SEQ ID NO: 344495 - DNA, 25 bp, Homo sapien
tctcgtgagaagcataccataccca

SEQ ID NO: 344496 - DNA, 25 bp, Homo sapien
tcagacaagagctgcaaggacatct

SEQ ID NO: 344497 - DNA, 25 bp, Homo sapien
tcagtgcctagaacctaagacgtgc

SEQ ID NO: 344498 - DNA, 25 bp, Homo sapien
caccagctggcgtaataaggccttt

SEQ ID NO: 344499 - DNA, 25 bp, Homo sapien
aatcagcctgtgaggcagtatccga

SEQ ID NO: 344500 - DNA, 25 bp, Homo sapien
tgtgggagtctagtacatacgacca

SEQ ID NO: 344501 - DNA, 25 bp, Homo sapien
cttgagaacagcacctatgaaaggg

SEQ ID NO: 344502 - DNA, 25 bp, Homo sapien
cccagtagggattcgataaacgcca

SEQ ID NO: 344503 - DNA, 25 bp, Homo sapien
gagcacaattaggagctcctccgtg

SEQ ID NO: 344504 - DNA, 25 bp, Homo sapien
caagacacgggcactctgatctcaa

SEQ ID NO: 344505 - DNA, 25 bp, Homo sapien
tctatgaagattagagagctgtgcc

SEQ ID NO: 344506 - DNA, 25 bp, Homo sapien
ttattgacacgaataagaaaagtaa

SEQ ID NO: 344507 - DNA, 25 bp, Homo sapien
atgtcattgttagtgtcattattga

SEQ ID NO: 344508 - DNA, 25 bp, Homo sapien
cattgttagtgtcattattgacacg

SEQ ID NO: 344509 - DNA, 25 bp, Homo sapien
gtcattgttagtgtcattattgaca

SEQ ID NO: 344510 - DNA, 25 bp, Homo sapien
ccgtgacgagagttacaataatagc

SEQ ID NO: 344511 - DNA, 25 bp, Homo sapien
tcatataccttgaggccgtgacgag

SEQ ID NO: 344512 - DNA, 25 bp, Homo sapien
catatccatgccacagttagtacac

SEQ ID NO: 344513 - DNA, 25 bp, Homo sapien
ctaagatttgtgctaacctgccact

SEQ ID NO: 344514 - DNA, 25 bp, Homo sapien
gtggcaaaggtgatatccgtgtcaa

SEQ ID NO: 344515 - DNA, 25 bp, Homo sapien
aggacgatgactctctccaggttgg

SEQ ID NO: 344516 - DNA, 25 bp, Homo sapien
cttcatcagaccataaatcccagag

SEQ ID NO: 344517 - DNA, 25 bp, Homo sapien
catcagaccataaatcccagagtaa

SEQ ID NO: 344518 - DNA, 25 bp, Homo sapien
aagaaccgtgcagttacttgaggag

SEQ ID NO: 344519 - DNA, 25 bp, Homo sapien
ttcatcctatcaggcagtgtgtggg

SEQ ID NO: 344520 - DNA, 25 bp, Homo sapien
aggtatgcccgttgtttagcttcca

SEQ ID NO: 344521 - DNA, 25 bp, Homo sapien
tacacacgcatttttgttacatggg

SEQ ID NO: 344522 - DNA, 25 bp, Homo sapien
gtgactgcccaaaacacaggggatg

SEQ ID NO: 344523 - DNA, 25 bp, Homo sapien
ctctacaggtgactgcccaaaacac

SEQ ID NO: 344524 - DNA, 25 bp, Homo sapien
aggtgactgcccaaaacacagggga

SEQ ID NO: 344525 - DNA, 25 bp, Homo sapien
ctacaggtgactgcccaaaacacag

SEQ ID NO: 344526 - DNA, 25 bp, Homo sapien
tcaaacacctggttagagccaacta

SEQ ID NO: 344527 - DNA, 25 bp, Homo sapien
tcctccgtgctgaatgaaacagcct

SEQ ID NO: 344528 - DNA, 25 bp, Homo sapien
tgttcacggcagataaaataacgtt

SEQ ID NO: 344529 - DNA, 25 bp, Homo sapien
gagccaactatgagcaagcacatgc

SEQ ID NO: 344530 - DNA, 25 bp, Homo sapien
tttggtgcttgacaattttccttga

SEQ ID NO: 344531 - DNA, 25 bp, Homo sapien
cttagttgtcgaggctccttttgat

SEQ ID NO: 344532 - DNA, 25 bp, Homo sapien
cttttgatctgcaggtatacaattc

SEQ ID NO: 344533 - DNA, 25 bp, Homo sapien
tctgcaggtatacaattccttttgg

SEQ ID NO: 344534 - DNA, 25 bp, Homo sapien
caagtgctgtgatttgcagaaccac

SEQ ID NO: 344535 - DNA, 25 bp, Homo sapien
tcagaccaactgtagctcaaggtgg

SEQ ID NO: 344536 - DNA, 25 bp, Homo sapien
gggagcacatttaagcaagtcagca

SEQ ID NO: 344537 - DNA, 25 bp, Homo sapien
tatgcagatctagaccaagtgctgt

SEQ ID NO: 344538 - DNA, 25 bp, Homo sapien
actacgcccagcacacttcggtgtc

SEQ ID NO: 344539 - DNA, 25 bp, Homo sapien
cacttcggtgtcttcttacaaagta

SEQ ID NO: 344540 - DNA, 25 bp, Homo sapien
aaagtaaagggtgcaggctcacagg

SEQ ID NO: 344541 - DNA, 25 bp, Homo sapien
cttacaaagtaaagggtgcaggctc

SEQ ID NO: 344542 - DNA, 25 bp, Homo sapien
gtctgctcaaccacaagtaataacg

SEQ ID NO: 344543 - DNA, 25 bp, Homo sapien
gtaataacgcttccagctagaggag

SEQ ID NO: 344544 - DNA, 25 bp, Homo sapien
gctagaggagatcacggaagtgcct

SEQ ID NO: 344545 - DNA, 25 bp, Homo sapien
tctggcattgctacagtctgctcaa

SEQ ID NO: 344546 - DNA, 25 bp, Homo sapien
agcgggcaccatccaggtctggaag

SEQ ID NO: 344547 - DNA, 25 bp, Homo sapien
gccaggatctgctccgcaatggagt

SEQ ID NO: 344548 - DNA, 25 bp, Homo sapien
gagtcagcaataaggtggaagtgca

SEQ ID NO: 344549 - DNA, 25 bp, Homo sapien
tcgtctgcattgtagaagtccacac

SEQ ID NO: 344550 - DNA, 25 bp, Homo sapien
aggacatgagaatgcaatgaaagtt

SEQ ID NO: 344551 - DNA, 25 bp, Homo sapien
aattaacagactagacttcagggag

SEQ ID NO: 344552 - DNA, 25 bp, Homo sapien
taaaacagtttggacagggcacggc

SEQ ID NO: 344553 - DNA, 25 bp, Homo sapien
acagactagacttcagggaggtgtg

SEQ ID NO: 344554 - DNA, 25 bp, Homo sapien
aggatgaaggccgtagtactgaaag

SEQ ID NO: 344555 - DNA, 25 bp, Homo sapien
gaaggccgtagtactgaaaggagcc

SEQ ID NO: 344556 - DNA, 25 bp, Homo sapien
ccacaggatgaaggccgtagtactg

SEQ ID NO: 344557 - DNA, 25 bp, Homo sapien
gatgaaggccgtagtactgaaagga

SEQ ID NO: 344558 - DNA, 25 bp, Homo sapien
tttgaccagggtgacgacatcccgg

SEQ ID NO: 344559 - DNA, 25 bp, Homo sapien
ctatggaacaggacggatttgacca

SEQ ID NO: 344560 - DNA, 25 bp, Homo sapien
gctggcattgtatccggcgcagaca

SEQ ID NO: 344561 - DNA, 25 bp, Homo sapien
ggcgcagacaatagcaacgtggatt

SEQ ID NO: 344562 - DNA, 25 bp, Homo sapien
ccttgctcccatgacacgggcttcc

SEQ ID NO: 344563 - DNA, 25 bp, Homo sapien
gcccttgctcccatgacacgggctt

SEQ ID NO: 344564 - DNA, 25 bp, Homo sapien
gctcccatgacacgggcttccagat

SEQ ID NO: 344565 - DNA, 25 bp, Homo sapien
ttgctcccatgacacgggcttccag

SEQ ID NO: 344566 - DNA, 25 bp, Homo sapien
cttgttatcccaaccagccatgtca

SEQ ID NO: 344567 - DNA, 25 bp, Homo sapien
gtccatcccatacagggtgatgtga

SEQ ID NO: 344568 - DNA, 25 bp, Homo sapien
cccaaccagccatgtcaaaatgcag

SEQ ID NO: 344569 - DNA, 25 bp, Homo sapien
tacagggtgatgtgacaatgtcctc

SEQ ID NO: 344570 - DNA, 25 bp, Homo sapien
tcaagaatgccagctcttggcatct

SEQ ID NO: 344571 - DNA, 25 bp, Homo sapien
gagggcaatcgggactttggacaac

SEQ ID NO: 344572 - DNA, 25 bp, Homo sapien
caggaggcatttgcaaggggtgagg

SEQ ID NO: 344573 - DNA, 25 bp, Homo sapien
catttgcaaggggtgagggcaatcg

SEQ ID NO: 344574 - DNA, 25 bp, Homo sapien
gcggtgacagagacacgggctttcc

SEQ ID NO: 344575 - DNA, 25 bp, Homo sapien
actcggagctgttgcctgccacgat

SEQ ID NO: 344576 - DNA, 25 bp, Homo sapien
tgtgcctgggactccagcggtgaca

SEQ ID NO: 344577 - DNA, 25 bp, Homo sapien
gatgccagcccgaaggttctcgctg

SEQ ID NO: 344578 - DNA, 25 bp, Homo sapien
tggcccgtcatatactcaaggagtc

SEQ ID NO: 344579 - DNA, 25 bp, Homo sapien
tctgagtatggacaaaagggctttg

SEQ ID NO: 344580 - DNA, 25 bp, Homo sapien
tcctgcttctataactggcccgtca

SEQ ID NO: 344581 - DNA, 25 bp, Homo sapien
gcattcaaatcgtcaccaaccaagg

SEQ ID NO: 344582 - DNA, 25 bp, Homo sapien
tgcccagggtgagttggctccttct

SEQ ID NO: 344583 - DNA, 25 bp, Homo sapien
gcccagggtgagttggctccttctc

SEQ ID NO: 344584 - DNA, 25 bp, Homo sapien
ttactgtaggtaaagcgccaccaca

SEQ ID NO: 344585 - DNA, 25 bp, Homo sapien
cagtggttgtagtaatagcagcaag

SEQ ID NO: 344586 - DNA, 25 bp, Homo sapien
tctggtccatggcagcaatctcagc

SEQ ID NO: 344587 - DNA, 25 bp, Homo sapien
agcgccaccacagtctggtccatgg

SEQ ID NO: 344588 - DNA, 25 bp, Homo sapien
taggaaggtgtggagagtaaaccat

SEQ ID NO: 344589 - DNA, 25 bp, Homo sapien
tctgagatactaacagttttgtagt

SEQ ID NO: 344590 - DNA, 25 bp, Homo sapien
gatactaacagttttgtagtgagct

SEQ ID NO: 344591 - DNA, 25 bp, Homo sapien
actaacagttttgtagtgagctgct

SEQ ID NO: 344592 - DNA, 25 bp, Homo sapien
tttccacatccgtggtctgaggtga

SEQ ID NO: 344593 - DNA, 25 bp, Homo sapien
ttgacaaggcatgagagacctggag

SEQ ID NO: 344594 - DNA, 25 bp, Homo sapien
ggtgtagcccgagagtggatttcca

SEQ ID NO: 344595 - DNA, 25 bp, Homo sapien
ttaagcttgtaggaaaggttgacaa

SEQ ID NO: 344596 - DNA, 25 bp, Homo sapien
tcttagggccagaagctttgtgaac

SEQ ID NO: 344597 - DNA, 25 bp, Homo sapien
cattccatcattgagctctccatga

SEQ ID NO: 344598 - DNA, 25 bp, Homo sapien
ggagcctctcgcaactgagcctgat

SEQ ID NO: 344599 - DNA, 25 bp, Homo sapien
tgggcagtaccctcatctgccggga

SEQ ID NO: 344600 - DNA, 25 bp, Homo sapien
gatctgacaagctgggtctgctcta

SEQ ID NO: 344601 - DNA, 25 bp, Homo sapien
tctagcactgctgctagacccctga

SEQ ID NO: 344602 - DNA, 25 bp, Homo sapien
cttgctgccaaaggaatcacttagg

SEQ ID NO: 344603 - DNA, 25 bp, Homo sapien
tggcctctaagcagccccggatctg

SEQ ID NO: 344604 - DNA, 25 bp, Homo sapien
tgaggaagattcctctggaatctat

SEQ ID NO: 344605 - DNA, 25 bp, Homo sapien
ccacagaaagcctttgaacagggag

SEQ ID NO: 344606 - DNA, 25 bp, Homo sapien
attcctctggaatctatacgaaagg

SEQ ID NO: 344607 - DNA, 25 bp, Homo sapien
cagggagtggcacagcctttgagga

SEQ ID NO: 344608 - DNA, 25 bp, Homo sapien
gagcacagtggaagccgacaggtaa

SEQ ID NO: 344609 - DNA, 25 bp, Homo sapien
gagcacacagctataaaattccagg

SEQ ID NO: 344610 - DNA, 25 bp, Homo sapien
actgggccctgagacattaacttgc

SEQ ID NO: 344611 - DNA, 25 bp, Homo sapien
gatcacagtgggcaacattctagag

SEQ ID NO: 344612 - DNA, 25 bp, Homo sapien
tagcacggatgggtcaatgccggca

SEQ ID NO: 344613 - DNA, 25 bp, Homo sapien
tcatggctagcacggatgggtcaat

SEQ ID NO: 344614 - DNA, 25 bp, Homo sapien
cacggatgggtcaatgccggcagca

SEQ ID NO: 344615 - DNA, 25 bp, Homo sapien
tcagtctgtcatggctagcacggat

SEQ ID NO: 344616 - DNA, 25 bp, Homo sapien
gatgacatccagtaacagcctgagc

SEQ ID NO: 344617 - DNA, 25 bp, Homo sapien
tatatcgcaatgaggaaccaagacc

SEQ ID NO: 344618 - DNA, 25 bp, Homo sapien
gatgtagcttactagagccctgtgg

SEQ ID NO: 344619 - DNA, 25 bp, Homo sapien
tcaagaaatgtcagactgtgccaag

SEQ ID NO: 344620 - DNA, 25 bp, Homo sapien
taaatgtcccacagacagtggtgca

SEQ ID NO: 344621 - DNA, 25 bp, Homo sapien
agaagcagatcactaaatgtcccac

SEQ ID NO: 344622 - DNA, 25 bp, Homo sapien
tgaaacgcatctgcagaagcagatc

SEQ ID NO: 344623 - DNA, 25 bp, Homo sapien
gaagcagatcactaaatgtcccaca

SEQ ID NO: 344624 - DNA, 25 bp, Homo sapien
catgtacaatctgacttcccagacc

SEQ ID NO: 344625 - DNA, 25 bp, Homo sapien
gaccttccagcacactctctgggat

SEQ ID NO: 344626 - DNA, 25 bp, Homo sapien
taccatgtacaatctgacttcccag

SEQ ID NO: 344627 - DNA, 25 bp, Homo sapien
caccaataccatgtacaatctgact

SEQ ID NO: 344628 - DNA, 25 bp, Homo sapien
caaaatagcccagtatcggaaccgt

SEQ ID NO: 344629 - DNA, 25 bp, Homo sapien
atagcccagtatcggaaccgtattt

SEQ ID NO: 344630 - DNA, 25 bp, Homo sapien
ttcaaaatagcccagtatcggaacc

SEQ ID NO: 344631 - DNA, 25 bp, Homo sapien
aaatagcccagtatcggaaccgtat

SEQ ID NO: 344632 - DNA, 25 bp, Homo sapien
gcgtgttttaagcaactctccatca

SEQ ID NO: 344633 - DNA, 25 bp, Homo sapien
gtgttttaagcaactctccatcatc

SEQ ID NO: 344634 - DNA, 25 bp, Homo sapien
cagcgtgttttaagcaactctccat

SEQ ID NO: 344635 - DNA, 25 bp, Homo sapien
ccagcgtgttttaagcaactctcca

SEQ ID NO: 344636 - DNA, 25 bp, Homo sapien
ccactgccatggcataattggctct

SEQ ID NO: 344637 - DNA, 25 bp, Homo sapien
atcaagaccaacatcacctcccctt

SEQ ID NO: 344638 - DNA, 25 bp, Homo sapien
ccatggcataattggctctatctac

SEQ ID NO: 344639 - DNA, 25 bp, Homo sapien
tgccatggcataattggctctatct

SEQ ID NO: 344640 - DNA, 25 bp, Homo sapien
cttagatgaaggttctgactgttcc

SEQ ID NO: 344641 - DNA, 25 bp, Homo sapien
ctgcttagatgaaggttctgactgt

SEQ ID NO: 344642 - DNA, 25 bp, Homo sapien
gcttagatgaaggttctgactgttc

SEQ ID NO: 344643 - DNA, 25 bp, Homo sapien
tagatgaaggttctgactgttccag

SEQ ID NO: 344644 - DNA, 25 bp, Homo sapien
gagaagactcaacgaggcagccaag

SEQ ID NO: 344645 - DNA, 25 bp, Homo sapien
cagagaagactcaacgaggcagcca

SEQ ID NO: 344646 - DNA, 25 bp, Homo sapien
agccaagaatttccgtctccccctg

SEQ ID NO: 344647 - DNA, 25 bp, Homo sapien
aagactcaacgaggcagccaagaat

SEQ ID NO: 344648 - DNA, 25 bp, Homo sapien
gccgtttctctgtccggagcatgaa

SEQ ID NO: 344649 - DNA, 25 bp, Homo sapien
gtccggagcatgaagtcctcggcct

SEQ ID NO: 344650 - DNA, 25 bp, Homo sapien
cagcgccgtttctctgtccggagca

SEQ ID NO: 344651 - DNA, 25 bp, Homo sapien
tttctctgtccggagcatgaagtcc

SEQ ID NO: 344652 - DNA, 25 bp, Homo sapien
cactcgtcttcagtgaacctttctt

SEQ ID NO: 344653 - DNA, 25 bp, Homo sapien
agtgaacctttcttacaaggtgctg

SEQ ID NO: 344654 - DNA, 25 bp, Homo sapien
acattgtcactcgtcttcagtgaac

SEQ ID NO: 344655 - DNA, 25 bp, Homo sapien
gaacctttcttacaaggtgctgtcc

SEQ ID NO: 344656 - DNA, 25 bp, Homo sapien
agtatttcgatctttgttcttccga

SEQ ID NO: 344657 - DNA, 25 bp, Homo sapien
ccttggagtatttcgatctttgttc

SEQ ID NO: 344658 - DNA, 25 bp, Homo sapien
gccttggagtatttcgatctttgtt

SEQ ID NO: 344659 - DNA, 25 bp, Homo sapien
tggagtatttcgatctttgttcttc

SEQ ID NO: 344660 - DNA, 25 bp, Homo sapien
gagtgttccacgctggcactgctgc

SEQ ID NO: 344661 - DNA, 25 bp, Homo sapien
tttttcgcaacaggagtgttccacg

SEQ ID NO: 344662 - DNA, 25 bp, Homo sapien
accccggacataggaccttgacacg

SEQ ID NO: 344663 - DNA, 25 bp, Homo sapien
ccttgacacgtttttcaaagatatg

SEQ ID NO: 344664 - DNA, 25 bp, Homo sapien
cattgggtccatgacacaggctgca

SEQ ID NO: 344665 - DNA, 25 bp, Homo sapien
ttcattgggtccatgacacaggctg

SEQ ID NO: 344666 - DNA, 25 bp, Homo sapien
attgggtccatgacacaggctgcaa

SEQ ID NO: 344667 - DNA, 25 bp, Homo sapien
tcattgggtccatgacacaggctgc

SEQ ID NO: 344668 - DNA, 25 bp, Homo sapien
cctccaggagggctttccgtgctgc

SEQ ID NO: 344669 - DNA, 25 bp, Homo sapien
cctaaatctttcatccggaggaatc

SEQ ID NO: 344670 - DNA, 25 bp, Homo sapien
atctttcatccggaggaatcctcca

SEQ ID NO: 344671 - DNA, 25 bp, Homo sapien
ctccaggagggctttccgtgctgct

SEQ ID NO: 344672 - DNA, 25 bp, Homo sapien
caaactcttgcattctacgatgctc

SEQ ID NO: 344673 - DNA, 25 bp, Homo sapien
cattctacgatgctcccaacttcag

SEQ ID NO: 344674 - DNA, 25 bp, Homo sapien
tcttgcattctacgatgctcccaac

SEQ ID NO: 344675 - DNA, 25 bp, Homo sapien
ttcccaaactcttgcattctacgat

SEQ ID NO: 344676 - DNA, 25 bp, Homo sapien
tgcacccttatcattgttgtccagc

SEQ ID NO: 344677 - DNA, 25 bp, Homo sapien
ggaagccttcatgcaaacctcatta

SEQ ID NO: 344678 - DNA, 25 bp, Homo sapien
tcattaagaggcacagtaattgttc

SEQ ID NO: 344679 - DNA, 25 bp, Homo sapien
cagctgttcaacgtgaatggcaaaa

SEQ ID NO: 344680 - DNA, 25 bp, Homo sapien
ttgccaactacgtcaccatccaggg

SEQ ID NO: 344681 - DNA, 25 bp, Homo sapien
ccttgacatcatctaagggttgaag

SEQ ID NO: 344682 - DNA, 25 bp, Homo sapien
aaagttcagaccttctggtcacaag

SEQ ID NO: 344683 - DNA, 25 bp, Homo sapien
ggtcacaagctctatccctctgctg

SEQ ID NO: 344684 - DNA, 25 bp, Homo sapien
ccttttcttctagtccttgtccctg

SEQ ID NO: 344685 - DNA, 25 bp, Homo sapien
acctgaaccaggcttgctatatcca

SEQ ID NO: 344686 - DNA, 25 bp, Homo sapien
tattgccaggccctatacttcctct

SEQ ID NO: 344687 - DNA, 25 bp, Homo sapien
caatgctaccatttgattcaccacc

SEQ ID NO: 344688 - DNA, 25 bp, Homo sapien
caccagcctgcgtaaagagcgtcta

SEQ ID NO: 344689 - DNA, 25 bp, Homo sapien
caggcaagtctgctccaatgatgac

SEQ ID NO: 344690 - DNA, 25 bp, Homo sapien
tcaaaggagatggtgcagccaaaaa

SEQ ID NO: 344691 - DNA, 25 bp, Homo sapien
aaaaatggcagctactgagggctac

SEQ ID NO: 344692 - DNA, 25 bp, Homo sapien
gaacagaggaattagactgaaaagc

SEQ ID NO: 344693 - DNA, 25 bp, Homo sapien
tataaacagtgatgtcccaatcact

SEQ ID NO: 344694 - DNA, 25 bp, Homo sapien
cctgcccaagtgcattaaaaacttc

SEQ ID NO: 344695 - DNA, 25 bp, Homo sapien
acaatcattatgatggataagaaaa

SEQ ID NO: 344696 - DNA, 25 bp, Homo sapien
tagaggtcagattgtcacttcttgc

SEQ ID NO: 344697 - DNA, 25 bp, Homo sapien
tatgtgtgcccttgggagctacaaa

SEQ ID NO: 344698 - DNA, 25 bp, Homo sapien
ctggccggcatctgaagttcccctt

SEQ ID NO: 344699 - DNA, 25 bp, Homo sapien
taattatgtattcccaaccttggcc

SEQ ID NO: 344700 - DNA, 25 bp, Homo sapien
cagcatcccagggtataagttacct

SEQ ID NO: 344701 - DNA, 25 bp, Homo sapien
tccagctagtggaaacaccagcatc

SEQ ID NO: 344702 - DNA, 25 bp, Homo sapien
tctggccacagtgatctatgacact

SEQ ID NO: 344703 - DNA, 25 bp, Homo sapien
taccacagatgaatgtgttgcacaa

SEQ ID NO: 344704 - DNA, 25 bp, Homo sapien
gactggaagctgctacattccccag

SEQ ID NO: 344705 - DNA, 25 bp, Homo sapien
cacaaggacaacagcatacgggtaa

SEQ ID NO: 344706 - DNA, 25 bp, Homo sapien
caatcctgactccaacagagactgg

SEQ ID NO: 344707 - DNA, 25 bp, Homo sapien
tctgctatagcacaaacggtggctt

SEQ ID NO: 344708 - DNA, 25 bp, Homo sapien
ttagcagagattctaagggttcaca

SEQ ID NO: 344709 - DNA, 25 bp, Homo sapien
ggttcacaggcaaagttgcgacaca

SEQ ID NO: 344710 - DNA, 25 bp, Homo sapien
tctgatcttgcatgtgcgtgcatac

SEQ ID NO: 344711 - DNA, 25 bp, Homo sapien
actgcgaccggctcattagcagaga

SEQ ID NO: 344712 - DNA, 25 bp, Homo sapien
ggccagaggagcactctcaagccac

SEQ ID NO: 344713 - DNA, 25 bp, Homo sapien
ctggacaagaacttgcagtttgcaa

SEQ ID NO: 344714 - DNA, 25 bp, Homo sapien
tagacataccactagcaaacagtgg

SEQ ID NO: 344715 - DNA, 25 bp, Homo sapien
tggcttcccaaaaccagcgattgga

SEQ ID NO: 344716 - DNA, 25 bp, Homo sapien
ttagctcgagctccagaaccagaag

SEQ ID NO: 344717 - DNA, 25 bp, Homo sapien
tgggctcccataataccgtgctttt

SEQ ID NO: 344718 - DNA, 25 bp, Homo sapien
tctggacatgggtagtaacagccct

SEQ ID NO: 344719 - DNA, 25 bp, Homo sapien
tcatcggtgaaaagtcccagacagc

SEQ ID NO: 344720 - DNA, 25 bp, Homo sapien
gcttcgagtggcagcccaaggtaga

SEQ ID NO: 344721 - DNA, 25 bp, Homo sapien
ggaagcaagaccaccagttgcagag

SEQ ID NO: 344722 - DNA, 25 bp, Homo sapien
ccatgtaaagtgtgaggccaagacc

SEQ ID NO: 344723 - DNA, 25 bp, Homo sapien
gagcttcagcaacaagccacctggg

SEQ ID NO: 344724 - DNA, 25 bp, Homo sapien
gcagcagcaataacacggccttcaa

SEQ ID NO: 344725 - DNA, 25 bp, Homo sapien
gacctagttcaactctgggctgtga

SEQ ID NO: 344726 - DNA, 25 bp, Homo sapien
taagtcttccgcacttgaggtcaga

SEQ ID NO: 344727 - DNA, 25 bp, Homo sapien
ggaggaccatacttctgttgcagaa

SEQ ID NO: 344728 - DNA, 25 bp, Homo sapien
tcagagatctcagcaagaggatgtc

SEQ ID NO: 344729 - DNA, 25 bp, Homo sapien
gcgatttactcaagaccccactgtg

SEQ ID NO: 344730 - DNA, 25 bp, Homo sapien
gatcatttggcacctggcttatggg

SEQ ID NO: 344731 - DNA, 25 bp, Homo sapien
tatgccaccggctccagttaaagac

SEQ ID NO: 344732 - DNA, 25 bp, Homo sapien
ccagaaaggatcaggcgagagacct

SEQ ID NO: 344733 - DNA, 25 bp, Homo sapien
aatttctgatgagcagccctctgcc

SEQ ID NO: 344734 - DNA, 25 bp, Homo sapien
tgtagtgaataccaacctcaggata

SEQ ID NO: 344735 - DNA, 25 bp, Homo sapien
ggctgtgtggtacaatccccaggac

SEQ ID NO: 344736 - DNA, 25 bp, Homo sapien
gtgctttacaaacggctgatgcatc

SEQ ID NO: 344737 - DNA, 25 bp, Homo sapien
tctgaatgcgtttcttaatgtaggt

SEQ ID NO: 344738 - DNA, 25 bp, Homo sapien
ctggctcacgacaggtgctttacaa

SEQ ID NO: 344739 - DNA, 25 bp, Homo sapien
tgatgcatctgaatgcgtttcttaa

SEQ ID NO: 344740 - DNA, 25 bp, Homo sapien
aatccattgggagcttttgataccc

SEQ ID NO: 344741 - DNA, 25 bp, Homo sapien
tctaagctggaagccaaaaggaaca

SEQ ID NO: 344742 - DNA, 25 bp, Homo sapien
actggacaggcaacggcaagaaacg

SEQ ID NO: 344743 - DNA, 25 bp, Homo sapien
aaggaacagactcccctcaagggca

SEQ ID NO: 344744 - DNA, 25 bp, Homo sapien
ttcggccagaatgagccacatggcc

SEQ ID NO: 344745 - DNA, 25 bp, Homo sapien
cccttcggccagaatgagccacatg

SEQ ID NO: 344746 - DNA, 25 bp, Homo sapien
ccttcggccagaatgagccacatgg

SEQ ID NO: 344747 - DNA, 25 bp, Homo sapien
cacccttcggccagaatgagccaca

SEQ ID NO: 344748 - DNA, 25 bp, Homo sapien
agatcctgtaagctgccatgggagc

SEQ ID NO: 344749 - DNA, 25 bp, Homo sapien
tgaagacaagctacacaaacccctg

SEQ ID NO: 344750 - DNA, 25 bp, Homo sapien
tcctcgagagctcacggcaagtggt

SEQ ID NO: 344751 - DNA, 25 bp, Homo sapien
gattgacggcagtcgctgagcaaag

SEQ ID NO: 344752 - DNA, 25 bp, Homo sapien
agaaagcggtttgcctccatactga

SEQ ID NO: 344753 - DNA, 25 bp, Homo sapien
tcagtcactcctttatctcgggcgt

SEQ ID NO: 344754 - DNA, 25 bp, Homo sapien
gaagtcaattaagctgtccgagagc

SEQ ID NO: 344755 - DNA, 25 bp, Homo sapien
tatctatcagaggtagcacgcaccg

SEQ ID NO: 344756 - DNA, 25 bp, Homo sapien
atggtttgtacagaacctaccaggc

SEQ ID NO: 344757 - DNA, 25 bp, Homo sapien
tgtacagaacctaccaggcaggtag

SEQ ID NO: 344758 - DNA, 25 bp, Homo sapien
cattgcctggcaatggtttgtacag

SEQ ID NO: 344759 - DNA, 25 bp, Homo sapien
tcacagaagttccaactccagtgag

SEQ ID NO: 344760 - DNA, 25 bp, Homo sapien
ccttggagtggagagcgcctaagtc

SEQ ID NO: 344761 - DNA, 25 bp, Homo sapien
catggaggcccctatgttcaggaag

SEQ ID NO: 344762 - DNA, 25 bp, Homo sapien
gaaagctacataggcaaggtgcagg

SEQ ID NO: 344763 - DNA, 25 bp, Homo sapien
gggaacttaagaaaccaatgctggc

SEQ ID NO: 344764 - DNA, 25 bp, Homo sapien
cccttatggtgcacggtggattgct

SEQ ID NO: 344765 - DNA, 25 bp, Homo sapien
tctagcggtgacaacatcggatggt

SEQ ID NO: 344766 - DNA, 25 bp, Homo sapien
tggagcttacagtctcactaaaggg

SEQ ID NO: 344767 - DNA, 25 bp, Homo sapien
gatggagccctagaatggacgacag

SEQ ID NO: 344768 - DNA, 25 bp, Homo sapien
gcaaccgtgggaagcactcgcatgt

SEQ ID NO: 344769 - DNA, 25 bp, Homo sapien
ttagagggacgcatctaccagccag

SEQ ID NO: 344770 - DNA, 25 bp, Homo sapien
cacaaagggccgtcatcaggagtat

SEQ ID NO: 344771 - DNA, 25 bp, Homo sapien
aagccatttgtcctcactgacgaga

SEQ ID NO: 344772 - DNA, 25 bp, Homo sapien
actcggtcctttgtgacagcctgac

SEQ ID NO: 344773 - DNA, 25 bp, Homo sapien
tctgtccaacgcaaaacctcttctt

SEQ ID NO: 344774 - DNA, 25 bp, Homo sapien
ctggctaactcggtcctttgtgaca

SEQ ID NO: 344775 - DNA, 25 bp, Homo sapien
gcctgactgaatccggggacaggac

SEQ ID NO: 344776 - DNA, 25 bp, Homo sapien
ctatgtataataatggtgccctggg

SEQ ID NO: 344777 - DNA, 25 bp, Homo sapien
ttgtaagaaactagcacagcagggc

SEQ ID NO: 344778 - DNA, 25 bp, Homo sapien
gagcgtcttctatgtaccaggaatg

SEQ ID NO: 344779 - DNA, 25 bp, Homo sapien
gcagatgccccaacaactgtgagtg

SEQ ID NO: 344780 - DNA, 25 bp, Homo sapien
acatcaaagaacaggggatgcctca

SEQ ID NO: 344781 - DNA, 25 bp, Homo sapien
tttcttatatacagcacatcaaaga

SEQ ID NO: 344782 - DNA, 25 bp, Homo sapien
taatgttcaggaggggtcacaacat

SEQ ID NO: 344783 - DNA, 25 bp, Homo sapien
gctgtaatgttcaggaggggtcaca

SEQ ID NO: 344784 - DNA, 25 bp, Homo sapien
ccagccataagggactgagacgttt

SEQ ID NO: 344785 - DNA, 25 bp, Homo sapien
gaaatgtactatattccagagccag

SEQ ID NO: 344786 - DNA, 25 bp, Homo sapien
ccatgtgcggcctgaagggtacact

SEQ ID NO: 344787 - DNA, 25 bp, Homo sapien
gaccttatccgtgcacaagtcatgt

SEQ ID NO: 344788 - DNA, 25 bp, Homo sapien
gtctgacgttccagatgccttcttg

SEQ ID NO: 344789 - DNA, 25 bp, Homo sapien
tcccatatggagagtctgacgttcc

SEQ ID NO: 344790 - DNA, 25 bp, Homo sapien
ttctctgacaggctcccatatggag

SEQ ID NO: 344791 - DNA, 25 bp, Homo sapien
ggccaaaacgcgacgacattctctg

SEQ ID NO: 344792 - DNA, 25 bp, Homo sapien
gtctccaatagcactttaacagagg

SEQ ID NO: 344793 - DNA, 25 bp, Homo sapien
tctccagacatcaggctaacactgc

SEQ ID NO: 344794 - DNA, 25 bp, Homo sapien
gagaggaggtactaacacctttgcc

SEQ ID NO: 344795 - DNA, 25 bp, Homo sapien
tgagtgatcatcttcatgagcctga

SEQ ID NO: 344796 - DNA, 25 bp, Homo sapien
gaagtagcctcgtgatcctgataaa

SEQ ID NO: 344797 - DNA, 25 bp, Homo sapien
tgatgcttggctaccaccttgcagc

SEQ ID NO: 344798 - DNA, 25 bp, Homo sapien
ccagtgagatatgatgcaaagggcc

SEQ ID NO: 344799 - DNA, 25 bp, Homo sapien
tgccaatgccggagaagtctgtgcg

SEQ ID NO: 344800 - DNA, 25 bp, Homo sapien
acaagaatgtcagctcattcagggc

SEQ ID NO: 344801 - DNA, 25 bp, Homo sapien
aacaagaatgtcagctcattcaggg

SEQ ID NO: 344802 - DNA, 25 bp, Homo sapien
ccagcttcctctgtgtacgaatcat

SEQ ID NO: 344803 - DNA, 25 bp, Homo sapien
gccagcttcctctgtgtacgaatca

SEQ ID NO: 344804 - DNA, 25 bp, Homo sapien
ggtaaccacgcagccaagctgaggt

SEQ ID NO: 344805 - DNA, 25 bp, Homo sapien
gccccaggaagggtatcactgaatt

SEQ ID NO: 344806 - DNA, 25 bp, Homo sapien
tatcactgaattaaaactccctcct

SEQ ID NO: 344807 - DNA, 25 bp, Homo sapien
aggtgcaggctagatccatggaagc

SEQ ID NO: 344808 - DNA, 25 bp, Homo sapien
caagcagtaaactctcattggtggt

SEQ ID NO: 344809 - DNA, 25 bp, Homo sapien
caaaaagctgcaagcagtaaactct

SEQ ID NO: 344810 - DNA, 25 bp, Homo sapien
agctgcaagcagtaaactctcattg

SEQ ID NO: 344811 - DNA, 25 bp, Homo sapien
tgcaagcagtaaactctcattggtg

SEQ ID NO: 344812 - DNA, 25 bp, Homo sapien
tttacactcaaattgtaccacaggg

SEQ ID NO: 344813 - DNA, 25 bp, Homo sapien
tcaggatttacactcaaattgtacc

SEQ ID NO: 344814 - DNA, 25 bp, Homo sapien
ctcaaattgtaccacagggcagcag

SEQ ID NO: 344815 - DNA, 25 bp, Homo sapien
cactcaaattgtaccacagggcagc

SEQ ID NO: 344816 - DNA, 25 bp, Homo sapien
tttttaggctgacataaagttttca

SEQ ID NO: 344817 - DNA, 25 bp, Homo sapien
ccatgcctgggcccttgaattctga

SEQ ID NO: 344818 - DNA, 25 bp, Homo sapien
cttgtactgccgtgcctatttttag

SEQ ID NO: 344819 - DNA, 25 bp, Homo sapien
ttgaaaaacttgtactgccgtgcct

SEQ ID NO: 344820 - DNA, 25 bp, Homo sapien
gaagagtctttaggcactgctgcta

SEQ ID NO: 344821 - DNA, 25 bp, Homo sapien
gcctcaggtgattagtgggcaacca

SEQ ID NO: 344822 - DNA, 25 bp, Homo sapien
tctgagatctctggacagggctaag

SEQ ID NO: 344823 - DNA, 25 bp, Homo sapien
caagcaccccttggtatggattaaa

SEQ ID NO: 344824 - DNA, 25 bp, Homo sapien
tgaaggcatcagtgtaccccaggaa

SEQ ID NO: 344825 - DNA, 25 bp, Homo sapien
ctgaaggcatcagtgtaccccagga

SEQ ID NO: 344826 - DNA, 25 bp, Homo sapien
tacagtagctctgccttacagacgg

SEQ ID NO: 344827 - DNA, 25 bp, Homo sapien
cagagagtgctcttgtaactgagaa

SEQ ID NO: 344828 - DNA, 25 bp, Homo sapien
ttacagacggaaggcatcagagagt

SEQ ID NO: 344829 - DNA, 25 bp, Homo sapien
caccaatatggtcgaggagagttct

SEQ ID NO: 344830 - DNA, 25 bp, Homo sapien
ccataatgcgacaaaagaggctcaa

SEQ ID NO: 344831 - DNA, 25 bp, Homo sapien
gcaaagctctctcagtagtcagggt

SEQ ID NO: 344832 - DNA, 25 bp, Homo sapien
catggagagctggaaagatcggcaa

SEQ ID NO: 344833 - DNA, 25 bp, Homo sapien
gaaagaaatccctagatgcccacgt

SEQ ID NO: 344834 - DNA, 25 bp, Homo sapien
tttggaggcatcaaactaagtcact

SEQ ID NO: 344835 - DNA, 25 bp, Homo sapien
tctagcaactcacacatttggaggc

SEQ ID NO: 344836 - DNA, 25 bp, Homo sapien
ctgtgcccaaccgaaaagtccttgg

SEQ ID NO: 344837 - DNA, 25 bp, Homo sapien
cttggttttgcataacaggtgaggc

SEQ ID NO: 344838 - DNA, 25 bp, Homo sapien
acagcatcacaccacgaaaggtagt

SEQ ID NO: 344839 - DNA, 25 bp, Homo sapien
gcaggctccgcgaaccacaggtgct

SEQ ID NO: 344840 - DNA, 25 bp, Homo sapien
gggccctctccaaacacggcaggct

SEQ ID NO: 344841 - DNA, 25 bp, Homo sapien
aaggtagttgcgtaccgcccaacag

SEQ ID NO: 344842 - DNA, 25 bp, Homo sapien
tcgtggtgttaaccagaaactcctc

SEQ ID NO: 344843 - DNA, 25 bp, Homo sapien
gtgcgggtatcggtcacatgccctc

SEQ ID NO: 344844 - DNA, 25 bp, Homo sapien
cggtcacatgccctcgtggtgttaa

SEQ ID NO: 344845 - DNA, 25 bp, Homo sapien
catgccctcgtggtgttaaccagaa

SEQ ID NO: 344846 - DNA, 25 bp, Homo sapien
cacaggttcggagaacttgtccggc

SEQ ID NO: 344847 - DNA, 25 bp, Homo sapien
cggagaacttgtccggcgctacaca

SEQ ID NO: 344848 - DNA, 25 bp, Homo sapien
cagccacaggttcggagaacttgtc

SEQ ID NO: 344849 - DNA, 25 bp, Homo sapien
caggttcggagaacttgtccggcgc

SEQ ID NO: 344850 - DNA, 25 bp, Homo sapien
cccccgcggcgactctcgcgctccg

SEQ ID NO: 344851 - DNA, 25 bp, Homo sapien
ggcgcccccgcggcgactctcgcgc

SEQ ID NO: 344852 - DNA, 25 bp, Homo sapien
cccgcggcgactctcgcgctccggg

SEQ ID NO: 344853 - DNA, 25 bp, Homo sapien
cgcccccgcggcgactctcgcgctc

SEQ ID NO: 344854 - DNA, 25 bp, Homo sapien
gggagacacggaagaacagggtggc

SEQ ID NO: 344855 - DNA, 25 bp, Homo sapien
cacggaagaacagggtggcgcggcg

SEQ ID NO: 344856 - DNA, 25 bp, Homo sapien
cttggccgtgactgccgccaggcag

SEQ ID NO: 344857 - DNA, 25 bp, Homo sapien
ttggccgtgactgccgccaggcaga

SEQ ID NO: 344858 - DNA, 25 bp, Homo sapien
caagcacagagttcgggactgcccc

SEQ ID NO: 344859 - DNA, 25 bp, Homo sapien
tccaagccgattcgtcccttcaggg

SEQ ID NO: 344860 - DNA, 25 bp, Homo sapien
tgccctactcggagcggcggtgcca

SEQ ID NO: 344861 - DNA, 25 bp, Homo sapien
cagcctcgggttgggtccagggagc

SEQ ID NO: 344862 - DNA, 25 bp, Homo sapien
cgcagccgcgcggaccgagagttcg

SEQ ID NO: 344863 - DNA, 25 bp, Homo sapien
cggccaatggcaagcgccgcagccg

SEQ ID NO: 344864 - DNA, 25 bp, Homo sapien
cccggcgagactccgccccggtgct

SEQ ID NO: 344865 - DNA, 25 bp, Homo sapien
accgagcggccggccaatggcaagc

SEQ ID NO: 344866 - DNA, 25 bp, Homo sapien
gcctcgggtcgcagcttctctcgga

SEQ ID NO: 344867 - DNA, 25 bp, Homo sapien
caaattgcacaaaacagccgtcgtg

SEQ ID NO: 344868 - DNA, 25 bp, Homo sapien
gaggctcgcaggcttgcaggaccat

SEQ ID NO: 344869 - DNA, 25 bp, Homo sapien
gccgtcgtgagaagtaggaagtttc

SEQ ID NO: 344870 - DNA, 25 bp, Homo sapien
cgggataagttaactgcgaagctgg

SEQ ID NO: 344871 - DNA, 25 bp, Homo sapien
gtacagcagcgtccccggcgaagaa

SEQ ID NO: 344872 - DNA, 25 bp, Homo sapien
agtaaaagacgtttgctttggagct

SEQ ID NO: 344873 - DNA, 25 bp, Homo sapien
cgagcccagcagaatgcgaaaggga

SEQ ID NO: 344874 - DNA, 25 bp, Homo sapien
gtgcacgttggcaggcatagcagat

SEQ ID NO: 344875 - DNA, 25 bp, Homo sapien
cacgttggcaggcatagcagattct

SEQ ID NO: 344876 - DNA, 25 bp, Homo sapien
cgttggcaggcatagcagattctgt

SEQ ID NO: 344877 - DNA, 25 bp, Homo sapien
cgtgcacgttggcaggcatagcaga

SEQ ID NO: 344878 - DNA, 25 bp, Homo sapien
ggctctctgaccaccttatgataaa

SEQ ID NO: 344879 - DNA, 25 bp, Homo sapien
gataaaatgctgaactggggagtca

SEQ ID NO: 344880 - DNA, 25 bp, Homo sapien
tgtgaaagtccgtcagagtaggact

SEQ ID NO: 344881 - DNA, 25 bp, Homo sapien
tgtcaggtattggctctctgaccac

SEQ ID NO: 344882 - DNA, 25 bp, Homo sapien
ttgaagaagaagctagttctattta

SEQ ID NO: 344883 - DNA, 25 bp, Homo sapien
ttaaaactctcttgcctaaggccat

SEQ ID NO: 344884 - DNA, 25 bp, Homo sapien
cccacttagaattaagtgaagcagc

SEQ ID NO: 344885 - DNA, 25 bp, Homo sapien
tcttgcttgaaggtattaaaactct

SEQ ID NO: 344886 - DNA, 25 bp, Homo sapien
gattaaagctttagactgtcacagg

SEQ ID NO: 344887 - DNA, 25 bp, Homo sapien
aactggatgaacttctgatgaacac

SEQ ID NO: 344888 - DNA, 25 bp, Homo sapien
cagagacgtaggacctcaccaagtg

SEQ ID NO: 344889 - DNA, 25 bp, Homo sapien
tgtcacaggccaacactaggtcaaa

SEQ ID NO: 344890 - DNA, 25 bp, Homo sapien
tttctttgtccatgttccattccat

SEQ ID NO: 344891 - DNA, 25 bp, Homo sapien
tggtttctttgtccatgttccattc

SEQ ID NO: 344892 - DNA, 25 bp, Homo sapien
attggtttctttgtccatgttccat

SEQ ID NO: 344893 - DNA, 25 bp, Homo sapien
ggtttctttgtccatgttccattcc

SEQ ID NO: 344894 - DNA, 25 bp, Homo sapien
cagtagcagttgtccacatagaccc

SEQ ID NO: 344895 - DNA, 25 bp, Homo sapien
tcagtagcagttgtccacatagacc

SEQ ID NO: 344896 - DNA, 25 bp, Homo sapien
ctgcttaaataaggacagaaaaaag

SEQ ID NO: 344897 - DNA, 25 bp, Homo sapien
tgcttaaataaggacagaaaaaagc

SEQ ID NO: 344898 - DNA, 25 bp, Homo sapien
catccttttcggagacatggccgta

SEQ ID NO: 344899 - DNA, 25 bp, Homo sapien
gcccttcatcaaagcagcggcagga

SEQ ID NO: 344900 - DNA, 25 bp, Homo sapien
catggccgtatccattgggtggcac

SEQ ID NO: 344901 - DNA, 25 bp, Homo sapien
gtggcacattaagccactccccagg

SEQ ID NO: 344902 - DNA, 25 bp, Homo sapien
atctgtccactcttacaagcgagga

SEQ ID NO: 344903 - DNA, 25 bp, Homo sapien
caagcgaggagcatgaggctcatcc

SEQ ID NO: 344904 - DNA, 25 bp, Homo sapien
tcttacaagcgaggagcatgaggct

SEQ ID NO: 344905 - DNA, 25 bp, Homo sapien
ccactcttacaagcgaggagcatga

SEQ ID NO: 344906 - DNA, 25 bp, Homo sapien
ttcaggctcaggaagtacttttgag

SEQ ID NO: 344907 - DNA, 25 bp, Homo sapien
gaaaagatgctcgttcaagtgaagg

SEQ ID NO: 344908 - DNA, 25 bp, Homo sapien
agccgggccgtgctgggtagatttc

SEQ ID NO: 344909 - DNA, 25 bp, Homo sapien
tggaagcatgtcctctctataggcg

SEQ ID NO: 344910 - DNA, 25 bp, Homo sapien
acattgcctggtttttgacccagtt

SEQ ID NO: 344911 - DNA, 25 bp, Homo sapien
cctttttgtctaaaaggatgagcca

SEQ ID NO: 344912 - DNA, 25 bp, Homo sapien
ttgcctggtttttgacccagttctc

SEQ ID NO: 344913 - DNA, 25 bp, Homo sapien
tgtgagcagcccattcacattgcct

SEQ ID NO: 344914 - DNA, 25 bp, Homo sapien
ccactgatgattgagcacaccctgc

SEQ ID NO: 344915 - DNA, 25 bp, Homo sapien
gagtccatctgattgcatgtggccc

SEQ ID NO: 344916 - DNA, 25 bp, Homo sapien
tccaaggtacaacaccagcacgtgg

SEQ ID NO: 344917 - DNA, 25 bp, Homo sapien
gatggaaggagttcggcagtcacca

SEQ ID NO: 344918 - DNA, 25 bp, Homo sapien
attgccaactgcttggtccaggcta

SEQ ID NO: 344919 - DNA, 25 bp, Homo sapien
gcccgctgtgttggaagatgtagaa

SEQ ID NO: 344920 - DNA, 25 bp, Homo sapien
tcccatacagaggaaatcaagacgt

SEQ ID NO: 344921 - DNA, 25 bp, Homo sapien
caatatcctgggaactcagaaagat

SEQ ID NO: 344922 - DNA, 25 bp, Homo sapien
caagacgtgtgcgtttgttccttcc

SEQ ID NO: 344923 - DNA, 25 bp, Homo sapien
acaaatgcctgggtaaatgcctctg

SEQ ID NO: 344924 - DNA, 25 bp, Homo sapien
tcagacgcaaacatcctgctgatgt

SEQ ID NO: 344925 - DNA, 25 bp, Homo sapien
gggaccacatttctgcttagatgaa

SEQ ID NO: 344926 - DNA, 25 bp, Homo sapien
tcctccacatgatcaatagaagaca

SEQ ID NO: 344927 - DNA, 25 bp, Homo sapien
cctgtttcatcaagtcgctgtgtga

SEQ ID NO: 344928 - DNA, 25 bp, Homo sapien
cttggagtgtgttatcccactgggc

SEQ ID NO: 344929 - DNA, 25 bp, Homo sapien
gttttggtctgtagagtctgtatcc

SEQ ID NO: 344930 - DNA, 25 bp, Homo sapien
tgatgtcctggctgtcgtttattga

SEQ ID NO: 344931 - DNA, 25 bp, Homo sapien
tagattgtaaggaggtagccgttcc

SEQ ID NO: 344932 - DNA, 25 bp, Homo sapien
gatgtcacctctatggatgagtcca

SEQ ID NO: 344933 - DNA, 25 bp, Homo sapien
taggccaacctctgtgctgagatct

SEQ ID NO: 344934 - DNA, 25 bp, Homo sapien
gatgaacgcttatgctaggccaacc

SEQ ID NO: 344935 - DNA, 25 bp, Homo sapien
aagtcccgattgtattcccaaaatg

SEQ ID NO: 344936 - DNA, 25 bp, Homo sapien
tagctgtggctaagtcccgattgta

SEQ ID NO: 344937 - DNA, 25 bp, Homo sapien
tcccaacaccatagctgtggctaag

SEQ ID NO: 344938 - DNA, 25 bp, Homo sapien
caccatagctgtggctaagtcccga

SEQ ID NO: 344939 - DNA, 25 bp, Homo sapien
ttttcaaccttgctatttgtaccca

SEQ ID NO: 344940 - DNA, 25 bp, Homo sapien
ctgagtcagcgagtttttcaacctt

SEQ ID NO: 344941 - DNA, 25 bp, Homo sapien
tttcaaccttgctatttgtacccat

SEQ ID NO: 344942 - DNA, 25 bp, Homo sapien
cctggcacatagtgaagttctgata

SEQ ID NO: 344943 - DNA, 25 bp, Homo sapien
gaatagggagacagagaatcctgct

SEQ ID NO: 344944 - DNA, 25 bp, Homo sapien
tcttcctttgcttgagtccgtgtct

SEQ ID NO: 344945 - DNA, 25 bp, Homo sapien
tattattgttactctccatggtgaa

SEQ ID NO: 344946 - DNA, 25 bp, Homo sapien
agcaggaagttgaaagcagcttcta

SEQ ID NO: 344947 - DNA, 25 bp, Homo sapien
aacagcccggaacacccagctcttg

SEQ ID NO: 344948 - DNA, 25 bp, Homo sapien
caggaagttgaaagcagcttctatc

SEQ ID NO: 344949 - DNA, 25 bp, Homo sapien
gaagttgaaagcagcttctatccca

SEQ ID NO: 344950 - DNA, 25 bp, Homo sapien
agcaagtgccgtaagggagaccact

SEQ ID NO: 344951 - DNA, 25 bp, Homo sapien
ccagggaagaagcaagtgccgtaag

SEQ ID NO: 344952 - DNA, 25 bp, Homo sapien
agaagcaagtgccgtaagggagacc

SEQ ID NO: 344953 - DNA, 25 bp, Homo sapien
gccagggaagaagcaagtgccgtaa

SEQ ID NO: 344954 - DNA, 25 bp, Homo sapien
aatcaagaagcaaaaggttgagccc

SEQ ID NO: 344955 - DNA, 25 bp, Homo sapien
caatcaggtctggaaccatgaggaa

SEQ ID NO: 344956 - DNA, 25 bp, Homo sapien
cagacctggttaagagagacagctt

SEQ ID NO: 344957 - DNA, 25 bp, Homo sapien
tgctgaaagcaattgtgggacacct

SEQ ID NO: 344958 - DNA, 25 bp, Homo sapien
tacactatctcctctatgcaaggca

SEQ ID NO: 344959 - DNA, 25 bp, Homo sapien
agtttgccaagccataatacaggat

SEQ ID NO: 344960 - DNA, 25 bp, Homo sapien
cataatacaggatcctgaaaagaca

SEQ ID NO: 344961 - DNA, 25 bp, Homo sapien
acaaaaataaatggtgggccagctt

SEQ ID NO: 344962 - DNA, 25 bp, Homo sapien
tcccctgcgctgagaattagattct

SEQ ID NO: 344963 - DNA, 25 bp, Homo sapien
tactgggatccatacgtgacttgag

SEQ ID NO: 344964 - DNA, 25 bp, Homo sapien
gactttttgcattgaggcagcttcc

SEQ ID NO: 344965 - DNA, 25 bp, Homo sapien
gattctggtatcaaagcaaagcacc

SEQ ID NO: 344966 - DNA, 25 bp, Homo sapien
ggttagttagacctgaagaggcact

SEQ ID NO: 344967 - DNA, 25 bp, Homo sapien
tcaggcctaaggagatcagaattct

SEQ ID NO: 344968 - DNA, 25 bp, Homo sapien
caagtcttgggaccaagccatccag

SEQ ID NO: 344969 - DNA, 25 bp, Homo sapien
tctgcagagactgtgggtacgcctc

SEQ ID NO: 344970 - DNA, 25 bp, Homo sapien
tgcggttccaagatctgtgagtctc

SEQ ID NO: 344971 - DNA, 25 bp, Homo sapien
gacttccagcccctatgtaaccatg

SEQ ID NO: 344972 - DNA, 25 bp, Homo sapien
tgtgacttccttccaccatgggcga

SEQ ID NO: 344973 - DNA, 25 bp, Homo sapien
tggaaggcatactggactgagagcc

SEQ ID NO: 344974 - DNA, 25 bp, Homo sapien
ggcatttgaggttgacagtcgcaca

SEQ ID NO: 344975 - DNA, 25 bp, Homo sapien
caggttcccatggtggagcggacat

SEQ ID NO: 344976 - DNA, 25 bp, Homo sapien
caaacctggcagtcgtgtaatgaga

SEQ ID NO: 344977 - DNA, 25 bp, Homo sapien
tgtgacccacacaaccgataagcag

SEQ ID NO: 344978 - DNA, 25 bp, Homo sapien
atggcagaaaggaaagtaaacatgt

SEQ ID NO: 344979 - DNA, 25 bp, Homo sapien
agttctacagggctgggaaggcttc

SEQ ID NO: 344980 - DNA, 25 bp, Homo sapien
cagaaaggaaagtaaacatgtcctt

SEQ ID NO: 344981 - DNA, 25 bp, Homo sapien
ggcagaaaggaaagtaaacatgtcc

SEQ ID NO: 344982 - DNA, 25 bp, Homo sapien
aatcctgcgactacaaggaattgag

SEQ ID NO: 344983 - DNA, 25 bp, Homo sapien
caaggaattgagtgttgtctgacaa

SEQ ID NO: 344984 - DNA, 25 bp, Homo sapien
tgaagaagcaagtccacaaatcctg

SEQ ID NO: 344985 - DNA, 25 bp, Homo sapien
tgagtgttgtctgacaaccacatga

SEQ ID NO: 344986 - DNA, 25 bp, Homo sapien
ggccacattcaaatccctctgcaag

SEQ ID NO: 344987 - DNA, 25 bp, Homo sapien
tctgcaagctatcagttcgtcttcc

SEQ ID NO: 344988 - DNA, 25 bp, Homo sapien
tcaagacttgtcactggccacattc

SEQ ID NO: 344989 - DNA, 25 bp, Homo sapien
tcaaatccctctgcaagctatcagt

SEQ ID NO: 344990 - DNA, 25 bp, Homo sapien
gaaatcaagggctactttgcctttg

SEQ ID NO: 344991 - DNA, 25 bp, Homo sapien
atcaagggctactttgcctttgatt

SEQ ID NO: 344992 - DNA, 25 bp, Homo sapien
atgaaatcaagggctactttgcctt

SEQ ID NO: 344993 - DNA, 25 bp, Homo sapien
aaatcaagggctactttgcctttga

SEQ ID NO: 344994 - DNA, 25 bp, Homo sapien
ccttcaggatatcctgagagtgacg

SEQ ID NO: 344995 - DNA, 25 bp, Homo sapien
ctagctaaactgtgccttcaggata

SEQ ID NO: 344996 - DNA, 25 bp, Homo sapien
tgtgccttcaggatatcctgagagt

SEQ ID NO: 344997 - DNA, 25 bp, Homo sapien
aaactgtgccttcaggatatcctga

SEQ ID NO: 344998 - DNA, 25 bp, Homo sapien
tatggcctggatttttgcatggccc

SEQ ID NO: 344999 - DNA, 25 bp, Homo sapien
gctgaccgtaactatggcctggatt

SEQ ID NO: 345000 - DNA, 25 bp, Homo sapien
gctgctgaccgtaactatggcctgg

SEQ ID NO: 345001 - DNA, 25 bp, Homo sapien
ggcacccagctgctgaccgtaacta

SEQ ID NO: 345002 - DNA, 25 bp, Homo sapien
tttgcattccgtcaagagatcctct

SEQ ID NO: 345003 - DNA, 25 bp, Homo sapien
tcctttagtcagtgtctgcccagag

SEQ ID NO: 345004 - DNA, 25 bp, Homo sapien
tattatccctactgcatgtgtgagg

SEQ ID NO: 345005 - DNA, 25 bp, Homo sapien
gaagtccaaagaggtgtctaatctg

SEQ ID NO: 345006 - DNA, 25 bp, Homo sapien
taaatctcatggtttcctgactcca

SEQ ID NO: 345007 - DNA, 25 bp, Homo sapien
ggtctcaaagtagcatctcttcatt

SEQ ID NO: 345008 - DNA, 25 bp, Homo sapien
cctttggctcagtaaggaccctata

SEQ ID NO: 345009 - DNA, 25 bp, Homo sapien
gataccagttaaagacaagggagtg

SEQ ID NO: 345010 - DNA, 25 bp, Homo sapien
ttctgattacctctttaaggcccca

SEQ ID NO: 345011 - DNA, 25 bp, Homo sapien
tgaccttatctaattctgattacct

SEQ ID NO: 345012 - DNA, 25 bp, Homo sapien
gaatgtgtatatcagctcaggtctc

SEQ ID NO: 345013 - DNA, 25 bp, Homo sapien
catagcaggtggagtctcaggctgt

SEQ ID NO: 345014 - DNA, 25 bp, Homo sapien
agaaccagcatcgatccagtcctct

SEQ ID NO: 345015 - DNA, 25 bp, Homo sapien
tcagcgactttagcagccaagttgc

SEQ ID NO: 345016 - DNA, 25 bp, Homo sapien
tgctgttgcttatatctggtccttc

SEQ ID NO: 345017 - DNA, 25 bp, Homo sapien
tggttcaaaattgggtggctcctct

SEQ ID NO: 345018 - DNA, 25 bp, Homo sapien
ctggacatccaagaacccattgatc

SEQ ID NO: 345019 - DNA, 25 bp, Homo sapien
tgtaggcatccgtgtcttggcacat

SEQ ID NO: 345020 - DNA, 25 bp, Homo sapien
ccctcatgatggtgtaggcatccgt

SEQ ID NO: 345021 - DNA, 25 bp, Homo sapien
catgatggtgtaggcatccgtgtct

SEQ ID NO: 345022 - DNA, 25 bp, Homo sapien
ttggcccctcatgatggtgtaggca

SEQ ID NO: 345023 - DNA, 25 bp, Homo sapien
gattttagattggtttacaattcca

SEQ ID NO: 345024 - DNA, 25 bp, Homo sapien
gattggtttacaattccattggcat

SEQ ID NO: 345025 - DNA, 25 bp, Homo sapien
ttagattggtttacaattccattgg

SEQ ID NO: 345026 - DNA, 25 bp, Homo sapien
cagattttagattggtttacaattc

SEQ ID NO: 345027 - DNA, 25 bp, Homo sapien
agctgtttctgctacggtcacagca

SEQ ID NO: 345028 - DNA, 25 bp, Homo sapien
gctcttatgcaacttctgaacttca

SEQ ID NO: 345029 - DNA, 25 bp, Homo sapien
catccagctcttatgcaacttctga

SEQ ID NO: 345030 - DNA, 25 bp, Homo sapien
cagcacaggccccgacattggcggg

SEQ ID NO: 345031 - DNA, 25 bp, Homo sapien
gaaaacaggtccagatgatgttgca

SEQ ID NO: 345032 - DNA, 25 bp, Homo sapien
aaaacaggtccagatgatgttgcat

SEQ ID NO: 345033 - DNA, 25 bp, Homo sapien
agaaaacaggtccagatgatgttgc

SEQ ID NO: 345034 - DNA, 25 bp, Homo sapien
gaagaaaacaggtccagatgatgtt

SEQ ID NO: 345035 - DNA, 25 bp, Homo sapien
gtcctttgatgaactgttacccaaa

SEQ ID NO: 345036 - DNA, 25 bp, Homo sapien
caagaactattgtcctttgatgaac

SEQ ID NO: 345037 - DNA, 25 bp, Homo sapien
tgatgaactgttacccaaaaatatc

SEQ ID NO: 345038 - DNA, 25 bp, Homo sapien
ccaaaaatatcatctgactcatgat

SEQ ID NO: 345039 - DNA, 25 bp, Homo sapien
tataaaggactagtaaggtagacac

SEQ ID NO: 345040 - DNA, 25 bp, Homo sapien
taggcagttataaaggactagtaag

SEQ ID NO: 345041 - DNA, 25 bp, Homo sapien
ggactagtaaggtagacactctggg

SEQ ID NO: 345042 - DNA, 25 bp, Homo sapien
gcagttataaaggactagtaaggta

SEQ ID NO: 345043 - DNA, 25 bp, Homo sapien
tctcagagattggtcatttaatcca

SEQ ID NO: 345044 - DNA, 25 bp, Homo sapien
acacaatcagtgcatgaatgatggg

SEQ ID NO: 345045 - DNA, 25 bp, Homo sapien
gtcttcttgagacattggtgctcag

SEQ ID NO: 345046 - DNA, 25 bp, Homo sapien
ctgcatgcagattctagagaaagaa

SEQ ID NO: 345047 - DNA, 25 bp, Homo sapien
agggttgcattgtgtcaactacgca

SEQ ID NO: 345048 - DNA, 25 bp, Homo sapien
taactgtgccggcagaagggtgatt

SEQ ID NO: 345049 - DNA, 25 bp, Homo sapien
tacgcagtcgaggttgtaactgtgc

SEQ ID NO: 345050 - DNA, 25 bp, Homo sapien
cattctggaacttggagggttgcat

SEQ ID NO: 345051 - DNA, 25 bp, Homo sapien
catggagtgccgcagcatgcactgt

SEQ ID NO: 345052 - DNA, 25 bp, Homo sapien
ggtaccatcatggagtgccgcagca

SEQ ID NO: 345053 - DNA, 25 bp, Homo sapien
cagggatgaggtaccatcatggagt

SEQ ID NO: 345054 - DNA, 25 bp, Homo sapien
agtgccgcagcatgcactgtcctgg

SEQ ID NO: 345055 - DNA, 25 bp, Homo sapien
aaagagatacagagtcccttctctg

SEQ ID NO: 345056 - DNA, 25 bp, Homo sapien
ggcccccaaagaagatcctggatgt

SEQ ID NO: 345057 - DNA, 25 bp, Homo sapien
ccagaaggcccccaaagaagatcct

SEQ ID NO: 345058 - DNA, 25 bp, Homo sapien
gagaacagctaaaccgttccaaatc

SEQ ID NO: 345059 - DNA, 25 bp, Homo sapien
agagaacagctaaaccgttccaaat

SEQ ID NO: 345060 - DNA, 25 bp, Homo sapien
accaatgtgccaggcagctagccag

SEQ ID NO: 345061 - DNA, 25 bp, Homo sapien
agctagccagccttgtcccagtgcc

SEQ ID NO: 345062 - DNA, 25 bp, Homo sapien
ctgagaaccaatgtgccaggcagct

SEQ ID NO: 345063 - DNA, 25 bp, Homo sapien
agggctggcctgatgctcttgacca

SEQ ID NO: 345064 - DNA, 25 bp, Homo sapien
gaacatgggagaacgaaagtgctga

SEQ ID NO: 345065 - DNA, 25 bp, Homo sapien
cataaatgcctaattgcagacaaga

SEQ ID NO: 345066 - DNA, 25 bp, Homo sapien
tacacaggatcctgaacttaaggca

SEQ ID NO: 345067 - DNA, 25 bp, Homo sapien
tagtacgtgtaaagccatggagaca

SEQ ID NO: 345068 - DNA, 25 bp, Homo sapien
gattgtccttcatgaacatgctctt

SEQ ID NO: 345069 - DNA, 25 bp, Homo sapien
cctccatagattgtccttcatgaac

SEQ ID NO: 345070 - DNA, 25 bp, Homo sapien
ttcatgaacatgctcttcttcttcc

SEQ ID NO: 345071 - DNA, 25 bp, Homo sapien
ttcttcctgctcaggctccggctgt

SEQ ID NO: 345072 - DNA, 25 bp, Homo sapien
tagtataactgtatgggtggattcc

SEQ ID NO: 345073 - DNA, 25 bp, Homo sapien
tccagtagtggtagactaggccata

SEQ ID NO: 345074 - DNA, 25 bp, Homo sapien
taggccatatagactgcccagcaac

SEQ ID NO: 345075 - DNA, 25 bp, Homo sapien
ttcagagtggtagcaagttctttca

SEQ ID NO: 345076 - DNA, 25 bp, Homo sapien
cagcatttgggcagaccatcatgac

SEQ ID NO: 345077 - DNA, 25 bp, Homo sapien
gcatttgggcagaccatcatgacgt

SEQ ID NO: 345078 - DNA, 25 bp, Homo sapien
catttgggcagaccatcatgacgtt

SEQ ID NO: 345079 - DNA, 25 bp, Homo sapien
ttgggcagaccatcatgacgttcat

SEQ ID NO: 345080 - DNA, 25 bp, Homo sapien
ttctttggcactatttccggttcca

SEQ ID NO: 345081 - DNA, 25 bp, Homo sapien
tcttgagctgtgcaacttcttttca

SEQ ID NO: 345082 - DNA, 25 bp, Homo sapien
catcattgtcttgagctgtgcaact

SEQ ID NO: 345083 - DNA, 25 bp, Homo sapien
ttcagtgatgggtttttctttggca

SEQ ID NO: 345084 - DNA, 25 bp, Homo sapien
tccctacggttctccatggggctca

SEQ ID NO: 345085 - DNA, 25 bp, Homo sapien
tgtccagaatgagaacgatttcttt

SEQ ID NO: 345086 - DNA, 25 bp, Homo sapien
ttcttttgcagtctgacagctgatc

SEQ ID NO: 345087 - DNA, 25 bp, Homo sapien
acagctgatctataatcaggttctg

SEQ ID NO: 345088 - DNA, 25 bp, Homo sapien
ctcctttccatgttcactcctttct

SEQ ID NO: 345089 - DNA, 25 bp, Homo sapien
tccatgttcactcctttctatcccc

SEQ ID NO: 345090 - DNA, 25 bp, Homo sapien
tttccatgttcactcctttctatcc

SEQ ID NO: 345091 - DNA, 25 bp, Homo sapien
cctttccatgttcactcctttctat

SEQ ID NO: 345092 - DNA, 25 bp, Homo sapien
gatcggatccgcttatgatgcatgt

SEQ ID NO: 345093 - DNA, 25 bp, Homo sapien
gatgcatgtagagccgaacttgaac

SEQ ID NO: 345094 - DNA, 25 bp, Homo sapien
gcaggaagcacgtttggttatgcca

SEQ ID NO: 345095 - DNA, 25 bp, Homo sapien
tacaattgcgtggagctgcttaaaa

SEQ ID NO: 345096 - DNA, 25 bp, Homo sapien
ggcttgccagcgtcaagtccttcag

SEQ ID NO: 345097 - DNA, 25 bp, Homo sapien
gtccacaaggtgaatcttgttgtca

SEQ ID NO: 345098 - DNA, 25 bp, Homo sapien
tcaggggcttgccagcgtcaagtcc

SEQ ID NO: 345099 - DNA, 25 bp, Homo sapien
tgaatcttgttgtcagctgggtcag

SEQ ID NO: 345100 - DNA, 25 bp, Homo sapien
ctgaggtggcgaggctccagcgcgg

SEQ ID NO: 345101 - DNA, 25 bp, Homo sapien
tggcgaggctccagcgcggcgtgct

SEQ ID NO: 345102 - DNA, 25 bp, Homo sapien
ctccagcgcggcgtgctcccagctt

SEQ ID NO: 345103 - DNA, 25 bp, Homo sapien
cagcgcggcgtgctcccagcttgag

SEQ ID NO: 345104 - DNA, 25 bp, Homo sapien
gggccaaactcgtgggtgacagcat

SEQ ID NO: 345105 - DNA, 25 bp, Homo sapien
tgggtgacagcatcgtgcacagagt

SEQ ID NO: 345106 - DNA, 25 bp, Homo sapien
gacagcatcgtgcacagagttggcc

SEQ ID NO: 345107 - DNA, 25 bp, Homo sapien
aaactcgtgggtgacagcatcgtgc

SEQ ID NO: 345108 - DNA, 25 bp, Homo sapien
ctgagcaagttgttggagatggtgt

SEQ ID NO: 345109 - DNA, 25 bp, Homo sapien
tggagatggtgtccaagtgcccacg

SEQ ID NO: 345110 - DNA, 25 bp, Homo sapien
agatggtgtccaagtgcccacggaa

SEQ ID NO: 345111 - DNA, 25 bp, Homo sapien
tgttggagatggtgtccaagtgccc

SEQ ID NO: 345112 - DNA, 25 bp, Homo sapien
gggccggcagctgagatgtggtcag

SEQ ID NO: 345113 - DNA, 25 bp, Homo sapien
gtcaggggccggcagctgagatgtg

SEQ ID NO: 345114 - DNA, 25 bp, Homo sapien
ggcagctgagatgtggtcagtggta

SEQ ID NO: 345115 - DNA, 25 bp, Homo sapien
gccggcagctgagatgtggtcagtg

SEQ ID NO: 345116 - DNA, 25 bp, Homo sapien
tccttgcctgtcaggtagttggtct

SEQ ID NO: 345117 - DNA, 25 bp, Homo sapien
catccttgcctgtcaggtagttggt

SEQ ID NO: 345118 - DNA, 25 bp, Homo sapien
ccctgggccaaactctgcttgggga

SEQ ID NO: 345119 - DNA, 25 bp, Homo sapien
tgccatccttgcctgtcaggtagtt

SEQ ID NO: 345120 - DNA, 25 bp, Homo sapien
tgtgcaactgaccaatgcaggggcc

SEQ ID NO: 345121 - DNA, 25 bp, Homo sapien
cggggttcgtgtcattgtggcccat

SEQ ID NO: 345122 - DNA, 25 bp, Homo sapien
ggatgtgatgaaggcatgggtctcg

SEQ ID NO: 345123 - DNA, 25 bp, Homo sapien
tctcggggttcgtgtcattgtggcc

SEQ ID NO: 345124 - DNA, 25 bp, Homo sapien
gtgcatagccatcctgctcaatgga

SEQ ID NO: 345125 - DNA, 25 bp, Homo sapien
tgcatagccatcctgctcaatggag

SEQ ID NO: 345126 - DNA, 25 bp, Homo sapien
gcatggagtaatagtgaactgggac

SEQ ID NO: 345127 - DNA, 25 bp, Homo sapien
agcatggagtaatagtgaactggga

SEQ ID NO: 345128 - DNA, 25 bp, Homo sapien
atggagtaatagtgaactgggactt

SEQ ID NO: 345129 - DNA, 25 bp, Homo sapien
catggagtaatagtgaactgggact

SEQ ID NO: 345130 - DNA, 25 bp, Homo sapien
cccatatcttcatagcttgaattgg

SEQ ID NO: 345131 - DNA, 25 bp, Homo sapien
ccccatatcttcatagcttgaattg

SEQ ID NO: 345132 - DNA, 25 bp, Homo sapien
ccagaggccattcttccttctctgc

SEQ ID NO: 345133 - DNA, 25 bp, Homo sapien
cagatgtccagaggccattcttcct

SEQ ID NO: 345134 - DNA, 25 bp, Homo sapien
gaggccattcttccttctctgccac

SEQ ID NO: 345135 - DNA, 25 bp, Homo sapien
tcagatgtccagaggccattcttcc

SEQ ID NO: 345136 - DNA, 25 bp, Homo sapien
gatgtgcagcttcagttcactgggg

SEQ ID NO: 345137 - DNA, 25 bp, Homo sapien
atgtgcagcttcagttcactggggt

SEQ ID NO: 345138 - DNA, 25 bp, Homo sapien
tgatgtgcagcttcagttcactggg

SEQ ID NO: 345139 - DNA, 25 bp, Homo sapien
ttcatcctgaggttgtaatggaaca

SEQ ID NO: 345140 - DNA, 25 bp, Homo sapien
tcttcatcctgaggttgtaatggaa

SEQ ID NO: 345141 - DNA, 25 bp, Homo sapien
ttgctcatgtacttcttcatcctga

SEQ ID NO: 345142 - DNA, 25 bp, Homo sapien
gtacttcttcatcctgaggttgtaa

SEQ ID NO: 345143 - DNA, 25 bp, Homo sapien
gtggtggtcccaatttctaagccca

SEQ ID NO: 345144 - DNA, 25 bp, Homo sapien
gaagtggtggtcccaatttctaagc

SEQ ID NO: 345145 - DNA, 25 bp, Homo sapien
ttgggtgaggtccaaccagagaggg

SEQ ID NO: 345146 - DNA, 25 bp, Homo sapien
gggcacttcagctcccaggggatcc

SEQ ID NO: 345147 - DNA, 25 bp, Homo sapien
acttcagctcccaggggatcccagt

SEQ ID NO: 345148 - DNA, 25 bp, Homo sapien
ttcagctcccaggggatcccagtca

SEQ ID NO: 345149 - DNA, 25 bp, Homo sapien
cttggggcacttcagctcccagggg

SEQ ID NO: 345150 - DNA, 25 bp, Homo sapien
aatgcagatgccccccaggctgcca

SEQ ID NO: 345151 - DNA, 25 bp, Homo sapien
tccaatgcagatgccccccaggctg

SEQ ID NO: 345152 - DNA, 25 bp, Homo sapien
atgcagatgccccccaggctgccac

SEQ ID NO: 345153 - DNA, 25 bp, Homo sapien
ccaatgcagatgccccccaggctgc

SEQ ID NO: 345154 - DNA, 25 bp, Homo sapien
atatttgacacttccagttgccagg

SEQ ID NO: 345155 - DNA, 25 bp, Homo sapien
agccatatttgacacttccagttgc

SEQ ID NO: 345156 - DNA, 25 bp, Homo sapien
gaagaaccccaggatattcatagtt

SEQ ID NO: 345157 - DNA, 25 bp, Homo sapien
ggtgcaggtctttctcactcccgag

SEQ ID NO: 345158 - DNA, 25 bp, Homo sapien
tcatccgggtgtctgtacacgatct

SEQ ID NO: 345159 - DNA, 25 bp, Homo sapien
tgtacacgatcttctctgagagggt

SEQ ID NO: 345160 - DNA, 25 bp, Homo sapien
ggtcagaggccggttcaatcatttg

SEQ ID NO: 345161 - DNA, 25 bp, Homo sapien
cgtccatcctgcatggtcacgctgt

SEQ ID NO: 345162 - DNA, 25 bp, Homo sapien
ccatatttttctgcagccaactgta

SEQ ID NO: 345163 - DNA, 25 bp, Homo sapien
tttttctgcagccaactgtagccat

SEQ ID NO: 345164 - DNA, 25 bp, Homo sapien
catatttttctgcagccaactgtag

SEQ ID NO: 345165 - DNA, 25 bp, Homo sapien
tatttttctgcagccaactgtagcc

SEQ ID NO: 345166 - DNA, 25 bp, Homo sapien
tctttgtgcccagattggcaagctg

SEQ ID NO: 345167 - DNA, 25 bp, Homo sapien
gactggctcgtgtctgacttctttg

SEQ ID NO: 345168 - DNA, 25 bp, Homo sapien
tgccgtgactggctcgtgtctgact

SEQ ID NO: 345169 - DNA, 25 bp, Homo sapien
tgacttctttgtgcccagattggca

SEQ ID NO: 345170 - DNA, 25 bp, Homo sapien
cagaggcactgaagggtctttcaga

SEQ ID NO: 345171 - DNA, 25 bp, Homo sapien
cgagcccggccaggattgagtttta

SEQ ID NO: 345172 - DNA, 25 bp, Homo sapien
gaagacgtcaactgtgagaatcagg

SEQ ID NO: 345173 - DNA, 25 bp, Homo sapien
caggtgctgctcacgggtccattgg

SEQ ID NO: 345174 - DNA, 25 bp, Homo sapien
tcggcgatgacagcggttgtgactt

SEQ ID NO: 345175 - DNA, 25 bp, Homo sapien
ccatctgagatagtgctgtacccca

SEQ ID NO: 345176 - DNA, 25 bp, Homo sapien
tgtcttggagacacctagtcggcga

SEQ ID NO: 345177 - DNA, 25 bp, Homo sapien
tagtaacaggagagctgtcactagc

SEQ ID NO: 345178 - DNA, 25 bp, Homo sapien
gcaggagaccccaacagtcatactg

SEQ ID NO: 345179 - DNA, 25 bp, Homo sapien
caacccgagtggagcacatggaggc

SEQ ID NO: 345180 - DNA, 25 bp, Homo sapien
caaatctgagaacagtgctgcaccc

SEQ ID NO: 345181 - DNA, 25 bp, Homo sapien
gacccgaggaagagaagtgactacc

SEQ ID NO: 345182 - DNA, 25 bp, Homo sapien
atatcatagtagaccccaggcccat

SEQ ID NO: 345183 - DNA, 25 bp, Homo sapien
tccaatgccaggtactgtaggacat

SEQ ID NO: 345184 - DNA, 25 bp, Homo sapien
gcacagcaggtaatcagttgcccac

SEQ ID NO: 345185 - DNA, 25 bp, Homo sapien
ctctaatgatgggaggaatgcccca

SEQ ID NO: 345186 - DNA, 25 bp, Homo sapien
tgcccctgctggaggcaatctgtcc

SEQ ID NO: 345187 - DNA, 25 bp, Homo sapien
gagagaggcttgggctggtgccagt

SEQ ID NO: 345188 - DNA, 25 bp, Homo sapien
gctggaggcaatctgtcctcgtctc

SEQ ID NO: 345189 - DNA, 25 bp, Homo sapien
catagcttggttgcctagcaagggc

SEQ ID NO: 345190 - DNA, 25 bp, Homo sapien
tctcctgctggtcacgaacatcatt

SEQ ID NO: 345191 - DNA, 25 bp, Homo sapien
ttggtatccctgactccatgtccat

SEQ ID NO: 345192 - DNA, 25 bp, Homo sapien
cactgtcctgctagctcgctctgat

SEQ ID NO: 345193 - DNA, 25 bp, Homo sapien
cgctctgatgacatcgcagcagcaa

SEQ ID NO: 345194 - DNA, 25 bp, Homo sapien
taagagccctgatctgtctgtgaca

SEQ ID NO: 345195 - DNA, 25 bp, Homo sapien
ttcccggcatccattgctaggagcc

SEQ ID NO: 345196 - DNA, 25 bp, Homo sapien
tcaaagagccgttgagagggttagc

SEQ ID NO: 345197 - DNA, 25 bp, Homo sapien
gcttcacgaagagttggctctcaga

SEQ ID NO: 345198 - DNA, 25 bp, Homo sapien
gaaaaagagacaagtcagcagtcca

SEQ ID NO: 345199 - DNA, 25 bp, Homo sapien
tatgatgggacacccaatccaggtg

SEQ ID NO: 345200 - DNA, 25 bp, Homo sapien
gtccatttcattgcagtgtaacagg

SEQ ID NO: 345201 - DNA, 25 bp, Homo sapien
ggaacagagtcctgcaggggtacta

SEQ ID NO: 345202 - DNA, 25 bp, Homo sapien
tgcagtgcagtatatagagagatat

SEQ ID NO: 345203 - DNA, 25 bp, Homo sapien
gcagtatatagagagatatcttcag

SEQ ID NO: 345204 - DNA, 25 bp, Homo sapien
tatagagagatatcttcaggcctga

SEQ ID NO: 345205 - DNA, 25 bp, Homo sapien
gtatatagagagatatcttcaggcc

SEQ ID NO: 345206 - DNA, 25 bp, Homo sapien
aatctctccaaagtcttttattcca

SEQ ID NO: 345207 - DNA, 25 bp, Homo sapien
ttaatctctccaaagtcttttattc

SEQ ID NO: 345208 - DNA, 25 bp, Homo sapien
ctactttttaatctctccaaagtct

SEQ ID NO: 345209 - DNA, 25 bp, Homo sapien
ccaaagtcttttattccatccacct

SEQ ID NO: 345210 - DNA, 25 bp, Homo sapien
tatagcatgtgggagtactagggac

SEQ ID NO: 345211 - DNA, 25 bp, Homo sapien
ggacaagagcaagtcctggaagtgt

SEQ ID NO: 345212 - DNA, 25 bp, Homo sapien
cctggaagtgtgcatctatagcatg

SEQ ID NO: 345213 - DNA, 25 bp, Homo sapien
gaagggcataggacaagagcaagtc

SEQ ID NO: 345214 - DNA, 25 bp, Homo sapien
actcctggagtaagctttgtacttc

SEQ ID NO: 345215 - DNA, 25 bp, Homo sapien
ctactcctggagtaagctttgtact

SEQ ID NO: 345216 - DNA, 25 bp, Homo sapien
tactcctggagtaagctttgtactt

SEQ ID NO: 345217 - DNA, 25 bp, Homo sapien
tcctggagtaagctttgtacttctc

SEQ ID NO: 345218 - DNA, 25 bp, Homo sapien
tcatcactttattcacgttgaggac

SEQ ID NO: 345219 - DNA, 25 bp, Homo sapien
tccacacctcctgaactgatcatca

SEQ ID NO: 345220 - DNA, 25 bp, Homo sapien
ctcttctttggttcttgcttcatgt

SEQ ID NO: 345221 - DNA, 25 bp, Homo sapien
tcaataaaacagctgcttggctctc

SEQ ID NO: 345222 - DNA, 25 bp, Homo sapien
cttctttggttcttgcttcatgtct

SEQ ID NO: 345223 - DNA, 25 bp, Homo sapien
ttggctctcttctttggttcttgct

SEQ ID NO: 345224 - DNA, 25 bp, Homo sapien
gctatggagccacatgccgtgaaaa

SEQ ID NO: 345225 - DNA, 25 bp, Homo sapien
cgcatcagtatgtcttttgcaagtc

SEQ ID NO: 345226 - DNA, 25 bp, Homo sapien
tcatagccagatgtgcgcatcagta

SEQ ID NO: 345227 - DNA, 25 bp, Homo sapien
tgaacaccagcgtagaccataggat

SEQ ID NO: 345228 - DNA, 25 bp, Homo sapien
atctcagttgtgtccttggttctag

SEQ ID NO: 345229 - DNA, 25 bp, Homo sapien
gaagttcatatccattcaggatctc

SEQ ID NO: 345230 - DNA, 25 bp, Homo sapien
ggccacattcgcagtagcagtagga

SEQ ID NO: 345231 - DNA, 25 bp, Homo sapien
ttctaggccacattcgcagtagcag

SEQ ID NO: 345232 - DNA, 25 bp, Homo sapien
caaggagtccaccagttggagaagc

SEQ ID NO: 345233 - DNA, 25 bp, Homo sapien
ttggatcagccacccagcagtgaat

SEQ ID NO: 345234 - DNA, 25 bp, Homo sapien
gactgaggtcttcacatacaagcca

SEQ ID NO: 345235 - DNA, 25 bp, Homo sapien
cagaaggaactatgacccagagtca

SEQ ID NO: 345236 - DNA, 25 bp, Homo sapien
ctacatggcttgagaattcttcctt

SEQ ID NO: 345237 - DNA, 25 bp, Homo sapien
ttgagaattcttccttttcttctac

SEQ ID NO: 345238 - DNA, 25 bp, Homo sapien
tggcttgagaattcttccttttctt

SEQ ID NO: 345239 - DNA, 25 bp, Homo sapien
gcttgagaattcttccttttcttct

SEQ ID NO: 345240 - DNA, 25 bp, Homo sapien
gtaaagtgaagctaacctctgttgc

SEQ ID NO: 345241 - DNA, 25 bp, Homo sapien
gtgcccatatgctcttccggtacag

SEQ ID NO: 345242 - DNA, 25 bp, Homo sapien
ccctgagctccgctggtaaagtgaa

SEQ ID NO: 345243 - DNA, 25 bp, Homo sapien
cttctgtgcccatatgctcttccgg

SEQ ID NO: 345244 - DNA, 25 bp, Homo sapien
tgtttctcctgcacttggctcccat

SEQ ID NO: 345245 - DNA, 25 bp, Homo sapien
cagctgtgtttctcctgcacttggc

SEQ ID NO: 345246 - DNA, 25 bp, Homo sapien
ctttcaccagctgtgtttctcctgc

SEQ ID NO: 345247 - DNA, 25 bp, Homo sapien
tgtgtttctcctgcacttggctccc

SEQ ID NO: 345248 - DNA, 25 bp, Homo sapien
tgcactggtgcacatcttttaaatg

SEQ ID NO: 345249 - DNA, 25 bp, Homo sapien
taggaaacaacaaagaattccgatc

SEQ ID NO: 345250 - DNA, 25 bp, Homo sapien
tcctttggagacagtacgaggagag

SEQ ID NO: 345251 - DNA, 25 bp, Homo sapien
gaattccgatctctcagcgggccca

SEQ ID NO: 345252 - DNA, 25 bp, Homo sapien
atgtcctgccaaattaccctgcaaa

SEQ ID NO: 345253 - DNA, 25 bp, Homo sapien
gggccaacaggtatgaagcagctta

SEQ ID NO: 345254 - DNA, 25 bp, Homo sapien
tgctgcatagtctataagtatgcca

SEQ ID NO: 345255 - DNA, 25 bp, Homo sapien
aagtagctatccagccagcattggt

SEQ ID NO: 345256 - DNA, 25 bp, Homo sapien
ccttgctgctcagacacgtgtaata

SEQ ID NO: 345257 - DNA, 25 bp, Homo sapien
gccaagccgcggtatgttttaaaga

SEQ ID NO: 345258 - DNA, 25 bp, Homo sapien
tatgaagcagtctcctttagggagc

SEQ ID NO: 345259 - DNA, 25 bp, Homo sapien
ccaggaccaggaagctatgaagcag

SEQ ID NO: 345260 - DNA, 25 bp, Homo sapien
tctactgacctaggtgagggcaggc

SEQ ID NO: 345261 - DNA, 25 bp, Homo sapien
tgttccgacactctgctgggcattc

SEQ ID NO: 345262 - DNA, 25 bp, Homo sapien
ggaattgccatcctctgttccgaca

SEQ ID NO: 345263 - DNA, 25 bp, Homo sapien
aaggagcctgcccactgtcatagag

SEQ ID NO: 345264 - DNA, 25 bp, Homo sapien
ggaaccaggcctgtcatgacagttt

SEQ ID NO: 345265 - DNA, 25 bp, Homo sapien
ccacctcctctgatagatttgcaca

SEQ ID NO: 345266 - DNA, 25 bp, Homo sapien
gatagatttgcacagctccagaagc

SEQ ID NO: 345267 - DNA, 25 bp, Homo sapien
gagagaattcacattaggacccctt

SEQ ID NO: 345268 - DNA, 25 bp, Homo sapien
caaacagtccgtttggccttggact

SEQ ID NO: 345269 - DNA, 25 bp, Homo sapien
taaacttctcgacatccaaggagga

SEQ ID NO: 345270 - DNA, 25 bp, Homo sapien
caaaaagctcgttttacagtatccg

SEQ ID NO: 345271 - DNA, 25 bp, Homo sapien
cttaatcagcaatgatgagagaatg

SEQ ID NO: 345272 - DNA, 25 bp, Homo sapien
ccttaatcagcaatgatgagagaat

SEQ ID NO: 345273 - DNA, 25 bp, Homo sapien
cagtgcagcgcagttcaagaagctc

SEQ ID NO: 345274 - DNA, 25 bp, Homo sapien
gggacagtgcagcgcagttcaagaa

SEQ ID NO: 345275 - DNA, 25 bp, Homo sapien
aagttcacgaggctttcaaagcgcc

SEQ ID NO: 345276 - DNA, 25 bp, Homo sapien
ctgaagttcacgaggctttcaaagc

SEQ ID NO: 345277 - DNA, 25 bp, Homo sapien
tcacgaggctttcaaagcgcccatt

SEQ ID NO: 345278 - DNA, 25 bp, Homo sapien
gaggctttcaaagcgcccatttcca

SEQ ID NO: 345279 - DNA, 25 bp, Homo sapien
gccaaactatatcaggctaccataa

SEQ ID NO: 345280 - DNA, 25 bp, Homo sapien
atctcatgagatgtgttcgctatca

SEQ ID NO: 345281 - DNA, 25 bp, Homo sapien
taccataacagtgtaccacaactgg

SEQ ID NO: 345282 - DNA, 25 bp, Homo sapien
caaagggagcatgtacagggaaact

SEQ ID NO: 345283 - DNA, 25 bp, Homo sapien
cctcagtttgtaggcgtgtcactcc

SEQ ID NO: 345284 - DNA, 25 bp, Homo sapien
gtgcccctcagtttgtaggcgtgtc

SEQ ID NO: 345285 - DNA, 25 bp, Homo sapien
tggttgctggtggtctttggtgccc

SEQ ID NO: 345286 - DNA, 25 bp, Homo sapien
agtttgtaggcgtgtcactccaatc

SEQ ID NO: 345287 - DNA, 25 bp, Homo sapien
agtatggccccatcttaatttgatt

SEQ ID NO: 345288 - DNA, 25 bp, Homo sapien
ggacaccagtcattaaattaggcct

SEQ ID NO: 345289 - DNA, 25 bp, Homo sapien
aaattaggcctaatactccagtatg

SEQ ID NO: 345290 - DNA, 25 bp, Homo sapien
taatactccagtatggccccatctt

SEQ ID NO: 345291 - DNA, 25 bp, Homo sapien
cccagacaaaagtagctctcgcagt

SEQ ID NO: 345292 - DNA, 25 bp, Homo sapien
gtagctctcgcagtctccacattca

SEQ ID NO: 345293 - DNA, 25 bp, Homo sapien
gacaaaagtagctctcgcagtctcc

SEQ ID NO: 345294 - DNA, 25 bp, Homo sapien
tagctcacccccgtaggaaatgtca

SEQ ID NO: 345295 - DNA, 25 bp, Homo sapien
tactttcatcaccaaacacggcaga

SEQ ID NO: 345296 - DNA, 25 bp, Homo sapien
accaaacacggcagagctccaacgt

SEQ ID NO: 345297 - DNA, 25 bp, Homo sapien
aaacacggcagagctccaacgtggc

SEQ ID NO: 345298 - DNA, 25 bp, Homo sapien
ctttcatcaccaaacacggcagagc

SEQ ID NO: 345299 - DNA, 25 bp, Homo sapien
gagagttggttattgaagtaagttc

SEQ ID NO: 345300 - DNA, 25 bp, Homo sapien
gagttggttattgaagtaagttcca

SEQ ID NO: 345301 - DNA, 25 bp, Homo sapien
agagagttggttattgaagtaagtt

SEQ ID NO: 345302 - DNA, 25 bp, Homo sapien
gaccagatgccctatgcccatctga

SEQ ID NO: 345303 - DNA, 25 bp, Homo sapien
catcagagatcagcacgaacaaagg

SEQ ID NO: 345304 - DNA, 25 bp, Homo sapien
cacgaacaaaggatgatcatggacc

SEQ ID NO: 345305 - DNA, 25 bp, Homo sapien
tcttcagatatttcatcagagatca

SEQ ID NO: 345306 - DNA, 25 bp, Homo sapien
taaactagacttggctgagcatact

SEQ ID NO: 345307 - DNA, 25 bp, Homo sapien
ggcatgagagctaagacactgtttt

SEQ ID NO: 345308 - DNA, 25 bp, Homo sapien
tcccaaagagactgagtattaaact

SEQ ID NO: 345309 - DNA, 25 bp, Homo sapien
tttttgcccttatggaattggaggc

SEQ ID NO: 345310 - DNA, 25 bp, Homo sapien
gtcctattttgcaagtcccattggg

SEQ ID NO: 345311 - DNA, 25 bp, Homo sapien
aatgaagaagtcctattttgcaagt

SEQ ID NO: 345312 - DNA, 25 bp, Homo sapien
gaagtcctattttgcaagtcccatt

SEQ ID NO: 345313 - DNA, 25 bp, Homo sapien
aagaagtcctattttgcaagtccca

SEQ ID NO: 345314 - DNA, 25 bp, Homo sapien
tcccacctaggcttataaatagtaa

SEQ ID NO: 345315 - DNA, 25 bp, Homo sapien
gggcacacacaaacgtaagtatctt

SEQ ID NO: 345316 - DNA, 25 bp, Homo sapien
gaaaggaagtatctagcattcagtg

SEQ ID NO: 345317 - DNA, 25 bp, Homo sapien
tgccaagcaatttacttagagggaa

SEQ ID NO: 345318 - DNA, 25 bp, Homo sapien
tgatctgccccatttgaccccagtg

SEQ ID NO: 345319 - DNA, 25 bp, Homo sapien
gaccccagtgtacttctctcaattg

SEQ ID NO: 345320 - DNA, 25 bp, Homo sapien
acacacatttttaagctcctgcagg

SEQ ID NO: 345321 - DNA, 25 bp, Homo sapien
tgggttcccattctaacttcaccaa

SEQ ID NO: 345322 - DNA, 25 bp, Homo sapien
ggcatcaagaatgcagagccaacct

SEQ ID NO: 345323 - DNA, 25 bp, Homo sapien
tggcatcaagaatgcagagccaacc

SEQ ID NO: 345324 - DNA, 25 bp, Homo sapien
aattccacaagtagcaggatggggc

SEQ ID NO: 345325 - DNA, 25 bp, Homo sapien
ttccacaagtagcaggatggggcat

SEQ ID NO: 345326 - DNA, 25 bp, Homo sapien
tccacaagtagcaggatggggcatg

SEQ ID NO: 345327 - DNA, 25 bp, Homo sapien
ttactctttatagtgaagcagacac

SEQ ID NO: 345328 - DNA, 25 bp, Homo sapien
ggagccagggtggtacagagcatgg

SEQ ID NO: 345329 - DNA, 25 bp, Homo sapien
ctttactctttatagtgaagcagac

SEQ ID NO: 345330 - DNA, 25 bp, Homo sapien
taaactttactctttatagtgaagc

SEQ ID NO: 345331 - DNA, 25 bp, Homo sapien
gatacatatatgtggatacttgaaa

SEQ ID NO: 345332 - DNA, 25 bp, Homo sapien
tctttggctgattaaactgaatgat

SEQ ID NO: 345333 - DNA, 25 bp, Homo sapien
tcaagattatattctctaaagccac

SEQ ID NO: 345334 - DNA, 25 bp, Homo sapien
gagaaatgtatttcggtgttaacag

SEQ ID NO: 345335 - DNA, 25 bp, Homo sapien
gactcactccactctatggaccaca

SEQ ID NO: 345336 - DNA, 25 bp, Homo sapien
agatttgcttagagactcactccac

SEQ ID NO: 345337 - DNA, 25 bp, Homo sapien
caaaggctatggcaagaataagtgg

SEQ ID NO: 345338 - DNA, 25 bp, Homo sapien
ataagtggagatattctgaatcttc

SEQ ID NO: 345339 - DNA, 25 bp, Homo sapien
ctgtccctaaggttcttgttggtct

SEQ ID NO: 345340 - DNA, 25 bp, Homo sapien
atctgctctacagccccatgaatct

SEQ ID NO: 345341 - DNA, 25 bp, Homo sapien
gctctacagccccatgaatctgatc

SEQ ID NO: 345342 - DNA, 25 bp, Homo sapien
agccccatgaatctgatcatcctca

SEQ ID NO: 345343 - DNA, 25 bp, Homo sapien
tacagccccatgaatctgatcatcc

SEQ ID NO: 345344 - DNA, 25 bp, Homo sapien
caagggggacggctctcatttgcag

SEQ ID NO: 345345 - DNA, 25 bp, Homo sapien
ccattatccagctgagcaaggcgct

SEQ ID NO: 345346 - DNA, 25 bp, Homo sapien
tactggagtactccttctccattat

SEQ ID NO: 345347 - DNA, 25 bp, Homo sapien
taagagtatcgtttcctactggagt

SEQ ID NO: 345348 - DNA, 25 bp, Homo sapien
tattatgtgattgtacaaggactca

SEQ ID NO: 345349 - DNA, 25 bp, Homo sapien
cttggtcgcaggcagcagcaaactt

SEQ ID NO: 345350 - DNA, 25 bp, Homo sapien
tttgaaaggttggttctcattattc

SEQ ID NO: 345351 - DNA, 25 bp, Homo sapien
aaggactcagctatggaccacttgt

SEQ ID NO: 345352 - DNA, 25 bp, Homo sapien
agaacctgagctcagtgtatggatg

SEQ ID NO: 345353 - DNA, 25 bp, Homo sapien
aacctgagctcagtgtatggatgtc

SEQ ID NO: 345354 - DNA, 25 bp, Homo sapien
gaacctgagctcagtgtatggatgt

SEQ ID NO: 345355 - DNA, 25 bp, Homo sapien
gttgcgtcccgctccttcaggatgt

SEQ ID NO: 345356 - DNA, 25 bp, Homo sapien
atctttcagctcattgtggctcatc

SEQ ID NO: 345357 - DNA, 25 bp, Homo sapien
tatgagtctccattagagcgcttgg

SEQ ID NO: 345358 - DNA, 25 bp, Homo sapien
gaattgctgtctatggcaaccacag

SEQ ID NO: 345359 - DNA, 25 bp, Homo sapien
tgtcagttcaacgatgttcacagcg

SEQ ID NO: 345360 - DNA, 25 bp, Homo sapien
gcgtcttcaccaggagtgcattccg

SEQ ID NO: 345361 - DNA, 25 bp, Homo sapien
cagacctttaccctcccatcctggg

SEQ ID NO: 345362 - DNA, 25 bp, Homo sapien
tgacccagacctttaccctcccatc

SEQ ID NO: 345363 - DNA, 25 bp, Homo sapien
aaagcacaagaacaggtctccagtt

SEQ ID NO: 345364 - DNA, 25 bp, Homo sapien
aagaacaggtctccagttctgttgt

SEQ ID NO: 345365 - DNA, 25 bp, Homo sapien
agtgaggtatgattataccaccgga

SEQ ID NO: 345366 - DNA, 25 bp, Homo sapien
gaggtatgattataccaccggactc

SEQ ID NO: 345367 - DNA, 25 bp, Homo sapien
gtatgattataccaccggactccag

SEQ ID NO: 345368 - DNA, 25 bp, Homo sapien
ggtatgattataccaccggactcca

SEQ ID NO: 345369 - DNA, 25 bp, Homo sapien
caagcacgttccatgtataaatcca

SEQ ID NO: 345370 - DNA, 25 bp, Homo sapien
ttatttcaagcacgttccatgtata

SEQ ID NO: 345371 - DNA, 25 bp, Homo sapien
ggcattatttcaagcacgttccatg

SEQ ID NO: 345372 - DNA, 25 bp, Homo sapien
gtcaggcattatttcaagcacgttc

SEQ ID NO: 345373 - DNA, 25 bp, Homo sapien
caggtgtaataagaacggcattgac

SEQ ID NO: 345374 - DNA, 25 bp, Homo sapien
tcacaagctgaacttcaggtgtaat

SEQ ID NO: 345375 - DNA, 25 bp, Homo sapien
taagaacggcattgacgtaccacct

SEQ ID NO: 345376 - DNA, 25 bp, Homo sapien
ttgtctggattcttgccgatattca

SEQ ID NO: 345377 - DNA, 25 bp, Homo sapien
ttggggcaagcctgagcgcccagct

SEQ ID NO: 345378 - DNA, 25 bp, Homo sapien
acagacactcgccctcaacaagaaa

SEQ ID NO: 345379 - DNA, 25 bp, Homo sapien
agacactcgccctcaacaagaaaac

SEQ ID NO: 345380 - DNA, 25 bp, Homo sapien
tcaagtcccactttggggcaagcct

SEQ ID NO: 345381 - DNA, 25 bp, Homo sapien
caaactttagagcagatatgagggt

SEQ ID NO: 345382 - DNA, 25 bp, Homo sapien
tatgagggttctatttttgacaggg

SEQ ID NO: 345383 - DNA, 25 bp, Homo sapien
atttttgacagggttagcgatgagg

SEQ ID NO: 345384 - DNA, 25 bp, Homo sapien
cagatatgagggttctatttttgac

SEQ ID NO: 345385 - DNA, 25 bp, Homo sapien
actgccttgtggaggaatatgcctg

SEQ ID NO: 345386 - DNA, 25 bp, Homo sapien
tggatggtccttcaactgccttgtg

SEQ ID NO: 345387 - DNA, 25 bp, Homo sapien
ggaggaatatgcctgcaacttgcat

SEQ ID NO: 345388 - DNA, 25 bp, Homo sapien
gatggtccttcaactgccttgtgga

SEQ ID NO: 345389 - DNA, 25 bp, Homo sapien
tttgtctcacgctgtttgggctccc

SEQ ID NO: 345390 - DNA, 25 bp, Homo sapien
ctgccacgctgaaaacactgccact

SEQ ID NO: 345391 - DNA, 25 bp, Homo sapien
cgactgatgcgcggcctctgttttg

SEQ ID NO: 345392 - DNA, 25 bp, Homo sapien
tcccaggataccaggcttagaagaa

SEQ ID NO: 345393 - DNA, 25 bp, Homo sapien
agcaagagcaaatctcaatatgttt

SEQ ID NO: 345394 - DNA, 25 bp, Homo sapien
caagagcaaatctcaatatgtttat

SEQ ID NO: 345395 - DNA, 25 bp, Homo sapien
gcaaatctcaatatgtttatcctta

SEQ ID NO: 345396 - DNA, 25 bp, Homo sapien
gagcaaatctcaatatgtttatcct

SEQ ID NO: 345397 - DNA, 25 bp, Homo sapien
gagtttgagtctgggcaacatggca

SEQ ID NO: 345398 - DNA, 25 bp, Homo sapien
tgaggcaggcacatcacttgagtcc

SEQ ID NO: 345399 - DNA, 25 bp, Homo sapien
tgggcaacatggcaaaaccctgtct

SEQ ID NO: 345400 - DNA, 25 bp, Homo sapien
aggcaggcacatcacttgagtccag

SEQ ID NO: 345401 - DNA, 25 bp, Homo sapien
tgagtcatatactgttgtttcagat

SEQ ID NO: 345402 - DNA, 25 bp, Homo sapien
gagagtttgagtcatatactgttgt

SEQ ID NO: 345403 - DNA, 25 bp, Homo sapien
tatactgttgtttcagattatctct

SEQ ID NO: 345404 - DNA, 25 bp, Homo sapien
agaggagagtttgagtcatatactg

SEQ ID NO: 345405 - DNA, 25 bp, Homo sapien
acacttcatcatcatacagcacagc

SEQ ID NO: 345406 - DNA, 25 bp, Homo sapien
cacacttcatcatcatacagcacag

SEQ ID NO: 345407 - DNA, 25 bp, Homo sapien
tcatcatcatacagcacagccttcc

SEQ ID NO: 345408 - DNA, 25 bp, Homo sapien
catgaggtaggcaacctgctgagac

SEQ ID NO: 345409 - DNA, 25 bp, Homo sapien
gaggtaggcaacctgctgagacccc

SEQ ID NO: 345410 - DNA, 25 bp, Homo sapien
tgagacccccagttgccgaccgagg

SEQ ID NO: 345411 - DNA, 25 bp, Homo sapien
tagagcatgaggtaggcaacctgct

SEQ ID NO: 345412 - DNA, 25 bp, Homo sapien
tgccacgtatggacagtaaaaggac

SEQ ID NO: 345413 - DNA, 25 bp, Homo sapien
ctttccaggtgctttgaacaaggct

SEQ ID NO: 345414 - DNA, 25 bp, Homo sapien
gagcctgagaacctgcacatactag

SEQ ID NO: 345415 - DNA, 25 bp, Homo sapien
tactagctgtgtccccttagacaag

SEQ ID NO: 345416 - DNA, 25 bp, Homo sapien
tagtggctagctgtcctatcactcc

SEQ ID NO: 345417 - DNA, 25 bp, Homo sapien
cttgctgcttctagtggctagctgt

SEQ ID NO: 345418 - DNA, 25 bp, Homo sapien
gcttctagtggctagctgtcctatc

SEQ ID NO: 345419 - DNA, 25 bp, Homo sapien
ggctagctgtcctatcactccactt

SEQ ID NO: 345420 - DNA, 25 bp, Homo sapien
tggccaggggcatggtagaattctt

SEQ ID NO: 345421 - DNA, 25 bp, Homo sapien
caggggcatggtagaattcttggca

SEQ ID NO: 345422 - DNA, 25 bp, Homo sapien
cttggcatttgagaagcatcctgta

SEQ ID NO: 345423 - DNA, 25 bp, Homo sapien
ctggagggggatggaagtccctggc

SEQ ID NO: 345424 - DNA, 25 bp, Homo sapien
cagcaacccttattcttctttgact

SEQ ID NO: 345425 - DNA, 25 bp, Homo sapien
tattggcagagatagctccttctgg

SEQ ID NO: 345426 - DNA, 25 bp, Homo sapien
gaaaatctgatccatgcctctctcg

SEQ ID NO: 345427 - DNA, 25 bp, Homo sapien
gtttgtgtgtaatgtccctttctct

SEQ ID NO: 345428 - DNA, 25 bp, Homo sapien
ctcaggccctgtgggagcacaagaa

SEQ ID NO: 345429 - DNA, 25 bp, Homo sapien
cacaagaaagtacaaggcatggccc

SEQ ID NO: 345430 - DNA, 25 bp, Homo sapien
tcagagcagacgagaacagggcaaa

SEQ ID NO: 345431 - DNA, 25 bp, Homo sapien
ggaccttcctacagggatacctgga

SEQ ID NO: 345432 - DNA, 25 bp, Homo sapien
ggtccactcacagagaaaaacggca

SEQ ID NO: 345433 - DNA, 25 bp, Homo sapien
aaacggcaggcctagaattagagaa

SEQ ID NO: 345434 - DNA, 25 bp, Homo sapien
caaggagaagcgaatagggaactct

SEQ ID NO: 345435 - DNA, 25 bp, Homo sapien
tattttcaccgatgaccctcagtgt

SEQ ID NO: 345436 - DNA, 25 bp, Homo sapien
ttctggccctttggctaaataaagc

SEQ ID NO: 345437 - DNA, 25 bp, Homo sapien
tctgatcactccaatagggagagag

SEQ ID NO: 345438 - DNA, 25 bp, Homo sapien
gatttggagagcgtcattataacct

SEQ ID NO: 345439 - DNA, 25 bp, Homo sapien
tacagagtttgagtggaatagagca

SEQ ID NO: 345440 - DNA, 25 bp, Homo sapien
gatttgtcccgcaggccatcattgg

SEQ ID NO: 345441 - DNA, 25 bp, Homo sapien
ttattgaaggcctcccctaggacca

SEQ ID NO: 345442 - DNA, 25 bp, Homo sapien
cagttagaagatgcaacagcccctt

SEQ ID NO: 345443 - DNA, 25 bp, Homo sapien
caaaatattgctggcctccgatggt

SEQ ID NO: 345444 - DNA, 25 bp, Homo sapien
tctacaagacagctcatctcaacag

SEQ ID NO: 345445 - DNA, 25 bp, Homo sapien
gaataaaccctcaattgtctacaag

SEQ ID NO: 345446 - DNA, 25 bp, Homo sapien
caggacgagaactcagacccagagc

SEQ ID NO: 345447 - DNA, 25 bp, Homo sapien
gcgctgctgccctcatacctgtgga

SEQ ID NO: 345448 - DNA, 25 bp, Homo sapien
tgtgatataatcaaggctggccaga

SEQ ID NO: 345449 - DNA, 25 bp, Homo sapien
tttggaggccccgacttgtgatata

SEQ ID NO: 345450 - DNA, 25 bp, Homo sapien
caattccttggtcctgcggtgtttg

SEQ ID NO: 345451 - DNA, 25 bp, Homo sapien
cacgggaggacaaggccataagagc

SEQ ID NO: 345452 - DNA, 25 bp, Homo sapien
actgataagggatgtccttcttgtg

SEQ ID NO: 345453 - DNA, 25 bp, Homo sapien
taagggatgtccttcttgtgggcct

SEQ ID NO: 345454 - DNA, 25 bp, Homo sapien
cctggtcccaccactgataagggat

SEQ ID NO: 345455 - DNA, 25 bp, Homo sapien
tgataagggatgtccttcttgtggg

SEQ ID NO: 345456 - DNA, 25 bp, Homo sapien
gaccttaggaaaatgacttcatctc

SEQ ID NO: 345457 - DNA, 25 bp, Homo sapien
tatgggaccttaggaaaatgacttc

SEQ ID NO: 345458 - DNA, 25 bp, Homo sapien
catctcccacgacctcagtttctca

SEQ ID NO: 345459 - DNA, 25 bp, Homo sapien
cagctatgggaccttaggaaaatga

SEQ ID NO: 345460 - DNA, 25 bp, Homo sapien
agcgctgaggccaaaaccctttgag

SEQ ID NO: 345461 - DNA, 25 bp, Homo sapien
tgagggtgagatgcaaacagggtcg

SEQ ID NO: 345462 - DNA, 25 bp, Homo sapien
aaacagggtcgggaggccagtgagt

SEQ ID NO: 345463 - DNA, 25 bp, Homo sapien
tcatgactcaagatgtgtccttggc

SEQ ID NO: 345464 - DNA, 25 bp, Homo sapien
tgctgagcacaagttgctaacagct

SEQ ID NO: 345465 - DNA, 25 bp, Homo sapien
tgtgctgagcacaagttgctaacag

SEQ ID NO: 345466 - DNA, 25 bp, Homo sapien
actgtgctgagcacaagttgctaac

SEQ ID NO: 345467 - DNA, 25 bp, Homo sapien
ctgagcacaagttgctaacagcttt

SEQ ID NO: 345468 - DNA, 25 bp, Homo sapien
tgacaccccggatcttccagccatt

SEQ ID NO: 345469 - DNA, 25 bp, Homo sapien
ccataagcccctataaccttcatgc

SEQ ID NO: 345470 - DNA, 25 bp, Homo sapien
caggcccaggttcctggccgtgtca

SEQ ID NO: 345471 - DNA, 25 bp, Homo sapien
cctggccgtgtcaatgtccctggat

SEQ ID NO: 345472 - DNA, 25 bp, Homo sapien
gggtccctgtgcctcgttctcactg

SEQ ID NO: 345473 - DNA, 25 bp, Homo sapien
ggtcacttccaggacagggcagtca

SEQ ID NO: 345474 - DNA, 25 bp, Homo sapien
gggtcacttccaggacagggcagtc

SEQ ID NO: 345475 - DNA, 25 bp, Homo sapien
cgttctcactgatggaatctgagca

SEQ ID NO: 345476 - DNA, 25 bp, Homo sapien
gtggctactcgtctgaaatcctgca

SEQ ID NO: 345477 - DNA, 25 bp, Homo sapien
tcatccaggtggctactcgtctgaa

SEQ ID NO: 345478 - DNA, 25 bp, Homo sapien
actcctactcagcaggaaaatcagt

SEQ ID NO: 345479 - DNA, 25 bp, Homo sapien
tcctactcagcaggaaaatcagtat

SEQ ID NO: 345480 - DNA, 25 bp, Homo sapien
gcacaatggtagaatggctggcaga

SEQ ID NO: 345481 - DNA, 25 bp, Homo sapien
cgaagtgtaccacgctgcacaatgg

SEQ ID NO: 345482 - DNA, 25 bp, Homo sapien
ccagatgacaggaggtgactccctg

SEQ ID NO: 345483 - DNA, 25 bp, Homo sapien
tccacacgggcacatcgaagtgtac

SEQ ID NO: 345484 - DNA, 25 bp, Homo sapien
tgcctcatcaaccttcctcctttta

SEQ ID NO: 345485 - DNA, 25 bp, Homo sapien
tgtgcctcatcaaccttcctccttt

SEQ ID NO: 345486 - DNA, 25 bp, Homo sapien
tcttgtgcctcatcaaccttcctcc

SEQ ID NO: 345487 - DNA, 25 bp, Homo sapien
ctctcttgtgcctcatcaaccttcc

SEQ ID NO: 345488 - DNA, 25 bp, Homo sapien
cttctggccacttgacatcttcaaa

SEQ ID NO: 345489 - DNA, 25 bp, Homo sapien
ccactcaggtccttcatcaagctct

SEQ ID NO: 345490 - DNA, 25 bp, Homo sapien
gagtctgtactactgtgtgtctttg

SEQ ID NO: 345491 - DNA, 25 bp, Homo sapien
agtctgtactactgtgtgtctttgt

SEQ ID NO: 345492 - DNA, 25 bp, Homo sapien
gaggatgactaaggcttttcttgac

SEQ ID NO: 345493 - DNA, 25 bp, Homo sapien
ggatgactaaggcttttcttgacat

SEQ ID NO: 345494 - DNA, 25 bp, Homo sapien
ctgaggatgactaaggcttttcttg

SEQ ID NO: 345495 - DNA, 25 bp, Homo sapien
atgactaaggcttttcttgacatca

SEQ ID NO: 345496 - DNA, 25 bp, Homo sapien
agtgcccacaaactgtgaaccagcc

SEQ ID NO: 345497 - DNA, 25 bp, Homo sapien
aagtgcccacaaactgtgaaccagc

SEQ ID NO: 345498 - DNA, 25 bp, Homo sapien
caagtgcccacaaactgtgaaccag

SEQ ID NO: 345499 - DNA, 25 bp, Homo sapien
tgcccacaaactgtgaaccagccat

SEQ ID NO: 345500 - DNA, 25 bp, Homo sapien
acaattcggtattacaccagctgga

SEQ ID NO: 345501 - DNA, 25 bp, Homo sapien
ccagctggaatgatcactgatctat

SEQ ID NO: 345502 - DNA, 25 bp, Homo sapien
cgtccttttggggtggctcagctaa

SEQ ID NO: 345503 - DNA, 25 bp, Homo sapien
caattcggtattacaccagctggaa

SEQ ID NO: 345504 - DNA, 25 bp, Homo sapien
tcgcttcgggtacccttgaagagcg

SEQ ID NO: 345505 - DNA, 25 bp, Homo sapien
tgtttttgaccaagagaaacatcgt

SEQ ID NO: 345506 - DNA, 25 bp, Homo sapien
tagaactgcagcaacgcagctgctg

SEQ ID NO: 345507 - DNA, 25 bp, Homo sapien
gacgacttgagtgtgtttttgacca

SEQ ID NO: 345508 - DNA, 25 bp, Homo sapien
ctccagtcccctctggagctggttt

SEQ ID NO: 345509 - DNA, 25 bp, Homo sapien
tgtcttcagagcaacaggaacaaac

SEQ ID NO: 345510 - DNA, 25 bp, Homo sapien
ctgtcttcagagcaacaggaacaaa

SEQ ID NO: 345511 - DNA, 25 bp, Homo sapien
caggtctgaccttcctaacaagtcc

SEQ ID NO: 345512 - DNA, 25 bp, Homo sapien
ggtctgaccttcctaacaagtccat

SEQ ID NO: 345513 - DNA, 25 bp, Homo sapien
aggtctgaccttcctaacaagtcca

SEQ ID NO: 345514 - DNA, 25 bp, Homo sapien
gggaagcagccatatctcacacggc

SEQ ID NO: 345515 - DNA, 25 bp, Homo sapien
tgcacattaaactcagggccttctg

SEQ ID NO: 345516 - DNA, 25 bp, Homo sapien
catgcacattaaactcagggccttc

SEQ ID NO: 345517 - DNA, 25 bp, Homo sapien
ctcgatatgcttgagtgtgtgtgca

SEQ ID NO: 345518 - DNA, 25 bp, Homo sapien
cacattaaactcagggccttctgtg

SEQ ID NO: 345519 - DNA, 25 bp, Homo sapien
ccgagtctgcgctctgggctcgact

SEQ ID NO: 345520 - DNA, 25 bp, Homo sapien
ccgagtgaaggtagcggcgagcgga

SEQ ID NO: 345521 - DNA, 25 bp, Homo sapien
cgctcttggtcgagcgggattcccc

SEQ ID NO: 345522 - DNA, 25 bp, Homo sapien
atcggcggcgttgaggcgggatccg

SEQ ID NO: 345523 - DNA, 25 bp, Homo sapien
agctgtgcggctcggaacccgcgat

SEQ ID NO: 345524 - DNA, 25 bp, Homo sapien
gcaggagaaagtacgaggagctttc

SEQ ID NO: 345525 - DNA, 25 bp, Homo sapien
tagctgttgccgcaaaactgccggg

SEQ ID NO: 345526 - DNA, 25 bp, Homo sapien
cctcttcacagagctttgttgagct

SEQ ID NO: 345527 - DNA, 25 bp, Homo sapien
agaagagaatgcagaatcttggaca

SEQ ID NO: 345528 - DNA, 25 bp, Homo sapien
tgcactgactggcattttgagttct

SEQ ID NO: 345529 - DNA, 25 bp, Homo sapien
aagaagagaatgcagaatcttggac

SEQ ID NO: 345530 - DNA, 25 bp, Homo sapien
tttgagttcttgaaaggagtggttg

SEQ ID NO: 345531 - DNA, 25 bp, Homo sapien
gaaaggctctacattgaaggctgac

SEQ ID NO: 345532 - DNA, 25 bp, Homo sapien
taacgagttgcccacactgagagag

SEQ ID NO: 345533 - DNA, 25 bp, Homo sapien
taaagaagggtctgtgtatcccagc

SEQ ID NO: 345534 - DNA, 25 bp, Homo sapien
taggttttaagtcagcacgtgaggc

SEQ ID NO: 345535 - DNA, 25 bp, Homo sapien
gcagattcgctggtcttcaaagcca

SEQ ID NO: 345536 - DNA, 25 bp, Homo sapien
tggtcaggcccagtcaggataatct

SEQ ID NO: 345537 - DNA, 25 bp, Homo sapien
cgagtaaatagcgtggtcaggattc

SEQ ID NO: 345538 - DNA, 25 bp, Homo sapien
gagtcaactcactagagaccttaag

SEQ ID NO: 345539 - DNA, 25 bp, Homo sapien
gccttacctgtcttagtctgaaatg

SEQ ID NO: 345540 - DNA, 25 bp, Homo sapien
ttcaatttgaagtgacctaggtggg

SEQ ID NO: 345541 - DNA, 25 bp, Homo sapien
gaaagataacgggaagatgccagtt

SEQ ID NO: 345542 - DNA, 25 bp, Homo sapien
tgagtagagggttcattccaattcc

SEQ ID NO: 345543 - DNA, 25 bp, Homo sapien
gaagttagccaccaagtcctcacaa

SEQ ID NO: 345544 - DNA, 25 bp, Homo sapien
taacccagaatctttagtcggcaga

SEQ ID NO: 345545 - DNA, 25 bp, Homo sapien
tttcactggcagcatgaagttagcc

SEQ ID NO: 345546 - DNA, 25 bp, Homo sapien
catcttatcagttcccctggtgggc

SEQ ID NO: 345547 - DNA, 25 bp, Homo sapien
gaaacccagccctattgtatttgta

SEQ ID NO: 345548 - DNA, 25 bp, Homo sapien
ccttgtggtatttggtactattaga

SEQ ID NO: 345549 - DNA, 25 bp, Homo sapien
ggaagacattaatcctagcattgtc

SEQ ID NO: 345550 - DNA, 25 bp, Homo sapien
aactttggattcagaccttcttgca

SEQ ID NO: 345551 - DNA, 25 bp, Homo sapien
gctgaagagattagaatcacaacgc

SEQ ID NO: 345552 - DNA, 25 bp, Homo sapien
cagaaactccctgaggttataagca

SEQ ID NO: 345553 - DNA, 25 bp, Homo sapien
catgccagaagaaaaggtcataacc

SEQ ID NO: 345554 - DNA, 25 bp, Homo sapien
tctagtgtgtaggtgtcagcagaca

SEQ ID NO: 345555 - DNA, 25 bp, Homo sapien
ggtaagataatttgggctgcgagca

SEQ ID NO: 345556 - DNA, 25 bp, Homo sapien
catcctgggcgctagagggaattgc

SEQ ID NO: 345557 - DNA, 25 bp, Homo sapien
gcagagacgggtattaaagccccac

SEQ ID NO: 345558 - DNA, 25 bp, Homo sapien
gtctcaacagatgacaaaccccttg

SEQ ID NO: 345559 - DNA, 25 bp, Homo sapien
gaccctaagagtctcggcttctgtg

SEQ ID NO: 345560 - DNA, 25 bp, Homo sapien
taagggctatgaccctaagagtctc

SEQ ID NO: 345561 - DNA, 25 bp, Homo sapien
aaggactaagggctatgaccctaag

SEQ ID NO: 345562 - DNA, 25 bp, Homo sapien
ggctatgaccctaagagtctcggct

SEQ ID NO: 345563 - DNA, 25 bp, Homo sapien
cgtggcttaaagaggaccgcgcttc

SEQ ID NO: 345564 - DNA, 25 bp, Homo sapien
cgggaccctggcgtctcagggcggg

SEQ ID NO: 345565 - DNA, 25 bp, Homo sapien
gaccctacatcgtgtgtgacgcccg

SEQ ID NO: 345566 - DNA, 25 bp, Homo sapien
cgagcaagccgcagtgaggtcatcg

SEQ ID NO: 345567 - DNA, 25 bp, Homo sapien
cggtggcgctggcggttgctgtcag

SEQ ID NO: 345568 - DNA, 25 bp, Homo sapien
gtcggtggcgctggcggttgctgtc

SEQ ID NO: 345569 - DNA, 25 bp, Homo sapien
ggtcggtggcgctggcggttgctgt

SEQ ID NO: 345570 - DNA, 25 bp, Homo sapien
tcggtggcgctggcggttgctgtca

SEQ ID NO: 345571 - DNA, 25 bp, Homo sapien
cggtgctccgcacccagcttcggtc

SEQ ID NO: 345572 - DNA, 25 bp, Homo sapien
gggaacccgttcagctctccagtgg

SEQ ID NO: 345573 - DNA, 25 bp, Homo sapien
tgattcccggggttggtggcagcgg

SEQ ID NO: 345574 - DNA, 25 bp, Homo sapien
ctctccagtgggacagcgcatcggt

SEQ ID NO: 345575 - DNA, 25 bp, Homo sapien
tgcacaggctgacacttcttcactg

SEQ ID NO: 345576 - DNA, 25 bp, Homo sapien
tgttgttattgtcatggtgcaggat

SEQ ID NO: 345577 - DNA, 25 bp, Homo sapien
ggtgacacaaatggaggtcctccga

SEQ ID NO: 345578 - DNA, 25 bp, Homo sapien
gaatgatggctgtcattgttctcca

SEQ ID NO: 345579 - DNA, 25 bp, Homo sapien
tcctgaaacactgatgttccctcct

SEQ ID NO: 345580 - DNA, 25 bp, Homo sapien
gcctctcctgaaacactgatgttcc

SEQ ID NO: 345581 - DNA, 25 bp, Homo sapien
atgagaggtgcccatcgttttcagg

SEQ ID NO: 345582 - DNA, 25 bp, Homo sapien
tctcctgaaacactgatgttccctc

SEQ ID NO: 345583 - DNA, 25 bp, Homo sapien
tgcacgtggttgacgcgtgaagata

SEQ ID NO: 345584 - DNA, 25 bp, Homo sapien
tgtgcacgtggttgacgcgtgaaga

SEQ ID NO: 345585 - DNA, 25 bp, Homo sapien
cgtggttgacgcgtgaagatagcat

SEQ ID NO: 345586 - DNA, 25 bp, Homo sapien
tcctgtgtgcacgtggttgacgcgt

SEQ ID NO: 345587 - DNA, 25 bp, Homo sapien
tgcagtatctcgttccatccaaaag

SEQ ID NO: 345588 - DNA, 25 bp, Homo sapien
tgcgcccggcagtaatcagactttt

SEQ ID NO: 345589 - DNA, 25 bp, Homo sapien
tccaaaagtgctccagttgcctggg

SEQ ID NO: 345590 - DNA, 25 bp, Homo sapien
tctgagggaactaacagcacagcct

SEQ ID NO: 345591 - DNA, 25 bp, Homo sapien
caaaagaatcgaaaacaggaacatg

SEQ ID NO: 345592 - DNA, 25 bp, Homo sapien
aaatagcaaactgctgaccatgggc

SEQ ID NO: 345593 - DNA, 25 bp, Homo sapien
aggtaaaagcaacccgtgtccattg

SEQ ID NO: 345594 - DNA, 25 bp, Homo sapien
tgaacccatatgcatagcaacgtta

SEQ ID NO: 345595 - DNA, 25 bp, Homo sapien
agcactctaacaccttgccaagcag

SEQ ID NO: 345596 - DNA, 25 bp, Homo sapien
taatcatgtaccgtgacctacgcgg

SEQ ID NO: 345597 - DNA, 25 bp, Homo sapien
tacgcggctaacatggtccaaatta

SEQ ID NO: 345598 - DNA, 25 bp, Homo sapien
taaggaaaatctaccctggcacgcc

SEQ ID NO: 345599 - DNA, 25 bp, Homo sapien
ttgaaccagggcataccagatctgg

SEQ ID NO: 345600 - DNA, 25 bp, Homo sapien
cataccagatctgggaggtatagtc

SEQ ID NO: 345601 - DNA, 25 bp, Homo sapien
tctgggaggtatagtcaggctccat

SEQ ID NO: 345602 - DNA, 25 bp, Homo sapien
ttgatcaggttgaaccagggcatac

SEQ ID NO: 345603 - DNA, 25 bp, Homo sapien
ttaggcctttggtcccctgatgtgg

SEQ ID NO: 345604 - DNA, 25 bp, Homo sapien
cccgtaaaatccagtgaggttcagc

SEQ ID NO: 345605 - DNA, 25 bp, Homo sapien
cctaagaacgatcaaggctggctgt

SEQ ID NO: 345606 - DNA, 25 bp, Homo sapien
agaagtgcacaagaacccctcagaa

SEQ ID NO: 345607 - DNA, 25 bp, Homo sapien
caggttatattaggcctcccctcct

SEQ ID NO: 345608 - DNA, 25 bp, Homo sapien
cctcctggcaggttatattaggcct

SEQ ID NO: 345609 - DNA, 25 bp, Homo sapien
gcttagctacctcctggcaggttat

SEQ ID NO: 345610 - DNA, 25 bp, Homo sapien
tggcaggttatattaggcctcccct

SEQ ID NO: 345611 - DNA, 25 bp, Homo sapien
gtaagtgcttggcatagccctgccc

SEQ ID NO: 345612 - DNA, 25 bp, Homo sapien
gggctctgggtcatacctgccttca

SEQ ID NO: 345613 - DNA, 25 bp, Homo sapien
cagtgagtcgcagctgcaatttgat

SEQ ID NO: 345614 - DNA, 25 bp, Homo sapien
tttccccaggcctatcgatgtttgc

SEQ ID NO: 345615 - DNA, 25 bp, Homo sapien
ttcttccttgggctagaggctgtct

SEQ ID NO: 345616 - DNA, 25 bp, Homo sapien
cactcggtgcccttttctgacttac

SEQ ID NO: 345617 - DNA, 25 bp, Homo sapien
gtccccacatgtgccatatcctgtc

SEQ ID NO: 345618 - DNA, 25 bp, Homo sapien
tgtccaagaactcccattgtcccag

SEQ ID NO: 345619 - DNA, 25 bp, Homo sapien
gaaggagctgtagtgtcctgctgcc

SEQ ID NO: 345620 - DNA, 25 bp, Homo sapien
cctctagcgcggttctgggaagtgt

SEQ ID NO: 345621 - DNA, 25 bp, Homo sapien
ctgccgctgcctgccattgacaatg

SEQ ID NO: 345622 - DNA, 25 bp, Homo sapien
gacaatgttgctgggacctctgcct

SEQ ID NO: 345623 - DNA, 25 bp, Homo sapien
tgtgtcccctgccccggatgtgctc

SEQ ID NO: 345624 - DNA, 25 bp, Homo sapien
agcccctgtgcccagtcttagtgaa

SEQ ID NO: 345625 - DNA, 25 bp, Homo sapien
gcagatgtgaataccggtcgcagtt

SEQ ID NO: 345626 - DNA, 25 bp, Homo sapien
ttcaggcgattctcgcgtgtcagcc

SEQ ID NO: 345627 - DNA, 25 bp, Homo sapien
taacatggcgtggtggttcgcgcct

SEQ ID NO: 345628 - DNA, 25 bp, Homo sapien
agtcttccacctaccacaagggtct

SEQ ID NO: 345629 - DNA, 25 bp, Homo sapien
tgctaatgagtttcaggcaaggatg

SEQ ID NO: 345630 - DNA, 25 bp, Homo sapien
ttagcaacccatagaccagtcttcc

SEQ ID NO: 345631 - DNA, 25 bp, Homo sapien
cagtgtattctggtatatacattag

SEQ ID NO: 345632 - DNA, 25 bp, Homo sapien
tgctatcaggagaccacctagaaga

SEQ ID NO: 345633 - DNA, 25 bp, Homo sapien
tcatctggtgctctccatatctgtt

SEQ ID NO: 345634 - DNA, 25 bp, Homo sapien
tatggaggatcaaaatacgggcgcc

SEQ ID NO: 345635 - DNA, 25 bp, Homo sapien
ggagtgagtttcgagaagacccagt

SEQ ID NO: 345636 - DNA, 25 bp, Homo sapien
tcaacaaacagatcaaagacaatat

SEQ ID NO: 345637 - DNA, 25 bp, Homo sapien
tttcactttcccgtggttagccatg

SEQ ID NO: 345638 - DNA, 25 bp, Homo sapien
agtacactgctgtttcaacaaacag

SEQ ID NO: 345639 - DNA, 25 bp, Homo sapien
cccgtggttagccatgatgaatgac

SEQ ID NO: 345640 - DNA, 25 bp, Homo sapien
atttcctgaggcatttaagcttcaa

SEQ ID NO: 345641 - DNA, 25 bp, Homo sapien
tggtgactttccatgtttcttgact

SEQ ID NO: 345642 - DNA, 25 bp, Homo sapien
tagttcacacacagactgtccattt

SEQ ID NO: 345643 - DNA, 25 bp, Homo sapien
tttaagcttcaacatcagacaatta

SEQ ID NO: 345644 - DNA, 25 bp, Homo sapien
gatacctgtttagggtgcacagcag

SEQ ID NO: 345645 - DNA, 25 bp, Homo sapien
acctgtttagggtgcacagcagcac

SEQ ID NO: 345646 - DNA, 25 bp, Homo sapien
gagcagcagatacctgtttagggtg

SEQ ID NO: 345647 - DNA, 25 bp, Homo sapien
cattcagtgtttggtaggtggaact

SEQ ID NO: 345648 - DNA, 25 bp, Homo sapien
tgcagctgcctaccgtgcaccttca

SEQ ID NO: 345649 - DNA, 25 bp, Homo sapien
taccgtgcaccttcacggcttgcat

SEQ ID NO: 345650 - DNA, 25 bp, Homo sapien
caccttcacggcttgcatgaggtcc

SEQ ID NO: 345651 - DNA, 25 bp, Homo sapien
tcacggcttgcatgaggtcccacct

SEQ ID NO: 345652 - DNA, 25 bp, Homo sapien
tggatgaaaggtccccagggaaatc

SEQ ID NO: 345653 - DNA, 25 bp, Homo sapien
ccgcgtactttctttagactccact

SEQ ID NO: 345654 - DNA, 25 bp, Homo sapien
tcttttagagacaaaggagcgttgg

SEQ ID NO: 345655 - DNA, 25 bp, Homo sapien
ccatttttgctcaggtcccgcgtac

SEQ ID NO: 345656 - DNA, 25 bp, Homo sapien
gattgggtgaggatgccttcacctc

SEQ ID NO: 345657 - DNA, 25 bp, Homo sapien
tttctgcaacttgaagctgaaagca

SEQ ID NO: 345658 - DNA, 25 bp, Homo sapien
tgcaacttgaagctgaaagcattct

SEQ ID NO: 345659 - DNA, 25 bp, Homo sapien
gaaagcattctttactgattgggtg

SEQ ID NO: 345660 - DNA, 25 bp, Homo sapien
ccctcttgcagctctgagtgggatg

SEQ ID NO: 345661 - DNA, 25 bp, Homo sapien
cctcttgcagctctgagtgggatga

SEQ ID NO: 345662 - DNA, 25 bp, Homo sapien
ctttctgccctcttgcagctctgag

SEQ ID NO: 345663 - DNA, 25 bp, Homo sapien
tctgccctcttgcagctctgagtgg

SEQ ID NO: 345664 - DNA, 25 bp, Homo sapien
gaaattgggcgcacacgtgagactg

SEQ ID NO: 345665 - DNA, 25 bp, Homo sapien
tggaggccctccagaggatggaaat

SEQ ID NO: 345666 - DNA, 25 bp, Homo sapien
tgtgcggctgctcgttatcagccgg

SEQ ID NO: 345667 - DNA, 25 bp, Homo sapien
gagatgatgaacgtggaggccctcc

SEQ ID NO: 345668 - DNA, 25 bp, Homo sapien
tgaagaagggtcacgtacatgccac

SEQ ID NO: 345669 - DNA, 25 bp, Homo sapien
gaagaagggtcacgtacatgccacc

SEQ ID NO: 345670 - DNA, 25 bp, Homo sapien
gaagggtcacgtacatgccacctgg

SEQ ID NO: 345671 - DNA, 25 bp, Homo sapien
gctgaagaagggtcacgtacatgcc

SEQ ID NO: 345672 - DNA, 25 bp, Homo sapien
cctggaatccgcactggaaaaggcc

SEQ ID NO: 345673 - DNA, 25 bp, Homo sapien
gaactgttcataggcccctggaatc

SEQ ID NO: 345674 - DNA, 25 bp, Homo sapien
tagtcaacgctccaagcctccattg

SEQ ID NO: 345675 - DNA, 25 bp, Homo sapien
tggaaaaggcctccgtagtcaacgc

SEQ ID NO: 345676 - DNA, 25 bp, Homo sapien
caccatccagtgagcgagggatgct

SEQ ID NO: 345677 - DNA, 25 bp, Homo sapien
gacctcaagtacatcaaggccaagg

SEQ ID NO: 345678 - DNA, 25 bp, Homo sapien
tgttcacagaccttaggcaccagac

SEQ ID NO: 345679 - DNA, 25 bp, Homo sapien
gctttcctgagtccgcttgtccaca

SEQ ID NO: 345680 - DNA, 25 bp, Homo sapien
atcccggagggtcctttcctctctg

SEQ ID NO: 345681 - DNA, 25 bp, Homo sapien
caccctggcagattgggaccagagg

SEQ ID NO: 345682 - DNA, 25 bp, Homo sapien
gcaccctggcagattgggaccagag

SEQ ID NO: 345683 - DNA, 25 bp, Homo sapien
ctgggtgtctcttgactcttcccag

SEQ ID NO: 345684 - DNA, 25 bp, Homo sapien
ggtcccaggcaaaagcgatcacagt

SEQ ID NO: 345685 - DNA, 25 bp, Homo sapien
aacaagtaacgggtgcatctctgca

SEQ ID NO: 345686 - DNA, 25 bp, Homo sapien
aacagaagtccccttgagtcacagg

SEQ ID NO: 345687 - DNA, 25 bp, Homo sapien
tattgtccccgaggcctagcatggg

SEQ ID NO: 345688 - DNA, 25 bp, Homo sapien
gagtcactgccatacctgaggaggc

SEQ ID NO: 345689 - DNA, 25 bp, Homo sapien
caaaccatgcagaacacagtgagcc

SEQ ID NO: 345690 - DNA, 25 bp, Homo sapien
gatagtcaaatgcttccccagctgg

SEQ ID NO: 345691 - DNA, 25 bp, Homo sapien
tatatggctacacgagatcagaccc

SEQ ID NO: 345692 - DNA, 25 bp, Homo sapien
ttggaggccatgtccttccggaaca

SEQ ID NO: 345693 - DNA, 25 bp, Homo sapien
agttggaggccatgtccttccggaa

SEQ ID NO: 345694 - DNA, 25 bp, Homo sapien
tagttggaggccatgtccttccgga

SEQ ID NO: 345695 - DNA, 25 bp, Homo sapien
ggaggccatgtccttccggaacagc

SEQ ID NO: 345696 - DNA, 25 bp, Homo sapien
tatggtgagccaaacacgtgccagt

SEQ ID NO: 345697 - DNA, 25 bp, Homo sapien
gcagtgccatgaccggagatgaaga

SEQ ID NO: 345698 - DNA, 25 bp, Homo sapien
acagaaatggtagcccctagggagc

SEQ ID NO: 345699 - DNA, 25 bp, Homo sapien
gatggaaccgctgaaagcctcgtgg

SEQ ID NO: 345700 - DNA, 25 bp, Homo sapien
cggtgagcacggtggcaccatgctt

SEQ ID NO: 345701 - DNA, 25 bp, Homo sapien
tccaggtacttcacggggatcttgt

SEQ ID NO: 345702 - DNA, 25 bp, Homo sapien
atgcttctttaagtcctcagacgcc

SEQ ID NO: 345703 - DNA, 25 bp, Homo sapien
cttcacggggatcttgtgcttggtg

SEQ ID NO: 345704 - DNA, 25 bp, Homo sapien
cttcaggtgcttgaacttgtcaaac

SEQ ID NO: 345705 - DNA, 25 bp, Homo sapien
gacttcaggtgcttgaacttgtcaa

SEQ ID NO: 345706 - DNA, 25 bp, Homo sapien
gaacttgtcaaacttctccagagtc

SEQ ID NO: 345707 - DNA, 25 bp, Homo sapien
cttgtcaaacttctccagagtctct

SEQ ID NO: 345708 - DNA, 25 bp, Homo sapien
gaagacaatcccttcgctcaaccag

SEQ ID NO: 345709 - DNA, 25 bp, Homo sapien
agcgtgggacgggatctcggagacc

SEQ ID NO: 345710 - DNA, 25 bp, Homo sapien
agaccatggaagacaatcccttcgc

SEQ ID NO: 345711 - DNA, 25 bp, Homo sapien
gaattctagggcatgagcgtgggac

SEQ ID NO: 345712 - DNA, 25 bp, Homo sapien
ctgatgaggacttcctgcccatggc

SEQ ID NO: 345713 - DNA, 25 bp, Homo sapien
tccaccttcccccagacgttcagca

SEQ ID NO: 345714 - DNA, 25 bp, Homo sapien
gccattccccgtcgctgagccccat

SEQ ID NO: 345715 - DNA, 25 bp, Homo sapien
agacgttcagcaccaactgccattc

SEQ ID NO: 345716 - DNA, 25 bp, Homo sapien
ctgccattccccgtcgctgagcccc

SEQ ID NO: 345717 - DNA, 25 bp, Homo sapien
gaagaagacaaaaagagcaagtatg

SEQ ID NO: 345718 - DNA, 25 bp, Homo sapien
gggtttgaggctgcctggtcccaag

SEQ ID NO: 345719 - DNA, 25 bp, Homo sapien
aggctgcctggtcccaagggcgttt

SEQ ID NO: 345720 - DNA, 25 bp, Homo sapien
tatgggctcactgggtgtcctggcc

SEQ ID NO: 345721 - DNA, 25 bp, Homo sapien
ctcatccagggagggtctaatcttt

SEQ ID NO: 345722 - DNA, 25 bp, Homo sapien
ccattgtggcgaggcaggacagctc

SEQ ID NO: 345723 - DNA, 25 bp, Homo sapien
agatcgctcaatggctcgctgtccc

SEQ ID NO: 345724 - DNA, 25 bp, Homo sapien
cttctgggatgcttgacaaagatcg

SEQ ID NO: 345725 - DNA, 25 bp, Homo sapien
tggtcactcgctggaggtgagtcca

SEQ ID NO: 345726 - DNA, 25 bp, Homo sapien
gatggcattgagctgtgccacatct

SEQ ID NO: 345727 - DNA, 25 bp, Homo sapien
cgctggaggtgagtccagggtgtga

SEQ ID NO: 345728 - DNA, 25 bp, Homo sapien
attgagctgtgccacatctgacctg

SEQ ID NO: 345729 - DNA, 25 bp, Homo sapien
gaaaatccaatctaggtgacctagg

SEQ ID NO: 345730 - DNA, 25 bp, Homo sapien
ttggacagctgacaattccctttgg

SEQ ID NO: 345731 - DNA, 25 bp, Homo sapien
aggaatttgctagcccttggacagc

SEQ ID NO: 345732 - DNA, 25 bp, Homo sapien
tgacaattccctttggtaaatctgg

SEQ ID NO: 345733 - DNA, 25 bp, Homo sapien
cctctccagcccctcagcatccatc

SEQ ID NO: 345734 - DNA, 25 bp, Homo sapien
tccagcccctcagcatccatcatac

SEQ ID NO: 345735 - DNA, 25 bp, Homo sapien
ctctccagcccctcagcatccatca

SEQ ID NO: 345736 - DNA, 25 bp, Homo sapien
agcccctcagcatccatcatactga

SEQ ID NO: 345737 - DNA, 25 bp, Homo sapien
agagcctccagccaagcggccaggg

SEQ ID NO: 345738 - DNA, 25 bp, Homo sapien
cgcagagcctccagccaagcggcca

SEQ ID NO: 345739 - DNA, 25 bp, Homo sapien
ttctccccagctgtcctcgcagagc

SEQ ID NO: 345740 - DNA, 25 bp, Homo sapien
cagctgtcctcgcagagcctccagc

SEQ ID NO: 345741 - DNA, 25 bp, Homo sapien
gtcacacagcgaggaaataccaagc

SEQ ID NO: 345742 - DNA, 25 bp, Homo sapien
taccaagcccaagattgggacccag

SEQ ID NO: 345743 - DNA, 25 bp, Homo sapien
tctgcttcatggctaagaactggtc

SEQ ID NO: 345744 - DNA, 25 bp, Homo sapien
tacagtacctagcaaaggaccaggc

SEQ ID NO: 345745 - DNA, 25 bp, Homo sapien
gagtttctcgctgagtgaccgggca

SEQ ID NO: 345746 - DNA, 25 bp, Homo sapien
tcatttaaccagagtgcccgtcatc

SEQ ID NO: 345747 - DNA, 25 bp, Homo sapien
ggaggctggagagagtcatttaacc

SEQ ID NO: 345748 - DNA, 25 bp, Homo sapien
tcctttgggacacgtagcatcgggt

SEQ ID NO: 345749 - DNA, 25 bp, Homo sapien
gggagcggtcgccaggtttgtccac

SEQ ID NO: 345750 - DNA, 25 bp, Homo sapien
cagttgtagggatacacagccatcc

SEQ ID NO: 345751 - DNA, 25 bp, Homo sapien
gtagggatacacagccatccccagg

SEQ ID NO: 345752 - DNA, 25 bp, Homo sapien
atgtgcctggcagttgtagggatac

SEQ ID NO: 345753 - DNA, 25 bp, Homo sapien
tggccagccggcaccagcgtgtatc

SEQ ID NO: 345754 - DNA, 25 bp, Homo sapien
gcaccagcgtgtatcgggctccctt

SEQ ID NO: 345755 - DNA, 25 bp, Homo sapien
ggtgctctcctcggtctaccctgaa

SEQ ID NO: 345756 - DNA, 25 bp, Homo sapien
gccggcaccagcgtgtatcgggctc

SEQ ID NO: 345757 - DNA, 25 bp, Homo sapien
ctttgctctcctcccatctatccag

SEQ ID NO: 345758 - DNA, 25 bp, Homo sapien
ctctcctcccatctatccagcacca

SEQ ID NO: 345759 - DNA, 25 bp, Homo sapien
ttgctctcctcccatctatccagca

SEQ ID NO: 345760 - DNA, 25 bp, Homo sapien
cttcccgcctttgctctcctcccat

SEQ ID NO: 345761 - DNA, 25 bp, Homo sapien
gtgattgtgggctgagaagttccat

SEQ ID NO: 345762 - DNA, 25 bp, Homo sapien
agcccagtctgaggacagaagacaa

SEQ ID NO: 345763 - DNA, 25 bp, Homo sapien
tctgagtatcctgggagtagatggg

SEQ ID NO: 345764 - DNA, 25 bp, Homo sapien
tcagtgttataattcagccagagtc

SEQ ID NO: 345765 - DNA, 25 bp, Homo sapien
gggtaaagcccagtctgaggacaga

SEQ ID NO: 345766 - DNA, 25 bp, Homo sapien
gacactgggcatatgttctggaaga

SEQ ID NO: 345767 - DNA, 25 bp, Homo sapien
caacttctcctttggaactcaggtg

SEQ ID NO: 345768 - DNA, 25 bp, Homo sapien
tcccagctccatctcaagttgaaga

SEQ ID NO: 345769 - DNA, 25 bp, Homo sapien
tgttctggaagaatgtcaacttctc

SEQ ID NO: 345770 - DNA, 25 bp, Homo sapien
gtgggggccaagttcagtctcttag

SEQ ID NO: 345771 - DNA, 25 bp, Homo sapien
ggtgggggccaagttcagtctctta

SEQ ID NO: 345772 - DNA, 25 bp, Homo sapien
tgggggccaagttcagtctcttagt

SEQ ID NO: 345773 - DNA, 25 bp, Homo sapien
agggtgggggccaagttcagtctct

SEQ ID NO: 345774 - DNA, 25 bp, Homo sapien
gatgacgctcctctgtgtgaagacg

SEQ ID NO: 345775 - DNA, 25 bp, Homo sapien
tgtgaagacgtggagctacaagacg

SEQ ID NO: 345776 - DNA, 25 bp, Homo sapien
agctacaagacggagatctgtcccc

SEQ ID NO: 345777 - DNA, 25 bp, Homo sapien
agggatgaggatgacgctcctctgt

SEQ ID NO: 345778 - DNA, 25 bp, Homo sapien
aggtaattagggttgactgaggcca

SEQ ID NO: 345779 - DNA, 25 bp, Homo sapien
actgaggccatagggtgaggtccta

SEQ ID NO: 345780 - DNA, 25 bp, Homo sapien
tgctgcacacctacactgaaggaag

SEQ ID NO: 345781 - DNA, 25 bp, Homo sapien
tcctaacccgatggaattgacttct

SEQ ID NO: 345782 - DNA, 25 bp, Homo sapien
gagttcaactttagagggagccatg

SEQ ID NO: 345783 - DNA, 25 bp, Homo sapien
tgggagtcgaacatgcctcatcata

SEQ ID NO: 345784 - DNA, 25 bp, Homo sapien
gcaagaagaaaggactatgagttca

SEQ ID NO: 345785 - DNA, 25 bp, Homo sapien
tctgggccaggacactcgaaaatta

SEQ ID NO: 345786 - DNA, 25 bp, Homo sapien
gaattagtggaccatccccttccag

SEQ ID NO: 345787 - DNA, 25 bp, Homo sapien
agcgagcctctgcttcgatgcttgg

SEQ ID NO: 345788 - DNA, 25 bp, Homo sapien
taaagctgagcacgaattagtggac

SEQ ID NO: 345789 - DNA, 25 bp, Homo sapien
gaggctttgtggcttgggtcgccag

SEQ ID NO: 345790 - DNA, 25 bp, Homo sapien
cagtcattaagagcaactcgttccc

SEQ ID NO: 345791 - DNA, 25 bp, Homo sapien
ctatggtccactgcccaacagtcat

SEQ ID NO: 345792 - DNA, 25 bp, Homo sapien
gagcagttgggctcctatggtccac

SEQ ID NO: 345793 - DNA, 25 bp, Homo sapien
aactggcccttccacggcactgtgt

SEQ ID NO: 345794 - DNA, 25 bp, Homo sapien
tatctgaaatctagtaacttcatta

SEQ ID NO: 345795 - DNA, 25 bp, Homo sapien
tgaaatctagtaacttcattacatt

SEQ ID NO: 345796 - DNA, 25 bp, Homo sapien
ttttatctgaaatctagtaacttca

SEQ ID NO: 345797 - DNA, 25 bp, Homo sapien
tctgaaatctagtaacttcattaca

SEQ ID NO: 345798 - DNA, 25 bp, Homo sapien
ctcacttagatccatgggcccaggc

SEQ ID NO: 345799 - DNA, 25 bp, Homo sapien
tattgcatcctagtcaaccttgggc

SEQ ID NO: 345800 - DNA, 25 bp, Homo sapien
gcagcatttgggagcgaaagcagaa

SEQ ID NO: 345801 - DNA, 25 bp, Homo sapien
tttgccactagaagcctaagcgatt

SEQ ID NO: 345802 - DNA, 25 bp, Homo sapien
tccaagagtacagaaagtccaggtc

SEQ ID NO: 345803 - DNA, 25 bp, Homo sapien
taataattgcatcgaggcctctagc

SEQ ID NO: 345804 - DNA, 25 bp, Homo sapien
taagagcagtttagcccctgaggag

SEQ ID NO: 345805 - DNA, 25 bp, Homo sapien
tcttaaaaggtctgtgggagccgcc

SEQ ID NO: 345806 - DNA, 25 bp, Homo sapien
tgtacaaagtggtccgggtgctcag

SEQ ID NO: 345807 - DNA, 25 bp, Homo sapien
tggagcaagtacaaagtgcctctgc

SEQ ID NO: 345808 - DNA, 25 bp, Homo sapien
tccttccaatatgggagggcagcaa

SEQ ID NO: 345809 - DNA, 25 bp, Homo sapien
gggactactgacctaggacctggta

SEQ ID NO: 345810 - DNA, 25 bp, Homo sapien
gctaagcacggacatacagacatgg

SEQ ID NO: 345811 - DNA, 25 bp, Homo sapien
taaatattgcaatagccaggcctca

SEQ ID NO: 345812 - DNA, 25 bp, Homo sapien
tgtccctgggtcctaaattcctgaa

SEQ ID NO: 345813 - DNA, 25 bp, Homo sapien
tcattcagcaccagatacactttgg

SEQ ID NO: 345814 - DNA, 25 bp, Homo sapien
tagggggcaaatcggctgtagccac

SEQ ID NO: 345815 - DNA, 25 bp, Homo sapien
ggcaaatcggctgtagccacctcgg

SEQ ID NO: 345816 - DNA, 25 bp, Homo sapien
tcagtagggggcaaatcggctgtag

SEQ ID NO: 345817 - DNA, 25 bp, Homo sapien
ggggcaaatcggctgtagccacctc

SEQ ID NO: 345818 - DNA, 25 bp, Homo sapien
tctgcttctaaggtgctcagaccag

SEQ ID NO: 345819 - DNA, 25 bp, Homo sapien
gagagggatctagaaacagcctgct

SEQ ID NO: 345820 - DNA, 25 bp, Homo sapien
tctcaaggagagtatgacgacattt

SEQ ID NO: 345821 - DNA, 25 bp, Homo sapien
cttcgaagcctcaaagcaactgatc

SEQ ID NO: 345822 - DNA, 25 bp, Homo sapien
tttaggacgaaatacaacctcaggc

SEQ ID NO: 345823 - DNA, 25 bp, Homo sapien
taatcactgaaactggaggcatcca

SEQ ID NO: 345824 - DNA, 25 bp, Homo sapien
ccatgtccagaggtagttgcccagt

SEQ ID NO: 345825 - DNA, 25 bp, Homo sapien
tctacgaagcacaccaactaggctg

SEQ ID NO: 345826 - DNA, 25 bp, Homo sapien
cgccaactccatagctagcggcagg

SEQ ID NO: 345827 - DNA, 25 bp, Homo sapien
cacagcgccaactccatagctagcg

SEQ ID NO: 345828 - DNA, 25 bp, Homo sapien
gccaactccatagctagcggcaggg

SEQ ID NO: 345829 - DNA, 25 bp, Homo sapien
agcgccaactccatagctagcggca

SEQ ID NO: 345830 - DNA, 25 bp, Homo sapien
taggggtcggctgtgtacaccctgc

SEQ ID NO: 345831 - DNA, 25 bp, Homo sapien
ggtcggctgtgtacaccctgccata

SEQ ID NO: 345832 - DNA, 25 bp, Homo sapien
gtcggctgtgtacaccctgccataa

SEQ ID NO: 345833 - DNA, 25 bp, Homo sapien
ggggtcggctgtgtacaccctgcca

SEQ ID NO: 345834 - DNA, 25 bp, Homo sapien
cggttgcagtagcaggctgtgcata

SEQ ID NO: 345835 - DNA, 25 bp, Homo sapien
ccgtcactgtaagcggctgcagcgg

SEQ ID NO: 345836 - DNA, 25 bp, Homo sapien
ggctgtgcatatctgtaggctgcat

SEQ ID NO: 345837 - DNA, 25 bp, Homo sapien
cggtggctgcggttgcagtagcagg

SEQ ID NO: 345838 - DNA, 25 bp, Homo sapien
gaagtcttatgccatacggcagagg

SEQ ID NO: 345839 - DNA, 25 bp, Homo sapien
tatttacagcaagttgggagcactc

SEQ ID NO: 345840 - DNA, 25 bp, Homo sapien
gcaaagctgtaaatcctggccacaa

SEQ ID NO: 345841 - DNA, 25 bp, Homo sapien
cactatcagggtgaatcatgcactc

SEQ ID NO: 345842 - DNA, 25 bp, Homo sapien
gccacaacgacctggtattacggaa

SEQ ID NO: 345843 - DNA, 25 bp, Homo sapien
taggctctaccacaagctcggtgaa

SEQ ID NO: 345844 - DNA, 25 bp, Homo sapien
tattacggaaacagtcagtcaccac

SEQ ID NO: 345845 - DNA, 25 bp, Homo sapien
tcaattactagagcgtgcagccaca

SEQ ID NO: 345846 - DNA, 25 bp, Homo sapien
ctgtttgatctgaagcagtttgcag

SEQ ID NO: 345847 - DNA, 25 bp, Homo sapien
tttgatctgaagcagtttgcagatt

SEQ ID NO: 345848 - DNA, 25 bp, Homo sapien
gatctgaagcagtttgcagattcta

SEQ ID NO: 345849 - DNA, 25 bp, Homo sapien
tgtttgatctgaagcagtttgcaga

SEQ ID NO: 345850 - DNA, 25 bp, Homo sapien
cactacagggcccaatgtgggattc

SEQ ID NO: 345851 - DNA, 25 bp, Homo sapien
caaacttatgtagcagcacagtcca

SEQ ID NO: 345852 - DNA, 25 bp, Homo sapien
ggccaagggaaatgcatgtctcaat

SEQ ID NO: 345853 - DNA, 25 bp, Homo sapien
taaactggattgtgaaaagccatcg

SEQ ID NO: 345854 - DNA, 25 bp, Homo sapien
taatgattggttcctgtaagactat

SEQ ID NO: 345855 - DNA, 25 bp, Homo sapien
ctgaggtattttagcgctaatgatt

SEQ ID NO: 345856 - DNA, 25 bp, Homo sapien
tattttagcgctaatgattggttcc

SEQ ID NO: 345857 - DNA, 25 bp, Homo sapien
tagcgctaatgattggttcctgtaa

SEQ ID NO: 345858 - DNA, 25 bp, Homo sapien
cctggccaaagtaggcaagtctttt

SEQ ID NO: 345859 - DNA, 25 bp, Homo sapien
tgttctaatagatcagatttcaaga

SEQ ID NO: 345860 - DNA, 25 bp, Homo sapien
acacgtgagcgatgatgcctggcca

SEQ ID NO: 345861 - DNA, 25 bp, Homo sapien
cggcccaaagtaggcaagtcttaat

SEQ ID NO: 345862 - DNA, 25 bp, Homo sapien
gaggttggaccaaatcatagctgag

SEQ ID NO: 345863 - DNA, 25 bp, Homo sapien
tacaggcctatgctaagtagtacag

SEQ ID NO: 345864 - DNA, 25 bp, Homo sapien
aaaacctctgagtgcattctgaaag

SEQ ID NO: 345865 - DNA, 25 bp, Homo sapien
taaattaaggcataccttacaggcc

SEQ ID NO: 345866 - DNA, 25 bp, Homo sapien
ggtcagcaccgtaaaatccgtcctg

SEQ ID NO: 345867 - DNA, 25 bp, Homo sapien
atagaggtcagcaccgtaaaatccg

SEQ ID NO: 345868 - DNA, 25 bp, Homo sapien
gaggtcagcaccgtaaaatccgtcc

SEQ ID NO: 345869 - DNA, 25 bp, Homo sapien
cagcaccgtaaaatccgtcctggta

SEQ ID NO: 345870 - DNA, 25 bp, Homo sapien
gaaagtgcacacgaaggttacacag

SEQ ID NO: 345871 - DNA, 25 bp, Homo sapien
cacagctccaggacatgcgaggaga

SEQ ID NO: 345872 - DNA, 25 bp, Homo sapien
tgcaaaactagaatgcgcaacctgg

SEQ ID NO: 345873 - DNA, 25 bp, Homo sapien
taaaaagcactcctagaagagccta

SEQ ID NO: 345874 - DNA, 25 bp, Homo sapien
ttttaccctgcacattagacatgcg

SEQ ID NO: 345875 - DNA, 25 bp, Homo sapien
acattagacatgcgataagatttgg

SEQ ID NO: 345876 - DNA, 25 bp, Homo sapien
gtagcaaacagacaatgcatgactt

SEQ ID NO: 345877 - DNA, 25 bp, Homo sapien
ctgaggtacctttgtgcatacagac

SEQ ID NO: 345878 - DNA, 25 bp, Homo sapien
gcatacagacttatacagactttcc

SEQ ID NO: 345879 - DNA, 25 bp, Homo sapien
gctggaaattttcaccactaccttc

SEQ ID NO: 345880 - DNA, 25 bp, Homo sapien
tcatagtctccagttgcagttaaag

SEQ ID NO: 345881 - DNA, 25 bp, Homo sapien
tagaaagtaatctgcctctcagctg

SEQ ID NO: 345882 - DNA, 25 bp, Homo sapien
caacttgttcaaaatgagaaggctg

SEQ ID NO: 345883 - DNA, 25 bp, Homo sapien
tggaatgccccaaatatgctatgcc

SEQ ID NO: 345884 - DNA, 25 bp, Homo sapien
catcttccatgtaaacaggtggttt

SEQ ID NO: 345885 - DNA, 25 bp, Homo sapien
aatcagtgttcaatgtaatgcacag

SEQ ID NO: 345886 - DNA, 25 bp, Homo sapien
aaatatatacctgacacagacttgg

SEQ ID NO: 345887 - DNA, 25 bp, Homo sapien
aatactggacttattccttgccatc

SEQ ID NO: 345888 - DNA, 25 bp, Homo sapien
aatcaaacggtgaaggatgctcagc

SEQ ID NO: 345889 - DNA, 25 bp, Homo sapien
catattcgtgcgcttctgagtgaac

SEQ ID NO: 345890 - DNA, 25 bp, Homo sapien
tgaggaagtccttggtacaactgac

SEQ ID NO: 345891 - DNA, 25 bp, Homo sapien
tccattgtgggtaactagctctgct

SEQ ID NO: 345892 - DNA, 25 bp, Homo sapien
aaacacaagacggttctggctactg

SEQ ID NO: 345893 - DNA, 25 bp, Homo sapien
ctagtaaacacaagacggttctggc

SEQ ID NO: 345894 - DNA, 25 bp, Homo sapien
agacggttctggctactgtcttaag

SEQ ID NO: 345895 - DNA, 25 bp, Homo sapien
cattaccatgagggcttaaggtggc

SEQ ID NO: 345896 - DNA, 25 bp, Homo sapien
tctgaaagcggctgccgtggtggct

SEQ ID NO: 345897 - DNA, 25 bp, Homo sapien
gcggctgccgtggtggctgcagtag

SEQ ID NO: 345898 - DNA, 25 bp, Homo sapien
tcggactgcaccatatactgtccgc

SEQ ID NO: 345899 - DNA, 25 bp, Homo sapien
ggaggtaccgctcggactgcaccat

SEQ ID NO: 345900 - DNA, 25 bp, Homo sapien
aatatgacagaaatttcaacttgca

SEQ ID NO: 345901 - DNA, 25 bp, Homo sapien
atatgacagaaatttcaacttgcat

SEQ ID NO: 345902 - DNA, 25 bp, Homo sapien
atgacagaaatttcaacttgcattc

SEQ ID NO: 345903 - DNA, 25 bp, Homo sapien
tatgacagaaatttcaacttgcatt

SEQ ID NO: 345904 - DNA, 25 bp, Homo sapien
gaatgtaagtgttgataccccctct

SEQ ID NO: 345905 - DNA, 25 bp, Homo sapien
tgcatcattgcctagggacacatct

SEQ ID NO: 345906 - DNA, 25 bp, Homo sapien
ctgctgcatcattgcctagggacac

SEQ ID NO: 345907 - DNA, 25 bp, Homo sapien
tcattgcctagggacacatctgctt

SEQ ID NO: 345908 - DNA, 25 bp, Homo sapien
tccggaccatatacagctccaacta

SEQ ID NO: 345909 - DNA, 25 bp, Homo sapien
ctgcatataactccggaccatatac

SEQ ID NO: 345910 - DNA, 25 bp, Homo sapien
tataactccggaccatatacagctc

SEQ ID NO: 345911 - DNA, 25 bp, Homo sapien
aactccggaccatatacagctccaa

SEQ ID NO: 345912 - DNA, 25 bp, Homo sapien
aaggccagaattggcctcctctttt

SEQ ID NO: 345913 - DNA, 25 bp, Homo sapien
aaaggccagaattggcctcctcttt

SEQ ID NO: 345914 - DNA, 25 bp, Homo sapien
aaaaggccagaattggcctcctctt

SEQ ID NO: 345915 - DNA, 25 bp, Homo sapien
actgcgtccagccacaattggcctt

SEQ ID NO: 345916 - DNA, 25 bp, Homo sapien
aaaagaattattgaaattaccagat

SEQ ID NO: 345917 - DNA, 25 bp, Homo sapien
ccagccacaattggccttttcaaaa

SEQ ID NO: 345918 - DNA, 25 bp, Homo sapien
tattgaaattaccagatttaaatga

SEQ ID NO: 345919 - DNA, 25 bp, Homo sapien
tctcattcagagaccatgagtctag

SEQ ID NO: 345920 - DNA, 25 bp, Homo sapien
tattagtaaaagcttatgcagaacc

SEQ ID NO: 345921 - DNA, 25 bp, Homo sapien
cactgggctacagattaaatttata

SEQ ID NO: 345922 - DNA, 25 bp, Homo sapien
aattgctcagactaaagtacagctg

SEQ ID NO: 345923 - DNA, 25 bp, Homo sapien
tcagtgggcatccaggggtattacg

SEQ ID NO: 345924 - DNA, 25 bp, Homo sapien
agtgggcatccaggggtattacgga

SEQ ID NO: 345925 - DNA, 25 bp, Homo sapien
gcatccaggggtattacggacaagt

SEQ ID NO: 345926 - DNA, 25 bp, Homo sapien
tgggcatccaggggtattacggaca

SEQ ID NO: 345927 - DNA, 25 bp, Homo sapien
taacatattagaaagagctacagca

SEQ ID NO: 345928 - DNA, 25 bp, Homo sapien
ctaacatattagaaagagctacagc

SEQ ID NO: 345929 - DNA, 25 bp, Homo sapien
aacatattagaaagagctacagcag

SEQ ID NO: 345930 - DNA, 25 bp, Homo sapien
tgcatatggtgtgaccatcttctta

SEQ ID NO: 345931 - DNA, 25 bp, Homo sapien
ttgcatatggtgtgaccatcttctt

SEQ ID NO: 345932 - DNA, 25 bp, Homo sapien
gcatatggtgtgaccatcttcttat

SEQ ID NO: 345933 - DNA, 25 bp, Homo sapien
ttagggaacataaagttgcacatcc

SEQ ID NO: 345934 - DNA, 25 bp, Homo sapien
gaagtggaccacattagggaacata

SEQ ID NO: 345935 - DNA, 25 bp, Homo sapien
cataaagttgcacatccaataacag

SEQ ID NO: 345936 - DNA, 25 bp, Homo sapien
tggaccacattagggaacataaagt

SEQ ID NO: 345937 - DNA, 25 bp, Homo sapien
aaagagtgagtcaagtgaagggccc

SEQ ID NO: 345938 - DNA, 25 bp, Homo sapien
tttgttcacttaccgccaacgggca

SEQ ID NO: 345939 - DNA, 25 bp, Homo sapien
tgaagggccctaaatgctaaaccat

SEQ ID NO: 345940 - DNA, 25 bp, Homo sapien
aaatccaggcggcattactcaacag

SEQ ID NO: 345941 - DNA, 25 bp, Homo sapien
gtagacttggtcataatcacagtac

SEQ ID NO: 345942 - DNA, 25 bp, Homo sapien
taatcacagtacattcgccagccag

SEQ ID NO: 345943 - DNA, 25 bp, Homo sapien
ggcggtagacttggtcataatcaca

SEQ ID NO: 345944 - DNA, 25 bp, Homo sapien
caggcggtagacttggtcataatca

SEQ ID NO: 345945 - DNA, 25 bp, Homo sapien
ccctctgtttaagaattttatccat

SEQ ID NO: 345946 - DNA, 25 bp, Homo sapien
tctgcatcagcactattctcgaaag

SEQ ID NO: 345947 - DNA, 25 bp, Homo sapien
gtctgcatcagcactattctcgaaa

SEQ ID NO: 345948 - DNA, 25 bp, Homo sapien
tgcatcagcactattctcgaaagtt

SEQ ID NO: 345949 - DNA, 25 bp, Homo sapien
tgtctgcatcagcactattctcgaa

SEQ ID NO: 345950 - DNA, 25 bp, Homo sapien
catgagcatggcagtggaacaccgt

SEQ ID NO: 345951 - DNA, 25 bp, Homo sapien
ggaggcatccatgggtttgattcca

SEQ ID NO: 345952 - DNA, 25 bp, Homo sapien
tccaagggcacccattccagcaaat

SEQ ID NO: 345953 - DNA, 25 bp, Homo sapien
gtatatcctaaaaccctgggtgatg

SEQ ID NO: 345954 - DNA, 25 bp, Homo sapien
ctaaaccactgtcattttcccacct

SEQ ID NO: 345955 - DNA, 25 bp, Homo sapien
ccactgtcattttcccaccttgtag

SEQ ID NO: 345956 - DNA, 25 bp, Homo sapien
aaaccactgtcattttcccaccttg

SEQ ID NO: 345957 - DNA, 25 bp, Homo sapien
aaccactgtcattttcccaccttgt

SEQ ID NO: 345958 - DNA, 25 bp, Homo sapien
gtgttgatacattctacaaaggaag

SEQ ID NO: 345959 - DNA, 25 bp, Homo sapien
caaataattgttatagtcaggatta

SEQ ID NO: 345960 - DNA, 25 bp, Homo sapien
taataataagtagcattagaacagc

SEQ ID NO: 345961 - DNA, 25 bp, Homo sapien
tagtcaggattaaacacttttagtg

SEQ ID NO: 345962 - DNA, 25 bp, Homo sapien
tacatcctgtgttctttacgtccca

SEQ ID NO: 345963 - DNA, 25 bp, Homo sapien
tagagataatctaaaccaaggtgga

SEQ ID NO: 345964 - DNA, 25 bp, Homo sapien
gctgaggccgaatttaaggctcata

SEQ ID NO: 345965 - DNA, 25 bp, Homo sapien
cacacttgacactgaaatggagctt

SEQ ID NO: 345966 - DNA, 25 bp, Homo sapien
tatttctacatctaggattttgcca

SEQ ID NO: 345967 - DNA, 25 bp, Homo sapien
cttagagccacgttcattaaagatt

SEQ ID NO: 345968 - DNA, 25 bp, Homo sapien
ccacgttcattaaagattatttcta

SEQ ID NO: 345969 - DNA, 25 bp, Homo sapien
attatttctacatctaggattttgc

SEQ ID NO: 345970 - DNA, 25 bp, Homo sapien
attagagacatgcagccgtttcggg

SEQ ID NO: 345971 - DNA, 25 bp, Homo sapien
ccggaagcggaaaggaatattagag

SEQ ID NO: 345972 - DNA, 25 bp, Homo sapien
cgtttcggggtagatttactctctg

SEQ ID NO: 345973 - DNA, 25 bp, Homo sapien
aaacatctgccggaggtcagggtcc

SEQ ID NO: 345974 - DNA, 25 bp, Homo sapien
tgttctccaatcaggaaactccagc

SEQ ID NO: 345975 - DNA, 25 bp, Homo sapien
ctacagggtagctgcttttcaaaag

SEQ ID NO: 345976 - DNA, 25 bp, Homo sapien
gaatggtcattgaacagtcatttgc

SEQ ID NO: 345977 - DNA, 25 bp, Homo sapien
aacatgaggtctacagggtagctgc

SEQ ID NO: 345978 - DNA, 25 bp, Homo sapien
gaagtgaacacctgaataatgacct

SEQ ID NO: 345979 - DNA, 25 bp, Homo sapien
ccttccgggccataaagatggtctt

SEQ ID NO: 345980 - DNA, 25 bp, Homo sapien
gaataatgaccttccgggccataaa

SEQ ID NO: 345981 - DNA, 25 bp, Homo sapien
tgcagagaacatccggaatcagaag

SEQ ID NO: 345982 - DNA, 25 bp, Homo sapien
atcctccttgtggttttagaagccg

SEQ ID NO: 345983 - DNA, 25 bp, Homo sapien
tccttgtggttttagaagccgcgga

SEQ ID NO: 345984 - DNA, 25 bp, Homo sapien
ctcatcctccttgtggttttagaag

SEQ ID NO: 345985 - DNA, 25 bp, Homo sapien
cctccttgtggttttagaagccgcg

SEQ ID NO: 345986 - DNA, 25 bp, Homo sapien
tgtcgaacatgcagtcgatgatgcc

SEQ ID NO: 345987 - DNA, 25 bp, Homo sapien
ggttcttgtcgaacatgcagtcgat

SEQ ID NO: 345988 - DNA, 25 bp, Homo sapien
tgcagtcgatgatgcccttcaccat

SEQ ID NO: 345989 - DNA, 25 bp, Homo sapien
cctgcaggttcttgtcgaacatgca

SEQ ID NO: 345990 - DNA, 25 bp, Homo sapien
gtggtggcccatgggcttttgcccc

SEQ ID NO: 345991 - DNA, 25 bp, Homo sapien
tggcccatgggcttttgccccggga

SEQ ID NO: 345992 - DNA, 25 bp, Homo sapien
ggtggtggcccatgggcttttgccc

SEQ ID NO: 345993 - DNA, 25 bp, Homo sapien
tggtggcccatgggcttttgccccg

SEQ ID NO: 345994 - DNA, 25 bp, Homo sapien
gaccaccgccggcagattgctgcgt

SEQ ID NO: 345995 - DNA, 25 bp, Homo sapien
ccggcagattgctgcgttgccggcc

SEQ ID NO: 345996 - DNA, 25 bp, Homo sapien
ccaccgccggcagattgctgcgttg

SEQ ID NO: 345997 - DNA, 25 bp, Homo sapien
accgccggcagattgctgcgttgcc

SEQ ID NO: 345998 - DNA, 25 bp, Homo sapien
aagtatctaaagatacaggaactga

SEQ ID NO: 345999 - DNA, 25 bp, Homo sapien
caacaggtagttagaatatgtacac

SEQ ID NO: 346000 - DNA, 25 bp, Homo sapien
gaagagtattcactaaagcttgtct

SEQ ID NO: 346001 - DNA, 25 bp, Homo sapien
tatccataatataccaatagaggtg

SEQ ID NO: 346002 - DNA, 25 bp, Homo sapien
cggtctggccggcatagtcttgagt

SEQ ID NO: 346003 - DNA, 25 bp, Homo sapien
ccattttgtgtgctgggtgagttgc

SEQ ID NO: 346004 - DNA, 25 bp, Homo sapien
tcaggttatgctcaccggtctggcc

SEQ ID NO: 346005 - DNA, 25 bp, Homo sapien
ccgtgggcttgcgtacttccgtaga

SEQ ID NO: 346006 - DNA, 25 bp, Homo sapien
cgtcaggagttgttgtcggctcctg

SEQ ID NO: 346007 - DNA, 25 bp, Homo sapien
tcaggagttgttgtcggctcctggt

SEQ ID NO: 346008 - DNA, 25 bp, Homo sapien
gcgtcaggagttgttgtcggctcct

SEQ ID NO: 346009 - DNA, 25 bp, Homo sapien
tgcgtcaggagttgttgtcggctcc

SEQ ID NO: 346010 - DNA, 25 bp, Homo sapien
aaacacaggctttaagagttgttga

SEQ ID NO: 346011 - DNA, 25 bp, Homo sapien
acacaggctttaagagttgttgacc

SEQ ID NO: 346012 - DNA, 25 bp, Homo sapien
cacaggctttaagagttgttgacca

SEQ ID NO: 346013 - DNA, 25 bp, Homo sapien
acaggctttaagagttgttgaccag

SEQ ID NO: 346014 - DNA, 25 bp, Homo sapien
tgactttcagtgttttttctaggtc

SEQ ID NO: 346015 - DNA, 25 bp, Homo sapien
cgacaggtgactttcagtgtttttt

SEQ ID NO: 346016 - DNA, 25 bp, Homo sapien
cagtgttttttctaggtccaaccat

SEQ ID NO: 346017 - DNA, 25 bp, Homo sapien
tcagtgttttttctaggtccaacca

SEQ ID NO: 346018 - DNA, 25 bp, Homo sapien
tacagcatgcctccaggacatgtcc

SEQ ID NO: 346019 - DNA, 25 bp, Homo sapien
tggtgtagatggtttgggtcccaca

SEQ ID NO: 346020 - DNA, 25 bp, Homo sapien
gaattatggttacagcatgcctcca

SEQ ID NO: 346021 - DNA, 25 bp, Homo sapien
aatgggagagaattatggttacagc

SEQ ID NO: 346022 - DNA, 25 bp, Homo sapien
gttagaatgcctaatttttcatctc

SEQ ID NO: 346023 - DNA, 25 bp, Homo sapien
cagttagaatgcctaatttttcatc

SEQ ID NO: 346024 - DNA, 25 bp, Homo sapien
agttagaatgcctaatttttcatct

SEQ ID NO: 346025 - DNA, 25 bp, Homo sapien
tcttatctgtctttaattaaagcat

SEQ ID NO: 346026 - DNA, 25 bp, Homo sapien
agagcgaactggcagcagctcaggt

SEQ ID NO: 346027 - DNA, 25 bp, Homo sapien
ggaacagaagagcgaactggcagca

SEQ ID NO: 346028 - DNA, 25 bp, Homo sapien
ctcttatctgtctttaattaaagca

SEQ ID NO: 346029 - DNA, 25 bp, Homo sapien
tatatggttgttacactcggccaca

SEQ ID NO: 346030 - DNA, 25 bp, Homo sapien
attatatggttgttacactcggcca

SEQ ID NO: 346031 - DNA, 25 bp, Homo sapien
tattatatggttgttacactcggcc

SEQ ID NO: 346032 - DNA, 25 bp, Homo sapien
ttatatggttgttacactcggccac

SEQ ID NO: 346033 - DNA, 25 bp, Homo sapien
ttgcgcttcagcctgcgcattcgct

SEQ ID NO: 346034 - DNA, 25 bp, Homo sapien
tcttttgcgcttcagcctgcgcatt

SEQ ID NO: 346035 - DNA, 25 bp, Homo sapien
tgcgcttcagcctgcgcattcgctt

SEQ ID NO: 346036 - DNA, 25 bp, Homo sapien
tcttcttttgcgcttcagcctgcgc

SEQ ID NO: 346037 - DNA, 25 bp, Homo sapien
tataactaaacaggattccagctcc

SEQ ID NO: 346038 - DNA, 25 bp, Homo sapien
taatggagcgtacagaaggatgcta

SEQ ID NO: 346039 - DNA, 25 bp, Homo sapien
tgcctccatcctgataactagctgg

SEQ ID NO: 346040 - DNA, 25 bp, Homo sapien
tctcgccctccggtggttactggga

SEQ ID NO: 346041 - DNA, 25 bp, Homo sapien
tgagttaccattttctttttctcca

SEQ ID NO: 346042 - DNA, 25 bp, Homo sapien
ccacccctgaatgcctaaggtaatt

SEQ ID NO: 346043 - DNA, 25 bp, Homo sapien
taagggtgggtaattgatctctctt

SEQ ID NO: 346044 - DNA, 25 bp, Homo sapien
taaacctttcaaagcagccgtgctg

SEQ ID NO: 346045 - DNA, 25 bp, Homo sapien
tccctcccatatctcaggcagatgg

SEQ ID NO: 346046 - DNA, 25 bp, Homo sapien
caactgccagacatgagagtgaggt

SEQ ID NO: 346047 - DNA, 25 bp, Homo sapien
tgaggttatcctagaccactgaggc

SEQ ID NO: 346048 - DNA, 25 bp, Homo sapien
tgaggctcagcaaatgcggccaaga

SEQ ID NO: 346049 - DNA, 25 bp, Homo sapien
tctggaaccccgacactactgtgtg

SEQ ID NO: 346050 - DNA, 25 bp, Homo sapien
ttccctttatgataaaggagctgct

SEQ ID NO: 346051 - DNA, 25 bp, Homo sapien
tgtagccagctgtcgtttaccctgc

SEQ ID NO: 346052 - DNA, 25 bp, Homo sapien
ttctgactttgatttaatgcagcaa

SEQ ID NO: 346053 - DNA, 25 bp, Homo sapien
cctgctcacgatgcaagaatatttt

SEQ ID NO: 346054 - DNA, 25 bp, Homo sapien
gggcaagacttcaccccactcatag

SEQ ID NO: 346055 - DNA, 25 bp, Homo sapien
taagactatgcccagcaggctaagg

SEQ ID NO: 346056 - DNA, 25 bp, Homo sapien
ccctggttgaaatggttatcatgcc

SEQ ID NO: 346057 - DNA, 25 bp, Homo sapien
ggatttatactaatgctagggcaag

SEQ ID NO: 346058 - DNA, 25 bp, Homo sapien
caggaggaagacatgagtatatctg

SEQ ID NO: 346059 - DNA, 25 bp, Homo sapien
ggccgtatggcctgtttttataata

SEQ ID NO: 346060 - DNA, 25 bp, Homo sapien
tatatctggagagaagcattacagg

SEQ ID NO: 346061 - DNA, 25 bp, Homo sapien
catttgagcaaaaatttgaaggcca

SEQ ID NO: 346062 - DNA, 25 bp, Homo sapien
gatttgctaattaacaggaccgcag

SEQ ID NO: 346063 - DNA, 25 bp, Homo sapien
caggtagccgactcacaagaatcgc

SEQ ID NO: 346064 - DNA, 25 bp, Homo sapien
aaactgtgggtttagcaagtctgag

SEQ ID NO: 346065 - DNA, 25 bp, Homo sapien
ttagctcaagtaacagaaagatgtc

SEQ ID NO: 346066 - DNA, 25 bp, Homo sapien
caagtagctggactacaggcacgca

SEQ ID NO: 346067 - DNA, 25 bp, Homo sapien
gcaccaccttgcccagctaattttt

SEQ ID NO: 346068 - DNA, 25 bp, Homo sapien
tcattgcagcttacacctcccaggc

SEQ ID NO: 346069 - DNA, 25 bp, Homo sapien
tcaggtgatcctcccacctcagcct

SEQ ID NO: 346070 - DNA, 25 bp, Homo sapien
tgactatcaaggatccaccaccaaa

SEQ ID NO: 346071 - DNA, 25 bp, Homo sapien
ttcccacaaggctacttaacagtgt

SEQ ID NO: 346072 - DNA, 25 bp, Homo sapien
gatcagaaatccagctgggtaagct

SEQ ID NO: 346073 - DNA, 25 bp, Homo sapien
tagctgttaggcctagacatcactg

SEQ ID NO: 346074 - DNA, 25 bp, Homo sapien
tctgaagcaagactgcgcatttgaa

SEQ ID NO: 346075 - DNA, 25 bp, Homo sapien
agacccagtgcctcctatcatagga

SEQ ID NO: 346076 - DNA, 25 bp, Homo sapien
tccttccccgttgtaagatgaaaca

SEQ ID NO: 346077 - DNA, 25 bp, Homo sapien
tagagcaacttgttgagcaacatgc

SEQ ID NO: 346078 - DNA, 25 bp, Homo sapien
gaggccatttgtgcaacagcagaac

SEQ ID NO: 346079 - DNA, 25 bp, Homo sapien
catggcttaacaaggtcagtacccc

SEQ ID NO: 346080 - DNA, 25 bp, Homo sapien
ggagttcagcccttgcgcctaagtc

SEQ ID NO: 346081 - DNA, 25 bp, Homo sapien
aacaatgtcacaatcaccgctaggt

SEQ ID NO: 346082 - DNA, 25 bp, Homo sapien
ttttaatggtgggatcttattcact

SEQ ID NO: 346083 - DNA, 25 bp, Homo sapien
taatggtgggatcttattcactgtg

SEQ ID NO: 346084 - DNA, 25 bp, Homo sapien
cacgggctgacccaaaagacaccaa

SEQ ID NO: 346085 - DNA, 25 bp, Homo sapien
ttcactgtgtacaggattctctaaa

SEQ ID NO: 346086 - DNA, 25 bp, Homo sapien
aatgttgacggtcttggccagcttc

SEQ ID NO: 346087 - DNA, 25 bp, Homo sapien
tgttgacggtcttggccagcttcac

SEQ ID NO: 346088 - DNA, 25 bp, Homo sapien
ctaaatgttgacggtcttggccagc

SEQ ID NO: 346089 - DNA, 25 bp, Homo sapien
taaatgttgacggtcttggccagct

SEQ ID NO: 346090 - DNA, 25 bp, Homo sapien
tccagtggtgttgcctgaataccaa

SEQ ID NO: 346091 - DNA, 25 bp, Homo sapien
ggtgttgcctgaataccaaggtctt

SEQ ID NO: 346092 - DNA, 25 bp, Homo sapien
cagtggtgttgcctgaataccaagg

SEQ ID NO: 346093 - DNA, 25 bp, Homo sapien
gcctgaataccaaggtcttctaagc

SEQ ID NO: 346094 - DNA, 25 bp, Homo sapien
gatgtgaatacgctccactttatcc

SEQ ID NO: 346095 - DNA, 25 bp, Homo sapien
gataggcaaaaggtggcaaggggta

SEQ ID NO: 346096 - DNA, 25 bp, Homo sapien
ctgataggcaaaaggtggcaagggg

SEQ ID NO: 346097 - DNA, 25 bp, Homo sapien
tgataggcaaaaggtggcaaggggt

SEQ ID NO: 346098 - DNA, 25 bp, Homo sapien
ccctttgctgtgagccacagcaaag

SEQ ID NO: 346099 - DNA, 25 bp, Homo sapien
tttgctgtgagccacagcaaagatg

SEQ ID NO: 346100 - DNA, 25 bp, Homo sapien
tgctgtgagccacagcaaagatgta

SEQ ID NO: 346101 - DNA, 25 bp, Homo sapien
gctgtgagccacagcaaagatgtac

SEQ ID NO: 346102 - DNA, 25 bp, Homo sapien
ggagatatcgatttggcccaacgaa

SEQ ID NO: 346103 - DNA, 25 bp, Homo sapien
tcgatttggcccaacgaaagcaaag

SEQ ID NO: 346104 - DNA, 25 bp, Homo sapien
atcgatttggcccaacgaaagcaaa

SEQ ID NO: 346105 - DNA, 25 bp, Homo sapien
caaagaggagatatcgatttggccc

SEQ ID NO: 346106 - DNA, 25 bp, Homo sapien
ggggtatagcaccaaaccaacacat

SEQ ID NO: 346107 - DNA, 25 bp, Homo sapien
gcttctggaaatgtgtctctcactg

SEQ ID NO: 346108 - DNA, 25 bp, Homo sapien
gggtatagcaccaaaccaacacata

SEQ ID NO: 346109 - DNA, 25 bp, Homo sapien
aggggtatagcaccaaaccaacaca

SEQ ID NO: 346110 - DNA, 25 bp, Homo sapien
ggggaatcttcacaaaaacatcctc

SEQ ID NO: 346111 - DNA, 25 bp, Homo sapien
gggaatcttcacaaaaacatcctca

SEQ ID NO: 346112 - DNA, 25 bp, Homo sapien
ggaatcttcacaaaaacatcctcaa

SEQ ID NO: 346113 - DNA, 25 bp, Homo sapien
ccatgggacgaaggtgcatgatgtc

SEQ ID NO: 346114 - DNA, 25 bp, Homo sapien
cccatgggacgaaggtgcatgatgt

SEQ ID NO: 346115 - DNA, 25 bp, Homo sapien
gaatctttatctctcgcgtcccatt

SEQ ID NO: 346116 - DNA, 25 bp, Homo sapien
catgggacgaaggtgcatgatgtca

SEQ ID NO: 346117 - DNA, 25 bp, Homo sapien
tgttgctccaaacccagtggccaca

SEQ ID NO: 346118 - DNA, 25 bp, Homo sapien
gtggttgacaacacatcggcccagg

SEQ ID NO: 346119 - DNA, 25 bp, Homo sapien
ccccacgcgtccaaggtggttgaca

SEQ ID NO: 346120 - DNA, 25 bp, Homo sapien
acatcggcccaggaatcctgttgct

SEQ ID NO: 346121 - DNA, 25 bp, Homo sapien
gctggcaatggagtgggctgtgaca

SEQ ID NO: 346122 - DNA, 25 bp, Homo sapien
agtgggctgtgacacacggatgtgg

SEQ ID NO: 346123 - DNA, 25 bp, Homo sapien
tggagtgggctgtgacacacggatg

SEQ ID NO: 346124 - DNA, 25 bp, Homo sapien
gatgaagctggcaatggagtgggct

SEQ ID NO: 346125 - DNA, 25 bp, Homo sapien
gcagggcccagacaacccgggattg

SEQ ID NO: 346126 - DNA, 25 bp, Homo sapien
atggatagagatataccgatatata

SEQ ID NO: 346127 - DNA, 25 bp, Homo sapien
agatataccgatatatatatggttt

SEQ ID NO: 346128 - DNA, 25 bp, Homo sapien
ggcctttttagccagcctagtggaa

SEQ ID NO: 346129 - DNA, 25 bp, Homo sapien
tcagagtgaaaatgctggcaggact

SEQ ID NO: 346130 - DNA, 25 bp, Homo sapien
caggtgatggaggaatccctaagtc

SEQ ID NO: 346131 - DNA, 25 bp, Homo sapien
gtaatgtttggtcctcctacagggc

SEQ ID NO: 346132 - DNA, 25 bp, Homo sapien
gaaagcaaggcccattctggaattc

SEQ ID NO: 346133 - DNA, 25 bp, Homo sapien
caaggcccattctggaattctatac

SEQ ID NO: 346134 - DNA, 25 bp, Homo sapien
gggctgggtttagatctatctcagc

SEQ ID NO: 346135 - DNA, 25 bp, Homo sapien
ccgtcagggtcatgttgaatagatc

SEQ ID NO: 346136 - DNA, 25 bp, Homo sapien
taatcacgtagtcatgaagatactc

SEQ ID NO: 346137 - DNA, 25 bp, Homo sapien
tgaagatactcactggacacagtgc

SEQ ID NO: 346138 - DNA, 25 bp, Homo sapien
tcaaggaattataatcacgtagtca

SEQ ID NO: 346139 - DNA, 25 bp, Homo sapien
gaattataatcacgtagtcatgaag

SEQ ID NO: 346140 - DNA, 25 bp, Homo sapien
catctgccaatggagattaaaaccc

SEQ ID NO: 346141 - DNA, 25 bp, Homo sapien
tatgaaagcaatacccattacaggt

SEQ ID NO: 346142 - DNA, 25 bp, Homo sapien
ttctaggaggaccattccatttgcc

SEQ ID NO: 346143 - DNA, 25 bp, Homo sapien
ccacccttggcaaatctctcaggaa

SEQ ID NO: 346144 - DNA, 25 bp, Homo sapien
tatcgctctggcaaggcaaaggcaa

SEQ ID NO: 346145 - DNA, 25 bp, Homo sapien
tttcaccataatgcaataggcagtg

SEQ ID NO: 346146 - DNA, 25 bp, Homo sapien
gagtgtcttaagagccttctatggc

SEQ ID NO: 346147 - DNA, 25 bp, Homo sapien
gaaaatccaaatggagtagtctctg

SEQ ID NO: 346148 - DNA, 25 bp, Homo sapien
tctaaaatgtaatagtaaagctgat

SEQ ID NO: 346149 - DNA, 25 bp, Homo sapien
catattacttagcatggcagtgagc

SEQ ID NO: 346150 - DNA, 25 bp, Homo sapien
catcttcaacagtaggaagccaaag

SEQ ID NO: 346151 - DNA, 25 bp, Homo sapien
ccaaaatttggacaaatcatgaaac

SEQ ID NO: 346152 - DNA, 25 bp, Homo sapien
cccgagggaagaaaagtagtcatca

SEQ ID NO: 346153 - DNA, 25 bp, Homo sapien
ccgagggaagaaaagtagtcatcat

SEQ ID NO: 346154 - DNA, 25 bp, Homo sapien
tccaccaactatccccgagggaaga

SEQ ID NO: 346155 - DNA, 25 bp, Homo sapien
ggaaacccctaagagccatcccata

SEQ ID NO: 346156 - DNA, 25 bp, Homo sapien
ttgttgcaccaaaagcgagcgaggg

SEQ ID NO: 346157 - DNA, 25 bp, Homo sapien
ccatataaataatcttcgcaaaaac

SEQ ID NO: 346158 - DNA, 25 bp, Homo sapien
aagtgccccaacttgaatgctaaag

SEQ ID NO: 346159 - DNA, 25 bp, Homo sapien
ttggtcctgcatggccttagataaa

SEQ ID NO: 346160 - DNA, 25 bp, Homo sapien
aaaccacattagaaagtatagtgaa

SEQ ID NO: 346161 - DNA, 25 bp, Homo sapien
aagtatagtgaaatgctcagagtgc

SEQ ID NO: 346162 - DNA, 25 bp, Homo sapien
tatgtaaaactggaacaatgtttgt

SEQ ID NO: 346163 - DNA, 25 bp, Homo sapien
gctaactggcaggtaataaagagac

SEQ ID NO: 346164 - DNA, 25 bp, Homo sapien
cattcagaattataaggcatcaaga

SEQ ID NO: 346165 - DNA, 25 bp, Homo sapien
taaagagacaagtccagcattcaga

SEQ ID NO: 346166 - DNA, 25 bp, Homo sapien
aaaaccaatcatgactgtgcttgag

SEQ ID NO: 346167 - DNA, 25 bp, Homo sapien
ggctgtcccgcgctgggaatccatg

SEQ ID NO: 346168 - DNA, 25 bp, Homo sapien
gataacctggagtcagaggctcgtt

SEQ ID NO: 346169 - DNA, 25 bp, Homo sapien
gcgctgggaatccatgataacctgg

SEQ ID NO: 346170 - DNA, 25 bp, Homo sapien
gaatccatgataacctggagtcaga

SEQ ID NO: 346171 - DNA, 25 bp, Homo sapien
gctttacccatagaggacacaggag

SEQ ID NO: 346172 - DNA, 25 bp, Homo sapien
gaaagcatttcgcttccaggtccca

SEQ ID NO: 346173 - DNA, 25 bp, Homo sapien
cctagcaggttcttacaggataagc

SEQ ID NO: 346174 - DNA, 25 bp, Homo sapien
ttgccggctgtgtgaaaatgaacct

SEQ ID NO: 346175 - DNA, 25 bp, Homo sapien
tcatatggcagcaaagtgcctctgg

SEQ ID NO: 346176 - DNA, 25 bp, Homo sapien
gagctttcccaagtatcctagaggg

SEQ ID NO: 346177 - DNA, 25 bp, Homo sapien
tgcctctggtgagacaactccttgt

SEQ ID NO: 346178 - DNA, 25 bp, Homo sapien
cagtctctcggccaggaagtgtttg

SEQ ID NO: 346179 - DNA, 25 bp, Homo sapien
tatccccagaactgatcagagtggc

SEQ ID NO: 346180 - DNA, 25 bp, Homo sapien
cactgttacaacttactgctggagg

SEQ ID NO: 346181 - DNA, 25 bp, Homo sapien
gaagatttcacaagggttctatccc

SEQ ID NO: 346182 - DNA, 25 bp, Homo sapien
tgtcttacattaaagtccctgctgg

SEQ ID NO: 346183 - DNA, 25 bp, Homo sapien
ttgaactggactccccacaccttac

SEQ ID NO: 346184 - DNA, 25 bp, Homo sapien
ctctgcttgaactggactccccaca

SEQ ID NO: 346185 - DNA, 25 bp, Homo sapien
ctctctgcttgaactggactcccca

SEQ ID NO: 346186 - DNA, 25 bp, Homo sapien
tgcttgaactggactccccacacct

SEQ ID NO: 346187 - DNA, 25 bp, Homo sapien
ccttcctggaattctaaaccctgct

SEQ ID NO: 346188 - DNA, 25 bp, Homo sapien
tccatggaatctgatgacatcactc

SEQ ID NO: 346189 - DNA, 25 bp, Homo sapien
ggttcctgggctggtccatggaatc

SEQ ID NO: 346190 - DNA, 25 bp, Homo sapien
tccttcctggaattctaaaccctgc

SEQ ID NO: 346191 - DNA, 25 bp, Homo sapien
taaatatggaccagggcttcattct

SEQ ID NO: 346192 - DNA, 25 bp, Homo sapien
catacaccagccaatttgtgactag

SEQ ID NO: 346193 - DNA, 25 bp, Homo sapien
tgcttaatccaaactctaattttga

SEQ ID NO: 346194 - DNA, 25 bp, Homo sapien
gaaattgttactcctcactctccct

SEQ ID NO: 346195 - DNA, 25 bp, Homo sapien
tatatccatagaggggggacagacc

SEQ ID NO: 346196 - DNA, 25 bp, Homo sapien
taacaattagtttatatccatagag

SEQ ID NO: 346197 - DNA, 25 bp, Homo sapien
tagtttatatccatagaggggggac

SEQ ID NO: 346198 - DNA, 25 bp, Homo sapien
tagaggggggacagaccaacataaa

SEQ ID NO: 346199 - DNA, 25 bp, Homo sapien
ggccctgccaaagaattgccgcctt

SEQ ID NO: 346200 - DNA, 25 bp, Homo sapien
aacaaaactggactggtcaggattc

SEQ ID NO: 346201 - DNA, 25 bp, Homo sapien
caggattcttcgtggcaaacagcag

SEQ ID NO: 346202 - DNA, 25 bp, Homo sapien
cctgccaaagaattgccgccttttc

SEQ ID NO: 346203 - DNA, 25 bp, Homo sapien
caacataccaagaatgcattaactt

SEQ ID NO: 346204 - DNA, 25 bp, Homo sapien
tacagcatttaaatctctcaaagcc

SEQ ID NO: 346205 - DNA, 25 bp, Homo sapien
tactcgctgatgcaaatatttcagt

SEQ ID NO: 346206 - DNA, 25 bp, Homo sapien
aatattatactattctgagttgcag

SEQ ID NO: 346207 - DNA, 25 bp, Homo sapien
ggagctagattcagacgattatgga

SEQ ID NO: 346208 - DNA, 25 bp, Homo sapien
cttgaggagctagattcagacgatt

SEQ ID NO: 346209 - DNA, 25 bp, Homo sapien
ttcagacgattatggaaaaaagccc

SEQ ID NO: 346210 - DNA, 25 bp, Homo sapien
cgattatggaaaaaagcccagctgt

SEQ ID NO: 346211 - DNA, 25 bp, Homo sapien
cagatcgatggctcttatcagggac

SEQ ID NO: 346212 - DNA, 25 bp, Homo sapien
gggacatggagtaacctgagcccct

SEQ ID NO: 346213 - DNA, 25 bp, Homo sapien
tctgctatcaggttgcacaaatgcc

SEQ ID NO: 346214 - DNA, 25 bp, Homo sapien
tctcgactgctaggacaggcgcttt

SEQ ID NO: 346215 - DNA, 25 bp, Homo sapien
cccaagaatttttgtggaccactga

SEQ ID NO: 346216 - DNA, 25 bp, Homo sapien
ctcccaagaatttttgtggaccact

SEQ ID NO: 346217 - DNA, 25 bp, Homo sapien
ccaagaatttttgtggaccactgaa

SEQ ID NO: 346218 - DNA, 25 bp, Homo sapien
tcccaagaatttttgtggaccactg

SEQ ID NO: 346219 - DNA, 25 bp, Homo sapien
ccctctctccaagccggggagcccg

SEQ ID NO: 346220 - DNA, 25 bp, Homo sapien
cctctctccaagccggggagcccgg

SEQ ID NO: 346221 - DNA, 25 bp, Homo sapien
gcaataactgggcgccccgtcccgc

SEQ ID NO: 346222 - DNA, 25 bp, Homo sapien
cgcaataactgggcgccccgtcccg

SEQ ID NO: 346223 - DNA, 25 bp, Homo sapien
tcagtgcgcggccgcttgctcaggc

SEQ ID NO: 346224 - DNA, 25 bp, Homo sapien
cctcctcagtgcgcggccgcttgct

SEQ ID NO: 346225 - DNA, 25 bp, Homo sapien
tcctcagtgcgcggccgcttgctca

SEQ ID NO: 346226 - DNA, 25 bp, Homo sapien
gcttgctcaggccgggatcggctcc

SEQ ID NO: 346227 - DNA, 25 bp, Homo sapien
gggagccgggcgacccgcgacaggc

SEQ ID NO: 346228 - DNA, 25 bp, Homo sapien
cgggagccgggcgacccgcgacagg

SEQ ID NO: 346229 - DNA, 25 bp, Homo sapien
gatgcggctgggcgccctccgccat

SEQ ID NO: 346230 - DNA, 25 bp, Homo sapien
cgagctgaggcggctgatgcggctg

SEQ ID NO: 346231 - DNA, 25 bp, Homo sapien
ccactggcgggtcgtgatgagcact

SEQ ID NO: 346232 - DNA, 25 bp, Homo sapien
ccgactgtcgcgacaggcgggcgcg

SEQ ID NO: 346233 - DNA, 25 bp, Homo sapien
tccctcacagcacgccggccgaggg

SEQ ID NO: 346234 - DNA, 25 bp, Homo sapien
tgcgtgcgcgcgagcggactccgcg

SEQ ID NO: 346235 - DNA, 25 bp, Homo sapien
gaaggatgatagcagggtattgaat

SEQ ID NO: 346236 - DNA, 25 bp, Homo sapien
cagggtattgaattgttgtttttca

SEQ ID NO: 346237 - DNA, 25 bp, Homo sapien
ttctgtagtttgatgaaggatgata

SEQ ID NO: 346238 - DNA, 25 bp, Homo sapien
tataggccagaaccttgccagccct

SEQ ID NO: 346239 - DNA, 25 bp, Homo sapien
ggtggtccagggcactcaagtatct

SEQ ID NO: 346240 - DNA, 25 bp, Homo sapien
tcggagacacgcaagtcatacctgg

SEQ ID NO: 346241 - DNA, 25 bp, Homo sapien
tcatacctggttgttgtagaaactt

SEQ ID NO: 346242 - DNA, 25 bp, Homo sapien
agtatctcaagaggccactctgtag

SEQ ID NO: 346243 - DNA, 25 bp, Homo sapien
gagttttatctgctgtgactgaaca

SEQ ID NO: 346244 - DNA, 25 bp, Homo sapien
caattgagataacgcggcaccttcg

SEQ ID NO: 346245 - DNA, 25 bp, Homo sapien
gttttatctgctgtgactgaacaat

SEQ ID NO: 346246 - DNA, 25 bp, Homo sapien
aaggagttttatctgctgtgactga

SEQ ID NO: 346247 - DNA, 25 bp, Homo sapien
taaatctggaggcttggtgacaaag

SEQ ID NO: 346248 - DNA, 25 bp, Homo sapien
gacatgccgtctttgagtgtagagg

SEQ ID NO: 346249 - DNA, 25 bp, Homo sapien
gggagttcattccacccagaggcct

SEQ ID NO: 346250 - DNA, 25 bp, Homo sapien
tcaaggacggttcctgaagagcaat

SEQ ID NO: 346251 - DNA, 25 bp, Homo sapien
gctgtagccttgaccgtacctcttt

SEQ ID NO: 346252 - DNA, 25 bp, Homo sapien
gtagtggctgtagccttgaccgtac

SEQ ID NO: 346253 - DNA, 25 bp, Homo sapien
agaagctgccaatggaccaaaagaa

SEQ ID NO: 346254 - DNA, 25 bp, Homo sapien
aaaattgatcgtgtgctgaggccct

SEQ ID NO: 346255 - DNA, 25 bp, Homo sapien
tctgaagacgctccttgaagactcc

SEQ ID NO: 346256 - DNA, 25 bp, Homo sapien
catgggtgaccctatcaagaatttc

SEQ ID NO: 346257 - DNA, 25 bp, Homo sapien
tgaggcgcccagcagttctatattc

SEQ ID NO: 346258 - DNA, 25 bp, Homo sapien
acacaatgttctggcgttaggcaag

SEQ ID NO: 346259 - DNA, 25 bp, Homo sapien
aatgtcatcgttccctcagtgtatc

SEQ ID NO: 346260 - DNA, 25 bp, Homo sapien
ctcccaaagcgagaaaggagccagg

SEQ ID NO: 346261 - DNA, 25 bp, Homo sapien
gaatgtcatcgttccctcagtgtat

SEQ ID NO: 346262 - DNA, 25 bp, Homo sapien
aacttgctcccaaagcgagaaagga

SEQ ID NO: 346263 - DNA, 25 bp, Homo sapien
ttcttggtaggttctcgcatactct

SEQ ID NO: 346264 - DNA, 25 bp, Homo sapien
caggatggctctagagatccggcct

SEQ ID NO: 346265 - DNA, 25 bp, Homo sapien
tgtcgtggcctgtgtatggctcacc

SEQ ID NO: 346266 - DNA, 25 bp, Homo sapien
ccactggctgactgagatacacttc

SEQ ID NO: 346267 - DNA, 25 bp, Homo sapien
tgcctgatggcacggatttcactcc

SEQ ID NO: 346268 - DNA, 25 bp, Homo sapien
tgggtatggcatggattcagacgct

SEQ ID NO: 346269 - DNA, 25 bp, Homo sapien
cgctgatagatctgagtgagctcca

SEQ ID NO: 346270 - DNA, 25 bp, Homo sapien
tgaagtggtcgcactcaggatccgg

SEQ ID NO: 346271 - DNA, 25 bp, Homo sapien
taaatggtgccaaaacaagaccagc

SEQ ID NO: 346272 - DNA, 25 bp, Homo sapien
ccagactcgtccctgctgtaaatgg

SEQ ID NO: 346273 - DNA, 25 bp, Homo sapien
tccctgctgtaaatggtgccaaaac

SEQ ID NO: 346274 - DNA, 25 bp, Homo sapien
tgcagtaagggccagactcgtccct

SEQ ID NO: 346275 - DNA, 25 bp, Homo sapien
gcagcgccagtggagctggacacca

SEQ ID NO: 346276 - DNA, 25 bp, Homo sapien
ggagctggacaccacattggagatg

SEQ ID NO: 346277 - DNA, 25 bp, Homo sapien
gaggcagcgccagtggagctggaca

SEQ ID NO: 346278 - DNA, 25 bp, Homo sapien
gctggacaccacattggagatggtg

SEQ ID NO: 346279 - DNA, 25 bp, Homo sapien
tgctgcacatattcgtcctcaatag

SEQ ID NO: 346280 - DNA, 25 bp, Homo sapien
ttccctaaactgctcatctttctgc

SEQ ID NO: 346281 - DNA, 25 bp, Homo sapien
tcaatagctgcatatgttctaagct

SEQ ID NO: 346282 - DNA, 25 bp, Homo sapien
catttgcaagggcacgaagcttttc

SEQ ID NO: 346283 - DNA, 25 bp, Homo sapien
cattctcaagttcagcagagggggc

SEQ ID NO: 346284 - DNA, 25 bp, Homo sapien
tgccagcgaaggacttggaggaaat

SEQ ID NO: 346285 - DNA, 25 bp, Homo sapien
aatattcctcctggactgctgagag

SEQ ID NO: 346286 - DNA, 25 bp, Homo sapien
tgctgagagggacattctcaagttc

SEQ ID NO: 346287 - DNA, 25 bp, Homo sapien
ggtggcctcttcagtaaagcgtttc

SEQ ID NO: 346288 - DNA, 25 bp, Homo sapien
gactctctcccggaagtatttggtg

SEQ ID NO: 346289 - DNA, 25 bp, Homo sapien
ctgggcaattcagccgcagtcacga

SEQ ID NO: 346290 - DNA, 25 bp, Homo sapien
atttgcagatgcactgggctgactc

SEQ ID NO: 346291 - DNA, 25 bp, Homo sapien
cttgagtcgtttgctaggtgccagg

SEQ ID NO: 346292 - DNA, 25 bp, Homo sapien
gctgtggtgccccacttgagtcgtt

SEQ ID NO: 346293 - DNA, 25 bp, Homo sapien
gccccacttgagtcgtttgctaggt

SEQ ID NO: 346294 - DNA, 25 bp, Homo sapien
ggtgccccacttgagtcgtttgcta

SEQ ID NO: 346295 - DNA, 25 bp, Homo sapien
ctgacctgactggaagggttcgttt

SEQ ID NO: 346296 - DNA, 25 bp, Homo sapien
actgacctgactggaagggttcgtt

SEQ ID NO: 346297 - DNA, 25 bp, Homo sapien
cactgacctgactggaagggttcgt

SEQ ID NO: 346298 - DNA, 25 bp, Homo sapien
aaattgtgggactgaatgtgagcca

SEQ ID NO: 346299 - DNA, 25 bp, Homo sapien
gcaaattgtgggactgaatgtgagc

SEQ ID NO: 346300 - DNA, 25 bp, Homo sapien
gaaagcaaattgtgggactgaatgt

SEQ ID NO: 346301 - DNA, 25 bp, Homo sapien
aggagaaagcaaattgtgggactga

SEQ ID NO: 346302 - DNA, 25 bp, Homo sapien
tccctttgcgtgtcagcaaatgcca

SEQ ID NO: 346303 - DNA, 25 bp, Homo sapien
tgcaatccctttgcgtgtcagcaaa

SEQ ID NO: 346304 - DNA, 25 bp, Homo sapien
ggatctctgcaatccctttgcgtgt

SEQ ID NO: 346305 - DNA, 25 bp, Homo sapien
tctctgcaatccctttgcgtgtcag

SEQ ID NO: 346306 - DNA, 25 bp, Homo sapien
atttagagaaattctacttgctcca

SEQ ID NO: 346307 - DNA, 25 bp, Homo sapien
tttagagaaattctacttgctccag

SEQ ID NO: 346308 - DNA, 25 bp, Homo sapien
ccaggtgtctattgtctggggcccc

SEQ ID NO: 346309 - DNA, 25 bp, Homo sapien
gcatccaggtgtctattgtctgggg

SEQ ID NO: 346310 - DNA, 25 bp, Homo sapien
tggggcccccatgcaaccatggtga

SEQ ID NO: 346311 - DNA, 25 bp, Homo sapien
tgacagtgaggccaatagaggcact

SEQ ID NO: 346312 - DNA, 25 bp, Homo sapien
tggcctggctcggaatcttgtctgg

SEQ ID NO: 346313 - DNA, 25 bp, Homo sapien
ctgagggttgaagctggatactgcc

SEQ ID NO: 346314 - DNA, 25 bp, Homo sapien
tactgcccctcgagctgaactagga

SEQ ID NO: 346315 - DNA, 25 bp, Homo sapien
gtctcgtcctccttaggcgttgttg

SEQ ID NO: 346316 - DNA, 25 bp, Homo sapien
tccagatgcagaggacagagactct

SEQ ID NO: 346317 - DNA, 25 bp, Homo sapien
tgcagtttggtcaattcccggaaag

SEQ ID NO: 346318 - DNA, 25 bp, Homo sapien
cctgggcaagcctgcagtttggtca

SEQ ID NO: 346319 - DNA, 25 bp, Homo sapien
caagcctgcagtttggtcaattccc

SEQ ID NO: 346320 - DNA, 25 bp, Homo sapien
cattagcacgggaattacagccctg

SEQ ID NO: 346321 - DNA, 25 bp, Homo sapien
gcattagccttcgtgcattagcacg

SEQ ID NO: 346322 - DNA, 25 bp, Homo sapien
cacaatacctaggtctcctgaggaa

SEQ ID NO: 346323 - DNA, 25 bp, Homo sapien
tagtgggaactacaagtgcatcact

SEQ ID NO: 346324 - DNA, 25 bp, Homo sapien
gggaccctgcggtgttcccagctgc

SEQ ID NO: 346325 - DNA, 25 bp, Homo sapien
cccgttaaactctgagcatccggca

SEQ ID NO: 346326 - DNA, 25 bp, Homo sapien
tctccccgttaaactctgagcatcc

SEQ ID NO: 346327 - DNA, 25 bp, Homo sapien
ctgagcatccggcagggaccctgcg

SEQ ID NO: 346328 - DNA, 25 bp, Homo sapien
cagcacttggactaaaagcaaccag

SEQ ID NO: 346329 - DNA, 25 bp, Homo sapien
ggcctctgccctccgtggcacagcc

SEQ ID NO: 346330 - DNA, 25 bp, Homo sapien
gggaggcagcacttggactaaaagc

SEQ ID NO: 346331 - DNA, 25 bp, Homo sapien
aggcagcacttggactaaaagcaac

SEQ ID NO: 346332 - DNA, 25 bp, Homo sapien
catcacctggatctgagaagcccat

SEQ ID NO: 346333 - DNA, 25 bp, Homo sapien
tgggcatcacctggatctgagaagc

SEQ ID NO: 346334 - DNA, 25 bp, Homo sapien
atcacctggatctgagaagcccatg

SEQ ID NO: 346335 - DNA, 25 bp, Homo sapien
tcttgaaagagtgtgagcaagatcc

SEQ ID NO: 346336 - DNA, 25 bp, Homo sapien
cttctcttgaaagagtgtgagcaag

SEQ ID NO: 346337 - DNA, 25 bp, Homo sapien
tctcttgaaagagtgtgagcaagat

SEQ ID NO: 346338 - DNA, 25 bp, Homo sapien
tgaaagagtgtgagcaagatccagc

SEQ ID NO: 346339 - DNA, 25 bp, Homo sapien
ggcagcagctcctgatcaaacatgc

SEQ ID NO: 346340 - DNA, 25 bp, Homo sapien
aaacatgcaaaacaggatgcttccc

SEQ ID NO: 346341 - DNA, 25 bp, Homo sapien
gtgaaagtcacaacttggcagcagc

SEQ ID NO: 346342 - DNA, 25 bp, Homo sapien
gaaagtgaaagtcacaacttggcag

SEQ ID NO: 346343 - DNA, 25 bp, Homo sapien
ccagcagcacccttggtcccaccct

SEQ ID NO: 346344 - DNA, 25 bp, Homo sapien
gcagcacccttggtcccaccctcct

SEQ ID NO: 346345 - DNA, 25 bp, Homo sapien
tggtccagcagcacccttggtccca

SEQ ID NO: 346346 - DNA, 25 bp, Homo sapien
ccttggtccagcagcacccttggtc

SEQ ID NO: 346347 - DNA, 25 bp, Homo sapien
tccttatgtgggttcttctgccagg

SEQ ID NO: 346348 - DNA, 25 bp, Homo sapien
tgccaggagcacctgctaccttcac

SEQ ID NO: 346349 - DNA, 25 bp, Homo sapien
ttccttatgtgggttcttctgccag

SEQ ID NO: 346350 - DNA, 25 bp, Homo sapien
cttccttatgtgggttcttctgcca

SEQ ID NO: 346351 - DNA, 25 bp, Homo sapien
tgattctacacaaggttaccgcgag

SEQ ID NO: 346352 - DNA, 25 bp, Homo sapien
catgtctgatatctacgtgggcccc

SEQ ID NO: 346353 - DNA, 25 bp, Homo sapien
tattggcacgggaactggaggacct

SEQ ID NO: 346354 - DNA, 25 bp, Homo sapien
taaggcacaggtggaagtctcctaa

SEQ ID NO: 346355 - DNA, 25 bp, Homo sapien
attttactagccgttcttgaatttg

SEQ ID NO: 346356 - DNA, 25 bp, Homo sapien
tactagccgttcttgaatttgccat

SEQ ID NO: 346357 - DNA, 25 bp, Homo sapien
cttgattttactagccgttcttgaa

SEQ ID NO: 346358 - DNA, 25 bp, Homo sapien
tttactagccgttcttgaatttgcc

SEQ ID NO: 346359 - DNA, 25 bp, Homo sapien
tgctccacaaccagcacccaaagct

SEQ ID NO: 346360 - DNA, 25 bp, Homo sapien
caggaagaagcttcttgctccacaa

SEQ ID NO: 346361 - DNA, 25 bp, Homo sapien
gaagcttcttgctccacaaccagca

SEQ ID NO: 346362 - DNA, 25 bp, Homo sapien
cttgctccacaaccagcacccaaag

SEQ ID NO: 346363 - DNA, 25 bp, Homo sapien
ctggcatctggttcttccttcaggg

SEQ ID NO: 346364 - DNA, 25 bp, Homo sapien
catctggttcttccttcagggccat

SEQ ID NO: 346365 - DNA, 25 bp, Homo sapien
gcatctggttcttccttcagggcca

SEQ ID NO: 346366 - DNA, 25 bp, Homo sapien
tggcatctggttcttccttcagggc

SEQ ID NO: 346367 - DNA, 25 bp, Homo sapien
tgaacccagccaactccattgtagc

SEQ ID NO: 346368 - DNA, 25 bp, Homo sapien
gagactaagatcgtccacttgttcc

SEQ ID NO: 346369 - DNA, 25 bp, Homo sapien
gagtcaacacttacaaccacaaggt

SEQ ID NO: 346370 - DNA, 25 bp, Homo sapien
taagacacctcaatgatttagtgac

SEQ ID NO: 346371 - DNA, 25 bp, Homo sapien
ttattcttgcacaataatctgcatg

SEQ ID NO: 346372 - DNA, 25 bp, Homo sapien
ggaagtcaccccatctattaattat

SEQ ID NO: 346373 - DNA, 25 bp, Homo sapien
catgacccctgtccataatgtaatt

SEQ ID NO: 346374 - DNA, 25 bp, Homo sapien
tatcagtccccttgataagtgggtc

SEQ ID NO: 346375 - DNA, 25 bp, Homo sapien
tagtcctaagaagtcaaaattctcc

SEQ ID NO: 346376 - DNA, 25 bp, Homo sapien
aaattctccatgctatctgatacac

SEQ ID NO: 346377 - DNA, 25 bp, Homo sapien
atgctatctgatacaccatgtccta

SEQ ID NO: 346378 - DNA, 25 bp, Homo sapien
attacaggaattgaaactagtccta

SEQ ID NO: 346379 - DNA, 25 bp, Homo sapien
tctgaagacgctccttgaagactcc

SEQ ID NO: 346380 - DNA, 25 bp, Homo sapien
catgggtgaccctatcaagaatttc

SEQ ID NO: 346381 - DNA, 25 bp, Homo sapien
tgaggcgcccagcagttctatattc

SEQ ID NO: 346382 - DNA, 25 bp, Homo sapien
acacaatgttctggcgttaggcaag

SEQ ID NO: 346383 - DNA, 25 bp, Homo sapien
aatgtcatcggtccctcagtgtacg

SEQ ID NO: 346384 - DNA, 25 bp, Homo sapien
aagcagggccgaccccatgtcaagt

SEQ ID NO: 346385 - DNA, 25 bp, Homo sapien
cactgttaggacaaaaacttgagac

SEQ ID NO: 346386 - DNA, 25 bp, Homo sapien
caggaacttgccctcaaagcgggaa

SEQ ID NO: 346387 - DNA, 25 bp, Homo sapien
gatgccaaagttcctaacactgagt

SEQ ID NO: 346388 - DNA, 25 bp, Homo sapien
ggcgcacttgccatcttgagtaacc

SEQ ID NO: 346389 - DNA, 25 bp, Homo sapien
ggaaatggctcattacccggccttc

SEQ ID NO: 346390 - DNA, 25 bp, Homo sapien
tcagcaagacagctcgagagatcca

SEQ ID NO: 346391 - DNA, 25 bp, Homo sapien
ccaggctcactgttggtcagagttt

SEQ ID NO: 346392 - DNA, 25 bp, Homo sapien
tacagtctcgaccatagaagatggc

SEQ ID NO: 346393 - DNA, 25 bp, Homo sapien
tgggtgtgggtcacaaagatcacct

SEQ ID NO: 346394 - DNA, 25 bp, Homo sapien
cacacccaaggaggccatttataga

SEQ ID NO: 346395 - DNA, 25 bp, Homo sapien
caagcaatcaaagggcgtccaacag

SEQ ID NO: 346396 - DNA, 25 bp, Homo sapien
taccccagctgcagtaatgctcagg

SEQ ID NO: 346397 - DNA, 25 bp, Homo sapien
ggtgtgatgtcacgcagaatgtccc

SEQ ID NO: 346398 - DNA, 25 bp, Homo sapien
cagccctgctgtaaatggtgccaac

SEQ ID NO: 346399 - DNA, 25 bp, Homo sapien
cacattggcgatgacgcagcctctg

SEQ ID NO: 346400 - DNA, 25 bp, Homo sapien
aatctcatttgcaatgacacgaagc

SEQ ID NO: 346401 - DNA, 25 bp, Homo sapien
caatgacacgaagcctttctatgga

SEQ ID NO: 346402 - DNA, 25 bp, Homo sapien
gcctctgtggaccttttcaatctca

SEQ ID NO: 346403 - DNA, 25 bp, Homo sapien
gctgcatgtctttgtcctcaatagc

SEQ ID NO: 346404 - DNA, 25 bp, Homo sapien
tgctgcatgtctttgtcctcaatag

SEQ ID NO: 346405 - DNA, 25 bp, Homo sapien
ctgcatgtctttgtcctcaatagcc

SEQ ID NO: 346406 - DNA, 25 bp, Homo sapien
ctgggcaattcagccacacgcacaa

SEQ ID NO: 346407 - DNA, 25 bp, Homo sapien
tgacttcttcagtgaagcgtttctt

SEQ ID NO: 346408 - DNA, 25 bp, Homo sapien
aattcagccacacgcacaaatctct

SEQ ID NO: 346409 - DNA, 25 bp, Homo sapien
ttttcagatgcactgggctaacttt

SEQ ID NO: 346410 - DNA, 25 bp, Homo sapien
gggtcatatcagatgggcgcttctg

SEQ ID NO: 346411 - DNA, 25 bp, Homo sapien
ttcagaacagctgtaaccccccatg

SEQ ID NO: 346412 - DNA, 25 bp, Homo sapien
gacctgaaacattcccgggcaaaca

SEQ ID NO: 346413 - DNA, 25 bp, Homo sapien
gtaaccccccatgaaactgcaagct

SEQ ID NO: 346414 - DNA, 25 bp, Homo sapien
acctcggccagtcatgagcagccag

SEQ ID NO: 346415 - DNA, 25 bp, Homo sapien
ccatgctgagatgtggatactggga

SEQ ID NO: 346416 - DNA, 25 bp, Homo sapien
gctgctgtaaccagctgtagggaca

SEQ ID NO: 346417 - DNA, 25 bp, Homo sapien
acaaacacagcttaacctcggccag

SEQ ID NO: 346418 - DNA, 25 bp, Homo sapien
gtccagcctggatggttttgctgca

SEQ ID NO: 346419 - DNA, 25 bp, Homo sapien
ccagcctggatggttttgctgcacc

SEQ ID NO: 346420 - DNA, 25 bp, Homo sapien
tccagcctggatggttttgctgcac

SEQ ID NO: 346421 - DNA, 25 bp, Homo sapien
tctcacaccaaggaaaagtccgctt

SEQ ID NO: 346422 - DNA, 25 bp, Homo sapien
tcacaccaaggaaaagtccgcttgt

SEQ ID NO: 346423 - DNA, 25 bp, Homo sapien
actctcacaccaaggaaaagtccgc

SEQ ID NO: 346424 - DNA, 25 bp, Homo sapien
cacaccaaggaaaagtccgcttgtc

SEQ ID NO: 346425 - DNA, 25 bp, Homo sapien
tgatgtgcagggcttctgacatgtg

SEQ ID NO: 346426 - DNA, 25 bp, Homo sapien
gtcgcgccgggcctgtgatgtgcag

SEQ ID NO: 346427 - DNA, 25 bp, Homo sapien
gggcttctgacatgtgtctcattca

SEQ ID NO: 346428 - DNA, 25 bp, Homo sapien
tcattcaatgatcacacacagcccg

SEQ ID NO: 346429 - DNA, 25 bp, Homo sapien
cgcttgtgatgagctgcacccagga

SEQ ID NO: 346430 - DNA, 25 bp, Homo sapien
ccgacgcttgtgatgagctgcaccc

SEQ ID NO: 346431 - DNA, 25 bp, Homo sapien
gcttgtgatgagctgcacccaggat

SEQ ID NO: 346432 - DNA, 25 bp, Homo sapien
gacgcttgtgatgagctgcacccag

SEQ ID NO: 346433 - DNA, 25 bp, Homo sapien
gaggctggatactgactgttagcct

SEQ ID NO: 346434 - DNA, 25 bp, Homo sapien
tgactgttagcctcaactaggacac

SEQ ID NO: 346435 - DNA, 25 bp, Homo sapien
ctaccagttggtcaattccgggaag

SEQ ID NO: 346436 - DNA, 25 bp, Homo sapien
gacacagtgcgtcccctctaggcga

SEQ ID NO: 346437 - DNA, 25 bp, Homo sapien
cagatgcagacgacaaagattttca

SEQ ID NO: 346438 - DNA, 25 bp, Homo sapien
agatgcagacgacaaagattttcag

SEQ ID NO: 346439 - DNA, 25 bp, Homo sapien
gatgcagacgacaaagattttcagc

SEQ ID NO: 346440 - DNA, 25 bp, Homo sapien
cagctgtgcacctatataataacca

SEQ ID NO: 346441 - DNA, 25 bp, Homo sapien
cttcccagcagctcacaatcaagca

SEQ ID NO: 346442 - DNA, 25 bp, Homo sapien
tcacctccagctgtgcacctatata

SEQ ID NO: 346443 - DNA, 25 bp, Homo sapien
agcacagcaaacacgctgctcccca

SEQ ID NO: 346444 - DNA, 25 bp, Homo sapien
ttcatcctgagcaaacatcgctggg

SEQ ID NO: 346445 - DNA, 25 bp, Homo sapien
atttcatcctgagcaaacatcgctg

SEQ ID NO: 346446 - DNA, 25 bp, Homo sapien
tccatgggggcctatttcatcctga

SEQ ID NO: 346447 - DNA, 25 bp, Homo sapien
ttccatgggggcctatttcatcctg

SEQ ID NO: 346448 - DNA, 25 bp, Homo sapien
tacagggcttcatcctaagaccgag

SEQ ID NO: 346449 - DNA, 25 bp, Homo sapien
gaagacacaccctgaatgtgggcag

SEQ ID NO: 346450 - DNA, 25 bp, Homo sapien
gactgagtcacactacgggcttctg

SEQ ID NO: 346451 - DNA, 25 bp, Homo sapien
gaacatcactagacggaggaatgcc

SEQ ID NO: 346452 - DNA, 25 bp, Homo sapien
tggtgtattagttcctcccctgctg

SEQ ID NO: 346453 - DNA, 25 bp, Homo sapien
gctgagacaaggaacgctgggacct

SEQ ID NO: 346454 - DNA, 25 bp, Homo sapien
cagatcttctaagtgcagctgaggg

SEQ ID NO: 346455 - DNA, 25 bp, Homo sapien
cacctggtggaacgtggctgagaca

SEQ ID NO: 346456 - DNA, 25 bp, Homo sapien
atgattgtgccacggtttgccagcc

SEQ ID NO: 346457 - DNA, 25 bp, Homo sapien
ggtcccaattgctcagggagtcaag

SEQ ID NO: 346458 - DNA, 25 bp, Homo sapien
taacgaggcattggggtacacacgg

SEQ ID NO: 346459 - DNA, 25 bp, Homo sapien
tttgaggccgggaggtccaagatgt

SEQ ID NO: 346460 - DNA, 25 bp, Homo sapien
gaagaccattctggaagttcttgca

SEQ ID NO: 346461 - DNA, 25 bp, Homo sapien
aagaccattctggaagttcttgcag

SEQ ID NO: 346462 - DNA, 25 bp, Homo sapien
agaagaccattctggaagttcttgc

SEQ ID NO: 346463 - DNA, 25 bp, Homo sapien
ttattgggacttacacacaggtcaa

SEQ ID NO: 346464 - DNA, 25 bp, Homo sapien
atgcaccctttagtaacctggaggg

SEQ ID NO: 346465 - DNA, 25 bp, Homo sapien
gggacatgcaccctttagtaacctg

SEQ ID NO: 346466 - DNA, 25 bp, Homo sapien
gacatgcaccctttagtaacctgga

SEQ ID NO: 346467 - DNA, 25 bp, Homo sapien
tgtatccaacagttctaactctggt

SEQ ID NO: 346468 - DNA, 25 bp, Homo sapien
aaagactttattcttggaaggacat

SEQ ID NO: 346469 - DNA, 25 bp, Homo sapien
tcccttattgcaggctccagtgttc

SEQ ID NO: 346470 - DNA, 25 bp, Homo sapien
cagttccataagctttaccttgccc

SEQ ID NO: 346471 - DNA, 25 bp, Homo sapien
taagaacattgggtgtgttcccacc

SEQ ID NO: 346472 - DNA, 25 bp, Homo sapien
tgagaaagttgagcttcccctccag

SEQ ID NO: 346473 - DNA, 25 bp, Homo sapien
catacgctcctaactgagggttggc

SEQ ID NO: 346474 - DNA, 25 bp, Homo sapien
tgagattcgcccaatgatatgcggg

SEQ ID NO: 346475 - DNA, 25 bp, Homo sapien
ccttatgtgatcctcaagctccctt

SEQ ID NO: 346476 - DNA, 25 bp, Homo sapien
ggcacggagcttccttatgtgatcc

SEQ ID NO: 346477 - DNA, 25 bp, Homo sapien
ctgtggacctgctcaacctcctctg

SEQ ID NO: 346478 - DNA, 25 bp, Homo sapien
gacctgctcaacctcctctgcaagg

SEQ ID NO: 346479 - DNA, 25 bp, Homo sapien
tgcctgtgctgctggtctttatcgt

SEQ ID NO: 346480 - DNA, 25 bp, Homo sapien
gaccatgtgacttgcaagcttgttc

SEQ ID NO: 346481 - DNA, 25 bp, Homo sapien
ttttgtccttcatgaccatgtgact

SEQ ID NO: 346482 - DNA, 25 bp, Homo sapien
ttatcgtggcggtttttgtccttca

SEQ ID NO: 346483 - DNA, 25 bp, Homo sapien
gagcaccgtttgttatctgatcatg

SEQ ID NO: 346484 - DNA, 25 bp, Homo sapien
cagttttcagtgagttacgtgagtc

SEQ ID NO: 346485 - DNA, 25 bp, Homo sapien
ggcgagaatcctgttaggccagttt

SEQ ID NO: 346486 - DNA, 25 bp, Homo sapien
ggtctgacctgcctttggcgagaat

SEQ ID NO: 346487 - DNA, 25 bp, Homo sapien
cagcagttgtagcagattctctctg

SEQ ID NO: 346488 - DNA, 25 bp, Homo sapien
tggaaatacttaaggtaatcctcaa

SEQ ID NO: 346489 - DNA, 25 bp, Homo sapien
tcagcagttgtagcagattctctct

SEQ ID NO: 346490 - DNA, 25 bp, Homo sapien
acttaaggtaatcctcaataaagat

SEQ ID NO: 346491 - DNA, 25 bp, Homo sapien
accgaggggctttccttggagctct

SEQ ID NO: 346492 - DNA, 25 bp, Homo sapien
gccagcggctgggttaccgaggggc

SEQ ID NO: 346493 - DNA, 25 bp, Homo sapien
taccgaggggctttccttggagctc

SEQ ID NO: 346494 - DNA, 25 bp, Homo sapien
ggtgccagcggctgggttaccgagg

SEQ ID NO: 346495 - DNA, 25 bp, Homo sapien
agaaaacaaattgtgggatcgaagg

SEQ ID NO: 346496 - DNA, 25 bp, Homo sapien
aacaaattgtgggatcgaaggtgag

SEQ ID NO: 346497 - DNA, 25 bp, Homo sapien
caaattgtgggatcgaaggtgagcc

SEQ ID NO: 346498 - DNA, 25 bp, Homo sapien
aattgtgggatcgaaggtgagcctc

SEQ ID NO: 346499 - DNA, 25 bp, Homo sapien
tcactctcacaccaaggcagggtcc

SEQ ID NO: 346500 - DNA, 25 bp, Homo sapien
cacaccaaggcagggtcctcttgtc

SEQ ID NO: 346501 - DNA, 25 bp, Homo sapien
actctcacaccaaggcagggtcctc

SEQ ID NO: 346502 - DNA, 25 bp, Homo sapien
tctcacaccaaggcagggtcctctt

SEQ ID NO: 346503 - DNA, 25 bp, Homo sapien
tctgtgatgtgcatggcctctgaca

SEQ ID NO: 346504 - DNA, 25 bp, Homo sapien
cagaggaatccacaaaagttaggga

SEQ ID NO: 346505 - DNA, 25 bp, Homo sapien
gataactagttgatgatagccagtg

SEQ ID NO: 346506 - DNA, 25 bp, Homo sapien
ttttcacaatagtgctagagccagg

SEQ ID NO: 346507 - DNA, 25 bp, Homo sapien
taacaggatatgaagatgtccattc

SEQ ID NO: 346508 - DNA, 25 bp, Homo sapien
actgtacaaattcacactcaaacta

SEQ ID NO: 346509 - DNA, 25 bp, Homo sapien
ttctttcagtcttactggctctcag

SEQ ID NO: 346510 - DNA, 25 bp, Homo sapien
cagtcttactggctctcagtagtct

SEQ ID NO: 346511 - DNA, 25 bp, Homo sapien
gaaaagttaccaggcacagggtcac

SEQ ID NO: 346512 - DNA, 25 bp, Homo sapien
taaacaagtctagagagaccatgtg

SEQ ID NO: 346513 - DNA, 25 bp, Homo sapien
agggtcacagggtgttctaagaaag

SEQ ID NO: 346514 - DNA, 25 bp, Homo sapien
gaaagaaagtcacggaaatcctcca

SEQ ID NO: 346515 - DNA, 25 bp, Homo sapien
gcatcctccagctcttatacaaaag

SEQ ID NO: 346516 - DNA, 25 bp, Homo sapien
acagctcagtggttcccgggcatcc

SEQ ID NO: 346517 - DNA, 25 bp, Homo sapien
tcaaaagccactcgcctccctcttt

SEQ ID NO: 346518 - DNA, 25 bp, Homo sapien
tgtgtctctgcgcactccccggcac

SEQ ID NO: 346519 - DNA, 25 bp, Homo sapien
ctctgtttcagggtcgaggcatcca

SEQ ID NO: 346520 - DNA, 25 bp, Homo sapien
tcagggtcgaggcatccagatatct

SEQ ID NO: 346521 - DNA, 25 bp, Homo sapien
ggtcgaggcatccagatatctgtct

SEQ ID NO: 346522 - DNA, 25 bp, Homo sapien
tgtttcagggtcgaggcatccagat

SEQ ID NO: 346523 - DNA, 25 bp, Homo sapien
agcagttcaccaggggagtatgcag

SEQ ID NO: 346524 - DNA, 25 bp, Homo sapien
gcagcagttcaccaggggagtatgc

SEQ ID NO: 346525 - DNA, 25 bp, Homo sapien
cagcagttcaccaggggagtatgca

SEQ ID NO: 346526 - DNA, 25 bp, Homo sapien
tgctgtaagggacggggtgacggga

SEQ ID NO: 346527 - DNA, 25 bp, Homo sapien
cccaatacttgtgaggagctgcatc

SEQ ID NO: 346528 - DNA, 25 bp, Homo sapien
tacttgtgaggagctgcatccagga

SEQ ID NO: 346529 - DNA, 25 bp, Homo sapien
ctgcccaatacttgtgaggagctgc

SEQ ID NO: 346530 - DNA, 25 bp, Homo sapien
acttgtgaggagctgcatccaggat

SEQ ID NO: 346531 - DNA, 25 bp, Homo sapien
tactccatgggtgagcctgcaggct

SEQ ID NO: 346532 - DNA, 25 bp, Homo sapien
caactgagcgacctggaagaggagc

SEQ ID NO: 346533 - DNA, 25 bp, Homo sapien
tcaggcttgactaggacacagtgtg

SEQ ID NO: 346534 - DNA, 25 bp, Homo sapien
cctgcaggctggtcaattccggtgt

SEQ ID NO: 346535 - DNA, 25 bp, Homo sapien
ttgctgtagcctagagcccctgggc

SEQ ID NO: 346536 - DNA, 25 bp, Homo sapien
agttcaaaccccatagcagggcaca

SEQ ID NO: 346537 - DNA, 25 bp, Homo sapien
tcttcagtgaaaagccacggtcaag

SEQ ID NO: 346538 - DNA, 25 bp, Homo sapien
cacacggcaccatgcaggactaatt

SEQ ID NO: 346539 - DNA, 25 bp, Homo sapien
cagctctatcaagttttttagaggg

SEQ ID NO: 346540 - DNA, 25 bp, Homo sapien
acatctgcccttgtgactctgatat

SEQ ID NO: 346541 - DNA, 25 bp, Homo sapien
tgaaatcccaggtgcaggaggcatt

SEQ ID NO: 346542 - DNA, 25 bp, Homo sapien
gaacaaataagaccatgactcatat

SEQ ID NO: 346543 - DNA, 25 bp, Homo sapien
gccacaaggacatgccgggctccag

SEQ ID NO: 346544 - DNA, 25 bp, Homo sapien
aaagagatgggcacccccaacacct

SEQ ID NO: 346545 - DNA, 25 bp, Homo sapien
aagagatgggcacccccaacaccta

SEQ ID NO: 346546 - DNA, 25 bp, Homo sapien
gcccggccacaaggacatgccgggc

SEQ ID NO: 346547 - DNA, 25 bp, Homo sapien
tgatccttcccttatagagctattg

SEQ ID NO: 346548 - DNA, 25 bp, Homo sapien
ggagcaatcagactcaagcctgggt

SEQ ID NO: 346549 - DNA, 25 bp, Homo sapien
gggagctttgtgaacccatctaagc

SEQ ID NO: 346550 - DNA, 25 bp, Homo sapien
tctacaaaagctgaatgatccttcc

SEQ ID NO: 346551 - DNA, 25 bp, Homo sapien
caagggatcttcctctgacagagac

SEQ ID NO: 346552 - DNA, 25 bp, Homo sapien
aagggatcttcctctgacagagact

SEQ ID NO: 346553 - DNA, 25 bp, Homo sapien
cgtcctccggcctcccagatatacc

SEQ ID NO: 346554 - DNA, 25 bp, Homo sapien
tgtaataaccagacacgtcctccgg

SEQ ID NO: 346555 - DNA, 25 bp, Homo sapien
gtaataaccagacacgtcctccggc

SEQ ID NO: 346556 - DNA, 25 bp, Homo sapien
ctgtgtaataaccagacacgtcctc

SEQ ID NO: 346557 - DNA, 25 bp, Homo sapien
atgaccaagcacagtaaacacgctg

SEQ ID NO: 346558 - DNA, 25 bp, Homo sapien
tcatgaccaagcacagtaaacacgc

SEQ ID NO: 346559 - DNA, 25 bp, Homo sapien
ctcatgaccaagcacagtaaacacg

SEQ ID NO: 346560 - DNA, 25 bp, Homo sapien
catgaccaagcacagtaaacacgct

SEQ ID NO: 346561 - DNA, 25 bp, Homo sapien
cccgatctctgcagtttaagggcac

SEQ ID NO: 346562 - DNA, 25 bp, Homo sapien
tgtctcaggcagtcagaaccagagt

SEQ ID NO: 346563 - DNA, 25 bp, Homo sapien
aagtcagactcaagcctcagtgcaa

SEQ ID NO: 346564 - DNA, 25 bp, Homo sapien
gattcaaggtctgctgtgtcagctg

SEQ ID NO: 346565 - DNA, 25 bp, Homo sapien
tggctggagaatccatgtggactct

SEQ ID NO: 346566 - DNA, 25 bp, Homo sapien
gaccatcagtcagaaggtcaaaggg

SEQ ID NO: 346567 - DNA, 25 bp, Homo sapien
cagtcaactggtgcggtgcttggaa

SEQ ID NO: 346568 - DNA, 25 bp, Homo sapien
taggtcaggaggcagtaaggtggct

SEQ ID NO: 346569 - DNA, 25 bp, Homo sapien
gcggaccaagaactgtgaccacagg

SEQ ID NO: 346570 - DNA, 25 bp, Homo sapien
cggatgtggcccctgtaagcttctt

SEQ ID NO: 346571 - DNA, 25 bp, Homo sapien
tataagattctgcaggcggaccaag

SEQ ID NO: 346572 - DNA, 25 bp, Homo sapien
ggatgtagtctacctcgtgtacgaa

SEQ ID NO: 346573 - DNA, 25 bp, Homo sapien
atatattgacggaagaatagagagg

SEQ ID NO: 346574 - DNA, 25 bp, Homo sapien
aggcttgaaggaaccagcaatgaga

SEQ ID NO: 346575 - DNA, 25 bp, Homo sapien
aaaaagaatatattgacggaagaat

SEQ ID NO: 346576 - DNA, 25 bp, Homo sapien
ggaggcttgaaggaaccagcaatga

SEQ ID NO: 346577 - DNA, 25 bp, Homo sapien
ggttgtcatgtgatgggtcccctcc

SEQ ID NO: 346578 - DNA, 25 bp, Homo sapien
tgtcgccgcccaggattgacctgtg

SEQ ID NO: 346579 - DNA, 25 bp, Homo sapien
caatgtcctccgaagaatgaagtct

SEQ ID NO: 346580 - DNA, 25 bp, Homo sapien
ccaggttactaaagggtgcatgtcc

SEQ ID NO: 346581 - DNA, 25 bp, Homo sapien
gctaaagcggaattgaaatgttacc

SEQ ID NO: 346582 - DNA, 25 bp, Homo sapien
catacatcatgacttcctggaaagc

SEQ ID NO: 346583 - DNA, 25 bp, Homo sapien
gaaacaagcaactcaacccagtgag

SEQ ID NO: 346584 - DNA, 25 bp, Homo sapien
tgcacgtgtgtgcacccatggtgag

SEQ ID NO: 346585 - DNA, 25 bp, Homo sapien
tagtcatacatgcttcaacgacggc

SEQ ID NO: 346586 - DNA, 25 bp, Homo sapien
tatagcacctgagccctttttggtt

SEQ ID NO: 346587 - DNA, 25 bp, Homo sapien
aattatagcacctgagccctttttg

SEQ ID NO: 346588 - DNA, 25 bp, Homo sapien
caacgacggccctgtgataaaaaca

SEQ ID NO: 346589 - DNA, 25 bp, Homo sapien
tctctttattgtgatgctcagtgga

SEQ ID NO: 346590 - DNA, 25 bp, Homo sapien
atggttctctttattgtgatgctca

SEQ ID NO: 346591 - DNA, 25 bp, Homo sapien
tctttattgtgatgctcagtggaaa

SEQ ID NO: 346592 - DNA, 25 bp, Homo sapien
gttctctttattgtgatgctcagtg

SEQ ID NO: 346593 - DNA, 25 bp, Homo sapien
cttactgtagtggtgacagctgcaa

SEQ ID NO: 346594 - DNA, 25 bp, Homo sapien
catctgtaaaccagcttactgtagt

SEQ ID NO: 346595 - DNA, 25 bp, Homo sapien
taaaccagcttactgtagtggtgac

SEQ ID NO: 346596 - DNA, 25 bp, Homo sapien
ccagcttactgtagtggtgacagct

SEQ ID NO: 346597 - DNA, 25 bp, Homo sapien
cagagctttgtaggcatatgcagct

SEQ ID NO: 346598 - DNA, 25 bp, Homo sapien
ggtagggtgggagtttcactcactc

SEQ ID NO: 346599 - DNA, 25 bp, Homo sapien
tcactcactcctttgtgacagcaac

SEQ ID NO: 346600 - DNA, 25 bp, Homo sapien
gacagcaactgggacctgaattcag

SEQ ID NO: 346601 - DNA, 25 bp, Homo sapien
ttcttgccgtaagtctcaatgcagc

SEQ ID NO: 346602 - DNA, 25 bp, Homo sapien
cagttaggaatacaagtaaattcgg

SEQ ID NO: 346603 - DNA, 25 bp, Homo sapien
agtaaattcggcaaccagtgtagac

SEQ ID NO: 346604 - DNA, 25 bp, Homo sapien
ccagtgaggacgagctactctcttc

SEQ ID NO: 346605 - DNA, 25 bp, Homo sapien
caacggtgcaggtaaaccaccctcg

SEQ ID NO: 346606 - DNA, 25 bp, Homo sapien
cctcgggcccagtcctagagtagac

SEQ ID NO: 346607 - DNA, 25 bp, Homo sapien
agtcctagagtagacacaagatcgc

SEQ ID NO: 346608 - DNA, 25 bp, Homo sapien
tttaaactatactgagtcaacggtg

SEQ ID NO: 346609 - DNA, 25 bp, Homo sapien
tggcccctctaacgctctggctgtc

SEQ ID NO: 346610 - DNA, 25 bp, Homo sapien
caagtcccttaaccattaaatatat

SEQ ID NO: 346611 - DNA, 25 bp, Homo sapien
taaatatatttggtccccaagagtg

SEQ ID NO: 346612 - DNA, 25 bp, Homo sapien
gctgtcagacttgggacaagtccct

SEQ ID NO: 346613 - DNA, 25 bp, Homo sapien
acttgagacattttagaatcaggag

SEQ ID NO: 346614 - DNA, 25 bp, Homo sapien
gagacattttagaatcaggagggag

SEQ ID NO: 346615 - DNA, 25 bp, Homo sapien
gggagacagcggacagtggcgctgc

SEQ ID NO: 346616 - DNA, 25 bp, Homo sapien
gggagggggcattgcacttgagaca

SEQ ID NO: 346617 - DNA, 25 bp, Homo sapien
gttcacagcagtcccaagaaggtgg

SEQ ID NO: 346618 - DNA, 25 bp, Homo sapien
tgctcgcctcaacatcttgtgcttt

SEQ ID NO: 346619 - DNA, 25 bp, Homo sapien
caccacgtgtgattgcaaacagcaa

SEQ ID NO: 346620 - DNA, 25 bp, Homo sapien
acaacacctggagggaaacgggatg

SEQ ID NO: 346621 - DNA, 25 bp, Homo sapien
ttcggcaggtttggcctcagcccca

SEQ ID NO: 346622 - DNA, 25 bp, Homo sapien
cagccccatccgctttgccatctac

SEQ ID NO: 346623 - DNA, 25 bp, Homo sapien
ttattcggcaggtttggcctcagcc

SEQ ID NO: 346624 - DNA, 25 bp, Homo sapien
ctcagccccatccgctttgccatct

SEQ ID NO: 346625 - DNA, 25 bp, Homo sapien
cacgacaaacggcaggtccccgcgc

SEQ ID NO: 346626 - DNA, 25 bp, Homo sapien
ttccgggccattcggcggggcacga

SEQ ID NO: 346627 - DNA, 25 bp, Homo sapien
ctcttcgtcggagccatccccggcg

SEQ ID NO: 346628 - DNA, 25 bp, Homo sapien
ttcgtcggagccatccccggcgcct

SEQ ID NO: 346629 - DNA, 25 bp, Homo sapien
tgttgcaactcctataaaaccggtg

SEQ ID NO: 346630 - DNA, 25 bp, Homo sapien
gcaggcaaagcttcccgcaaaatgt

SEQ ID NO: 346631 - DNA, 25 bp, Homo sapien
tcaaagtgaattcgagagggaaacc

SEQ ID NO: 346632 - DNA, 25 bp, Homo sapien
gcaaaatgtttaggtgtcggacatc

SEQ ID NO: 346633 - DNA, 25 bp, Homo sapien
gttctttagggagctgacttcgcgg

SEQ ID NO: 346634 - DNA, 25 bp, Homo sapien
ttctttagggagctgacttcgcggt

SEQ ID NO: 346635 - DNA, 25 bp, Homo sapien
agctcgcgctgcagtttccggcggg

SEQ ID NO: 346636 - DNA, 25 bp, Homo sapien
ggccgtctcagtggcgtcctccagc

SEQ ID NO: 346637 - DNA, 25 bp, Homo sapien
gcgctgcagtttccggcgggaggcg

SEQ ID NO: 346638 - DNA, 25 bp, Homo sapien
tgcttcaggcgggtagatgccttgt

SEQ ID NO: 346639 - DNA, 25 bp, Homo sapien
tactgctcggcgttcctccgctcgt

SEQ ID NO: 346640 - DNA, 25 bp, Homo sapien
tgctcggcgttcctccgctcgtcat

SEQ ID NO: 346641 - DNA, 25 bp, Homo sapien
cttgtactgctcggcgttcctccgc

SEQ ID NO: 346642 - DNA, 25 bp, Homo sapien
ttgtactgctcggcgttcctccgct

SEQ ID NO: 346643 - DNA, 25 bp, Homo sapien
gagcattctcgttcttctgggcgtg

SEQ ID NO: 346644 - DNA, 25 bp, Homo sapien
caatcttggcctcgagggcggtgat

SEQ ID NO: 346645 - DNA, 25 bp, Homo sapien
tccaggttcaggtcggtgttgatct

SEQ ID NO: 346646 - DNA, 25 bp, Homo sapien
tgatggaggccttgtacttggactt

SEQ ID NO: 346647 - DNA, 25 bp, Homo sapien
cgatgcgggcctccagacgccgctt

SEQ ID NO: 346648 - DNA, 25 bp, Homo sapien
cttcttcagccggtcgttgatcagc

SEQ ID NO: 346649 - DNA, 25 bp, Homo sapien
tcgttgatcagctccgtgttgccct

SEQ ID NO: 346650 - DNA, 25 bp, Homo sapien
tcagccggtcgttgatcagctccgt

SEQ ID NO: 346651 - DNA, 25 bp, Homo sapien
ctgggcctggcgcttggcacgctcc

SEQ ID NO: 346652 - DNA, 25 bp, Homo sapien
gcttggcacgctccgcggctgccag

SEQ ID NO: 346653 - DNA, 25 bp, Homo sapien
ctggcgcttggcacgctccgcggct

SEQ ID NO: 346654 - DNA, 25 bp, Homo sapien
tgggcctggcgcttggcacgctccg

SEQ ID NO: 346655 - DNA, 25 bp, Homo sapien
gtgccgctctccattgcagccccac

SEQ ID NO: 346656 - DNA, 25 bp, Homo sapien
ggtgccgctctccattgcagcccca

SEQ ID NO: 346657 - DNA, 25 bp, Homo sapien
caggatctcctcacgagaggcgcgg

SEQ ID NO: 346658 - DNA, 25 bp, Homo sapien
ctcctcacgagaggcgcgggtgtca

SEQ ID NO: 346659 - DNA, 25 bp, Homo sapien
gtgtcatccagctcgcgcatgcagt

SEQ ID NO: 346660 - DNA, 25 bp, Homo sapien
cagcttcttctcgttctctttggcc

SEQ ID NO: 346661 - DNA, 25 bp, Homo sapien
gcttcttccgggcggccactgccat

SEQ ID NO: 346662 - DNA, 25 bp, Homo sapien
ccgagtcgatgtgcgcctccaggtc

SEQ ID NO: 346663 - DNA, 25 bp, Homo sapien
ttggccgagtcgatgtgcgcctcca

SEQ ID NO: 346664 - DNA, 25 bp, Homo sapien
tgtttgatggcttcgtcccggttct

SEQ ID NO: 346665 - DNA, 25 bp, Homo sapien
ccagctctgcctccatctcccgcac

SEQ ID NO: 346666 - DNA, 25 bp, Homo sapien
ttcctctcgtcctccagctctgcct

SEQ ID NO: 346667 - DNA, 25 bp, Homo sapien
tcctctcgtcctccagctctgcctc

SEQ ID NO: 346668 - DNA, 25 bp, Homo sapien
cctccagctctgcctccatctcccg

SEQ ID NO: 346669 - DNA, 25 bp, Homo sapien
caaccgcagcttggcatcttcggtg

SEQ ID NO: 346670 - DNA, 25 bp, Homo sapien
atcttcggtggcctgcagctcgtcc

SEQ ID NO: 346671 - DNA, 25 bp, Homo sapien
ggtcccgctcgaactgggccttcat

SEQ ID NO: 346672 - DNA, 25 bp, Homo sapien
catggcctgcaggttgacctccaac

SEQ ID NO: 346673 - DNA, 25 bp, Homo sapien
cggtcgcgctcctctgcatacttgg

SEQ ID NO: 346674 - DNA, 25 bp, Homo sapien
catccttggagctcataaggtcctc

SEQ ID NO: 346675 - DNA, 25 bp, Homo sapien
agccttggtctccttctctcgggcc

SEQ ID NO: 346676 - DNA, 25 bp, Homo sapien
atctccgtgcggaactgcttgttga

SEQ ID NO: 346677 - DNA, 25 bp, Homo sapien
tctccaggttgcacgcgctctggcg

SEQ ID NO: 346678 - DNA, 25 bp, Homo sapien
tgcacgcgctctggcgctggtggtc

SEQ ID NO: 346679 - DNA, 25 bp, Homo sapien
tcttctccaggttgcacgcgctctg

SEQ ID NO: 346680 - DNA, 25 bp, Homo sapien
ttgcacgcgctctggcgctggtggt

SEQ ID NO: 346681 - DNA, 25 bp, Homo sapien
tctccagcttgtcgtaggcggccac

SEQ ID NO: 346682 - DNA, 25 bp, Homo sapien
cttctccagcttgtcgtaggcggcc

SEQ ID NO: 346683 - DNA, 25 bp, Homo sapien
ccttctcctcgtgccgctggctcag

SEQ ID NO: 346684 - DNA, 25 bp, Homo sapien
cagcttgtcgtaggcggccaccttc

SEQ ID NO: 346685 - DNA, 25 bp, Homo sapien
ctgggacccatgaggccaaggagct

SEQ ID NO: 346686 - DNA, 25 bp, Homo sapien
catcagataacaaacagcgcaggcc

SEQ ID NO: 346687 - DNA, 25 bp, Homo sapien
gcttgctgcctacatccataatgga

SEQ ID NO: 346688 - DNA, 25 bp, Homo sapien
tacagatgatgacggcacagggact

SEQ ID NO: 346689 - DNA, 25 bp, Homo sapien
gcacggttggcttcccagggggaga

SEQ ID NO: 346690 - DNA, 25 bp, Homo sapien
agcacggttggcttcccagggggag

SEQ ID NO: 346691 - DNA, 25 bp, Homo sapien
gtgggagagcacggttggcttccca

SEQ ID NO: 346692 - DNA, 25 bp, Homo sapien
ggagagcacggttggcttcccaggg

SEQ ID NO: 346693 - DNA, 25 bp, Homo sapien
agctgctcccggaaggaattcttct

SEQ ID NO: 346694 - DNA, 25 bp, Homo sapien
cggaaggaattcttctcgtcctcca

SEQ ID NO: 346695 - DNA, 25 bp, Homo sapien
tgggcatggagggtggcgatctgct

SEQ ID NO: 346696 - DNA, 25 bp, Homo sapien
tggagggtggcgatctgcttctcca

SEQ ID NO: 346697 - DNA, 25 bp, Homo sapien
tggacttgctgtcggactggctgag

SEQ ID NO: 346698 - DNA, 25 bp, Homo sapien
tgctgtcggactggctgagaagccc

SEQ ID NO: 346699 - DNA, 25 bp, Homo sapien
ctgagaagcccggtcacgttgtcca

SEQ ID NO: 346700 - DNA, 25 bp, Homo sapien
agaagcccggtcacgttgtccagct

SEQ ID NO: 346701 - DNA, 25 bp, Homo sapien
cggggagacacaaaggaccatggac

SEQ ID NO: 346702 - DNA, 25 bp, Homo sapien
tcctgccccacctcatctcctttag

SEQ ID NO: 346703 - DNA, 25 bp, Homo sapien
agacacaaaggaccatggacccacc

SEQ ID NO: 346704 - DNA, 25 bp, Homo sapien
gcaccgggcggggagacacaaagga

SEQ ID NO: 346705 - DNA, 25 bp, Homo sapien
tgcgcttgtgctccgagtccccttt

SEQ ID NO: 346706 - DNA, 25 bp, Homo sapien
accttgtcggccagctctgtgcgca

SEQ ID NO: 346707 - DNA, 25 bp, Homo sapien
cagagtctgctttgccttctcgagg

SEQ ID NO: 346708 - DNA, 25 bp, Homo sapien
agcaccttcacctcgttggccagct

SEQ ID NO: 346709 - DNA, 25 bp, Homo sapien
ccgcttcgtctgctccagctgctcc

SEQ ID NO: 346710 - DNA, 25 bp, Homo sapien
agctgctccgccagctcctccacgg

SEQ ID NO: 346711 - DNA, 25 bp, Homo sapien
tccagctgctccgccagctcctcca

SEQ ID NO: 346712 - DNA, 25 bp, Homo sapien
cgcttcgtctgctccagctgctccg

SEQ ID NO: 346713 - DNA, 25 bp, Homo sapien
gttcacctcctgctcacgttttgac

SEQ ID NO: 346714 - DNA, 25 bp, Homo sapien
ttcctggaagcacgctcagactcca

SEQ ID NO: 346715 - DNA, 25 bp, Homo sapien
tattcctggaagcacgctcagactc

SEQ ID NO: 346716 - DNA, 25 bp, Homo sapien
agctgtggaatccagcgtgtcctcc

SEQ ID NO: 346717 - DNA, 25 bp, Homo sapien
cgatctggtcgctgaggtctgtgga

SEQ ID NO: 346718 - DNA, 25 bp, Homo sapien
ctcggcgatctggtcgctgaggtct

SEQ ID NO: 346719 - DNA, 25 bp, Homo sapien
ggagctcggcgatctggtcgctgag

SEQ ID NO: 346720 - DNA, 25 bp, Homo sapien
cctccagcttccggcgggtcttctc

SEQ ID NO: 346721 - DNA, 25 bp, Homo sapien
gttggaatcgcacggtcagggctct

SEQ ID NO: 346722 - DNA, 25 bp, Homo sapien
tgtgaggcgccaatgagttactatc

SEQ ID NO: 346723 - DNA, 25 bp, Homo sapien
tgatcttgagatgtagcccgtgaag

SEQ ID NO: 346724 - DNA, 25 bp, Homo sapien
caggtcaccggcatgctaagtttca

SEQ ID NO: 346725 - DNA, 25 bp, Homo sapien
tgaacttccgcagtattcgtctagg

SEQ ID NO: 346726 - DNA, 25 bp, Homo sapien
tcccctgggtatgagctcagagttc

SEQ ID NO: 346727 - DNA, 25 bp, Homo sapien
cagccagtgctgtagtgtgacccag

SEQ ID NO: 346728 - DNA, 25 bp, Homo sapien
ggcatctagccacagagcaacaggg

SEQ ID NO: 346729 - DNA, 25 bp, Homo sapien
cttgagcttggcgaggctcttagat

SEQ ID NO: 346730 - DNA, 25 bp, Homo sapien
tgagcttggcgaggctcttagattt

SEQ ID NO: 346731 - DNA, 25 bp, Homo sapien
cttccaagtcagtgatcattgcctc

SEQ ID NO: 346732 - DNA, 25 bp, Homo sapien
caagtcagtgatcattgcctcatgc

SEQ ID NO: 346733 - DNA, 25 bp, Homo sapien
ggccagcttgcagttctggtcctcc

SEQ ID NO: 346734 - DNA, 25 bp, Homo sapien
cttggccagcttgcagttctggtcc

SEQ ID NO: 346735 - DNA, 25 bp, Homo sapien
gccagcttgcagttctggtcctcca

SEQ ID NO: 346736 - DNA, 25 bp, Homo sapien
tggccagcttgcagttctggtcctc

SEQ ID NO: 346737 - DNA, 25 bp, Homo sapien
tttcagcttcgcctcggtggtcacc

SEQ ID NO: 346738 - DNA, 25 bp, Homo sapien
agcttcgcctcggtggtcaccttct

SEQ ID NO: 346739 - DNA, 25 bp, Homo sapien
ctttttcagcttcgcctcggtggtc

SEQ ID NO: 346740 - DNA, 25 bp, Homo sapien
agctttttcagcttcgcctcggtgg

SEQ ID NO: 346741 - DNA, 25 bp, Homo sapien
cctccccgggtgcagcgggcaggaa

SEQ ID NO: 346742 - DNA, 25 bp, Homo sapien
ctccccgggtgcagcgggcaggaac

SEQ ID NO: 346743 - DNA, 25 bp, Homo sapien
ccctccccgggtgcagcgggcagga

SEQ ID NO: 346744 - DNA, 25 bp, Homo sapien
tcggcacacagctcggtttctgcct

SEQ ID NO: 346745 - DNA, 25 bp, Homo sapien
ccctggcctctaggtcatggcagat

SEQ ID NO: 346746 - DNA, 25 bp, Homo sapien
tcttcttcttctccgcctgcaggtg

SEQ ID NO: 346747 - DNA, 25 bp, Homo sapien
ttcctgcttcttggcggtcaggcgg

SEQ ID NO: 346748 - DNA, 25 bp, Homo sapien
actgcagcgtctccatctccgtgag

SEQ ID NO: 346749 - DNA, 25 bp, Homo sapien
ctgagactgcagcgtctccatctcc

SEQ ID NO: 346750 - DNA, 25 bp, Homo sapien
tgagactgcagcgtctccatctccg

SEQ ID NO: 346751 - DNA, 25 bp, Homo sapien
agactgcagcgtctccatctccgtg

SEQ ID NO: 346752 - DNA, 25 bp, Homo sapien
ctcaggaggcccttctagcacgcac

SEQ ID NO: 346753 - DNA, 25 bp, Homo sapien
agcgcagttccgctggaggaccttc

SEQ ID NO: 346754 - DNA, 25 bp, Homo sapien
ggtaggcagcgcagttccgctggag

SEQ ID NO: 346755 - DNA, 25 bp, Homo sapien
cgctggaggaccttcatggcggtaa

SEQ ID NO: 346756 - DNA, 25 bp, Homo sapien
gaggaccttcatggcggtaagctgc

SEQ ID NO: 346757 - DNA, 25 bp, Homo sapien
cacaagggtcacacggtaaggagtc

SEQ ID NO: 346758 - DNA, 25 bp, Homo sapien
ggaatcacagggttctttagggaca

SEQ ID NO: 346759 - DNA, 25 bp, Homo sapien
gtctggactcgaggatggcctgctc

SEQ ID NO: 346760 - DNA, 25 bp, Homo sapien
agggagtcaaagatgagtctggact

SEQ ID NO: 346761 - DNA, 25 bp, Homo sapien
cacaccggcacggaagaagactttg

SEQ ID NO: 346762 - DNA, 25 bp, Homo sapien
tgctgtcgagctccagggcttttat

SEQ ID NO: 346763 - DNA, 25 bp, Homo sapien
gcctggaaccctatgatgacgtcgg

SEQ ID NO: 346764 - DNA, 25 bp, Homo sapien
tggccaatgcggtacagattgctgt

SEQ ID NO: 346765 - DNA, 25 bp, Homo sapien
gtagcagctgctaacctggacacgc

SEQ ID NO: 346766 - DNA, 25 bp, Homo sapien
gctaacctggacacgccagaaacaa

SEQ ID NO: 346767 - DNA, 25 bp, Homo sapien
tggacacgccagaaacaacaggatg

SEQ ID NO: 346768 - DNA, 25 bp, Homo sapien
aaggtagcagctgctaacctggaca

SEQ ID NO: 346769 - DNA, 25 bp, Homo sapien
cactgatatagcaaggtgggccctg

SEQ ID NO: 346770 - DNA, 25 bp, Homo sapien
ccggcagagtcagacgcggagcatc

SEQ ID NO: 346771 - DNA, 25 bp, Homo sapien
gcccggccatggctacagttcttgt

SEQ ID NO: 346772 - DNA, 25 bp, Homo sapien
catccctggctatctgaggcctagg

SEQ ID NO: 346773 - DNA, 25 bp, Homo sapien
tccatgaaacccttgggaatggagt

SEQ ID NO: 346774 - DNA, 25 bp, Homo sapien
catgagcacgcacgcctgcttcccg

SEQ ID NO: 346775 - DNA, 25 bp, Homo sapien
cccgtccatgaaacccttgggaatg

SEQ ID NO: 346776 - DNA, 25 bp, Homo sapien
catgaaacccttgggaatggagttt

SEQ ID NO: 346777 - DNA, 25 bp, Homo sapien
gaggaaggaaagagaagcctggtca

SEQ ID NO: 346778 - DNA, 25 bp, Homo sapien
aaggaaagagaagcctggtcatttt

SEQ ID NO: 346779 - DNA, 25 bp, Homo sapien
ggaaggaaagagaagcctggtcatt

SEQ ID NO: 346780 - DNA, 25 bp, Homo sapien
ctgaggaaggaaagagaagcctggt

SEQ ID NO: 346781 - DNA, 25 bp, Homo sapien
ctgcatttcggtattaaaatgggga

SEQ ID NO: 346782 - DNA, 25 bp, Homo sapien
tgcatttcggtattaaaatggggaa

SEQ ID NO: 346783 - DNA, 25 bp, Homo sapien
tggcggcagatacggatgccctcga

SEQ ID NO: 346784 - DNA, 25 bp, Homo sapien
gagaacaccgttgcagcgcagctgg

SEQ ID NO: 346785 - DNA, 25 bp, Homo sapien
tctgccgaaactcctggaagaccac

SEQ ID NO: 346786 - DNA, 25 bp, Homo sapien
tccagcacgagatgcgggtccagct

SEQ ID NO: 346787 - DNA, 25 bp, Homo sapien
gggttcgtgttcctcagcgtagcca

SEQ ID NO: 346788 - DNA, 25 bp, Homo sapien
cacctggtccaggccgatgatgcgg

SEQ ID NO: 346789 - DNA, 25 bp, Homo sapien
gaacatgcccttccgcgtcttgaag

SEQ ID NO: 346790 - DNA, 25 bp, Homo sapien
agtgcggtctccgacatgccggcca

SEQ ID NO: 346791 - DNA, 25 bp, Homo sapien
gtggagaccacagagaacacgtgag

SEQ ID NO: 346792 - DNA, 25 bp, Homo sapien
gagaccacagagaacacgtgagtgc

SEQ ID NO: 346793 - DNA, 25 bp, Homo sapien
acagagaacacgtgagtgcccacac

SEQ ID NO: 346794 - DNA, 25 bp, Homo sapien
gaacacgtgagtgcccacacagttg

SEQ ID NO: 346795 - DNA, 25 bp, Homo sapien
ggagaataggaaagcgatgatagaa

SEQ ID NO: 346796 - DNA, 25 bp, Homo sapien
tggttctaggtggagaataggaaag

SEQ ID NO: 346797 - DNA, 25 bp, Homo sapien
taggaaagcgatgatagaaataggc

SEQ ID NO: 346798 - DNA, 25 bp, Homo sapien
gatgatagaaataggctctctgagt

SEQ ID NO: 346799 - DNA, 25 bp, Homo sapien
tgggaagatgaccagccgcagccaa

SEQ ID NO: 346800 - DNA, 25 bp, Homo sapien
tgaccagccgcagccaagaggaggc

SEQ ID NO: 346801 - DNA, 25 bp, Homo sapien
gatgaccagccgcagccaagaggag

SEQ ID NO: 346802 - DNA, 25 bp, Homo sapien
ggaagatgaccagccgcagccaaga

SEQ ID NO: 346803 - DNA, 25 bp, Homo sapien
tcatcagccactcgtcagctttgta

SEQ ID NO: 346804 - DNA, 25 bp, Homo sapien
gacaaacttgtcagaggactggtgg

SEQ ID NO: 346805 - DNA, 25 bp, Homo sapien
ttccacagctccgagacaaacttgt

SEQ ID NO: 346806 - DNA, 25 bp, Homo sapien
gccactcgtcagctttgtaatccac

SEQ ID NO: 346807 - DNA, 25 bp, Homo sapien
agtaatacagcatgacatcttcatt

SEQ ID NO: 346808 - DNA, 25 bp, Homo sapien
atcccagctacagggctgtaatctc

SEQ ID NO: 346809 - DNA, 25 bp, Homo sapien
gaacaatacccagagagcatcaggg

SEQ ID NO: 346810 - DNA, 25 bp, Homo sapien
caatacccagagagcatcagggacc

SEQ ID NO: 346811 - DNA, 25 bp, Homo sapien
taactctagtgggtagcagccaggg

SEQ ID NO: 346812 - DNA, 25 bp, Homo sapien
ttgtcacaactaaggacggtgctcc

SEQ ID NO: 346813 - DNA, 25 bp, Homo sapien
ctaaatagaagaggccggcacaggt

SEQ ID NO: 346814 - DNA, 25 bp, Homo sapien
tccttgtggcttgggaacagacctg

SEQ ID NO: 346815 - DNA, 25 bp, Homo sapien
gctgtcaccggccacattactgggt

SEQ ID NO: 346816 - DNA, 25 bp, Homo sapien
cagacaggcccaacgataatgcatg

SEQ ID NO: 346817 - DNA, 25 bp, Homo sapien
tcattgtgcaagaaccgtactcagg

SEQ ID NO: 346818 - DNA, 25 bp, Homo sapien
taatgcatgatgacaaccagcctgg

SEQ ID NO: 346819 - DNA, 25 bp, Homo sapien
accttctccacgaagctcttgtcgg

SEQ ID NO: 346820 - DNA, 25 bp, Homo sapien
tctccacgaagctcttgtcggtggc

SEQ ID NO: 346821 - DNA, 25 bp, Homo sapien
gccggcatagtggataatgcagaaa

SEQ ID NO: 346822 - DNA, 25 bp, Homo sapien
acgaagctcttgtcggtggctttgg

SEQ ID NO: 346823 - DNA, 25 bp, Homo sapien
tggcttctcaatgaggtcgatgcag

SEQ ID NO: 346824 - DNA, 25 bp, Homo sapien
actcgatgccctcgcgctggtactc

SEQ ID NO: 346825 - DNA, 25 bp, Homo sapien
cctgctccaggatgaacatggtgtg

SEQ ID NO: 346826 - DNA, 25 bp, Homo sapien
gaggccaaagtcgatgaagttccac

SEQ ID NO: 346827 - DNA, 25 bp, Homo sapien
tgcacagctgctcaaacgagttcag

SEQ ID NO: 346828 - DNA, 25 bp, Homo sapien
tgggaccccaggcacacactatggt

SEQ ID NO: 346829 - DNA, 25 bp, Homo sapien
cactatggtacatggctaatattgg

SEQ ID NO: 346830 - DNA, 25 bp, Homo sapien
aggcacacactatggtacatggcta

SEQ ID NO: 346831 - DNA, 25 bp, Homo sapien
tgcaccaggcccttctattttttta

SEQ ID NO: 346832 - DNA, 25 bp, Homo sapien
tcatgcaaaggagatggccaactca

SEQ ID NO: 346833 - DNA, 25 bp, Homo sapien
gtcttcatgcaaaggagatggccaa

SEQ ID NO: 346834 - DNA, 25 bp, Homo sapien
aaaggagatggccaactcagatcga

SEQ ID NO: 346835 - DNA, 25 bp, Homo sapien
gatggccaactcagatcgatgcagg

SEQ ID NO: 346836 - DNA, 25 bp, Homo sapien
tccagagccttgttgatgcgcagca

SEQ ID NO: 346837 - DNA, 25 bp, Homo sapien
tctcgaagccggcaatgtccaggat

SEQ ID NO: 346838 - DNA, 25 bp, Homo sapien
tccaggatcccgatgaaggaggcgc

SEQ ID NO: 346839 - DNA, 25 bp, Homo sapien
ggaacatccgctcataggtcgcctt

SEQ ID NO: 346840 - DNA, 25 bp, Homo sapien
caatgatattcatcactgggaattg

SEQ ID NO: 346841 - DNA, 25 bp, Homo sapien
tttaagtcttgtaggaaagagctgc

SEQ ID NO: 346842 - DNA, 25 bp, Homo sapien
tgcccaatgatattcatcactggga

SEQ ID NO: 346843 - DNA, 25 bp, Homo sapien
ttttaagtcttgtaggaaagagctg

SEQ ID NO: 346844 - DNA, 25 bp, Homo sapien
gacgtaatcccgtcccaccttgatg

SEQ ID NO: 346845 - DNA, 25 bp, Homo sapien
tgctctttagtctgcgccttctgga

SEQ ID NO: 346846 - DNA, 25 bp, Homo sapien
tacccaagagatgggacaccttttg

SEQ ID NO: 346847 - DNA, 25 bp, Homo sapien
aatcggtcacattgatacccaagag

SEQ ID NO: 346848 - DNA, 25 bp, Homo sapien
gatgttgccgagctgaagaacccct

SEQ ID NO: 346849 - DNA, 25 bp, Homo sapien
agtgttccgctccttcttgaagacg

SEQ ID NO: 346850 - DNA, 25 bp, Homo sapien
gaacccctgagatgacccgcagcag

SEQ ID NO: 346851 - DNA, 25 bp, Homo sapien
catggacgcctggtcagtgttccgc

SEQ ID NO: 346852 - DNA, 25 bp, Homo sapien
cgaccataggagggccagccctgta

SEQ ID NO: 346853 - DNA, 25 bp, Homo sapien
gaccataggagggccagccctgtac

SEQ ID NO: 346854 - DNA, 25 bp, Homo sapien
tcgaccataggagggccagccctgt

SEQ ID NO: 346855 - DNA, 25 bp, Homo sapien
tgacgtgtccattggacaggaagcg

SEQ ID NO: 346856 - DNA, 25 bp, Homo sapien
tgggatgcccataatcctcatggcc

SEQ ID NO: 346857 - DNA, 25 bp, Homo sapien
ttgtacggctccaacaggagatcgg

SEQ ID NO: 346858 - DNA, 25 bp, Homo sapien
caggaagcggtatttgttgtacggc

SEQ ID NO: 346859 - DNA, 25 bp, Homo sapien
gttcttccttggcttggcggatagc

SEQ ID NO: 346860 - DNA, 25 bp, Homo sapien
gccccagacaggagataatagaaga

SEQ ID NO: 346861 - DNA, 25 bp, Homo sapien
cttggcttggcggatagcacgagat

SEQ ID NO: 346862 - DNA, 25 bp, Homo sapien
cggatagcacgagatttctccaaaa

SEQ ID NO: 346863 - DNA, 25 bp, Homo sapien
ttgcaaatattaaggagcaacacaa

SEQ ID NO: 346864 - DNA, 25 bp, Homo sapien
tgcaaatattaaggagcaacacaag

SEQ ID NO: 346865 - DNA, 25 bp, Homo sapien
tttgcaaatattaaggagcaacaca

SEQ ID NO: 346866 - DNA, 25 bp, Homo sapien
ctttgcaaatattaaggagcaacac

SEQ ID NO: 346867 - DNA, 25 bp, Homo sapien
tccaacaatgtagccattgacatca

SEQ ID NO: 346868 - DNA, 25 bp, Homo sapien
tgttggctccaacaatgtagccatt

SEQ ID NO: 346869 - DNA, 25 bp, Homo sapien
ggctccaacaatgtagccattgaca

SEQ ID NO: 346870 - DNA, 25 bp, Homo sapien
tcaatgttggctccaacaatgtagc

SEQ ID NO: 346871 - DNA, 25 bp, Homo sapien
tgcccctgacatggggagctagaga

SEQ ID NO: 346872 - DNA, 25 bp, Homo sapien
cctgacatggggagctagagagcac

SEQ ID NO: 346873 - DNA, 25 bp, Homo sapien
ctaagtaagaaaggatagcaagaga

SEQ ID NO: 346874 - DNA, 25 bp, Homo sapien
taagaaaggatagcaagagatcaga

SEQ ID NO: 346875 - DNA, 25 bp, Homo sapien
tcttcacggtcttggcgttcccgaa

SEQ ID NO: 346876 - DNA, 25 bp, Homo sapien
ggcgttcccgaaggcctccaggatg

SEQ ID NO: 346877 - DNA, 25 bp, Homo sapien
tcattcttcacggtcttggcgttcc

SEQ ID NO: 346878 - DNA, 25 bp, Homo sapien
gttgtcattcttcacggtcttggcg

SEQ ID NO: 346879 - DNA, 25 bp, Homo sapien
gcaaggaacccagggacgcagtgaa

SEQ ID NO: 346880 - DNA, 25 bp, Homo sapien
ctgcaaggaacccagggacgcagtg

SEQ ID NO: 346881 - DNA, 25 bp, Homo sapien
ccagggacgcagtgaaggccgggca

SEQ ID NO: 346882 - DNA, 25 bp, Homo sapien
ggacgcagtgaaggccgggcagcga

SEQ ID NO: 346883 - DNA, 25 bp, Homo sapien
agggagagtcaaaggtcaccgttca

SEQ ID NO: 346884 - DNA, 25 bp, Homo sapien
tacacaaataacagagcagggagag

SEQ ID NO: 346885 - DNA, 25 bp, Homo sapien
gcttcactgggtggtgtttctgcca

SEQ ID NO: 346886 - DNA, 25 bp, Homo sapien
tcaccgttcaggatccgggcatctg

SEQ ID NO: 346887 - DNA, 25 bp, Homo sapien
agagagcgctggctcccaaaccaat

SEQ ID NO: 346888 - DNA, 25 bp, Homo sapien
tcaactcggtcactgcaagtgagag

SEQ ID NO: 346889 - DNA, 25 bp, Homo sapien
caaaccaattcaagggtgttctgtg

SEQ ID NO: 346890 - DNA, 25 bp, Homo sapien
ggtctggaacaacccctctgctggt

SEQ ID NO: 346891 - DNA, 25 bp, Homo sapien
taaatataactcctgacgccccatg

SEQ ID NO: 346892 - DNA, 25 bp, Homo sapien
caggaaccccagatgtaaggcatat

SEQ ID NO: 346893 - DNA, 25 bp, Homo sapien
cagaagactgtactcattaggccat

SEQ ID NO: 346894 - DNA, 25 bp, Homo sapien
caaacgtcttgagaagcttggcaca

SEQ ID NO: 346895 - DNA, 25 bp, Homo sapien
ttctgactggcacggcggtggcagg

SEQ ID NO: 346896 - DNA, 25 bp, Homo sapien
accacagagcgtggagggctccgtg

SEQ ID NO: 346897 - DNA, 25 bp, Homo sapien
catgggacatgacagctatggtgcg

SEQ ID NO: 346898 - DNA, 25 bp, Homo sapien
ggctccgtgagagcggagtccccat

SEQ ID NO: 346899 - DNA, 25 bp, Homo sapien
gtacgccagatactggatgaccttc

SEQ ID NO: 346900 - DNA, 25 bp, Homo sapien
aggacgccacgtacgccagatactg

SEQ ID NO: 346901 - DNA, 25 bp, Homo sapien
gccacgtacgccagatactggatga

SEQ ID NO: 346902 - DNA, 25 bp, Homo sapien
cttgtgcgaggacgccacgtacgcc

SEQ ID NO: 346903 - DNA, 25 bp, Homo sapien
gtgcacaagatggattgatcttctc

SEQ ID NO: 346904 - DNA, 25 bp, Homo sapien
gcacaagatggattgatcttctcgg

SEQ ID NO: 346905 - DNA, 25 bp, Homo sapien
cacaagatggattgatcttctcggt

SEQ ID NO: 346906 - DNA, 25 bp, Homo sapien
tgcacaagatggattgatcttctcg

SEQ ID NO: 346907 - DNA, 25 bp, Homo sapien
tctcgcagtctaccctcacacctgg

SEQ ID NO: 346908 - DNA, 25 bp, Homo sapien
gggatctcgcagtctaccctcacac

SEQ ID NO: 346909 - DNA, 25 bp, Homo sapien
ctttgtggggatctcgcagtctacc

SEQ ID NO: 346910 - DNA, 25 bp, Homo sapien
gtggggatctcgcagtctaccctca

SEQ ID NO: 346911 - DNA, 25 bp, Homo sapien
agtcgtgagcagccaacggcccaat

SEQ ID NO: 346912 - DNA, 25 bp, Homo sapien
tgcgagtgctggcaagtcgtgagca

SEQ ID NO: 346913 - DNA, 25 bp, Homo sapien
ccaacggcccaatgctaccataaaa

SEQ ID NO: 346914 - DNA, 25 bp, Homo sapien
gagtgctggcaagtcgtgagcagcc

SEQ ID NO: 346915 - DNA, 25 bp, Homo sapien
ccggatgcaccacgaatcgtaccat

SEQ ID NO: 346916 - DNA, 25 bp, Homo sapien
tatcctaaatccaccggccggatgc

SEQ ID NO: 346917 - DNA, 25 bp, Homo sapien
accggccggatgcaccacgaatcgt

SEQ ID NO: 346918 - DNA, 25 bp, Homo sapien
agtatcctaaatccaccggccggat

SEQ ID NO: 346919 - DNA, 25 bp, Homo sapien
ctggcaccgccacgagaaagtcttt

SEQ ID NO: 346920 - DNA, 25 bp, Homo sapien
gatttcattttcaaccgaaaatgtc

SEQ ID NO: 346921 - DNA, 25 bp, Homo sapien
ttacaaattcaggaaccaggccatt

SEQ ID NO: 346922 - DNA, 25 bp, Homo sapien
tgtctcggagctcccaactgagcaa

SEQ ID NO: 346923 - DNA, 25 bp, Homo sapien
aaaaccacatacgagtgctgaccac

SEQ ID NO: 346924 - DNA, 25 bp, Homo sapien
caaggcagctccaacaggtttgtca

SEQ ID NO: 346925 - DNA, 25 bp, Homo sapien
ggcactgctcatgacaaactcagct

SEQ ID NO: 346926 - DNA, 25 bp, Homo sapien
aagacagcaaccagctttgtgaaac

SEQ ID NO: 346927 - DNA, 25 bp, Homo sapien
gcaccatttcctaggcgaggcagac

SEQ ID NO: 346928 - DNA, 25 bp, Homo sapien
gtctggcccgggatccagaagcacc

SEQ ID NO: 346929 - DNA, 25 bp, Homo sapien
tgaactttacagcagaccattgtgc

SEQ ID NO: 346930 - DNA, 25 bp, Homo sapien
gcagaccttttgcagaccacagctg

SEQ ID NO: 346931 - DNA, 25 bp, Homo sapien
gagtgagaatccctggcttagtctg

SEQ ID NO: 346932 - DNA, 25 bp, Homo sapien
ctagtgccaagagtgagaatccctg

SEQ ID NO: 346933 - DNA, 25 bp, Homo sapien
gaatccctggcttagtctgacaata

SEQ ID NO: 346934 - DNA, 25 bp, Homo sapien
tctgacaataggtgagtgacatata

SEQ ID NO: 346935 - DNA, 25 bp, Homo sapien
taaatcaggactgtacaggcaaacc

SEQ ID NO: 346936 - DNA, 25 bp, Homo sapien
tccggctgtgccttttaagatgtaa

SEQ ID NO: 346937 - DNA, 25 bp, Homo sapien
tagtatgtcataaggcacagccagc

SEQ ID NO: 346938 - DNA, 25 bp, Homo sapien
tgaaccagcttgtcataacatggac

SEQ ID NO: 346939 - DNA, 25 bp, Homo sapien
gaaaatagcctagagacgtccttcg

SEQ ID NO: 346940 - DNA, 25 bp, Homo sapien
gtcaatgtgggagctcaagagctgc

SEQ ID NO: 346941 - DNA, 25 bp, Homo sapien
tgagggttagaaaacacatggaccc

SEQ ID NO: 346942 - DNA, 25 bp, Homo sapien
gacgtccttcgtcagtcaatgtggg

SEQ ID NO: 346943 - DNA, 25 bp, Homo sapien
cagatctcaagatgactccggagta

SEQ ID NO: 346944 - DNA, 25 bp, Homo sapien
gaaggagtcccacaggttaactgaa

SEQ ID NO: 346945 - DNA, 25 bp, Homo sapien
ccaattaagagagctgggagcaaac

SEQ ID NO: 346946 - DNA, 25 bp, Homo sapien
catacaagataggagaacacggccc

SEQ ID NO: 346947 - DNA, 25 bp, Homo sapien
ctgcagtcaaataaagcactaccag

SEQ ID NO: 346948 - DNA, 25 bp, Homo sapien
gaaaaagaaacgtgtaaacactgca

SEQ ID NO: 346949 - DNA, 25 bp, Homo sapien
gaaacgtgtaaacactgcagtcaaa

SEQ ID NO: 346950 - DNA, 25 bp, Homo sapien
agtcaaataaagcactaccagggct

SEQ ID NO: 346951 - DNA, 25 bp, Homo sapien
aacacacaggtcatacataggtgac

SEQ ID NO: 346952 - DNA, 25 bp, Homo sapien
tataaacatgtcctctggatagcca

SEQ ID NO: 346953 - DNA, 25 bp, Homo sapien
taggaactcctgagagccgtggact

SEQ ID NO: 346954 - DNA, 25 bp, Homo sapien
ctcgaacgtgtttctagactgtggg

SEQ ID NO: 346955 - DNA, 25 bp, Homo sapien
gcactgcccatcaccagccactaga

SEQ ID NO: 346956 - DNA, 25 bp, Homo sapien
tcaatgtggcaccaaatgtgactta

SEQ ID NO: 346957 - DNA, 25 bp, Homo sapien
tgtggcaccaaatgtgacttagcac

SEQ ID NO: 346958 - DNA, 25 bp, Homo sapien
caatgtggcaccaaatgtgacttag

SEQ ID NO: 346959 - DNA, 25 bp, Homo sapien
aatgtggcaccaaatgtgacttagc

SEQ ID NO: 346960 - DNA, 25 bp, Homo sapien
aggccccaggtgaagattcagcccc

SEQ ID NO: 346961 - DNA, 25 bp, Homo sapien
gaggccccaggtgaagattcagccc

SEQ ID NO: 346962 - DNA, 25 bp, Homo sapien
taggcggtgtctgtgatggcataga

SEQ ID NO: 346963 - DNA, 25 bp, Homo sapien
catcatactcctgtaggcggtgtct

SEQ ID NO: 346964 - DNA, 25 bp, Homo sapien
cttgcatcatactcctgtaggcggt

SEQ ID NO: 346965 - DNA, 25 bp, Homo sapien
catactcctgtaggcggtgtctgtg

SEQ ID NO: 346966 - DNA, 25 bp, Homo sapien
agtagatgggcaggttcttgtaagg

SEQ ID NO: 346967 - DNA, 25 bp, Homo sapien
gtagatgggcaggttcttgtaagga

SEQ ID NO: 346968 - DNA, 25 bp, Homo sapien
tagatgggcaggttcttgtaaggat

SEQ ID NO: 346969 - DNA, 25 bp, Homo sapien
aaaagagcggcagataggaacaggt

SEQ ID NO: 346970 - DNA, 25 bp, Homo sapien
tgcaggtgtgaagcaccggcatcct

SEQ ID NO: 346971 - DNA, 25 bp, Homo sapien
aatatctgcggcttcaaaggacccc

SEQ ID NO: 346972 - DNA, 25 bp, Homo sapien
tgccctgtaagtgaagatcctccct

SEQ ID NO: 346973 - DNA, 25 bp, Homo sapien
tcttcaagcaactggagtgacccaa

SEQ ID NO: 346974 - DNA, 25 bp, Homo sapien
gagcagactcgggtctccaatgcca

SEQ ID NO: 346975 - DNA, 25 bp, Homo sapien
tccttggtcacggaggccagttctc

SEQ ID NO: 346976 - DNA, 25 bp, Homo sapien
aaaagattcctaaaagctgcgcaag

SEQ ID NO: 346977 - DNA, 25 bp, Homo sapien
gattcactggatgctcgtggaggca

SEQ ID NO: 346978 - DNA, 25 bp, Homo sapien
tggtctacgggagctcaaagttctc

SEQ ID NO: 346979 - DNA, 25 bp, Homo sapien
taatcccgtcaaagcagtgatgatg

SEQ ID NO: 346980 - DNA, 25 bp, Homo sapien
tgatgatggagctaagccctgcgga

SEQ ID NO: 346981 - DNA, 25 bp, Homo sapien
gcccagcctatagtaacctcttcat

SEQ ID NO: 346982 - DNA, 25 bp, Homo sapien
ctcggagccctcagacccagcctgc

SEQ ID NO: 346983 - DNA, 25 bp, Homo sapien
cggagccctcagacccagcctgcgg

SEQ ID NO: 346984 - DNA, 25 bp, Homo sapien
tgcggggtgccacggcagccactta

SEQ ID NO: 346985 - DNA, 25 bp, Homo sapien
agcctgcggggtgccacggcagcca

SEQ ID NO: 346986 - DNA, 25 bp, Homo sapien
tcggaaggcacccataccagcttct

SEQ ID NO: 346987 - DNA, 25 bp, Homo sapien
tacttatcggcagcttgctgtgcca

SEQ ID NO: 346988 - DNA, 25 bp, Homo sapien
tcaaagccactcttgtcggaaggca

SEQ ID NO: 346989 - DNA, 25 bp, Homo sapien
gccctgagtagtaacgctccttgag

SEQ ID NO: 346990 - DNA, 25 bp, Homo sapien
aaagggctgaatcgacatgcactgc

SEQ ID NO: 346991 - DNA, 25 bp, Homo sapien
ggccgtagtgtaccaccaccttgag

SEQ ID NO: 346992 - DNA, 25 bp, Homo sapien
ttgagatacattcccaggagtggag

SEQ ID NO: 346993 - DNA, 25 bp, Homo sapien
tgtgaaagcaaccaaccagcatcat

SEQ ID NO: 346994 - DNA, 25 bp, Homo sapien
tcagacaaggcacaaaacctagggt

SEQ ID NO: 346995 - DNA, 25 bp, Homo sapien
catttccactcccagacaacgaggg

SEQ ID NO: 346996 - DNA, 25 bp, Homo sapien
caacgagggctgatgtaaacctttc

SEQ ID NO: 346997 - DNA, 25 bp, Homo sapien
gaccaaggacctgctaggaagcgct

SEQ ID NO: 346998 - DNA, 25 bp, Homo sapien
tgagaagtgaccaagcaatcccagg

SEQ ID NO: 346999 - DNA, 25 bp, Homo sapien
gaatcaccgtcctacgacagtgaga

SEQ ID NO: 347000 - DNA, 25 bp, Homo sapien
cagatctcatgtggcatgtgtcaca

SEQ ID NO: 347001 - DNA, 25 bp, Homo sapien
gattaaatgacacgagagggacaag

SEQ ID NO: 347002 - DNA, 25 bp, Homo sapien
gacaaaataagctcccagagctggg

SEQ ID NO: 347003 - DNA, 25 bp, Homo sapien
tgacaaaataagctcccagagctgg

SEQ ID NO: 347004 - DNA, 25 bp, Homo sapien
agtgccactgtgatgacaaaataag

SEQ ID NO: 347005 - DNA, 25 bp, Homo sapien
gccactgtgatgacaaaataagctc

SEQ ID NO: 347006 - DNA, 25 bp, Homo sapien
ttacagccctggctgaacatgcagc

SEQ ID NO: 347007 - DNA, 25 bp, Homo sapien
agccctggctgaacatgcagctcag

SEQ ID NO: 347008 - DNA, 25 bp, Homo sapien
tacagccctggctgaacatgcagct

SEQ ID NO: 347009 - DNA, 25 bp, Homo sapien
tggtttgaaagtggccaaagctgtg

SEQ ID NO: 347010 - DNA, 25 bp, Homo sapien
ctggtttgaaagtggccaaagctgt

SEQ ID NO: 347011 - DNA, 25 bp, Homo sapien
ggtttgaaagtggccaaagctgtgg

SEQ ID NO: 347012 - DNA, 25 bp, Homo sapien
aggaaacagtgggcggcaggccggc

SEQ ID NO: 347013 - DNA, 25 bp, Homo sapien
ggaaacagtgggcggcaggccggct

SEQ ID NO: 347014 - DNA, 25 bp, Homo sapien
gcagaaggcgggctgagaacagcat

SEQ ID NO: 347015 - DNA, 25 bp, Homo sapien
tttacaatctcgaaggctgcctcct

SEQ ID NO: 347016 - DNA, 25 bp, Homo sapien
taaaggtgaagtcagtagccaaggc

SEQ ID NO: 347017 - DNA, 25 bp, Homo sapien
tgccaactgctgtacgggagatccc

SEQ ID NO: 347018 - DNA, 25 bp, Homo sapien
caaagctctgcctgcgtctgggcaa

SEQ ID NO: 347019 - DNA, 25 bp, Homo sapien
ttttaaaagcatcagcatggtacct

SEQ ID NO: 347020 - DNA, 25 bp, Homo sapien
ttttttaaaagcatcagcatggtac

SEQ ID NO: 347021 - DNA, 25 bp, Homo sapien
tttttaaaagcatcagcatggtacc

SEQ ID NO: 347022 - DNA, 25 bp, Homo sapien
tttaaaagcatcagcatggtaccta

SEQ ID NO: 347023 - DNA, 25 bp, Homo sapien
taacgagactgtgatgggacccaga

SEQ ID NO: 347024 - DNA, 25 bp, Homo sapien
ttaataacgagactgtgatgggacc

SEQ ID NO: 347025 - DNA, 25 bp, Homo sapien
tataattaataacgagactgtgatg

SEQ ID NO: 347026 - DNA, 25 bp, Homo sapien
taattaataacgagactgtgatggg

SEQ ID NO: 347027 - DNA, 25 bp, Homo sapien
tcacccgcagaggacagcgagttct

SEQ ID NO: 347028 - DNA, 25 bp, Homo sapien
tagattaagtcacccagactgtccc

SEQ ID NO: 347029 - DNA, 25 bp, Homo sapien
cacggagttacagcatagggacaga

SEQ ID NO: 347030 - DNA, 25 bp, Homo sapien
ttctccccgattctggcccagttag

SEQ ID NO: 347031 - DNA, 25 bp, Homo sapien
ccataaggatggtaagggcctctga

SEQ ID NO: 347032 - DNA, 25 bp, Homo sapien
tcaggaaaggagtcaatcgggcaca

SEQ ID NO: 347033 - DNA, 25 bp, Homo sapien
catctaagcacaagggacagggagc

SEQ ID NO: 347034 - DNA, 25 bp, Homo sapien
gaagctaatcgtgggaatgggaacc

SEQ ID NO: 347035 - DNA, 25 bp, Homo sapien
taaagatgtcaagctggtaagggct

SEQ ID NO: 347036 - DNA, 25 bp, Homo sapien
tcctacgagagagaagttgtcccat

SEQ ID NO: 347037 - DNA, 25 bp, Homo sapien
taacatgcgtccttcatcctacgag

SEQ ID NO: 347038 - DNA, 25 bp, Homo sapien
taccctaccaggctacacaacaatg

SEQ ID NO: 347039 - DNA, 25 bp, Homo sapien
ggtcagccttgcttagccttccgtg

SEQ ID NO: 347040 - DNA, 25 bp, Homo sapien
agaggactttctcgagcgctcgggc

SEQ ID NO: 347041 - DNA, 25 bp, Homo sapien
aggcgctgcttctcccgagaggact

SEQ ID NO: 347042 - DNA, 25 bp, Homo sapien
ccaggaaccgcggtgatctgcgcgc

SEQ ID NO: 347043 - DNA, 25 bp, Homo sapien
gaaaaactgggtgcgtagcccagag

SEQ ID NO: 347044 - DNA, 25 bp, Homo sapien
aggccctgcagcagatatgcagtcc

SEQ ID NO: 347045 - DNA, 25 bp, Homo sapien
gaaatgcagtctcagctggacatgg

SEQ ID NO: 347046 - DNA, 25 bp, Homo sapien
ctgcagcagatatgcagtcctggga

SEQ ID NO: 347047 - DNA, 25 bp, Homo sapien
gttctgataactgactgccatcggg

SEQ ID NO: 347048 - DNA, 25 bp, Homo sapien
tgataactgactgccatcgggccag

SEQ ID NO: 347049 - DNA, 25 bp, Homo sapien
ggaggtgtacaactttagtgacaca

SEQ ID NO: 347050 - DNA, 25 bp, Homo sapien
cagttaaggttagcagtggaggtgt

SEQ ID NO: 347051 - DNA, 25 bp, Homo sapien
gattagatgcgtttcccctgcgctg

SEQ ID NO: 347052 - DNA, 25 bp, Homo sapien
ccagggtcaggagttgaaagtacca

SEQ ID NO: 347053 - DNA, 25 bp, Homo sapien
tgagactcagaaacgcaaatgcggt

SEQ ID NO: 347054 - DNA, 25 bp, Homo sapien
tgactcaacagctgaccagggtcag

SEQ ID NO: 347055 - DNA, 25 bp, Homo sapien
ccctcaggctgctttgcaagttaaa

SEQ ID NO: 347056 - DNA, 25 bp, Homo sapien
ggatggtggcatccgaagccagcct

SEQ ID NO: 347057 - DNA, 25 bp, Homo sapien
ggattctgagccgtggatccaccct

SEQ ID NO: 347058 - DNA, 25 bp, Homo sapien
tacacaaagggaattggcccctcat

SEQ ID NO: 347059 - DNA, 25 bp, Homo sapien
gatgaagtctcgctccatcacccag

SEQ ID NO: 347060 - DNA, 25 bp, Homo sapien
gagatgaagtctcgctccatcaccc

SEQ ID NO: 347061 - DNA, 25 bp, Homo sapien
agatgaagtctcgctccatcaccca

SEQ ID NO: 347062 - DNA, 25 bp, Homo sapien
tcttttctaaaggtgaggtcagtgc

SEQ ID NO: 347063 - DNA, 25 bp, Homo sapien
tccgcatcgtggcataggtagattt

SEQ ID NO: 347064 - DNA, 25 bp, Homo sapien
gcccggtgggctgcgccgtcctgga

SEQ ID NO: 347065 - DNA, 25 bp, Homo sapien
ctcctggctcgtgggtgggtaatcc

SEQ ID NO: 347066 - DNA, 25 bp, Homo sapien
taatagggcgcttaccacgtaattg

SEQ ID NO: 347067 - DNA, 25 bp, Homo sapien
aaactaatacacattactaacacac

SEQ ID NO: 347068 - DNA, 25 bp, Homo sapien
ctgtgatattttgtgatggctggcc

SEQ ID NO: 347069 - DNA, 25 bp, Homo sapien
aacacacaataagagaagcgtttaa

SEQ ID NO: 347070 - DNA, 25 bp, Homo sapien
ccggtgtttcctgtttaagatgtgg

SEQ ID NO: 347071 - DNA, 25 bp, Homo sapien
agcccggtgtttcctgtttaagatg

SEQ ID NO: 347072 - DNA, 25 bp, Homo sapien
cccggtgtttcctgtttaagatgtg

SEQ ID NO: 347073 - DNA, 25 bp, Homo sapien
tgagccgtgacctcatttgcaggga

SEQ ID NO: 347074 - DNA, 25 bp, Homo sapien
gggactgtcatgagccccaacttgg

SEQ ID NO: 347075 - DNA, 25 bp, Homo sapien
ggaacttccaatcggtgccagcgtg

SEQ ID NO: 347076 - DNA, 25 bp, Homo sapien
tgccagcgtgcttccacctgctgag

SEQ ID NO: 347077 - DNA, 25 bp, Homo sapien
tttctgggccgttccctgcccagag

SEQ ID NO: 347078 - DNA, 25 bp, Homo sapien
ccatggacacggccccaacattgtt

SEQ ID NO: 347079 - DNA, 25 bp, Homo sapien
cattcgggatttccgcagcttggcc

SEQ ID NO: 347080 - DNA, 25 bp, Homo sapien
agcttggccagcactaccttcgctt

SEQ ID NO: 347081 - DNA, 25 bp, Homo sapien
cggggtgggggttgagctggccctg

SEQ ID NO: 347082 - DNA, 25 bp, Homo sapien
gtgggggttgagctggccctggccc

SEQ ID NO: 347083 - DNA, 25 bp, Homo sapien
ggtgggggttgagctggccctggcc

SEQ ID NO: 347084 - DNA, 25 bp, Homo sapien
gggtgggggttgagctggccctggc

SEQ ID NO: 347085 - DNA, 25 bp, Homo sapien
gcgtggaagtcaagcagccagccca

SEQ ID NO: 347086 - DNA, 25 bp, Homo sapien
ccagcccagcaaactcgagcttcca

SEQ ID NO: 347087 - DNA, 25 bp, Homo sapien
gggcacaagggagcgtggaagtcaa

SEQ ID NO: 347088 - DNA, 25 bp, Homo sapien
cagcccagcaaactcgagcttccac

SEQ ID NO: 347089 - DNA, 25 bp, Homo sapien
actgggtgtcaagaaaaaatataca

SEQ ID NO: 347090 - DNA, 25 bp, Homo sapien
tatacaggggccatatcccgggttg

SEQ ID NO: 347091 - DNA, 25 bp, Homo sapien
gccatatcccgggttgtcttcaggc

SEQ ID NO: 347092 - DNA, 25 bp, Homo sapien
tatcccgggttgtcttcaggctcgg

SEQ ID NO: 347093 - DNA, 25 bp, Homo sapien
catggggcccaatgtggcacccaga

SEQ ID NO: 347094 - DNA, 25 bp, Homo sapien
cggcatccccggtgaggtcagtgtc

SEQ ID NO: 347095 - DNA, 25 bp, Homo sapien
aggaggattccgtgagcacagccag

SEQ ID NO: 347096 - DNA, 25 bp, Homo sapien
cagagaatgaccgtgggctgacagc

SEQ ID NO: 347097 - DNA, 25 bp, Homo sapien
tgtggctgcctgactaggaacgctg

SEQ ID NO: 347098 - DNA, 25 bp, Homo sapien
caccttgagacttccggagtcgagg

SEQ ID NO: 347099 - DNA, 25 bp, Homo sapien
tgctcagaaaaccaacgggccagct

SEQ ID NO: 347100 - DNA, 25 bp, Homo sapien
cgagccaggcacgaggtttcagatt

SEQ ID NO: 347101 - DNA, 25 bp, Homo sapien
ttgatgcccacaaacttgtccacca

SEQ ID NO: 347102 - DNA, 25 bp, Homo sapien
ttcaggaaggcctccaactgatcct

SEQ ID NO: 347103 - DNA, 25 bp, Homo sapien
tcttcatggccagcacagtgggcac

SEQ ID NO: 347104 - DNA, 25 bp, Homo sapien
tgtccaccacgtccccattcttcat

SEQ ID NO: 347105 - DNA, 25 bp, Homo sapien
gacagttcgagtcctggctttgcac

SEQ ID NO: 347106 - DNA, 25 bp, Homo sapien
gaaaataacccttgcagctgcaggc

SEQ ID NO: 347107 - DNA, 25 bp, Homo sapien
agaaacgtcttccattgcgggctcc

SEQ ID NO: 347108 - DNA, 25 bp, Homo sapien
tggtggcttatccagggcactgact

SEQ ID NO: 347109 - DNA, 25 bp, Homo sapien
gagcctgggagactgaggcttcagt

SEQ ID NO: 347110 - DNA, 25 bp, Homo sapien
ttgagcctgggagactgaggcttca

SEQ ID NO: 347111 - DNA, 25 bp, Homo sapien
gcctgggagactgaggcttcagtga

SEQ ID NO: 347112 - DNA, 25 bp, Homo sapien
ctgtactcccatactcgggaggctg

SEQ ID NO: 347113 - DNA, 25 bp, Homo sapien
atttgagtataaagcagagctcagg

SEQ ID NO: 347114 - DNA, 25 bp, Homo sapien
aaagagaaagatttgagtataaagc

SEQ ID NO: 347115 - DNA, 25 bp, Homo sapien
aagatttgagtataaagcagagctc

SEQ ID NO: 347116 - DNA, 25 bp, Homo sapien
gagaaagatttgagtataaagcaga

SEQ ID NO: 347117 - DNA, 25 bp, Homo sapien
aaatgactgctcactgaacatgtgg

SEQ ID NO: 347118 - DNA, 25 bp, Homo sapien
cctgctagactaggagagatcttgc

SEQ ID NO: 347119 - DNA, 25 bp, Homo sapien
tggcacatcgagctcccaaatgact

SEQ ID NO: 347120 - DNA, 25 bp, Homo sapien
tctgagactaagtgaatgacctggt

SEQ ID NO: 347121 - DNA, 25 bp, Homo sapien
ccaggatcttgcagggtccacacca

SEQ ID NO: 347122 - DNA, 25 bp, Homo sapien
ctcatactcaatggcgaggtctgtg

SEQ ID NO: 347123 - DNA, 25 bp, Homo sapien
caggatcttgcagggtccacaccac

SEQ ID NO: 347124 - DNA, 25 bp, Homo sapien
cccaggatcttgcagggtccacacc

SEQ ID NO: 347125 - DNA, 25 bp, Homo sapien
ttgaccactcggtcttgaaagtcag

SEQ ID NO: 347126 - DNA, 25 bp, Homo sapien
taaaggttgtcaaggagatcctcgt

SEQ ID NO: 347127 - DNA, 25 bp, Homo sapien
cactggtgtctcactgttgaccact

SEQ ID NO: 347128 - DNA, 25 bp, Homo sapien
gatcctcgtggtgtatattgtccgg

SEQ ID NO: 347129 - DNA, 25 bp, Homo sapien
ctggaagtgaggggtggccactgac

SEQ ID NO: 347130 - DNA, 25 bp, Homo sapien
caggaacctcctcagaagaagtcgc

SEQ ID NO: 347131 - DNA, 25 bp, Homo sapien
cctcctcagaagaagtcgctgagcc

SEQ ID NO: 347132 - DNA, 25 bp, Homo sapien
tcctcagaagaagtcgctgagccat

SEQ ID NO: 347133 - DNA, 25 bp, Homo sapien
gaacctcctcagaagaagtcgctga

SEQ ID NO: 347134 - DNA, 25 bp, Homo sapien
aataatgtatgtaaggaccaagtac

SEQ ID NO: 347135 - DNA, 25 bp, Homo sapien
gcagagttggaagcaaaatgcaagg

SEQ ID NO: 347136 - DNA, 25 bp, Homo sapien
gcacacaaaaggaagtcgacacact

SEQ ID NO: 347137 - DNA, 25 bp, Homo sapien
acagctaggcaaaccagaaggacag

SEQ ID NO: 347138 - DNA, 25 bp, Homo sapien
tgcccacactgcgagtaagggaagg

SEQ ID NO: 347139 - DNA, 25 bp, Homo sapien
tcaagtaagttaagtgacatgccca

SEQ ID NO: 347140 - DNA, 25 bp, Homo sapien
taagggaaggaatacgaggctcaag

SEQ ID NO: 347141 - DNA, 25 bp, Homo sapien
ggaagttgctattgtactgcccaca

SEQ ID NO: 347142 - DNA, 25 bp, Homo sapien
cctggctctccggcgagctagatcc

SEQ ID NO: 347143 - DNA, 25 bp, Homo sapien
gcccggccgccagcctgcgcaggaa

SEQ ID NO: 347144 - DNA, 25 bp, Homo sapien
cgcccggccgccagcctgcgcagga

SEQ ID NO: 347145 - DNA, 25 bp, Homo sapien
ggcgagctagatccccccgcccgcc

SEQ ID NO: 347146 - DNA, 25 bp, Homo sapien
cctgcaatgcgagcggagggatgca

SEQ ID NO: 347147 - DNA, 25 bp, Homo sapien
aagggcacgcctgtcgtcacttcct

SEQ ID NO: 347148 - DNA, 25 bp, Homo sapien
tgcgagcggagggatgcacagccta

SEQ ID NO: 347149 - DNA, 25 bp, Homo sapien
gcctgtcaagggcacgcctgtcgtc

SEQ ID NO: 347150 - DNA, 25 bp, Homo sapien
ggcggaagagcgtccctctccaatt

SEQ ID NO: 347151 - DNA, 25 bp, Homo sapien
cgtcacttccgggtacaggcaggcg

SEQ ID NO: 347152 - DNA, 25 bp, Homo sapien
tcggcttctcagagggttgtgatta

SEQ ID NO: 347153 - DNA, 25 bp, Homo sapien
cctcggcttctcagagggttgtgat

SEQ ID NO: 347154 - DNA, 25 bp, Homo sapien
tctgaatttcacaggcggaccagtc

SEQ ID NO: 347155 - DNA, 25 bp, Homo sapien
tcatctgagcaatgggaagaatgcc

SEQ ID NO: 347156 - DNA, 25 bp, Homo sapien
tacaaaagggctctcagctacatgg

SEQ ID NO: 347157 - DNA, 25 bp, Homo sapien
tctggcttagtcacaagcaggctca

SEQ ID NO: 347158 - DNA, 25 bp, Homo sapien
aggatccttgagacctagaccagtg

SEQ ID NO: 347159 - DNA, 25 bp, Homo sapien
ctagaccagtgtattttctcatttg

SEQ ID NO: 347160 - DNA, 25 bp, Homo sapien
tagacaggaaagatggttacggacc

SEQ ID NO: 347161 - DNA, 25 bp, Homo sapien
caagagtgcgtctcatggatggtgc

SEQ ID NO: 347162 - DNA, 25 bp, Homo sapien
tacggaccaggtgactaaaggtgac

SEQ ID NO: 347163 - DNA, 25 bp, Homo sapien
tccctgacagaataaggctactgga

SEQ ID NO: 347164 - DNA, 25 bp, Homo sapien
tcttaagatgcggatgggtttcccc

SEQ ID NO: 347165 - DNA, 25 bp, Homo sapien
tgtgaagcactccacaggcgggatg

SEQ ID NO: 347166 - DNA, 25 bp, Homo sapien
tctttggcaatcacgcattggcggg

SEQ ID NO: 347167 - DNA, 25 bp, Homo sapien
tgtaagcaactgtacccagcgcatg

SEQ ID NO: 347168 - DNA, 25 bp, Homo sapien
gctgccaaaggctctcggtactcac

SEQ ID NO: 347169 - DNA, 25 bp, Homo sapien
tgttgctatcgacggactgagccag

SEQ ID NO: 347170 - DNA, 25 bp, Homo sapien
tagtggctcttggtcgccaagctgc

SEQ ID NO: 347171 - DNA, 25 bp, Homo sapien
gcatagtcccgcaggagcctgctct

SEQ ID NO: 347172 - DNA, 25 bp, Homo sapien
gcgcgtgagggcgaacaggaagcag

SEQ ID NO: 347173 - DNA, 25 bp, Homo sapien
gtggcaacttctggcgcgtgagggc

SEQ ID NO: 347174 - DNA, 25 bp, Homo sapien
cgtgagggcgaacaggaagcaggac

SEQ ID NO: 347175 - DNA, 25 bp, Homo sapien
aacttctggcgcgtgagggcgaaca

SEQ ID NO: 347176 - DNA, 25 bp, Homo sapien
ctgtgacctttcttcaacctggagc

SEQ ID NO: 347177 - DNA, 25 bp, Homo sapien
tttggatttccagatatgggtcctg

SEQ ID NO: 347178 - DNA, 25 bp, Homo sapien
tccacgggtcttgggtctctgtgac

SEQ ID NO: 347179 - DNA, 25 bp, Homo sapien
ctggagctcagaccctttgtctttc

SEQ ID NO: 347180 - DNA, 25 bp, Homo sapien
tgcatagaagcttcgcaaatcggtg

SEQ ID NO: 347181 - DNA, 25 bp, Homo sapien
tcggtgtccaaacagttctccagga

SEQ ID NO: 347182 - DNA, 25 bp, Homo sapien
tcttccacgatgtgatggatggccg

SEQ ID NO: 347183 - DNA, 25 bp, Homo sapien
ccagtctgttaagaagtcttccacg

SEQ ID NO: 347184 - DNA, 25 bp, Homo sapien
ggatgaagaaagttagactgccagg

SEQ ID NO: 347185 - DNA, 25 bp, Homo sapien
tcctccaggtactcaaaggccgtgg

SEQ ID NO: 347186 - DNA, 25 bp, Homo sapien
catcaaagaagacgtccttgtcggg

SEQ ID NO: 347187 - DNA, 25 bp, Homo sapien
gaagagcccgtgctttgccttcctc

SEQ ID NO: 347188 - DNA, 25 bp, Homo sapien
attcacgcgccgcacgatggagctg

SEQ ID NO: 347189 - DNA, 25 bp, Homo sapien
tcggccagcacaccgaacatctggt

SEQ ID NO: 347190 - DNA, 25 bp, Homo sapien
ttcaacaggatgacatcggccagca

SEQ ID NO: 347191 - DNA, 25 bp, Homo sapien
tccaggagccggtgaacagcacgca

SEQ ID NO: 347192 - DNA, 25 bp, Homo sapien
cctgagaacgccatacacactggtc

SEQ ID NO: 347193 - DNA, 25 bp, Homo sapien
gctgcctttagagcagggccagcag

SEQ ID NO: 347194 - DNA, 25 bp, Homo sapien
ctggaaagggccagacaatccatat

SEQ ID NO: 347195 - DNA, 25 bp, Homo sapien
agggaggaacggcacgctgcactta

SEQ ID NO: 347196 - DNA, 25 bp, Homo sapien
tcgtagctagctcgaatcagcgggt

SEQ ID NO: 347197 - DNA, 25 bp, Homo sapien
tgcatttcccgagttaagtctgagg

SEQ ID NO: 347198 - DNA, 25 bp, Homo sapien
gatttccggtagtccaccgagtggc

SEQ ID NO: 347199 - DNA, 25 bp, Homo sapien
cagcgggtacttcttgccgaatgca

SEQ ID NO: 347200 - DNA, 25 bp, Homo sapien
ggattacccggtcatagggcacgcg

SEQ ID NO: 347201 - DNA, 25 bp, Homo sapien
gatccgtcaggtcagactcgagcag

SEQ ID NO: 347202 - DNA, 25 bp, Homo sapien
gcaaagttgtcattgtcgtcctggg

SEQ ID NO: 347203 - DNA, 25 bp, Homo sapien
cagggacttgagctggtaggtatcc

SEQ ID NO: 347204 - DNA, 25 bp, Homo sapien
tgtgacacccaagatgttctctgct

SEQ ID NO: 347205 - DNA, 25 bp, Homo sapien
cctctgcatattcggagccagggaa

SEQ ID NO: 347206 - DNA, 25 bp, Homo sapien
tgctgtctcaaaggccgagttccca

SEQ ID NO: 347207 - DNA, 25 bp, Homo sapien
gtctccaacgtagtgggtggcccag

SEQ ID NO: 347208 - DNA, 25 bp, Homo sapien
ccttgtccagagtgacgtgggcgat

SEQ ID NO: 347209 - DNA, 25 bp, Homo sapien
cccgtgtaccgcttgttgatgctga

SEQ ID NO: 347210 - DNA, 25 bp, Homo sapien
tgttgtactggacacggagccccag

SEQ ID NO: 347211 - DNA, 25 bp, Homo sapien
tgaactcggcgttagccttgcccgt

SEQ ID NO: 347212 - DNA, 25 bp, Homo sapien
tcagaggggtaaggcctcgcacccg

SEQ ID NO: 347213 - DNA, 25 bp, Homo sapien
cagatcagaggggtaaggcctcgca

SEQ ID NO: 347214 - DNA, 25 bp, Homo sapien
cagcagatcagaggggtaaggcctc

SEQ ID NO: 347215 - DNA, 25 bp, Homo sapien
gatcagaggggtaaggcctcgcacc

SEQ ID NO: 347216 - DNA, 25 bp, Homo sapien
tatgattgtagtaacctccaccctg

SEQ ID NO: 347217 - DNA, 25 bp, Homo sapien
tgcgggaactctcactgcaatctgg

SEQ ID NO: 347218 - DNA, 25 bp, Homo sapien
cggactccaccgtttcaagctggga

SEQ ID NO: 347219 - DNA, 25 bp, Homo sapien
tcctcagagctcatttgcccggact

SEQ ID NO: 347220 - DNA, 25 bp, Homo sapien
gagccgccaggtccctacgcccgca

SEQ ID NO: 347221 - DNA, 25 bp, Homo sapien
ccgccaggtccctacgcccgcagct

SEQ ID NO: 347222 - DNA, 25 bp, Homo sapien
gaccgaaccctgagaaacgcgcgaa

SEQ ID NO: 347223 - DNA, 25 bp, Homo sapien
ctccgaccgaaccctgagaaacgcg

SEQ ID NO: 347224 - DNA, 25 bp, Homo sapien
aacccgtggtctaatgaggccgcgc

SEQ ID NO: 347225 - DNA, 25 bp, Homo sapien
cgctccggctgcaacccgtggtcta

SEQ ID NO: 347226 - DNA, 25 bp, Homo sapien
cggctgcaacccgtggtctaatgag

SEQ ID NO: 347227 - DNA, 25 bp, Homo sapien
tgcaacccgtggtctaatgaggccg

SEQ ID NO: 347228 - DNA, 25 bp, Homo sapien
cctttgatgcttagtggaatgtgtg

SEQ ID NO: 347229 - DNA, 25 bp, Homo sapien
cgagggcctttgatgcttagtggaa

SEQ ID NO: 347230 - DNA, 25 bp, Homo sapien
tgtccttccaccgagactacgaggg

SEQ ID NO: 347231 - DNA, 25 bp, Homo sapien
gaatgtgtgtctaacttgctctctg

SEQ ID NO: 347232 - DNA, 25 bp, Homo sapien
ggagtttgtccttccaccgagacta

SEQ ID NO: 347233 - DNA, 25 bp, Homo sapien
caccgagactacgagggcctttgat

SEQ ID NO: 347234 - DNA, 25 bp, Homo sapien
atcaaaggccctcgtagtctcggtg

SEQ ID NO: 347235 - DNA, 25 bp, Homo sapien
cacacattccactaagcatcaaagg

SEQ ID NO: 347236 - DNA, 25 bp, Homo sapien
tagtctcggtggaaggacaaactcc

SEQ ID NO: 347237 - DNA, 25 bp, Homo sapien
ttccactaagcatcaaaggccctcg

SEQ ID NO: 347238 - DNA, 25 bp, Homo sapien
aatgtcagagagcaagttagacaca

SEQ ID NO: 347239 - DNA, 25 bp, Homo sapien
gagagcaagttagacacacattcca

SEQ ID NO: 347240 - DNA, 25 bp, Homo sapien
tcacgcacagtccagcagaggttca

SEQ ID NO: 347241 - DNA, 25 bp, Homo sapien
tgaaaggcttaacttcggaatggaa

SEQ ID NO: 347242 - DNA, 25 bp, Homo sapien
tgttgaaaactcacgcacagtccag

SEQ ID NO: 347243 - DNA, 25 bp, Homo sapien
gtgaacatcatatcacacaacctgg

SEQ ID NO: 347244 - DNA, 25 bp, Homo sapien
taacttcggaatggaagtgttgaaa

SEQ ID NO: 347245 - DNA, 25 bp, Homo sapien
tcatatcacacaacctggctcattt

SEQ ID NO: 347246 - DNA, 25 bp, Homo sapien
aaatgagccaggttgtgtgatatga

SEQ ID NO: 347247 - DNA, 25 bp, Homo sapien
ttccattccgaagttaagcctttca

SEQ ID NO: 347248 - DNA, 25 bp, Homo sapien
ccaggttgtgtgatatgatgttcac

SEQ ID NO: 347249 - DNA, 25 bp, Homo sapien
tcaacacttccattccgaagttaag

SEQ ID NO: 347250 - DNA, 25 bp, Homo sapien
ggactgtgcgtgagttttcaacact

SEQ ID NO: 347251 - DNA, 25 bp, Homo sapien
tgaacctctgctggactgtgcgtga

SEQ ID NO: 347252 - DNA, 25 bp, Homo sapien
tccgtgtctacagcctccctgatgg

SEQ ID NO: 347253 - DNA, 25 bp, Homo sapien
cgtgtctacagcctccctgatggca

SEQ ID NO: 347254 - DNA, 25 bp, Homo sapien
tgtctacagcctccctgatggcacc

SEQ ID NO: 347255 - DNA, 25 bp, Homo sapien
tacagcctccctgatggcaccttca

SEQ ID NO: 347256 - DNA, 25 bp, Homo sapien
gtcatccgtgtctacagcctccctg

SEQ ID NO: 347257 - DNA, 25 bp, Homo sapien
gtgtctacagcctccctgatggcac

SEQ ID NO: 347258 - DNA, 25 bp, Homo sapien
tgaaggtgccatcagggaggctgta

SEQ ID NO: 347259 - DNA, 25 bp, Homo sapien
catcagggaggctgtagacacggat

SEQ ID NO: 347260 - DNA, 25 bp, Homo sapien
tcagggaggctgtagacacggatga

SEQ ID NO: 347261 - DNA, 25 bp, Homo sapien
tgccatcagggaggctgtagacacg

SEQ ID NO: 347262 - DNA, 25 bp, Homo sapien
cagggaggctgtagacacggatgac

SEQ ID NO: 347263 - DNA, 25 bp, Homo sapien
gtgccatcagggaggctgtagacac

SEQ ID NO: 347264 - DNA, 25 bp, Homo sapien
gtcatcctaggcacccagcagttca

SEQ ID NO: 347265 - DNA, 25 bp, Homo sapien
gctgcgtcattgacatctgcatgaa

SEQ ID NO: 347266 - DNA, 25 bp, Homo sapien
ggcattttacgctgcgtcattgaca

SEQ ID NO: 347267 - DNA, 25 bp, Homo sapien
gagggcaaatacctcatcctcaagg

SEQ ID NO: 347268 - DNA, 25 bp, Homo sapien
tggaggagggcaaatacctcatcct

SEQ ID NO: 347269 - DNA, 25 bp, Homo sapien
cagttcaagcctaatgagtttgcca

SEQ ID NO: 347270 - DNA, 25 bp, Homo sapien
ggatgaggtatttgccctcctccag

SEQ ID NO: 347271 - DNA, 25 bp, Homo sapien
tgaactgctgggtgcctaggatgac

SEQ ID NO: 347272 - DNA, 25 bp, Homo sapien
aatgacgcagcgtaaaatgccccag

SEQ ID NO: 347273 - DNA, 25 bp, Homo sapien
ccttgaggatgaggtatttgccctc

SEQ ID NO: 347274 - DNA, 25 bp, Homo sapien
tcatgcagatgtcaatgacgcagcg

SEQ ID NO: 347275 - DNA, 25 bp, Homo sapien
ggcaaactcattaggcttgaactgc

SEQ ID NO: 347276 - DNA, 25 bp, Homo sapien
ttatgtgtctcggtaccacgtgaaa

SEQ ID NO: 347277 - DNA, 25 bp, Homo sapien
tatgtgtctcggtaccacgtgaaag

SEQ ID NO: 347278 - DNA, 25 bp, Homo sapien
ctttcacgtggtaccgagacacata

SEQ ID NO: 347279 - DNA, 25 bp, Homo sapien
tttcacgtggtaccgagacacataa

SEQ ID NO: 347280 - DNA, 25 bp, Homo sapien
atggtgtcaatgaaatccagaactg

SEQ ID NO: 347281 - DNA, 25 bp, Homo sapien
gaaatccagaactgagaactcagaa

SEQ ID NO: 347282 - DNA, 25 bp, Homo sapien
cctgaactagggcaatggtgtcaat

SEQ ID NO: 347283 - DNA, 25 bp, Homo sapien
tagggcaatggtgtcaatgaaatcc

SEQ ID NO: 347284 - DNA, 25 bp, Homo sapien
gagtcctgaactagggcaatggtgt

SEQ ID NO: 347285 - DNA, 25 bp, Homo sapien
cctccccgtgtactggacaattgac

SEQ ID NO: 347286 - DNA, 25 bp, Homo sapien
gtcaattgtccagtacacggggagg

SEQ ID NO: 347287 - DNA, 25 bp, Homo sapien
gacaccattgccctagttcaggact

SEQ ID NO: 347288 - DNA, 25 bp, Homo sapien
cacccctggatttatctctgccagt

SEQ ID NO: 347289 - DNA, 25 bp, Homo sapien
ttctgagttctcagttctggatttc

SEQ ID NO: 347290 - DNA, 25 bp, Homo sapien
cagttctggatttcattgacaccat

SEQ ID NO: 347291 - DNA, 25 bp, Homo sapien
gatttcattgacaccattgccctag

SEQ ID NO: 347292 - DNA, 25 bp, Homo sapien
tcagaagctggactctcagcgaggg

SEQ ID NO: 347293 - DNA, 25 bp, Homo sapien
aatggcgttgactggcgtcagaagc

SEQ ID NO: 347294 - DNA, 25 bp, Homo sapien
aacagctacaagttggcccggtgga

SEQ ID NO: 347295 - DNA, 25 bp, Homo sapien
gctttgctggctggatctgagtacc

SEQ ID NO: 347296 - DNA, 25 bp, Homo sapien
cactgtaatggcgttgactggcgtc

SEQ ID NO: 347297 - DNA, 25 bp, Homo sapien
ctggatctgagtacctcaagcttgg

SEQ ID NO: 347298 - DNA, 25 bp, Homo sapien
tcgctgagagtccagcttctgacgc

SEQ ID NO: 347299 - DNA, 25 bp, Homo sapien
gcttctgacgccagtcaacgccatt

SEQ ID NO: 347300 - DNA, 25 bp, Homo sapien
ccaagcttgaggtactcagatccag

SEQ ID NO: 347301 - DNA, 25 bp, Homo sapien
tccaccgggccaacttgtagctgtt

SEQ ID NO: 347302 - DNA, 25 bp, Homo sapien
aggtactcagatccagccagcaaag

SEQ ID NO: 347303 - DNA, 25 bp, Homo sapien
gacgccagtcaacgccattacagtg

SEQ ID NO: 347304 - DNA, 25 bp, Homo sapien
ccatcattccctgtctaggcgagct

SEQ ID NO: 347305 - DNA, 25 bp, Homo sapien
tgcgtacctacccactttctaagca

SEQ ID NO: 347306 - DNA, 25 bp, Homo sapien
gtaagatttagtgcgtacctaccca

SEQ ID NO: 347307 - DNA, 25 bp, Homo sapien
ggctctgctgtttatatgacacttc

SEQ ID NO: 347308 - DNA, 25 bp, Homo sapien
taagtcgttgagtgactgctgtgcg

SEQ ID NO: 347309 - DNA, 25 bp, Homo sapien
cctgtctaggcgagcttttagaaga

SEQ ID NO: 347310 - DNA, 25 bp, Homo sapien
tgcttagaaagtgggtaggtacgca

SEQ ID NO: 347311 - DNA, 25 bp, Homo sapien
gaagtgtcatataaacagcagagcc

SEQ ID NO: 347312 - DNA, 25 bp, Homo sapien
caggagagccccgttagagaaacag

SEQ ID NO: 347313 - DNA, 25 bp, Homo sapien
tgggtaggtacgcactaaatcttac

SEQ ID NO: 347314 - DNA, 25 bp, Homo sapien
taaaagctcgcctagacagggaatg

SEQ ID NO: 347315 - DNA, 25 bp, Homo sapien
cgcacagcagtcactcaacgactta

SEQ ID NO: 347316 - DNA, 25 bp, Homo sapien
tcatttcactctgggtccaacttcc

SEQ ID NO: 347317 - DNA, 25 bp, Homo sapien
tccaacttcccacgtctacaaatga

SEQ ID NO: 347318 - DNA, 25 bp, Homo sapien
tatgggtagaaaagaggatctctct

SEQ ID NO: 347319 - DNA, 25 bp, Homo sapien
tgccctgtgtttgccatgaaccaag

SEQ ID NO: 347320 - DNA, 25 bp, Homo sapien
tttgccctgtgtttgccatgaacca

SEQ ID NO: 347321 - DNA, 25 bp, Homo sapien
ccacgtctacaaatgatatgggtag

SEQ ID NO: 347322 - DNA, 25 bp, Homo sapien
agagagatcctcttttctacccata

SEQ ID NO: 347323 - DNA, 25 bp, Homo sapien
cttggttcatggcaaacacagggca

SEQ ID NO: 347324 - DNA, 25 bp, Homo sapien
tacccatatcatttgtagacgtggg

SEQ ID NO: 347325 - DNA, 25 bp, Homo sapien
tcatttgtagacgtgggaagttgga

SEQ ID NO: 347326 - DNA, 25 bp, Homo sapien
tggttcatggcaaacacagggcaaa

SEQ ID NO: 347327 - DNA, 25 bp, Homo sapien
gaagttggacccagagtgaaatgac

SEQ ID NO: 347328 - DNA, 25 bp, Homo sapien
gccataggttctgcccgtagtcaag

SEQ ID NO: 347329 - DNA, 25 bp, Homo sapien
gtccatcagcattgtctttcttcca

SEQ ID NO: 347330 - DNA, 25 bp, Homo sapien
tgatcctagccataggttctgcccg

SEQ ID NO: 347331 - DNA, 25 bp, Homo sapien
gggtgatacttgatcctagccatag

SEQ ID NO: 347332 - DNA, 25 bp, Homo sapien
gagactctgcaagggcaagggtcac

SEQ ID NO: 347333 - DNA, 25 bp, Homo sapien
caggcctcaaccatgaactctttga

SEQ ID NO: 347334 - DNA, 25 bp, Homo sapien
tcttccacctaagctctgagcctcc

SEQ ID NO: 347335 - DNA, 25 bp, Homo sapien
gcctccaacatctccaacttctttt

SEQ ID NO: 347336 - DNA, 25 bp, Homo sapien
atttcactgataattgccctagttc

SEQ ID NO: 347337 - DNA, 25 bp, Homo sapien
attgccctagttcagggccccattt

SEQ ID NO: 347338 - DNA, 25 bp, Homo sapien
cctaagctctgagcctccaacatct

SEQ ID NO: 347339 - DNA, 25 bp, Homo sapien
tttcactgataattgccctagttca

SEQ ID NO: 347340 - DNA, 25 bp, Homo sapien
ggaggctcagagcttaggtggaaga

SEQ ID NO: 347341 - DNA, 25 bp, Homo sapien
aaatggggccctgaactagggcaat

SEQ ID NO: 347342 - DNA, 25 bp, Homo sapien
aaaagaagttggagatgttggaggc

SEQ ID NO: 347343 - DNA, 25 bp, Homo sapien
tgaactagggcaattatcagtgaaa

SEQ ID NO: 347344 - DNA, 25 bp, Homo sapien
gaactagggcaattatcagtgaaat

SEQ ID NO: 347345 - DNA, 25 bp, Homo sapien
agatgttggaggctcagagcttagg

SEQ ID NO: 347346 - DNA, 25 bp, Homo sapien
tatggctaggatcaagtatcacccc

SEQ ID NO: 347347 - DNA, 25 bp, Homo sapien
caaagagttcatggttgaggcctgg

SEQ ID NO: 347348 - DNA, 25 bp, Homo sapien
gtgacccttgcccttgcagagtctc

SEQ ID NO: 347349 - DNA, 25 bp, Homo sapien
gactacgggcagaacctatggctag

SEQ ID NO: 347350 - DNA, 25 bp, Homo sapien
tccccttgactacgggcagaaccta

SEQ ID NO: 347351 - DNA, 25 bp, Homo sapien
tggaagaaagacaatgctgatggac

SEQ ID NO: 347352 - DNA, 25 bp, Homo sapien
tacagtgcctgtttacgcaggctag

SEQ ID NO: 347353 - DNA, 25 bp, Homo sapien
tattccctacagtgcctgtttacgc

SEQ ID NO: 347354 - DNA, 25 bp, Homo sapien
gcctgtttacgcaggctaggttgta

SEQ ID NO: 347355 - DNA, 25 bp, Homo sapien
tgtttacgcaggctaggttgtataa

SEQ ID NO: 347356 - DNA, 25 bp, Homo sapien
gacaccatgtctctattccctacag

SEQ ID NO: 347357 - DNA, 25 bp, Homo sapien
tgtctctattccctacagtgcctgt

SEQ ID NO: 347358 - DNA, 25 bp, Homo sapien
ctgtagggaatagagacatggtgtc

SEQ ID NO: 347359 - DNA, 25 bp, Homo sapien
tacaacctagcctgcgtaaacaggc

SEQ ID NO: 347360 - DNA, 25 bp, Homo sapien
aacaggcactgtagggaatagagac

SEQ ID NO: 347361 - DNA, 25 bp, Homo sapien
ttatacaacctagcctgcgtaaaca

SEQ ID NO: 347362 - DNA, 25 bp, Homo sapien
gagggtgatggagatggcggctcac

SEQ ID NO: 347363 - DNA, 25 bp, Homo sapien
cctgcgtaaacaggcactgtaggga

SEQ ID NO: 347364 - DNA, 25 bp, Homo sapien
gagatgatattgaccttattgtccg

SEQ ID NO: 347365 - DNA, 25 bp, Homo sapien
gacactcaatgagtgggattccagg

SEQ ID NO: 347366 - DNA, 25 bp, Homo sapien
gatggcgtcatgactggagccaacg

SEQ ID NO: 347367 - DNA, 25 bp, Homo sapien
tcaacatcaagacactcaatgagtg

SEQ ID NO: 347368 - DNA, 25 bp, Homo sapien
tccgttgtgagcacgatggcgtcat

SEQ ID NO: 347369 - DNA, 25 bp, Homo sapien
attgaccttattgtccgttgtgagc

SEQ ID NO: 347370 - DNA, 25 bp, Homo sapien
tcatgacgccatcgtgctcacaacg

SEQ ID NO: 347371 - DNA, 25 bp, Homo sapien
gctcacaacggacaataaggtcaat

SEQ ID NO: 347372 - DNA, 25 bp, Homo sapien
ttccccgttggctccagtcatgacg

SEQ ID NO: 347373 - DNA, 25 bp, Homo sapien
gacaataaggtcaatatcatctcca

SEQ ID NO: 347374 - DNA, 25 bp, Homo sapien
cctggaatcccactcattgagtgtc

SEQ ID NO: 347375 - DNA, 25 bp, Homo sapien
cactcattgagtgtcttgatgttga

SEQ ID NO: 347376 - DNA, 25 bp, Homo sapien
gaggacgacatggataagaatgaaa

SEQ ID NO: 347377 - DNA, 25 bp, Homo sapien
tgtggaggacgacatggataagaat

SEQ ID NO: 347378 - DNA, 25 bp, Homo sapien
cccgtttgtggaggacgacatggat

SEQ ID NO: 347379 - DNA, 25 bp, Homo sapien
aacccgtttgtggaggacgacatgg

SEQ ID NO: 347380 - DNA, 25 bp, Homo sapien
caaacccgtttgtggaggacgacat

SEQ ID NO: 347381 - DNA, 25 bp, Homo sapien
cgtttgtggaggacgacatggataa

SEQ ID NO: 347382 - DNA, 25 bp, Homo sapien
catgtcgtcctccacaaacgggttt

SEQ ID NO: 347383 - DNA, 25 bp, Homo sapien
tttcattcttatccatgtcgtcctc

SEQ ID NO: 347384 - DNA, 25 bp, Homo sapien
atgtcgtcctccacaaacgggtttg

SEQ ID NO: 347385 - DNA, 25 bp, Homo sapien
ttatccatgtcgtcctccacaaacg

SEQ ID NO: 347386 - DNA, 25 bp, Homo sapien
attcttatccatgtcgtcctccaca

SEQ ID NO: 347387 - DNA, 25 bp, Homo sapien
tccatgtcgtcctccacaaacgggt

SEQ ID NO: 347388 - DNA, 25 bp, Homo sapien
gtgagtgagactgccaatgagcccc

SEQ ID NO: 347389 - DNA, 25 bp, Homo sapien
agtgagtgagactgccaatgagccc

SEQ ID NO: 347390 - DNA, 25 bp, Homo sapien
acagtgagtgagactgccaatgagc

SEQ ID NO: 347391 - DNA, 25 bp, Homo sapien
gagccccctcaagatgaaggtaatt

SEQ ID NO: 347392 - DNA, 25 bp, Homo sapien
caatgagccccctcaagatgaaggt

SEQ ID NO: 347393 - DNA, 25 bp, Homo sapien
cagtgagtgagactgccaatgagcc

SEQ ID NO: 347394 - DNA, 25 bp, Homo sapien
catggaggcaacctacatcaaccac

SEQ ID NO: 347395 - DNA, 25 bp, Homo sapien
gtaattccttcaattcaccccgcaa

SEQ ID NO: 347396 - DNA, 25 bp, Homo sapien
ggtaattccttcaattcaccccgca

SEQ ID NO: 347397 - DNA, 25 bp, Homo sapien
gccatggaggcaacctacatcaacc

SEQ ID NO: 347398 - DNA, 25 bp, Homo sapien
tccttcaattcaccccgcaacctgg

SEQ ID NO: 347399 - DNA, 25 bp, Homo sapien
gaggcaacctacatcaaccacaatt

SEQ ID NO: 347400 - DNA, 25 bp, Homo sapien
tgtggttgatgtaggttgcctccat

SEQ ID NO: 347401 - DNA, 25 bp, Homo sapien
tggttgatgtaggttgcctccatgg

SEQ ID NO: 347402 - DNA, 25 bp, Homo sapien
ttgtggttgatgtaggttgcctcca

SEQ ID NO: 347403 - DNA, 25 bp, Homo sapien
aattgtggttgatgtaggttgcctc

SEQ ID NO: 347404 - DNA, 25 bp, Homo sapien
tgcggggtgaattgaaggaattacc

SEQ ID NO: 347405 - DNA, 25 bp, Homo sapien
ggttgatgtaggttgcctccatggc

SEQ ID NO: 347406 - DNA, 25 bp, Homo sapien
gaattaccttcatcttgagggggct

SEQ ID NO: 347407 - DNA, 25 bp, Homo sapien
ggggctcattggcagtctcactcac

SEQ ID NO: 347408 - DNA, 25 bp, Homo sapien
gctcattggcagtctcactcactgt

SEQ ID NO: 347409 - DNA, 25 bp, Homo sapien
ggctcattggcagtctcactcactg

SEQ ID NO: 347410 - DNA, 25 bp, Homo sapien
accttcatcttgagggggctcattg

SEQ ID NO: 347411 - DNA, 25 bp, Homo sapien
gggctcattggcagtctcactcact

SEQ ID NO: 347412 - DNA, 25 bp, Homo sapien
ctctttgttgcatggtgagtgacca

SEQ ID NO: 347413 - DNA, 25 bp, Homo sapien
tggtgagtgaccatgccacgctttt

SEQ ID NO: 347414 - DNA, 25 bp, Homo sapien
gcacattgtcagtgactctttgttg

SEQ ID NO: 347415 - DNA, 25 bp, Homo sapien
cgctgcgcacattgtcagtgactct

SEQ ID NO: 347416 - DNA, 25 bp, Homo sapien
tgcgcacattgtcagtgactctttg

SEQ ID NO: 347417 - DNA, 25 bp, Homo sapien
gagtgaccatgccacgcttttgcag

SEQ ID NO: 347418 - DNA, 25 bp, Homo sapien
aaaagcgtggcatggtcactcacca

SEQ ID NO: 347419 - DNA, 25 bp, Homo sapien
caaagagtcactgacaatgtgcgca

SEQ ID NO: 347420 - DNA, 25 bp, Homo sapien
agagtcactgacaatgtgcgcagcg

SEQ ID NO: 347421 - DNA, 25 bp, Homo sapien
caacaaagagtcactgacaatgtgc

SEQ ID NO: 347422 - DNA, 25 bp, Homo sapien
ctgcaaaagcgtggcatggtcactc

SEQ ID NO: 347423 - DNA, 25 bp, Homo sapien
tggtcactcaccatgcaacaaagag

SEQ ID NO: 347424 - DNA, 25 bp, Homo sapien
tcccaagggaattgacagcagcagt

SEQ ID NO: 347425 - DNA, 25 bp, Homo sapien
cacactctttagaggttaggagaag

SEQ ID NO: 347426 - DNA, 25 bp, Homo sapien
gagtcctcacagcaccctaatagca

SEQ ID NO: 347427 - DNA, 25 bp, Homo sapien
gcagcagtgtctgaatctcccacac

SEQ ID NO: 347428 - DNA, 25 bp, Homo sapien
cttgaggcctcagcttttggagtcc

SEQ ID NO: 347429 - DNA, 25 bp, Homo sapien
gactgtcactgcagtacctgcttga

SEQ ID NO: 347430 - DNA, 25 bp, Homo sapien
ggactccaaaagctgaggcctcaag

SEQ ID NO: 347431 - DNA, 25 bp, Homo sapien
gctattagggtgctgtgaggactcc

SEQ ID NO: 347432 - DNA, 25 bp, Homo sapien
caatgcctttgagttgctccccagg

SEQ ID NO: 347433 - DNA, 25 bp, Homo sapien
cactgctgctgtcaattcccttggg

SEQ ID NO: 347434 - DNA, 25 bp, Homo sapien
tcaagcaggtactgcagtgacagtc

SEQ ID NO: 347435 - DNA, 25 bp, Homo sapien
cctctaaagagtgtgggagattcag

SEQ ID NO: 347436 - DNA, 25 bp, Homo sapien
tcctgggatattgtcgtccagagag

SEQ ID NO: 347437 - DNA, 25 bp, Homo sapien
gctgtacccgctcagtgtattcctg

SEQ ID NO: 347438 - DNA, 25 bp, Homo sapien
tattgtcgtccagagagttgggtcc

SEQ ID NO: 347439 - DNA, 25 bp, Homo sapien
cacgctgatgagctgtacccgctca

SEQ ID NO: 347440 - DNA, 25 bp, Homo sapien
ccgctcagtgtattcctgggatatt

SEQ ID NO: 347441 - DNA, 25 bp, Homo sapien
cctggccacgctgatgagctgtacc

SEQ ID NO: 347442 - DNA, 25 bp, Homo sapien
tgagcgggtacagctcatcagcgtg

SEQ ID NO: 347443 - DNA, 25 bp, Homo sapien
ttggacccaactctctggacgacaa

SEQ ID NO: 347444 - DNA, 25 bp, Homo sapien
aatatcccaggaatacactgagcgg

SEQ ID NO: 347445 - DNA, 25 bp, Homo sapien
aactctctggacgacaatatcccag

SEQ ID NO: 347446 - DNA, 25 bp, Homo sapien
gggtacagctcatcagcgtggccag

SEQ ID NO: 347447 - DNA, 25 bp, Homo sapien
caggaatacactgagcgggtacagc

SEQ ID NO: 347448 - DNA, 25 bp, Homo sapien
gggccctagaatactacgacaaagc

SEQ ID NO: 347449 - DNA, 25 bp, Homo sapien
cactgcggagcatcaagcgcatctt

SEQ ID NO: 347450 - DNA, 25 bp, Homo sapien
tttgaccgcatcaccacgaggagtg

SEQ ID NO: 347451 - DNA, 25 bp, Homo sapien
tgagaagccactgcggagcatcaag

SEQ ID NO: 347452 - DNA, 25 bp, Homo sapien
tagaatactacgacaaagcctttga

SEQ ID NO: 347453 - DNA, 25 bp, Homo sapien
gcatcaagcgcatcttccacactgt

SEQ ID NO: 347454 - DNA, 25 bp, Homo sapien
cactcctcgtggtgatgcggtcaaa

SEQ ID NO: 347455 - DNA, 25 bp, Homo sapien
tcgtagtattctagggccccacaac

SEQ ID NO: 347456 - DNA, 25 bp, Homo sapien
ttgatgctccgcagtggcttctcac

SEQ ID NO: 347457 - DNA, 25 bp, Homo sapien
caaaggctttgtcgtagtattctag

SEQ ID NO: 347458 - DNA, 25 bp, Homo sapien
acagtgtggaagatgcgcttgatgc

SEQ ID NO: 347459 - DNA, 25 bp, Homo sapien
gaagatgcgcttgatgctccgcagt

SEQ ID NO: 347460 - DNA, 25 bp, Homo sapien
aatggattttcctcagttgatgaag

SEQ ID NO: 347461 - DNA, 25 bp, Homo sapien
tggattttcctcagttgatgaagat

SEQ ID NO: 347462 - DNA, 25 bp, Homo sapien
gactcttcagttgaagttcgtagtg

SEQ ID NO: 347463 - DNA, 25 bp, Homo sapien
gaagatgcgctacttggaagtatca

SEQ ID NO: 347464 - DNA, 25 bp, Homo sapien
gatgaagatgcgctacttggaagta

SEQ ID NO: 347465 - DNA, 25 bp, Homo sapien
cagttgaagttcgtagtgattggga

SEQ ID NO: 347466 - DNA, 25 bp, Homo sapien
tcccaatcactacgaacttcaactg

SEQ ID NO: 347467 - DNA, 25 bp, Homo sapien
tcttcatcaactgaggaaaatccat

SEQ ID NO: 347468 - DNA, 25 bp, Homo sapien
tgatacttccaagtagcgcatcttc

SEQ ID NO: 347469 - DNA, 25 bp, Homo sapien
tacttccaagtagcgcatcttcatc

SEQ ID NO: 347470 - DNA, 25 bp, Homo sapien
acttcccaatcactacgaacttcaa

SEQ ID NO: 347471 - DNA, 25 bp, Homo sapien
cactacgaacttcaactgaagagtc

SEQ ID NO: 347472 - DNA, 25 bp, Homo sapien
ctcttccacaccataaattcctggg

SEQ ID NO: 347473 - DNA, 25 bp, Homo sapien
tctacatgttcatcaggtgacatca

SEQ ID NO: 347474 - DNA, 25 bp, Homo sapien
caagaatagttaataacccgagaga

SEQ ID NO: 347475 - DNA, 25 bp, Homo sapien
tgaacgttcacctgcgtgtgcttgt

SEQ ID NO: 347476 - DNA, 25 bp, Homo sapien
tgaacttttgatccctttggtcctc

SEQ ID NO: 347477 - DNA, 25 bp, Homo sapien
tcattacctgggagtggaaccccat

SEQ ID NO: 347478 - DNA, 25 bp, Homo sapien
gaggaccaaagggatcaaaagttca

SEQ ID NO: 347479 - DNA, 25 bp, Homo sapien
caagcacacgcaggtgaacgttcac

SEQ ID NO: 347480 - DNA, 25 bp, Homo sapien
cccaggaatttatggtgtggaagag

SEQ ID NO: 347481 - DNA, 25 bp, Homo sapien
tgtcacctgatgaacatgtagaagg

SEQ ID NO: 347482 - DNA, 25 bp, Homo sapien
ggttattaactattcttgatacagc

SEQ ID NO: 347483 - DNA, 25 bp, Homo sapien
catgtgaatggctcaaaacaacatg

SEQ ID NO: 347484 - DNA, 25 bp, Homo sapien
acaatttggggttaggcagaaatgg

SEQ ID NO: 347485 - DNA, 25 bp, Homo sapien
aacaatttggggttaggcagaaatg

SEQ ID NO: 347486 - DNA, 25 bp, Homo sapien
atttggggttaggcagaaatgggat

SEQ ID NO: 347487 - DNA, 25 bp, Homo sapien
caatttggggttaggcagaaatggg

SEQ ID NO: 347488 - DNA, 25 bp, Homo sapien
cccatttctgcctaaccccaaattg

SEQ ID NO: 347489 - DNA, 25 bp, Homo sapien
ccatttctgcctaaccccaaattgt

SEQ ID NO: 347490 - DNA, 25 bp, Homo sapien
atcccatttctgcctaaccccaaat

SEQ ID NO: 347491 - DNA, 25 bp, Homo sapien
catttctgcctaaccccaaattgtt

SEQ ID NO: 347492 - DNA, 25 bp, Homo sapien
aacaatttggggttaggcagaaatg

SEQ ID NO: 347493 - DNA, 25 bp, Homo sapien
tcgactgcagaaaaagttccagaaa

SEQ ID NO: 347494 - DNA, 25 bp, Homo sapien
aacgcattcgactgcagaaaaagtt

SEQ ID NO: 347495 - DNA, 25 bp, Homo sapien
ttaggcagaaatgggatcagaaatc

SEQ ID NO: 347496 - DNA, 25 bp, Homo sapien
cagaaaaagttccagaaacaatttg

SEQ ID NO: 347497 - DNA, 25 bp, Homo sapien
cattcgactgcagaaaaagttccag

SEQ ID NO: 347498 - DNA, 25 bp, Homo sapien
tggaactttttctgcagtcgaatgc

SEQ ID NO: 347499 - DNA, 25 bp, Homo sapien
ccatttctgcctaaccccaaattgt

SEQ ID NO: 347500 - DNA, 25 bp, Homo sapien
aattgtttctggaactttttctgca

SEQ ID NO: 347501 - DNA, 25 bp, Homo sapien
aactttttctgcagtcgaatgcgtt

SEQ ID NO: 347502 - DNA, 25 bp, Homo sapien
tgcctaaccccaaattgtttctgga

SEQ ID NO: 347503 - DNA, 25 bp, Homo sapien
gatttctgatcccatttctgcctaa

SEQ ID NO: 347504 - DNA, 25 bp, Homo sapien
gcagagacaaagatcgtcggaacat

SEQ ID NO: 347505 - DNA, 25 bp, Homo sapien
caaagatcgtcggaacatgttgcag

SEQ ID NO: 347506 - DNA, 25 bp, Homo sapien
cctgcctaagagtgccaaacagaaa

SEQ ID NO: 347507 - DNA, 25 bp, Homo sapien
tgcagatcctgcctaagagtgccaa

SEQ ID NO: 347508 - DNA, 25 bp, Homo sapien
gaacatgttgcagttcaacctgcag

SEQ ID NO: 347509 - DNA, 25 bp, Homo sapien
ttgcagttcaacctgcagatcctgc

SEQ ID NO: 347510 - DNA, 25 bp, Homo sapien
caggttgaactgcaacatgttccga

SEQ ID NO: 347511 - DNA, 25 bp, Homo sapien
tttctgtttggcactcttaggcagg

SEQ ID NO: 347512 - DNA, 25 bp, Homo sapien
gaactgcaacatgttccgacgatct

SEQ ID NO: 347513 - DNA, 25 bp, Homo sapien
catgttccgacgatctttgtctctg

SEQ ID NO: 347514 - DNA, 25 bp, Homo sapien
ttggcactcttaggcaggatctgca

SEQ ID NO: 347515 - DNA, 25 bp, Homo sapien
gcaggatctgcaggttgaactgcaa

SEQ ID NO: 347516 - DNA, 25 bp, Homo sapien
ttttaacatggatgtttcttgctga

SEQ ID NO: 347517 - DNA, 25 bp, Homo sapien
taacatggatgtttcttgctgatgc

SEQ ID NO: 347518 - DNA, 25 bp, Homo sapien
acatggatgtttcttgctgatgccc

SEQ ID NO: 347519 - DNA, 25 bp, Homo sapien
atggatgtttcttgctgatgcccag

SEQ ID NO: 347520 - DNA, 25 bp, Homo sapien
aacatggatgtttcttgctgatgcc

SEQ ID NO: 347521 - DNA, 25 bp, Homo sapien
catggatgtttcttgctgatgccca

SEQ ID NO: 347522 - DNA, 25 bp, Homo sapien
ggcatcagcaagaaacatccatgtt

SEQ ID NO: 347523 - DNA, 25 bp, Homo sapien
ctgggcatcagcaagaaacatccat

SEQ ID NO: 347524 - DNA, 25 bp, Homo sapien
tcagcaagaaacatccatgttaaaa

SEQ ID NO: 347525 - DNA, 25 bp, Homo sapien
tgggcatcagcaagaaacatccatg

SEQ ID NO: 347526 - DNA, 25 bp, Homo sapien
cagcaagaaacatccatgttaaaat

SEQ ID NO: 347527 - DNA, 25 bp, Homo sapien
gggcatcagcaagaaacatccatgt

SEQ ID NO: 347528 - DNA, 25 bp, Homo sapien
agacggcctaccagcggaatcgaat

SEQ ID NO: 347529 - DNA, 25 bp, Homo sapien
tcaatatgcttatttccatgaggag

SEQ ID NO: 347530 - DNA, 25 bp, Homo sapien
atacagcgcgcacacagaagacggc

SEQ ID NO: 347531 - DNA, 25 bp, Homo sapien
taagtactcctctcagtttggtggt

SEQ ID NO: 347532 - DNA, 25 bp, Homo sapien
ttccagctggtggatacagcgcgca

SEQ ID NO: 347533 - DNA, 25 bp, Homo sapien
gcggaatcgaatgagatttgcccag

SEQ ID NO: 347534 - DNA, 25 bp, Homo sapien
caccaccaaactgagaggagtactt

SEQ ID NO: 347535 - DNA, 25 bp, Homo sapien
ctcctcatggaaataagcatattga

SEQ ID NO: 347536 - DNA, 25 bp, Homo sapien
tgcgcgctgtatccaccagctggaa

SEQ ID NO: 347537 - DNA, 25 bp, Homo sapien
ggcaaatctcattcgattccgctgg

SEQ ID NO: 347538 - DNA, 25 bp, Homo sapien
gccgtcttctgtgtgcgcgctgtat

SEQ ID NO: 347539 - DNA, 25 bp, Homo sapien
tcgattccgctggtaggccgtcttc

SEQ ID NO: 347540 - DNA, 25 bp, Homo sapien
cacataccaagataagaggtacaca

SEQ ID NO: 347541 - DNA, 25 bp, Homo sapien
ggagccacataccaagataagaggt

SEQ ID NO: 347542 - DNA, 25 bp, Homo sapien
tggacaggagccacataccaagata

SEQ ID NO: 347543 - DNA, 25 bp, Homo sapien
acataccaagataagaggtacacaa

SEQ ID NO: 347544 - DNA, 25 bp, Homo sapien
caggagccacataccaagataagag

SEQ ID NO: 347545 - DNA, 25 bp, Homo sapien
gccacataccaagataagaggtaca

SEQ ID NO: 347546 - DNA, 25 bp, Homo sapien
ctcttatcttggtatgtggctcctg

SEQ ID NO: 347547 - DNA, 25 bp, Homo sapien
acctcttatcttggtatgtggctcc

SEQ ID NO: 347548 - DNA, 25 bp, Homo sapien
tgtacctcttatcttggtatgtggc

SEQ ID NO: 347549 - DNA, 25 bp, Homo sapien
tatcttggtatgtggctcctgtcca

SEQ ID NO: 347550 - DNA, 25 bp, Homo sapien
tgtgtacctcttatcttggtatgtg

SEQ ID NO: 347551 - DNA, 25 bp, Homo sapien
ttgtgtacctcttatcttggtatgt

SEQ ID NO: 347552 - DNA, 25 bp, Homo sapien
cctaccagccgttcagcaaaggaga

SEQ ID NO: 347553 - DNA, 25 bp, Homo sapien
tccctgtgcggttcccgagcagttt

SEQ ID NO: 347554 - DNA, 25 bp, Homo sapien
atgacacccgtgatccaggacaacc

SEQ ID NO: 347555 - DNA, 25 bp, Homo sapien
cagcaaaggagatcggctaggaaag

SEQ ID NO: 347556 - DNA, 25 bp, Homo sapien
gcagtttcgggatatgccctaccag

SEQ ID NO: 347557 - DNA, 25 bp, Homo sapien
tggcaaagttcatgacacccgtgat

SEQ ID NO: 347558 - DNA, 25 bp, Homo sapien
tcctttgctgaacggctggtagggc

SEQ ID NO: 347559 - DNA, 25 bp, Homo sapien
ctttcctagccgatctcctttgctg

SEQ ID NO: 347560 - DNA, 25 bp, Homo sapien
aaactgctcgggaaccgcacaggga

SEQ ID NO: 347561 - DNA, 25 bp, Homo sapien
tggtagggcatatcccgaaactgct

SEQ ID NO: 347562 - DNA, 25 bp, Homo sapien
ggttgtcctggatcacgggtgtcat

SEQ ID NO: 347563 - DNA, 25 bp, Homo sapien
tcacgggtgtcatgaactttgccat

SEQ ID NO: 347564 - DNA, 25 bp, Homo sapien
aaagactaaggtggctggacgtggt

SEQ ID NO: 347565 - DNA, 25 bp, Homo sapien
atggaaaagactaaggtggctggac

SEQ ID NO: 347566 - DNA, 25 bp, Homo sapien
gaaaagactaaggtggctggacgtg

SEQ ID NO: 347567 - DNA, 25 bp, Homo sapien
tggaaaagactaaggtggctggacg

SEQ ID NO: 347568 - DNA, 25 bp, Homo sapien
aagactaaggtggctggacgtggtg

SEQ ID NO: 347569 - DNA, 25 bp, Homo sapien
aaaagactaaggtggctggacgtgg

SEQ ID NO: 347570 - DNA, 25 bp, Homo sapien
caccacgtccagccaccttagtctt

SEQ ID NO: 347571 - DNA, 25 bp, Homo sapien
accacgtccagccaccttagtcttt

SEQ ID NO: 347572 - DNA, 25 bp, Homo sapien
ccacgtccagccaccttagtctttt

SEQ ID NO: 347573 - DNA, 25 bp, Homo sapien
cgtccagccaccttagtcttttcca

SEQ ID NO: 347574 - DNA, 25 bp, Homo sapien
gtccagccaccttagtcttttccat

SEQ ID NO: 347575 - DNA, 25 bp, Homo sapien
cacgtccagccaccttagtcttttc

SEQ ID NO: 347576 - DNA, 25 bp, Homo sapien
tttgattgtcacttaactcacctgg

SEQ ID NO: 347577 - DNA, 25 bp, Homo sapien
ttgattgtcacttaactcacctggg

SEQ ID NO: 347578 - DNA, 25 bp, Homo sapien
aggtccttggccctcggccctgctc

SEQ ID NO: 347579 - DNA, 25 bp, Homo sapien
gaggtccttggccctcggccctgct

SEQ ID NO: 347580 - DNA, 25 bp, Homo sapien
tgattgtcacttaactcacctgggt

SEQ ID NO: 347581 - DNA, 25 bp, Homo sapien
acccaggtgagttaagtgacaatca

SEQ ID NO: 347582 - DNA, 25 bp, Homo sapien
ccaggtgagttaagtgacaatcaaa

SEQ ID NO: 347583 - DNA, 25 bp, Homo sapien
gagcagggccgagggccaaggacct

SEQ ID NO: 347584 - DNA, 25 bp, Homo sapien
agcagggccgagggccaaggacctc

SEQ ID NO: 347585 - DNA, 25 bp, Homo sapien
cccaggtgagttaagtgacaatcaa

SEQ ID NO: 347586 - DNA, 25 bp, Homo sapien
cacttaactcacctgggttaagacg

SEQ ID NO: 347587 - DNA, 25 bp, Homo sapien
ttgattgtcacttaactcacctggg

SEQ ID NO: 347588 - DNA, 25 bp, Homo sapien
aggtccttggccctcggccctgctc

SEQ ID NO: 347589 - DNA, 25 bp, Homo sapien
catgagctgggtgaatttgattgtc

SEQ ID NO: 347590 - DNA, 25 bp, Homo sapien
tgattgtcacttaactcacctgggt

SEQ ID NO: 347591 - DNA, 25 bp, Homo sapien
ctcagtgcccatgagctgggtgaat

SEQ ID NO: 347592 - DNA, 25 bp, Homo sapien
gacaatcaaattcacccagctcatg

SEQ ID NO: 347593 - DNA, 25 bp, Homo sapien
attcacccagctcatgggcactgag

SEQ ID NO: 347594 - DNA, 25 bp, Homo sapien
taacccaggtgagttaagtgacaat

SEQ ID NO: 347595 - DNA, 25 bp, Homo sapien
gagcagggccgagggccaaggacct

SEQ ID NO: 347596 - DNA, 25 bp, Homo sapien
cgtcttaacccaggtgagttaagtg

SEQ ID NO: 347597 - DNA, 25 bp, Homo sapien
cccaggtgagttaagtgacaatcaa

SEQ ID NO: 347598 - DNA, 25 bp, Homo sapien
gagccggttcggactaggtccagcc

SEQ ID NO: 347599 - DNA, 25 bp, Homo sapien
gtcccgcacgctactgaacgcggga

SEQ ID NO: 347600 - DNA, 25 bp, Homo sapien
ctgaacgcgggacacgaccttgtgg

SEQ ID NO: 347601 - DNA, 25 bp, Homo sapien
cggttcggactaggtccagccttcg

SEQ ID NO: 347602 - DNA, 25 bp, Homo sapien
ccggaagagacctctcttagtccct

SEQ ID NO: 347603 - DNA, 25 bp, Homo sapien
gcctcccggaagagacctctcttag

SEQ ID NO: 347604 - DNA, 25 bp, Homo sapien
cgaaggctggacctagtccgaaccg

SEQ ID NO: 347605 - DNA, 25 bp, Homo sapien
ctaagagaggtctcttccgggaggc

SEQ ID NO: 347606 - DNA, 25 bp, Homo sapien
aggctggacctagtccgaaccggct

SEQ ID NO: 347607 - DNA, 25 bp, Homo sapien
tcgtgtcccgcgttcagtagcgtgc

SEQ ID NO: 347608 - DNA, 25 bp, Homo sapien
acaaggtcgtgtcccgcgttcagta

SEQ ID NO: 347609 - DNA, 25 bp, Homo sapien
agggactaagagaggtctcttccgg

SEQ ID NO: 347610 - DNA, 25 bp, Homo sapien
tcgtgtttacggcggcgcccgctgc

SEQ ID NO: 347611 - DNA, 25 bp, Homo sapien
gagtgctgctgctaacgcggtcccc

SEQ ID NO: 347612 - DNA, 25 bp, Homo sapien
cccggcacgcaccatctgttgccat

SEQ ID NO: 347613 - DNA, 25 bp, Homo sapien
cctggtttctcaagagtgctgctgc

SEQ ID NO: 347614 - DNA, 25 bp, Homo sapien
gctgcgcgcgcatgtttcctctttt

SEQ ID NO: 347615 - DNA, 25 bp, Homo sapien
gtgctgctgctaacgcggtccccgg

SEQ ID NO: 347616 - DNA, 25 bp, Homo sapien
aaagaggaaacatgcgcgcgcagcg

SEQ ID NO: 347617 - DNA, 25 bp, Homo sapien
gcagcgggcgccgccgtaaacacga

SEQ ID NO: 347618 - DNA, 25 bp, Homo sapien
gcagcagcactcttgagaaaccagg

SEQ ID NO: 347619 - DNA, 25 bp, Homo sapien
aaaagaggaaacatgcgcgcgcagc

SEQ ID NO: 347620 - DNA, 25 bp, Homo sapien
gatggcaacagatggtgcgtgccgg

SEQ ID NO: 347621 - DNA, 25 bp, Homo sapien
cggggaccgcgttagcagcagcact

SEQ ID NO: 347622 - DNA, 25 bp, Homo sapien
aggacgcctggcgaaacgcagtaac

SEQ ID NO: 347623 - DNA, 25 bp, Homo sapien
tacggctcgtgagttcttccgccca

SEQ ID NO: 347624 - DNA, 25 bp, Homo sapien
ggaccttcgctttacggctcgtgag

SEQ ID NO: 347625 - DNA, 25 bp, Homo sapien
cgggagagcagtttacgacagcgcc

SEQ ID NO: 347626 - DNA, 25 bp, Homo sapien
aagcgggagagcagtttacgacagc

SEQ ID NO: 347627 - DNA, 25 bp, Homo sapien
tggcgaaacgcagtaacggatttcc

SEQ ID NO: 347628 - DNA, 25 bp, Homo sapien
tcacgagccgtaaagcgaaggtcca

SEQ ID NO: 347629 - DNA, 25 bp, Homo sapien
gaaatccgttactgcgtttcgccag

SEQ ID NO: 347630 - DNA, 25 bp, Homo sapien
gttactgcgtttcgccaggcgtcct

SEQ ID NO: 347631 - DNA, 25 bp, Homo sapien
gaagaactcacgagccgtaaagcga

SEQ ID NO: 347632 - DNA, 25 bp, Homo sapien
ggcgctgtcgtaaactgctctcccg

SEQ ID NO: 347633 - DNA, 25 bp, Homo sapien
ttgggcggaagaactcacgagccgt

SEQ ID NO: 347634 - DNA, 25 bp, Homo sapien
ggataccgcctgacgtagtgccaat

SEQ ID NO: 347635 - DNA, 25 bp, Homo sapien
ttcagtgatgaacgccctctttggg

SEQ ID NO: 347636 - DNA, 25 bp, Homo sapien
tgcgcggccgccaagtttcagtgat

SEQ ID NO: 347637 - DNA, 25 bp, Homo sapien
gcctgacgtagtgccaatcacacct

SEQ ID NO: 347638 - DNA, 25 bp, Homo sapien
cggccgccaagtttcagtgatgaac

SEQ ID NO: 347639 - DNA, 25 bp, Homo sapien
gatgaacgccctctttgggcgtccc

SEQ ID NO: 347640 - DNA, 25 bp, Homo sapien
tgtgattggcactacgtcaggcggt

SEQ ID NO: 347641 - DNA, 25 bp, Homo sapien
agaggtgtgattggcactacgtcag

SEQ ID NO: 347642 - DNA, 25 bp, Homo sapien
cccaaagagggcgttcatcactgaa

SEQ ID NO: 347643 - DNA, 25 bp, Homo sapien
gggacgcccaaagagggcgttcatc

SEQ ID NO: 347644 - DNA, 25 bp, Homo sapien
ttcatcactgaaacttggcggccgc

SEQ ID NO: 347645 - DNA, 25 bp, Homo sapien
ttggcactacgtcaggcggtatccg

SEQ ID NO: 347646 - DNA, 25 bp, Homo sapien
tttagcgctgtgttcttctccactg

SEQ ID NO: 347647 - DNA, 25 bp, Homo sapien
tcctgttccacctcaatataatttt

SEQ ID NO: 347648 - DNA, 25 bp, Homo sapien
tgttccacctcaatataattttgtg

SEQ ID NO: 347649 - DNA, 25 bp, Homo sapien
gagggttgaaggaactgtcttcaaa

SEQ ID NO: 347650 - DNA, 25 bp, Homo sapien
ccaagtcctgcggactcctgcgccc

SEQ ID NO: 347651 - DNA, 25 bp, Homo sapien
tcctgcggactcctgcgcccagtaa

SEQ ID NO: 347652 - DNA, 25 bp, Homo sapien
tgcggactcctgcgcccagtaatca

SEQ ID NO: 347653 - DNA, 25 bp, Homo sapien
gctccaagtcctgcggactcctgcg

SEQ ID NO: 347654 - DNA, 25 bp, Homo sapien
gaagcactgttcctgctcccgcagg

SEQ ID NO: 347655 - DNA, 25 bp, Homo sapien
ggctataggtccacagcaggctctg

SEQ ID NO: 347656 - DNA, 25 bp, Homo sapien
cgcaggcggctataggtccacagca

SEQ ID NO: 347657 - DNA, 25 bp, Homo sapien
ctccatggcgaagcactgttcctgc

SEQ ID NO: 347658 - DNA, 25 bp, Homo sapien
tgaaacaatgtttgtgcatttgaga

SEQ ID NO: 347659 - DNA, 25 bp, Homo sapien
gaaacaatgtttgtgcatttgagaa

SEQ ID NO: 347660 - DNA, 25 bp, Homo sapien
aggtccccctcgctcttggtgtggt

SEQ ID NO: 347661 - DNA, 25 bp, Homo sapien
tcgctcttggtgtggtcgccattga

SEQ ID NO: 347662 - DNA, 25 bp, Homo sapien
gtgtggtcgccattgatggcaatga

SEQ ID NO: 347663 - DNA, 25 bp, Homo sapien
gccattgatggcaatgaacaggcat

SEQ ID NO: 347664 - DNA, 25 bp, Homo sapien
gggagttgctgttttccatggagaa

SEQ ID NO: 347665 - DNA, 25 bp, Homo sapien
agggagttgctgttttccatggaga

SEQ ID NO: 347666 - DNA, 25 bp, Homo sapien
gagcacagtggagcgtccagacagc

SEQ ID NO: 347667 - DNA, 25 bp, Homo sapien
cctcatcggagagcagcacaacatc

SEQ ID NO: 347668 - DNA, 25 bp, Homo sapien
ctctgtgactgcctcatcggagagc

SEQ ID NO: 347669 - DNA, 25 bp, Homo sapien
ctgcctcatcggagagcagcacaac

SEQ ID NO: 347670 - DNA, 25 bp, Homo sapien
ctgtgcgggtcagcgccacacggaa

SEQ ID NO: 347671 - DNA, 25 bp, Homo sapien
atctgtgcgggtcagcgccacacgg

SEQ ID NO: 347672 - DNA, 25 bp, Homo sapien
ggcatctgtgcgggtcagcgccaca

SEQ ID NO: 347673 - DNA, 25 bp, Homo sapien
cgccacacggaagcccctcgtccct

SEQ ID NO: 347674 - DNA, 25 bp, Homo sapien
ggccaagaagatgtgggaaacatcc

SEQ ID NO: 347675 - DNA, 25 bp, Homo sapien
ctgaggccaagaagatgtgggaaac

SEQ ID NO: 347676 - DNA, 25 bp, Homo sapien
ccaagaagatgtgggaaacatccat

SEQ ID NO: 347677 - DNA, 25 bp, Homo sapien
gaggccaagaagatgtgggaaacat

SEQ ID NO: 347678 - DNA, 25 bp, Homo sapien
ctgtttcaggatcgtgatagttcat

SEQ ID NO: 347679 - DNA, 25 bp, Homo sapien
actgtttcaggatcgtgatagttca

SEQ ID NO: 347680 - DNA, 25 bp, Homo sapien
aactgtttcaggatcgtgatagttc

SEQ ID NO: 347681 - DNA, 25 bp, Homo sapien
acacagcagcaccttccctcactcc

SEQ ID NO: 347682 - DNA, 25 bp, Homo sapien
tttttggatttggtgaagtcagcat

SEQ ID NO: 347683 - DNA, 25 bp, Homo sapien
tccctgcagaggctttgaagttttt

SEQ ID NO: 347684 - DNA, 25 bp, Homo sapien
agaggctttgaagtttttggatttg

SEQ ID NO: 347685 - DNA, 25 bp, Homo sapien
ttaagttatggagagtgagcctccc

SEQ ID NO: 347686 - DNA, 25 bp, Homo sapien
taaggtcgttagttcgatgtgcagc

SEQ ID NO: 347687 - DNA, 25 bp, Homo sapien
gaacattggacccttctagagtaga

SEQ ID NO: 347688 - DNA, 25 bp, Homo sapien
cctggctgatagaccattttttaag

SEQ ID NO: 347689 - DNA, 25 bp, Homo sapien
ttaactctccatgatcgcagcaagg

SEQ ID NO: 347690 - DNA, 25 bp, Homo sapien
gagctcaacctcaggaaatgccggt

SEQ ID NO: 347691 - DNA, 25 bp, Homo sapien
tcctggattctagacgggtgccctt

SEQ ID NO: 347692 - DNA, 25 bp, Homo sapien
ccttacactgggatggaactgctaa

SEQ ID NO: 347693 - DNA, 25 bp, Homo sapien
tcaaggcctaggaagtcatcacagt

SEQ ID NO: 347694 - DNA, 25 bp, Homo sapien
gattgccccatcaatgctgggcgga

SEQ ID NO: 347695 - DNA, 25 bp, Homo sapien
gggcatcagtgagtccaaggacccc

SEQ ID NO: 347696 - DNA, 25 bp, Homo sapien
agtgtcattgttgaacccgctgggc

SEQ ID NO: 347697 - DNA, 25 bp, Homo sapien
aataatggtacatgggaaatcatgc

SEQ ID NO: 347698 - DNA, 25 bp, Homo sapien
ctcctcccgcggtcttctggcgagg

SEQ ID NO: 347699 - DNA, 25 bp, Homo sapien
ggtcttctggcgaggcccgcggtct

SEQ ID NO: 347700 - DNA, 25 bp, Homo sapien
cttttggaaggtctcccagcggagg

SEQ ID NO: 347701 - DNA, 25 bp, Homo sapien
tacatggagatctccgtggacggca

SEQ ID NO: 347702 - DNA, 25 bp, Homo sapien
tatccctgtcggagttgtaggtggc

SEQ ID NO: 347703 - DNA, 25 bp, Homo sapien
gtcgataaacatgtgcaccgccagc

SEQ ID NO: 347704 - DNA, 25 bp, Homo sapien
cgcagctgtttgtgccggtcgataa

SEQ ID NO: 347705 - DNA, 25 bp, Homo sapien
tggctgcgatgcagaggccacccat

SEQ ID NO: 347706 - DNA, 25 bp, Homo sapien
agttttgtagaactcgctggctgcg

SEQ ID NO: 347707 - DNA, 25 bp, Homo sapien
caggatgatgttgtgtcgagttttg

SEQ ID NO: 347708 - DNA, 25 bp, Homo sapien
cgaagaagatgccggcactcaggat

SEQ ID NO: 347709 - DNA, 25 bp, Homo sapien
aaaaaatcaggtggtgggctggatg

SEQ ID NO: 347710 - DNA, 25 bp, Homo sapien
tgctagtcatacttggccagctgtg

SEQ ID NO: 347711 - DNA, 25 bp, Homo sapien
aaaaaaatcaggtggtgggctggat

SEQ ID NO: 347712 - DNA, 25 bp, Homo sapien
cattaggtctgtaggtctccctcca

SEQ ID NO: 347713 - DNA, 25 bp, Homo sapien
tctagggaactcttatggaaggacc

SEQ ID NO: 347714 - DNA, 25 bp, Homo sapien
gaccttaactaggagtggactcagg

SEQ ID NO: 347715 - DNA, 25 bp, Homo sapien
tccagatggctagccctcagggaga

SEQ ID NO: 347716 - DNA, 25 bp, Homo sapien
cccgagtgtgaaccagtgacattgc

SEQ ID NO: 347717 - DNA, 25 bp, Homo sapien
attgctcagtcatcaaagtgctttt

SEQ ID NO: 347718 - DNA, 25 bp, Homo sapien
tgacattgcagcaaagtgtggtcgg

SEQ ID NO: 347719 - DNA, 25 bp, Homo sapien
gggttgaattgtagacacatgcagg

SEQ ID NO: 347720 - DNA, 25 bp, Homo sapien
tgtgtcagcttcgtaatctgcatcc

SEQ ID NO: 347721 - DNA, 25 bp, Homo sapien
gctgtgtcagcttcgtaatctgcat

SEQ ID NO: 347722 - DNA, 25 bp, Homo sapien
ctgggaagtgatcaatttgcttgca

SEQ ID NO: 347723 - DNA, 25 bp, Homo sapien
attctgctgtgtcagcttcgtaatc

SEQ ID NO: 347724 - DNA, 25 bp, Homo sapien
agcagtggaggtttgattccgagct

SEQ ID NO: 347725 - DNA, 25 bp, Homo sapien
gacgacttcaaaacgctgccttctg

SEQ ID NO: 347726 - DNA, 25 bp, Homo sapien
ccgcagtactgcagagaggatctaa

SEQ ID NO: 347727 - DNA, 25 bp, Homo sapien
actgccacgcaggaggccgatgaat

SEQ ID NO: 347728 - DNA, 25 bp, Homo sapien
caattccgcacggaattcaccaaac

SEQ ID NO: 347729 - DNA, 25 bp, Homo sapien
catctgcaattccgcacggaattca

SEQ ID NO: 347730 - DNA, 25 bp, Homo sapien
cccatctgcaattccgcacggaatt

SEQ ID NO: 347731 - DNA, 25 bp, Homo sapien
ttcccatctgcaattccgcacggaa

SEQ ID NO: 347732 - DNA, 25 bp, Homo sapien
tcacatactatattagaaggaggta

SEQ ID NO: 347733 - DNA, 25 bp, Homo sapien
ggcaaagacagatagtacagaactt

SEQ ID NO: 347734 - DNA, 25 bp, Homo sapien
gaggtatgaggccttatggcagcac

SEQ ID NO: 347735 - DNA, 25 bp, Homo sapien
tacagaacttactagagtgcaatcc

SEQ ID NO: 347736 - DNA, 25 bp, Homo sapien
gtctccccagcgagagtgtaagttc

SEQ ID NO: 347737 - DNA, 25 bp, Homo sapien
tccaattgttcccattcacctgtct

SEQ ID NO: 347738 - DNA, 25 bp, Homo sapien
gattcaccggattttcctgtctcca

SEQ ID NO: 347739 - DNA, 25 bp, Homo sapien
cacctgtctccccagcgagagtgta

SEQ ID NO: 347740 - DNA, 25 bp, Homo sapien
cagaagccaaaatatgccgggtgaa

SEQ ID NO: 347741 - DNA, 25 bp, Homo sapien
ccgggtgaaggcagacattcggctc

SEQ ID NO: 347742 - DNA, 25 bp, Homo sapien
gaaggcagacattcggctctggacc

SEQ ID NO: 347743 - DNA, 25 bp, Homo sapien
ttagcaacatatgtaacacaagcca

SEQ ID NO: 347744 - DNA, 25 bp, Homo sapien
ccaagtttcccaaggacgcagtgaa

SEQ ID NO: 347745 - DNA, 25 bp, Homo sapien
taaaggtagccagggagtccatctc

SEQ ID NO: 347746 - DNA, 25 bp, Homo sapien
accctgttggccctgagagagctga

SEQ ID NO: 347747 - DNA, 25 bp, Homo sapien
tcaaatggtgatgtgtcgcaaagcc

SEQ ID NO: 347748 - DNA, 25 bp, Homo sapien
agagcagagcaggttctggctggca

SEQ ID NO: 347749 - DNA, 25 bp, Homo sapien
cataattgggccagccttgaaggca

SEQ ID NO: 347750 - DNA, 25 bp, Homo sapien
caaggacccagggattaacgtccag

SEQ ID NO: 347751 - DNA, 25 bp, Homo sapien
aacgtccagggcgttaacatcataa

SEQ ID NO: 347752 - DNA, 25 bp, Homo sapien
tagccagaagggttatttaaaatgc

SEQ ID NO: 347753 - DNA, 25 bp, Homo sapien
tccaatttttattggcattgtagcc

SEQ ID NO: 347754 - DNA, 25 bp, Homo sapien
tctgattacatcaattctgagaatc

SEQ ID NO: 347755 - DNA, 25 bp, Homo sapien
tgcaaatctgattacatcaattctg

SEQ ID NO: 347756 - DNA, 25 bp, Homo sapien
tcctcctctcgccaataagggcagg

SEQ ID NO: 347757 - DNA, 25 bp, Homo sapien
ttatgattaagggaaagtcctcctc

SEQ ID NO: 347758 - DNA, 25 bp, Homo sapien
tagtgacaggcatcagggaggccat

SEQ ID NO: 347759 - DNA, 25 bp, Homo sapien
ccaataagggcaggtagtgacaggc

SEQ ID NO: 347760 - DNA, 25 bp, Homo sapien
gctgaggctgccatgtacgtcggag

SEQ ID NO: 347761 - DNA, 25 bp, Homo sapien
tctcctatcagtctctagaggagtc

SEQ ID NO: 347762 - DNA, 25 bp, Homo sapien
catgtacgtcggaggcagtacccga

SEQ ID NO: 347763 - DNA, 25 bp, Homo sapien
gagcaggcttggattcagtctccta

SEQ ID NO: 347764 - DNA, 25 bp, Homo sapien
cctggtactgttcagagtctagcag

SEQ ID NO: 347765 - DNA, 25 bp, Homo sapien
ccgcgtcatggggacccgctgtgtc

SEQ ID NO: 347766 - DNA, 25 bp, Homo sapien
agagtctagcaggaccgcgtcatgg

SEQ ID NO: 347767 - DNA, 25 bp, Homo sapien
tcagatgactgcctggtactgttca

SEQ ID NO: 347768 - DNA, 25 bp, Homo sapien
tccagttctcagttcacgaggtccg

SEQ ID NO: 347769 - DNA, 25 bp, Homo sapien
tggatcttaagaagtcggattcccc

SEQ ID NO: 347770 - DNA, 25 bp, Homo sapien
gctactctaatgagctggatcttaa

SEQ ID NO: 347771 - DNA, 25 bp, Homo sapien
tgaacctgggagcactttccgttct

SEQ ID NO: 347772 - DNA, 25 bp, Homo sapien
gttctgacccaattctctcatcatt

SEQ ID NO: 347773 - DNA, 25 bp, Homo sapien
aaagactcgacccaattctcaagcc

SEQ ID NO: 347774 - DNA, 25 bp, Homo sapien
acacattcacatttgacccagttcc

SEQ ID NO: 347775 - DNA, 25 bp, Homo sapien
aaagacgtgacccaatttgcctcca

SEQ ID NO: 347776 - DNA, 25 bp, Homo sapien
tgtcaaaactcatcacactggtgct

SEQ ID NO: 347777 - DNA, 25 bp, Homo sapien
cattggctggactagggtttaaatc

SEQ ID NO: 347778 - DNA, 25 bp, Homo sapien
gtttaaatccctgcaccaccaatga

SEQ ID NO: 347779 - DNA, 25 bp, Homo sapien
gactatacagtagatcccagaggat

SEQ ID NO: 347780 - DNA, 25 bp, Homo sapien
ggtgctctgcaaagccgctgactta

SEQ ID NO: 347781 - DNA, 25 bp, Homo sapien
gcaaagccgctgacttagacctggg

SEQ ID NO: 347782 - DNA, 25 bp, Homo sapien
tcctctggtgctctgcaaagccgct

SEQ ID NO: 347783 - DNA, 25 bp, Homo sapien
tctgcaaagccgctgacttagacct

SEQ ID NO: 347784 - DNA, 25 bp, Homo sapien
tcgtcgtcaccctgaaaggtgcaaa

SEQ ID NO: 347785 - DNA, 25 bp, Homo sapien
agggcacagtcgtcgtcaccctgaa

SEQ ID NO: 347786 - DNA, 25 bp, Homo sapien
gcacagtcgtcgtcaccctgaaagg

SEQ ID NO: 347787 - DNA, 25 bp, Homo sapien
cgtcaccctgaaaggtgcaaagcag

SEQ ID NO: 347788 - DNA, 25 bp, Homo sapien
tagagccaatagtcggttcccacag

SEQ ID NO: 347789 - DNA, 25 bp, Homo sapien
ttcattctcactgacacttttggtc

SEQ ID NO: 347790 - DNA, 25 bp, Homo sapien
tccggaatgggtcataacttcctcg

SEQ ID NO: 347791 - DNA, 25 bp, Homo sapien
gcaaacccctctggagtagagccaa

SEQ ID NO: 347792 - DNA, 25 bp, Homo sapien
catttgaacacctcgatcaaacagc

SEQ ID NO: 347793 - DNA, 25 bp, Homo sapien
tttgaacacctcgatcaaacagccc

SEQ ID NO: 347794 - DNA, 25 bp, Homo sapien
aagcaccaacggtggttaaaagcat

SEQ ID NO: 347795 - DNA, 25 bp, Homo sapien
caccaacggtggttaaaagcatttg

SEQ ID NO: 347796 - DNA, 25 bp, Homo sapien
tataaagatcacacgggaagaggct

SEQ ID NO: 347797 - DNA, 25 bp, Homo sapien
tgtgagagccgagatgcaaccttcg

SEQ ID NO: 347798 - DNA, 25 bp, Homo sapien
gcggcctgcgccatgaaaatccttt

SEQ ID NO: 347799 - DNA, 25 bp, Homo sapien
cagtgaaccagggaacagccgaatt

SEQ ID NO: 347800 - DNA, 25 bp, Homo sapien
aggctgaagacttctccactttggt

SEQ ID NO: 347801 - DNA, 25 bp, Homo sapien
gggtacagcaagagctatatttgca

SEQ ID NO: 347802 - DNA, 25 bp, Homo sapien
agagctatatttgcaggctgaagac

SEQ ID NO: 347803 - DNA, 25 bp, Homo sapien
cagcaagagctatatttgcaggctg

SEQ ID NO: 347804 - DNA, 25 bp, Homo sapien
caactgttaatgaccactggcgctg

SEQ ID NO: 347805 - DNA, 25 bp, Homo sapien
ggccatgaacttcatcatgttccac

SEQ ID NO: 347806 - DNA, 25 bp, Homo sapien
gttaatgaccactggcgctggccct

SEQ ID NO: 347807 - DNA, 25 bp, Homo sapien
tccacaactgttaatgaccactggc

SEQ ID NO: 347808 - DNA, 25 bp, Homo sapien
gggcatatgtcaccagctctcaaag

SEQ ID NO: 347809 - DNA, 25 bp, Homo sapien
gcctgggaattggaacacctgggct

SEQ ID NO: 347810 - DNA, 25 bp, Homo sapien
catgcacacttcaaacgcccagtgg

SEQ ID NO: 347811 - DNA, 25 bp, Homo sapien
gaagactgacattgattgagcacct

SEQ ID NO: 347812 - DNA, 25 bp, Homo sapien
ctcactcattcagttacacgggctg

SEQ ID NO: 347813 - DNA, 25 bp, Homo sapien
tatttgccctcgagtgtttacagaa

SEQ ID NO: 347814 - DNA, 25 bp, Homo sapien
gctgctttagcacttcgatggtaga

SEQ ID NO: 347815 - DNA, 25 bp, Homo sapien
cagaagaggtgtgctgatacttgct

SEQ ID NO: 347816 - DNA, 25 bp, Homo sapien
caggcgtccagtcatgcagggtgca

SEQ ID NO: 347817 - DNA, 25 bp, Homo sapien
tggtgtgatatgacccaggcgtcca

SEQ ID NO: 347818 - DNA, 25 bp, Homo sapien
ctgggttccactgccttggccgctg

SEQ ID NO: 347819 - DNA, 25 bp, Homo sapien
cgccgtgcagtcaggtgtggcaaac

SEQ ID NO: 347820 - DNA, 25 bp, Homo sapien
gagctcctgactgcacgttgagccc

SEQ ID NO: 347821 - DNA, 25 bp, Homo sapien
gtgtggcttgaggtgtcggcaggac

SEQ ID NO: 347822 - DNA, 25 bp, Homo sapien
gggcattggccaccctgcagtcacc

SEQ ID NO: 347823 - DNA, 25 bp, Homo sapien
tgagcccctgagtgtgtggcttgag

SEQ ID NO: 347824 - DNA, 25 bp, Homo sapien
aaggttctatgcgagtcccactccc

SEQ ID NO: 347825 - DNA, 25 bp, Homo sapien
taaaggttctatgcgagtcccactc

SEQ ID NO: 347826 - DNA, 25 bp, Homo sapien
gaataaaggttctatgcgagtccca

SEQ ID NO: 347827 - DNA, 25 bp, Homo sapien
ggttctatgcgagtcccactccctg

SEQ ID NO: 347828 - DNA, 25 bp, Homo sapien
ggctggtgccgggcccgtcttgcat

SEQ ID NO: 347829 - DNA, 25 bp, Homo sapien
ttgcactgcttttgcaacccggtag

SEQ ID NO: 347830 - DNA, 25 bp, Homo sapien
tgcaacccggtaggggctggtgccg

SEQ ID NO: 347831 - DNA, 25 bp, Homo sapien
ctgcttttgcaacccggtaggggct

SEQ ID NO: 347832 - DNA, 25 bp, Homo sapien
tgtcttctccggttgtgcagcacga

SEQ ID NO: 347833 - DNA, 25 bp, Homo sapien
agaggtaattctgtcttctccggtt

SEQ ID NO: 347834 - DNA, 25 bp, Homo sapien
gtgcagcacgatctgctccagctcg

SEQ ID NO: 347835 - DNA, 25 bp, Homo sapien
tctccggttgtgcagcacgatctgc

SEQ ID NO: 347836 - DNA, 25 bp, Homo sapien
accttctcccggtacagctggtgga

SEQ ID NO: 347837 - DNA, 25 bp, Homo sapien
gaactgcttggcaaggcagtggaaa

SEQ ID NO: 347838 - DNA, 25 bp, Homo sapien
tggtggaactgcttggcaaggcagt

SEQ ID NO: 347839 - DNA, 25 bp, Homo sapien
tcatgccagggcccggaaaacctcc

SEQ ID NO: 347840 - DNA, 25 bp, Homo sapien
gaattttgacaatcacccagggctg

SEQ ID NO: 347841 - DNA, 25 bp, Homo sapien
tgagaagaggccgtgaaatatcccc

SEQ ID NO: 347842 - DNA, 25 bp, Homo sapien
gatgtgcgaaggaaaccaggtcccg

SEQ ID NO: 347843 - DNA, 25 bp, Homo sapien
tgttttgagacgatccctggcagct

SEQ ID NO: 347844 - DNA, 25 bp, Homo sapien
acgttacttccccactcctcgcttg

SEQ ID NO: 347845 - DNA, 25 bp, Homo sapien
tgtagggctgttatgaagcctaaac

SEQ ID NO: 347846 - DNA, 25 bp, Homo sapien
cacagtaggccctcatcaaacgtta

SEQ ID NO: 347847 - DNA, 25 bp, Homo sapien
taatgtgtgcaaaacacctagcaca

SEQ ID NO: 347848 - DNA, 25 bp, Homo sapien
gagttttataagctcggacggcagc

SEQ ID NO: 347849 - DNA, 25 bp, Homo sapien
gctttcttaaccgagctgccagcgg

SEQ ID NO: 347850 - DNA, 25 bp, Homo sapien
tactgagtgtttaccaggcgccaga

SEQ ID NO: 347851 - DNA, 25 bp, Homo sapien
gaatcaggtctaaaggccacaaggt

SEQ ID NO: 347852 - DNA, 25 bp, Homo sapien
ctgctcgtctgccggccaggtctgt

SEQ ID NO: 347853 - DNA, 25 bp, Homo sapien
cactgctcgtctgccggccaggtct

SEQ ID NO: 347854 - DNA, 25 bp, Homo sapien
tgctcgtctgccggccaggtctgtc

SEQ ID NO: 347855 - DNA, 25 bp, Homo sapien
actgctcgtctgccggccaggtctg

SEQ ID NO: 347856 - DNA, 25 bp, Homo sapien
aactgatattacagcaccctcccgt

SEQ ID NO: 347857 - DNA, 25 bp, Homo sapien
tacttgtaccccatatacaagagaa

SEQ ID NO: 347858 - DNA, 25 bp, Homo sapien
cattcccgtttcctagactgggaga

SEQ ID NO: 347859 - DNA, 25 bp, Homo sapien
tgccaggtgcgtgtcttcattcccg

SEQ ID NO: 347860 - DNA, 25 bp, Homo sapien
catagacgagacataagacattggg

SEQ ID NO: 347861 - DNA, 25 bp, Homo sapien
gaaggattcttcattggtcacatca

SEQ ID NO: 347862 - DNA, 25 bp, Homo sapien
tggagcctgtgaccgagccttctcc

SEQ ID NO: 347863 - DNA, 25 bp, Homo sapien
cattggtcacatcatagacgagaca

SEQ ID NO: 347864 - DNA, 25 bp, Homo sapien
aactggacagggctccatgacccaa

SEQ ID NO: 347865 - DNA, 25 bp, Homo sapien
tccatgacccaattaagagccaagg

SEQ ID NO: 347866 - DNA, 25 bp, Homo sapien
catgacccaattaagagccaaggct

SEQ ID NO: 347867 - DNA, 25 bp, Homo sapien
cagggctccatgacccaattaagag

SEQ ID NO: 347868 - DNA, 25 bp, Homo sapien
caatttatccagcatttccgaaaac

SEQ ID NO: 347869 - DNA, 25 bp, Homo sapien
agcatttccgaaaacagctccttgc

SEQ ID NO: 347870 - DNA, 25 bp, Homo sapien
tccagcatttccgaaaacagctcct

SEQ ID NO: 347871 - DNA, 25 bp, Homo sapien
tttatccagcatttccgaaaacagc

SEQ ID NO: 347872 - DNA, 25 bp, Homo sapien
aactcacactggacttgtcttaggg

SEQ ID NO: 347873 - DNA, 25 bp, Homo sapien
cacaagctacgagtcactggtatca

SEQ ID NO: 347874 - DNA, 25 bp, Homo sapien
tcttagagaggcagtacgacgggtt

SEQ ID NO: 347875 - DNA, 25 bp, Homo sapien
tctcccaggcacgagagaagatgaa

SEQ ID NO: 347876 - DNA, 25 bp, Homo sapien
cccaggttcccataaagagactcaa

SEQ ID NO: 347877 - DNA, 25 bp, Homo sapien
tctggtgaaagctacaaaccctctc

SEQ ID NO: 347878 - DNA, 25 bp, Homo sapien
ttcccctgggtaaaggcatcactca

SEQ ID NO: 347879 - DNA, 25 bp, Homo sapien
gattctattccgaaatgctcagcca

SEQ ID NO: 347880 - DNA, 25 bp, Homo sapien
cacactgtctcccgtgtcaggaact

SEQ ID NO: 347881 - DNA, 25 bp, Homo sapien
cactgtctcccgtgtcaggaactgg

SEQ ID NO: 347882 - DNA, 25 bp, Homo sapien
ctgtctcccgtgtcaggaactggca

SEQ ID NO: 347883 - DNA, 25 bp, Homo sapien
actgtctcccgtgtcaggaactggc

SEQ ID NO: 347884 - DNA, 25 bp, Homo sapien
ctgccgaggaacaccaagaatgtta

SEQ ID NO: 347885 - DNA, 25 bp, Homo sapien
ccgaggaacaccaagaatgttagca

SEQ ID NO: 347886 - DNA, 25 bp, Homo sapien
caccaagaatgttagcactgagggc

SEQ ID NO: 347887 - DNA, 25 bp, Homo sapien
ggaacaccaagaatgttagcactga

SEQ ID NO: 347888 - DNA, 25 bp, Homo sapien
gctccatcactgcggaagatctgtg

SEQ ID NO: 347889 - DNA, 25 bp, Homo sapien
ttctggaaatgggctccatcactgc

SEQ ID NO: 347890 - DNA, 25 bp, Homo sapien
tttctggaaatgggctccatcactg

SEQ ID NO: 347891 - DNA, 25 bp, Homo sapien
ccatcactgcggaagatctgtgcca

SEQ ID NO: 347892 - DNA, 25 bp, Homo sapien
tcacgggaacttgttctgaggccgc

SEQ ID NO: 347893 - DNA, 25 bp, Homo sapien
tctgcaaacctcacaacagccagag

SEQ ID NO: 347894 - DNA, 25 bp, Homo sapien
agagcacacttctgcacggctaagc

SEQ ID NO: 347895 - DNA, 25 bp, Homo sapien
gcagggcacaggtccatgagactga

SEQ ID NO: 347896 - DNA, 25 bp, Homo sapien
gccctggaaacggaactgacgctct

SEQ ID NO: 347897 - DNA, 25 bp, Homo sapien
taacagaacttacagagggctttgg

SEQ ID NO: 347898 - DNA, 25 bp, Homo sapien
ggaactgacgctcttccactgaaac

SEQ ID NO: 347899 - DNA, 25 bp, Homo sapien
cagaaggtaacagaacttacagagg

SEQ ID NO: 347900 - DNA, 25 bp, Homo sapien
tatgtcgcagttttcagtctgagac

SEQ ID NO: 347901 - DNA, 25 bp, Homo sapien
ctgcatttgtgggaagcaagaagtc

SEQ ID NO: 347902 - DNA, 25 bp, Homo sapien
cgcagaatacctgtctgtgacccaa

SEQ ID NO: 347903 - DNA, 25 bp, Homo sapien
ggtcaacagccccagaaactggtcc

SEQ ID NO: 347904 - DNA, 25 bp, Homo sapien
ctctcctagagctcagggaccactt

SEQ ID NO: 347905 - DNA, 25 bp, Homo sapien
gctcagggaccacttctgacacttt

SEQ ID NO: 347906 - DNA, 25 bp, Homo sapien
cagagaggctgggtaactcgcccag

SEQ ID NO: 347907 - DNA, 25 bp, Homo sapien
acatctggggcaaccacagcctaga

SEQ ID NO: 347908 - DNA, 25 bp, Homo sapien
cggtgactctgacgtagtaggtgct

SEQ ID NO: 347909 - DNA, 25 bp, Homo sapien
caactgactcatgcttgcaggccca

SEQ ID NO: 347910 - DNA, 25 bp, Homo sapien
ttaatgagttaatatgcacagtgcc

SEQ ID NO: 347911 - DNA, 25 bp, Homo sapien
tgttagaacgtatcacacgcatctt

SEQ ID NO: 347912 - DNA, 25 bp, Homo sapien
gggcagcacagtaactttgggtctt

SEQ ID NO: 347913 - DNA, 25 bp, Homo sapien
ggtgcttgggatgtatcagtcaaca

SEQ ID NO: 347914 - DNA, 25 bp, Homo sapien
tgggagactcaacatttatgccctt

SEQ ID NO: 347915 - DNA, 25 bp, Homo sapien
gacaacacacaagtgccttttgcaa

SEQ ID NO: 347916 - DNA, 25 bp, Homo sapien
gccaggatgcatttggctgccagct

SEQ ID NO: 347917 - DNA, 25 bp, Homo sapien
tgcatttggctgccagcttcaccat

SEQ ID NO: 347918 - DNA, 25 bp, Homo sapien
gatgcatttggctgccagcttcacc

SEQ ID NO: 347919 - DNA, 25 bp, Homo sapien
ctgccaggatgcatttggctgccag

SEQ ID NO: 347920 - DNA, 25 bp, Homo sapien
gtaaccaacactcccgcgagccgta

SEQ ID NO: 347921 - DNA, 25 bp, Homo sapien
acaagagcggctgctagagacgcga

SEQ ID NO: 347922 - DNA, 25 bp, Homo sapien
ccgcgagccgtacccagaggacaag

SEQ ID NO: 347923 - DNA, 25 bp, Homo sapien
ggctgctagagacgcgagtgggtgg

SEQ ID NO: 347924 - DNA, 25 bp, Homo sapien
gatgaccgagcccggcccttctggg

SEQ ID NO: 347925 - DNA, 25 bp, Homo sapien
gggagggctgatctcaagggtcagt

SEQ ID NO: 347926 - DNA, 25 bp, Homo sapien
atctcaagggtcagtggccgcgacg

SEQ ID NO: 347927 - DNA, 25 bp, Homo sapien
ctggggatgaccgagcccggccctt

SEQ ID NO: 347928 - DNA, 25 bp, Homo sapien
ccggctcgaggcctgacacggcagt

SEQ ID NO: 347929 - DNA, 25 bp, Homo sapien
tctgaaaaggtgcaagcgagcggac

SEQ ID NO: 347930 - DNA, 25 bp, Homo sapien
aagcgagcggacacggcctgtgctc

SEQ ID NO: 347931 - DNA, 25 bp, Homo sapien
cctgacacggcagtctgaaaaggtg

SEQ ID NO: 347932 - DNA, 25 bp, Homo sapien
cagtctgcttgacgagtggttgtaa

SEQ ID NO: 347933 - DNA, 25 bp, Homo sapien
gaccctcgattggttgccgccaaaa

SEQ ID NO: 347934 - DNA, 25 bp, Homo sapien
tgacgtcaaccagctttatatcccg

SEQ ID NO: 347935 - DNA, 25 bp, Homo sapien
tccgatcacaagtaccgggccggat

SEQ ID NO: 347936 - DNA, 25 bp, Homo sapien
ctcatggacccaagggccttctata

SEQ ID NO: 347937 - DNA, 25 bp, Homo sapien
tacatttctgtgactgaaggtaagc

SEQ ID NO: 347938 - DNA, 25 bp, Homo sapien
ggtaagctgaatgagagtcactagg

SEQ ID NO: 347939 - DNA, 25 bp, Homo sapien
gacccaagggccttctatacatttc

SEQ ID NO: 347940 - DNA, 25 bp, Homo sapien
tccactgttcacgtgggcccggttg

SEQ ID NO: 347941 - DNA, 25 bp, Homo sapien
tggcggtggccatctcaataaaggg

SEQ ID NO: 347942 - DNA, 25 bp, Homo sapien
tgcactgccttctctcggtaatgac

SEQ ID NO: 347943 - DNA, 25 bp, Homo sapien
gttgtttatgtctccgctgatgcag

SEQ ID NO: 347944 - DNA, 25 bp, Homo sapien
gggctgccgccttttgacttatttg

SEQ ID NO: 347945 - DNA, 25 bp, Homo sapien
cccggaatgcaaagtggaggcctga

SEQ ID NO: 347946 - DNA, 25 bp, Homo sapien
acggaggccgcgatgtcctgattct

SEQ ID NO: 347947 - DNA, 25 bp, Homo sapien
cagccgggaaattgtctgctgcagg

SEQ ID NO: 347948 - DNA, 25 bp, Homo sapien
gaatacgccgtagacatcctgggtt

SEQ ID NO: 347949 - DNA, 25 bp, Homo sapien
atacgccgtagacatcctgggttcc

SEQ ID NO: 347950 - DNA, 25 bp, Homo sapien
ggaatacgccgtagacatcctgggt

SEQ ID NO: 347951 - DNA, 25 bp, Homo sapien
ttggaatacgccgtagacatcctgg

SEQ ID NO: 347952 - DNA, 25 bp, Homo sapien
ctttgagggaggaccacgtctcctt

SEQ ID NO: 347953 - DNA, 25 bp, Homo sapien
gagggaggaccacgtctccttggca

SEQ ID NO: 347954 - DNA, 25 bp, Homo sapien
ccttggcagccatcatatcctggtg

SEQ ID NO: 347955 - DNA, 25 bp, Homo sapien
tccttggcagccatcatatcctggt

SEQ ID NO: 347956 - DNA, 25 bp, Homo sapien
aggcctgggtcttcctgagcaagca

SEQ ID NO: 347957 - DNA, 25 bp, Homo sapien
gcctgggtcttcctgagcaagcaga

SEQ ID NO: 347958 - DNA, 25 bp, Homo sapien
ccaggcctgggtcttcctgagcaag

SEQ ID NO: 347959 - DNA, 25 bp, Homo sapien
cctgggtcttcctgagcaagcagag

SEQ ID NO: 347960 - DNA, 25 bp, Homo sapien
aatggtgtcattagagggccacagg

SEQ ID NO: 347961 - DNA, 25 bp, Homo sapien
aaaataacataaacgaactgaacag

SEQ ID NO: 347962 - DNA, 25 bp, Homo sapien
gaagaccaggggcagtcagtgcttc

SEQ ID NO: 347963 - DNA, 25 bp, Homo sapien
ccgagattgggtgttcagggcagag

SEQ ID NO: 347964 - DNA, 25 bp, Homo sapien
tagctttcagccaccagagtggaga

SEQ ID NO: 347965 - DNA, 25 bp, Homo sapien
gctttcagccaccagagtggagaat

SEQ ID NO: 347966 - DNA, 25 bp, Homo sapien
ttagctttcagccaccagagtggag

SEQ ID NO: 347967 - DNA, 25 bp, Homo sapien
ctttcagccaccagagtggagaatt

SEQ ID NO: 347968 - DNA, 25 bp, Homo sapien
tgcacacggggcatgcggatcttct

SEQ ID NO: 347969 - DNA, 25 bp, Homo sapien
gaatgtaactaggactgcgtgcagg

SEQ ID NO: 347970 - DNA, 25 bp, Homo sapien
aactaggactgcgtgcaggcacgtg

SEQ ID NO: 347971 - DNA, 25 bp, Homo sapien
gatccatcgccgggaatgggtttca

SEQ ID NO: 347972 - DNA, 25 bp, Homo sapien
gttgctactcagtcaacatctgctg

SEQ ID NO: 347973 - DNA, 25 bp, Homo sapien
tgccgggcacagagttgctactcag

SEQ ID NO: 347974 - DNA, 25 bp, Homo sapien
tccattgccgggcacagagttgcta

SEQ ID NO: 347975 - DNA, 25 bp, Homo sapien
gcacagagttgctactcagtcaaca

SEQ ID NO: 347976 - DNA, 25 bp, Homo sapien
caattttgccgtccccatctttgtc

SEQ ID NO: 347977 - DNA, 25 bp, Homo sapien
gcatctggggagaagccttttagga

SEQ ID NO: 347978 - DNA, 25 bp, Homo sapien
tcttggtttctttagcagacaggtc

SEQ ID NO: 347979 - DNA, 25 bp, Homo sapien
tttagcagacaggtctctggcatct

SEQ ID NO: 347980 - DNA, 25 bp, Homo sapien
tcacatcatccgcactctttttctt

SEQ ID NO: 347981 - DNA, 25 bp, Homo sapien
catcatccgcactctttttcttcag

SEQ ID NO: 347982 - DNA, 25 bp, Homo sapien
caggccgaccatttggaagaacttt

SEQ ID NO: 347983 - DNA, 25 bp, Homo sapien
tttcttcaggccgaccatttggaag

SEQ ID NO: 347984 - DNA, 25 bp, Homo sapien
caattttctgtatcttggggtcctg

SEQ ID NO: 347985 - DNA, 25 bp, Homo sapien
tatcttggggtcctgttttagaaca

SEQ ID NO: 347986 - DNA, 25 bp, Homo sapien
attttctgtatcttggggtcctgtt

SEQ ID NO: 347987 - DNA, 25 bp, Homo sapien
ctgtatcttggggtcctgttttaga

SEQ ID NO: 347988 - DNA, 25 bp, Homo sapien
tcctcagcgttcagcaagtctgtca

SEQ ID NO: 347989 - DNA, 25 bp, Homo sapien
gatgtcctcagcgttcagcaagtct

SEQ ID NO: 347990 - DNA, 25 bp, Homo sapien
cgttcagcaagtctgtcatcgacat

SEQ ID NO: 347991 - DNA, 25 bp, Homo sapien
cagcgttcagcaagtctgtcatcga

SEQ ID NO: 347992 - DNA, 25 bp, Homo sapien
tatgaccagcgctgcagtgctgcgc

SEQ ID NO: 347993 - DNA, 25 bp, Homo sapien
tttgagcgggcagagcaagtgcgaa

SEQ ID NO: 347994 - DNA, 25 bp, Homo sapien
acacgcaggaggtgcgccgtctcag

SEQ ID NO: 347995 - DNA, 25 bp, Homo sapien
gaaagtccacctgccgtcaaggaca

SEQ ID NO: 347996 - DNA, 25 bp, Homo sapien
ggctggagcctgcactgaaaggctg

SEQ ID NO: 347997 - DNA, 25 bp, Homo sapien
aaaggctgggctggtgggaagtcct

SEQ ID NO: 347998 - DNA, 25 bp, Homo sapien
gggctggtgggaagtcctgtcggga

SEQ ID NO: 347999 - DNA, 25 bp, Homo sapien
ctggtgggaagtcctgtcgggaagt

SEQ ID NO: 348000 - DNA, 25 bp, Homo sapien
gatctcgtcaagtcgtgggcatggc

SEQ ID NO: 348001 - DNA, 25 bp, Homo sapien
ccctgggggctttgtcatcagagaa

SEQ ID NO: 348002 - DNA, 25 bp, Homo sapien
gagccgggatgcaggagaaccttga

SEQ ID NO: 348003 - DNA, 25 bp, Homo sapien
cctggcggagatgtgtctgaactct

SEQ ID NO: 348004 - DNA, 25 bp, Homo sapien
tgagggcgcatgaaggagagggtct

SEQ ID NO: 348005 - DNA, 25 bp, Homo sapien
agcctgctgagggcgcatgaaggag

SEQ ID NO: 348006 - DNA, 25 bp, Homo sapien
aaagagcctgctgagggcgcatgaa

SEQ ID NO: 348007 - DNA, 25 bp, Homo sapien
ctgctgagggcgcatgaaggagagg

SEQ ID NO: 348008 - DNA, 25 bp, Homo sapien
tcttcatccgtcaggtaggaccagc

SEQ ID NO: 348009 - DNA, 25 bp, Homo sapien
tgagccaaacgaaccagctcctggg

SEQ ID NO: 348010 - DNA, 25 bp, Homo sapien
gatccagagcagtgtccatgtggcc

SEQ ID NO: 348011 - DNA, 25 bp, Homo sapien
tgtgtgatgccgagaagcgaatgct

SEQ ID NO: 348012 - DNA, 25 bp, Homo sapien
gaaagtggttgaggtgacccttcca

SEQ ID NO: 348013 - DNA, 25 bp, Homo sapien
cctgtatgacatggaagctgttgcc

SEQ ID NO: 348014 - DNA, 25 bp, Homo sapien
tgtagtccgtagaaagccatctttg

SEQ ID NO: 348015 - DNA, 25 bp, Homo sapien
gaagctagggcaccctctggaatga

SEQ ID NO: 348016 - DNA, 25 bp, Homo sapien
gattccatccatacttgtttaatgg

SEQ ID NO: 348017 - DNA, 25 bp, Homo sapien
gaggtcacttcaggcatttctttgc

SEQ ID NO: 348018 - DNA, 25 bp, Homo sapien
gaggttatcaaaaatcaggtctcca

SEQ ID NO: 348019 - DNA, 25 bp, Homo sapien
aggtctccataagtgagaggtcact

SEQ ID NO: 348020 - DNA, 25 bp, Homo sapien
atccccagttcctctcggacaaagt

SEQ ID NO: 348021 - DNA, 25 bp, Homo sapien
tttattaatgaccatctggagccag

SEQ ID NO: 348022 - DNA, 25 bp, Homo sapien
tccccagacctgtgcgcttggagtt

SEQ ID NO: 348023 - DNA, 25 bp, Homo sapien
tggtgagatgaccccgccaggctct

SEQ ID NO: 348024 - DNA, 25 bp, Homo sapien
gagcagagcttgtgaagtgttacct

SEQ ID NO: 348025 - DNA, 25 bp, Homo sapien
agtaaagagaggagggctgatgtca

SEQ ID NO: 348026 - DNA, 25 bp, Homo sapien
catttctgttatcaggcatcatgca

SEQ ID NO: 348027 - DNA, 25 bp, Homo sapien
cgccgggtcatgttagttgtcatca

SEQ ID NO: 348028 - DNA, 25 bp, Homo sapien
tctttgaggctaatggacccgtggg

SEQ ID NO: 348029 - DNA, 25 bp, Homo sapien
gaagctgcacatcacgcagaaggac

SEQ ID NO: 348030 - DNA, 25 bp, Homo sapien
agggtctacaacacgatgccatgag

SEQ ID NO: 348031 - DNA, 25 bp, Homo sapien
tctcagaggagattgggaccaggaa

SEQ ID NO: 348032 - DNA, 25 bp, Homo sapien
caagagaatagagagactgaatttt

SEQ ID NO: 348033 - DNA, 25 bp, Homo sapien
gagaatagagagactgaattttcct

SEQ ID NO: 348034 - DNA, 25 bp, Homo sapien
agttgaaatgttgcctccccaggca

SEQ ID NO: 348035 - DNA, 25 bp, Homo sapien
tgaagttgaaatgttgcctccccag

SEQ ID NO: 348036 - DNA, 25 bp, Homo sapien
gataagagtgcgtcactgtgtggct

SEQ ID NO: 348037 - DNA, 25 bp, Homo sapien
accaaaggtaggcaacacctgtatg

SEQ ID NO: 348038 - DNA, 25 bp, Homo sapien
ggcaaaagcatatctgtcattattc

SEQ ID NO: 348039 - DNA, 25 bp, Homo sapien
gttgattgcctttctagacgacagc

SEQ ID NO: 348040 - DNA, 25 bp, Homo sapien
tgcccagaggtagcagtttcaggct

SEQ ID NO: 348041 - DNA, 25 bp, Homo sapien
tttcaggctagtatggttgctccag

SEQ ID NO: 348042 - DNA, 25 bp, Homo sapien
gcaacagaggcttaacaacatagaa

SEQ ID NO: 348043 - DNA, 25 bp, Homo sapien
tttggctgcacatggaaaatcccta

SEQ ID NO: 348044 - DNA, 25 bp, Homo sapien
agccaccgcgcccaggctttgattg

SEQ ID NO: 348045 - DNA, 25 bp, Homo sapien
accgcgcccaggctttgattgattt

SEQ ID NO: 348046 - DNA, 25 bp, Homo sapien
ccaccgcgcccaggctttgattgat

SEQ ID NO: 348047 - DNA, 25 bp, Homo sapien
ccgcgcccaggctttgattgatttt

SEQ ID NO: 348048 - DNA, 25 bp, Homo sapien
gggacagagtctagaggcagcccac

SEQ ID NO: 348049 - DNA, 25 bp, Homo sapien
gtctatatgttgaagtgcacccaag

SEQ ID NO: 348050 - DNA, 25 bp, Homo sapien
gcctggctcatggaaaacactgcaa

SEQ ID NO: 348051 - DNA, 25 bp, Homo sapien
taccaaccgtgtgactgtcgaccaa

SEQ ID NO: 348052 - DNA, 25 bp, Homo sapien
gctccgtgggcaggatttttgtgtg

SEQ ID NO: 348053 - DNA, 25 bp, Homo sapien
ctccgtgggcaggatttttgtgtgt

SEQ ID NO: 348054 - DNA, 25 bp, Homo sapien
agctccgtgggcaggatttttgtgt

SEQ ID NO: 348055 - DNA, 25 bp, Homo sapien
gctggacagcggtgggaagaagcag

SEQ ID NO: 348056 - DNA, 25 bp, Homo sapien
acacaggtaaggacctgtccctgga

SEQ ID NO: 348057 - DNA, 25 bp, Homo sapien
gcaggagacacaggtaaggacctgt

SEQ ID NO: 348058 - DNA, 25 bp, Homo sapien
caagggctggacagcggtgggaaga

SEQ ID NO: 348059 - DNA, 25 bp, Homo sapien
tgtagagaagttaacggcccaagtg

SEQ ID NO: 348060 - DNA, 25 bp, Homo sapien
cccttgagaccccacgtcatgtaga

SEQ ID NO: 348061 - DNA, 25 bp, Homo sapien
tgtgggacctccagtcccttgagac

SEQ ID NO: 348062 - DNA, 25 bp, Homo sapien
cccacgtctactgcggaaaagtcag

SEQ ID NO: 348063 - DNA, 25 bp, Homo sapien
agagcatgtcatcgctgaggtagca

SEQ ID NO: 348064 - DNA, 25 bp, Homo sapien
catgtcatcgctgaggtagcaggac

SEQ ID NO: 348065 - DNA, 25 bp, Homo sapien
accagagcatgtcatcgctgaggta

SEQ ID NO: 348066 - DNA, 25 bp, Homo sapien
tcatcgctgaggtagcaggacatgg

SEQ ID NO: 348067 - DNA, 25 bp, Homo sapien
gcagaggggacaccgtagcccctac

SEQ ID NO: 348068 - DNA, 25 bp, Homo sapien
ggcagaggggacaccgtagccccta

SEQ ID NO: 348069 - DNA, 25 bp, Homo sapien
ggtatagtcactgtagcagcgcagg

SEQ ID NO: 348070 - DNA, 25 bp, Homo sapien
ctggtatagtcactgtagcagcgca

SEQ ID NO: 348071 - DNA, 25 bp, Homo sapien
tggtatagtcactgtagcagcgcag

SEQ ID NO: 348072 - DNA, 25 bp, Homo sapien
gtatagtcactgtagcagcgcaggg

SEQ ID NO: 348073 - DNA, 25 bp, Homo sapien
cctgccaggctaagtccccagcaca

SEQ ID NO: 348074 - DNA, 25 bp, Homo sapien
gtagaagacacctctactgtgtcaa

SEQ ID NO: 348075 - DNA, 25 bp, Homo sapien
ttgagtagaagacacctctactgtg

SEQ ID NO: 348076 - DNA, 25 bp, Homo sapien
gagtagaagacacctctactgtgtc

SEQ ID NO: 348077 - DNA, 25 bp, Homo sapien
tagaagacacctctactgtgtcaaa

SEQ ID NO: 348078 - DNA, 25 bp, Homo sapien
tctgcaagttcaggttcatagcatt

SEQ ID NO: 348079 - DNA, 25 bp, Homo sapien
catagcatttttctggtgccaccgc

SEQ ID NO: 348080 - DNA, 25 bp, Homo sapien
atagcatttttctggtgccaccgcc

SEQ ID NO: 348081 - DNA, 25 bp, Homo sapien
agtgctttctgcaagttcaggttca

SEQ ID NO: 348082 - DNA, 25 bp, Homo sapien
gtgtaagaagccttcatgaggctct

SEQ ID NO: 348083 - DNA, 25 bp, Homo sapien
tgatttctcaatgacctctggtgtg

SEQ ID NO: 348084 - DNA, 25 bp, Homo sapien
tgacctctggtgtgtaagaagcctt

SEQ ID NO: 348085 - DNA, 25 bp, Homo sapien
catgccagtgttctaagtccctcac

SEQ ID NO: 348086 - DNA, 25 bp, Homo sapien
gccatattcctgcaggccatcccac

SEQ ID NO: 348087 - DNA, 25 bp, Homo sapien
gtggccatattcctgcaggccatcc

SEQ ID NO: 348088 - DNA, 25 bp, Homo sapien
ggccatattcctgcaggccatccca

SEQ ID NO: 348089 - DNA, 25 bp, Homo sapien
cgtggccatattcctgcaggccatc

SEQ ID NO: 348090 - DNA, 25 bp, Homo sapien
acagggatccgagccaggtggaaga

SEQ ID NO: 348091 - DNA, 25 bp, Homo sapien
ggtgacagggatccgagccaggtgg

SEQ ID NO: 348092 - DNA, 25 bp, Homo sapien
tgacagggatccgagccaggtggaa

SEQ ID NO: 348093 - DNA, 25 bp, Homo sapien
gacagggatccgagccaggtggaag

SEQ ID NO: 348094 - DNA, 25 bp, Homo sapien
tgtagccgaggtcatagtagtctga

SEQ ID NO: 348095 - DNA, 25 bp, Homo sapien
ccttttctggccctcgaagacttca

SEQ ID NO: 348096 - DNA, 25 bp, Homo sapien
tcgaagacttcatcaatagcctttt

SEQ ID NO: 348097 - DNA, 25 bp, Homo sapien
agtttgaccgcatgttgtagccgag

SEQ ID NO: 348098 - DNA, 25 bp, Homo sapien
ggccctgttctctctcgaggaggat

SEQ ID NO: 348099 - DNA, 25 bp, Homo sapien
ccttctggttcgtgggcgtgctcct

SEQ ID NO: 348100 - DNA, 25 bp, Homo sapien
ggaggatcgagagcccgcattcttc

SEQ ID NO: 348101 - DNA, 25 bp, Homo sapien
cacattgctcccaaacttgtggcga

SEQ ID NO: 348102 - DNA, 25 bp, Homo sapien
ctccttcaagtggcactgccctagg

SEQ ID NO: 348103 - DNA, 25 bp, Homo sapien
atctccttcaagtggcactgcccta

SEQ ID NO: 348104 - DNA, 25 bp, Homo sapien
tctccttcaagtggcactgccctag

SEQ ID NO: 348105 - DNA, 25 bp, Homo sapien
caaggaactgtaggccgctttccag

SEQ ID NO: 348106 - DNA, 25 bp, Homo sapien
tgtccaaggaactgtaggccgcttt

SEQ ID NO: 348107 - DNA, 25 bp, Homo sapien
ttccaggggtccaagtcctgttggc

SEQ ID NO: 348108 - DNA, 25 bp, Homo sapien
ggtgtccaaggaactgtaggccgct

SEQ ID NO: 348109 - DNA, 25 bp, Homo sapien
ctcttgctgtgggacaggcaattcc

SEQ ID NO: 348110 - DNA, 25 bp, Homo sapien
cctcttgctgtgggacaggcaattc

SEQ ID NO: 348111 - DNA, 25 bp, Homo sapien
tcttgctgtgggacaggcaattcca

SEQ ID NO: 348112 - DNA, 25 bp, Homo sapien
tctggacgggctacaatggaagtgt

SEQ ID NO: 348113 - DNA, 25 bp, Homo sapien
gatgagactagagacccaagcaaca

SEQ ID NO: 348114 - DNA, 25 bp, Homo sapien
gaatgggttccttctctggtcgagc

SEQ ID NO: 348115 - DNA, 25 bp, Homo sapien
caaatacccagtaaggtgttcggag

SEQ ID NO: 348116 - DNA, 25 bp, Homo sapien
taacagcaggaaacacgtgaaccac

SEQ ID NO: 348117 - DNA, 25 bp, Homo sapien
ccacactgatgtgtgctgaagccca

SEQ ID NO: 348118 - DNA, 25 bp, Homo sapien
tgcagatccccactgcagaactact

SEQ ID NO: 348119 - DNA, 25 bp, Homo sapien
ggaaacacgtgaaccacactgatgt

SEQ ID NO: 348120 - DNA, 25 bp, Homo sapien
tacagtaagcagaagaggtcacggc

SEQ ID NO: 348121 - DNA, 25 bp, Homo sapien
gtaagaaccggctgtaagtcatggg

SEQ ID NO: 348122 - DNA, 25 bp, Homo sapien
taaaccggccgcagttacagtaagc

SEQ ID NO: 348123 - DNA, 25 bp, Homo sapien
ttattccagtgttgacagagagagg

SEQ ID NO: 348124 - DNA, 25 bp, Homo sapien
ttctcagactttccctgggacacac

SEQ ID NO: 348125 - DNA, 25 bp, Homo sapien
gccttctcagactttccctgggaca

SEQ ID NO: 348126 - DNA, 25 bp, Homo sapien
aggccttctcagactttccctggga

SEQ ID NO: 348127 - DNA, 25 bp, Homo sapien
tcaggccttctcagactttccctgg

SEQ ID NO: 348128 - DNA, 25 bp, Homo sapien
tcccttgcggcacgtggcaatgaga

SEQ ID NO: 348129 - DNA, 25 bp, Homo sapien
caatgagaggctgcgagagatccac

SEQ ID NO: 348130 - DNA, 25 bp, Homo sapien
tcgtacacggccacatcaggcttgc

SEQ ID NO: 348131 - DNA, 25 bp, Homo sapien
catgaaaggcatgttgacggcacca

SEQ ID NO: 348132 - DNA, 25 bp, Homo sapien
tgtatgaggggtggggactaatggg

SEQ ID NO: 348133 - DNA, 25 bp, Homo sapien
gcagaggacacagcttaggggatgt

SEQ ID NO: 348134 - DNA, 25 bp, Homo sapien
cagaggacacagcttaggggatgta

SEQ ID NO: 348135 - DNA, 25 bp, Homo sapien
ggatgtatgaggggtggggactaat

SEQ ID NO: 348136 - DNA, 25 bp, Homo sapien
taactactgcagctaaaagcaccca

SEQ ID NO: 348137 - DNA, 25 bp, Homo sapien
gtgaccctggcaggcacacgattcg

SEQ ID NO: 348138 - DNA, 25 bp, Homo sapien
cacgattcggtacatcatcacgcca

SEQ ID NO: 348139 - DNA, 25 bp, Homo sapien
caagtcgagtttgattggcagtggt

SEQ ID NO: 348140 - DNA, 25 bp, Homo sapien
tctggaccgctgaacctacagggtg

SEQ ID NO: 348141 - DNA, 25 bp, Homo sapien
cacgctgggaaccataaacttggca

SEQ ID NO: 348142 - DNA, 25 bp, Homo sapien
catgcccctgtgtgttacatctgga

SEQ ID NO: 348143 - DNA, 25 bp, Homo sapien
tggccgccaggtgtctaagctctgc

SEQ ID NO: 348144 - DNA, 25 bp, Homo sapien
agcaaagcctcttggaggagggggt

SEQ ID NO: 348145 - DNA, 25 bp, Homo sapien
ctcgaactcccgagctcatgatccg

SEQ ID NO: 348146 - DNA, 25 bp, Homo sapien
aactcccgagctcatgatccgccca

SEQ ID NO: 348147 - DNA, 25 bp, Homo sapien
atccgcccaccttggtctcccaagg

SEQ ID NO: 348148 - DNA, 25 bp, Homo sapien
aggcacgtaccaccaacgcctggct

SEQ ID NO: 348149 - DNA, 25 bp, Homo sapien
actaactagctatgcggccttggcc

SEQ ID NO: 348150 - DNA, 25 bp, Homo sapien
gctgttacaactctgccgacgggct

SEQ ID NO: 348151 - DNA, 25 bp, Homo sapien
cagtcctgcctctagaaaagggaag

SEQ ID NO: 348152 - DNA, 25 bp, Homo sapien
gaagaggcgtcttgaaccaaggcca

SEQ ID NO: 348153 - DNA, 25 bp, Homo sapien
tccgtgggaggtttctgtacagcaa

SEQ ID NO: 348154 - DNA, 25 bp, Homo sapien
tctataagggtttctgcgggacgag

SEQ ID NO: 348155 - DNA, 25 bp, Homo sapien
tacagcaatgcaaacgctggctcag

SEQ ID NO: 348156 - DNA, 25 bp, Homo sapien
tagcacatggctatgaggacacatt

SEQ ID NO: 348157 - DNA, 25 bp, Homo sapien
agcgcccggtagagcacctgatgaa

SEQ ID NO: 348158 - DNA, 25 bp, Homo sapien
cctctcgggtgcctggtgagtacca

SEQ ID NO: 348159 - DNA, 25 bp, Homo sapien
gcggtggccaaacacacggaacatc

SEQ ID NO: 348160 - DNA, 25 bp, Homo sapien
ccattgagcactgatacggtgcggt

SEQ ID NO: 348161 - DNA, 25 bp, Homo sapien
cgatggcatcttgggcttagaatcc

SEQ ID NO: 348162 - DNA, 25 bp, Homo sapien
gaagttacagtactcgatcccgcca

SEQ ID NO: 348163 - DNA, 25 bp, Homo sapien
caagagtttccgaggactccaagta

SEQ ID NO: 348164 - DNA, 25 bp, Homo sapien
gataagtttgcagattccctctgga

SEQ ID NO: 348165 - DNA, 25 bp, Homo sapien
gctggagaagttggccggttcaaac

SEQ ID NO: 348166 - DNA, 25 bp, Homo sapien
ccggacgccgcgctggcgctcgccc

SEQ ID NO: 348167 - DNA, 25 bp, Homo sapien
gccccggccggctggagaagttggc

SEQ ID NO: 348168 - DNA, 25 bp, Homo sapien
tccccaggcggcgcgcaccatcgcg

SEQ ID NO: 348169 - DNA, 25 bp, Homo sapien
ggcgcaatgggtggcggaggcgctg

SEQ ID NO: 348170 - DNA, 25 bp, Homo sapien
tggtacctgccgaagctggggcgcg

SEQ ID NO: 348171 - DNA, 25 bp, Homo sapien
ggtgtcggcgcaatgggtggcggag

SEQ ID NO: 348172 - DNA, 25 bp, Homo sapien
gccgccatggcttcgccgcagctct

SEQ ID NO: 348173 - DNA, 25 bp, Homo sapien
ggccgagcatttcgcggagtacgca

SEQ ID NO: 348174 - DNA, 25 bp, Homo sapien
tcttcgacatcgaccagtgcagcga

SEQ ID NO: 348175 - DNA, 25 bp, Homo sapien
gtcgtgatctacgacgccagcgacc

SEQ ID NO: 348176 - DNA, 25 bp, Homo sapien
tccgccccgcgcgtctggtggatgt

SEQ ID NO: 348177 - DNA, 25 bp, Homo sapien
tcaaagcgaaatgttttgttgttat

SEQ ID NO: 348178 - DNA, 25 bp, Homo sapien
cacttggtgcgtctggtaaaggctc

SEQ ID NO: 348179 - DNA, 25 bp, Homo sapien
attttttactataatgtttgcaact

SEQ ID NO: 348180 - DNA, 25 bp, Homo sapien
gaacacttggtgcgtctggtaaagg

SEQ ID NO: 348181 - DNA, 25 bp, Homo sapien
gctgtgccgcgagcagaagtccttc

SEQ ID NO: 348182 - DNA, 25 bp, Homo sapien
tgaccacccggcagacgctgtgccg

SEQ ID NO: 348183 - DNA, 25 bp, Homo sapien
gcggctcaacgtggggggcacggtg

SEQ ID NO: 348184 - DNA, 25 bp, Homo sapien
gcaagtgggtgcggctcaacgtggg

SEQ ID NO: 348185 - DNA, 25 bp, Homo sapien
ctagaggctagaaacccgagatcgg

SEQ ID NO: 348186 - DNA, 25 bp, Homo sapien
ttcttccggattgcagactgctgac

SEQ ID NO: 348187 - DNA, 25 bp, Homo sapien
tgaggactttcttccggattgcaga

SEQ ID NO: 348188 - DNA, 25 bp, Homo sapien
aaagagagggagctagccctcgccc

SEQ ID NO: 348189 - DNA, 25 bp, Homo sapien
ggtggtcgcccccttcgatggagct

SEQ ID NO: 348190 - DNA, 25 bp, Homo sapien
tcgatggagctcacagcttcgggag

SEQ ID NO: 348191 - DNA, 25 bp, Homo sapien
cccccttcgatggagctcacagctt

SEQ ID NO: 348192 - DNA, 25 bp, Homo sapien
ccttcgatggagctcacagcttcgg

SEQ ID NO: 348193 - DNA, 25 bp, Homo sapien
tcagtggagtgacagatgtccccgc

SEQ ID NO: 348194 - DNA, 25 bp, Homo sapien
cagtggagtgacagatgtccccgcc

SEQ ID NO: 348195 - DNA, 25 bp, Homo sapien
gtggagtgacagatgtccccgccag

SEQ ID NO: 348196 - DNA, 25 bp, Homo sapien
ggagtgacagatgtccccgccagat

SEQ ID NO: 348197 - DNA, 25 bp, Homo sapien
cagttttcccagttgttcaatgcag

SEQ ID NO: 348198 - DNA, 25 bp, Homo sapien
cctcagttttcccagttgttcaatg

SEQ ID NO: 348199 - DNA, 25 bp, Homo sapien
cagatgatgaaagtacctccttcta

SEQ ID NO: 348200 - DNA, 25 bp, Homo sapien
gatgatgaaagtacctccttctagt

SEQ ID NO: 348201 - DNA, 25 bp, Homo sapien
ctgagaccgggtctttggggatagc

SEQ ID NO: 348202 - DNA, 25 bp, Homo sapien
tgagaccgggtctttggggatagcc

SEQ ID NO: 348203 - DNA, 25 bp, Homo sapien
cctcctccgcttcccgctggaggtc

SEQ ID NO: 348204 - DNA, 25 bp, Homo sapien
tggaggtcctgcctcatcttcatcc

SEQ ID NO: 348205 - DNA, 25 bp, Homo sapien
tgctcacgcctccatcccgggtctg

SEQ ID NO: 348206 - DNA, 25 bp, Homo sapien
cctgtccgggttttctctctgcctg

SEQ ID NO: 348207 - DNA, 25 bp, Homo sapien
ctgcatcccagagcgtcctgcctgc

SEQ ID NO: 348208 - DNA, 25 bp, Homo sapien
gcagtgagggcttctcctcggcccc

SEQ ID NO: 348209 - DNA, 25 bp, Homo sapien
tccttgcaggttcccgtccgcaccc

SEQ ID NO: 348210 - DNA, 25 bp, Homo sapien
ctctgtgcccactaaccctgccggg

SEQ ID NO: 348211 - DNA, 25 bp, Homo sapien
ttgcctccttgagccttagtccagg

SEQ ID NO: 348212 - DNA, 25 bp, Homo sapien
tgcacagaggagcaaagtccctgaa

SEQ ID NO: 348213 - DNA, 25 bp, Homo sapien
ggcataacactgtgtttgcaaatgg

SEQ ID NO: 348214 - DNA, 25 bp, Homo sapien
gttggcttggccttctctttggtga

SEQ ID NO: 348215 - DNA, 25 bp, Homo sapien
tcagggacgagacaagatgccacct

SEQ ID NO: 348216 - DNA, 25 bp, Homo sapien
tctgagggtcccctccgatgggagc

SEQ ID NO: 348217 - DNA, 25 bp, Homo sapien
tgcttggcagttgccctgggctctc

SEQ ID NO: 348218 - DNA, 25 bp, Homo sapien
tcctcgggatgtagaaccagcattc

SEQ ID NO: 348219 - DNA, 25 bp, Homo sapien
cgccaggaaccagcggccactgagt

SEQ ID NO: 348220 - DNA, 25 bp, Homo sapien
tgtagacgccgaagtagttaggccg

SEQ ID NO: 348221 - DNA, 25 bp, Homo sapien
cacacctgtgatgcgggtgtagacg

SEQ ID NO: 348222 - DNA, 25 bp, Homo sapien
agcggccactgagtgccttgcacac

SEQ ID NO: 348223 - DNA, 25 bp, Homo sapien
cttcttgcccttgcggtagccggca

SEQ ID NO: 348224 - DNA, 25 bp, Homo sapien
ggcacacagcatgcgtggcgtcacc

SEQ ID NO: 348225 - DNA, 25 bp, Homo sapien
tagcgatagacctcgctgcacaggt

SEQ ID NO: 348226 - DNA, 25 bp, Homo sapien
tgtgggatcaactgcacatccactt

SEQ ID NO: 348227 - DNA, 25 bp, Homo sapien
tcctcttcgtggtacgggtgcagga

SEQ ID NO: 348228 - DNA, 25 bp, Homo sapien
aggaacacggtccacagcaccgtgg

SEQ ID NO: 348229 - DNA, 25 bp, Homo sapien
cagcccgtaatccagcagtgcaggc

SEQ ID NO: 348230 - DNA, 25 bp, Homo sapien
gccacgtcgtagtcatggctgtcct

SEQ ID NO: 348231 - DNA, 25 bp, Homo sapien
aagagagctaggtggtcagagcgcc

SEQ ID NO: 348232 - DNA, 25 bp, Homo sapien
gggcagctgttatcacccagcggtc

SEQ ID NO: 348233 - DNA, 25 bp, Homo sapien
catggccactcaccctcggaggaca

SEQ ID NO: 348234 - DNA, 25 bp, Homo sapien
atcacccagcggtcagcgatgaggg

SEQ ID NO: 348235 - DNA, 25 bp, Homo sapien
acagatgtgtcgaccccgaacctgg

SEQ ID NO: 348236 - DNA, 25 bp, Homo sapien
gccccggcagccaggcagggctcac

SEQ ID NO: 348237 - DNA, 25 bp, Homo sapien
cccaagctccagggccccggcagcc

SEQ ID NO: 348238 - DNA, 25 bp, Homo sapien
ctccctcccaagctccagggccccg

SEQ ID NO: 348239 - DNA, 25 bp, Homo sapien
cctcccaagctccagggccccggca

SEQ ID NO: 348240 - DNA, 25 bp, Homo sapien
agtcgggccgcccatcacactgcgg

SEQ ID NO: 348241 - DNA, 25 bp, Homo sapien
tcacactgcgggttgggcttcttca

SEQ ID NO: 348242 - DNA, 25 bp, Homo sapien
gcagctccggtcctcacactggaag

SEQ ID NO: 348243 - DNA, 25 bp, Homo sapien
ctccggtcctcacactggaaggtga

SEQ ID NO: 348244 - DNA, 25 bp, Homo sapien
tcgtcgctgccgttgagacaatcag

SEQ ID NO: 348245 - DNA, 25 bp, Homo sapien
tggcactgctcttcgtcgctgccgt

SEQ ID NO: 348246 - DNA, 25 bp, Homo sapien
gttgagacaatcaggctgcccatca

SEQ ID NO: 348247 - DNA, 25 bp, Homo sapien
gctcttcgtcgctgccgttgagaca

SEQ ID NO: 348248 - DNA, 25 bp, Homo sapien
catccaggccgttggggcagtcctt

SEQ ID NO: 348249 - DNA, 25 bp, Homo sapien
ttctctcatccaggccgttggggca

SEQ ID NO: 348250 - DNA, 25 bp, Homo sapien
tggggcagtccttgaccccatcaca

SEQ ID NO: 348251 - DNA, 25 bp, Homo sapien
ggggcagtccttgaccccatcacag

SEQ ID NO: 348252 - DNA, 25 bp, Homo sapien
agttgatggtgatcccggccgtggc

SEQ ID NO: 348253 - DNA, 25 bp, Homo sapien
ttgtacaagccatagtgcacccgca

SEQ ID NO: 348254 - DNA, 25 bp, Homo sapien
tcctctcggcgtagggctgcaggat

SEQ ID NO: 348255 - DNA, 25 bp, Homo sapien
ctgcaggatgcgcaagccacacagc

SEQ ID NO: 348256 - DNA, 25 bp, Homo sapien
tccaagaattctagagccccagagc

SEQ ID NO: 348257 - DNA, 25 bp, Homo sapien
tcttccaagactggcatcttagata

SEQ ID NO: 348258 - DNA, 25 bp, Homo sapien
tcattcttcgtcaccttttgtctgg

SEQ ID NO: 348259 - DNA, 25 bp, Homo sapien
ggtgattgggaacacacaccccaga

SEQ ID NO: 348260 - DNA, 25 bp, Homo sapien
accaaacgtgtctgagacctctggg

SEQ ID NO: 348261 - DNA, 25 bp, Homo sapien
tccaaggtgtctgatgaccaaacgt

SEQ ID NO: 348262 - DNA, 25 bp, Homo sapien
gctgtaattagaataaacatccaag

SEQ ID NO: 348263 - DNA, 25 bp, Homo sapien
tttattgaaggattgagggtgccag

SEQ ID NO: 348264 - DNA, 25 bp, Homo sapien
cttgggcttccaatgagggggtcac

SEQ ID NO: 348265 - DNA, 25 bp, Homo sapien
gattggggacttgggcttccaatga

SEQ ID NO: 348266 - DNA, 25 bp, Homo sapien
gggggtcactattgaggagggaaga

SEQ ID NO: 348267 - DNA, 25 bp, Homo sapien
tgctgcccctctgagattggggact

SEQ ID NO: 348268 - DNA, 25 bp, Homo sapien
tgttctggatcgtccactggccctg

SEQ ID NO: 348269 - DNA, 25 bp, Homo sapien
gggtgcacggcaaatcatacttctg

SEQ ID NO: 348270 - DNA, 25 bp, Homo sapien
cctcctcagtgcataggcatcaaac

SEQ ID NO: 348271 - DNA, 25 bp, Homo sapien
aaccagagggccaagccgtagtcca

SEQ ID NO: 348272 - DNA, 25 bp, Homo sapien
gttgtccagcgtcaggttcacttca

SEQ ID NO: 348273 - DNA, 25 bp, Homo sapien
gctgaggacgccctgggagtcgagc

SEQ ID NO: 348274 - DNA, 25 bp, Homo sapien
gagtcgagcctgttgtccagcgtca

SEQ ID NO: 348275 - DNA, 25 bp, Homo sapien
acgccctgggagtcgagcctgttgt

SEQ ID NO: 348276 - DNA, 25 bp, Homo sapien
ctcctggcggctgcagccgtacacc

SEQ ID NO: 348277 - DNA, 25 bp, Homo sapien
ggcccttcttccagacgaccgccat

SEQ ID NO: 348278 - DNA, 25 bp, Homo sapien
ccgacgccagaacctccaccacggg

SEQ ID NO: 348279 - DNA, 25 bp, Homo sapien
gaagaccaccggctgcacggagagc

SEQ ID NO: 348280 - DNA, 25 bp, Homo sapien
cagccggagtttgagcatgaggtcc

SEQ ID NO: 348281 - DNA, 25 bp, Homo sapien
tcatacatggccagtcggtcccggc

SEQ ID NO: 348282 - DNA, 25 bp, Homo sapien
cccacgtagctgtagcggtaacaac

SEQ ID NO: 348283 - DNA, 25 bp, Homo sapien
tggtcaggccccttcagccggagga

SEQ ID NO: 348284 - DNA, 25 bp, Homo sapien
ccagcgtggaattcaatgcagctat

SEQ ID NO: 348285 - DNA, 25 bp, Homo sapien
tcaatgcagctatgtctttcacact

SEQ ID NO: 348286 - DNA, 25 bp, Homo sapien
tgcagctatgtctttcacactggct

SEQ ID NO: 348287 - DNA, 25 bp, Homo sapien
cgtggaattcaatgcagctatgtct

SEQ ID NO: 348288 - DNA, 25 bp, Homo sapien
tgtaggggacggcagccgagctgtt

SEQ ID NO: 348289 - DNA, 25 bp, Homo sapien
tttggagaatgaaccagaagaagca

SEQ ID NO: 348290 - DNA, 25 bp, Homo sapien
ccacttcgtactcggccctgtaggg

SEQ ID NO: 348291 - DNA, 25 bp, Homo sapien
tcagcatcagccggcggtgctcggg

SEQ ID NO: 348292 - DNA, 25 bp, Homo sapien
acggagctggagttgtagtaagttc

SEQ ID NO: 348293 - DNA, 25 bp, Homo sapien
ttgtagtaagttcccaggcgggtgc

SEQ ID NO: 348294 - DNA, 25 bp, Homo sapien
tggagttgtagtaagttcccaggcg

SEQ ID NO: 348295 - DNA, 25 bp, Homo sapien
ccaaaggaatagacggagctggagt

SEQ ID NO: 348296 - DNA, 25 bp, Homo sapien
cgattgagtacacgcagactgcctg

SEQ ID NO: 348297 - DNA, 25 bp, Homo sapien
agactgcctgagtacacctggctga

SEQ ID NO: 348298 - DNA, 25 bp, Homo sapien
tcttctgggctttggcggtttcact

SEQ ID NO: 348299 - DNA, 25 bp, Homo sapien
ggtttcactgcggaaggcactagat

SEQ ID NO: 348300 - DNA, 25 bp, Homo sapien
tggagtcctcacaggccttgaacat

SEQ ID NO: 348301 - DNA, 25 bp, Homo sapien
ccgcttcctcgccatcacctccgtc

SEQ ID NO: 348302 - DNA, 25 bp, Homo sapien
ccgggcttttctcttggagtcctca

SEQ ID NO: 348303 - DNA, 25 bp, Homo sapien
ctaggaaataccagagtagcacccc

SEQ ID NO: 348304 - DNA, 25 bp, Homo sapien
ctgccagggaaacagaccaaagttg

SEQ ID NO: 348305 - DNA, 25 bp, Homo sapien
tgccagggaaacagaccaaagttgg

SEQ ID NO: 348306 - DNA, 25 bp, Homo sapien
accaaagttggaaacagcctcgcat

SEQ ID NO: 348307 - DNA, 25 bp, Homo sapien
gaaacagaccaaagttggaaacagc

SEQ ID NO: 348308 - DNA, 25 bp, Homo sapien
ttttggagtggaagagtaacaacat

SEQ ID NO: 348309 - DNA, 25 bp, Homo sapien
cttttggagtggaagagtaacaaca

SEQ ID NO: 348310 - DNA, 25 bp, Homo sapien
agtgggtgccgagacagctcacaga

SEQ ID NO: 348311 - DNA, 25 bp, Homo sapien
caagtgggtgccgagacagctcaca

SEQ ID NO: 348312 - DNA, 25 bp, Homo sapien
actgcaagtgggtgccgagacagct

SEQ ID NO: 348313 - DNA, 25 bp, Homo sapien
agtgactgcaagtgggtgccgagac

SEQ ID NO: 348314 - DNA, 25 bp, Homo sapien
caggtcagctcgcaccagagggcag

SEQ ID NO: 348315 - DNA, 25 bp, Homo sapien
caggcaccagagctggactgggtct

SEQ ID NO: 348316 - DNA, 25 bp, Homo sapien
cagagggcaggcaccagagctggac

SEQ ID NO: 348317 - DNA, 25 bp, Homo sapien
tcaggtcagctcgcaccagagggca

SEQ ID NO: 348318 - DNA, 25 bp, Homo sapien
ggactgtgctccaattgccacaggg

SEQ ID NO: 348319 - DNA, 25 bp, Homo sapien
tctctctttgcccctcacattgaac

SEQ ID NO: 348320 - DNA, 25 bp, Homo sapien
cctcacattgaactcctggaagcgg

SEQ ID NO: 348321 - DNA, 25 bp, Homo sapien
ctcctggaagcggggactgtgctcc

SEQ ID NO: 348322 - DNA, 25 bp, Homo sapien
tgatcaccctctggccgatgaggcc

SEQ ID NO: 348323 - DNA, 25 bp, Homo sapien
ctgatcaccctctggccgatgaggc

SEQ ID NO: 348324 - DNA, 25 bp, Homo sapien
agataggtgccgggcctgcacacag

SEQ ID NO: 348325 - DNA, 25 bp, Homo sapien
cccaggctggatcaatggcctagag

SEQ ID NO: 348326 - DNA, 25 bp, Homo sapien
ctttgggagcggcagataggtgccg

SEQ ID NO: 348327 - DNA, 25 bp, Homo sapien
ctagagccatgaccagggtgtctgg

SEQ ID NO: 348328 - DNA, 25 bp, Homo sapien
ggccacctggccatcgatccgacat

SEQ ID NO: 348329 - DNA, 25 bp, Homo sapien
gcggccacctggccatcgatccgac

SEQ ID NO: 348330 - DNA, 25 bp, Homo sapien
ccacctggccatcgatccgacatgg

SEQ ID NO: 348331 - DNA, 25 bp, Homo sapien
cacctggccatcgatccgacatggc

SEQ ID NO: 348332 - DNA, 25 bp, Homo sapien
tgctgcccttgaagaaagctgccaa

SEQ ID NO: 348333 - DNA, 25 bp, Homo sapien
ctgcccttgaagaaagctgccaagc

SEQ ID NO: 348334 - DNA, 25 bp, Homo sapien
tcagttgctgcccttgaagaaagct

SEQ ID NO: 348335 - DNA, 25 bp, Homo sapien
gttgctgcccttgaagaaagctgcc

SEQ ID NO: 348336 - DNA, 25 bp, Homo sapien
tgccgctcctgtctcctgaatctga

SEQ ID NO: 348337 - DNA, 25 bp, Homo sapien
tggtgccgctcctgtctcctgaatc

SEQ ID NO: 348338 - DNA, 25 bp, Homo sapien
acagtgaccgctggcccatcccttc

SEQ ID NO: 348339 - DNA, 25 bp, Homo sapien
acacagtgaccgctggcccatccct

SEQ ID NO: 348340 - DNA, 25 bp, Homo sapien
tcacaaagatggtacacacggatca

SEQ ID NO: 348341 - DNA, 25 bp, Homo sapien
cagagaggattagtaggttgcccca

SEQ ID NO: 348342 - DNA, 25 bp, Homo sapien
cattcaggaccctatggcaggaggt

SEQ ID NO: 348343 - DNA, 25 bp, Homo sapien
taaggagaccgacttgcagagagga

SEQ ID NO: 348344 - DNA, 25 bp, Homo sapien
tgggccccagcattaaagatacagc

SEQ ID NO: 348345 - DNA, 25 bp, Homo sapien
gcaaaaccggcacttgaagagtcag

SEQ ID NO: 348346 - DNA, 25 bp, Homo sapien
gatacagcagccaagcactctgagg

SEQ ID NO: 348347 - DNA, 25 bp, Homo sapien
gaggagcgatgcttctgagcctaaa

SEQ ID NO: 348348 - DNA, 25 bp, Homo sapien
gcaggcgagcattaagggccctgaa

SEQ ID NO: 348349 - DNA, 25 bp, Homo sapien
ctacaccaagtgagttgggtcctga

SEQ ID NO: 348350 - DNA, 25 bp, Homo sapien
ggcgagcattaagggccctgaactc

SEQ ID NO: 348351 - DNA, 25 bp, Homo sapien
acaccaagtgagttgggtcctgacc

SEQ ID NO: 348352 - DNA, 25 bp, Homo sapien
aagtaaccctggttggtgaagcagc

SEQ ID NO: 348353 - DNA, 25 bp, Homo sapien
ggtcgtaagtaaagtacacctggca

SEQ ID NO: 348354 - DNA, 25 bp, Homo sapien
gcctctatctccaaggcatccggga

SEQ ID NO: 348355 - DNA, 25 bp, Homo sapien
gttgctgcttaaggatgcgggctca

SEQ ID NO: 348356 - DNA, 25 bp, Homo sapien
gctcagctgggaaaagaacttcgag

SEQ ID NO: 348357 - DNA, 25 bp, Homo sapien
gttacacttcaggaccttcttcagc

SEQ ID NO: 348358 - DNA, 25 bp, Homo sapien
ctgagctcagctgggaaaagaactt

SEQ ID NO: 348359 - DNA, 25 bp, Homo sapien
ggtctggggtgttacacttcaggac

SEQ ID NO: 348360 - DNA, 25 bp, Homo sapien
aagccccgctgaggcccacgaggag

SEQ ID NO: 348361 - DNA, 25 bp, Homo sapien
gccgagccacggaatggtgtccttc

SEQ ID NO: 348362 - DNA, 25 bp, Homo sapien
gatgatgaagccaaaagccccgctg

SEQ ID NO: 348363 - DNA, 25 bp, Homo sapien
gtgttcctgcagttgatcagcaagt

SEQ ID NO: 348364 - DNA, 25 bp, Homo sapien
gcttgacccgcacctgaaactcata

SEQ ID NO: 348365 - DNA, 25 bp, Homo sapien
ggctccaggtcgtgaactcgccttg

SEQ ID NO: 348366 - DNA, 25 bp, Homo sapien
tcgccttgcagaggcttgacccgca

SEQ ID NO: 348367 - DNA, 25 bp, Homo sapien
gcgtctccaggcagatccattcctg

SEQ ID NO: 348368 - DNA, 25 bp, Homo sapien
tgggtcggagacaggactgtcagcg

SEQ ID NO: 348369 - DNA, 25 bp, Homo sapien
gggtcggagacaggactgtcagcgc

SEQ ID NO: 348370 - DNA, 25 bp, Homo sapien
ctgggtcggagacaggactgtcagc

SEQ ID NO: 348371 - DNA, 25 bp, Homo sapien
ggtcggagacaggactgtcagcgcc

SEQ ID NO: 348372 - DNA, 25 bp, Homo sapien
gcatctgtgggtctccacgtggaca

SEQ ID NO: 348373 - DNA, 25 bp, Homo sapien
ttcccagcttatgttgcatctgtgg

SEQ ID NO: 348374 - DNA, 25 bp, Homo sapien
ggcttgggagatttcccagcttatg

SEQ ID NO: 348375 - DNA, 25 bp, Homo sapien
ccacgtggacaacttggagggagat

SEQ ID NO: 348376 - DNA, 25 bp, Homo sapien
ggttctcaaagggcttgaagtcctg

SEQ ID NO: 348377 - DNA, 25 bp, Homo sapien
gtgacgatgtcaactgtggtcagtt

SEQ ID NO: 348378 - DNA, 25 bp, Homo sapien
gttctcaaagggcttgaagtcctgg

SEQ ID NO: 348379 - DNA, 25 bp, Homo sapien
acagcaccctcagggtgacgatgtc

SEQ ID NO: 348380 - DNA, 25 bp, Homo sapien
tccgaggatcaggttgcaggcccag

SEQ ID NO: 348381 - DNA, 25 bp, Homo sapien
gatgcttgactcacggggagcagct

SEQ ID NO: 348382 - DNA, 25 bp, Homo sapien
gctccgaggatcaggttgcaggccc

SEQ ID NO: 348383 - DNA, 25 bp, Homo sapien
tggggctccgaggatcaggttgcag

SEQ ID NO: 348384 - DNA, 25 bp, Homo sapien
cacaggagatgttggctctcgagtt

SEQ ID NO: 348385 - DNA, 25 bp, Homo sapien
cccatcttggctccagacacaggag

SEQ ID NO: 348386 - DNA, 25 bp, Homo sapien
tctgtccggccaggcatggacttgg

SEQ ID NO: 348387 - DNA, 25 bp, Homo sapien
tagaagcatgtgaactgggaagtgc

SEQ ID NO: 348388 - DNA, 25 bp, Homo sapien
aggaggggcagacgccaggacagag

SEQ ID NO: 348389 - DNA, 25 bp, Homo sapien
aggggcagacgccaggacagagcag

SEQ ID NO: 348390 - DNA, 25 bp, Homo sapien
attcaccgctgcagatgcccaagag

SEQ ID NO: 348391 - DNA, 25 bp, Homo sapien
gcagatgcccaagaggtagccaggg

SEQ ID NO: 348392 - DNA, 25 bp, Homo sapien
cacagggtggagccgaggaaggaag

SEQ ID NO: 348393 - DNA, 25 bp, Homo sapien
ccacagggtggagccgaggaaggaa

SEQ ID NO: 348394 - DNA, 25 bp, Homo sapien
tccacagggtggagccgaggaagga

SEQ ID NO: 348395 - DNA, 25 bp, Homo sapien
gggcggtggcagcgcgcgctctcca

SEQ ID NO: 348396 - DNA, 25 bp, Homo sapien
ggcagcgcgcgctctccagtcctcc

SEQ ID NO: 348397 - DNA, 25 bp, Homo sapien
tggcagcgcgcgctctccagtcctc

SEQ ID NO: 348398 - DNA, 25 bp, Homo sapien
ggctgagacatggggcggtggcagc

SEQ ID NO: 348399 - DNA, 25 bp, Homo sapien
gtccctgagtcaccaggcccgtgga

SEQ ID NO: 348400 - DNA, 25 bp, Homo sapien
tgagtcaccaggcccgtggaaccac

SEQ ID NO: 348401 - DNA, 25 bp, Homo sapien
tgaaactgtccctgagtcaccaggc

SEQ ID NO: 348402 - DNA, 25 bp, Homo sapien
tcaccaggcccgtggaaccacccat

SEQ ID NO: 348403 - DNA, 25 bp, Homo sapien
agacagcattctttaatcatgctgg

SEQ ID NO: 348404 - DNA, 25 bp, Homo sapien
gacagcattctttaatcatgctgga

SEQ ID NO: 348405 - DNA, 25 bp, Homo sapien
ggagacagcattctttaatcatgct

SEQ ID NO: 348406 - DNA, 25 bp, Homo sapien
gagacagcattctttaatcatgctg

SEQ ID NO: 348407 - DNA, 25 bp, Homo sapien
aggatcaggcagggtggtttatagc

SEQ ID NO: 348408 - DNA, 25 bp, Homo sapien
tcaggcagggtggtttatagcacag

SEQ ID NO: 348409 - DNA, 25 bp, Homo sapien
aggcagggtggtttatagcacaggt

SEQ ID NO: 348410 - DNA, 25 bp, Homo sapien
gatcaggcagggtggtttatagcac

SEQ ID NO: 348411 - DNA, 25 bp, Homo sapien
tgcaggtgtttgtaaaggcagcacc

SEQ ID NO: 348412 - DNA, 25 bp, Homo sapien
tcagatgactttggtggaagggact

SEQ ID NO: 348413 - DNA, 25 bp, Homo sapien
ggccttagcaccttgataaagcctg

SEQ ID NO: 348414 - DNA, 25 bp, Homo sapien
gagtctgcatgagcaccaatgggcg

SEQ ID NO: 348415 - DNA, 25 bp, Homo sapien
gaaccccgggtgattcgcatgcatt

SEQ ID NO: 348416 - DNA, 25 bp, Homo sapien
aacgggaaggagatacctgcccctg

SEQ ID NO: 348417 - DNA, 25 bp, Homo sapien
tagaagcagggtctccccagaatgc

SEQ ID NO: 348418 - DNA, 25 bp, Homo sapien
gtggttcatagactgaccccatcag

SEQ ID NO: 348419 - DNA, 25 bp, Homo sapien
cctgcttcacagcagtgcaaactga

SEQ ID NO: 348420 - DNA, 25 bp, Homo sapien
agcagtgcaaactgagccctgcagg

SEQ ID NO: 348421 - DNA, 25 bp, Homo sapien
cttcctgcttcacagcagtgcaaac

SEQ ID NO: 348422 - DNA, 25 bp, Homo sapien
tcacagcagtgcaaactgagccctg

SEQ ID NO: 348423 - DNA, 25 bp, Homo sapien
ctctccagccgggagggtggcccag

SEQ ID NO: 348424 - DNA, 25 bp, Homo sapien
cagccgggagggtggcccagaggcc

SEQ ID NO: 348425 - DNA, 25 bp, Homo sapien
ctgagctctccagccgggagggtgg

SEQ ID NO: 348426 - DNA, 25 bp, Homo sapien
ccagccgggagggtggcccagaggc

SEQ ID NO: 348427 - DNA, 25 bp, Homo sapien
ttgaagagccgcacccagacgcggt

SEQ ID NO: 348428 - DNA, 25 bp, Homo sapien
tagatggcgttctcgcgctggcgct

SEQ ID NO: 348429 - DNA, 25 bp, Homo sapien
tcgaagtcgttgctgtagatggcgt

SEQ ID NO: 348430 - DNA, 25 bp, Homo sapien
cagacgcggtccccgtaggccaggt

SEQ ID NO: 348431 - DNA, 25 bp, Homo sapien
caaagaccctttcgaagagcagcgt

SEQ ID NO: 348432 - DNA, 25 bp, Homo sapien
tgcataatgtgcacgtacgtctcct

SEQ ID NO: 348433 - DNA, 25 bp, Homo sapien
caaactggccggtcgccatgtcaaa

SEQ ID NO: 348434 - DNA, 25 bp, Homo sapien
taattccagctgtgcacattgaggc

SEQ ID NO: 348435 - DNA, 25 bp, Homo sapien
gaaggcgaagaagcgcttctggcac

SEQ ID NO: 348436 - DNA, 25 bp, Homo sapien
aagcgcttctggcacggggcgccgg

SEQ ID NO: 348437 - DNA, 25 bp, Homo sapien
agaaggcgaagaagcgcttctggca

SEQ ID NO: 348438 - DNA, 25 bp, Homo sapien
ctgagaaggcgaagaagcgcttctg

SEQ ID NO: 348439 - DNA, 25 bp, Homo sapien
cccatgtaccctggcaggcccattg

SEQ ID NO: 348440 - DNA, 25 bp, Homo sapien
cattgggcctgggtcccctttgtca

SEQ ID NO: 348441 - DNA, 25 bp, Homo sapien
tccctgcccatgtaccctggcaggc

SEQ ID NO: 348442 - DNA, 25 bp, Homo sapien
atgtaccctggcaggcccattgggc

SEQ ID NO: 348443 - DNA, 25 bp, Homo sapien
aaaggggacaagtcagggtggacat

SEQ ID NO: 348444 - DNA, 25 bp, Homo sapien
acactcatctgtgacggctctgccc

SEQ ID NO: 348445 - DNA, 25 bp, Homo sapien
catctgtgacggctctgcccctgtc

SEQ ID NO: 348446 - DNA, 25 bp, Homo sapien
actcatctgtgacggctctgcccct

SEQ ID NO: 348447 - DNA, 25 bp, Homo sapien
gaggaagagcaacgtcctcaccacg

SEQ ID NO: 348448 - DNA, 25 bp, Homo sapien
cctcaccacgaaatcagaacaaggg

SEQ ID NO: 348449 - DNA, 25 bp, Homo sapien
aggaagtttgttgtgccccagccca

SEQ ID NO: 348450 - DNA, 25 bp, Homo sapien
tggacaggacgaagggactatcttc

SEQ ID NO: 348451 - DNA, 25 bp, Homo sapien
tgtcaaggcctggtcacagccgtca

SEQ ID NO: 348452 - DNA, 25 bp, Homo sapien
gaagggaagcgagtccttccacgtc

SEQ ID NO: 348453 - DNA, 25 bp, Homo sapien
ctgttgtgggcagagacggacgcta

SEQ ID NO: 348454 - DNA, 25 bp, Homo sapien
gacggacgctaaggatgtcaaggcc

SEQ ID NO: 348455 - DNA, 25 bp, Homo sapien
agggctgcatgctccgaccctcggc

SEQ ID NO: 348456 - DNA, 25 bp, Homo sapien
agcgggtagccagcccgcacctgga

SEQ ID NO: 348457 - DNA, 25 bp, Homo sapien
ctattgagagagcgggtagccagcc

SEQ ID NO: 348458 - DNA, 25 bp, Homo sapien
tgcctttcacctggacgggccctca

SEQ ID NO: 348459 - DNA, 25 bp, Homo sapien
caggatggtgatattaatgtagggt

SEQ ID NO: 348460 - DNA, 25 bp, Homo sapien
ccttcaggatggtgatattaatgta

SEQ ID NO: 348461 - DNA, 25 bp, Homo sapien
agctccaccatagggatctcacaca

SEQ ID NO: 348462 - DNA, 25 bp, Homo sapien
ggtgagctccaccatagggatctca

SEQ ID NO: 348463 - DNA, 25 bp, Homo sapien
cagacgggacccagggcggctgtcc

SEQ ID NO: 348464 - DNA, 25 bp, Homo sapien
ctcagagtcacagcaccgttggcag

SEQ ID NO: 348465 - DNA, 25 bp, Homo sapien
agcaaacacatgccctccgggcagg

SEQ ID NO: 348466 - DNA, 25 bp, Homo sapien
ctggggacaaacgtggagggttctg

SEQ ID NO: 348467 - DNA, 25 bp, Homo sapien
aggaggactgaggttagtgaacact

SEQ ID NO: 348468 - DNA, 25 bp, Homo sapien
accgactccactatctccagcaaac

SEQ ID NO: 348469 - DNA, 25 bp, Homo sapien
gcgactcacggaccctgagccactg

SEQ ID NO: 348470 - DNA, 25 bp, Homo sapien
tccccaggcgactcacggaccctga

SEQ ID NO: 348471 - DNA, 25 bp, Homo sapien
ccaggcgactcacggaccctgagcc

SEQ ID NO: 348472 - DNA, 25 bp, Homo sapien
gtggcctccccaggcgactcacgga

SEQ ID NO: 348473 - DNA, 25 bp, Homo sapien
gcctctgggttctgcggagataaag

SEQ ID NO: 348474 - DNA, 25 bp, Homo sapien
ttgcttaactctttggtgatccagt

SEQ ID NO: 348475 - DNA, 25 bp, Homo sapien
ctgcaatactaacttgttgctggcc

SEQ ID NO: 348476 - DNA, 25 bp, Homo sapien
tcagcctctgggttctgcggagata

SEQ ID NO: 348477 - DNA, 25 bp, Homo sapien
tagaagtgtgttttagcaagctaac

SEQ ID NO: 348478 - DNA, 25 bp, Homo sapien
catacaatgagcaataaggatgacc

SEQ ID NO: 348479 - DNA, 25 bp, Homo sapien
gccctattttgaacacctctgacat

SEQ ID NO: 348480 - DNA, 25 bp, Homo sapien
ttaccgcatactgtttctcagcagg

SEQ ID NO: 348481 - DNA, 25 bp, Homo sapien
tgtgttcaatttaaggaagcactga

SEQ ID NO: 348482 - DNA, 25 bp, Homo sapien
gaagcactgagtaagcttatcttgc

SEQ ID NO: 348483 - DNA, 25 bp, Homo sapien
tgcattcttacacaaagagtatagc

SEQ ID NO: 348484 - DNA, 25 bp, Homo sapien
gcagcaatatattctacaacagcaa

SEQ ID NO: 348485 - DNA, 25 bp, Homo sapien
tcacaggaattgctagatgagctga

SEQ ID NO: 348486 - DNA, 25 bp, Homo sapien
ctgatacggagttgctagacgattc

SEQ ID NO: 348487 - DNA, 25 bp, Homo sapien
gtttctgacgagaagcagtcaagag

SEQ ID NO: 348488 - DNA, 25 bp, Homo sapien
tagacgattccaatacatgctcaga

SEQ ID NO: 348489 - DNA, 25 bp, Homo sapien
gcatgccactcgagtcaaacccttg

SEQ ID NO: 348490 - DNA, 25 bp, Homo sapien
atttgaaagcatgccactcgagtca

SEQ ID NO: 348491 - DNA, 25 bp, Homo sapien
gccactcgagtcaaacccttgttaa

SEQ ID NO: 348492 - DNA, 25 bp, Homo sapien
tgaaagcatgccactcgagtcaaac

SEQ ID NO: 348493 - DNA, 25 bp, Homo sapien
ggaaaaacagattcttactgcactt

SEQ ID NO: 348494 - DNA, 25 bp, Homo sapien
ctgtaaatagctcaagaaggggggg

SEQ ID NO: 348495 - DNA, 25 bp, Homo sapien
attcctgttttgcttgatatatatg

SEQ ID NO: 348496 - DNA, 25 bp, Homo sapien
gttttgcttgatatatatgtgttag

SEQ ID NO: 348497 - DNA, 25 bp, Homo sapien
tgcttgatatatatgtgttagtttt

SEQ ID NO: 348498 - DNA, 25 bp, Homo sapien
cctgttttgcttgatatatatgtgt

SEQ ID NO: 348499 - DNA, 25 bp, Homo sapien
aaagaattaatatcattgactagga

SEQ ID NO: 348500 - DNA, 25 bp, Homo sapien
ggatacctctgtggcatataataaa

SEQ ID NO: 348501 - DNA, 25 bp, Homo sapien
gaaagacttagagcagtcatggtta

SEQ ID NO: 348502 - DNA, 25 bp, Homo sapien
tcattgactaggaaatgtggatacc

SEQ ID NO: 348503 - DNA, 25 bp, Homo sapien
tgtttgaccatgaggtaagagtctc

SEQ ID NO: 348504 - DNA, 25 bp, Homo sapien
tcttgttaaagagtataccagtgct

SEQ ID NO: 348505 - DNA, 25 bp, Homo sapien
cagctttatcctacctaacttgaaa

SEQ ID NO: 348506 - DNA, 25 bp, Homo sapien
tttaagccaataagttcacacagaa

SEQ ID NO: 348507 - DNA, 25 bp, Homo sapien
tcaggaggtcgcttgtcagtagcaa

SEQ ID NO: 348508 - DNA, 25 bp, Homo sapien
taatgggcttatatgggtcctaggc

SEQ ID NO: 348509 - DNA, 25 bp, Homo sapien
tgtaagatgctgtccaacaggctgc

SEQ ID NO: 348510 - DNA, 25 bp, Homo sapien
aactgacgagtttgctgggccaact

SEQ ID NO: 348511 - DNA, 25 bp, Homo sapien
tgttttctggtatcgtcccttcgtg

SEQ ID NO: 348512 - DNA, 25 bp, Homo sapien
tactggaaaggggtcccaatccaga

SEQ ID NO: 348513 - DNA, 25 bp, Homo sapien
tttgttgaagacttactgcctgggc

SEQ ID NO: 348514 - DNA, 25 bp, Homo sapien
gattctttcatctgaccagcaggga

SEQ ID NO: 348515 - DNA, 25 bp, Homo sapien
gggaagactctccaacccgatggaa

SEQ ID NO: 348516 - DNA, 25 bp, Homo sapien
tcacataactggtagagaggagcaa

SEQ ID NO: 348517 - DNA, 25 bp, Homo sapien
gaagagcctcctgtccctctaggtg

SEQ ID NO: 348518 - DNA, 25 bp, Homo sapien
cattagctttgaccgtgcctgaaaa

SEQ ID NO: 348519 - DNA, 25 bp, Homo sapien
tgtgcgtcatccgttggtgtcccag

SEQ ID NO: 348520 - DNA, 25 bp, Homo sapien
gaaaattcctccatttgtgcgtcat

SEQ ID NO: 348521 - DNA, 25 bp, Homo sapien
caggacaacagcatgaccaggagga

SEQ ID NO: 348522 - DNA, 25 bp, Homo sapien
ccctgggccagataaacatgaggag

SEQ ID NO: 348523 - DNA, 25 bp, Homo sapien
cagacaaacctgggtgatgactcag

SEQ ID NO: 348524 - DNA, 25 bp, Homo sapien
tctgtgggccttccatatcttgact

SEQ ID NO: 348525 - DNA, 25 bp, Homo sapien
atccacgacagcgccacgggcccga

SEQ ID NO: 348526 - DNA, 25 bp, Homo sapien
acgacagcgccacgggcccgaggga

SEQ ID NO: 348527 - DNA, 25 bp, Homo sapien
ccacgacagcgccacgggcccgagg

SEQ ID NO: 348528 - DNA, 25 bp, Homo sapien
cagcgccacgggcccgagggacgag

SEQ ID NO: 348529 - DNA, 25 bp, Homo sapien
cctccagtggacttgctgagatgct

SEQ ID NO: 348530 - DNA, 25 bp, Homo sapien
cagtggacttgctgagatgctcagc

SEQ ID NO: 348531 - DNA, 25 bp, Homo sapien
ccagtggacttgctgagatgctcag

SEQ ID NO: 348532 - DNA, 25 bp, Homo sapien
tggcaaccgcctcggagagacaagt

SEQ ID NO: 348533 - DNA, 25 bp, Homo sapien
gctcccctctgataatgctgatgct

SEQ ID NO: 348534 - DNA, 25 bp, Homo sapien
cgcttctaggtaaagaggatcccaa

SEQ ID NO: 348535 - DNA, 25 bp, Homo sapien
ctgatgctgatgcaggaagtcctgg

SEQ ID NO: 348536 - DNA, 25 bp, Homo sapien
ggccagggtgcacggagcccacaca

SEQ ID NO: 348537 - DNA, 25 bp, Homo sapien
aacaggccagggtgcacggagccca

SEQ ID NO: 348538 - DNA, 25 bp, Homo sapien
tcacacccgaacaggccagggtgca

SEQ ID NO: 348539 - DNA, 25 bp, Homo sapien
acccgaacaggccagggtgcacgga

SEQ ID NO: 348540 - DNA, 25 bp, Homo sapien
ccaggccacagctgttatcaggtgt

SEQ ID NO: 348541 - DNA, 25 bp, Homo sapien
ggtgtcaccgtctttattgacaaga

SEQ ID NO: 348542 - DNA, 25 bp, Homo sapien
ttcacacccatcaggacacagtgtc

SEQ ID NO: 348543 - DNA, 25 bp, Homo sapien
cagtgtctggcggagaaattggccc

SEQ ID NO: 348544 - DNA, 25 bp, Homo sapien
ttctcgttagatcccaggaggcagc

SEQ ID NO: 348545 - DNA, 25 bp, Homo sapien
cattgactgcctgggccaaaagggt

SEQ ID NO: 348546 - DNA, 25 bp, Homo sapien
tacaaaagtagatgcagggccttgc

SEQ ID NO: 348547 - DNA, 25 bp, Homo sapien
taagcttatgcagttcgaggtccct

SEQ ID NO: 348548 - DNA, 25 bp, Homo sapien
gatgcgcatcgtgctggacttctcc

SEQ ID NO: 348549 - DNA, 25 bp, Homo sapien
ctacaggtagctgatgcgcatcgtg

SEQ ID NO: 348550 - DNA, 25 bp, Homo sapien
tgccaggctgcgtgatctggctgac

SEQ ID NO: 348551 - DNA, 25 bp, Homo sapien
tagctgatgcgcatcgtgctggact

SEQ ID NO: 348552 - DNA, 25 bp, Homo sapien
tcctcagtcttctccgggggcccca

SEQ ID NO: 348553 - DNA, 25 bp, Homo sapien
tcctcctcagtcttctccgggggcc

SEQ ID NO: 348554 - DNA, 25 bp, Homo sapien
tccccttgcccccctccctgctctc

SEQ ID NO: 348555 - DNA, 25 bp, Homo sapien
tcctcctcctcagtcttctccgggg

SEQ ID NO: 348556 - DNA, 25 bp, Homo sapien
tggctgcgcacacggcgggagggcc

SEQ ID NO: 348557 - DNA, 25 bp, Homo sapien
cctgcggaagccctgcttgaagcgg

SEQ ID NO: 348558 - DNA, 25 bp, Homo sapien
tcctggctgcgcacacggcgggagg

SEQ ID NO: 348559 - DNA, 25 bp, Homo sapien
aagccctgcttgaagcggtaggaga

SEQ ID NO: 348560 - DNA, 25 bp, Homo sapien
caccaggaagtagagcccaaagaag

SEQ ID NO: 348561 - DNA, 25 bp, Homo sapien
ttgagcacgtagaagggcatccagc

SEQ ID NO: 348562 - DNA, 25 bp, Homo sapien
atgcgcgtgaccctgcgttcggagc

SEQ ID NO: 348563 - DNA, 25 bp, Homo sapien
agcagagcacgaagagcgccaccac

SEQ ID NO: 348564 - DNA, 25 bp, Homo sapien
cacgttgacgatgttgagcacgtag

SEQ ID NO: 348565 - DNA, 25 bp, Homo sapien
cccacacccggcgcccagctgagcg

SEQ ID NO: 348566 - DNA, 25 bp, Homo sapien
cgagggtgcccacacccggcgccca

SEQ ID NO: 348567 - DNA, 25 bp, Homo sapien
gtgcccacacccggcgcccagctga

SEQ ID NO: 348568 - DNA, 25 bp, Homo sapien
tggcacgagggtgcccacacccggc

SEQ ID NO: 348569 - DNA, 25 bp, Homo sapien
tgtgccgcaggaccacatagatgac

SEQ ID NO: 348570 - DNA, 25 bp, Homo sapien
caggttctgaggtcgtggacaccga

SEQ ID NO: 348571 - DNA, 25 bp, Homo sapien
tggttgatgccatccaccgccatga

SEQ ID NO: 348572 - DNA, 25 bp, Homo sapien
tggacaccgatgatggatgaagcat

SEQ ID NO: 348573 - DNA, 25 bp, Homo sapien
gagggtggtcagcagtcagctattt

SEQ ID NO: 348574 - DNA, 25 bp, Homo sapien
gggtggtcagcagtcagctatttgc

SEQ ID NO: 348575 - DNA, 25 bp, Homo sapien
ggggagggtggtcagcagtcagcta

SEQ ID NO: 348576 - DNA, 25 bp, Homo sapien
ggagggtggtcagcagtcagctatt

SEQ ID NO: 348577 - DNA, 25 bp, Homo sapien
ccctaacagttcagggaggccaggc

SEQ ID NO: 348578 - DNA, 25 bp, Homo sapien
acattgtccccggatggaagcctca

SEQ ID NO: 348579 - DNA, 25 bp, Homo sapien
catccttgagaaggagggacttttc

SEQ ID NO: 348580 - DNA, 25 bp, Homo sapien
gccgttcaacaaggagagctccaag

SEQ ID NO: 348581 - DNA, 25 bp, Homo sapien
cagggttgtttgcagagattaaacg

SEQ ID NO: 348582 - DNA, 25 bp, Homo sapien
taaacggaggcgtgccaagcacagt

SEQ ID NO: 348583 - DNA, 25 bp, Homo sapien
gacatgatacatctggctccctcca

SEQ ID NO: 348584 - DNA, 25 bp, Homo sapien
gggaagccaacgacatgatacatct

SEQ ID NO: 348585 - DNA, 25 bp, Homo sapien
aggctggttatcattctgctgtccc

SEQ ID NO: 348586 - DNA, 25 bp, Homo sapien
gacagagagggactgtgccacagat

SEQ ID NO: 348587 - DNA, 25 bp, Homo sapien
tctagaccgcttgcgggctcaggtt

SEQ ID NO: 348588 - DNA, 25 bp, Homo sapien
gacacagaagccaatagaaatagag

SEQ ID NO: 348589 - DNA, 25 bp, Homo sapien
ttccaatatctccttttggagctgt

SEQ ID NO: 348590 - DNA, 25 bp, Homo sapien
gaatcaataaatttattttctgctt

SEQ ID NO: 348591 - DNA, 25 bp, Homo sapien
aataaatttattttctgcttaagca

SEQ ID NO: 348592 - DNA, 25 bp, Homo sapien
caataaatttattttctgcttaagc

SEQ ID NO: 348593 - DNA, 25 bp, Homo sapien
tcaataaatttattttctgcttaag

SEQ ID NO: 348594 - DNA, 25 bp, Homo sapien
catcgatattagagcagctggcctc

SEQ ID NO: 348595 - DNA, 25 bp, Homo sapien
agtaagagccccatccctgaaggta

SEQ ID NO: 348596 - DNA, 25 bp, Homo sapien
cgggtagatgcttccacatgcggca

SEQ ID NO: 348597 - DNA, 25 bp, Homo sapien
tctcacaggtaagtgcagctcagga

SEQ ID NO: 348598 - DNA, 25 bp, Homo sapien
gcaggagcatgaggggcttgggatg

SEQ ID NO: 348599 - DNA, 25 bp, Homo sapien
aggagcatgaggggcttgggatgca

SEQ ID NO: 348600 - DNA, 25 bp, Homo sapien
cacgggggtggcttaatgggtcctg

SEQ ID NO: 348601 - DNA, 25 bp, Homo sapien
gagcatgaggggcttgggatgcagc

SEQ ID NO: 348602 - DNA, 25 bp, Homo sapien
gccatctgctaagaaacgccacagg

SEQ ID NO: 348603 - DNA, 25 bp, Homo sapien
aaatttgcacgttcctggcctcagg

SEQ ID NO: 348604 - DNA, 25 bp, Homo sapien
tcagacccatctaggtgggagcgct

SEQ ID NO: 348605 - DNA, 25 bp, Homo sapien
aaagaccatcaacgaagctctgcag

SEQ ID NO: 348606 - DNA, 25 bp, Homo sapien
gctgcaggcgcgcttctgctgccgc

SEQ ID NO: 348607 - DNA, 25 bp, Homo sapien
gcccggatggcctcgtcgaacacgg

SEQ ID NO: 348608 - DNA, 25 bp, Homo sapien
cgtcgaacacggttttcaggcctct

SEQ ID NO: 348609 - DNA, 25 bp, Homo sapien
tggcctcgtcgaacacggttttcag

SEQ ID NO: 348610 - DNA, 25 bp, Homo sapien
agtggtgccgcacttctgggaacca

SEQ ID NO: 348611 - DNA, 25 bp, Homo sapien
cttcagtttctcgatggtgtccttg

SEQ ID NO: 348612 - DNA, 25 bp, Homo sapien
tgtccttgtcgtcccgcaggtccag

SEQ ID NO: 348613 - DNA, 25 bp, Homo sapien
agtgccaggccctgcgggtaggtga

SEQ ID NO: 348614 - DNA, 25 bp, Homo sapien
acacaaggttgtatgggtcaagagg

SEQ ID NO: 348615 - DNA, 25 bp, Homo sapien
gacacaaggttgtatgggtcaagag

SEQ ID NO: 348616 - DNA, 25 bp, Homo sapien
gggggacacaaggttgtatgggtca

SEQ ID NO: 348617 - DNA, 25 bp, Homo sapien
gggacacaaggttgtatgggtcaag

SEQ ID NO: 348618 - DNA, 25 bp, Homo sapien
ggcgcggacgttctcataagaggct

SEQ ID NO: 348619 - DNA, 25 bp, Homo sapien
aagaggctgggctgacgagggagaa

SEQ ID NO: 348620 - DNA, 25 bp, Homo sapien
tctcataagaggctgggctgacgag

SEQ ID NO: 348621 - DNA, 25 bp, Homo sapien
cttggcgcggacgttctcataagag

SEQ ID NO: 348622 - DNA, 25 bp, Homo sapien
gagaggtagggtttcccaggctgag

SEQ ID NO: 348623 - DNA, 25 bp, Homo sapien
cctgggacatgcaaggcaggcagac

SEQ ID NO: 348624 - DNA, 25 bp, Homo sapien
tggctggaagggcatcccaagcaga

SEQ ID NO: 348625 - DNA, 25 bp, Homo sapien
atgggcacattgaggaccgggaacc

SEQ ID NO: 348626 - DNA, 25 bp, Homo sapien
gtctgtggataggagagcggccgga

SEQ ID NO: 348627 - DNA, 25 bp, Homo sapien
cgtctgtggataggagagcggccgg

SEQ ID NO: 348628 - DNA, 25 bp, Homo sapien
ctgtggataggagagcggccggaga

SEQ ID NO: 348629 - DNA, 25 bp, Homo sapien
gtggataggagagcggccggagacg

SEQ ID NO: 348630 - DNA, 25 bp, Homo sapien
aatgaatgttcatcccgtctcaggc

SEQ ID NO: 348631 - DNA, 25 bp, Homo sapien
accctgagacaaggaggtgatgtga

SEQ ID NO: 348632 - DNA, 25 bp, Homo sapien
tattttgtcgaatgaatgttcatcc

SEQ ID NO: 348633 - DNA, 25 bp, Homo sapien
cgcccagccgcaatattttgtcgaa

SEQ ID NO: 348634 - DNA, 25 bp, Homo sapien
gaacgagcctccagatgcacttgct

SEQ ID NO: 348635 - DNA, 25 bp, Homo sapien
tcttccagggaaagagggctgcttc

SEQ ID NO: 348636 - DNA, 25 bp, Homo sapien
actatgcatcgggtgcagagccagc

SEQ ID NO: 348637 - DNA, 25 bp, Homo sapien
gaaagctgttagtcactggccatgg

SEQ ID NO: 348638 - DNA, 25 bp, Homo sapien
gctattggttgaaagatgaaggcag

SEQ ID NO: 348639 - DNA, 25 bp, Homo sapien
cgtgctattggttgaaagatgaagg

SEQ ID NO: 348640 - DNA, 25 bp, Homo sapien
gtgctattggttgaaagatgaaggc

SEQ ID NO: 348641 - DNA, 25 bp, Homo sapien
tgctattggttgaaagatgaaggca

SEQ ID NO: 348642 - DNA, 25 bp, Homo sapien
cacaggcacacgagggcactgtctt

SEQ ID NO: 348643 - DNA, 25 bp, Homo sapien
cttggttctaacgaggtgaggtgta

SEQ ID NO: 348644 - DNA, 25 bp, Homo sapien
tcaccagggcttccgtcgagcttgg

SEQ ID NO: 348645 - DNA, 25 bp, Homo sapien
ctatgccacaggcacacgagggcac

SEQ ID NO: 348646 - DNA, 25 bp, Homo sapien
cacaggcattggcagtagcaggatc

SEQ ID NO: 348647 - DNA, 25 bp, Homo sapien
gaaactttgtgcctgaagccatatg

SEQ ID NO: 348648 - DNA, 25 bp, Homo sapien
ccctgtgcaattggataggtggcca

SEQ ID NO: 348649 - DNA, 25 bp, Homo sapien
taggtggccacacgcatagagctgg

SEQ ID NO: 348650 - DNA, 25 bp, Homo sapien
gccaccagggatcagggacctccag

SEQ ID NO: 348651 - DNA, 25 bp, Homo sapien
caatccttcggagagacttgggaag

SEQ ID NO: 348652 - DNA, 25 bp, Homo sapien
gacaacaaagtccactaggggccac

SEQ ID NO: 348653 - DNA, 25 bp, Homo sapien
gaaggtagatctggtcgggcctatt

SEQ ID NO: 348654 - DNA, 25 bp, Homo sapien
actgtgctgagataatgggagaccc

SEQ ID NO: 348655 - DNA, 25 bp, Homo sapien
tcgtggtagatcagaaaggcttccc

SEQ ID NO: 348656 - DNA, 25 bp, Homo sapien
cacatgtgtgacatcttgcgcaggg

SEQ ID NO: 348657 - DNA, 25 bp, Homo sapien
tctcaacgtacaagggaggtgcctg

SEQ ID NO: 348658 - DNA, 25 bp, Homo sapien
ggtggtgtagctgatgagaaggcag

SEQ ID NO: 348659 - DNA, 25 bp, Homo sapien
tggtggtgtagctgatgagaaggca

SEQ ID NO: 348660 - DNA, 25 bp, Homo sapien
ttggtggtgtagctgatgagaaggc

SEQ ID NO: 348661 - DNA, 25 bp, Homo sapien
agggccaggcgcgtttctgcgggcg

SEQ ID NO: 348662 - DNA, 25 bp, Homo sapien
gccaggcgcgtttctgcgggcgcaa

SEQ ID NO: 348663 - DNA, 25 bp, Homo sapien
ggccaggcgcgtttctgcgggcgca

SEQ ID NO: 348664 - DNA, 25 bp, Homo sapien
caggcgcgtttctgcgggcgcaagg

SEQ ID NO: 348665 - DNA, 25 bp, Homo sapien
tgcagggggcggagcatgcggtctg

SEQ ID NO: 348666 - DNA, 25 bp, Homo sapien
agcatgcggtctggcagagcagctg

SEQ ID NO: 348667 - DNA, 25 bp, Homo sapien
caggccccctgcgtggaggctccag

SEQ ID NO: 348668 - DNA, 25 bp, Homo sapien
gctctccccacggtcgtttgcaggg

SEQ ID NO: 348669 - DNA, 25 bp, Homo sapien
cgtggctcctctctccgaaatattt

SEQ ID NO: 348670 - DNA, 25 bp, Homo sapien
ttctgccgccctcagggccccgtgg

SEQ ID NO: 348671 - DNA, 25 bp, Homo sapien
ccggcagggcggtgttcttggtgct

SEQ ID NO: 348672 - DNA, 25 bp, Homo sapien
aaatatttcatgaatccgcctcctt

SEQ ID NO: 348673 - DNA, 25 bp, Homo sapien
gtttcaagaactcgttacgtgtcag

SEQ ID NO: 348674 - DNA, 25 bp, Homo sapien
caagaactcgttacgtgtcagcgga

SEQ ID NO: 348675 - DNA, 25 bp, Homo sapien
actgtttcaagaactcgttacgtgt

SEQ ID NO: 348676 - DNA, 25 bp, Homo sapien
aactcgttacgtgtcagcggaatca

SEQ ID NO: 348677 - DNA, 25 bp, Homo sapien
caatgcctgcttaatcatgagaagg

SEQ ID NO: 348678 - DNA, 25 bp, Homo sapien
aaggcatcccagagtacaggagcgg

SEQ ID NO: 348679 - DNA, 25 bp, Homo sapien
ggagcgctcaacattccctctgtgt

SEQ ID NO: 348680 - DNA, 25 bp, Homo sapien
aacctttaagaaatgcggccaggca

SEQ ID NO: 348681 - DNA, 25 bp, Homo sapien
taaatgagtcaacggaggaaggaag

SEQ ID NO: 348682 - DNA, 25 bp, Homo sapien
tcccagcaaaggcatgccgcggaga

SEQ ID NO: 348683 - DNA, 25 bp, Homo sapien
catgccgcggagaagacaataaatt

SEQ ID NO: 348684 - DNA, 25 bp, Homo sapien
ccgcatccggcctatgactagtatt

SEQ ID NO: 348685 - DNA, 25 bp, Homo sapien
tacaggctggcatggatcatcaggc

SEQ ID NO: 348686 - DNA, 25 bp, Homo sapien
catctgtctgaagccgaagtctagg

SEQ ID NO: 348687 - DNA, 25 bp, Homo sapien
taattcatagagacgaagaccagcg

SEQ ID NO: 348688 - DNA, 25 bp, Homo sapien
gaaggccgggactgcagctttgaaa

SEQ ID NO: 348689 - DNA, 25 bp, Homo sapien
gggcttcactgttgatttttcacaa

SEQ ID NO: 348690 - DNA, 25 bp, Homo sapien
tttcacaagtgattactggcggtag

SEQ ID NO: 348691 - DNA, 25 bp, Homo sapien
gattactggcggtagaatttgtcac

SEQ ID NO: 348692 - DNA, 25 bp, Homo sapien
cactcagatttctccgggggaccgg

SEQ ID NO: 348693 - DNA, 25 bp, Homo sapien
gtcactatcaatcaggcacctgctg

SEQ ID NO: 348694 - DNA, 25 bp, Homo sapien
ctctaccaagcacacctccccagag

SEQ ID NO: 348695 - DNA, 25 bp, Homo sapien
tccagcagcctttggggaaccgtca

SEQ ID NO: 348696 - DNA, 25 bp, Homo sapien
agccttcgtgtcctctaccaagcac

SEQ ID NO: 348697 - DNA, 25 bp, Homo sapien
cagaattcggttcatgtggagccca

SEQ ID NO: 348698 - DNA, 25 bp, Homo sapien
tcttgcatccagtcgtcagcacggg

SEQ ID NO: 348699 - DNA, 25 bp, Homo sapien
ccaccagagggactaaagcgcaaaa

SEQ ID NO: 348700 - DNA, 25 bp, Homo sapien
caacaggagtgagtacatatgccca

SEQ ID NO: 348701 - DNA, 25 bp, Homo sapien
tctaccagctgagggttacccgaag

SEQ ID NO: 348702 - DNA, 25 bp, Homo sapien
gcatatgcgccaagttaccttccga

SEQ ID NO: 348703 - DNA, 25 bp, Homo sapien
tcctggccaggcgtgaacgtctttc

SEQ ID NO: 348704 - DNA, 25 bp, Homo sapien
caagggtcgttacggaggtcactgc

SEQ ID NO: 348705 - DNA, 25 bp, Homo sapien
taataatagaccacatgcctggctg

SEQ ID NO: 348706 - DNA, 25 bp, Homo sapien
tcagctgcctttttaggacggttcc

SEQ ID NO: 348707 - DNA, 25 bp, Homo sapien
gaaataaggaacacctgtcagctgc

SEQ ID NO: 348708 - DNA, 25 bp, Homo sapien
tgcaaaaatgttgcggtgccctaga

SEQ ID NO: 348709 - DNA, 25 bp, Homo sapien
tgcatcggccctagaaacagctttg

SEQ ID NO: 348710 - DNA, 25 bp, Homo sapien
gacatcagttcacatgagaaggcag

SEQ ID NO: 348711 - DNA, 25 bp, Homo sapien
tgggactaccatttctggcaggtgc

SEQ ID NO: 348712 - DNA, 25 bp, Homo sapien
tctcagcatggctggaagagcctgt

SEQ ID NO: 348713 - DNA, 25 bp, Homo sapien
gaggcaagcagtatggaccctggtt

SEQ ID NO: 348714 - DNA, 25 bp, Homo sapien
catacaggaatctccgagttgagga

SEQ ID NO: 348715 - DNA, 25 bp, Homo sapien
tgacctttagtgaggcctgaagccg

SEQ ID NO: 348716 - DNA, 25 bp, Homo sapien
aggaaagtttcgtaacacagcaagg

SEQ ID NO: 348717 - DNA, 25 bp, Homo sapien
tccaacagagggttagctgcacctg

SEQ ID NO: 348718 - DNA, 25 bp, Homo sapien
tataagctaggacctgtcactggtg

SEQ ID NO: 348719 - DNA, 25 bp, Homo sapien
caatgctcagaaacacaggaggtgg

SEQ ID NO: 348720 - DNA, 25 bp, Homo sapien
tggacaaactggcacatacacgaca

SEQ ID NO: 348721 - DNA, 25 bp, Homo sapien
gatttgcttcccaaaagagctggcc

SEQ ID NO: 348722 - DNA, 25 bp, Homo sapien
tctaaagtggaaggagacattgccc

SEQ ID NO: 348723 - DNA, 25 bp, Homo sapien
gcaaagctgctagtagaggcgtccc

SEQ ID NO: 348724 - DNA, 25 bp, Homo sapien
caagcgacatgttgctaggcgggca

SEQ ID NO: 348725 - DNA, 25 bp, Homo sapien
gaggagtaccctgagtagtagtgtc

SEQ ID NO: 348726 - DNA, 25 bp, Homo sapien
gatcttgtgcgtgctctcggatgag

SEQ ID NO: 348727 - DNA, 25 bp, Homo sapien
cctcgtagtacagggcgggaaagct

SEQ ID NO: 348728 - DNA, 25 bp, Homo sapien
tccagtaatcaaggatgtcatgcag

SEQ ID NO: 348729 - DNA, 25 bp, Homo sapien
cgctgcccccgccgctgcccgccgg

SEQ ID NO: 348730 - DNA, 25 bp, Homo sapien
tccaggtggtggatgcccccgcccc

SEQ ID NO: 348731 - DNA, 25 bp, Homo sapien
ctccaggtggtggatgcccccgccc

SEQ ID NO: 348732 - DNA, 25 bp, Homo sapien
tgcccccgccgctgcccgccggcac

SEQ ID NO: 348733 - DNA, 25 bp, Homo sapien
gccggtccagcgggctgttgagggg

SEQ ID NO: 348734 - DNA, 25 bp, Homo sapien
ccggtccagcgggctgttgaggggg

SEQ ID NO: 348735 - DNA, 25 bp, Homo sapien
tcttgatggaaccactggacgacac

SEQ ID NO: 348736 - DNA, 25 bp, Homo sapien
ggcacgtccaggctaaagaccttgg

SEQ ID NO: 348737 - DNA, 25 bp, Homo sapien
tggacgacacgctgcaggtcttgcg

SEQ ID NO: 348738 - DNA, 25 bp, Homo sapien
aaaagaggccgagtccagcttgaga

SEQ ID NO: 348739 - DNA, 25 bp, Homo sapien
ctcgggccgagccagaccgtccccg

SEQ ID NO: 348740 - DNA, 25 bp, Homo sapien
tcgggccgagccagaccgtccccgc

SEQ ID NO: 348741 - DNA, 25 bp, Homo sapien
gaagaggtcgcactcacagttgaag

SEQ ID NO: 348742 - DNA, 25 bp, Homo sapien
gaaggcaccgtcctcgatgtaggag

SEQ ID NO: 348743 - DNA, 25 bp, Homo sapien
tcgatgctgatgaggctcgggcact

SEQ ID NO: 348744 - DNA, 25 bp, Homo sapien
cagaaggtgtactcagtgtgcgccc

SEQ ID NO: 348745 - DNA, 25 bp, Homo sapien
aggcagggggtgcctagcggccaga

SEQ ID NO: 348746 - DNA, 25 bp, Homo sapien
cgctggcctcggagtgaggggccag

SEQ ID NO: 348747 - DNA, 25 bp, Homo sapien
gcgctggcctcggagtgaggggcca

SEQ ID NO: 348748 - DNA, 25 bp, Homo sapien
tgggcctccgcacttcccatattaa

SEQ ID NO: 348749 - DNA, 25 bp, Homo sapien
tttcaccagtgcctgcgcagcacgg

SEQ ID NO: 348750 - DNA, 25 bp, Homo sapien
aatggaggctccagtgtcggacagc

SEQ ID NO: 348751 - DNA, 25 bp, Homo sapien
tactatgtaccaggcgccggctagg

SEQ ID NO: 348752 - DNA, 25 bp, Homo sapien
gtcaccaattctacaggactttaag

SEQ ID NO: 348753 - DNA, 25 bp, Homo sapien
tgaccctctgacagcttccccttgg

SEQ ID NO: 348754 - DNA, 25 bp, Homo sapien
cttggcctctgtgggtcaccaattc

SEQ ID NO: 348755 - DNA, 25 bp, Homo sapien
ggactttaagctgtcctgaccctct

SEQ ID NO: 348756 - DNA, 25 bp, Homo sapien
gcatgcaaggatgaaggtagttgtc

SEQ ID NO: 348757 - DNA, 25 bp, Homo sapien
aaggatgaaggtagttgtcagatgc

SEQ ID NO: 348758 - DNA, 25 bp, Homo sapien
tcagggcatgcaaggatgaaggtag

SEQ ID NO: 348759 - DNA, 25 bp, Homo sapien
gaaggtagttgtcagatgctggggc

SEQ ID NO: 348760 - DNA, 25 bp, Homo sapien
caatcatagccaccatgcatgcggg

SEQ ID NO: 348761 - DNA, 25 bp, Homo sapien
tttacaggtaaggtgaccgcagctc

SEQ ID NO: 348762 - DNA, 25 bp, Homo sapien
tgatgaattctcaccacctgcgcta

SEQ ID NO: 348763 - DNA, 25 bp, Homo sapien
ctgagcgctttacctagatgatgaa

SEQ ID NO: 348764 - DNA, 25 bp, Homo sapien
cagtacgttttcgccttctgtacct

SEQ ID NO: 348765 - DNA, 25 bp, Homo sapien
tctcctttcccaggtacgcaggccc

SEQ ID NO: 348766 - DNA, 25 bp, Homo sapien
ttctgtacctcctccattcgtgccc

SEQ ID NO: 348767 - DNA, 25 bp, Homo sapien
actgtgagtacccaagaacaaggac

SEQ ID NO: 348768 - DNA, 25 bp, Homo sapien
gtgagaacggtagttatcataacca

SEQ ID NO: 348769 - DNA, 25 bp, Homo sapien
ctggcctttatcctgcaagatgaga

SEQ ID NO: 348770 - DNA, 25 bp, Homo sapien
ttccttggagtctccacggccctat

SEQ ID NO: 348771 - DNA, 25 bp, Homo sapien
tacataggcatgtgagaacggtagt

SEQ ID NO: 348772 - DNA, 25 bp, Homo sapien
gatttgcttagttccctctggccag

SEQ ID NO: 348773 - DNA, 25 bp, Homo sapien
tagctgtggatgattgtcttggcct

SEQ ID NO: 348774 - DNA, 25 bp, Homo sapien
ctttccttcatggtagcaaggtggc

SEQ ID NO: 348775 - DNA, 25 bp, Homo sapien
tggtagcccctaacagcaagaaagg

SEQ ID NO: 348776 - DNA, 25 bp, Homo sapien
caattggctgggacccgttatgctc

SEQ ID NO: 348777 - DNA, 25 bp, Homo sapien
catgtcactgcctaaagggttagga

SEQ ID NO: 348778 - DNA, 25 bp, Homo sapien
gggactgcctatcacaagacacttg

SEQ ID NO: 348779 - DNA, 25 bp, Homo sapien
ccttcaggaactcgggacacagatg

SEQ ID NO: 348780 - DNA, 25 bp, Homo sapien
acccagctggggacaccagggtgta

SEQ ID NO: 348781 - DNA, 25 bp, Homo sapien
cccagctggggacaccagggtgtat

SEQ ID NO: 348782 - DNA, 25 bp, Homo sapien
tcatcgggcacccagctggggacac

SEQ ID NO: 348783 - DNA, 25 bp, Homo sapien
tcgggcacccagctggggacaccag

SEQ ID NO: 348784 - DNA, 25 bp, Homo sapien
tagagcagacaatggagggagcgaa

SEQ ID NO: 348785 - DNA, 25 bp, Homo sapien
gatagagcagacaatggagggagcg

SEQ ID NO: 348786 - DNA, 25 bp, Homo sapien
ctggatagagcagacaatggaggga

SEQ ID NO: 348787 - DNA, 25 bp, Homo sapien
gagcagacaatggagggagcgaaat

SEQ ID NO: 348788 - DNA, 25 bp, Homo sapien
catggctgtaggcatgcaaggtgaa

SEQ ID NO: 348789 - DNA, 25 bp, Homo sapien
gagtccctgctaagtctccaaaggc

SEQ ID NO: 348790 - DNA, 25 bp, Homo sapien
tgtcactacaaggagcagaaatgca

SEQ ID NO: 348791 - DNA, 25 bp, Homo sapien
agtctctgtcactcaagtgggccca

SEQ ID NO: 348792 - DNA, 25 bp, Homo sapien
ttcccctcaaagacaccgtagctga

SEQ ID NO: 348793 - DNA, 25 bp, Homo sapien
tgacgttgagtttcccctcaaagac

SEQ ID NO: 348794 - DNA, 25 bp, Homo sapien
caaagacaccgtagctgagggtgac

SEQ ID NO: 348795 - DNA, 25 bp, Homo sapien
gggccctgtagcttaatgacgttga

SEQ ID NO: 348796 - DNA, 25 bp, Homo sapien
cccacgccccaaggcacttcacagc

SEQ ID NO: 348797 - DNA, 25 bp, Homo sapien
cagggaaagctgcccgggaacctga

SEQ ID NO: 348798 - DNA, 25 bp, Homo sapien
tagaagagtgttggggcatcacact

SEQ ID NO: 348799 - DNA, 25 bp, Homo sapien
ggcagcatcctggcacaggtggagg

SEQ ID NO: 348800 - DNA, 25 bp, Homo sapien
gatgagagcagatgtgtccatgaaa

SEQ ID NO: 348801 - DNA, 25 bp, Homo sapien
ccagcttgcactcaatgatatagcc

SEQ ID NO: 348802 - DNA, 25 bp, Homo sapien
gagcagatgtgtccatgaaacggga

SEQ ID NO: 348803 - DNA, 25 bp, Homo sapien
tgatatagcccatggtgcagtcatc

SEQ ID NO: 348804 - DNA, 25 bp, Homo sapien
ctggcccacggagccatcttcaaag

SEQ ID NO: 348805 - DNA, 25 bp, Homo sapien
agtttgcgattgatgcagaagccag

SEQ ID NO: 348806 - DNA, 25 bp, Homo sapien
tcttcaaagccagtttgcgattgat

SEQ ID NO: 348807 - DNA, 25 bp, Homo sapien
caaagccagtttgcgattgatgcag

SEQ ID NO: 348808 - DNA, 25 bp, Homo sapien
cgtcgcgggccagcgggaaggctct

SEQ ID NO: 348809 - DNA, 25 bp, Homo sapien
cgcccttgggttcacatagttgtca

SEQ ID NO: 348810 - DNA, 25 bp, Homo sapien
ttcccacatagacgtcgcgggccag

SEQ ID NO: 348811 - DNA, 25 bp, Homo sapien
tggatgggccggttcaggctgggcc

SEQ ID NO: 348812 - DNA, 25 bp, Homo sapien
tgtgttccgcggagcagttggtgac

SEQ ID NO: 348813 - DNA, 25 bp, Homo sapien
tgttccgcggagcagttggtgacca

SEQ ID NO: 348814 - DNA, 25 bp, Homo sapien
ggctgtgttccgcggagcagttggt

SEQ ID NO: 348815 - DNA, 25 bp, Homo sapien
ttccgcggagcagttggtgaccaca

SEQ ID NO: 348816 - DNA, 25 bp, Homo sapien
ctcctggaggcctttgtctgggctg

SEQ ID NO: 348817 - DNA, 25 bp, Homo sapien
tctgggctgtcggtgaagacaaatg

SEQ ID NO: 348818 - DNA, 25 bp, Homo sapien
ctgggctgtcggtgaagacaaatgt

SEQ ID NO: 348819 - DNA, 25 bp, Homo sapien
cagtctctcctggaggcctttgtct

SEQ ID NO: 348820 - DNA, 25 bp, Homo sapien
acaacttcagggtgtacacagccca

SEQ ID NO: 348821 - DNA, 25 bp, Homo sapien
ggtcacacgctcctttaggacaaca

SEQ ID NO: 348822 - DNA, 25 bp, Homo sapien
gatggactctgtactcctccagtga

SEQ ID NO: 348823 - DNA, 25 bp, Homo sapien
acacagcccacagtctaaacacata

SEQ ID NO: 348824 - DNA, 25 bp, Homo sapien
tctatgtgaacagacccacggccac

SEQ ID NO: 348825 - DNA, 25 bp, Homo sapien
cacggccacaccatgggacaccacg

SEQ ID NO: 348826 - DNA, 25 bp, Homo sapien
gaacacaatcttaaacccattttca

SEQ ID NO: 348827 - DNA, 25 bp, Homo sapien
ggacaccacgccactagggagacgt

SEQ ID NO: 348828 - DNA, 25 bp, Homo sapien
tgtgcaagccatctcggaaatgctg

SEQ ID NO: 348829 - DNA, 25 bp, Homo sapien
attggacatgcacttgcccgcaacg

SEQ ID NO: 348830 - DNA, 25 bp, Homo sapien
ggaaatgctgcctcacaacccagtc

SEQ ID NO: 348831 - DNA, 25 bp, Homo sapien
cagtccggctctcccagattggaca

SEQ ID NO: 348832 - DNA, 25 bp, Homo sapien
ccgggttcggctggctcagctcggg

SEQ ID NO: 348833 - DNA, 25 bp, Homo sapien
cactgcaatgaagacatcgtgtagc

SEQ ID NO: 348834 - DNA, 25 bp, Homo sapien
tggaaagcccgggtcgtcttcactg

SEQ ID NO: 348835 - DNA, 25 bp, Homo sapien
tccaggcgcaagcggtggaaagccc

SEQ ID NO: 348836 - DNA, 25 bp, Homo sapien
gttcaagtggtaccgcagacacagg

SEQ ID NO: 348837 - DNA, 25 bp, Homo sapien
gtaccgcagacacaggagccccatg

SEQ ID NO: 348838 - DNA, 25 bp, Homo sapien
aagtggtaccgcagacacaggagcc

SEQ ID NO: 348839 - DNA, 25 bp, Homo sapien
ggacaggttcaagtggtaccgcaga

SEQ ID NO: 348840 - DNA, 25 bp, Homo sapien
ctgagccatggcagcacgatctcga

SEQ ID NO: 348841 - DNA, 25 bp, Homo sapien
cagaggctgagccatggcagcacga

SEQ ID NO: 348842 - DNA, 25 bp, Homo sapien
ccaaatcccaaccagacagggaggg

SEQ ID NO: 348843 - DNA, 25 bp, Homo sapien
aggcaaaagtctggcaggcatcagg

SEQ ID NO: 348844 - DNA, 25 bp, Homo sapien
tgcatggctgaatccacgaggagcg

SEQ ID NO: 348845 - DNA, 25 bp, Homo sapien
cacgggccgtacattctcatgacag

SEQ ID NO: 348846 - DNA, 25 bp, Homo sapien
ccgccaggaacgcacacgtgttagt

SEQ ID NO: 348847 - DNA, 25 bp, Homo sapien
gagtccaagggtctaggaaggctca

SEQ ID NO: 348848 - DNA, 25 bp, Homo sapien
tctgagccacggcactgccgcagca

SEQ ID NO: 348849 - DNA, 25 bp, Homo sapien
tccccactcatgggcgggcacctgc

SEQ ID NO: 348850 - DNA, 25 bp, Homo sapien
ccgcactccacccacacgaggcggg

SEQ ID NO: 348851 - DNA, 25 bp, Homo sapien
aggatgcggccgcgcaccaccttgg

SEQ ID NO: 348852 - DNA, 25 bp, Homo sapien
ggatgacgatggggtagatctcgtt

SEQ ID NO: 348853 - DNA, 25 bp, Homo sapien
tggatgacgatggggtagatctcgt

SEQ ID NO: 348854 - DNA, 25 bp, Homo sapien
ctgacttcccggacattcttctcag

SEQ ID NO: 348855 - DNA, 25 bp, Homo sapien
tcccggacattcttctcagtcacct

SEQ ID NO: 348856 - DNA, 25 bp, Homo sapien
cccggatcctgctgcctagcccagg

SEQ ID NO: 348857 - DNA, 25 bp, Homo sapien
aggatgggcacagttcctccccaga

SEQ ID NO: 348858 - DNA, 25 bp, Homo sapien
caacagactcctggatggcccggat

SEQ ID NO: 348859 - DNA, 25 bp, Homo sapien
tggatggcccggatcctgctgccta

SEQ ID NO: 348860 - DNA, 25 bp, Homo sapien
tagcggccgcaccaaactgtagggt

SEQ ID NO: 348861 - DNA, 25 bp, Homo sapien
tagggtctgaggctccgctccggct

SEQ ID NO: 348862 - DNA, 25 bp, Homo sapien
aggcactcaggcaacagcaccacgg

SEQ ID NO: 348863 - DNA, 25 bp, Homo sapien
aggtctagcaggttacggatgagcc

SEQ ID NO: 348864 - DNA, 25 bp, Homo sapien
ccagcagcagctgatccggggagtc

SEQ ID NO: 348865 - DNA, 25 bp, Homo sapien
gatccggggagtcccctgcaggcgc

SEQ ID NO: 348866 - DNA, 25 bp, Homo sapien
tccggggagtcccctgcaggcgccc

SEQ ID NO: 348867 - DNA, 25 bp, Homo sapien
ggagtcccctgcaggcgcccccacg

SEQ ID NO: 348868 - DNA, 25 bp, Homo sapien
catacgaggcaaactttagggtctc

SEQ ID NO: 348869 - DNA, 25 bp, Homo sapien
gaccaagaggaaccaaatgtcacat

SEQ ID NO: 348870 - DNA, 25 bp, Homo sapien
gagcctgggtcagcaaagatgtcct

SEQ ID NO: 348871 - DNA, 25 bp, Homo sapien
ggtataccccccaagctacagatgg

SEQ ID NO: 348872 - DNA, 25 bp, Homo sapien
actaggcacgctttacctcatttca

SEQ ID NO: 348873 - DNA, 25 bp, Homo sapien
tgaccaattaaatcaccagggaagg

SEQ ID NO: 348874 - DNA, 25 bp, Homo sapien
gggtactcctgcatactaggcacgc

SEQ ID NO: 348875 - DNA, 25 bp, Homo sapien
cctggacggtgagctctgctgttct

SEQ ID NO: 348876 - DNA, 25 bp, Homo sapien
ttctcctgaacttctaggagctgct

SEQ ID NO: 348877 - DNA, 25 bp, Homo sapien
cctcggtgccggctggagggcaggc

SEQ ID NO: 348878 - DNA, 25 bp, Homo sapien
ggtgccggctggagggcaggcattt

SEQ ID NO: 348879 - DNA, 25 bp, Homo sapien
gcaggcatttctcctgaacttctag

SEQ ID NO: 348880 - DNA, 25 bp, Homo sapien
tgtatgccgagtccaccagtcgaag

SEQ ID NO: 348881 - DNA, 25 bp, Homo sapien
tttgcccaggcttctagggcctcgt

SEQ ID NO: 348882 - DNA, 25 bp, Homo sapien
ggtcaacccgggtgcagaaccattc

SEQ ID NO: 348883 - DNA, 25 bp, Homo sapien
cacgaatgtagaagggctcggcacc

SEQ ID NO: 348884 - DNA, 25 bp, Homo sapien
aggggagtgtggacccctgattcca

SEQ ID NO: 348885 - DNA, 25 bp, Homo sapien
gagtgtggacccctgattccagagc

SEQ ID NO: 348886 - DNA, 25 bp, Homo sapien
gtggacccctgattccagagcaagg

SEQ ID NO: 348887 - DNA, 25 bp, Homo sapien
gcctcggcttccaggcacgccccct

SEQ ID NO: 348888 - DNA, 25 bp, Homo sapien
ggtgtttcatgcctcacagttcaga

SEQ ID NO: 348889 - DNA, 25 bp, Homo sapien
gcctctgagagtagagcagcccagg

SEQ ID NO: 348890 - DNA, 25 bp, Homo sapien
catgcctcacagttcagatagcgcc

SEQ ID NO: 348891 - DNA, 25 bp, Homo sapien
tgtgggggtgtttcatgcctcacag

SEQ ID NO: 348892 - DNA, 25 bp, Homo sapien
cccagctcaggaggcagggcctcac

SEQ ID NO: 348893 - DNA, 25 bp, Homo sapien
cccccagctcaggaggcagggcctc

SEQ ID NO: 348894 - DNA, 25 bp, Homo sapien
ccccagctcaggaggcagggcctca

SEQ ID NO: 348895 - DNA, 25 bp, Homo sapien
ccccccagctcaggaggcagggcct

SEQ ID NO: 348896 - DNA, 25 bp, Homo sapien
ctggtcccttgtcctgcggctctgg

SEQ ID NO: 348897 - DNA, 25 bp, Homo sapien
cataaaacgacagtccatctggtcc

SEQ ID NO: 348898 - DNA, 25 bp, Homo sapien
accatctgtccccataaaacgacag

SEQ ID NO: 348899 - DNA, 25 bp, Homo sapien
ggccagacacccgaatagccagaga

SEQ ID NO: 348900 - DNA, 25 bp, Homo sapien
taacacgaagctgacaatgacaccc

SEQ ID NO: 348901 - DNA, 25 bp, Homo sapien
tttgttccaggcatgtgtaccgggt

SEQ ID NO: 348902 - DNA, 25 bp, Homo sapien
cattcactgggttgcgactgggaca

SEQ ID NO: 348903 - DNA, 25 bp, Homo sapien
gtcagatggtccgagaagcacagca

SEQ ID NO: 348904 - DNA, 25 bp, Homo sapien
ccacacgctgtcagaggatgaggac

SEQ ID NO: 348905 - DNA, 25 bp, Homo sapien
gaccagggcttaagtgtcacactcc

SEQ ID NO: 348906 - DNA, 25 bp, Homo sapien
aggaagtccaggccacagccccgag

SEQ ID NO: 348907 - DNA, 25 bp, Homo sapien
aaaggccacacgctgtcagaggatg

SEQ ID NO: 348908 - DNA, 25 bp, Homo sapien
gatgtctgacatgctgctgaaggat

SEQ ID NO: 348909 - DNA, 25 bp, Homo sapien
ctgtgatgtctgacatgctgctgaa

SEQ ID NO: 348910 - DNA, 25 bp, Homo sapien
tgatgtctgacatgctgctgaagga

SEQ ID NO: 348911 - DNA, 25 bp, Homo sapien
gtgatgtctgacatgctgctgaagg

SEQ ID NO: 348912 - DNA, 25 bp, Homo sapien
gtcttcctcacgctgccggcggagg

SEQ ID NO: 348913 - DNA, 25 bp, Homo sapien
cttcctcacgctgccggcggaggat

SEQ ID NO: 348914 - DNA, 25 bp, Homo sapien
gcaggatggagagccgattgatctc

SEQ ID NO: 348915 - DNA, 25 bp, Homo sapien
gatggagagccgattgatctccttt

SEQ ID NO: 348916 - DNA, 25 bp, Homo sapien
ggaggggaactcgctcaggctccaa

SEQ ID NO: 348917 - DNA, 25 bp, Homo sapien
tgcctccccagttgcttctgggcct

SEQ ID NO: 348918 - DNA, 25 bp, Homo sapien
ggggaactcgctcaggctccaagtg

SEQ ID NO: 348919 - DNA, 25 bp, Homo sapien
aggggaggggaactcgctcaggctc

SEQ ID NO: 348920 - DNA, 25 bp, Homo sapien
tactggtccttctcgatgaggctct

SEQ ID NO: 348921 - DNA, 25 bp, Homo sapien
aactggatccggtcacggctctgga

SEQ ID NO: 348922 - DNA, 25 bp, Homo sapien
tgagcgttgtcagcagctcatcccg

SEQ ID NO: 348923 - DNA, 25 bp, Homo sapien
gaggctctgtgagtactgcaactgg

SEQ ID NO: 348924 - DNA, 25 bp, Homo sapien
tgcggtgcttgagccgcaggtcttc

SEQ ID NO: 348925 - DNA, 25 bp, Homo sapien
cttctgcagcgtgcggtgcttgagc

SEQ ID NO: 348926 - DNA, 25 bp, Homo sapien
ccttctgcagcgtgcggtgcttgag

SEQ ID NO: 348927 - DNA, 25 bp, Homo sapien
tgcttgagccgcaggtcttccatct

SEQ ID NO: 348928 - DNA, 25 bp, Homo sapien
gtcatgctctaggatgtccagcagg

SEQ ID NO: 348929 - DNA, 25 bp, Homo sapien
catgctctaggatgtccagcaggat

SEQ ID NO: 348930 - DNA, 25 bp, Homo sapien
agtcatgctctaggatgtccagcag

SEQ ID NO: 348931 - DNA, 25 bp, Homo sapien
tcatgctctaggatgtccagcagga

SEQ ID NO: 348932 - DNA, 25 bp, Homo sapien
catgactaggggtcttcaaggggct

SEQ ID NO: 348933 - DNA, 25 bp, Homo sapien
aggccattcccaagacctactccca

SEQ ID NO: 348934 - DNA, 25 bp, Homo sapien
ggtagaccctgggcccaagatcttg

SEQ ID NO: 348935 - DNA, 25 bp, Homo sapien
agcctggcccatacaggtagaccct

SEQ ID NO: 348936 - DNA, 25 bp, Homo sapien
gtgacgccgtcagccgctggttctc

SEQ ID NO: 348937 - DNA, 25 bp, Homo sapien
tcctgcaactcccgcagtgacgccg

SEQ ID NO: 348938 - DNA, 25 bp, Homo sapien
agtgacgccgtcagccgctggttct

SEQ ID NO: 348939 - DNA, 25 bp, Homo sapien
actcccgcagtgacgccgtcagccg

SEQ ID NO: 348940 - DNA, 25 bp, Homo sapien
acaaggtccacattgtctggctcct

SEQ ID NO: 348941 - DNA, 25 bp, Homo sapien
ttcgaagcagtgcacactcttcctc

SEQ ID NO: 348942 - DNA, 25 bp, Homo sapien
ctcagagacaaggtccacattgtct

SEQ ID NO: 348943 - DNA, 25 bp, Homo sapien
gggcccctggcccttcgaagcagtg

SEQ ID NO: 348944 - DNA, 25 bp, Homo sapien
agcccaagacatgggtcagcccaga

SEQ ID NO: 348945 - DNA, 25 bp, Homo sapien
gagcccaagacatgggtcagcccag

SEQ ID NO: 348946 - DNA, 25 bp, Homo sapien
actatgaagggctacagagctgcca

SEQ ID NO: 348947 - DNA, 25 bp, Homo sapien
tcaccagttcggagtgtgcagccag

SEQ ID NO: 348948 - DNA, 25 bp, Homo sapien
taaaatgggcccagtcaatcccctg

SEQ ID NO: 348949 - DNA, 25 bp, Homo sapien
gaatcaaacaagacagcaagtgggc

SEQ ID NO: 348950 - DNA, 25 bp, Homo sapien
tgtgccaggcgcatggcgatcatgt

SEQ ID NO: 348951 - DNA, 25 bp, Homo sapien
tcatcaagaattgggtcaggccctc

SEQ ID NO: 348952 - DNA, 25 bp, Homo sapien
tgcaggtcacggctgcgaagtacag

SEQ ID NO: 348953 - DNA, 25 bp, Homo sapien
gccgtcgcacctctgtcatcaagaa

SEQ ID NO: 348954 - DNA, 25 bp, Homo sapien
tcctggcccgtgagcagcgtgaagt

SEQ ID NO: 348955 - DNA, 25 bp, Homo sapien
agtgttcggggtagtagaactccag

SEQ ID NO: 348956 - DNA, 25 bp, Homo sapien
aggaaggcctcatagcccctcttgc

SEQ ID NO: 348957 - DNA, 25 bp, Homo sapien
ggcagcgcaagatgtccatcaggcg

SEQ ID NO: 348958 - DNA, 25 bp, Homo sapien
cgcggcacgggaagcggtaggtgct

SEQ ID NO: 348959 - DNA, 25 bp, Homo sapien
gggaagcggtaggtgctcagcacct

SEQ ID NO: 348960 - DNA, 25 bp, Homo sapien
cggtgcggttgacgcggcacgggaa

SEQ ID NO: 348961 - DNA, 25 bp, Homo sapien
gttgacgcggcacgggaagcggtag

SEQ ID NO: 348962 - DNA, 25 bp, Homo sapien
gcgcgagccagccgatgccggacgc

SEQ ID NO: 348963 - DNA, 25 bp, Homo sapien
cgagccagccgatgccggacgccct

SEQ ID NO: 348964 - DNA, 25 bp, Homo sapien
cgcgagccagccgatgccggacgcc

SEQ ID NO: 348965 - DNA, 25 bp, Homo sapien
gcgagccagccgatgccggacgccc

SEQ ID NO: 348966 - DNA, 25 bp, Homo sapien
cctccgcctcagaccccgagccggc

SEQ ID NO: 348967 - DNA, 25 bp, Homo sapien
tcctccgcctcagaccccgagccgg

SEQ ID NO: 348968 - DNA, 25 bp, Homo sapien
tccgcctcagaccccgagccggccc

SEQ ID NO: 348969 - DNA, 25 bp, Homo sapien
ctccgcctcagaccccgagccggcc

SEQ ID NO: 348970 - DNA, 25 bp, Homo sapien
gtcgcctcgggctcccgggtccgca

SEQ ID NO: 348971 - DNA, 25 bp, Homo sapien
cccgcacgctacagtcgcctcgggc

SEQ ID NO: 348972 - DNA, 25 bp, Homo sapien
ctacagtcgcctcgggctcccgggt

SEQ ID NO: 348973 - DNA, 25 bp, Homo sapien
gcacgctacagtcgcctcgggctcc

SEQ ID NO: 348974 - DNA, 25 bp, Homo sapien
tgccgcccgccccgggtcgtgcgtc

SEQ ID NO: 348975 - DNA, 25 bp, Homo sapien
ctcatctttcccctgtccccgggcg

SEQ ID NO: 348976 - DNA, 25 bp, Homo sapien
ttccccacaaacatctgagcctcct

SEQ ID NO: 348977 - DNA, 25 bp, Homo sapien
acttccccacaaacatctgagcctc

SEQ ID NO: 348978 - DNA, 25 bp, Homo sapien
ccccacaaacatctgagcctcctca

SEQ ID NO: 348979 - DNA, 25 bp, Homo sapien
gcgcccccggggctcgcggagccag

SEQ ID NO: 348980 - DNA, 25 bp, Homo sapien
cgcgcccccggggctcgcggagcca

SEQ ID NO: 348981 - DNA, 25 bp, Homo sapien
tctgggcaggagagttgccgaccac

SEQ ID NO: 348982 - DNA, 25 bp, Homo sapien
gagtgccatttacagcttccgccag

SEQ ID NO: 348983 - DNA, 25 bp, Homo sapien
ccctggtaggcatggactagcagct

SEQ ID NO: 348984 - DNA, 25 bp, Homo sapien
aggcggctgactgcagacatgatca

SEQ ID NO: 348985 - DNA, 25 bp, Homo sapien
atgcgcggcaggagcgggtggaggt

SEQ ID NO: 348986 - DNA, 25 bp, Homo sapien
tggacgaagagtggagggcgcccca

SEQ ID NO: 348987 - DNA, 25 bp, Homo sapien
taacagctgggttgggcccagtggc

SEQ ID NO: 348988 - DNA, 25 bp, Homo sapien
actacccagagatggatgcgcggca

SEQ ID NO: 348989 - DNA, 25 bp, Homo sapien
ttgtttgcttttagccctggggcag

SEQ ID NO: 348990 - DNA, 25 bp, Homo sapien
tgtttgcttttagccctggggcagg

SEQ ID NO: 348991 - DNA, 25 bp, Homo sapien
tttgtttgcttttagccctggggca

SEQ ID NO: 348992 - DNA, 25 bp, Homo sapien
tggtgtgactcggaagaagaaccag

SEQ ID NO: 348993 - DNA, 25 bp, Homo sapien
acacccaagctctgttgatcctggt

SEQ ID NO: 348994 - DNA, 25 bp, Homo sapien
tcctggtgtgactcggaagaagaac

SEQ ID NO: 348995 - DNA, 25 bp, Homo sapien
tgttgatcctggtgtgactcggaag

SEQ ID NO: 348996 - DNA, 25 bp, Homo sapien
cttttaacttgaaagaggacatgtt

SEQ ID NO: 348997 - DNA, 25 bp, Homo sapien
gaggacatgttgaacccgcccctta

SEQ ID NO: 348998 - DNA, 25 bp, Homo sapien
tattcttttaacttgaaagaggaca

SEQ ID NO: 348999 - DNA, 25 bp, Homo sapien
ttcttttaacttgaaagaggacatg

SEQ ID NO: 349000 - DNA, 25 bp, Homo sapien
aatttgtcactctcaaaggtcactg

SEQ ID NO: 349001 - DNA, 25 bp, Homo sapien
ccttgaatttgtcactctcaaaggt

SEQ ID NO: 349002 - DNA, 25 bp, Homo sapien
aaaagtcagctcgtgcccatctggc

SEQ ID NO: 349003 - DNA, 25 bp, Homo sapien
gaaaagtcagctcgtgcccatctgg

SEQ ID NO: 349004 - DNA, 25 bp, Homo sapien
tgcagacaatggtggattcgctgaa

SEQ ID NO: 349005 - DNA, 25 bp, Homo sapien
gtccaatgagttgcagacaatggtg

SEQ ID NO: 349006 - DNA, 25 bp, Homo sapien
ttgctgccgtccaatgagttgcaga

SEQ ID NO: 349007 - DNA, 25 bp, Homo sapien
acaatggtggattcgctgaagcgag

SEQ ID NO: 349008 - DNA, 25 bp, Homo sapien
ccatcagtgccatcggcgatgctgc

SEQ ID NO: 349009 - DNA, 25 bp, Homo sapien
gggttgaccccggcttcatgtccat

SEQ ID NO: 349010 - DNA, 25 bp, Homo sapien
tcagtgccatcggcgatgctgcctg

SEQ ID NO: 349011 - DNA, 25 bp, Homo sapien
agggttgaccccggcttcatgtcca

SEQ ID NO: 349012 - DNA, 25 bp, Homo sapien
ttccactcgagtccccacagaaaat

SEQ ID NO: 349013 - DNA, 25 bp, Homo sapien
ccaacccagctgcaggtctcaatcc

SEQ ID NO: 349014 - DNA, 25 bp, Homo sapien
gtctcaatccccctgcccacgtgag

SEQ ID NO: 349015 - DNA, 25 bp, Homo sapien
gaaaatcaatcccacacttgcccag

SEQ ID NO: 349016 - DNA, 25 bp, Homo sapien
agaaaaagcatgatctgagatgccc

SEQ ID NO: 349017 - DNA, 25 bp, Homo sapien
actggggcactttgccagaagtcaa

SEQ ID NO: 349018 - DNA, 25 bp, Homo sapien
gaaaaagcatgatctgagatgccct

SEQ ID NO: 349019 - DNA, 25 bp, Homo sapien
tgaatgagctcattggactggggca

SEQ ID NO: 349020 - DNA, 25 bp, Homo sapien
tcaactcgtggtcaagcttatatcc

SEQ ID NO: 349021 - DNA, 25 bp, Homo sapien
tccctcaaggtcctaggtgaggact

SEQ ID NO: 349022 - DNA, 25 bp, Homo sapien
cagtacccagcacaaacaggcagaa

SEQ ID NO: 349023 - DNA, 25 bp, Homo sapien
cctgtgctcagggtctcaactcgtg

SEQ ID NO: 349024 - DNA, 25 bp, Homo sapien
tacatgaggatgtagcttatcgccc

SEQ ID NO: 349025 - DNA, 25 bp, Homo sapien
ttcacagcggccaaggtacatgagg

SEQ ID NO: 349026 - DNA, 25 bp, Homo sapien
cagagaattcttccggaggcggtca

SEQ ID NO: 349027 - DNA, 25 bp, Homo sapien
cagaacgagttagagcgtcccttgg

SEQ ID NO: 349028 - DNA, 25 bp, Homo sapien
ctatggtgccgagcgcgcccgttcg

SEQ ID NO: 349029 - DNA, 25 bp, Homo sapien
taggtgacgctctaggcgagctcgt

SEQ ID NO: 349030 - DNA, 25 bp, Homo sapien
ggcgagctcgttggcctctctatgg

SEQ ID NO: 349031 - DNA, 25 bp, Homo sapien
tgcccctttaatcggcagagggcgg

SEQ ID NO: 349032 - DNA, 25 bp, Homo sapien
gcactgtatgtaggtcgcctgaccc

SEQ ID NO: 349033 - DNA, 25 bp, Homo sapien
ttctggcccctgtccaaggcgtggg

SEQ ID NO: 349034 - DNA, 25 bp, Homo sapien
ggcctaagctatgaatgggactaga

SEQ ID NO: 349035 - DNA, 25 bp, Homo sapien
tctcccatgggagtgatgaccagtc

SEQ ID NO: 349036 - DNA, 25 bp, Homo sapien
gctcaagggtaatgccagaggccca

SEQ ID NO: 349037 - DNA, 25 bp, Homo sapien
tagagttctcggtgtgtctccttca

SEQ ID NO: 349038 - DNA, 25 bp, Homo sapien
ccatccatctgtccgtggtcagaag

SEQ ID NO: 349039 - DNA, 25 bp, Homo sapien
tgggtgtcttacgtctgtccatcca

SEQ ID NO: 349040 - DNA, 25 bp, Homo sapien
taggtcagccatatataccctggga

SEQ ID NO: 349041 - DNA, 25 bp, Homo sapien
gagaggccccaccaagtgtttccag

SEQ ID NO: 349042 - DNA, 25 bp, Homo sapien
ggcattccccgtaactccagatggg

SEQ ID NO: 349043 - DNA, 25 bp, Homo sapien
atggaacactggcacaaccctaggg

SEQ ID NO: 349044 - DNA, 25 bp, Homo sapien
gccatacgaccatggccaacaaggt

SEQ ID NO: 349045 - DNA, 25 bp, Homo sapien
aagaattcaggcagcagtcaaggcc

SEQ ID NO: 349046 - DNA, 25 bp, Homo sapien
aggcagcccgggtagtcacagccat

SEQ ID NO: 349047 - DNA, 25 bp, Homo sapien
ggctcagtcaggcaaccaagaattc

SEQ ID NO: 349048 - DNA, 25 bp, Homo sapien
aagtgatccacctgcacaggcctcc

SEQ ID NO: 349049 - DNA, 25 bp, Homo sapien
tcaagtgatccacctgcacaggcct

SEQ ID NO: 349050 - DNA, 25 bp, Homo sapien
ttcaagtgatccacctgcacaggcc

SEQ ID NO: 349051 - DNA, 25 bp, Homo sapien
caagtgatccacctgcacaggcctc

SEQ ID NO: 349052 - DNA, 25 bp, Homo sapien
cctccaagaggtgtgcagccgccta

SEQ ID NO: 349053 - DNA, 25 bp, Homo sapien
gccctccaagaggtgtgcagccgcc

SEQ ID NO: 349054 - DNA, 25 bp, Homo sapien
gcctaccccccgagaacctcagcaa

SEQ ID NO: 349055 - DNA, 25 bp, Homo sapien
tccaagaggtgtgcagccgcctacc

SEQ ID NO: 349056 - DNA, 25 bp, Homo sapien
tgacacccagcaacatcgccatagt

SEQ ID NO: 349057 - DNA, 25 bp, Homo sapien
agcaggaggtgaacaagatgacacc

SEQ ID NO: 349058 - DNA, 25 bp, Homo sapien
gatgaagttcctggcacggctggcc

SEQ ID NO: 349059 - DNA, 25 bp, Homo sapien
tcgccatagtcctgggacccaactt

SEQ ID NO: 349060 - DNA, 25 bp, Homo sapien
ccacgtgctgattgcatttgcttgg

SEQ ID NO: 349061 - DNA, 25 bp, Homo sapien
gatttcctcccacgtgctgattgca

SEQ ID NO: 349062 - DNA, 25 bp, Homo sapien
ggcaagatttcctcccacgtgctga

SEQ ID NO: 349063 - DNA, 25 bp, Homo sapien
cccacgtgctgattgcatttgcttg

SEQ ID NO: 349064 - DNA, 25 bp, Homo sapien
aaaccctttgctgagcagatgcatc

SEQ ID NO: 349065 - DNA, 25 bp, Homo sapien
caggtggtgggcgtcgtcgaggcgc

SEQ ID NO: 349066 - DNA, 25 bp, Homo sapien
tcgaggcgctgatccagagcgcaga

SEQ ID NO: 349067 - DNA, 25 bp, Homo sapien
ctccgtgtcttccatccaggtggtg

SEQ ID NO: 349068 - DNA, 25 bp, Homo sapien
gcgcggtctctgagagccgtctccg

SEQ ID NO: 349069 - DNA, 25 bp, Homo sapien
aaacggtcccggccagtggagtgag

SEQ ID NO: 349070 - DNA, 25 bp, Homo sapien
gagcctggcgcggtctctgagagcc

SEQ ID NO: 349071 - DNA, 25 bp, Homo sapien
tttacaacggggatggtctgcctgc

SEQ ID NO: 349072 - DNA, 25 bp, Homo sapien
atcaacttcaacgtgtcaggcctct

SEQ ID NO: 349073 - DNA, 25 bp, Homo sapien
aacgtgtcaggcctcttctcagctg

SEQ ID NO: 349074 - DNA, 25 bp, Homo sapien
aggaacttccgtccactgccgtgcc

SEQ ID NO: 349075 - DNA, 25 bp, Homo sapien
agctgttaccctccaggacacagtc

SEQ ID NO: 349076 - DNA, 25 bp, Homo sapien
taccaaggaaaggtgaggactgagg

SEQ ID NO: 349077 - DNA, 25 bp, Homo sapien
gaggactgaggggcttgaatggctc

SEQ ID NO: 349078 - DNA, 25 bp, Homo sapien
ggtgaggactgaggggcttgaatgg

SEQ ID NO: 349079 - DNA, 25 bp, Homo sapien
accaaggaaaggtgaggactgaggg

SEQ ID NO: 349080 - DNA, 25 bp, Homo sapien
ccccggagacagctgccccagtgga

SEQ ID NO: 349081 - DNA, 25 bp, Homo sapien
cccccggagacagctgccccagtgg

SEQ ID NO: 349082 - DNA, 25 bp, Homo sapien
tcctactgcaggaaataccattacc

SEQ ID NO: 349083 - DNA, 25 bp, Homo sapien
tcctgtctgaagtgagatcacagca

SEQ ID NO: 349084 - DNA, 25 bp, Homo sapien
cagacagaagtgacctgccaaggtc

SEQ ID NO: 349085 - DNA, 25 bp, Homo sapien
cattacctcttagcagtgaggagac

SEQ ID NO: 349086 - DNA, 25 bp, Homo sapien
tggttgcttccagatcacaaggcct

SEQ ID NO: 349087 - DNA, 25 bp, Homo sapien
accagtggctcctcaaaggtcccaa

SEQ ID NO: 349088 - DNA, 25 bp, Homo sapien
tattctgggcaattggccacgacca

SEQ ID NO: 349089 - DNA, 25 bp, Homo sapien
gctcacggtagaatccctggaatta

SEQ ID NO: 349090 - DNA, 25 bp, Homo sapien
ccatgtgcctcgtaccccatcgtac

SEQ ID NO: 349091 - DNA, 25 bp, Homo sapien
catgtgcctcgtaccccatcgtaca

SEQ ID NO: 349092 - DNA, 25 bp, Homo sapien
accatgtgcctcgtaccccatcgta

SEQ ID NO: 349093 - DNA, 25 bp, Homo sapien
acaccatgtgcctcgtaccccatcg

SEQ ID NO: 349094 - DNA, 25 bp, Homo sapien
cacacgtttcttgggacttcgctct

SEQ ID NO: 349095 - DNA, 25 bp, Homo sapien
gagattcgacccaaaggcagttcat

SEQ ID NO: 349096 - DNA, 25 bp, Homo sapien
gaactggagcgtccacgattcaggg

SEQ ID NO: 349097 - DNA, 25 bp, Homo sapien
ggcaatgagattcgacccaaaggca

SEQ ID NO: 349098 - DNA, 25 bp, Homo sapien
gtacccagccataaagtgactctta

SEQ ID NO: 349099 - DNA, 25 bp, Homo sapien
gaaacaatctgtactcccaggtcag

SEQ ID NO: 349100 - DNA, 25 bp, Homo sapien
tatgaagctgtacaaccctgggcaa

SEQ ID NO: 349101 - DNA, 25 bp, Homo sapien
gcatgaaggccgaatgttctggcac

SEQ ID NO: 349102 - DNA, 25 bp, Homo sapien
tagctagcctgccaagaacggtgga

SEQ ID NO: 349103 - DNA, 25 bp, Homo sapien
gtttgtccaaaggtccacggctgtc

SEQ ID NO: 349104 - DNA, 25 bp, Homo sapien
gtgaaatcgcgaacctcaggcagga

SEQ ID NO: 349105 - DNA, 25 bp, Homo sapien
gagataagtgccgtagacatcccca

SEQ ID NO: 349106 - DNA, 25 bp, Homo sapien
taatctgggtctcacgggaccagct

SEQ ID NO: 349107 - DNA, 25 bp, Homo sapien
tcagtaaataagagtggtccacgtc

SEQ ID NO: 349108 - DNA, 25 bp, Homo sapien
tatttattgtgtgccagtgatggtg

SEQ ID NO: 349109 - DNA, 25 bp, Homo sapien
tacccgtacagcgttgatggccaca

SEQ ID NO: 349110 - DNA, 25 bp, Homo sapien
cgcgcctggctgtttgcctcacttt

SEQ ID NO: 349111 - DNA, 25 bp, Homo sapien
tgcctcacttttaaaggacatagag

SEQ ID NO: 349112 - DNA, 25 bp, Homo sapien
cacttttaaaggacatagaggaggg

SEQ ID NO: 349113 - DNA, 25 bp, Homo sapien
gcctggctgtttgcctcacttttaa

SEQ ID NO: 349114 - DNA, 25 bp, Homo sapien
ctgtttccgaccagggccagtacag

SEQ ID NO: 349115 - DNA, 25 bp, Homo sapien
atattgatgccaatcttagcacact

SEQ ID NO: 349116 - DNA, 25 bp, Homo sapien
cagggccagtacagtcctccttagg

SEQ ID NO: 349117 - DNA, 25 bp, Homo sapien
attgatgccaatcttagcacactac

SEQ ID NO: 349118 - DNA, 25 bp, Homo sapien
ttaactgaaccatctgagagtatgt

SEQ ID NO: 349119 - DNA, 25 bp, Homo sapien
cattttttaactgaaccatctgaga

SEQ ID NO: 349120 - DNA, 25 bp, Homo sapien
ttacattttttaactgaaccatctg

SEQ ID NO: 349121 - DNA, 25 bp, Homo sapien
taactgaaccatctgagagtatgtt

SEQ ID NO: 349122 - DNA, 25 bp, Homo sapien
aaccgcctcaacctggaggccatca

SEQ ID NO: 349123 - DNA, 25 bp, Homo sapien
tggatacgaattcaagttccccaac

SEQ ID NO: 349124 - DNA, 25 bp, Homo sapien
gctgacggtgacttcaagatcaaat

SEQ ID NO: 349125 - DNA, 25 bp, Homo sapien
ctgccagatggatacgaattcaagt

SEQ ID NO: 349126 - DNA, 25 bp, Homo sapien
gtctccagggaccaaatttagccca

SEQ ID NO: 349127 - DNA, 25 bp, Homo sapien
gccacgtggtcaggcattgaaggaa

SEQ ID NO: 349128 - DNA, 25 bp, Homo sapien
tgcctctagctttaggtcaacagat

SEQ ID NO: 349129 - DNA, 25 bp, Homo sapien
ggacctattccatggtgccacgtgg

SEQ ID NO: 349130 - DNA, 25 bp, Homo sapien
cttttccagtaagcttgatcattta

SEQ ID NO: 349131 - DNA, 25 bp, Homo sapien
tgatcatttaatatccagatgacaa

SEQ ID NO: 349132 - DNA, 25 bp, Homo sapien
gatgacaaccgtgtggtctccagca

SEQ ID NO: 349133 - DNA, 25 bp, Homo sapien
gaaaccttatcagtcttggctgggt

SEQ ID NO: 349134 - DNA, 25 bp, Homo sapien
ctgtcaaatgagaatctggaaggcc

SEQ ID NO: 349135 - DNA, 25 bp, Homo sapien
caggagccaggttgtgatggttcct

SEQ ID NO: 349136 - DNA, 25 bp, Homo sapien
gaggaatgtagcactgatctgtcag

SEQ ID NO: 349137 - DNA, 25 bp, Homo sapien
gcgtgttcattcactctcccaagga

SEQ ID NO: 349138 - DNA, 25 bp, Homo sapien
agcccggggtgccagaaggccagtt

SEQ ID NO: 349139 - DNA, 25 bp, Homo sapien
ctgagtgaggtgcaagggtagggtg

SEQ ID NO: 349140 - DNA, 25 bp, Homo sapien
caagggtagggtgagaaaactcagc

SEQ ID NO: 349141 - DNA, 25 bp, Homo sapien
aaggccagtttctagagttagatgg

SEQ ID NO: 349142 - DNA, 25 bp, Homo sapien
ctcctggcagcaaatgctgggaaag

SEQ ID NO: 349143 - DNA, 25 bp, Homo sapien
cctcatggtggagagactcctggca

SEQ ID NO: 349144 - DNA, 25 bp, Homo sapien
ctggcagcaaatgctgggaaagaac

SEQ ID NO: 349145 - DNA, 25 bp, Homo sapien
cttggcctcattcctcatggtggag

SEQ ID NO: 349146 - DNA, 25 bp, Homo sapien
gaaaagagcatctaacaaacggccc

SEQ ID NO: 349147 - DNA, 25 bp, Homo sapien
ggaacctgagcaacgggtgcacgcc

SEQ ID NO: 349148 - DNA, 25 bp, Homo sapien
aacggcccagcgttctgggaacctg

SEQ ID NO: 349149 - DNA, 25 bp, Homo sapien
gcatctaacaaacggcccagcgttc

SEQ ID NO: 349150 - DNA, 25 bp, Homo sapien
tactcgctaggaattccgcctcttc

SEQ ID NO: 349151 - DNA, 25 bp, Homo sapien
tttgtgtccagcttactcgctagga

SEQ ID NO: 349152 - DNA, 25 bp, Homo sapien
ccgcctcttcctgtgtgacctcggg

SEQ ID NO: 349153 - DNA, 25 bp, Homo sapien
gggcaaatcggctcacccctctgag

SEQ ID NO: 349154 - DNA, 25 bp, Homo sapien
caggctaagccagaatttgtatcca

SEQ ID NO: 349155 - DNA, 25 bp, Homo sapien
taactcagtgagtcccaggctaagc

SEQ ID NO: 349156 - DNA, 25 bp, Homo sapien
gtgcttggaagatggacagcacatc

SEQ ID NO: 349157 - DNA, 25 bp, Homo sapien
ccaggtccgttccagctttctttca

SEQ ID NO: 349158 - DNA, 25 bp, Homo sapien
tttttggaggccgaggtgagcggat

SEQ ID NO: 349159 - DNA, 25 bp, Homo sapien
cacttgagctcaggagtttgaaacc

SEQ ID NO: 349160 - DNA, 25 bp, Homo sapien
acacctataatcccagcatttttgg

SEQ ID NO: 349161 - DNA, 25 bp, Homo sapien
attggttggccgggcacattggctc

SEQ ID NO: 349162 - DNA, 25 bp, Homo sapien
tgctcaacttcaagaagggatggat

SEQ ID NO: 349163 - DNA, 25 bp, Homo sapien
acagcccgatctgctcaacttcaag

SEQ ID NO: 349164 - DNA, 25 bp, Homo sapien
gatgtcgatcttggacgagcctgga

SEQ ID NO: 349165 - DNA, 25 bp, Homo sapien
gagaggtaagaggactgaggccgga

SEQ ID NO: 349166 - DNA, 25 bp, Homo sapien
tgctgggtgcagaaccgccagagcc

SEQ ID NO: 349167 - DNA, 25 bp, Homo sapien
tgccccatttggacccgtaccatgg

SEQ ID NO: 349168 - DNA, 25 bp, Homo sapien
acacacactgcatatctgagcgcgc

SEQ ID NO: 349169 - DNA, 25 bp, Homo sapien
aaaaaagcaattcctggtggctgtg

SEQ ID NO: 349170 - DNA, 25 bp, Homo sapien
tgtttaagtgaacagtgaccggcct

SEQ ID NO: 349171 - DNA, 25 bp, Homo sapien
gcatcttcccagcaaaatggcggtg

SEQ ID NO: 349172 - DNA, 25 bp, Homo sapien
ggctctcagggtggaacatctcgga

SEQ ID NO: 349173 - DNA, 25 bp, Homo sapien
caaacagctcttggaccataccggg

SEQ ID NO: 349174 - DNA, 25 bp, Homo sapien
ttgctcggcggaagaaacacagatg

SEQ ID NO: 349175 - DNA, 25 bp, Homo sapien
taaatacccggatgcgccgcccaag

SEQ ID NO: 349176 - DNA, 25 bp, Homo sapien
gaaatgtgccggcacaccagcggtc

SEQ ID NO: 349177 - DNA, 25 bp, Homo sapien
accagcggtcctcggcgccgtttgg

SEQ ID NO: 349178 - DNA, 25 bp, Homo sapien
gaccaccccaagtattcagacatga

SEQ ID NO: 349179 - DNA, 25 bp, Homo sapien
gcaaagtccagtgccaagagggccg

SEQ ID NO: 349180 - DNA, 25 bp, Homo sapien
tcaagttgtccatcaagcgcctggt

SEQ ID NO: 349181 - DNA, 25 bp, Homo sapien
gaaatcaagaaggtagccacgccaa

SEQ ID NO: 349182 - DNA, 25 bp, Homo sapien
aaaatagaaaaatcgcgcacttgcg

SEQ ID NO: 349183 - DNA, 25 bp, Homo sapien
catagtttctcccagtcagctagga

SEQ ID NO: 349184 - DNA, 25 bp, Homo sapien
gagtttcagaacctttggccagcag

SEQ ID NO: 349185 - DNA, 25 bp, Homo sapien
ttaaccagttgtgcaaggacagcaa

SEQ ID NO: 349186 - DNA, 25 bp, Homo sapien
agcgggtcatcacgtcccgtcaggg

SEQ ID NO: 349187 - DNA, 25 bp, Homo sapien
gagtgagcgggtcatcacgtcccgt

SEQ ID NO: 349188 - DNA, 25 bp, Homo sapien
aagagtgagcgggtcatcacgtccc

SEQ ID NO: 349189 - DNA, 25 bp, Homo sapien
tgagcgggtcatcacgtcccgtcag

SEQ ID NO: 349190 - DNA, 25 bp, Homo sapien
gaatccttaacttctgtgccaacaa

SEQ ID NO: 349191 - DNA, 25 bp, Homo sapien
aatccttaacttctgtgccaacaac

SEQ ID NO: 349192 - DNA, 25 bp, Homo sapien
atccttaacttctgtgccaacaact

SEQ ID NO: 349193 - DNA, 25 bp, Homo sapien
caagtgaggtctgctgagatagcgc

SEQ ID NO: 349194 - DNA, 25 bp, Homo sapien
gcaaagcccctttggccatacaagg

SEQ ID NO: 349195 - DNA, 25 bp, Homo sapien
tctgttatacagacccgggtgagga

SEQ ID NO: 349196 - DNA, 25 bp, Homo sapien
caaggtcctcaccagacaagtgcag

SEQ ID NO: 349197 - DNA, 25 bp, Homo sapien
tggccaggaggtcagtcacttcatc

SEQ ID NO: 349198 - DNA, 25 bp, Homo sapien
agctggccaggaggtcagtcacttc

SEQ ID NO: 349199 - DNA, 25 bp, Homo sapien
catgctctgcatctgcagactgagg

SEQ ID NO: 349200 - DNA, 25 bp, Homo sapien
ccaggaggtcagtcacttcatccac

SEQ ID NO: 349201 - DNA, 25 bp, Homo sapien
agatactccctcagcatatggatga

SEQ ID NO: 349202 - DNA, 25 bp, Homo sapien
tgctcatgttgccctaggcgctcca

SEQ ID NO: 349203 - DNA, 25 bp, Homo sapien
agaggtcatccaggcgttctcgctg

SEQ ID NO: 349204 - DNA, 25 bp, Homo sapien
tctgcaggcgggtgcagaggtcatc

SEQ ID NO: 349205 - DNA, 25 bp, Homo sapien
cctgggttcctagggaggcagacag

SEQ ID NO: 349206 - DNA, 25 bp, Homo sapien
tgccaactggggtcagtgtgaaaca

SEQ ID NO: 349207 - DNA, 25 bp, Homo sapien
tgtgtctgtggttagggcagcatct

SEQ ID NO: 349208 - DNA, 25 bp, Homo sapien
gtgctgccttggtgccgtggtctcc

SEQ ID NO: 349209 - DNA, 25 bp, Homo sapien
ggtgcaggggtgtgcgaccagctcg

SEQ ID NO: 349210 - DNA, 25 bp, Homo sapien
atggccctcctgcaggatattcagc

SEQ ID NO: 349211 - DNA, 25 bp, Homo sapien
cagacgcacagcctctaggcactgg

SEQ ID NO: 349212 - DNA, 25 bp, Homo sapien
tgcttcacctccagacgcacagcct

SEQ ID NO: 349213 - DNA, 25 bp, Homo sapien
gcaggtaccagctgaggtgagcatt

SEQ ID NO: 349214 - DNA, 25 bp, Homo sapien
ctgcaggtaccagctgaggtgagca

SEQ ID NO: 349215 - DNA, 25 bp, Homo sapien
tgcaggtaccagctgaggtgagcat

SEQ ID NO: 349216 - DNA, 25 bp, Homo sapien
acagagaggggaagaaaccacatac

SEQ ID NO: 349217 - DNA, 25 bp, Homo sapien
gaaagaggacagagaggggaagaaa

SEQ ID NO: 349218 - DNA, 25 bp, Homo sapien
ggacagagaggggaagaaaccacat

SEQ ID NO: 349219 - DNA, 25 bp, Homo sapien
gggagaaagaggacagagaggggaa

SEQ ID NO: 349220 - DNA, 25 bp, Homo sapien
ggtgatgacaggaacgtggttggtg

SEQ ID NO: 349221 - DNA, 25 bp, Homo sapien
gatgacaggaacgtggttggtgcag

SEQ ID NO: 349222 - DNA, 25 bp, Homo sapien
tgtggtgatgacaggaacgtggttg

SEQ ID NO: 349223 - DNA, 25 bp, Homo sapien
agtgtggtgatgacaggaacgtggt

SEQ ID NO: 349224 - DNA, 25 bp, Homo sapien
tgttccccagcccatctcgctggtt

SEQ ID NO: 349225 - DNA, 25 bp, Homo sapien
gcccatctcgctggttaggatcagc

SEQ ID NO: 349226 - DNA, 25 bp, Homo sapien
cccagcccatctcgctggttaggat

SEQ ID NO: 349227 - DNA, 25 bp, Homo sapien
cagtggcgtgttccccagcccatct

SEQ ID NO: 349228 - DNA, 25 bp, Homo sapien
caagagggaccatagacataagtgt

SEQ ID NO: 349229 - DNA, 25 bp, Homo sapien
tgctgtattatcaccagggtctgcc

SEQ ID NO: 349230 - DNA, 25 bp, Homo sapien
tcctggcagtcttgggatcacctca

SEQ ID NO: 349231 - DNA, 25 bp, Homo sapien
taaagttcttccaatagcagctgct

SEQ ID NO: 349232 - DNA, 25 bp, Homo sapien
agctgcacagggatccgcgccatct

SEQ ID NO: 349233 - DNA, 25 bp, Homo sapien
cagggatccgcgccatcttccagca

SEQ ID NO: 349234 - DNA, 25 bp, Homo sapien
ggcaaagtgtagagctgtgcggccc

SEQ ID NO: 349235 - DNA, 25 bp, Homo sapien
gctgtgcggcccttgtcatcagctg

SEQ ID NO: 349236 - DNA, 25 bp, Homo sapien
ttggcattggccgagtccctcagtc

SEQ ID NO: 349237 - DNA, 25 bp, Homo sapien
acatcattggcattggccgagtccc

SEQ ID NO: 349238 - DNA, 25 bp, Homo sapien
gccgagtccctcagtctcttcagag

SEQ ID NO: 349239 - DNA, 25 bp, Homo sapien
ttggccgagtccctcagtctcttca

SEQ ID NO: 349240 - DNA, 25 bp, Homo sapien
ttgagcccaaaatcacaccatggca

SEQ ID NO: 349241 - DNA, 25 bp, Homo sapien
cttgagcccaaaatcacaccatggc

SEQ ID NO: 349242 - DNA, 25 bp, Homo sapien
tgagcccaaaatcacaccatggcac

SEQ ID NO: 349243 - DNA, 25 bp, Homo sapien
acttgagcccaaaatcacaccatgg

SEQ ID NO: 349244 - DNA, 25 bp, Homo sapien
aaggagactcaagggtcagtgtggc

SEQ ID NO: 349245 - DNA, 25 bp, Homo sapien
ccgagtcatgggaagtttccattca

SEQ ID NO: 349246 - DNA, 25 bp, Homo sapien
tcaccatcgttactgaaaggagact

SEQ ID NO: 349247 - DNA, 25 bp, Homo sapien
tcaccaataagcgttccgagtcatg

SEQ ID NO: 349248 - DNA, 25 bp, Homo sapien
ttgcagcgcagctcgtcgcgcggct

SEQ ID NO: 349249 - DNA, 25 bp, Homo sapien
cagcgggtatcttgcagcgcagctc

SEQ ID NO: 349250 - DNA, 25 bp, Homo sapien
ctccttgcccgtgggcccgagccgc

SEQ ID NO: 349251 - DNA, 25 bp, Homo sapien
gcctcagccggccagcgggtatctt

SEQ ID NO: 349252 - DNA, 25 bp, Homo sapien
ggacgtgcaagtagcgcagcggcga

SEQ ID NO: 349253 - DNA, 25 bp, Homo sapien
cacaggacgtgcaagtagcgcagcg

SEQ ID NO: 349254 - DNA, 25 bp, Homo sapien
ccgcccagcgcagacccgaagtcag

SEQ ID NO: 349255 - DNA, 25 bp, Homo sapien
agaagaggccctcagcgtcagtcag

SEQ ID NO: 349256 - DNA, 25 bp, Homo sapien
gacccgaagtcagcgaaggagaaga

SEQ ID NO: 349257 - DNA, 25 bp, Homo sapien
tcagcgtcagtcagcggctccggcg

SEQ ID NO: 349258 - DNA, 25 bp, Homo sapien
cgcactcgccctccgagctcgagtg

SEQ ID NO: 349259 - DNA, 25 bp, Homo sapien
tcgagtggcctgagcgcggctcgtc

SEQ ID NO: 349260 - DNA, 25 bp, Homo sapien
tgagcgcggctcgtcgtccgcgtcc

SEQ ID NO: 349261 - DNA, 25 bp, Homo sapien
ccgagctcgagtggcctgagcgcgg

SEQ ID NO: 349262 - DNA, 25 bp, Homo sapien
gggcctggccgcctgagcctcgttc

SEQ ID NO: 349263 - DNA, 25 bp, Homo sapien
ggcaacggctccgcgcgggcctggc

SEQ ID NO: 349264 - DNA, 25 bp, Homo sapien
ctgagcctcgttcccgaccgaccaa

SEQ ID NO: 349265 - DNA, 25 bp, Homo sapien
gacctacttccctccgccctgagtc

SEQ ID NO: 349266 - DNA, 25 bp, Homo sapien
ggcgaaccaatgactacccttccag

SEQ ID NO: 349267 - DNA, 25 bp, Homo sapien
ctcaggccgagacagagcggcgaac

SEQ ID NO: 349268 - DNA, 25 bp, Homo sapien
gacagagcggcgaaccaatgactac

SEQ ID NO: 349269 - DNA, 25 bp, Homo sapien
caatgactacccttccagcttaaac

SEQ ID NO: 349270 - DNA, 25 bp, Homo sapien
ttcagggaaggtcctgaaccaaatc

SEQ ID NO: 349271 - DNA, 25 bp, Homo sapien
atcgagggtcggtaaagcttaagct

SEQ ID NO: 349272 - DNA, 25 bp, Homo sapien
tcgagggtcggtaaagcttaagctc

SEQ ID NO: 349273 - DNA, 25 bp, Homo sapien
tcctgaaccaaatcgagggtcggta

SEQ ID NO: 349274 - DNA, 25 bp, Homo sapien
ctggcctcgaacccggtgtactcaa

SEQ ID NO: 349275 - DNA, 25 bp, Homo sapien
aacccggtgtactcaagagctgccc

SEQ ID NO: 349276 - DNA, 25 bp, Homo sapien
tcgaacccggtgtactcaagagctg

SEQ ID NO: 349277 - DNA, 25 bp, Homo sapien
caggcttcgcgacacagctggcctc

SEQ ID NO: 349278 - DNA, 25 bp, Homo sapien
tgtgaagtccgaacgtttgaataat

SEQ ID NO: 349279 - DNA, 25 bp, Homo sapien
ctccattccctcttactgcatggga

SEQ ID NO: 349280 - DNA, 25 bp, Homo sapien
ccccagtaagtttagtcttgtgaag

SEQ ID NO: 349281 - DNA, 25 bp, Homo sapien
cattccctcttactgcatgggacca

SEQ ID NO: 349282 - DNA, 25 bp, Homo sapien
gagaagccggccatcttttgtgtag

SEQ ID NO: 349283 - DNA, 25 bp, Homo sapien
tttctggttcctctaactttgcctc

SEQ ID NO: 349284 - DNA, 25 bp, Homo sapien
aatcttccttcacgcgagaagccgg

SEQ ID NO: 349285 - DNA, 25 bp, Homo sapien
gccaaatacgtgtccttatatctga

SEQ ID NO: 349286 - DNA, 25 bp, Homo sapien
aaattcaggctacttgtaaccctct

SEQ ID NO: 349287 - DNA, 25 bp, Homo sapien
gtgtgagccacggaacgcggctcct

SEQ ID NO: 349288 - DNA, 25 bp, Homo sapien
tttgagaagtccctatttgaagaga

SEQ ID NO: 349289 - DNA, 25 bp, Homo sapien
gaggaaaattcaggctacttgtaac

SEQ ID NO: 349290 - DNA, 25 bp, Homo sapien
gaaaggtgacccacaagtctatgaa

SEQ ID NO: 349291 - DNA, 25 bp, Homo sapien
gatgtaccccatgcgtattgatgag

SEQ ID NO: 349292 - DNA, 25 bp, Homo sapien
tgatgagagcattcacctccagctg

SEQ ID NO: 349293 - DNA, 25 bp, Homo sapien
gggacaagatgttgcgcatgcagaa

SEQ ID NO: 349294 - DNA, 25 bp, Homo sapien
tggatgcagccactcactggatgcc

SEQ ID NO: 349295 - DNA, 25 bp, Homo sapien
agctgcctggctaagtgaacccctg

SEQ ID NO: 349296 - DNA, 25 bp, Homo sapien
gcaactcgcagaagatgccaaggat

SEQ ID NO: 349297 - DNA, 25 bp, Homo sapien
tctttatcctctgggaagtctaggg

SEQ ID NO: 349298 - DNA, 25 bp, Homo sapien
caagaggttggttcccgttgccact

SEQ ID NO: 349299 - DNA, 25 bp, Homo sapien
taacagagtggaattcagcacccgc

SEQ ID NO: 349300 - DNA, 25 bp, Homo sapien
ccgttgcagaggtttattgagatca

SEQ ID NO: 349301 - DNA, 25 bp, Homo sapien
tgaaatatgcaaacaggtagctaga

SEQ ID NO: 349302 - DNA, 25 bp, Homo sapien
ttattggccagttaatcattgtggt

SEQ ID NO: 349303 - DNA, 25 bp, Homo sapien
ttgcctaaggcggtaagaaatcaaa

SEQ ID NO: 349304 - DNA, 25 bp, Homo sapien
cattgtggttgaatacttgcctaag

SEQ ID NO: 349305 - DNA, 25 bp, Homo sapien
gcctaaggcggtaagaaatcaaata

SEQ ID NO: 349306 - DNA, 25 bp, Homo sapien
agcaggcccagtggatacctttaga

SEQ ID NO: 349307 - DNA, 25 bp, Homo sapien
cctagtagggatgctcgggctttgc

SEQ ID NO: 349308 - DNA, 25 bp, Homo sapien
ggtactgcagggcagtgctatgcca

SEQ ID NO: 349309 - DNA, 25 bp, Homo sapien
tccagtggtcgagcttgggctaccc

SEQ ID NO: 349310 - DNA, 25 bp, Homo sapien
ggcaagacccttcctaagttcctca

SEQ ID NO: 349311 - DNA, 25 bp, Homo sapien
tggcaagacccttcctaagttcctc

SEQ ID NO: 349312 - DNA, 25 bp, Homo sapien
ttaagtggtggcaagacccttccta

SEQ ID NO: 349313 - DNA, 25 bp, Homo sapien
agtggtggcaagacccttcctaagt

SEQ ID NO: 349314 - DNA, 25 bp, Homo sapien
gtcaatgtcttccatttcccggagt

SEQ ID NO: 349315 - DNA, 25 bp, Homo sapien
caatgtcttccatttcccggagttt

SEQ ID NO: 349316 - DNA, 25 bp, Homo sapien
tggtcaatgtcttccatttcccgga

SEQ ID NO: 349317 - DNA, 25 bp, Homo sapien
tccttctgtggtcaatgtcttccat

SEQ ID NO: 349318 - DNA, 25 bp, Homo sapien
ttccattcgcacttggcgctgggcc

SEQ ID NO: 349319 - DNA, 25 bp, Homo sapien
ctgccacagcagaccctgtatttcc

SEQ ID NO: 349320 - DNA, 25 bp, Homo sapien
gaccctgtatttccattcgcacttg

SEQ ID NO: 349321 - DNA, 25 bp, Homo sapien
agcagtgagctagagcctgacccct

SEQ ID NO: 349322 - DNA, 25 bp, Homo sapien
caaggatgattcctcggtactgttt

SEQ ID NO: 349323 - DNA, 25 bp, Homo sapien
gatgattcctcggtactgtttgccc

SEQ ID NO: 349324 - DNA, 25 bp, Homo sapien
ttcctcggtactgtttgccctgtcc

SEQ ID NO: 349325 - DNA, 25 bp, Homo sapien
tgggagatttcagcaaggatgattc

SEQ ID NO: 349326 - DNA, 25 bp, Homo sapien
caggcagcgggttgcctctcttgag

SEQ ID NO: 349327 - DNA, 25 bp, Homo sapien
caggttcccatgagggatgcaggca

SEQ ID NO: 349328 - DNA, 25 bp, Homo sapien
ggagaggaagtggttctattgtcaa

SEQ ID NO: 349329 - DNA, 25 bp, Homo sapien
caaatagtgtttctaggccgggcgc

SEQ ID NO: 349330 - DNA, 25 bp, Homo sapien
ccccagcatgactggtccgtcggag

SEQ ID NO: 349331 - DNA, 25 bp, Homo sapien
catgactggtccgtcggagtcttac

SEQ ID NO: 349332 - DNA, 25 bp, Homo sapien
cacttgttggcccttggccctcagg

SEQ ID NO: 349333 - DNA, 25 bp, Homo sapien
gccctcagggatcccctgactgctc

SEQ ID NO: 349334 - DNA, 25 bp, Homo sapien
gctcttcaaatcggtctagctcagg

SEQ ID NO: 349335 - DNA, 25 bp, Homo sapien
ggctggagccttctgtcgtgcagga

SEQ ID NO: 349336 - DNA, 25 bp, Homo sapien
cttctgtcgtgcaggaggggccttt

SEQ ID NO: 349337 - DNA, 25 bp, Homo sapien
ctcttcaaatcggtctagctcaggg

SEQ ID NO: 349338 - DNA, 25 bp, Homo sapien
ccctgtggcaaagatattttggagt

SEQ ID NO: 349339 - DNA, 25 bp, Homo sapien
tgtccttccctgtggcaaagatatt

SEQ ID NO: 349340 - DNA, 25 bp, Homo sapien
ccatgtccttccctgtggcaaagat

SEQ ID NO: 349341 - DNA, 25 bp, Homo sapien
ccttccctgtggcaaagatattttg

SEQ ID NO: 349342 - DNA, 25 bp, Homo sapien
gcagacagggcttccgtacacctgc

SEQ ID NO: 349343 - DNA, 25 bp, Homo sapien
aaagaaatggcctagttaggctgta

SEQ ID NO: 349344 - DNA, 25 bp, Homo sapien
aaagggtgcccttattcatggtctg

SEQ ID NO: 349345 - DNA, 25 bp, Homo sapien
caagtgcacgtgcttgctgcagggt

SEQ ID NO: 349346 - DNA, 25 bp, Homo sapien
gactacaggtggacgtcatcgtgcc

SEQ ID NO: 349347 - DNA, 25 bp, Homo sapien
actacaggtggacgtcatcgtgccc

SEQ ID NO: 349348 - DNA, 25 bp, Homo sapien
ctacaggtggacgtcatcgtgccca

SEQ ID NO: 349349 - DNA, 25 bp, Homo sapien
catcacgcctgaccgatatcctatc

SEQ ID NO: 349350 - DNA, 25 bp, Homo sapien
cgcctgaccgatatcctatctctaa

SEQ ID NO: 349351 - DNA, 25 bp, Homo sapien
agccatcacgcctgaccgatatcct

SEQ ID NO: 349352 - DNA, 25 bp, Homo sapien
tcacgcctgaccgatatcctatctc

SEQ ID NO: 349353 - DNA, 25 bp, Homo sapien
tgtagtcccagctactcgggaggct

SEQ ID NO: 349354 - DNA, 25 bp, Homo sapien
ccagctactcgggaggctgaggcag

SEQ ID NO: 349355 - DNA, 25 bp, Homo sapien
aattagcccggcgtgatggcaggtg

SEQ ID NO: 349356 - DNA, 25 bp, Homo sapien
ttagcccggcgtgatggcaggtgcc

SEQ ID NO: 349357 - DNA, 25 bp, Homo sapien
tcggcgatgcctgtagtggcaactt

SEQ ID NO: 349358 - DNA, 25 bp, Homo sapien
gatagcccctatcatcaggaagtgg

SEQ ID NO: 349359 - DNA, 25 bp, Homo sapien
gaatacccctaagccaacatgtgct

SEQ ID NO: 349360 - DNA, 25 bp, Homo sapien
gcaaggctaagaaagctcaggaacc

SEQ ID NO: 349361 - DNA, 25 bp, Homo sapien
tgctcccggctgtaggccccattgg

SEQ ID NO: 349362 - DNA, 25 bp, Homo sapien
gcactgtaggggcaaagcatctcct

SEQ ID NO: 349363 - DNA, 25 bp, Homo sapien
cttgacacatgttggcaggccggag

SEQ ID NO: 349364 - DNA, 25 bp, Homo sapien
tgcttggaaggtaagactctctggc

SEQ ID NO: 349365 - DNA, 25 bp, Homo sapien
cactggaggtcaggagtttgagacc

SEQ ID NO: 349366 - DNA, 25 bp, Homo sapien
gtggctcacgcctgtaatcccaaca

SEQ ID NO: 349367 - DNA, 25 bp, Homo sapien
aaaagaagtcaaaaggccaggtgca

SEQ ID NO: 349368 - DNA, 25 bp, Homo sapien
ctttgggaggctgaggtgggcagat

SEQ ID NO: 349369 - DNA, 25 bp, Homo sapien
atgtggcgctgctggatgttcgtca

SEQ ID NO: 349370 - DNA, 25 bp, Homo sapien
catgatgtccatgatgtggcgctgc

SEQ ID NO: 349371 - DNA, 25 bp, Homo sapien
ttcatgatgtccatgatgtggcgct

SEQ ID NO: 349372 - DNA, 25 bp, Homo sapien
tgatgtccatgatgtggcgctgctg

SEQ ID NO: 349373 - DNA, 25 bp, Homo sapien
aagtgatggtcttggggcggcgccg

SEQ ID NO: 349374 - DNA, 25 bp, Homo sapien
ccagttcctttggtcactacctcca

SEQ ID NO: 349375 - DNA, 25 bp, Homo sapien
gttcctttggtcactacctccatct

SEQ ID NO: 349376 - DNA, 25 bp, Homo sapien
ccccggggtgtaagtgatggtcttg

SEQ ID NO: 349377 - DNA, 25 bp, Homo sapien
gatcgagccagagaatgatgccgcc

SEQ ID NO: 349378 - DNA, 25 bp, Homo sapien
ctgaggagggaaagacgcaatgaca

SEQ ID NO: 349379 - DNA, 25 bp, Homo sapien
gagggaaagacgcaatgacacaccc

SEQ ID NO: 349380 - DNA, 25 bp, Homo sapien
taatattgcgacagtgcccaaacct

SEQ ID NO: 349381 - DNA, 25 bp, Homo sapien
cagcgcctgtggcagggaagtctcc

SEQ ID NO: 349382 - DNA, 25 bp, Homo sapien
catggtcacaacagtacccactgag

SEQ ID NO: 349383 - DNA, 25 bp, Homo sapien
agtgatatgccaaaattgaaatttc

SEQ ID NO: 349384 - DNA, 25 bp, Homo sapien
gagggagtgttaacacagccatggt

SEQ ID NO: 349385 - DNA, 25 bp, Homo sapien
tctccacatagaagtgggctcccgg

SEQ ID NO: 349386 - DNA, 25 bp, Homo sapien
ccacatagaagtgggctcccggagg

SEQ ID NO: 349387 - DNA, 25 bp, Homo sapien
ctctccacatagaagtgggctcccg

SEQ ID NO: 349388 - DNA, 25 bp, Homo sapien
cactgctttacagccgcatccgcac

SEQ ID NO: 349389 - DNA, 25 bp, Homo sapien
tcgctactatagaaacgcgcacaca

SEQ ID NO: 349390 - DNA, 25 bp, Homo sapien
ggtgccacgcagaaatactgcgcga

SEQ ID NO: 349391 - DNA, 25 bp, Homo sapien
aatactgcgcgatctgggctgctgg

SEQ ID NO: 349392 - DNA, 25 bp, Homo sapien
agctggcagctagcgcctctcgcta

SEQ ID NO: 349393 - DNA, 25 bp, Homo sapien
gcgcatgcgcactttccccgctctg

SEQ ID NO: 349394 - DNA, 25 bp, Homo sapien
cgcatgcgcactttccccgctctgt

SEQ ID NO: 349395 - DNA, 25 bp, Homo sapien
agcgcatgcgcactttccccgctct

SEQ ID NO: 349396 - DNA, 25 bp, Homo sapien
gagcttccatgatgcaggtcctaga

SEQ ID NO: 349397 - DNA, 25 bp, Homo sapien
tctggagcagtggaagatgcattgc

SEQ ID NO: 349398 - DNA, 25 bp, Homo sapien
gcttcacgggaaccagcagttttgg

SEQ ID NO: 349399 - DNA, 25 bp, Homo sapien
cctagatggagggattttggccacc

SEQ ID NO: 349400 - DNA, 25 bp, Homo sapien
taggcgcttaaggagtagactgtct

SEQ ID NO: 349401 - DNA, 25 bp, Homo sapien
cataaaacccttggtggagcactta

SEQ ID NO: 349402 - DNA, 25 bp, Homo sapien
tgagataacgatcggacctacccct

SEQ ID NO: 349403 - DNA, 25 bp, Homo sapien
gacatccttggtctggacttggaca

SEQ ID NO: 349404 - DNA, 25 bp, Homo sapien
cctttgcattctactcctagctact

SEQ ID NO: 349405 - DNA, 25 bp, Homo sapien
tactcctagctacttccagaaagca

SEQ ID NO: 349406 - DNA, 25 bp, Homo sapien
gaagcaccagtacagggataagaga

SEQ ID NO: 349407 - DNA, 25 bp, Homo sapien
catttgaggaagcaccagtacaggg

SEQ ID NO: 349408 - DNA, 25 bp, Homo sapien
gagacagtaatgagttacatgtgga

SEQ ID NO: 349409 - DNA, 25 bp, Homo sapien
gaggggactactgagataaataaca

SEQ ID NO: 349410 - DNA, 25 bp, Homo sapien
tagagtggctaggagaggggactac

SEQ ID NO: 349411 - DNA, 25 bp, Homo sapien
aatgcttaatgcagagttaataggg

SEQ ID NO: 349412 - DNA, 25 bp, Homo sapien
cctcatctttcagtgtgggtgcaac

SEQ ID NO: 349413 - DNA, 25 bp, Homo sapien
gattctagtgtcttcagcctgccga

SEQ ID NO: 349414 - DNA, 25 bp, Homo sapien
tcacctcctgggatgcgtctcaagg

SEQ ID NO: 349415 - DNA, 25 bp, Homo sapien
caggtcctgggatagagggtcattc

SEQ ID NO: 349416 - DNA, 25 bp, Homo sapien
catagccggctgctgagtagctgct

SEQ ID NO: 349417 - DNA, 25 bp, Homo sapien
tgatggtcagagtagtcaaactggg

SEQ ID NO: 349418 - DNA, 25 bp, Homo sapien
ccgagtggccataatagggtcctga

SEQ ID NO: 349419 - DNA, 25 bp, Homo sapien
ctgcgagggccccatataggagaag

SEQ ID NO: 349420 - DNA, 25 bp, Homo sapien
actgcagctctgtcttcggggtggt

SEQ ID NO: 349421 - DNA, 25 bp, Homo sapien
gatctcaccaatgtccacgttgccg

SEQ ID NO: 349422 - DNA, 25 bp, Homo sapien
atggagcgcccgtcccgcttcgggt

SEQ ID NO: 349423 - DNA, 25 bp, Homo sapien
ccgaagtcgatgtgaggcttcccgc

SEQ ID NO: 349424 - DNA, 25 bp, Homo sapien
ttcttgtgctgcatacggagccgct

SEQ ID NO: 349425 - DNA, 25 bp, Homo sapien
gccggtggtccaagtgggcgctctt

SEQ ID NO: 349426 - DNA, 25 bp, Homo sapien
cgctcttgtagtgggcctggatggc

SEQ ID NO: 349427 - DNA, 25 bp, Homo sapien
tggatggcggcggtcccaccttgct

SEQ ID NO: 349428 - DNA, 25 bp, Homo sapien
gaggatctagggttggactcttaac

SEQ ID NO: 349429 - DNA, 25 bp, Homo sapien
ggtgcttttctaatgctgcttgcgg

SEQ ID NO: 349430 - DNA, 25 bp, Homo sapien
cctgattgtgtgaattccagtgtgg

SEQ ID NO: 349431 - DNA, 25 bp, Homo sapien
gactcttaactctgggtcctgattg

SEQ ID NO: 349432 - DNA, 25 bp, Homo sapien
tgagtgatggccaagaataagtcct

SEQ ID NO: 349433 - DNA, 25 bp, Homo sapien
tgtcccctggcactaaagatactgg

SEQ ID NO: 349434 - DNA, 25 bp, Homo sapien
ctgaagggagtccaagcccagggtt

SEQ ID NO: 349435 - DNA, 25 bp, Homo sapien
caatcttaaacccttggcaatggga

SEQ ID NO: 349436 - DNA, 25 bp, Homo sapien
gggaacttgtcatcgtccgcctcgc

SEQ ID NO: 349437 - DNA, 25 bp, Homo sapien
tttgctggcgccgttgacgcgcacg

SEQ ID NO: 349438 - DNA, 25 bp, Homo sapien
ctccttcttgaccttgcccagctcg

SEQ ID NO: 349439 - DNA, 25 bp, Homo sapien
tgacgtgcggcttgcttttgctggc

SEQ ID NO: 349440 - DNA, 25 bp, Homo sapien
ggcagcggggctcctccgagcccac

SEQ ID NO: 349441 - DNA, 25 bp, Homo sapien
tcctccgagcccacggggctcagct

SEQ ID NO: 349442 - DNA, 25 bp, Homo sapien
ctagcgagggcgcgctccccgggga

SEQ ID NO: 349443 - DNA, 25 bp, Homo sapien
ggctcagctccacctccgataggtc

SEQ ID NO: 349444 - DNA, 25 bp, Homo sapien
gccggggtcctcgcaaagagtccaa

SEQ ID NO: 349445 - DNA, 25 bp, Homo sapien
cggggtcctcgcaaagagtccaacg

SEQ ID NO: 349446 - DNA, 25 bp, Homo sapien
gggtcctcgcaaagagtccaacgcc

SEQ ID NO: 349447 - DNA, 25 bp, Homo sapien
tcctcgcaaagagtccaacgcccac

SEQ ID NO: 349448 - DNA, 25 bp, Homo sapien
caacggggtttagaggagagccagg

SEQ ID NO: 349449 - DNA, 25 bp, Homo sapien
ccaacggggtttagaggagagccag

SEQ ID NO: 349450 - DNA, 25 bp, Homo sapien
accgtgtcccaaggtgtgcggtcca

SEQ ID NO: 349451 - DNA, 25 bp, Homo sapien
cagtctggggctcgtccttaggaag

SEQ ID NO: 349452 - DNA, 25 bp, Homo sapien
gtcccaaggtgtgcggtccagctcg

SEQ ID NO: 349453 - DNA, 25 bp, Homo sapien
tggaaaaccgtgtcccaaggtgtgc

SEQ ID NO: 349454 - DNA, 25 bp, Homo sapien
ctcgttaggacggagcctgaatcct

SEQ ID NO: 349455 - DNA, 25 bp, Homo sapien
tgaatccttaccaccaaccaccctg

SEQ ID NO: 349456 - DNA, 25 bp, Homo sapien
gccggacagcccgagactgactgag

SEQ ID NO: 349457 - DNA, 25 bp, Homo sapien
cgagactgactgagcgactgagcct

SEQ ID NO: 349458 - DNA, 25 bp, Homo sapien
cttttcccaggcagccctttctgcc

SEQ ID NO: 349459 - DNA, 25 bp, Homo sapien
ttttcccaggcagccctttctgccc

SEQ ID NO: 349460 - DNA, 25 bp, Homo sapien
tcccaggcagccctttctgccccat

SEQ ID NO: 349461 - DNA, 25 bp, Homo sapien
ttcccaggcagccctttctgcccca

SEQ ID NO: 349462 - DNA, 25 bp, Homo sapien
gattgtcacgaagtcctctactccc

SEQ ID NO: 349463 - DNA, 25 bp, Homo sapien
ctctcagtaggtcttagaggcattt

SEQ ID NO: 349464 - DNA, 25 bp, Homo sapien
ggttgctacctactgggacccagct

SEQ ID NO: 349465 - DNA, 25 bp, Homo sapien
gagtcctagtcctgattgtcacgaa

SEQ ID NO: 349466 - DNA, 25 bp, Homo sapien
cagagctgcctccggtcagcagtga

SEQ ID NO: 349467 - DNA, 25 bp, Homo sapien
gagctgcctccggtcagcagtgacc

SEQ ID NO: 349468 - DNA, 25 bp, Homo sapien
aaacgtgaagcccactgatgacact

SEQ ID NO: 349469 - DNA, 25 bp, Homo sapien
agctgcctccggtcagcagtgaccc

SEQ ID NO: 349470 - DNA, 25 bp, Homo sapien
atcctcctcgccgacataaggtttt

SEQ ID NO: 349471 - DNA, 25 bp, Homo sapien
tcctcgccgacataaggttttctta

SEQ ID NO: 349472 - DNA, 25 bp, Homo sapien
ttgtctgagcttgaaggatcctcct

SEQ ID NO: 349473 - DNA, 25 bp, Homo sapien
gggtgatccagtcagaatttagcgt

SEQ ID NO: 349474 - DNA, 25 bp, Homo sapien
gcagcaggccttccgcaaagacttg

SEQ ID NO: 349475 - DNA, 25 bp, Homo sapien
gcaggccttccgcaaagacttgctg

SEQ ID NO: 349476 - DNA, 25 bp, Homo sapien
ggccttccgcaaagacttgctgaat

SEQ ID NO: 349477 - DNA, 25 bp, Homo sapien
ttccgcaaagacttgctgaattaac

SEQ ID NO: 349478 - DNA, 25 bp, Homo sapien
aaaaaagcagtgcattaattttaca

SEQ ID NO: 349479 - DNA, 25 bp, Homo sapien
aaggtggcatatgcatgaagacctg

SEQ ID NO: 349480 - DNA, 25 bp, Homo sapien
agttgcacaggcagttggacatttg

SEQ ID NO: 349481 - DNA, 25 bp, Homo sapien
catagtatgatatgtgggcaagtgg

SEQ ID NO: 349482 - DNA, 25 bp, Homo sapien
gaatgtctgggtcatgaggtatgta

SEQ ID NO: 349483 - DNA, 25 bp, Homo sapien
tattaactagatattgcagtgcaca

SEQ ID NO: 349484 - DNA, 25 bp, Homo sapien
tcttgtagataaatagccatgagtg

SEQ ID NO: 349485 - DNA, 25 bp, Homo sapien
taactagatattgcagtgcacacct

SEQ ID NO: 349486 - DNA, 25 bp, Homo sapien
gagggggccgccgtcaatgcccgca

SEQ ID NO: 349487 - DNA, 25 bp, Homo sapien
agggggccgccgtcaatgcccgcat

SEQ ID NO: 349488 - DNA, 25 bp, Homo sapien
ggagggggccgccgtcaatgcccgc

SEQ ID NO: 349489 - DNA, 25 bp, Homo sapien
caaacatgggaaggacggacacttg

SEQ ID NO: 349490 - DNA, 25 bp, Homo sapien
cacttggtgctgactgagaatgccc

SEQ ID NO: 349491 - DNA, 25 bp, Homo sapien
cacggttttgtaagctacagcatgc

SEQ ID NO: 349492 - DNA, 25 bp, Homo sapien
caatccatgcaggtgcggagggtca

SEQ ID NO: 349493 - DNA, 25 bp, Homo sapien
cgtactcaaagatacgatcacaaac

SEQ ID NO: 349494 - DNA, 25 bp, Homo sapien
ctcacagtcccaacattcacaaatt

SEQ ID NO: 349495 - DNA, 25 bp, Homo sapien
tgatcgtccccctcgtttgcctgtc

SEQ ID NO: 349496 - DNA, 25 bp, Homo sapien
tcacaaattccctgatcgtccccct

SEQ ID NO: 349497 - DNA, 25 bp, Homo sapien
ccattttctaactggccagtgtcct

SEQ ID NO: 349498 - DNA, 25 bp, Homo sapien
caaggaagctgcctggatgcgcagt

SEQ ID NO: 349499 - DNA, 25 bp, Homo sapien
gctgcctcgaggctgagtgtgccca

SEQ ID NO: 349500 - DNA, 25 bp, Homo sapien
tcaggacgtgtcacagaggacagac

SEQ ID NO: 349501 - DNA, 25 bp, Homo sapien
gcttgaggcataggccctgtccaca

SEQ ID NO: 349502 - DNA, 25 bp, Homo sapien
agctccttgggcctgtccacgctgc

SEQ ID NO: 349503 - DNA, 25 bp, Homo sapien
gctccttgggcctgtccacgctgct

SEQ ID NO: 349504 - DNA, 25 bp, Homo sapien
ccttgggcctgtccacgctgctcct

SEQ ID NO: 349505 - DNA, 25 bp, Homo sapien
tgggcctgtccacgctgctcctcat

SEQ ID NO: 349506 - DNA, 25 bp, Homo sapien
gtcgtccaggcgttgagtgtgccct

SEQ ID NO: 349507 - DNA, 25 bp, Homo sapien
agttgttttccaagtgaggcagaga

SEQ ID NO: 349508 - DNA, 25 bp, Homo sapien
gagaatggttctcttgttaccaaca

SEQ ID NO: 349509 - DNA, 25 bp, Homo sapien
tctgggcattgggtaatgcgctccc

SEQ ID NO: 349510 - DNA, 25 bp, Homo sapien
catctcctgagtgagggacacagca

SEQ ID NO: 349511 - DNA, 25 bp, Homo sapien
cctagccaaggtcaagtaataacga

SEQ ID NO: 349512 - DNA, 25 bp, Homo sapien
gaggacacggtctagactgatggac

SEQ ID NO: 349513 - DNA, 25 bp, Homo sapien
gacagtagacgttacatagccttga

SEQ ID NO: 349514 - DNA, 25 bp, Homo sapien
ggatcaactggagcccagacgtgga

SEQ ID NO: 349515 - DNA, 25 bp, Homo sapien
gctgagctttatcaccagtttcctg

SEQ ID NO: 349516 - DNA, 25 bp, Homo sapien
cagcgtaccaggctctctgagacaa

SEQ ID NO: 349517 - DNA, 25 bp, Homo sapien
gacaagaagctgtgttcccaagtca

SEQ ID NO: 349518 - DNA, 25 bp, Homo sapien
atacagactcggcagccagcctcgg

SEQ ID NO: 349519 - DNA, 25 bp, Homo sapien
tatttctggttctgtgggctcgccc

SEQ ID NO: 349520 - DNA, 25 bp, Homo sapien
gttctgtgggctcgccccgggcgct

SEQ ID NO: 349521 - DNA, 25 bp, Homo sapien
ctcggcctcgcctctatttctggtt

SEQ ID NO: 349522 - DNA, 25 bp, Homo sapien
ttggtggcgacagccatgaagaccc

SEQ ID NO: 349523 - DNA, 25 bp, Homo sapien
agcctcagcgtcctcagtgtcactg

SEQ ID NO: 349524 - DNA, 25 bp, Homo sapien
ttagcacaacgcaggcagcagttgg

SEQ ID NO: 349525 - DNA, 25 bp, Homo sapien
ggttcctctgcaacaacaggcaggg

SEQ ID NO: 349526 - DNA, 25 bp, Homo sapien
tcctgtggggtcctcccctcactct

SEQ ID NO: 349527 - DNA, 25 bp, Homo sapien
gtcctgtggggtcctcccctcactc

SEQ ID NO: 349528 - DNA, 25 bp, Homo sapien
aagaggagggagaggtaaggtcctg

SEQ ID NO: 349529 - DNA, 25 bp, Homo sapien
aggagggagaggtaaggtcctgtgg

SEQ ID NO: 349530 - DNA, 25 bp, Homo sapien
cttggaggagggactaactggccgt

SEQ ID NO: 349531 - DNA, 25 bp, Homo sapien
tgtcctcacccagagcgggcggtcc

SEQ ID NO: 349532 - DNA, 25 bp, Homo sapien
agagcgggcggtccggcttggagga

SEQ ID NO: 349533 - DNA, 25 bp, Homo sapien
caacttgcgctaaggctttgtgcct

SEQ ID NO: 349534 - DNA, 25 bp, Homo sapien
aggggcactaggctcgccaccccct

SEQ ID NO: 349535 - DNA, 25 bp, Homo sapien
ccatcaggaacttggtgacggcgta

SEQ ID NO: 349536 - DNA, 25 bp, Homo sapien
caggctgaacagatacgggacgtgc

SEQ ID NO: 349537 - DNA, 25 bp, Homo sapien
gatgtccacgaagcccacgatggac

SEQ ID NO: 349538 - DNA, 25 bp, Homo sapien
gtccttggcgtagttcaccagcagg

SEQ ID NO: 349539 - DNA, 25 bp, Homo sapien
tcagcctccgcctcgcccggagcgt

SEQ ID NO: 349540 - DNA, 25 bp, Homo sapien
gagcgtccccggcgcggtcgccggc

SEQ ID NO: 349541 - DNA, 25 bp, Homo sapien
accctgggggatgcctcgcgcagct

SEQ ID NO: 349542 - DNA, 25 bp, Homo sapien
tgtccctgcgcggtcgcgggcccgg

SEQ ID NO: 349543 - DNA, 25 bp, Homo sapien
ggagcccgccgagcagcaggaagcc

SEQ ID NO: 349544 - DNA, 25 bp, Homo sapien
gccgccgctcgaagtacagccccag

SEQ ID NO: 349545 - DNA, 25 bp, Homo sapien
agcaggagcccgccgagcagcagga

SEQ ID NO: 349546 - DNA, 25 bp, Homo sapien
gcgacagcgcggacaggaacacggg

SEQ ID NO: 349547 - DNA, 25 bp, Homo sapien
cgggcgaggcggtgctgtgccgggg

SEQ ID NO: 349548 - DNA, 25 bp, Homo sapien
tgcgggcgaggcggtgctgtgccgg

SEQ ID NO: 349549 - DNA, 25 bp, Homo sapien
gcgggcgaggcggtgctgtgccggg

SEQ ID NO: 349550 - DNA, 25 bp, Homo sapien
gtagagctccaggaggcgcgtggca

SEQ ID NO: 349551 - DNA, 25 bp, Homo sapien
tcaccgggcgacagccaaagcgggt

SEQ ID NO: 349552 - DNA, 25 bp, Homo sapien
agcaccccagcggtcaggtagagct

SEQ ID NO: 349553 - DNA, 25 bp, Homo sapien
aagcgggtcacgaggatgctggaca

SEQ ID NO: 349554 - DNA, 25 bp, Homo sapien
tgtagccggcgtcgaagtcgcgcat

SEQ ID NO: 349555 - DNA, 25 bp, Homo sapien
cggaagaagacgctcacggctttgg

SEQ ID NO: 349556 - DNA, 25 bp, Homo sapien
catggctagcatgatggaggacacc

SEQ ID NO: 349557 - DNA, 25 bp, Homo sapien
aagccgtaggcgaagccggtgacca

SEQ ID NO: 349558 - DNA, 25 bp, Homo sapien
ttctcctgcaaagggcgctgaagga

SEQ ID NO: 349559 - DNA, 25 bp, Homo sapien
tgagggtctcgggacaacagaacaa

SEQ ID NO: 349560 - DNA, 25 bp, Homo sapien
aaagggccgctgtgcgtgattttcc

SEQ ID NO: 349561 - DNA, 25 bp, Homo sapien
aggtgggcgtccagcaccaaagtcg

SEQ ID NO: 349562 - DNA, 25 bp, Homo sapien
ctcccggtgaagcttacccggatgg

SEQ ID NO: 349563 - DNA, 25 bp, Homo sapien
tgggtttgggggtccagcctcacat

SEQ ID NO: 349564 - DNA, 25 bp, Homo sapien
tttgggggtccagcctcacatctcc

SEQ ID NO: 349565 - DNA, 25 bp, Homo sapien
gcagctcccggtgaagcttacccgg

SEQ ID NO: 349566 - DNA, 25 bp, Homo sapien
ccgtctcagggacccgcttcttgga

SEQ ID NO: 349567 - DNA, 25 bp, Homo sapien
ttgaaggtctcggaccccaagccag

SEQ ID NO: 349568 - DNA, 25 bp, Homo sapien
caaaagatgtacagagagggcatgt

SEQ ID NO: 349569 - DNA, 25 bp, Homo sapien
cccattccgcctgctttactttgaa

SEQ ID NO: 349570 - DNA, 25 bp, Homo sapien
gcttgacagtggcaaaaggatttgt

SEQ ID NO: 349571 - DNA, 25 bp, Homo sapien
tggtgatggtgggacgaagcttgac

SEQ ID NO: 349572 - DNA, 25 bp, Homo sapien
tgggacgaagcttgacagtggcaaa

SEQ ID NO: 349573 - DNA, 25 bp, Homo sapien
cgaagcttgacagtggcaaaaggat

SEQ ID NO: 349574 - DNA, 25 bp, Homo sapien
ggtgagaagggcagatgatccccac

SEQ ID NO: 349575 - DNA, 25 bp, Homo sapien
catccactccttgccccgcttcatc

SEQ ID NO: 349576 - DNA, 25 bp, Homo sapien
cagctgggcaactgagctgggtcct

SEQ ID NO: 349577 - DNA, 25 bp, Homo sapien
tgcctcctgcccctatttggtctcc

SEQ ID NO: 349578 - DNA, 25 bp, Homo sapien
ctgtggtgggtactgctctgaggac

SEQ ID NO: 349579 - DNA, 25 bp, Homo sapien
tggtgggtactgctctgaggacatc

SEQ ID NO: 349580 - DNA, 25 bp, Homo sapien
tcgggaagagctcctgtggtgggta

SEQ ID NO: 349581 - DNA, 25 bp, Homo sapien
ggtactgctctgaggacatcagttt

SEQ ID NO: 349582 - DNA, 25 bp, Homo sapien
acgtcagtggcaactgctgtgctgc

SEQ ID NO: 349583 - DNA, 25 bp, Homo sapien
ggcacggcttggcacccggcttggg

SEQ ID NO: 349584 - DNA, 25 bp, Homo sapien
cagtggcaactgctgtgctgcccat

SEQ ID NO: 349585 - DNA, 25 bp, Homo sapien
cttgacgtcagtggcaactgctgtg

SEQ ID NO: 349586 - DNA, 25 bp, Homo sapien
tggccatcccagtactccgagggtg

SEQ ID NO: 349587 - DNA, 25 bp, Homo sapien
catcccagtactccgagggtgctat

SEQ ID NO: 349588 - DNA, 25 bp, Homo sapien
gccatcccagtactccgagggtgct

SEQ ID NO: 349589 - DNA, 25 bp, Homo sapien
ctggccatcccagtactccgagggt

SEQ ID NO: 349590 - DNA, 25 bp, Homo sapien
gtggctgccccggagtgggtaggac

SEQ ID NO: 349591 - DNA, 25 bp, Homo sapien
caggaggtcatcgaggctgtggctg

SEQ ID NO: 349592 - DNA, 25 bp, Homo sapien
ccggtccaggaggtcatcgaggctg

SEQ ID NO: 349593 - DNA, 25 bp, Homo sapien
tccaggaggtcatcgaggctgtggc

SEQ ID NO: 349594 - DNA, 25 bp, Homo sapien
aaggagactgttgaccggagggagg

SEQ ID NO: 349595 - DNA, 25 bp, Homo sapien
gacgcagtgaccttcagggcagaga

SEQ ID NO: 349596 - DNA, 25 bp, Homo sapien
gttggggcctgtccaatcccttgtc

SEQ ID NO: 349597 - DNA, 25 bp, Homo sapien
gctcagggccggtggttctccaggg

SEQ ID NO: 349598 - DNA, 25 bp, Homo sapien
tcatgggtgtcatgggggacatgga

SEQ ID NO: 349599 - DNA, 25 bp, Homo sapien
tcatgggggtcacgggggtcatggg

SEQ ID NO: 349600 - DNA, 25 bp, Homo sapien
cacgggggtcatgggattcacgggc

SEQ ID NO: 349601 - DNA, 25 bp, Homo sapien
cagctcgttcccggggttcatgggt

SEQ ID NO: 349602 - DNA, 25 bp, Homo sapien
tccagagccttcacgtacgcctcgg

SEQ ID NO: 349603 - DNA, 25 bp, Homo sapien
cagagccttcacgtacgcctcgggg

SEQ ID NO: 349604 - DNA, 25 bp, Homo sapien
gagccttcacgtacgcctcggggaa

SEQ ID NO: 349605 - DNA, 25 bp, Homo sapien
ctccagagccttcacgtacgcctcg

SEQ ID NO: 349606 - DNA, 25 bp, Homo sapien
gacaatgaccaaaagaagccaggcc

SEQ ID NO: 349607 - DNA, 25 bp, Homo sapien
gggtgtgacagcctccatctagaag

SEQ ID NO: 349608 - DNA, 25 bp, Homo sapien
tggtcccagaacatcccaggagggt

SEQ ID NO: 349609 - DNA, 25 bp, Homo sapien
gcaggtgtccctatcgttggcgttc

SEQ ID NO: 349610 - DNA, 25 bp, Homo sapien
cagcttgccgtagagccagccgttc

SEQ ID NO: 349611 - DNA, 25 bp, Homo sapien
cacgtccccagcggagaagcgcagc

SEQ ID NO: 349612 - DNA, 25 bp, Homo sapien
acgtccccagcggagaagcgcagca

SEQ ID NO: 349613 - DNA, 25 bp, Homo sapien
tccagcttgccgtagagccagccgt

SEQ ID NO: 349614 - DNA, 25 bp, Homo sapien
ctccgagtgggagaccagggcgcgg

SEQ ID NO: 349615 - DNA, 25 bp, Homo sapien
tccgagtgggagaccagggcgcgga

SEQ ID NO: 349616 - DNA, 25 bp, Homo sapien
cgcccgggcgctcgccaaaggagtt

SEQ ID NO: 349617 - DNA, 25 bp, Homo sapien
ccaaaggagttggagcgcgagcttt

SEQ ID NO: 349618 - DNA, 25 bp, Homo sapien
ttggagcgcgagctttgggcgctgc

SEQ ID NO: 349619 - DNA, 25 bp, Homo sapien
gagttggagcgcgagctttgggcgc

SEQ ID NO: 349620 - DNA, 25 bp, Homo sapien
tcgcgtcgggctcggtgccgtagga

SEQ ID NO: 349621 - DNA, 25 bp, Homo sapien
gagcgacggtctggctctagctggg

SEQ ID NO: 349622 - DNA, 25 bp, Homo sapien
tagctgggacgcgggcctcgcgtcg

SEQ ID NO: 349623 - DNA, 25 bp, Homo sapien
aggccgacggcgtgcggggcaggga

SEQ ID NO: 349624 - DNA, 25 bp, Homo sapien
gcagcacgcggttctggagcatccc

SEQ ID NO: 349625 - DNA, 25 bp, Homo sapien
acgcggttctggagcatcccccggg

SEQ ID NO: 349626 - DNA, 25 bp, Homo sapien
agcacgcggttctggagcatccccc

SEQ ID NO: 349627 - DNA, 25 bp, Homo sapien
agcagcacgcggttctggagcatcc

SEQ ID NO: 349628 - DNA, 25 bp, Homo sapien
tttcaaacatccctgtccctcaagg

SEQ ID NO: 349629 - DNA, 25 bp, Homo sapien
taaaatcccaggtacaatcagaatg

SEQ ID NO: 349630 - DNA, 25 bp, Homo sapien
aaaacttctttcaatggcactgacc

SEQ ID NO: 349631 - DNA, 25 bp, Homo sapien
aaggcctagctcaagacggtcacct

SEQ ID NO: 349632 - DNA, 25 bp, Homo sapien
tgaaaagatactggcatgtcacagc

SEQ ID NO: 349633 - DNA, 25 bp, Homo sapien
gaaaagatgtcaagctcgcgtttaa

SEQ ID NO: 349634 - DNA, 25 bp, Homo sapien
caagtatgaggtaaagccacaccga

SEQ ID NO: 349635 - DNA, 25 bp, Homo sapien
tgggaaggcacgttactgactagac

SEQ ID NO: 349636 - DNA, 25 bp, Homo sapien
ggtcatgacagccaaagagtggaaa

SEQ ID NO: 349637 - DNA, 25 bp, Homo sapien
agtagcgaggacgtgaaacaactgg

SEQ ID NO: 349638 - DNA, 25 bp, Homo sapien
tcataaactgctgatggacacggaa

SEQ ID NO: 349639 - DNA, 25 bp, Homo sapien
catgaagactcgtacatggatgctc

SEQ ID NO: 349640 - DNA, 25 bp, Homo sapien
ttctctgctaggaagcgatagcgcc

SEQ ID NO: 349641 - DNA, 25 bp, Homo sapien
cgatagcgccgcttctcttccaatt

SEQ ID NO: 349642 - DNA, 25 bp, Homo sapien
tctgtgcgtgcagccggttcacact

SEQ ID NO: 349643 - DNA, 25 bp, Homo sapien
gcccgctgactctcagacacgaagg

SEQ ID NO: 349644 - DNA, 25 bp, Homo sapien
cgagctcatagtgctggcggctgtc

SEQ ID NO: 349645 - DNA, 25 bp, Homo sapien
cgctcggtggcggtactcgagctca

SEQ ID NO: 349646 - DNA, 25 bp, Homo sapien
acagctcagacatgcacttctccag

SEQ ID NO: 349647 - DNA, 25 bp, Homo sapien
ttctccaggttggccgctcggtggc

SEQ ID NO: 349648 - DNA, 25 bp, Homo sapien
gcaggcctccatggaatgtctgcac

SEQ ID NO: 349649 - DNA, 25 bp, Homo sapien
ttgatgaactgcatgtccagcttgg

SEQ ID NO: 349650 - DNA, 25 bp, Homo sapien
gcagcaggcctccatggaatgtctg

SEQ ID NO: 349651 - DNA, 25 bp, Homo sapien
aactgcatgtccagcttggtgttct

SEQ ID NO: 349652 - DNA, 25 bp, Homo sapien
ggctcagaagcttcgtcctcattct

SEQ ID NO: 349653 - DNA, 25 bp, Homo sapien
tgtctctggaatgggtgcacatttg

SEQ ID NO: 349654 - DNA, 25 bp, Homo sapien
ccatggcaagtggatgtctggccac

SEQ ID NO: 349655 - DNA, 25 bp, Homo sapien
tagccccttggagctgctatggcca

SEQ ID NO: 349656 - DNA, 25 bp, Homo sapien
tcctgctctaggtgtcctcacatca

SEQ ID NO: 349657 - DNA, 25 bp, Homo sapien
cacagttatttcccaaactttggtg

SEQ ID NO: 349658 - DNA, 25 bp, Homo sapien
aaggaatgctggcaatctcctccca

SEQ ID NO: 349659 - DNA, 25 bp, Homo sapien
catgttgttgggcagttggacctaa

SEQ ID NO: 349660 - DNA, 25 bp, Homo sapien
tctgcatggtagtttcaggtctggt

SEQ ID NO: 349661 - DNA, 25 bp, Homo sapien
tgcagccttcggtctttccacaagc

SEQ ID NO: 349662 - DNA, 25 bp, Homo sapien
aaacattctaagtcagatcctgtcc

SEQ ID NO: 349663 - DNA, 25 bp, Homo sapien
taatggctggtcatctgagacttgc

SEQ ID NO: 349664 - DNA, 25 bp, Homo sapien
aagattgttccccatgcccaactga

SEQ ID NO: 349665 - DNA, 25 bp, Homo sapien
ccccttcacacattggagggagaac

SEQ ID NO: 349666 - DNA, 25 bp, Homo sapien
ccaaagagcaccctgacttccaggg

SEQ ID NO: 349667 - DNA, 25 bp, Homo sapien
atggtatcccccaaagagcaccctg

SEQ ID NO: 349668 - DNA, 25 bp, Homo sapien
tcagagttcaagtgccgctgggtgt

SEQ ID NO: 349669 - DNA, 25 bp, Homo sapien
ggtcagagttcaagtgccgctgggt

SEQ ID NO: 349670 - DNA, 25 bp, Homo sapien
gggtgtcagacatctgcaccaagat

SEQ ID NO: 349671 - DNA, 25 bp, Homo sapien
ctgggtgtcagacatctgcaccaag

SEQ ID NO: 349672 - DNA, 25 bp, Homo sapien
gcacgctccccaatcttctggatgg

SEQ ID NO: 349673 - DNA, 25 bp, Homo sapien
gcactgaagtagacctcggccgcct

SEQ ID NO: 349674 - DNA, 25 bp, Homo sapien
tggcactgaagtagacctcggccgc

SEQ ID NO: 349675 - DNA, 25 bp, Homo sapien
tgcagggcacgctccccaatcttct

SEQ ID NO: 349676 - DNA, 25 bp, Homo sapien
tccagggcggggttaaactgctcca

SEQ ID NO: 349677 - DNA, 25 bp, Homo sapien
gaaggcacgcaggtagttgttgccc

SEQ ID NO: 349678 - DNA, 25 bp, Homo sapien
cggggttaaactgctccatgatgct

SEQ ID NO: 349679 - DNA, 25 bp, Homo sapien
tagttgttgcccaggtacaccaggt

SEQ ID NO: 349680 - DNA, 25 bp, Homo sapien
ggtggacctgtaaaactggtccatc

SEQ ID NO: 349681 - DNA, 25 bp, Homo sapien
ggacctgtaaaactggtccatctcg

SEQ ID NO: 349682 - DNA, 25 bp, Homo sapien
ccatggtggacctgtaaaactggtc

SEQ ID NO: 349683 - DNA, 25 bp, Homo sapien
acctgtaaaactggtccatctcggg

SEQ ID NO: 349684 - DNA, 25 bp, Homo sapien
actcagctggcagcgaggaagcctc

SEQ ID NO: 349685 - DNA, 25 bp, Homo sapien
agcagtggtaggtagtccctcaggt

SEQ ID NO: 349686 - DNA, 25 bp, Homo sapien
agtggtaggtagtccctcaggtgcc

SEQ ID NO: 349687 - DNA, 25 bp, Homo sapien
ccacgactcagctggcagcgaggaa

SEQ ID NO: 349688 - DNA, 25 bp, Homo sapien
gatttatttcagttttggctcttaa

SEQ ID NO: 349689 - DNA, 25 bp, Homo sapien
tatttcagttttggctcttaagcca

SEQ ID NO: 349690 - DNA, 25 bp, Homo sapien
ttcagttttggctcttaagccactt

SEQ ID NO: 349691 - DNA, 25 bp, Homo sapien
tttatttcagttttggctcttaagc

SEQ ID NO: 349692 - DNA, 25 bp, Homo sapien
ggcaaagtccaacgggcatcccact

SEQ ID NO: 349693 - DNA, 25 bp, Homo sapien
ctcccaggagtgacctttgagagct

SEQ ID NO: 349694 - DNA, 25 bp, Homo sapien
agaaactcccaggagtgacctttga

SEQ ID NO: 349695 - DNA, 25 bp, Homo sapien
catcccactcctgcggcctgggctt

SEQ ID NO: 349696 - DNA, 25 bp, Homo sapien
ccgggtacccttaatgtttgagctg

SEQ ID NO: 349697 - DNA, 25 bp, Homo sapien
cgggtacccttaatgtttgagctga

SEQ ID NO: 349698 - DNA, 25 bp, Homo sapien
gggtacccttaatgtttgagctgat

SEQ ID NO: 349699 - DNA, 25 bp, Homo sapien
tcccagcctggaatgacagaaagtg

SEQ ID NO: 349700 - DNA, 25 bp, Homo sapien
cagctggggccggtgagaggctggg

SEQ ID NO: 349701 - DNA, 25 bp, Homo sapien
gtcagttgtccttgacagtcaggga

SEQ ID NO: 349702 - DNA, 25 bp, Homo sapien
tcccaggcctggtctatggactcag

SEQ ID NO: 349703 - DNA, 25 bp, Homo sapien
cttctggaactcctcgcggtgctca

SEQ ID NO: 349704 - DNA, 25 bp, Homo sapien
agcatgatgtccgtccccagctggg

SEQ ID NO: 349705 - DNA, 25 bp, Homo sapien
gctcatagatgtagacctcggtctc

SEQ ID NO: 349706 - DNA, 25 bp, Homo sapien
cagagggcgttgaccagcactgtgt

SEQ ID NO: 349707 - DNA, 25 bp, Homo sapien
tggatgccgaccatctcgcaccagg

SEQ ID NO: 349708 - DNA, 25 bp, Homo sapien
gtactggatgccgaccatctcgcac

SEQ ID NO: 349709 - DNA, 25 bp, Homo sapien
ctgaagtactggatgccgaccatct

SEQ ID NO: 349710 - DNA, 25 bp, Homo sapien
acagcccgcccgtctggatccgtgc

SEQ ID NO: 349711 - DNA, 25 bp, Homo sapien
tcttggccagctcccaggggttgct

SEQ ID NO: 349712 - DNA, 25 bp, Homo sapien
gttgctgggacggaagacatccaca

SEQ ID NO: 349713 - DNA, 25 bp, Homo sapien
tgtccccagggagacaacgatggag

SEQ ID NO: 349714 - DNA, 25 bp, Homo sapien
tcacaggcacttgtggggacctccc

SEQ ID NO: 349715 - DNA, 25 bp, Homo sapien
caaatgagggctctcagcgaagctc

SEQ ID NO: 349716 - DNA, 25 bp, Homo sapien
gcacatgagaacagggcaagaggtc

SEQ ID NO: 349717 - DNA, 25 bp, Homo sapien
catacaccagctgcaagaaggatcc

SEQ ID NO: 349718 - DNA, 25 bp, Homo sapien
gatgctggcccaagtcaagtcgtgg

SEQ ID NO: 349719 - DNA, 25 bp, Homo sapien
aggctcctgccactatgcccgcctg

SEQ ID NO: 349720 - DNA, 25 bp, Homo sapien
acaggctcctgccactatgcccgcc

SEQ ID NO: 349721 - DNA, 25 bp, Homo sapien
ctcctgccactatgcccgcctggct

SEQ ID NO: 349722 - DNA, 25 bp, Homo sapien
ggctcctgccactatgcccgcctgg

SEQ ID NO: 349723 - DNA, 25 bp, Homo sapien
tttgcttccgaacaagctctgctgc

SEQ ID NO: 349724 - DNA, 25 bp, Homo sapien
catccgcacgcaataggagagttag

SEQ ID NO: 349725 - DNA, 25 bp, Homo sapien
tctgacagtctgacggtctctgccg

SEQ ID NO: 349726 - DNA, 25 bp, Homo sapien
gctctgctgccgatttgctggatga

SEQ ID NO: 349727 - DNA, 25 bp, Homo sapien
tcgagtggcacgttcatggtatgca

SEQ ID NO: 349728 - DNA, 25 bp, Homo sapien
tgagctcaagggcaagcatgtgtcc

SEQ ID NO: 349729 - DNA, 25 bp, Homo sapien
gcattcctgtgggactgtctatcca

SEQ ID NO: 349730 - DNA, 25 bp, Homo sapien
tgatggccccattaggtagctgcag

SEQ ID NO: 349731 - DNA, 25 bp, Homo sapien
tgattgtactcatggatctcggtca

SEQ ID NO: 349732 - DNA, 25 bp, Homo sapien
tctcggtcatggcatccagcgtggg

SEQ ID NO: 349733 - DNA, 25 bp, Homo sapien
gcgcccattgggtcggaagtaagta

SEQ ID NO: 349734 - DNA, 25 bp, Homo sapien
cttgcggatcaggtcctgattgtac

SEQ ID NO: 349735 - DNA, 25 bp, Homo sapien
cccatgcactccagatctcagggtg

SEQ ID NO: 349736 - DNA, 25 bp, Homo sapien
ctccagatctcagggtgtgcgtgtt

SEQ ID NO: 349737 - DNA, 25 bp, Homo sapien
gggactggcataaaacccatgcact

SEQ ID NO: 349738 - DNA, 25 bp, Homo sapien
aagccacactctctggctagttcgt

SEQ ID NO: 349739 - DNA, 25 bp, Homo sapien
catggatgcatcaaacatggtttaa

SEQ ID NO: 349740 - DNA, 25 bp, Homo sapien
gggccagtcgcttcccatggatgca

SEQ ID NO: 349741 - DNA, 25 bp, Homo sapien
tcagccaataaagaccagtgcagcg

SEQ ID NO: 349742 - DNA, 25 bp, Homo sapien
ttccagggacttttctaacctgcca

SEQ ID NO: 349743 - DNA, 25 bp, Homo sapien
agccggctgccggtcagacagtgtc

SEQ ID NO: 349744 - DNA, 25 bp, Homo sapien
agtttctggagcatcgtagttccgg

SEQ ID NO: 349745 - DNA, 25 bp, Homo sapien
taacgttctggttgaaacgaggctc

SEQ ID NO: 349746 - DNA, 25 bp, Homo sapien
ctggaggcctgaggttaacgttctg

SEQ ID NO: 349747 - DNA, 25 bp, Homo sapien
tgttcgggataggtgggcttctccc

SEQ ID NO: 349748 - DNA, 25 bp, Homo sapien
tctgttcgggataggtgggcttctc

SEQ ID NO: 349749 - DNA, 25 bp, Homo sapien
caggctctctccggcagtgctggag

SEQ ID NO: 349750 - DNA, 25 bp, Homo sapien
ctctgttcgggataggtgggcttct

SEQ ID NO: 349751 - DNA, 25 bp, Homo sapien
tacatgggtatacgcctaagctaac

SEQ ID NO: 349752 - DNA, 25 bp, Homo sapien
tgatgaactgagagtcaggcaggcc

SEQ ID NO: 349753 - DNA, 25 bp, Homo sapien
tgttgggcctggtacagaatcctgg

SEQ ID NO: 349754 - DNA, 25 bp, Homo sapien
aagaactctggcctgcaacgtggtc

SEQ ID NO: 349755 - DNA, 25 bp, Homo sapien
cagcggtagttttttatgctctgtg

SEQ ID NO: 349756 - DNA, 25 bp, Homo sapien
ggtggaggatctgccacccagacac

SEQ ID NO: 349757 - DNA, 25 bp, Homo sapien
cagagacagctttccaaccagtgga

SEQ ID NO: 349758 - DNA, 25 bp, Homo sapien
tagttttttatgctctgtggtccgg

SEQ ID NO: 349759 - DNA, 25 bp, Homo sapien
gccgcgcatgtaggccatggactta

SEQ ID NO: 349760 - DNA, 25 bp, Homo sapien
ggccccgactcgtagggcctggagc

SEQ ID NO: 349761 - DNA, 25 bp, Homo sapien
gggtttcctgacgtccgtcatcttg

SEQ ID NO: 349762 - DNA, 25 bp, Homo sapien
cttcatgcgaaagtacatgccgcgc

SEQ ID NO: 349763 - DNA, 25 bp, Homo sapien
gggctcccgtagaacagcctgcaga

SEQ ID NO: 349764 - DNA, 25 bp, Homo sapien
cctgcagagcgcctgaacgcaggag

SEQ ID NO: 349765 - DNA, 25 bp, Homo sapien
ttcctttgcaacctcccagacagac

SEQ ID NO: 349766 - DNA, 25 bp, Homo sapien
cgaggcctaagcaaacccaaattct

SEQ ID NO: 349767 - DNA, 25 bp, Homo sapien
ccttctcgatggcgatgaggagctg

SEQ ID NO: 349768 - DNA, 25 bp, Homo sapien
gccacacccgaggccttctcgatgg

SEQ ID NO: 349769 - DNA, 25 bp, Homo sapien
tctcgatggcgatgaggagctggat

SEQ ID NO: 349770 - DNA, 25 bp, Homo sapien
ggccttctcgatggcgatgaggagc

SEQ ID NO: 349771 - DNA, 25 bp, Homo sapien
tggcgacagagatcaacccagaggg

SEQ ID NO: 349772 - DNA, 25 bp, Homo sapien
gagagcctgcggtagcacaaaggac

SEQ ID NO: 349773 - DNA, 25 bp, Homo sapien
tgagtgcgaagtgagaggacccaca

SEQ ID NO: 349774 - DNA, 25 bp, Homo sapien
catatggatgcggactggacctgga

SEQ ID NO: 349775 - DNA, 25 bp, Homo sapien
gtcacttcacctctcaggggctcag

SEQ ID NO: 349776 - DNA, 25 bp, Homo sapien
aagtcacttcacctctcaggggctc

SEQ ID NO: 349777 - DNA, 25 bp, Homo sapien
gcaagtcacttcacctctcaggggc

SEQ ID NO: 349778 - DNA, 25 bp, Homo sapien
agcaagtcacttcacctctcagggg

SEQ ID NO: 349779 - DNA, 25 bp, Homo sapien
ttccgggcccgtgagatgtgcatga

SEQ ID NO: 349780 - DNA, 25 bp, Homo sapien
gcttctcgtccctcatggagcccag

SEQ ID NO: 349781 - DNA, 25 bp, Homo sapien
gcccaggatgaacgctggcttccgg

SEQ ID NO: 349782 - DNA, 25 bp, Homo sapien
atgaacgctggcttccgggcccgtg

SEQ ID NO: 349783 - DNA, 25 bp, Homo sapien
gcgtgtcctcttcagacaaagtgct

SEQ ID NO: 349784 - DNA, 25 bp, Homo sapien
ccacctggggcctaagaattcttat

SEQ ID NO: 349785 - DNA, 25 bp, Homo sapien
caaagtgcttcttcttgcatcggag

SEQ ID NO: 349786 - DNA, 25 bp, Homo sapien
gatgctgcaataaccacctggggcc

SEQ ID NO: 349787 - DNA, 25 bp, Homo sapien
caggcccaccatccggcctggcttg

SEQ ID NO: 349788 - DNA, 25 bp, Homo sapien
ccaggcccaccatccggcctggctt

SEQ ID NO: 349789 - DNA, 25 bp, Homo sapien
caccatccggcctggcttgggtgac

SEQ ID NO: 349790 - DNA, 25 bp, Homo sapien
ttcaacgtctgaaagtcaccacggg

SEQ ID NO: 349791 - DNA, 25 bp, Homo sapien
tccagagaagggtcctgtctagtct

SEQ ID NO: 349792 - DNA, 25 bp, Homo sapien
gcccaaccgagattcaaacagtgtg

SEQ ID NO: 349793 - DNA, 25 bp, Homo sapien
gccacctcatgggtgccactggaaa

SEQ ID NO: 349794 - DNA, 25 bp, Homo sapien
ggagaagagggagtcgggaggcgag

SEQ ID NO: 349795 - DNA, 25 bp, Homo sapien
tggagaagagggagtcgggaggcga

SEQ ID NO: 349796 - DNA, 25 bp, Homo sapien
atgggtgggaagcagtattcggccc

SEQ ID NO: 349797 - DNA, 25 bp, Homo sapien
aagggatgatgtggcgctgcagagc

SEQ ID NO: 349798 - DNA, 25 bp, Homo sapien
tcagcagagtcaagatcgccttcct

SEQ ID NO: 349799 - DNA, 25 bp, Homo sapien
tgggaagcagtattcggcccccacg

SEQ ID NO: 349800 - DNA, 25 bp, Homo sapien
tctgctccgaacacgatgagggcct

SEQ ID NO: 349801 - DNA, 25 bp, Homo sapien
cgaacacgatgagggccttgatcat

SEQ ID NO: 349802 - DNA, 25 bp, Homo sapien
cccaaagtcattcggggtgtccact

SEQ ID NO: 349803 - DNA, 25 bp, Homo sapien
gaggctaggaatgtaggagtctccc

SEQ ID NO: 349804 - DNA, 25 bp, Homo sapien
gtgttgccgtgctctccgcgggcat

SEQ ID NO: 349805 - DNA, 25 bp, Homo sapien
tcaccgccacgtgcagggccgtgtt

SEQ ID NO: 349806 - DNA, 25 bp, Homo sapien
cactatggcacagtcgaagcggttg

SEQ ID NO: 349807 - DNA, 25 bp, Homo sapien
tgttcacgttgcagccccgtttcag

SEQ ID NO: 349808 - DNA, 25 bp, Homo sapien
ctccgtaacgggggtctttgctgtg

SEQ ID NO: 349809 - DNA, 25 bp, Homo sapien
ctgctgtccatgctgatgatcatct

SEQ ID NO: 349810 - DNA, 25 bp, Homo sapien
cgtaacgggggtctttgctgtggat

SEQ ID NO: 349811 - DNA, 25 bp, Homo sapien
taacgggggtctttgctgtggatct

SEQ ID NO: 349812 - DNA, 25 bp, Homo sapien
gcagcacgcggaccatctcctgctt

SEQ ID NO: 349813 - DNA, 25 bp, Homo sapien
gagagaacttcatggccgagtggat

SEQ ID NO: 349814 - DNA, 25 bp, Homo sapien
gggcccatgatgttgcaccgagcat

SEQ ID NO: 349815 - DNA, 25 bp, Homo sapien
tgttgcaccgagcattgcacagcag

SEQ ID NO: 349816 - DNA, 25 bp, Homo sapien
ttcacctggttcaggccagccactg

SEQ ID NO: 349817 - DNA, 25 bp, Homo sapien
gttattcacctggttcaggccagcc

SEQ ID NO: 349818 - DNA, 25 bp, Homo sapien
gcagcggggtcagcccttggttatt

SEQ ID NO: 349819 - DNA, 25 bp, Homo sapien
tattcacctggttcaggccagccac

SEQ ID NO: 349820 - DNA, 25 bp, Homo sapien
ccatctgagtgtggcagtactgcac

SEQ ID NO: 349821 - DNA, 25 bp, Homo sapien
acagcataatggaagacggtctctc

SEQ ID NO: 349822 - DNA, 25 bp, Homo sapien
tgcagcacctgagaattgtcaccct

SEQ ID NO: 349823 - DNA, 25 bp, Homo sapien
tctcccttgtagtcggtgacatcca

SEQ ID NO: 349824 - DNA, 25 bp, Homo sapien
aaattcaatttcatggtgggtagaa

SEQ ID NO: 349825 - DNA, 25 bp, Homo sapien
tgggtagaaatcagctcccacagac

SEQ ID NO: 349826 - DNA, 25 bp, Homo sapien
tggcacctggtgagcactccggact

SEQ ID NO: 349827 - DNA, 25 bp, Homo sapien
tcccacagacctggcacctggtgag

SEQ ID NO: 349828 - DNA, 25 bp, Homo sapien
gatggaagcactcgcggatccctag

SEQ ID NO: 349829 - DNA, 25 bp, Homo sapien
gggtggttacggatgaggtcggtca

SEQ ID NO: 349830 - DNA, 25 bp, Homo sapien
ctgatgatacggctgtgatggaagc

SEQ ID NO: 349831 - DNA, 25 bp, Homo sapien
gatgaggtcggtcaggtgctgcagg

SEQ ID NO: 349832 - DNA, 25 bp, Homo sapien
ctgggaagaatactgatggaaattc

SEQ ID NO: 349833 - DNA, 25 bp, Homo sapien
ttcactagggcgtcagcctccaact

SEQ ID NO: 349834 - DNA, 25 bp, Homo sapien
gggaagaatactgatggaaattcac

SEQ ID NO: 349835 - DNA, 25 bp, Homo sapien
tggaaattcactagggcgtcagcct

SEQ ID NO: 349836 - DNA, 25 bp, Homo sapien
tccacagagagtgcgttgattaaca

SEQ ID NO: 349837 - DNA, 25 bp, Homo sapien
ggaccagcctgttgttccacagaga

SEQ ID NO: 349838 - DNA, 25 bp, Homo sapien
cagagtctagtgaaggcagtgccca

SEQ ID NO: 349839 - DNA, 25 bp, Homo sapien
ccagagagtgttggctcaacgggac

SEQ ID NO: 349840 - DNA, 25 bp, Homo sapien
aagccccagaaatccacgcttagca

SEQ ID NO: 349841 - DNA, 25 bp, Homo sapien
tctgctgatttaacataccctataa

SEQ ID NO: 349842 - DNA, 25 bp, Homo sapien
tgatttaacataccctataagccct

SEQ ID NO: 349843 - DNA, 25 bp, Homo sapien
aatccacgcttagcaccttgtaggg

SEQ ID NO: 349844 - DNA, 25 bp, Homo sapien
tcactcgaggtgtagtcggccacag

SEQ ID NO: 349845 - DNA, 25 bp, Homo sapien
gtgacgccactgaaggtattgacca

SEQ ID NO: 349846 - DNA, 25 bp, Homo sapien
tccttcacccggaatgggttagaga

SEQ ID NO: 349847 - DNA, 25 bp, Homo sapien
ggttagagaacaagttggtgacgcc

SEQ ID NO: 349848 - DNA, 25 bp, Homo sapien
tgcggggcaggtggggaggccccac

SEQ ID NO: 349849 - DNA, 25 bp, Homo sapien
cttctgcggggcaggtggggaggcc

SEQ ID NO: 349850 - DNA, 25 bp, Homo sapien
ttctgcggggcaggtggggaggccc

SEQ ID NO: 349851 - DNA, 25 bp, Homo sapien
tctgcggggcaggtggggaggcccc

SEQ ID NO: 349852 - DNA, 25 bp, Homo sapien
cacctgtagtgtgtggtattgacca

SEQ ID NO: 349853 - DNA, 25 bp, Homo sapien
cacaggtgaccttaactgcctgctt

SEQ ID NO: 349854 - DNA, 25 bp, Homo sapien
caggctggctacctagaaggctgtc

SEQ ID NO: 349855 - DNA, 25 bp, Homo sapien
gaaaacgaggtctctggtcagccag

SEQ ID NO: 349856 - DNA, 25 bp, Homo sapien
aggcaggaggacgagatgacgcaat

SEQ ID NO: 349857 - DNA, 25 bp, Homo sapien
catccagccttcagggtaggcagga

SEQ ID NO: 349858 - DNA, 25 bp, Homo sapien
actgtgggcacacaaacagtggcca

SEQ ID NO: 349859 - DNA, 25 bp, Homo sapien
acagaaacgacaggcttggctggca

SEQ ID NO: 349860 - DNA, 25 bp, Homo sapien
cagattccagcttcaacctcatcgg

SEQ ID NO: 349861 - DNA, 25 bp, Homo sapien
ttgactcgggaagttagggatactg

SEQ ID NO: 349862 - DNA, 25 bp, Homo sapien
tgagaaatgagtagaggcaccacga

SEQ ID NO: 349863 - DNA, 25 bp, Homo sapien
atactgagggagacacacggaggag

SEQ ID NO: 349864 - DNA, 25 bp, Homo sapien
caccacgaaaggtggagacggacgt

SEQ ID NO: 349865 - DNA, 25 bp, Homo sapien
agggagtcacataagggttaatgga

SEQ ID NO: 349866 - DNA, 25 bp, Homo sapien
gagtcacataagggttaatggagga

SEQ ID NO: 349867 - DNA, 25 bp, Homo sapien
cgggatgggaattggggacgcaggg

SEQ ID NO: 349868 - DNA, 25 bp, Homo sapien
cgcagggggatgaaaagatggaagg

SEQ ID NO: 349869 - DNA, 25 bp, Homo sapien
tccggcggagacttgggagtccgga

SEQ ID NO: 349870 - DNA, 25 bp, Homo sapien
cgaggaatatccaaaggagggtccg

SEQ ID NO: 349871 - DNA, 25 bp, Homo sapien
ctcagaatcggagacacgaggaata

SEQ ID NO: 349872 - DNA, 25 bp, Homo sapien
tgggagtccggagcgccgaggaagt

SEQ ID NO: 349873 - DNA, 25 bp, Homo sapien
ctcagcacttctacttcctcctact

SEQ ID NO: 349874 - DNA, 25 bp, Homo sapien
ctcggcttactcagcacttctactt

SEQ ID NO: 349875 - DNA, 25 bp, Homo sapien
tactcagcacttctacttcctccta

SEQ ID NO: 349876 - DNA, 25 bp, Homo sapien
gcttactcagcacttctacttcctc

SEQ ID NO: 349877 - DNA, 25 bp, Homo sapien
cccaaagggcagttgattaacttgc

SEQ ID NO: 349878 - DNA, 25 bp, Homo sapien
tgtatcagccgcaacacccaaaggg

SEQ ID NO: 349879 - DNA, 25 bp, Homo sapien
tgtgattattcccacttagcaagga

SEQ ID NO: 349880 - DNA, 25 bp, Homo sapien
aacttgcgtggggagaggcttccct

SEQ ID NO: 349881 - DNA, 25 bp, Homo sapien
gagatttcaatacaatctatattat

SEQ ID NO: 349882 - DNA, 25 bp, Homo sapien
tgcccaaagctatcgaggaaggacc

SEQ ID NO: 349883 - DNA, 25 bp, Homo sapien
tcaggagctagtataagcccagcct

SEQ ID NO: 349884 - DNA, 25 bp, Homo sapien
tctggtccaataaataaaggcggcg

SEQ ID NO: 349885 - DNA, 25 bp, Homo sapien
aggacactttgcctgtagggacacg

SEQ ID NO: 349886 - DNA, 25 bp, Homo sapien
tgcgtgtactgctggtaggcaggtg

SEQ ID NO: 349887 - DNA, 25 bp, Homo sapien
tccagggtggactgctgcgtgtact

SEQ ID NO: 349888 - DNA, 25 bp, Homo sapien
tcctgcacgatgtcgtgcgggttca

SEQ ID NO: 349889 - DNA, 25 bp, Homo sapien
tcttctcgttgtcgcgggcgccact

SEQ ID NO: 349890 - DNA, 25 bp, Homo sapien
gccgggcagggagcgggaggggcag

SEQ ID NO: 349891 - DNA, 25 bp, Homo sapien
ggagcgggaggggcaggtgaggagg

SEQ ID NO: 349892 - DNA, 25 bp, Homo sapien
ctgccgggcagggagcgggaggggc

SEQ ID NO: 349893 - DNA, 25 bp, Homo sapien
agggagcgggaggggcaggtgagga

SEQ ID NO: 349894 - DNA, 25 bp, Homo sapien
ctgggacggtgagagggaggtggct

SEQ ID NO: 349895 - DNA, 25 bp, Homo sapien
gcccgtgatcctgggacagacaccc

SEQ ID NO: 349896 - DNA, 25 bp, Homo sapien
cctgcccgtgatcctgggacagaca

SEQ ID NO: 349897 - DNA, 25 bp, Homo sapien
agcccctgcccgtgatcctgggaca

SEQ ID NO: 349898 - DNA, 25 bp, Homo sapien
gggtcgcctaggaccctggctcata

SEQ ID NO: 349899 - DNA, 25 bp, Homo sapien
aatcggtcgtgctggtggcacctgc

SEQ ID NO: 349900 - DNA, 25 bp, Homo sapien
gaagcccgagggaatttgtctattc

SEQ ID NO: 349901 - DNA, 25 bp, Homo sapien
tgagcttccaggaccgaatcggtcg

SEQ ID NO: 349902 - DNA, 25 bp, Homo sapien
agtcctggtagccggcagccacggt

SEQ ID NO: 349903 - DNA, 25 bp, Homo sapien
ccgacacgcgggccgagtggatttt

SEQ ID NO: 349904 - DNA, 25 bp, Homo sapien
tgtgcgtccagcctcttgtcagcat

SEQ ID NO: 349905 - DNA, 25 bp, Homo sapien
cttgtaggtgaaggcgtgccgcagg

SEQ ID NO: 349906 - DNA, 25 bp, Homo sapien
aggaagcgcagaggacagggtggca

SEQ ID NO: 349907 - DNA, 25 bp, Homo sapien
ggggcagcaggaagcgcagaggaca

SEQ ID NO: 349908 - DNA, 25 bp, Homo sapien
gggcagcaggaagcgcagaggacag

SEQ ID NO: 349909 - DNA, 25 bp, Homo sapien
gcgcagaggacagggtggcatgggc

SEQ ID NO: 349910 - DNA, 25 bp, Homo sapien
ccatgaagaacttgaggacggggct

SEQ ID NO: 349911 - DNA, 25 bp, Homo sapien
tggtcacgtagaggtagccactggt

SEQ ID NO: 349912 - DNA, 25 bp, Homo sapien
gaaagaaagatgacggacttgacca

SEQ ID NO: 349913 - DNA, 25 bp, Homo sapien
gggccaggctgacggagatgttgta

SEQ ID NO: 349914 - DNA, 25 bp, Homo sapien
ccagaatgaaatgggtgtggacaat

SEQ ID NO: 349915 - DNA, 25 bp, Homo sapien
tctgtggacttgagccgacctcttg

SEQ ID NO: 349916 - DNA, 25 bp, Homo sapien
tggacaatttacacagcacgggctt

SEQ ID NO: 349917 - DNA, 25 bp, Homo sapien
agccacggggtcactttcactaagc

SEQ ID NO: 349918 - DNA, 25 bp, Homo sapien
acacaccccggggagcacccgctgc

SEQ ID NO: 349919 - DNA, 25 bp, Homo sapien
gctcagacttcaggggggttgtgag

SEQ ID NO: 349920 - DNA, 25 bp, Homo sapien
aggtcatggctgtgcggccactctg

SEQ ID NO: 349921 - DNA, 25 bp, Homo sapien
ggaaggtcatggctgtgcggccact

SEQ ID NO: 349922 - DNA, 25 bp, Homo sapien
atcccggtacttgccgaaggcctgg

SEQ ID NO: 349923 - DNA, 25 bp, Homo sapien
gaggaccacagtgctgaccgccatg

SEQ ID NO: 349924 - DNA, 25 bp, Homo sapien
tgctgaccgccatgagtggcttcac

SEQ ID NO: 349925 - DNA, 25 bp, Homo sapien
catcccggtacttgccgaaggcctg

SEQ ID NO: 349926 - DNA, 25 bp, Homo sapien
agaggcagcaggtgccatacataca

SEQ ID NO: 349927 - DNA, 25 bp, Homo sapien
gaggcagcaggtgccatacatacag

SEQ ID NO: 349928 - DNA, 25 bp, Homo sapien
gcagaacctcagaaatccgatggaa

SEQ ID NO: 349929 - DNA, 25 bp, Homo sapien
tccgatggaataagtctttccccag

SEQ ID NO: 349930 - DNA, 25 bp, Homo sapien
ttttcctctgatctccgacatgatg

SEQ ID NO: 349931 - DNA, 25 bp, Homo sapien
agcacaggctcaggaaattatagat

SEQ ID NO: 349932 - DNA, 25 bp, Homo sapien
ctccgacatgatggaactttctcct

SEQ ID NO: 349933 - DNA, 25 bp, Homo sapien
tttctcctcctaggtactcatagca

SEQ ID NO: 349934 - DNA, 25 bp, Homo sapien
tcaaatcagcagaatgggtccgcag

SEQ ID NO: 349935 - DNA, 25 bp, Homo sapien
ccagtcaaatcagcagaatgggtcc

SEQ ID NO: 349936 - DNA, 25 bp, Homo sapien
gtcaaatcagcagaatgggtccgca

SEQ ID NO: 349937 - DNA, 25 bp, Homo sapien
cagtcaaatcagcagaatgggtccg

SEQ ID NO: 349938 - DNA, 25 bp, Homo sapien
aatgaccgtgtccattctaagccgg

SEQ ID NO: 349939 - DNA, 25 bp, Homo sapien
cactgcgctgggtgttggctgtcac

SEQ ID NO: 349940 - DNA, 25 bp, Homo sapien
taagccgggtccagctatatcatga

SEQ ID NO: 349941 - DNA, 25 bp, Homo sapien
tccaggtggcatccccatgtatatg

SEQ ID NO: 349942 - DNA, 25 bp, Homo sapien
gaagtcgtgagcttgctgccaacag

SEQ ID NO: 349943 - DNA, 25 bp, Homo sapien
ggagcacacagatgcgatcacggct

SEQ ID NO: 349944 - DNA, 25 bp, Homo sapien
ctggcctataagaaaccatttctaa

SEQ ID NO: 349945 - DNA, 25 bp, Homo sapien
aaccatttctaacgggcagagtcca

SEQ ID NO: 349946 - DNA, 25 bp, Homo sapien
agaatgggcacagtgtgttgcaacc

SEQ ID NO: 349947 - DNA, 25 bp, Homo sapien
gatgggtgatcatcctggacaagaa

SEQ ID NO: 349948 - DNA, 25 bp, Homo sapien
gttaattttgcccactttgggcaga

SEQ ID NO: 349949 - DNA, 25 bp, Homo sapien
agaacgttcttatgcctcttttcag

SEQ ID NO: 349950 - DNA, 25 bp, Homo sapien
gaagctggttaaaagtctccacgtg

SEQ ID NO: 349951 - DNA, 25 bp, Homo sapien
tattctctacagaaacaggtcccag

SEQ ID NO: 349952 - DNA, 25 bp, Homo sapien
tatcctcagaacacggtccagctga

SEQ ID NO: 349953 - DNA, 25 bp, Homo sapien
cctgaatacgaagggcgagaggtcc

SEQ ID NO: 349954 - DNA, 25 bp, Homo sapien
gacggtgccgaagtacacgtagtac

SEQ ID NO: 349955 - DNA, 25 bp, Homo sapien
cacgtagtactggtcgttggtgaag

SEQ ID NO: 349956 - DNA, 25 bp, Homo sapien
ctgtagcagcgcaggtgcatgtaga

SEQ ID NO: 349957 - DNA, 25 bp, Homo sapien
cgatgaagaggatgcgcacgatgta

SEQ ID NO: 349958 - DNA, 25 bp, Homo sapien
ctgggggcagaggtgtggggtcagc

SEQ ID NO: 349959 - DNA, 25 bp, Homo sapien
gggcagaggtgtggggtcagctggg

SEQ ID NO: 349960 - DNA, 25 bp, Homo sapien
tgggggcagaggtgtggggtcagct

SEQ ID NO: 349961 - DNA, 25 bp, Homo sapien
cagaggtgtggggtcagctggggac

SEQ ID NO: 349962 - DNA, 25 bp, Homo sapien
ggtgtctcgtcccagctctcatgac

SEQ ID NO: 349963 - DNA, 25 bp, Homo sapien
gcagcccctgggtgtctcgtcccag

SEQ ID NO: 349964 - DNA, 25 bp, Homo sapien
ctgggtgtctcgtcccagctctcat

SEQ ID NO: 349965 - DNA, 25 bp, Homo sapien
tgtctcgtcccagctctcatgacat

SEQ ID NO: 349966 - DNA, 25 bp, Homo sapien
atgagcagggccgtccacacgaaga

SEQ ID NO: 349967 - DNA, 25 bp, Homo sapien
tggcctgagcggcagttgtcatcag

SEQ ID NO: 349968 - DNA, 25 bp, Homo sapien
agagatggcctgagcggcagttgtc

SEQ ID NO: 349969 - DNA, 25 bp, Homo sapien
agcggcagttgtcatcaggaacaca

SEQ ID NO: 349970 - DNA, 25 bp, Homo sapien
ggtcgtgggcgacgctggatccggg

SEQ ID NO: 349971 - DNA, 25 bp, Homo sapien
tgccctcggggatcacggagacgct

SEQ ID NO: 349972 - DNA, 25 bp, Homo sapien
ggctgctgcggtcgtgggcgacgct

SEQ ID NO: 349973 - DNA, 25 bp, Homo sapien
ggatcacggagacgctgggcgaggc

SEQ ID NO: 349974 - DNA, 25 bp, Homo sapien
gggaaacctttgcagaaagtgacaa

SEQ ID NO: 349975 - DNA, 25 bp, Homo sapien
cctttgcagaaagtgacaagctagc

SEQ ID NO: 349976 - DNA, 25 bp, Homo sapien
ctgagggaaacctttgcagaaagtg

SEQ ID NO: 349977 - DNA, 25 bp, Homo sapien
aaacctttgcagaaagtgacaagct

SEQ ID NO: 349978 - DNA, 25 bp, Homo sapien
aagtgactgaattaagggtcctgaa

SEQ ID NO: 349979 - DNA, 25 bp, Homo sapien
tcccctctgcccatggattttatta

SEQ ID NO: 349980 - DNA, 25 bp, Homo sapien
tgctgcccttgcagatggcgaaagg

SEQ ID NO: 349981 - DNA, 25 bp, Homo sapien
tgtggtaggctgaagaataatcccc

SEQ ID NO: 349982 - DNA, 25 bp, Homo sapien
gcactgttcatctgaactgaccgct

SEQ ID NO: 349983 - DNA, 25 bp, Homo sapien
ggtcagactcgagcactgttcatct

SEQ ID NO: 349984 - DNA, 25 bp, Homo sapien
ctggttggggtcagactcgagcact

SEQ ID NO: 349985 - DNA, 25 bp, Homo sapien
ttcatctgaactgaccgctctgctc

SEQ ID NO: 349986 - DNA, 25 bp, Homo sapien
ttcagcaatcaaaaggtacatggga

SEQ ID NO: 349987 - DNA, 25 bp, Homo sapien
caaacaagcaatctcccatgaccag

SEQ ID NO: 349988 - DNA, 25 bp, Homo sapien
ggcatcacaatcaccgacttgcggt

SEQ ID NO: 349989 - DNA, 25 bp, Homo sapien
ctgcttcagcaatcaaaaggtacat

SEQ ID NO: 349990 - DNA, 25 bp, Homo sapien
gctgtcagtaaaaggctaggcccac

SEQ ID NO: 349991 - DNA, 25 bp, Homo sapien
cattccagatgagtggtgagcacct

SEQ ID NO: 349992 - DNA, 25 bp, Homo sapien
ccggccgagtaggagatacctctta

SEQ ID NO: 349993 - DNA, 25 bp, Homo sapien
gaaggcacaccgagtatcaagtcag

SEQ ID NO: 349994 - DNA, 25 bp, Homo sapien
acccgcacagggcacggacgcctcc

SEQ ID NO: 349995 - DNA, 25 bp, Homo sapien
ccgcacagggcacggacgcctcccc

SEQ ID NO: 349996 - DNA, 25 bp, Homo sapien
actgccacccgcacagggcacggac

SEQ ID NO: 349997 - DNA, 25 bp, Homo sapien
tgccacccgcacagggcacggacgc

SEQ ID NO: 349998 - DNA, 25 bp, Homo sapien
ttggcgtggaaagggagcgggcaca

SEQ ID NO: 349999 - DNA, 25 bp, Homo sapien
ttgcaaagcgccttggtccatccgc

SEQ ID NO: 350000 - DNA, 25 bp, Homo sapien
ggagcacacaatccctcttgcaaag

SEQ ID NO: 350001 - DNA, 25 bp, Homo sapien
ggacaggtccgattacactccagga

SEQ ID NO: 350002 - DNA, 25 bp, Homo sapien
gagccggcggccgaagccgggcgtc

SEQ ID NO: 350003 - DNA, 25 bp, Homo sapien
ccccgcgctcgggagtcgcagctcc

SEQ ID NO: 350004 - DNA, 25 bp, Homo sapien
cgaagccgggcgtccctcgcgcggg

SEQ ID NO: 350005 - DNA, 25 bp, Homo sapien
gcgcgggcctctccgaaacaagcag

SEQ ID NO: 350006 - DNA, 25 bp, Homo sapien
ccgggttctcttgccactcacaaaa

SEQ ID NO: 350007 - DNA, 25 bp, Homo sapien
gcggacgcggctgagatcactgcct

SEQ ID NO: 350008 - DNA, 25 bp, Homo sapien
cggcgtctgcggacgatgcgcggca

SEQ ID NO: 350009 - DNA, 25 bp, Homo sapien
atgcgctctgggctcgccgccgggg

SEQ ID NO: 350010 - DNA, 25 bp, Homo sapien
gccagtaggccagtttttaagcaaa

SEQ ID NO: 350011 - DNA, 25 bp, Homo sapien
tccagcagccacgttgtgtctagta

SEQ ID NO: 350012 - DNA, 25 bp, Homo sapien
tcaggtccctgataaaactttcatt

SEQ ID NO: 350013 - DNA, 25 bp, Homo sapien
tgcagggtaatgcatactggatgcc

SEQ ID NO: 350014 - DNA, 25 bp, Homo sapien
aggctacgggacaccacttcacgtg

SEQ ID NO: 350015 - DNA, 25 bp, Homo sapien
ctgaacctcagcaggctacgggaca

SEQ ID NO: 350016 - DNA, 25 bp, Homo sapien
cgtgggccacttgaaaggatagaga

SEQ ID NO: 350017 - DNA, 25 bp, Homo sapien
caccacttcacgtgggccacttgaa

SEQ ID NO: 350018 - DNA, 25 bp, Homo sapien
aatgaccagttgtgttcctgtgggc

SEQ ID NO: 350019 - DNA, 25 bp, Homo sapien
tcctgtgggcgcttgtgctgtaggc

SEQ ID NO: 350020 - DNA, 25 bp, Homo sapien
ccatggggactgagcattcttagcc

SEQ ID NO: 350021 - DNA, 25 bp, Homo sapien
gactgagcattcttagccataactg

SEQ ID NO: 350022 - DNA, 25 bp, Homo sapien
gctgtctggtgtcaggttgtccatc

SEQ ID NO: 350023 - DNA, 25 bp, Homo sapien
ctagttggtaacttccactcgctgt

SEQ ID NO: 350024 - DNA, 25 bp, Homo sapien
ttggtaacttccactcgctgtctgg

SEQ ID NO: 350025 - DNA, 25 bp, Homo sapien
cgctgtctggtgtcaggttgtccat

SEQ ID NO: 350026 - DNA, 25 bp, Homo sapien
agcaagacccacttccgggtctgca

SEQ ID NO: 350027 - DNA, 25 bp, Homo sapien
ccttcagggcgagggcttgttcctc

SEQ ID NO: 350028 - DNA, 25 bp, Homo sapien
caagacccacttccgggtctgcagg

SEQ ID NO: 350029 - DNA, 25 bp, Homo sapien
ctgccttcagggcgagggcttgttc

SEQ ID NO: 350030 - DNA, 25 bp, Homo sapien
taacaaccacgataaagctcaaaaa

SEQ ID NO: 350031 - DNA, 25 bp, Homo sapien
ttcaaattaacaaccacgataaagc

SEQ ID NO: 350032 - DNA, 25 bp, Homo sapien
attacttcaaattaacaaccacgat

SEQ ID NO: 350033 - DNA, 25 bp, Homo sapien
aattaacaaccacgataaagctcaa

SEQ ID NO: 350034 - DNA, 25 bp, Homo sapien
atggattctgccctaaaaccaggaa

SEQ ID NO: 350035 - DNA, 25 bp, Homo sapien
cagggaagtaatttataactcagag

SEQ ID NO: 350036 - DNA, 25 bp, Homo sapien
ccccatgtccttgttagtagacaca

SEQ ID NO: 350037 - DNA, 25 bp, Homo sapien
gaccccaggtgactgtcaggaccag

SEQ ID NO: 350038 - DNA, 25 bp, Homo sapien
gtggggctgtgcgtatctcctggat

SEQ ID NO: 350039 - DNA, 25 bp, Homo sapien
gaaaagcccagcacgggaagtcagc

SEQ ID NO: 350040 - DNA, 25 bp, Homo sapien
ggggctgtgcgtatctcctggattc

SEQ ID NO: 350041 - DNA, 25 bp, Homo sapien
agcccagcacgggaagtcagccact

SEQ ID NO: 350042 - DNA, 25 bp, Homo sapien
gctcggaaaactcggtgggaactgc

SEQ ID NO: 350043 - DNA, 25 bp, Homo sapien
gctcctgtagcctggtgttgtcagg

SEQ ID NO: 350044 - DNA, 25 bp, Homo sapien
ggacctgtcacttctccgacacgga

SEQ ID NO: 350045 - DNA, 25 bp, Homo sapien
cctgatgatgcttgagggccggctt

SEQ ID NO: 350046 - DNA, 25 bp, Homo sapien
cttcttgccattggcaaagaaatca

SEQ ID NO: 350047 - DNA, 25 bp, Homo sapien
accacaagggggcaagaatcctcag

SEQ ID NO: 350048 - DNA, 25 bp, Homo sapien
aacaaactccatcgtcggttttgtg

SEQ ID NO: 350049 - DNA, 25 bp, Homo sapien
catcgtcggttttgtgctgggtttt

SEQ ID NO: 350050 - DNA, 25 bp, Homo sapien
ttcctgggcctgagatccgaggaag

SEQ ID NO: 350051 - DNA, 25 bp, Homo sapien
cagcacgctaggagatccatcttca

SEQ ID NO: 350052 - DNA, 25 bp, Homo sapien
ccatcttcatgtgacagaaacggat

SEQ ID NO: 350053 - DNA, 25 bp, Homo sapien
agggaaaagacaggtgaggtacaca

SEQ ID NO: 350054 - DNA, 25 bp, Homo sapien
ttgagtcccccgacgtgtcggacta

SEQ ID NO: 350055 - DNA, 25 bp, Homo sapien
agattgtcccagtgtaaagttgagt

SEQ ID NO: 350056 - DNA, 25 bp, Homo sapien
tgtcccagtgtaaagttgagtcccc

SEQ ID NO: 350057 - DNA, 25 bp, Homo sapien
agtcccccgacgtgtcggactactg

SEQ ID NO: 350058 - DNA, 25 bp, Homo sapien
tcaggcctgagcatagaaacccttg

SEQ ID NO: 350059 - DNA, 25 bp, Homo sapien
aatggacacacgttccccagagagc

SEQ ID NO: 350060 - DNA, 25 bp, Homo sapien
ttaacttgcgtaacagcccagaggc

SEQ ID NO: 350061 - DNA, 25 bp, Homo sapien
tacagaggcataaaaagggctcctt

SEQ ID NO: 350062 - DNA, 25 bp, Homo sapien
caaacactggtccaatgggggctct

SEQ ID NO: 350063 - DNA, 25 bp, Homo sapien
aagcaaacactggtccaatgggggc

SEQ ID NO: 350064 - DNA, 25 bp, Homo sapien
gcaaacactggtccaatgggggctc

SEQ ID NO: 350065 - DNA, 25 bp, Homo sapien
aacactggtccaatgggggctctcc

SEQ ID NO: 350066 - DNA, 25 bp, Homo sapien
cccgagatggtcaaatggcacactt

SEQ ID NO: 350067 - DNA, 25 bp, Homo sapien
ttcccgagatggtcaaatggcacac

SEQ ID NO: 350068 - DNA, 25 bp, Homo sapien
cacttcccgagatggtcaaatggca

SEQ ID NO: 350069 - DNA, 25 bp, Homo sapien
cgagatggtcaaatggcacacttgt

SEQ ID NO: 350070 - DNA, 25 bp, Homo sapien
caatgagggttctctcgcaggactc

SEQ ID NO: 350071 - DNA, 25 bp, Homo sapien
gaggcaaacctgctacctaagtaga

SEQ ID NO: 350072 - DNA, 25 bp, Homo sapien
gagggaggtacaagcttcaagtcaa

SEQ ID NO: 350073 - DNA, 25 bp, Homo sapien
tagccgctggcgatagagatttggc

SEQ ID NO: 350074 - DNA, 25 bp, Homo sapien
caaagaggatgggacctcactgccc

SEQ ID NO: 350075 - DNA, 25 bp, Homo sapien
gccaagtcctggctctacagaaggg

SEQ ID NO: 350076 - DNA, 25 bp, Homo sapien
atgtcagggagcagcaacacctcat

SEQ ID NO: 350077 - DNA, 25 bp, Homo sapien
ccaaggcaagcagcgtcgatggaaa

SEQ ID NO: 350078 - DNA, 25 bp, Homo sapien
ctcttgccgcccagtgaggtctgag

SEQ ID NO: 350079 - DNA, 25 bp, Homo sapien
ctgaggaggagacgttggcgggcgc

SEQ ID NO: 350080 - DNA, 25 bp, Homo sapien
ctgggatccgggagacctcttgccg

SEQ ID NO: 350081 - DNA, 25 bp, Homo sapien
gggagacctcttgccgcccagtgag

SEQ ID NO: 350082 - DNA, 25 bp, Homo sapien
ctctcccggtcgacccgcgagatcg

SEQ ID NO: 350083 - DNA, 25 bp, Homo sapien
tctcccggtcgacccgcgagatcgc

SEQ ID NO: 350084 - DNA, 25 bp, Homo sapien
cttcctctcccggtcgacccgcgag

SEQ ID NO: 350085 - DNA, 25 bp, Homo sapien
tcctctcccggtcgacccgcgagat

SEQ ID NO: 350086 - DNA, 25 bp, Homo sapien
ggaagccaccctcagagtaggcaca

SEQ ID NO: 350087 - DNA, 25 bp, Homo sapien
aagccaccctcagagtaggcacaaa

SEQ ID NO: 350088 - DNA, 25 bp, Homo sapien
ccaccctcagagtaggcacaaacag

SEQ ID NO: 350089 - DNA, 25 bp, Homo sapien
gcccactgcctgagtccctgctcac

SEQ ID NO: 350090 - DNA, 25 bp, Homo sapien
cccatcctctcctcgcgttcgtgtt

SEQ ID NO: 350091 - DNA, 25 bp, Homo sapien
agccggttggcagtggcccccgtgg

SEQ ID NO: 350092 - DNA, 25 bp, Homo sapien
tcgggtcgcggacccccgtagctgc

SEQ ID NO: 350093 - DNA, 25 bp, Homo sapien
ggaagccacgggctcggcggcactg

SEQ ID NO: 350094 - DNA, 25 bp, Homo sapien
ttgctaaaccgagcaggaaagctgt

SEQ ID NO: 350095 - DNA, 25 bp, Homo sapien
ctaatgcgcccaggatgatcaagag

SEQ ID NO: 350096 - DNA, 25 bp, Homo sapien
tgtgtaccaagagcccttaactact

SEQ ID NO: 350097 - DNA, 25 bp, Homo sapien
tgggctaggactcagaccagctctc

SEQ ID NO: 350098 - DNA, 25 bp, Homo sapien
gggggctggcaggaagggggccgca

SEQ ID NO: 350099 - DNA, 25 bp, Homo sapien
cgtccacagggaagggcagggggct

SEQ ID NO: 350100 - DNA, 25 bp, Homo sapien
ggcagggggctggcaggaagggggc

SEQ ID NO: 350101 - DNA, 25 bp, Homo sapien
ctagttcatcctggggccgtccaca

SEQ ID NO: 350102 - DNA, 25 bp, Homo sapien
tggacctcggaacacagtggctgta

SEQ ID NO: 350103 - DNA, 25 bp, Homo sapien
tgcctcaagagggacttccaggaag

SEQ ID NO: 350104 - DNA, 25 bp, Homo sapien
aaaaggtcagcaaagtcacacgagc

SEQ ID NO: 350105 - DNA, 25 bp, Homo sapien
aggtggttcagctcactacagtggc

SEQ ID NO: 350106 - DNA, 25 bp, Homo sapien
tgaagtcagagaagacgtcccctgc

SEQ ID NO: 350107 - DNA, 25 bp, Homo sapien
aaatgtgtcgcatgtggccaatggc

SEQ ID NO: 350108 - DNA, 25 bp, Homo sapien
ccagacgtgggagtgactatctcga

SEQ ID NO: 350109 - DNA, 25 bp, Homo sapien
tcctaaccatctagcagggtggctg

SEQ ID NO: 350110 - DNA, 25 bp, Homo sapien
tgagtctgtcctgggacccgttccc

SEQ ID NO: 350111 - DNA, 25 bp, Homo sapien
atggcagggccttttccaccatggc

SEQ ID NO: 350112 - DNA, 25 bp, Homo sapien
cagaggccgccaacggggtctagct

SEQ ID NO: 350113 - DNA, 25 bp, Homo sapien
tctcttgggaacagggggtcatccc

SEQ ID NO: 350114 - DNA, 25 bp, Homo sapien
tccaccggcctatctggggggctct

SEQ ID NO: 350115 - DNA, 25 bp, Homo sapien
tcctccaccggcctatctggggggc

SEQ ID NO: 350116 - DNA, 25 bp, Homo sapien
cctccaccggcctatctggggggct

SEQ ID NO: 350117 - DNA, 25 bp, Homo sapien
caccggcctatctggggggctctgg

SEQ ID NO: 350118 - DNA, 25 bp, Homo sapien
gcgctcactggtcaagtggcaaatt

SEQ ID NO: 350119 - DNA, 25 bp, Homo sapien
aggctcagcctcttgcgctcactgg

SEQ ID NO: 350120 - DNA, 25 bp, Homo sapien
tcttgcgctcactggtcaagtggca

SEQ ID NO: 350121 - DNA, 25 bp, Homo sapien
cagcctcttgcgctcactggtcaag

SEQ ID NO: 350122 - DNA, 25 bp, Homo sapien
ggacagaaaggtcccttcgctgtca

SEQ ID NO: 350123 - DNA, 25 bp, Homo sapien
aggtcccttcgctgtcatggggctg

SEQ ID NO: 350124 - DNA, 25 bp, Homo sapien
acagaaaggtcccttcgctgtcatg

SEQ ID NO: 350125 - DNA, 25 bp, Homo sapien
agaaaggtcccttcgctgtcatggg

SEQ ID NO: 350126 - DNA, 25 bp, Homo sapien
cagagctctgggtacggccggccaa

SEQ ID NO: 350127 - DNA, 25 bp, Homo sapien
gaaacaagacatacaatttcacaga

SEQ ID NO: 350128 - DNA, 25 bp, Homo sapien
aagagatgtgaaacaagacatacaa

SEQ ID NO: 350129 - DNA, 25 bp, Homo sapien
gagggaaacagaacaactgcctagc

SEQ ID NO: 350130 - DNA, 25 bp, Homo sapien
caggggcccatgaccaagaagaaag

SEQ ID NO: 350131 - DNA, 25 bp, Homo sapien
ggcccatgaccaagaagaaagcaag

SEQ ID NO: 350132 - DNA, 25 bp, Homo sapien
ggggcccatgaccaagaagaaagca

SEQ ID NO: 350133 - DNA, 25 bp, Homo sapien
ccaggggcccatgaccaagaagaaa

SEQ ID NO: 350134 - DNA, 25 bp, Homo sapien
aggagcagcaggacggtgtaggcag

SEQ ID NO: 350135 - DNA, 25 bp, Homo sapien
atggtgcaggtagccacctgggatg

SEQ ID NO: 350136 - DNA, 25 bp, Homo sapien
agcaggacggtgtaggcagcaatca

SEQ ID NO: 350137 - DNA, 25 bp, Homo sapien
gaggggccatggtgcaggtagccac

SEQ ID NO: 350138 - DNA, 25 bp, Homo sapien
caagctgtcagcacggatgaggctg

SEQ ID NO: 350139 - DNA, 25 bp, Homo sapien
cagatcctccttgttccgacgggag

SEQ ID NO: 350140 - DNA, 25 bp, Homo sapien
tctgggaccccagtgaggtcaacca

SEQ ID NO: 350141 - DNA, 25 bp, Homo sapien
gggaccccaggtgaagccagatcct

SEQ ID NO: 350142 - DNA, 25 bp, Homo sapien
ggagcccctcccgccaccagctcac

SEQ ID NO: 350143 - DNA, 25 bp, Homo sapien
cgtctgtcgggagcccctcccgcca

SEQ ID NO: 350144 - DNA, 25 bp, Homo sapien
tcgggagcccctcccgccaccagct

SEQ ID NO: 350145 - DNA, 25 bp, Homo sapien
tctgtcgggagcccctcccgccacc

SEQ ID NO: 350146 - DNA, 25 bp, Homo sapien
catccagtcccccaagcccgccttg

SEQ ID NO: 350147 - DNA, 25 bp, Homo sapien
cccatccagtcccccaagcccgcct

SEQ ID NO: 350148 - DNA, 25 bp, Homo sapien
ccatccagtcccccaagcccgcctt

SEQ ID NO: 350149 - DNA, 25 bp, Homo sapien
ggcttgtcgtcaaaccgcagggagc

SEQ ID NO: 350150 - DNA, 25 bp, Homo sapien
agagctgacgtaggtaagagtagtc

SEQ ID NO: 350151 - DNA, 25 bp, Homo sapien
gcagaagttgaggtatgttgagaat

SEQ ID NO: 350152 - DNA, 25 bp, Homo sapien
tcagcatgttccagtcaaagacgta

SEQ ID NO: 350153 - DNA, 25 bp, Homo sapien
cagagcaagggaagacctgcgaaca

SEQ ID NO: 350154 - DNA, 25 bp, Homo sapien
aaagcctagcctgcccgtgagcaga

SEQ ID NO: 350155 - DNA, 25 bp, Homo sapien
ggtgttgcagaggatagagaaggcc

SEQ ID NO: 350156 - DNA, 25 bp, Homo sapien
ggccttccctatcctactgtgatga

SEQ ID NO: 350157 - DNA, 25 bp, Homo sapien
gacatcttcttctcgctgatccgtt

SEQ ID NO: 350158 - DNA, 25 bp, Homo sapien
gatccgttcatacttctggcgcttg

SEQ ID NO: 350159 - DNA, 25 bp, Homo sapien
cagaggacctcgatgggcgttgaca

SEQ ID NO: 350160 - DNA, 25 bp, Homo sapien
tccaggtcatctcgacggctttgct

SEQ ID NO: 350161 - DNA, 25 bp, Homo sapien
ttgtcgggcttgacgtcccggtgga

SEQ ID NO: 350162 - DNA, 25 bp, Homo sapien
cttggagtggatatactcgatgcgg

SEQ ID NO: 350163 - DNA, 25 bp, Homo sapien
gtagcgggccgtgccggtcaggttc

SEQ ID NO: 350164 - DNA, 25 bp, Homo sapien
cgtgttgatggaagcgtagcgggcc

SEQ ID NO: 350165 - DNA, 25 bp, Homo sapien
gaggttcggcgttcacctacggtca

SEQ ID NO: 350166 - DNA, 25 bp, Homo sapien
tctgtgtgaccgaccgcaggcttta

SEQ ID NO: 350167 - DNA, 25 bp, Homo sapien
gcaaggcgctgaatggtatctcacc

SEQ ID NO: 350168 - DNA, 25 bp, Homo sapien
tacggtcactggtctggaacaggac

SEQ ID NO: 350169 - DNA, 25 bp, Homo sapien
gcaccacttgatggacgggatcccc

SEQ ID NO: 350170 - DNA, 25 bp, Homo sapien
tcttgaggctgaatttgcgggaaca

SEQ ID NO: 350171 - DNA, 25 bp, Homo sapien
accatcacgttgtagtcgccctcag

SEQ ID NO: 350172 - DNA, 25 bp, Homo sapien
ttgaacaggtcctcgaggctaggcc

SEQ ID NO: 350173 - DNA, 25 bp, Homo sapien
tcttgtagaacttgctctcgatgtg

SEQ ID NO: 350174 - DNA, 25 bp, Homo sapien
tctcgatgtgcagctgggggtgctt

SEQ ID NO: 350175 - DNA, 25 bp, Homo sapien
ctccagcttgatggcgacttcctca

SEQ ID NO: 350176 - DNA, 25 bp, Homo sapien
cttgatggcgacttcctcaccagag

SEQ ID NO: 350177 - DNA, 25 bp, Homo sapien
gtctgtcggcaagactgtgggggcg

SEQ ID NO: 350178 - DNA, 25 bp, Homo sapien
ctgtctgtcggcaagactgtggggg

SEQ ID NO: 350179 - DNA, 25 bp, Homo sapien
tgtctgtcggcaagactgtgggggc

SEQ ID NO: 350180 - DNA, 25 bp, Homo sapien
tctgtcggcaagactgtgggggcgc

SEQ ID NO: 350181 - DNA, 25 bp, Homo sapien
tttagtatattcacaagcttgcgca

SEQ ID NO: 350182 - DNA, 25 bp, Homo sapien
tagtatattcacaagcttgcgcagc

SEQ ID NO: 350183 - DNA, 25 bp, Homo sapien
agtatattcacaagcttgcgcagcc

SEQ ID NO: 350184 - DNA, 25 bp, Homo sapien
ttagtatattcacaagcttgcgcag

SEQ ID NO: 350185 - DNA, 25 bp, Homo sapien
tgaaaacacctgtagcctttagtgg

SEQ ID NO: 350186 - DNA, 25 bp, Homo sapien
gtaaggtcctatctcctcgctccat

SEQ ID NO: 350187 - DNA, 25 bp, Homo sapien
tagtggggtaaggtcctatctcctc

SEQ ID NO: 350188 - DNA, 25 bp, Homo sapien
gaatcatacaacgtgattttttgtg

SEQ ID NO: 350189 - DNA, 25 bp, Homo sapien
ggcctgcagcacttggtgattcggc

SEQ ID NO: 350190 - DNA, 25 bp, Homo sapien
cactcttcgagtactactgtttgta

SEQ ID NO: 350191 - DNA, 25 bp, Homo sapien
tgattcggcagatgtgtgcagggag

SEQ ID NO: 350192 - DNA, 25 bp, Homo sapien
aggtagtggtagacagggccctctt

SEQ ID NO: 350193 - DNA, 25 bp, Homo sapien
cagcttcaataatacgagggtcctt

SEQ ID NO: 350194 - DNA, 25 bp, Homo sapien
tctagagccagtacaaagaggagta

SEQ ID NO: 350195 - DNA, 25 bp, Homo sapien
tctgcaaaaagagcgacgggacctg

SEQ ID NO: 350196 - DNA, 25 bp, Homo sapien
caaacagtaaggagctgggtacact

SEQ ID NO: 350197 - DNA, 25 bp, Homo sapien
tgagccatatctcctggcctccttt

SEQ ID NO: 350198 - DNA, 25 bp, Homo sapien
tgtgagccatatctcctggcctcct

SEQ ID NO: 350199 - DNA, 25 bp, Homo sapien
gccatatctcctggcctcctttttt

SEQ ID NO: 350200 - DNA, 25 bp, Homo sapien
gtgtgagccatatctcctggcctcc

SEQ ID NO: 350201 - DNA, 25 bp, Homo sapien
gaaaccccgaagttctgagctgatg

SEQ ID NO: 350202 - DNA, 25 bp, Homo sapien
gatggacacgacacacagacttggt

SEQ ID NO: 350203 - DNA, 25 bp, Homo sapien
gaaagtaccctgcaaggaagtggtc

SEQ ID NO: 350204 - DNA, 25 bp, Homo sapien
ggaacagttcttggtcagtcaggca

SEQ ID NO: 350205 - DNA, 25 bp, Homo sapien
aggaagggccaagactcatgaccgt

SEQ ID NO: 350206 - DNA, 25 bp, Homo sapien
caggaagcacatccggagagaaaaa

SEQ ID NO: 350207 - DNA, 25 bp, Homo sapien
tgaggcacaaaagaaccgcatgact

SEQ ID NO: 350208 - DNA, 25 bp, Homo sapien
tcagaagtggcactgaaaggcgcaa

SEQ ID NO: 350209 - DNA, 25 bp, Homo sapien
gtagatatctccgaaggacccgctc

SEQ ID NO: 350210 - DNA, 25 bp, Homo sapien
gcggtacttgttccccacacgtagc

SEQ ID NO: 350211 - DNA, 25 bp, Homo sapien
gatcttccgtcccaggcggtacttg

SEQ ID NO: 350212 - DNA, 25 bp, Homo sapien
ccaggtagatatctccgaaggaccc

SEQ ID NO: 350213 - DNA, 25 bp, Homo sapien
ctacgcgggcccgaatcaacagtat

SEQ ID NO: 350214 - DNA, 25 bp, Homo sapien
aacgagcgggcgcagccttgcgaac

SEQ ID NO: 350215 - DNA, 25 bp, Homo sapien
ggcgccggtgattgtccgatgaaac

SEQ ID NO: 350216 - DNA, 25 bp, Homo sapien
aaacgcccgtcatccaacgagcggg

SEQ ID NO: 350217 - DNA, 25 bp, Homo sapien
aaggcgccgatgccgggccactgct

SEQ ID NO: 350218 - DNA, 25 bp, Homo sapien
ccgccgggaaggcgccgatgccggg

SEQ ID NO: 350219 - DNA, 25 bp, Homo sapien
ggaggattcgcggagccgcccggcg

SEQ ID NO: 350220 - DNA, 25 bp, Homo sapien
ggctcgcgcgctctcgcaccgcgcg

SEQ ID NO: 350221 - DNA, 25 bp, Homo sapien
tgaagctcaaactgtgatgggcaca

SEQ ID NO: 350222 - DNA, 25 bp, Homo sapien
cctgaagctcaaactgtgatgggca

SEQ ID NO: 350223 - DNA, 25 bp, Homo sapien
acagagaggacccctcagatcccaa

SEQ ID NO: 350224 - DNA, 25 bp, Homo sapien
tttccctgaagctcaaactgtgatg

SEQ ID NO: 350225 - DNA, 25 bp, Homo sapien
aagttctcagccggcctgagcgcca

SEQ ID NO: 350226 - DNA, 25 bp, Homo sapien
agaggcctgggcacaattgagcagg

SEQ ID NO: 350227 - DNA, 25 bp, Homo sapien
ctgtgtcctccagtccttaccaccc

SEQ ID NO: 350228 - DNA, 25 bp, Homo sapien
tttctctgggggcattaggagatcc

SEQ ID NO: 350229 - DNA, 25 bp, Homo sapien
agctcacacaaccactcattagctg

SEQ ID NO: 350230 - DNA, 25 bp, Homo sapien
tgaggatgattgctgcgactaataa

SEQ ID NO: 350231 - DNA, 25 bp, Homo sapien
cgctcggcatagttggtgcgactca

SEQ ID NO: 350232 - DNA, 25 bp, Homo sapien
gcgactaataatcccgatgcccaca

SEQ ID NO: 350233 - DNA, 25 bp, Homo sapien
cacccctgagggagttaggagccct

SEQ ID NO: 350234 - DNA, 25 bp, Homo sapien
tcagagacccctggatacccaattg

SEQ ID NO: 350235 - DNA, 25 bp, Homo sapien
taatgctaatgctcagacactccca

SEQ ID NO: 350236 - DNA, 25 bp, Homo sapien
gatatgcgccgacctagtggttcgt

SEQ ID NO: 350237 - DNA, 25 bp, Homo sapien
tcatggttagagagagcaaaggtct

SEQ ID NO: 350238 - DNA, 25 bp, Homo sapien
gggacagggcctacataatttagct

SEQ ID NO: 350239 - DNA, 25 bp, Homo sapien
tacatttgccaaatagtcaatcggc

SEQ ID NO: 350240 - DNA, 25 bp, Homo sapien
tgactcaccacaacgagaaaatgct

SEQ ID NO: 350241 - DNA, 25 bp, Homo sapien
agtttggagaccagccgaaaccctg

SEQ ID NO: 350242 - DNA, 25 bp, Homo sapien
aggtcagagtttggagaccagccga

SEQ ID NO: 350243 - DNA, 25 bp, Homo sapien
gtcagagtttggagaccagccgaaa

SEQ ID NO: 350244 - DNA, 25 bp, Homo sapien
cagagtttggagaccagccgaaacc

SEQ ID NO: 350245 - DNA, 25 bp, Homo sapien
ggacaacgtgactataacccagaga

SEQ ID NO: 350246 - DNA, 25 bp, Homo sapien
caaagtctacgttttcaggacaacg

SEQ ID NO: 350247 - DNA, 25 bp, Homo sapien
gatcgtgccagcaacagagtgagcc

SEQ ID NO: 350248 - DNA, 25 bp, Homo sapien
ggagcaggcagtatctccacagacc

SEQ ID NO: 350249 - DNA, 25 bp, Homo sapien
cggccttcgagatgcgaagtgcgca

SEQ ID NO: 350250 - DNA, 25 bp, Homo sapien
ctgaagcttgctggccggccttcga

SEQ ID NO: 350251 - DNA, 25 bp, Homo sapien
gagatgcgaagtgcgcacacctgtg

SEQ ID NO: 350252 - DNA, 25 bp, Homo sapien
ttgctggccggccttcgagatgcga

SEQ ID NO: 350253 - DNA, 25 bp, Homo sapien
ttctgatctcccagatcggaaagag

SEQ ID NO: 350254 - DNA, 25 bp, Homo sapien
agtgcggccctccaagtgcggtcct

SEQ ID NO: 350255 - DNA, 25 bp, Homo sapien
gtgaggcgctgggacacttctcccg

SEQ ID NO: 350256 - DNA, 25 bp, Homo sapien
ggcctcggacttcaggttcagatca

SEQ ID NO: 350257 - DNA, 25 bp, Homo sapien
ccactctacttctctccggcccgct

SEQ ID NO: 350258 - DNA, 25 bp, Homo sapien
gatgaggagcctccgaaaggcctgt

SEQ ID NO: 350259 - DNA, 25 bp, Homo sapien
gaggagcctccgaaaggcctgtttc

SEQ ID NO: 350260 - DNA, 25 bp, Homo sapien
cgagggatgaggagcctccgaaagg

SEQ ID NO: 350261 - DNA, 25 bp, Homo sapien
aaccctcaaaaactggccaggagca

SEQ ID NO: 350262 - DNA, 25 bp, Homo sapien
ctgtaatcccaggctgaagcgggca

SEQ ID NO: 350263 - DNA, 25 bp, Homo sapien
catacttactaaaagatacaaaaat

SEQ ID NO: 350264 - DNA, 25 bp, Homo sapien
gcagtagaacagcttgaatccagga

SEQ ID NO: 350265 - DNA, 25 bp, Homo sapien
ccagcccagaatggtgagaggtcac

SEQ ID NO: 350266 - DNA, 25 bp, Homo sapien
aactgagggtgagtcgttcccagcc

SEQ ID NO: 350267 - DNA, 25 bp, Homo sapien
cacccggaccattgacttgaaaaga

SEQ ID NO: 350268 - DNA, 25 bp, Homo sapien
cctcaaaggcctaagataaacggat

SEQ ID NO: 350269 - DNA, 25 bp, Homo sapien
ccacaaggcccagggtgatggcaga

SEQ ID NO: 350270 - DNA, 25 bp, Homo sapien
ggcaaagagtgcgagaaggacaccc

SEQ ID NO: 350271 - DNA, 25 bp, Homo sapien
ccagctaggcatgaccaatttctca

SEQ ID NO: 350272 - DNA, 25 bp, Homo sapien
ggtcaacagaatctgcaggctcctc

SEQ ID NO: 350273 - DNA, 25 bp, Homo sapien
gaattcactggctttctgaataggc

SEQ ID NO: 350274 - DNA, 25 bp, Homo sapien
gcattgaattcactggctttctgaa

SEQ ID NO: 350275 - DNA, 25 bp, Homo sapien
taggcattgaattcactggctttct

SEQ ID NO: 350276 - DNA, 25 bp, Homo sapien
ttagtaggcattgaattcactggct

SEQ ID NO: 350277 - DNA, 25 bp, Homo sapien
cactgggtgctagcgaggtgtttct

SEQ ID NO: 350278 - DNA, 25 bp, Homo sapien
cacactgggtgctagcgaggtgttt

SEQ ID NO: 350279 - DNA, 25 bp, Homo sapien
cctgagggccgtgggcgagtcccgc

SEQ ID NO: 350280 - DNA, 25 bp, Homo sapien
gtccacactgggtgctagcgaggtg

SEQ ID NO: 350281 - DNA, 25 bp, Homo sapien
tgggtccgggcgctggacagaggtc

SEQ ID NO: 350282 - DNA, 25 bp, Homo sapien
gacagaggtcttagctcaaagcagg

SEQ ID NO: 350283 - DNA, 25 bp, Homo sapien
tccgggcgctggacagaggtcttag

SEQ ID NO: 350284 - DNA, 25 bp, Homo sapien
cgctggacagaggtcttagctcaaa

SEQ ID NO: 350285 - DNA, 25 bp, Homo sapien
atgagaaaagctgcggagaaggaag

SEQ ID NO: 350286 - DNA, 25 bp, Homo sapien
gctctacctgggatgatggccagga

SEQ ID NO: 350287 - DNA, 25 bp, Homo sapien
gatgagaaaagctgcggagaaggaa

SEQ ID NO: 350288 - DNA, 25 bp, Homo sapien
cagagagcaggcttgtcactggcca

SEQ ID NO: 350289 - DNA, 25 bp, Homo sapien
ggatgagtatgaaggcggtgacgaa

SEQ ID NO: 350290 - DNA, 25 bp, Homo sapien
cgaagagggtaattctggtgactaa

SEQ ID NO: 350291 - DNA, 25 bp, Homo sapien
ccagatgctgatggcacgggggtga

SEQ ID NO: 350292 - DNA, 25 bp, Homo sapien
actaagttctggtcactccctgaca

SEQ ID NO: 350293 - DNA, 25 bp, Homo sapien
aattccctctgtccccgcttttgct

SEQ ID NO: 350294 - DNA, 25 bp, Homo sapien
ccctcgggtcatggccttgataatt

SEQ ID NO: 350295 - DNA, 25 bp, Homo sapien
ccaccctcgggtcatggccttgata

SEQ ID NO: 350296 - DNA, 25 bp, Homo sapien
gctctgacggagcacatcctgtggg

SEQ ID NO: 350297 - DNA, 25 bp, Homo sapien
tgattccagctgagcccctactttg

SEQ ID NO: 350298 - DNA, 25 bp, Homo sapien
tctgcagtgaaccaatccgtaggct

SEQ ID NO: 350299 - DNA, 25 bp, Homo sapien
gaagggcctggaatttgtcaagaca

SEQ ID NO: 350300 - DNA, 25 bp, Homo sapien
acaaagctcgagcaggacaggaacc

SEQ ID NO: 350301 - DNA, 25 bp, Homo sapien
ccaccatggccaccaaagggctggg

SEQ ID NO: 350302 - DNA, 25 bp, Homo sapien
gcctcaacctcctcctgtatagctg

SEQ ID NO: 350303 - DNA, 25 bp, Homo sapien
aacctcctcctgtatagctggacta

SEQ ID NO: 350304 - DNA, 25 bp, Homo sapien
ctcctcctgtatagctggactacag

SEQ ID NO: 350305 - DNA, 25 bp, Homo sapien
caaggagtgatcctgacttcccagg

SEQ ID NO: 350306 - DNA, 25 bp, Homo sapien
cactctggccagaggaggaaattct

SEQ ID NO: 350307 - DNA, 25 bp, Homo sapien
tgcaataagcattaggcctcccctg

SEQ ID NO: 350308 - DNA, 25 bp, Homo sapien
agcttacagggaaccacacaaccag

SEQ ID NO: 350309 - DNA, 25 bp, Homo sapien
ccactgggctgtgtatgcaggacaa

SEQ ID NO: 350310 - DNA, 25 bp, Homo sapien
tgtgcacgggtccataaacagaagg

SEQ ID NO: 350311 - DNA, 25 bp, Homo sapien
ccaatggtatagacgggcctggaga

SEQ ID NO: 350312 - DNA, 25 bp, Homo sapien
tgatgaaggtcagcccagagatctt

SEQ ID NO: 350313 - DNA, 25 bp, Homo sapien
gactccgagaagtgccctgaacgag

SEQ ID NO: 350314 - DNA, 25 bp, Homo sapien
gcagacagcctagtccattatatag

SEQ ID NO: 350315 - DNA, 25 bp, Homo sapien
tgaacgagttcacctccgaagggaa

SEQ ID NO: 350316 - DNA, 25 bp, Homo sapien
tcagattgctaggaccaaaaaggcc

SEQ ID NO: 350317 - DNA, 25 bp, Homo sapien
gacagagctggtactagccctgacc

SEQ ID NO: 350318 - DNA, 25 bp, Homo sapien
tatcaacctcgtcaatggagaggca

SEQ ID NO: 350319 - DNA, 25 bp, Homo sapien
caggaggtctccatcgagtgctagc

SEQ ID NO: 350320 - DNA, 25 bp, Homo sapien
tggtattcaaagcatcgggcccagc

SEQ ID NO: 350321 - DNA, 25 bp, Homo sapien
ttaggaggctgaggcatgagaatcg

SEQ ID NO: 350322 - DNA, 25 bp, Homo sapien
cttgaacctgggaggcagaggttgc

SEQ ID NO: 350323 - DNA, 25 bp, Homo sapien
ggcacacacatgtaatcctagctat

SEQ ID NO: 350324 - DNA, 25 bp, Homo sapien
agtgagctgagatcgcgccgttgca

SEQ ID NO: 350325 - DNA, 25 bp, Homo sapien
cttttttctataagatcttcaaggc

SEQ ID NO: 350326 - DNA, 25 bp, Homo sapien
ttttctataagatcttcaaggctga

SEQ ID NO: 350327 - DNA, 25 bp, Homo sapien
taaagtttgttattctataacacag

SEQ ID NO: 350328 - DNA, 25 bp, Homo sapien
tgttcacagagtaattaagattgta

SEQ ID NO: 350329 - DNA, 25 bp, Homo sapien
ggtaaacagaacacttgtggctcta

SEQ ID NO: 350330 - DNA, 25 bp, Homo sapien
ttgccagagtgaaaagagtagtaac

SEQ ID NO: 350331 - DNA, 25 bp, Homo sapien
tagggactagagaatttttgaaaca

SEQ ID NO: 350332 - DNA, 25 bp, Homo sapien
gcactaacttgtactcaacccttag

SEQ ID NO: 350333 - DNA, 25 bp, Homo sapien
aaaagtttagtctactgacactcaa

SEQ ID NO: 350334 - DNA, 25 bp, Homo sapien
tgaaaagtttagtctactgacactc

SEQ ID NO: 350335 - DNA, 25 bp, Homo sapien
aagtttagtctactgacactcaatg

SEQ ID NO: 350336 - DNA, 25 bp, Homo sapien
ttagtctactgacactcaatgttat

SEQ ID NO: 350337 - DNA, 25 bp, Homo sapien
gtaaccactccttagctattgcatg

SEQ ID NO: 350338 - DNA, 25 bp, Homo sapien
gactcatagcggtactgccttaatg

SEQ ID NO: 350339 - DNA, 25 bp, Homo sapien
ggttgagtgacataagcacctctgt

SEQ ID NO: 350340 - DNA, 25 bp, Homo sapien
cactactgtgactgcattgggtcag

SEQ ID NO: 350341 - DNA, 25 bp, Homo sapien
gcctcccaaagtggttcttattata

SEQ ID NO: 350342 - DNA, 25 bp, Homo sapien
gtggttcttattataaaaataatca

SEQ ID NO: 350343 - DNA, 25 bp, Homo sapien
gaaatagaacgatactccaaaggaa

SEQ ID NO: 350344 - DNA, 25 bp, Homo sapien
gctagagaaatagaacgatactcca

SEQ ID NO: 350345 - DNA, 25 bp, Homo sapien
aaaaaataaggcaatagctagagaa

SEQ ID NO: 350346 - DNA, 25 bp, Homo sapien
tagctagagaaatagaacgatactc

SEQ ID NO: 350347 - DNA, 25 bp, Homo sapien
agagtgacatccagtaagacgagga

SEQ ID NO: 350348 - DNA, 25 bp, Homo sapien
aaattaggtcggcaaggacgagagt

SEQ ID NO: 350349 - DNA, 25 bp, Homo sapien
cagtaagacgaggaaaactccaaat

SEQ ID NO: 350350 - DNA, 25 bp, Homo sapien
gtgaaaattaggtcggcaaggacga

SEQ ID NO: 350351 - DNA, 25 bp, Homo sapien
ttagtattaagctgcccagtggcag

SEQ ID NO: 350352 - DNA, 25 bp, Homo sapien
ggcatttgtccctatagctatacta

SEQ ID NO: 350353 - DNA, 25 bp, Homo sapien
aactgtaatgccttagaatctcaga

SEQ ID NO: 350354 - DNA, 25 bp, Homo sapien
gccactgatcaggtaccaaaatgtt

SEQ ID NO: 350355 - DNA, 25 bp, Homo sapien
aaggatgatacaattgaatgcacaa

SEQ ID NO: 350356 - DNA, 25 bp, Homo sapien
gatgatacaattgaatgcacaattt

SEQ ID NO: 350357 - DNA, 25 bp, Homo sapien
caaatgcaaaggatgatacaattga

SEQ ID NO: 350358 - DNA, 25 bp, Homo sapien
gaatgcacaattttcttaatcttac

SEQ ID NO: 350359 - DNA, 25 bp, Homo sapien
tcatcaaactttggccagatctcag

SEQ ID NO: 350360 - DNA, 25 bp, Homo sapien
cagatatacattagcaagagtcgca

SEQ ID NO: 350361 - DNA, 25 bp, Homo sapien
gtttactatgctatccagaagacag

SEQ ID NO: 350362 - DNA, 25 bp, Homo sapien
caaggagtatagcatgaagacagaa

SEQ ID NO: 350363 - DNA, 25 bp, Homo sapien
caatgatggctagtgttaagtgtgg

SEQ ID NO: 350364 - DNA, 25 bp, Homo sapien
cagatacatttgattacatgaggat

SEQ ID NO: 350365 - DNA, 25 bp, Homo sapien
tatcaatagcgtcacaatcattccc

SEQ ID NO: 350366 - DNA, 25 bp, Homo sapien
tcaaagaacgtgcattagaacaaat

SEQ ID NO: 350367 - DNA, 25 bp, Homo sapien
gaagtgcatgcatcaaagcttaaga

SEQ ID NO: 350368 - DNA, 25 bp, Homo sapien
tacagatctacagagttttcgaagt

SEQ ID NO: 350369 - DNA, 25 bp, Homo sapien
gcttaagaatgactatatgtgggta

SEQ ID NO: 350370 - DNA, 25 bp, Homo sapien
taatgacctcttacgttattttcag

SEQ ID NO: 350371 - DNA, 25 bp, Homo sapien
aatatatgatatgccaaagccaagc

SEQ ID NO: 350372 - DNA, 25 bp, Homo sapien
aatgaatatatgatatgccaaagcc

SEQ ID NO: 350373 - DNA, 25 bp, Homo sapien
gaatgaatatatgatatgccaaagc

SEQ ID NO: 350374 - DNA, 25 bp, Homo sapien
gaatatatgatatgccaaagccaag

SEQ ID NO: 350375 - DNA, 25 bp, Homo sapien
tccagcattgacacaagctggtgaa

SEQ ID NO: 350376 - DNA, 25 bp, Homo sapien
tctccagcattgacacaagctggtg

SEQ ID NO: 350377 - DNA, 25 bp, Homo sapien
ctccagcattgacacaagctggtga

SEQ ID NO: 350378 - DNA, 25 bp, Homo sapien
tcaaacttggaaagtcgttctaaca

SEQ ID NO: 350379 - DNA, 25 bp, Homo sapien
caaacttggaaagtcgttctaacat

SEQ ID NO: 350380 - DNA, 25 bp, Homo sapien
tgaagcaacattttcagcatctcca

SEQ ID NO: 350381 - DNA, 25 bp, Homo sapien
atatgaagcaacattttcagcatct

SEQ ID NO: 350382 - DNA, 25 bp, Homo sapien
gtatgggtcaaggattttgtccacc

SEQ ID NO: 350383 - DNA, 25 bp, Homo sapien
gtcatatctgttatgaggtctcttt

SEQ ID NO: 350384 - DNA, 25 bp, Homo sapien
tagtcttggtaggtcgtatgggtca

SEQ ID NO: 350385 - DNA, 25 bp, Homo sapien
cttgaggtagaattgttcagtggtt

SEQ ID NO: 350386 - DNA, 25 bp, Homo sapien
tttgtaacggatagctgtgctgggt

SEQ ID NO: 350387 - DNA, 25 bp, Homo sapien
gtaacggatagctgtgctgggtata

SEQ ID NO: 350388 - DNA, 25 bp, Homo sapien
taatgtctgggttgaatgtatctgg

SEQ ID NO: 350389 - DNA, 25 bp, Homo sapien
tataatattcttggccgaaagattt

SEQ ID NO: 350390 - DNA, 25 bp, Homo sapien
tatgtttatgattgggttctattac

SEQ ID NO: 350391 - DNA, 25 bp, Homo sapien
gtattaccttacatctcactgagtt

SEQ ID NO: 350392 - DNA, 25 bp, Homo sapien
tatgaatgggtcttggatgtctgtt

SEQ ID NO: 350393 - DNA, 25 bp, Homo sapien
tctatgcatctggtgaaaaagtcac

SEQ ID NO: 350394 - DNA, 25 bp, Homo sapien
ttagctggcctgacagtctgctggc

SEQ ID NO: 350395 - DNA, 25 bp, Homo sapien
ccaggatgtggacacgaggctgctc

SEQ ID NO: 350396 - DNA, 25 bp, Homo sapien
tttctcaggctcatgcaaggtcgca

SEQ ID NO: 350397 - DNA, 25 bp, Homo sapien
cctaagggcatgtcttctgggagta

SEQ ID NO: 350398 - DNA, 25 bp, Homo sapien
tcaaataccactagtaactcttcac

SEQ ID NO: 350399 - DNA, 25 bp, Homo sapien
cttgcttgcccttgtaattttctgc

SEQ ID NO: 350400 - DNA, 25 bp, Homo sapien
gcttgcccttgtaattttctgcctt

SEQ ID NO: 350401 - DNA, 25 bp, Homo sapien
ttctgccttctcacgttcaaatacc

SEQ ID NO: 350402 - DNA, 25 bp, Homo sapien
attttgtggaatgttcgttcatgtg

SEQ ID NO: 350403 - DNA, 25 bp, Homo sapien
tgttcgttcatgtgttactgttgtc

SEQ ID NO: 350404 - DNA, 25 bp, Homo sapien
tggaatgttcgttcatgtgttactg

SEQ ID NO: 350405 - DNA, 25 bp, Homo sapien
cgttcatgtgttactgttgtcattt

SEQ ID NO: 350406 - DNA, 25 bp, Homo sapien
gacaccagggctgctcctttaaatt

SEQ ID NO: 350407 - DNA, 25 bp, Homo sapien
cttttactgataggtgacaccaggg

SEQ ID NO: 350408 - DNA, 25 bp, Homo sapien
ttttactgataggtgacaccagggc

SEQ ID NO: 350409 - DNA, 25 bp, Homo sapien
ctcctttaaattcacctgtgtgtgg

SEQ ID NO: 350410 - DNA, 25 bp, Homo sapien
ggtgcctcctcggttgctcctttaa

SEQ ID NO: 350411 - DNA, 25 bp, Homo sapien
ctcctcggttgctcctttaaattcg

SEQ ID NO: 350412 - DNA, 25 bp, Homo sapien
tcctttaaattcgtttgtctgtgga

SEQ ID NO: 350413 - DNA, 25 bp, Homo sapien
ctttctttcgcaggtgcctcctcgg

SEQ ID NO: 350414 - DNA, 25 bp, Homo sapien
tcaatgctgactgccgtcagctcat

SEQ ID NO: 350415 - DNA, 25 bp, Homo sapien
ctccatcaatgctgactgccgtcag

SEQ ID NO: 350416 - DNA, 25 bp, Homo sapien
gctgactgccgtcagctcatttgga

SEQ ID NO: 350417 - DNA, 25 bp, Homo sapien
actgccgtcagctcatttggatggg

SEQ ID NO: 350418 - DNA, 25 bp, Homo sapien
ttttcaccaatcctagttgtctttc

SEQ ID NO: 350419 - DNA, 25 bp, Homo sapien
ctccttggttgctcctttaaattca

SEQ ID NO: 350420 - DNA, 25 bp, Homo sapien
tctttcgcaggtgcctccttggttg

SEQ ID NO: 350421 - DNA, 25 bp, Homo sapien
ctttctttcgcaggtgcctccttgg

SEQ ID NO: 350422 - DNA, 25 bp, Homo sapien
tccttggttgctcctttaaattcat

SEQ ID NO: 350423 - DNA, 25 bp, Homo sapien
caaggaaggcctgtaggctcagaga

SEQ ID NO: 350424 - DNA, 25 bp, Homo sapien
ccaaaagggatgcaaactactccca

SEQ ID NO: 350425 - DNA, 25 bp, Homo sapien
ctttcacatcatgcactggccaggt

SEQ ID NO: 350426 - DNA, 25 bp, Homo sapien
aagctaattttcactcctggagaag

SEQ ID NO: 350427 - DNA, 25 bp, Homo sapien
agttaacaaatgctgacaacgctgt

SEQ ID NO: 350428 - DNA, 25 bp, Homo sapien
aaacagttaacaaatgctgacaacg

SEQ ID NO: 350429 - DNA, 25 bp, Homo sapien
gaaaaacagttaacaaatgctgaca

SEQ ID NO: 350430 - DNA, 25 bp, Homo sapien
taacaaatgctgacaacgctgtttt

SEQ ID NO: 350431 - DNA, 25 bp, Homo sapien
tgtccccaaatttccagtaactcaa

SEQ ID NO: 350432 - DNA, 25 bp, Homo sapien
tttatcataaaattaccaaactgtc

SEQ ID NO: 350433 - DNA, 25 bp, Homo sapien
actttatcataaaattaccaaactg

SEQ ID NO: 350434 - DNA, 25 bp, Homo sapien
ccagtaactcaattatgctgatacc

SEQ ID NO: 350435 - DNA, 25 bp, Homo sapien
tcatataaaacataaaaagggtcca

SEQ ID NO: 350436 - DNA, 25 bp, Homo sapien
cataaaaagggtccaatcatttact

SEQ ID NO: 350437 - DNA, 25 bp, Homo sapien
tcaaatagagtcagctaaaagtagc

SEQ ID NO: 350438 - DNA, 25 bp, Homo sapien
agtggcatctttcaggcagtcaaga

SEQ ID NO: 350439 - DNA, 25 bp, Homo sapien
gttcttatcaaccaatatcatgttt

SEQ ID NO: 350440 - DNA, 25 bp, Homo sapien
caagagtcattaaaactactccaaa

SEQ ID NO: 350441 - DNA, 25 bp, Homo sapien
gaacgacttagtcattgccaggcca

SEQ ID NO: 350442 - DNA, 25 bp, Homo sapien
cctgcaatgaggagatagaacgact

SEQ ID NO: 350443 - DNA, 25 bp, Homo sapien
cagcacatcttttgggacccctgag

SEQ ID NO: 350444 - DNA, 25 bp, Homo sapien
tggctaccctgctgtggcgaaaaca

SEQ ID NO: 350445 - DNA, 25 bp, Homo sapien
aggccctgaacgtcttctcaaatcc

SEQ ID NO: 350446 - DNA, 25 bp, Homo sapien
atcccaaaatgtggattccaaccca

SEQ ID NO: 350447 - DNA, 25 bp, Homo sapien
tgaacgtcttctcaaatccccggga

SEQ ID NO: 350448 - DNA, 25 bp, Homo sapien
agaatgcgccttcccgtcttcggtg

SEQ ID NO: 350449 - DNA, 25 bp, Homo sapien
ctgtcgggtcttgcccctcgggcgg

SEQ ID NO: 350450 - DNA, 25 bp, Homo sapien
aggcagccctaaatccagcctccca

SEQ ID NO: 350451 - DNA, 25 bp, Homo sapien
cgcgcgccccgctgtcgggtcttgc

SEQ ID NO: 350452 - DNA, 25 bp, Homo sapien
cctcgggcggtaccgcccaggcagc

SEQ ID NO: 350453 - DNA, 25 bp, Homo sapien
tgacggccaagagcggatgcagccc

SEQ ID NO: 350454 - DNA, 25 bp, Homo sapien
gcgtgagtgtgacggccaagagcgg

SEQ ID NO: 350455 - DNA, 25 bp, Homo sapien
ccaagagcggatgcagcccgggatc

SEQ ID NO: 350456 - DNA, 25 bp, Homo sapien
gagtgtgacggccaagagcggatgc

SEQ ID NO: 350457 - DNA, 25 bp, Homo sapien
gcccctcggccatttcctcgcgcgg

SEQ ID NO: 350458 - DNA, 25 bp, Homo sapien
tccggcccctcggccatttcctcgc

SEQ ID NO: 350459 - DNA, 25 bp, Homo sapien
ctcggccatttcctcgcgcggcggc

SEQ ID NO: 350460 - DNA, 25 bp, Homo sapien
cctcggccatttcctcgcgcggcgg

SEQ ID NO: 350461 - DNA, 25 bp, Homo sapien
gctaagtgcaggcgcggggggggtc

SEQ ID NO: 350462 - DNA, 25 bp, Homo sapien
cggggctaagtgcaggcgcgggggg

SEQ ID NO: 350463 - DNA, 25 bp, Homo sapien
gggcgcggggctaagtgcaggcgcg

SEQ ID NO: 350464 - DNA, 25 bp, Homo sapien
tgcaggcgcggggggggtccctaga

SEQ ID NO: 350465 - DNA, 25 bp, Homo sapien
ggaaggagtgaagcctgcgggcggg

SEQ ID NO: 350466 - DNA, 25 bp, Homo sapien
ggcagctccggaggcggccaccggg

SEQ ID NO: 350467 - DNA, 25 bp, Homo sapien
ggagtgaagcctgcgggcgggtgtg

SEQ ID NO: 350468 - DNA, 25 bp, Homo sapien
gcaagaactgaagccgggggaacca

SEQ ID NO: 350469 - DNA, 25 bp, Homo sapien
ttcaagtcggccaacactgcggcca

SEQ ID NO: 350470 - DNA, 25 bp, Homo sapien
gacctcgggctgctcggcctggtct

SEQ ID NO: 350471 - DNA, 25 bp, Homo sapien
tgtgcctccctgcagatgccggctg

SEQ ID NO: 350472 - DNA, 25 bp, Homo sapien
tgcaaaggggcgttgccaactgtct

SEQ ID NO: 350473 - DNA, 25 bp, Homo sapien
tgggctgggaggcagctgcaatgac

SEQ ID NO: 350474 - DNA, 25 bp, Homo sapien
gctgggctgggaggcagctgcaatg

SEQ ID NO: 350475 - DNA, 25 bp, Homo sapien
ggggaggctggcagagagctgggct

SEQ ID NO: 350476 - DNA, 25 bp, Homo sapien
tataacatgtcccacggggaggctg

SEQ ID NO: 350477 - DNA, 25 bp, Homo sapien
ctccaggtctctcagtgaggcccac

SEQ ID NO: 350478 - DNA, 25 bp, Homo sapien
gggctttcgaagcctgccttcccca

SEQ ID NO: 350479 - DNA, 25 bp, Homo sapien
agcaaacccattctccaggtctctc

SEQ ID NO: 350480 - DNA, 25 bp, Homo sapien
cattctccaggtctctcagtgaggc

SEQ ID NO: 350481 - DNA, 25 bp, Homo sapien
tggaggagatctcacagccaggaca

SEQ ID NO: 350482 - DNA, 25 bp, Homo sapien
ggggattgctcagattcccctccag

SEQ ID NO: 350483 - DNA, 25 bp, Homo sapien
ccaggacagagtcgccgcctgctcc

SEQ ID NO: 350484 - DNA, 25 bp, Homo sapien
cagggtaggagtcaggggcggtgga

SEQ ID NO: 350485 - DNA, 25 bp, Homo sapien
tcccaagcctgagcaggtagcggca

SEQ ID NO: 350486 - DNA, 25 bp, Homo sapien
tgtcccaagcctgagcaggtagcgg

SEQ ID NO: 350487 - DNA, 25 bp, Homo sapien
cctgcaaccgcagtggacggctcca

SEQ ID NO: 350488 - DNA, 25 bp, Homo sapien
ggctccagcgaccatgaccaagaag

SEQ ID NO: 350489 - DNA, 25 bp, Homo sapien
ctgctcgtagcccaggaagccgtgg

SEQ ID NO: 350490 - DNA, 25 bp, Homo sapien
tcgtagcccaggaagccgtggcatc

SEQ ID NO: 350491 - DNA, 25 bp, Homo sapien
ctcgtagcccaggaagccgtggcat

SEQ ID NO: 350492 - DNA, 25 bp, Homo sapien
ttactgctcgtagcccaggaagccg

SEQ ID NO: 350493 - DNA, 25 bp, Homo sapien
gggcagatgcgccactgaatttcct

SEQ ID NO: 350494 - DNA, 25 bp, Homo sapien
tgggcagatgcgccactgaatttcc

SEQ ID NO: 350495 - DNA, 25 bp, Homo sapien
ccactgatgttccagctgagcacag

SEQ ID NO: 350496 - DNA, 25 bp, Homo sapien
tgtacatgggctcatcgggggtttt

SEQ ID NO: 350497 - DNA, 25 bp, Homo sapien
catgggctcatcgggggttttccag

SEQ ID NO: 350498 - DNA, 25 bp, Homo sapien
acatgggctcatcgggggttttcca

SEQ ID NO: 350499 - DNA, 25 bp, Homo sapien
ctctgttgtcaatctgggctgggcc

SEQ ID NO: 350500 - DNA, 25 bp, Homo sapien
ctgagagcaaagagggcacgtcctt

SEQ ID NO: 350501 - DNA, 25 bp, Homo sapien
agaaagtcatgagcaacaggccaca

SEQ ID NO: 350502 - DNA, 25 bp, Homo sapien
cctgtccagcaggtaaaaacggcag

SEQ ID NO: 350503 - DNA, 25 bp, Homo sapien
cctgcggtaggagatgttgtccagc

SEQ ID NO: 350504 - DNA, 25 bp, Homo sapien
agatgttgtccagcgggagggaagc

SEQ ID NO: 350505 - DNA, 25 bp, Homo sapien
tgtccagcgggagggaagcctgcat

SEQ ID NO: 350506 - DNA, 25 bp, Homo sapien
ccctgcggtaggagatgttgtccag

SEQ ID NO: 350507 - DNA, 25 bp, Homo sapien
ctccaggtccaggtggctgccgaac

SEQ ID NO: 350508 - DNA, 25 bp, Homo sapien
cgctccaggtccaggtggctgccga

SEQ ID NO: 350509 - DNA, 25 bp, Homo sapien
gctccaggtccaggtggctgccgaa

SEQ ID NO: 350510 - DNA, 25 bp, Homo sapien
gcgctccaggtccaggtggctgccg

SEQ ID NO: 350511 - DNA, 25 bp, Homo sapien
tggacaatgatgatgggcgacacca

SEQ ID NO: 350512 - DNA, 25 bp, Homo sapien
atggactggaccaccacagcgatga

SEQ ID NO: 350513 - DNA, 25 bp, Homo sapien
tgtcatagcccacgttgaggtcccg

SEQ ID NO: 350514 - DNA, 25 bp, Homo sapien
tgcgtctccaccgagaacaggaagg

SEQ ID NO: 350515 - DNA, 25 bp, Homo sapien
tgctccgccaccacccgccgccggg

SEQ ID NO: 350516 - DNA, 25 bp, Homo sapien
ctgctccgccaccacccgccgccgg

SEQ ID NO: 350517 - DNA, 25 bp, Homo sapien
gctccgccaccacccgccgccgggc

SEQ ID NO: 350518 - DNA, 25 bp, Homo sapien
gccgccgggccccccgccgcaggca

SEQ ID NO: 350519 - DNA, 25 bp, Homo sapien
tcaggttggcgaagtacacgttgca

SEQ ID NO: 350520 - DNA, 25 bp, Homo sapien
ggaagaaggcgatacaccagaagag

SEQ ID NO: 350521 - DNA, 25 bp, Homo sapien
aaggccgcggagaagatcatgagca

SEQ ID NO: 350522 - DNA, 25 bp, Homo sapien
tgtagcgctgcgacttgttgctcag

SEQ ID NO: 350523 - DNA, 25 bp, Homo sapien
ctgaagccggcgtggtcacctggga

SEQ ID NO: 350524 - DNA, 25 bp, Homo sapien
tgaagccggcgtggtcacctgggaa

SEQ ID NO: 350525 - DNA, 25 bp, Homo sapien
gtgctgcagacgagatctcttcctg

SEQ ID NO: 350526 - DNA, 25 bp, Homo sapien
ctggtgctgcagacgagatctcttc

SEQ ID NO: 350527 - DNA, 25 bp, Homo sapien
tggtgctgcagacgagatctcttcc

SEQ ID NO: 350528 - DNA, 25 bp, Homo sapien
ggtgctgcagacgagatctcttcct

SEQ ID NO: 350529 - DNA, 25 bp, Homo sapien
ggagccgatcccctgatggctacag

SEQ ID NO: 350530 - DNA, 25 bp, Homo sapien
gagccgatcccctgatggctacaga

SEQ ID NO: 350531 - DNA, 25 bp, Homo sapien
gctgttctttctggttgaaattctc

SEQ ID NO: 350532 - DNA, 25 bp, Homo sapien
aagtttattcctgtctctgggcctt

SEQ ID NO: 350533 - DNA, 25 bp, Homo sapien
caagtttattcctgtctctgggcct

SEQ ID NO: 350534 - DNA, 25 bp, Homo sapien
tgcactggctgttctttctggttga

SEQ ID NO: 350535 - DNA, 25 bp, Homo sapien
ctgggcggagggtccgacgagagtc

SEQ ID NO: 350536 - DNA, 25 bp, Homo sapien
tcccaaggcgcgatccggcgggcgg

SEQ ID NO: 350537 - DNA, 25 bp, Homo sapien
gcgagcgggcgctacatcccaaggc

SEQ ID NO: 350538 - DNA, 25 bp, Homo sapien
acgagagtccgggaggcggcgagcg

SEQ ID NO: 350539 - DNA, 25 bp, Homo sapien
catcacatgaatgctcagtgcgtgg

SEQ ID NO: 350540 - DNA, 25 bp, Homo sapien
catgaatgctcagtgcgtggatgca

SEQ ID NO: 350541 - DNA, 25 bp, Homo sapien
ggcagacagccaggactgatgttcc

SEQ ID NO: 350542 - DNA, 25 bp, Homo sapien
gagactcaagcagcctgagtgccct

SEQ ID NO: 350543 - DNA, 25 bp, Homo sapien
ccacagacggccgtggcagctgttg

SEQ ID NO: 350544 - DNA, 25 bp, Homo sapien
cctatagaaaaaccgccacagacgg

SEQ ID NO: 350545 - DNA, 25 bp, Homo sapien
tttagcacctatagaaaaaccgcca

SEQ ID NO: 350546 - DNA, 25 bp, Homo sapien
cagctgttgctaaggagacgctccc

SEQ ID NO: 350547 - DNA, 25 bp, Homo sapien
agggcaggagctgtcccatgcatgc

SEQ ID NO: 350548 - DNA, 25 bp, Homo sapien
tggtgtttgccggaagtcctcggaa

SEQ ID NO: 350549 - DNA, 25 bp, Homo sapien
gctctgtgactcctgaatccgggct

SEQ ID NO: 350550 - DNA, 25 bp, Homo sapien
tgagagccgcgttttggtcaccgag

SEQ ID NO: 350551 - DNA, 25 bp, Homo sapien
gaaagctgagaatgaatccccaggg

SEQ ID NO: 350552 - DNA, 25 bp, Homo sapien
ttaggaaatggactcgtccgcgcct

SEQ ID NO: 350553 - DNA, 25 bp, Homo sapien
aaatggactcgtccgcgcctccggg

SEQ ID NO: 350554 - DNA, 25 bp, Homo sapien
ccaccccgcactcggttaggaaatg

SEQ ID NO: 350555 - DNA, 25 bp, Homo sapien
cactcggttaggaaatggactcgtc

SEQ ID NO: 350556 - DNA, 25 bp, Homo sapien
tttcctagaagtttgctgggcgcgg

SEQ ID NO: 350557 - DNA, 25 bp, Homo sapien
tgttccgaatcctcggcgacctgag

SEQ ID NO: 350558 - DNA, 25 bp, Homo sapien
gcacgactgactggctggaccatga

SEQ ID NO: 350559 - DNA, 25 bp, Homo sapien
gaaactttgcggagctccacttcca

SEQ ID NO: 350560 - DNA, 25 bp, Homo sapien
atttattgtttagacagaatctagc

SEQ ID NO: 350561 - DNA, 25 bp, Homo sapien
tcatgatcagcaagactggagaggc

SEQ ID NO: 350562 - DNA, 25 bp, Homo sapien
taggtcctgggatgacagcaatgct

SEQ ID NO: 350563 - DNA, 25 bp, Homo sapien
tggaatcagtggctatcctgcccca

SEQ ID NO: 350564 - DNA, 25 bp, Homo sapien
gggcactctacctggctaactggat

SEQ ID NO: 350565 - DNA, 25 bp, Homo sapien
aaataaccacttgcttgcccagaga

SEQ ID NO: 350566 - DNA, 25 bp, Homo sapien
tagatgagaagtccacacaacgaat

SEQ ID NO: 350567 - DNA, 25 bp, Homo sapien
gctgcgagagagtagggcatccctt

SEQ ID NO: 350568 - DNA, 25 bp, Homo sapien
gcactgatcccaagcaaaagccact

SEQ ID NO: 350569 - DNA, 25 bp, Homo sapien
tatttcagcttatgctgaagaccta

SEQ ID NO: 350570 - DNA, 25 bp, Homo sapien
gatgagcaagcattcaggccttagc

SEQ ID NO: 350571 - DNA, 25 bp, Homo sapien
gacctacctgtatgttgcacattga

SEQ ID NO: 350572 - DNA, 25 bp, Homo sapien
caaaacctcgagtatagatcttaca

SEQ ID NO: 350573 - DNA, 25 bp, Homo sapien
tgatgtccctatcctgttgtagtga

SEQ ID NO: 350574 - DNA, 25 bp, Homo sapien
gacttaggctttagtcctccatgac

SEQ ID NO: 350575 - DNA, 25 bp, Homo sapien
gaactcacctaccttcagatggagg

SEQ ID NO: 350576 - DNA, 25 bp, Homo sapien
tgggtccatctgctataaagtcttg

SEQ ID NO: 350577 - DNA, 25 bp, Homo sapien
aaaaggatgccgaagaaaatctgca

SEQ ID NO: 350578 - DNA, 25 bp, Homo sapien
taagctgagtgcaaaaggatgccga

SEQ ID NO: 350579 - DNA, 25 bp, Homo sapien
gccgaagaaaatctgcacccagaag

SEQ ID NO: 350580 - DNA, 25 bp, Homo sapien
gatgccgaagaaaatctgcacccag

SEQ ID NO: 350581 - DNA, 25 bp, Homo sapien
ccagactggatcattttggtgggca

SEQ ID NO: 350582 - DNA, 25 bp, Homo sapien
tccacccagatgctgagatgctaca

SEQ ID NO: 350583 - DNA, 25 bp, Homo sapien
aattaatttcacagatggtccccag

SEQ ID NO: 350584 - DNA, 25 bp, Homo sapien
agcaatcagtcaaaacaggcccgag

SEQ ID NO: 350585 - DNA, 25 bp, Homo sapien
gctggagtcactaccacttgagtgg

SEQ ID NO: 350586 - DNA, 25 bp, Homo sapien
gaaaagacaaatcacgatggttggg

SEQ ID NO: 350587 - DNA, 25 bp, Homo sapien
gacagtgttccttaaaatgtaatta

SEQ ID NO: 350588 - DNA, 25 bp, Homo sapien
aaatgtaattaagtctgctggagtc

SEQ ID NO: 350589 - DNA, 25 bp, Homo sapien
ggagggtattggtaggcagtctgcc

SEQ ID NO: 350590 - DNA, 25 bp, Homo sapien
agggtattggtaggcagtctgcccc

SEQ ID NO: 350591 - DNA, 25 bp, Homo sapien
gagggtattggtaggcagtctgccc

SEQ ID NO: 350592 - DNA, 25 bp, Homo sapien
gaggagggtattggtaggcagtctg

SEQ ID NO: 350593 - DNA, 25 bp, Homo sapien
atattggtagctcccggaggctgtg

SEQ ID NO: 350594 - DNA, 25 bp, Homo sapien
ctatcatattggtagctcccggagg

SEQ ID NO: 350595 - DNA, 25 bp, Homo sapien
tcatattggtagctcccggaggctg

SEQ ID NO: 350596 - DNA, 25 bp, Homo sapien
tatcatattggtagctcccggaggc

SEQ ID NO: 350597 - DNA, 25 bp, Homo sapien
atcagtggctgtggctgctgcccag

SEQ ID NO: 350598 - DNA, 25 bp, Homo sapien
tcagtggctgtggctgctgcccaga

SEQ ID NO: 350599 - DNA, 25 bp, Homo sapien
cagtggctgtggctgctgcccagac

SEQ ID NO: 350600 - DNA, 25 bp, Homo sapien
tatcccactaaactgctggctagag

SEQ ID NO: 350601 - DNA, 25 bp, Homo sapien
ccactaaactgctggctagagctct

SEQ ID NO: 350602 - DNA, 25 bp, Homo sapien
ggcctatcccactaaactgctggct

SEQ ID NO: 350603 - DNA, 25 bp, Homo sapien
tcccactaaactgctggctagagct

SEQ ID NO: 350604 - DNA, 25 bp, Homo sapien
cataggtgccttgaccataggtgta

SEQ ID NO: 350605 - DNA, 25 bp, Homo sapien
tacgatcccgatagcttgcagagtc

SEQ ID NO: 350606 - DNA, 25 bp, Homo sapien
gccataagcagctgccccataggtg

SEQ ID NO: 350607 - DNA, 25 bp, Homo sapien
tgaagaagtggtccggtaacgagaa

SEQ ID NO: 350608 - DNA, 25 bp, Homo sapien
caattagtactgtaaaaatatactc

SEQ ID NO: 350609 - DNA, 25 bp, Homo sapien
gtattaaacatgtctccttgatatt

SEQ ID NO: 350610 - DNA, 25 bp, Homo sapien
taatggcagatataggacctaaaca

SEQ ID NO: 350611 - DNA, 25 bp, Homo sapien
gatatttagttatgctggccagcct

SEQ ID NO: 350612 - DNA, 25 bp, Homo sapien
aaagcattaggcagtgtcctttgct

SEQ ID NO: 350613 - DNA, 25 bp, Homo sapien
aaaaccaaacctcagaccagtctct

SEQ ID NO: 350614 - DNA, 25 bp, Homo sapien
gcgtaaagagataccttggcagtac

SEQ ID NO: 350615 - DNA, 25 bp, Homo sapien
ggactatcacaacaaacttcacgtt

SEQ ID NO: 350616 - DNA, 25 bp, Homo sapien
gccgcctcctctgtggtccacaagc

SEQ ID NO: 350617 - DNA, 25 bp, Homo sapien
ctcctctgtggtccacaagctgcat

SEQ ID NO: 350618 - DNA, 25 bp, Homo sapien
cctcctctgtggtccacaagctgca

SEQ ID NO: 350619 - DNA, 25 bp, Homo sapien
cgcctcctctgtggtccacaagctg

SEQ ID NO: 350620 - DNA, 25 bp, Homo sapien
ccttgttggtgctacgggctgttcg

SEQ ID NO: 350621 - DNA, 25 bp, Homo sapien
ttttggattgatagcctgattggcc

SEQ ID NO: 350622 - DNA, 25 bp, Homo sapien
tgataagctctctggcctgttttag

SEQ ID NO: 350623 - DNA, 25 bp, Homo sapien
caatacggtgcacataatcctctga

SEQ ID NO: 350624 - DNA, 25 bp, Homo sapien
gttgatcacaaacttgacatcttcc

SEQ ID NO: 350625 - DNA, 25 bp, Homo sapien
catagttgatcacaaacttgacatc

SEQ ID NO: 350626 - DNA, 25 bp, Homo sapien
tagttgatcacaaacttgacatctt

SEQ ID NO: 350627 - DNA, 25 bp, Homo sapien
agttgatcacaaacttgacatcttc

SEQ ID NO: 350628 - DNA, 25 bp, Homo sapien
caatgattgtctacgtgacctggga

SEQ ID NO: 350629 - DNA, 25 bp, Homo sapien
caacaggtgggaagcacgaatgcag

SEQ ID NO: 350630 - DNA, 25 bp, Homo sapien
gagccaaagctgttaagtacacacc

SEQ ID NO: 350631 - DNA, 25 bp, Homo sapien
cactgtgaagttatgaggccaaatc

SEQ ID NO: 350632 - DNA, 25 bp, Homo sapien
atttggttgccaagcgccggagaac

SEQ ID NO: 350633 - DNA, 25 bp, Homo sapien
cacacgctcgctctgtgaactggct

SEQ ID NO: 350634 - DNA, 25 bp, Homo sapien
gagcatgcatcaagggtccgtggca

SEQ ID NO: 350635 - DNA, 25 bp, Homo sapien
ctcctcctttgggaaaccgctgcag

SEQ ID NO: 350636 - DNA, 25 bp, Homo sapien
tttcctagcagaaagcaccagggtg

SEQ ID NO: 350637 - DNA, 25 bp, Homo sapien
tgtaaactgctttcaggcctccgcc

SEQ ID NO: 350638 - DNA, 25 bp, Homo sapien
gaatcgccaatcactaataaggagg

SEQ ID NO: 350639 - DNA, 25 bp, Homo sapien
gatccagacatgacctcagagggca

SEQ ID NO: 350640 - DNA, 25 bp, Homo sapien
tctgtagcaataaggatgggtgcct

SEQ ID NO: 350641 - DNA, 25 bp, Homo sapien
cacgggaggctacatctgtagcaat

SEQ ID NO: 350642 - DNA, 25 bp, Homo sapien
agcaataaggatgggtgcctttcca

SEQ ID NO: 350643 - DNA, 25 bp, Homo sapien
ctagcccacgggaggctacatctgt

SEQ ID NO: 350644 - DNA, 25 bp, Homo sapien
caatggcttcccttaagagtagtcc

SEQ ID NO: 350645 - DNA, 25 bp, Homo sapien
gcttcccttaagagtagtcctgaaa

SEQ ID NO: 350646 - DNA, 25 bp, Homo sapien
ttctcaatggcttcccttaagagta

SEQ ID NO: 350647 - DNA, 25 bp, Homo sapien
taaacaaaatatggcctcttccatt

SEQ ID NO: 350648 - DNA, 25 bp, Homo sapien
aaagtttaaagagccagcatcgtgg

SEQ ID NO: 350649 - DNA, 25 bp, Homo sapien
gcatcgtggcccttaaagaaccatg

SEQ ID NO: 350650 - DNA, 25 bp, Homo sapien
tattgtctgaacatagccacgttta

SEQ ID NO: 350651 - DNA, 25 bp, Homo sapien
gcacacgctaaaagtaccctcagta

SEQ ID NO: 350652 - DNA, 25 bp, Homo sapien
ggctataacagagaccaccatttgg

SEQ ID NO: 350653 - DNA, 25 bp, Homo sapien
tacagcttttgtcctaaaacagcag

SEQ ID NO: 350654 - DNA, 25 bp, Homo sapien
catgaacattcacttatgggcaggg

SEQ ID NO: 350655 - DNA, 25 bp, Homo sapien
gaaagtttgcctatccctgaaatag

SEQ ID NO: 350656 - DNA, 25 bp, Homo sapien
ttctggttgactcttgtctccatgg

SEQ ID NO: 350657 - DNA, 25 bp, Homo sapien
ctttctggttgactcttgtctccat

SEQ ID NO: 350658 - DNA, 25 bp, Homo sapien
tccatggatacacatagctggccaa

SEQ ID NO: 350659 - DNA, 25 bp, Homo sapien
cattaagtacccaatctctttctgg

SEQ ID NO: 350660 - DNA, 25 bp, Homo sapien
ctatcagaagaaaagtgaccaatat

SEQ ID NO: 350661 - DNA, 25 bp, Homo sapien
gttaattgccttggtgctatactca

SEQ ID NO: 350662 - DNA, 25 bp, Homo sapien
ctttaaagccaaatgctatcatgca

SEQ ID NO: 350663 - DNA, 25 bp, Homo sapien
gcaaactgcatggataggcattatt

SEQ ID NO: 350664 - DNA, 25 bp, Homo sapien
caatttttgtaaggtttgtcaggct

SEQ ID NO: 350665 - DNA, 25 bp, Homo sapien
tctctgcgcatccttcgagtcagat

SEQ ID NO: 350666 - DNA, 25 bp, Homo sapien
gcatccttcgagtcagatcatcaca

SEQ ID NO: 350667 - DNA, 25 bp, Homo sapien
tcacagcgtctctttgtctccacaa

SEQ ID NO: 350668 - DNA, 25 bp, Homo sapien
gagtcagatcatcacagcgtctctt

SEQ ID NO: 350669 - DNA, 25 bp, Homo sapien
cagcttgtaatcagcagagctaaat

SEQ ID NO: 350670 - DNA, 25 bp, Homo sapien
ttctcaggcctcaaaatatactggt

SEQ ID NO: 350671 - DNA, 25 bp, Homo sapien
ttatcagaaacctagcaatgctttt

SEQ ID NO: 350672 - DNA, 25 bp, Homo sapien
actgcagcaccaagacacaaaattg

SEQ ID NO: 350673 - DNA, 25 bp, Homo sapien
gcactcaactccagattgcctacgt

SEQ ID NO: 350674 - DNA, 25 bp, Homo sapien
tcaactccagattgcctacgttgat

SEQ ID NO: 350675 - DNA, 25 bp, Homo sapien
actcaactccagattgcctacgttg

SEQ ID NO: 350676 - DNA, 25 bp, Homo sapien
tctggaggatgttgtggttggcact

SEQ ID NO: 350677 - DNA, 25 bp, Homo sapien
ctgggtgtaatcacgaaggaaatcc

SEQ ID NO: 350678 - DNA, 25 bp, Homo sapien
cacgaaggaaatcctctgcaagctg

SEQ ID NO: 350679 - DNA, 25 bp, Homo sapien
caggttgcactccacatcagtgtct

SEQ ID NO: 350680 - DNA, 25 bp, Homo sapien
ttttggccaggttgcactccacatc

SEQ ID NO: 350681 - DNA, 25 bp, Homo sapien
tgtcagcttcgtccaatacaaggta

SEQ ID NO: 350682 - DNA, 25 bp, Homo sapien
caaggtaagtacatcggcgaagatt

SEQ ID NO: 350683 - DNA, 25 bp, Homo sapien
tggtcaacaattttacggatctggg

SEQ ID NO: 350684 - DNA, 25 bp, Homo sapien
cggcgaagatttgtctttcctgact

SEQ ID NO: 350685 - DNA, 25 bp, Homo sapien
ggagtggctatgcagatctcaacac

SEQ ID NO: 350686 - DNA, 25 bp, Homo sapien
ccaggagtggctatgcagatctcaa

SEQ ID NO: 350687 - DNA, 25 bp, Homo sapien
ctatcagacgtccaggagtggctat

SEQ ID NO: 350688 - DNA, 25 bp, Homo sapien
acgtccaggagtggctatgcagatc

SEQ ID NO: 350689 - DNA, 25 bp, Homo sapien
aaacaaaaccaatgatcgagccaat

SEQ ID NO: 350690 - DNA, 25 bp, Homo sapien
cgagccaatcgactaggtgcagtgg

SEQ ID NO: 350691 - DNA, 25 bp, Homo sapien
ggtggctgtactcaatgctgcagag

SEQ ID NO: 350692 - DNA, 25 bp, Homo sapien
caatgatcgagccaatcgactaggt

SEQ ID NO: 350693 - DNA, 25 bp, Homo sapien
ggagcacctccataaatacaagtac

SEQ ID NO: 350694 - DNA, 25 bp, Homo sapien
atttgccatagtcatcggccacctg

SEQ ID NO: 350695 - DNA, 25 bp, Homo sapien
gggacctttaggagcacctccataa

SEQ ID NO: 350696 - DNA, 25 bp, Homo sapien
tacaagtactcttcaatctagaaca

SEQ ID NO: 350697 - DNA, 25 bp, Homo sapien
gttaatatgaacaattgcaggcagg

SEQ ID NO: 350698 - DNA, 25 bp, Homo sapien
tatggctggtggttaatatgaacaa

SEQ ID NO: 350699 - DNA, 25 bp, Homo sapien
gattgggccatctcccctttccaag

SEQ ID NO: 350700 - DNA, 25 bp, Homo sapien
cctttccaagtatggctggtggtta

SEQ ID NO: 350701 - DNA, 25 bp, Homo sapien
atatcccggccactaagagccaacg

SEQ ID NO: 350702 - DNA, 25 bp, Homo sapien
cggccactaagagccaacggaaatc

SEQ ID NO: 350703 - DNA, 25 bp, Homo sapien
atcccggccactaagagccaacgga

SEQ ID NO: 350704 - DNA, 25 bp, Homo sapien
ccatatcccggccactaagagccaa

SEQ ID NO: 350705 - DNA, 25 bp, Homo sapien
taaagtgctgatccatcaacacatc

SEQ ID NO: 350706 - DNA, 25 bp, Homo sapien
gtaaagtgctgatccatcaacacat

SEQ ID NO: 350707 - DNA, 25 bp, Homo sapien
ccttctttcggcgtagctcatcaac

SEQ ID NO: 350708 - DNA, 25 bp, Homo sapien
ttcggcgtagctcatcaacctcata

SEQ ID NO: 350709 - DNA, 25 bp, Homo sapien
tgtaatctccttctttcggcgtagc

SEQ ID NO: 350710 - DNA, 25 bp, Homo sapien
aatctccttctttcggcgtagctca

SEQ ID NO: 350711 - DNA, 25 bp, Homo sapien
aaacttggggagctcactcaaatcc

SEQ ID NO: 350712 - DNA, 25 bp, Homo sapien
cgctccccaggattaccaaatttct

SEQ ID NO: 350713 - DNA, 25 bp, Homo sapien
tttttctcaaacttggggagctcac

SEQ ID NO: 350714 - DNA, 25 bp, Homo sapien
tttacgcaaacgctccccaggatta

SEQ ID NO: 350715 - DNA, 25 bp, Homo sapien
tattgggatcactggatacctacac

SEQ ID NO: 350716 - DNA, 25 bp, Homo sapien
gagcacatagcatagggatacccgt

SEQ ID NO: 350717 - DNA, 25 bp, Homo sapien
ggtgtattattctacagggcctcaa

SEQ ID NO: 350718 - DNA, 25 bp, Homo sapien
taatatgcccctcagcttaagactc

SEQ ID NO: 350719 - DNA, 25 bp, Homo sapien
ggcaattatcacgttcctcagagga

SEQ ID NO: 350720 - DNA, 25 bp, Homo sapien
aacttttctgtacaaggatcctggg

SEQ ID NO: 350721 - DNA, 25 bp, Homo sapien
cacatatcaagtggcgtcacgtaac

SEQ ID NO: 350722 - DNA, 25 bp, Homo sapien
taacagagcgcctactacagtgaga

SEQ ID NO: 350723 - DNA, 25 bp, Homo sapien
ttctagcgaggcagaatagttgacg

SEQ ID NO: 350724 - DNA, 25 bp, Homo sapien
cgcccggtccacaataccaagaact

SEQ ID NO: 350725 - DNA, 25 bp, Homo sapien
accaagaactttctagcgaggcaga

SEQ ID NO: 350726 - DNA, 25 bp, Homo sapien
gaactttctagcgaggcagaatagt

SEQ ID NO: 350727 - DNA, 25 bp, Homo sapien
tctctcaggaagatccgcgtttttc

SEQ ID NO: 350728 - DNA, 25 bp, Homo sapien
cgtttttcagatgaacgccgaggcc

SEQ ID NO: 350729 - DNA, 25 bp, Homo sapien
gccgaggcctggagacatcgaacag

SEQ ID NO: 350730 - DNA, 25 bp, Homo sapien
ggagagaacgtcaagggtgccattt

SEQ ID NO: 350731 - DNA, 25 bp, Homo sapien
ctccacggtcacgatcccggtcccg

SEQ ID NO: 350732 - DNA, 25 bp, Homo sapien
cggtccccaaagcctcctccgcgca

SEQ ID NO: 350733 - DNA, 25 bp, Homo sapien
ggtccccaaagcctcctccgcgcat

SEQ ID NO: 350734 - DNA, 25 bp, Homo sapien
aaaaggatagagatctgggagcggg

SEQ ID NO: 350735 - DNA, 25 bp, Homo sapien
tagagatctgggagcggggcacgga

SEQ ID NO: 350736 - DNA, 25 bp, Homo sapien
ctgggagcggggcacggatggccgg

SEQ ID NO: 350737 - DNA, 25 bp, Homo sapien
gcggggcacggatggccgggctcgg

SEQ ID NO: 350738 - DNA, 25 bp, Homo sapien
ctggtgacgaccgatggcggcggcg

SEQ ID NO: 350739 - DNA, 25 bp, Homo sapien
tggtgacgaccgatggcggcggcgc

SEQ ID NO: 350740 - DNA, 25 bp, Homo sapien
gtgacgaccgatggcggcggcgcct

SEQ ID NO: 350741 - DNA, 25 bp, Homo sapien
ggtgacgaccgatggcggcggcgcc

SEQ ID NO: 350742 - DNA, 25 bp, Homo sapien
tccgacgcgctgtctcccgtcgcag

SEQ ID NO: 350743 - DNA, 25 bp, Homo sapien
tgtctcccgtcgcagacgccaccgt

SEQ ID NO: 350744 - DNA, 25 bp, Homo sapien
gcaggcgcagcgctctctcgctccg

SEQ ID NO: 350745 - DNA, 25 bp, Homo sapien
gcgctctctcgctccgacgcgctgt

SEQ ID NO: 350746 - DNA, 25 bp, Homo sapien
aacacagagaatcggggctacaaag

SEQ ID NO: 350747 - DNA, 25 bp, Homo sapien
tcggagacgggagcaaaacacagag

SEQ ID NO: 350748 - DNA, 25 bp, Homo sapien
caaaacacagagaatcggggctaca

SEQ ID NO: 350749 - DNA, 25 bp, Homo sapien
ctcgtcggagacgggagcaaaacac

SEQ ID NO: 350750 - DNA, 25 bp, Homo sapien
gccgccgctgagtcggctccaactt

SEQ ID NO: 350751 - DNA, 25 bp, Homo sapien
gctcaaaccgggcagtgccgcggtt

SEQ ID NO: 350752 - DNA, 25 bp, Homo sapien
tgccgcggtttaggcgtctccttcc

SEQ ID NO: 350753 - DNA, 25 bp, Homo sapien
ccagcgactgcacaaaatggcggcc

SEQ ID NO: 350754 - DNA, 25 bp, Homo sapien
cctgggcccgctgagaatggcggcg

SEQ ID NO: 350755 - DNA, 25 bp, Homo sapien
tccgttgcctttcgctgctctgtct

SEQ ID NO: 350756 - DNA, 25 bp, Homo sapien
cggcgccatttcctttccgttgcct

SEQ ID NO: 350757 - DNA, 25 bp, Homo sapien
catttcctttccgttgcctttcgct

SEQ ID NO: 350758 - DNA, 25 bp, Homo sapien
tgcttcctgtcgtctcaaactgcat

SEQ ID NO: 350759 - DNA, 25 bp, Homo sapien
ctgcttcctgtcgtctcaaactgca

SEQ ID NO: 350760 - DNA, 25 bp, Homo sapien
ggcactataccctagaaaaatggtg

SEQ ID NO: 350761 - DNA, 25 bp, Homo sapien
ccttaggagaatgggacatttctga

SEQ ID NO: 350762 - DNA, 25 bp, Homo sapien
tgtgtgtcctataaacattcctccc

SEQ ID NO: 350763 - DNA, 25 bp, Homo sapien
tagctatgtaagtcagtggcactat

SEQ ID NO: 350764 - DNA, 25 bp, Homo sapien
tcctccagcagttattgcgaaggtg

SEQ ID NO: 350765 - DNA, 25 bp, Homo sapien
ctccagcagttattgcgaaggtggc

SEQ ID NO: 350766 - DNA, 25 bp, Homo sapien
ccagcagttattgcgaaggtggctt

SEQ ID NO: 350767 - DNA, 25 bp, Homo sapien
attcctccagcagttattgcgaagg

SEQ ID NO: 350768 - DNA, 25 bp, Homo sapien
tcttgttgttgaagcatgagccaga

SEQ ID NO: 350769 - DNA, 25 bp, Homo sapien
tcctcttccctttcgcaagcttatt

SEQ ID NO: 350770 - DNA, 25 bp, Homo sapien
ccctttcgcaagcttattcttgttg

SEQ ID NO: 350771 - DNA, 25 bp, Homo sapien
cttattcttgttgttgaagcatgag

SEQ ID NO: 350772 - DNA, 25 bp, Homo sapien
gctacattttcgttatcaataaact

SEQ ID NO: 350773 - DNA, 25 bp, Homo sapien
gaatgtgctggtcacatgaatctca

SEQ ID NO: 350774 - DNA, 25 bp, Homo sapien
aactggccgtctggttcttcattca

SEQ ID NO: 350775 - DNA, 25 bp, Homo sapien
tatcaataaactggccgtctggttc

SEQ ID NO: 350776 - DNA, 25 bp, Homo sapien
agcctttgttactttgtctagcact

SEQ ID NO: 350777 - DNA, 25 bp, Homo sapien
aatactagcctttgttactttgtct

SEQ ID NO: 350778 - DNA, 25 bp, Homo sapien
ttgtctagcactttacttagcttcc

SEQ ID NO: 350779 - DNA, 25 bp, Homo sapien
tttgtctagcactttacttagcttc

SEQ ID NO: 350780 - DNA, 25 bp, Homo sapien
gtcatagttgctcctggatcggcag

SEQ ID NO: 350781 - DNA, 25 bp, Homo sapien
catagttgctcctggatcggcagtc

SEQ ID NO: 350782 - DNA, 25 bp, Homo sapien
ttgctcctggatcggcagtcatttg

SEQ ID NO: 350783 - DNA, 25 bp, Homo sapien
tagttgctcctggatcggcagtcat

SEQ ID NO: 350784 - DNA, 25 bp, Homo sapien
tcgtgacaacatctgggccaatttt

SEQ ID NO: 350785 - DNA, 25 bp, Homo sapien
tgaaatccactcgaaaaagtgccat

SEQ ID NO: 350786 - DNA, 25 bp, Homo sapien
cacggccactgaaatccactcgaaa

SEQ ID NO: 350787 - DNA, 25 bp, Homo sapien
gattttttggagtcgtgacaacatc

SEQ ID NO: 350788 - DNA, 25 bp, Homo sapien
tcttcatggaactttgctgctacat

SEQ ID NO: 350789 - DNA, 25 bp, Homo sapien
tgctacataatcaagtagctccatc

SEQ ID NO: 350790 - DNA, 25 bp, Homo sapien
tgctgctacataatcaagtagctcc

SEQ ID NO: 350791 - DNA, 25 bp, Homo sapien
ctttgctgctacataatcaagtagc

SEQ ID NO: 350792 - DNA, 25 bp, Homo sapien
cataaagtacgttgtccagtactgc

SEQ ID NO: 350793 - DNA, 25 bp, Homo sapien
attaaagcgatcagcaatgtcccta

SEQ ID NO: 350794 - DNA, 25 bp, Homo sapien
tatatgcacgtgcataaagtacgtt

SEQ ID NO: 350795 - DNA, 25 bp, Homo sapien
tccagtactgcatcatggtctacat

SEQ ID NO: 350796 - DNA, 25 bp, Homo sapien
cagcagtataagtatgagacacgga

SEQ ID NO: 350797 - DNA, 25 bp, Homo sapien
gaatgagaacactccaatgtggccc

SEQ ID NO: 350798 - DNA, 25 bp, Homo sapien
tctcttgcatatgacttagctccta

SEQ ID NO: 350799 - DNA, 25 bp, Homo sapien
gagtcctaagacaacctatgcccta

SEQ ID NO: 350800 - DNA, 25 bp, Homo sapien
aagaaataagtattacagcaaaaca

SEQ ID NO: 350801 - DNA, 25 bp, Homo sapien
aaaatttatttcgtagagacactat

SEQ ID NO: 350802 - DNA, 25 bp, Homo sapien
ctaaataactgctgatgtacaatgt

SEQ ID NO: 350803 - DNA, 25 bp, Homo sapien
tgggatttatagcaaccacacctgg

SEQ ID NO: 350804 - DNA, 25 bp, Homo sapien
caaagtgattggagaacttaaacag

SEQ ID NO: 350805 - DNA, 25 bp, Homo sapien
ctttggtttgtctcattactactgg

SEQ ID NO: 350806 - DNA, 25 bp, Homo sapien
actactggtttatggaatgactaca

SEQ ID NO: 350807 - DNA, 25 bp, Homo sapien
taaacccatatgaagaagtgaaacc

SEQ ID NO: 350808 - DNA, 25 bp, Homo sapien
aatctttcctcctgggtagccacca

SEQ ID NO: 350809 - DNA, 25 bp, Homo sapien
tcctgggtagccaccagctcctgga

SEQ ID NO: 350810 - DNA, 25 bp, Homo sapien
ttttctgtatcaatgaagataatct

SEQ ID NO: 350811 - DNA, 25 bp, Homo sapien
ccagctcctggaagttgagctgtca

SEQ ID NO: 350812 - DNA, 25 bp, Homo sapien
tgagaaagctgggtttttccagtac

SEQ ID NO: 350813 - DNA, 25 bp, Homo sapien
cacagagggtatgagaaagctgggt

SEQ ID NO: 350814 - DNA, 25 bp, Homo sapien
ggtatgagaaagctgggtttttcca

SEQ ID NO: 350815 - DNA, 25 bp, Homo sapien
cagagggtatgagaaagctgggttt

SEQ ID NO: 350816 - DNA, 25 bp, Homo sapien
gcttctgtaattgccatactttcaa

SEQ ID NO: 350817 - DNA, 25 bp, Homo sapien
ctccaaaagcttctgtaattgccat

SEQ ID NO: 350818 - DNA, 25 bp, Homo sapien
taattgccatactttcaattccacc

SEQ ID NO: 350819 - DNA, 25 bp, Homo sapien
caaaagcttctgtaattgccatact

SEQ ID NO: 350820 - DNA, 25 bp, Homo sapien
caaattcctggctcccggtggtgat

SEQ ID NO: 350821 - DNA, 25 bp, Homo sapien
tcttttcactatactcaaatgcagt

SEQ ID NO: 350822 - DNA, 25 bp, Homo sapien
cccggtggtgatatggaaaaccatt

SEQ ID NO: 350823 - DNA, 25 bp, Homo sapien
tcactatactcaaatgcagtcaaga

SEQ ID NO: 350824 - DNA, 25 bp, Homo sapien
ggctttcttcaacaccctggcagtt

SEQ ID NO: 350825 - DNA, 25 bp, Homo sapien
tggaattgacttgtgggtacactgc

SEQ ID NO: 350826 - DNA, 25 bp, Homo sapien
tcagaagctagagcaactgagctgg

SEQ ID NO: 350827 - DNA, 25 bp, Homo sapien
gtttcccaaaccctgagtactgctc

SEQ ID NO: 350828 - DNA, 25 bp, Homo sapien
cagttcggttgagtcccctccaagt

SEQ ID NO: 350829 - DNA, 25 bp, Homo sapien
gttcaggatcacactgccacttgca

SEQ ID NO: 350830 - DNA, 25 bp, Homo sapien
ggatcacactgccacttgcatcact

SEQ ID NO: 350831 - DNA, 25 bp, Homo sapien
tcagttcggttgagtcccctccaag

SEQ ID NO: 350832 - DNA, 25 bp, Homo sapien
agccataggtatgatatttgaggag

SEQ ID NO: 350833 - DNA, 25 bp, Homo sapien
cttcacaacagccataggtatgata

SEQ ID NO: 350834 - DNA, 25 bp, Homo sapien
caacagccataggtatgatatttga

SEQ ID NO: 350835 - DNA, 25 bp, Homo sapien
tcacaacagccataggtatgatatt

SEQ ID NO: 350836 - DNA, 25 bp, Homo sapien
tcctttgacattgcatagagctctt

SEQ ID NO: 350837 - DNA, 25 bp, Homo sapien
gttgtcatctgtatacctttgatgg

SEQ ID NO: 350838 - DNA, 25 bp, Homo sapien
tggtacagattcctactgatttcag

SEQ ID NO: 350839 - DNA, 25 bp, Homo sapien
gtcctttgacattgcatagagctct

SEQ ID NO: 350840 - DNA, 25 bp, Homo sapien
tgtaacaggtcaatatcttgaaaca

SEQ ID NO: 350841 - DNA, 25 bp, Homo sapien
tctgtaacaggtcaatatcttgaaa

SEQ ID NO: 350842 - DNA, 25 bp, Homo sapien
tttctgtaacaggtcaatatcttga

SEQ ID NO: 350843 - DNA, 25 bp, Homo sapien
aacaggtcaatatcttgaaacaaag

SEQ ID NO: 350844 - DNA, 25 bp, Homo sapien
atcctggttcttccgccacaacttg

SEQ ID NO: 350845 - DNA, 25 bp, Homo sapien
ttggaatcctggttcttccgccaca

SEQ ID NO: 350846 - DNA, 25 bp, Homo sapien
gaatcctggttcttccgccacaact

SEQ ID NO: 350847 - DNA, 25 bp, Homo sapien
ggttcttccgccacaacttgatcct

SEQ ID NO: 350848 - DNA, 25 bp, Homo sapien
ttgaaaagtgggcaacagaaaaata

SEQ ID NO: 350849 - DNA, 25 bp, Homo sapien
attgaaaagtgggcaacagaaaaat

SEQ ID NO: 350850 - DNA, 25 bp, Homo sapien
aaagtgggcaacagaaaaataatca

SEQ ID NO: 350851 - DNA, 25 bp, Homo sapien
gtgggcaacagaaaaataatcactt

SEQ ID NO: 350852 - DNA, 25 bp, Homo sapien
aataaaatgcggtccaaatcatcat

SEQ ID NO: 350853 - DNA, 25 bp, Homo sapien
aaatgcggtccaaatcatcattttt

SEQ ID NO: 350854 - DNA, 25 bp, Homo sapien
atgcggtccaaatcatcatttttct

SEQ ID NO: 350855 - DNA, 25 bp, Homo sapien
taaaatgcggtccaaatcatcattt

SEQ ID NO: 350856 - DNA, 25 bp, Homo sapien
tcaaacggcaaaggatggaaggcaa

SEQ ID NO: 350857 - DNA, 25 bp, Homo sapien
ccttcagatggctagctatgagtac

SEQ ID NO: 350858 - DNA, 25 bp, Homo sapien
tggaaggcaaccgagaccgttcgga

SEQ ID NO: 350859 - DNA, 25 bp, Homo sapien
tactgtccccatcgaagagaaaaac

SEQ ID NO: 350860 - DNA, 25 bp, Homo sapien
gatgaaatgaaaagattgtccccca

SEQ ID NO: 350861 - DNA, 25 bp, Homo sapien
ttcttctccccgtgatgaaatgaaa

SEQ ID NO: 350862 - DNA, 25 bp, Homo sapien
cttctccccgtgatgaaatgaaaag

SEQ ID NO: 350863 - DNA, 25 bp, Homo sapien
cccgtgatgaaatgaaaagattgtc

SEQ ID NO: 350864 - DNA, 25 bp, Homo sapien
cacagtctccccgagattttcaagg

SEQ ID NO: 350865 - DNA, 25 bp, Homo sapien
cgcgccgttgaccacagggtttggc

SEQ ID NO: 350866 - DNA, 25 bp, Homo sapien
acaggattctaactcgggcctagaa

SEQ ID NO: 350867 - DNA, 25 bp, Homo sapien
attttcaaggtgaagcccctctgcc

SEQ ID NO: 350868 - DNA, 25 bp, Homo sapien
tttggcgataggtcttggtcgcgag

SEQ ID NO: 350869 - DNA, 25 bp, Homo sapien
tggcttagaaggtcgaatccgggcc

SEQ ID NO: 350870 - DNA, 25 bp, Homo sapien
tcgcgagggttgcagatggagcctt

SEQ ID NO: 350871 - DNA, 25 bp, Homo sapien
atggagccttggcttagaaggtcga

SEQ ID NO: 350872 - DNA, 25 bp, Homo sapien
caaaagcaccaacactggccacatt

SEQ ID NO: 350873 - DNA, 25 bp, Homo sapien
ggaccaccgtcatatattcagtcag

SEQ ID NO: 350874 - DNA, 25 bp, Homo sapien
cataaaccatagctaaagaacactg

SEQ ID NO: 350875 - DNA, 25 bp, Homo sapien
tacgaaggctaagagtcgctaggtg

SEQ ID NO: 350876 - DNA, 25 bp, Homo sapien
cgttacgctatgacattacgaaggc

SEQ ID NO: 350877 - DNA, 25 bp, Homo sapien
ccacgtctctgctggatataaagac

SEQ ID NO: 350878 - DNA, 25 bp, Homo sapien
gagataatcaccacacaaggcagga

SEQ ID NO: 350879 - DNA, 25 bp, Homo sapien
tcagtgaggatttgtcaatcgggca

SEQ ID NO: 350880 - DNA, 25 bp, Homo sapien
acccctatttacacgatggaactgg

SEQ ID NO: 350881 - DNA, 25 bp, Homo sapien
cgtatgccaccttgctctgctaatt

SEQ ID NO: 350882 - DNA, 25 bp, Homo sapien
ggcgtatgccaccttgctctgctaa

SEQ ID NO: 350883 - DNA, 25 bp, Homo sapien
gcgtatgccaccttgctctgctaat

SEQ ID NO: 350884 - DNA, 25 bp, Homo sapien
gtgtatacacccatgagccattcac

SEQ ID NO: 350885 - DNA, 25 bp, Homo sapien
taggtgtgtatacacccatgagcca

SEQ ID NO: 350886 - DNA, 25 bp, Homo sapien
tgtgtatacacccatgagccattca

SEQ ID NO: 350887 - DNA, 25 bp, Homo sapien
ggtgtgtatacacccatgagccatt

SEQ ID NO: 350888 - DNA, 25 bp, Homo sapien
catctcttctagtttaacatctgaa

SEQ ID NO: 350889 - DNA, 25 bp, Homo sapien
ccatgctgagagtatgggttttcag

SEQ ID NO: 350890 - DNA, 25 bp, Homo sapien
tcatcaattcataagcaattcaaaa

SEQ ID NO: 350891 - DNA, 25 bp, Homo sapien
aattcataagcaattcaaaatcagg

SEQ ID NO: 350892 - DNA, 25 bp, Homo sapien
catatttaacatcctgagaggctac

SEQ ID NO: 350893 - DNA, 25 bp, Homo sapien
catttctggaaagggtccatgcagg

SEQ ID NO: 350894 - DNA, 25 bp, Homo sapien
cagggatgatcttggactgtgcaac

SEQ ID NO: 350895 - DNA, 25 bp, Homo sapien
aaatggtcctgacagacagaaatgc

SEQ ID NO: 350896 - DNA, 25 bp, Homo sapien
gaaggctcccaagatgagggacgtc

SEQ ID NO: 350897 - DNA, 25 bp, Homo sapien
tattagggaaggctcccaagatgag

SEQ ID NO: 350898 - DNA, 25 bp, Homo sapien
cttgctcctggtatattagggaagg

SEQ ID NO: 350899 - DNA, 25 bp, Homo sapien
ccaagatgagggacgtctaagcggg

SEQ ID NO: 350900 - DNA, 25 bp, Homo sapien
ggcattccctttctgcagtcaagaa

SEQ ID NO: 350901 - DNA, 25 bp, Homo sapien
gaaaggtcaagatgcacagctacta

SEQ ID NO: 350902 - DNA, 25 bp, Homo sapien
tcaagaaagcacgttcagaaaggtc

SEQ ID NO: 350903 - DNA, 25 bp, Homo sapien
cacccggccaagaagagtacacttt

SEQ ID NO: 350904 - DNA, 25 bp, Homo sapien
tgtctaaaccagacttagcagagca

SEQ ID NO: 350905 - DNA, 25 bp, Homo sapien
agtgcagggatggtacagaatagac

SEQ ID NO: 350906 - DNA, 25 bp, Homo sapien
tagcagagcactcagcacatactaa

SEQ ID NO: 350907 - DNA, 25 bp, Homo sapien
tggaggtaacaatatccatcttggg

SEQ ID NO: 350908 - DNA, 25 bp, Homo sapien
tgtctcatgaactgggagtgactaa

SEQ ID NO: 350909 - DNA, 25 bp, Homo sapien
ttaaatcagacaacatgtgcatgct

SEQ ID NO: 350910 - DNA, 25 bp, Homo sapien
caaagattcactcaaatgagctgga

SEQ ID NO: 350911 - DNA, 25 bp, Homo sapien
aaaagacaagatgtttgccaggcag

SEQ ID NO: 350912 - DNA, 25 bp, Homo sapien
tctgtaggcgcttcctggttctagg

SEQ ID NO: 350913 - DNA, 25 bp, Homo sapien
ctcgtagcagaaatatcacggattc

SEQ ID NO: 350914 - DNA, 25 bp, Homo sapien
gcagaaatatcacggattctgtagg

SEQ ID NO: 350915 - DNA, 25 bp, Homo sapien
tatcacggattctgtaggcgcttcc

SEQ ID NO: 350916 - DNA, 25 bp, Homo sapien
gattcctcattgacggctgaaggtg

SEQ ID NO: 350917 - DNA, 25 bp, Homo sapien
gctgaaggtgggatgaacatgtggt

SEQ ID NO: 350918 - DNA, 25 bp, Homo sapien
tttcttgtcaggtgattcctcattg

SEQ ID NO: 350919 - DNA, 25 bp, Homo sapien
atgttcacacttctacctttcccat

SEQ ID NO: 350920 - DNA, 25 bp, Homo sapien
gctgatgacatcagtatacgttggg

SEQ ID NO: 350921 - DNA, 25 bp, Homo sapien
tcatgctgcacagggtctcgctgat

SEQ ID NO: 350922 - DNA, 25 bp, Homo sapien
tgattgaggttgtctttccgcttct

SEQ ID NO: 350923 - DNA, 25 bp, Homo sapien
tcagtccaatgatgctggtacaact

SEQ ID NO: 350924 - DNA, 25 bp, Homo sapien
aggaaatccccgtactgtggaactg

SEQ ID NO: 350925 - DNA, 25 bp, Homo sapien
cccgtactgtggaactgtgttgacg

SEQ ID NO: 350926 - DNA, 25 bp, Homo sapien
gaaatccccgtactgtggaactgtg

SEQ ID NO: 350927 - DNA, 25 bp, Homo sapien
ctgtcaaggaaatccccgtactgtg

SEQ ID NO: 350928 - DNA, 25 bp, Homo sapien
gagcaagagatgactctcctgctct

SEQ ID NO: 350929 - DNA, 25 bp, Homo sapien
tattagtggcatgagcgcagtgcat

SEQ ID NO: 350930 - DNA, 25 bp, Homo sapien
agagatgactctcctgctctttgac

SEQ ID NO: 350931 - DNA, 25 bp, Homo sapien
ctgcgtttctggataagatacctga

SEQ ID NO: 350932 - DNA, 25 bp, Homo sapien
tattagatctttaggataaatggca

SEQ ID NO: 350933 - DNA, 25 bp, Homo sapien
tttctattagatctttaggataaat

SEQ ID NO: 350934 - DNA, 25 bp, Homo sapien
tctattagatctttaggataaatgg

SEQ ID NO: 350935 - DNA, 25 bp, Homo sapien
ctattagatctttaggataaatggc

SEQ ID NO: 350936 - DNA, 25 bp, Homo sapien
tgctcgtggtcttttcccttctgac

SEQ ID NO: 350937 - DNA, 25 bp, Homo sapien
gtgctcgtggtcttttcccttctga

SEQ ID NO: 350938 - DNA, 25 bp, Homo sapien
ggtgctcgtggtcttttcccttctg

SEQ ID NO: 350939 - DNA, 25 bp, Homo sapien
tatcaacacattcttgccgtgctgc

SEQ ID NO: 350940 - DNA, 25 bp, Homo sapien
tcaacacattcttgccgtgctgctg

SEQ ID NO: 350941 - DNA, 25 bp, Homo sapien
ccgtgctgctgcagactggcatagt

SEQ ID NO: 350942 - DNA, 25 bp, Homo sapien
actggcatagttctggagaaagtac

SEQ ID NO: 350943 - DNA, 25 bp, Homo sapien
tttgaagtcagctcagggcttttgc

SEQ ID NO: 350944 - DNA, 25 bp, Homo sapien
aatgttgaagaggtttgaagtcagc

SEQ ID NO: 350945 - DNA, 25 bp, Homo sapien
gggctcttcccataaatgttgaaga

SEQ ID NO: 350946 - DNA, 25 bp, Homo sapien
aagaggtttgaagtcagctcagggc

SEQ ID NO: 350947 - DNA, 25 bp, Homo sapien
gaagcagttataccttaatggaaca

SEQ ID NO: 350948 - DNA, 25 bp, Homo sapien
gcagcagtacccaatcacactattt

SEQ ID NO: 350949 - DNA, 25 bp, Homo sapien
tctaatcctgttctaatgggatagg

SEQ ID NO: 350950 - DNA, 25 bp, Homo sapien
tcagagctggccaaatgtctcccag

SEQ ID NO: 350951 - DNA, 25 bp, Homo sapien
tcctcttgacttcttgcgtaggttt

SEQ ID NO: 350952 - DNA, 25 bp, Homo sapien
ttgacttcttgcgtaggtttcttca

SEQ ID NO: 350953 - DNA, 25 bp, Homo sapien
gacttcttgcgtaggtttcttcaag

SEQ ID NO: 350954 - DNA, 25 bp, Homo sapien
tcttgacttcttgcgtaggtttctt

SEQ ID NO: 350955 - DNA, 25 bp, Homo sapien
tgcattcgtaagcttttttctgagt

SEQ ID NO: 350956 - DNA, 25 bp, Homo sapien
gcagtattctgcattcgtaagcttt

SEQ ID NO: 350957 - DNA, 25 bp, Homo sapien
tctgcttggccgaagaggttttttc

SEQ ID NO: 350958 - DNA, 25 bp, Homo sapien
cactgggtgaatttgcactagaaga

SEQ ID NO: 350959 - DNA, 25 bp, Homo sapien
acatgcagaacgagacctttcaggt

SEQ ID NO: 350960 - DNA, 25 bp, Homo sapien
tgcagaacgagacctttcaggtcct

SEQ ID NO: 350961 - DNA, 25 bp, Homo sapien
cagaacgagacctttcaggtcctcc

SEQ ID NO: 350962 - DNA, 25 bp, Homo sapien
tgttctcagcaaaggaacatgcaga

SEQ ID NO: 350963 - DNA, 25 bp, Homo sapien
aaaggacttcccagacatcgtgcag

SEQ ID NO: 350964 - DNA, 25 bp, Homo sapien
aagaacgctggattcgtctgggcga

SEQ ID NO: 350965 - DNA, 25 bp, Homo sapien
tatttcagccaggtacatgcccagc

SEQ ID NO: 350966 - DNA, 25 bp, Homo sapien
catgggaagctagagcgaagaacgc

SEQ ID NO: 350967 - DNA, 25 bp, Homo sapien
tactgtacagagattgagataggtt

SEQ ID NO: 350968 - DNA, 25 bp, Homo sapien
tagggcaatgacagtgaacctggca

SEQ ID NO: 350969 - DNA, 25 bp, Homo sapien
aggctggcagtcagggacagcttct

SEQ ID NO: 350970 - DNA, 25 bp, Homo sapien
tcaacccaacaggaagataagtact

SEQ ID NO: 350971 - DNA, 25 bp, Homo sapien
aaatgctgacagtgacaatggcaat

SEQ ID NO: 350972 - DNA, 25 bp, Homo sapien
ggttaactgcatgctatcaatgtct

SEQ ID NO: 350973 - DNA, 25 bp, Homo sapien
aatggcaatggtgataggagcttac

SEQ ID NO: 350974 - DNA, 25 bp, Homo sapien
gggttgggaggaaatgctgacagtg

SEQ ID NO: 350975 - DNA, 25 bp, Homo sapien
ggccactgatgctccagaagaaccg

SEQ ID NO: 350976 - DNA, 25 bp, Homo sapien
cctgaagcttatgggactccaaagg

SEQ ID NO: 350977 - DNA, 25 bp, Homo sapien
gaaccgagggttcctgaagcttatg

SEQ ID NO: 350978 - DNA, 25 bp, Homo sapien
tgatgctccagaagaaccgagggtt

SEQ ID NO: 350979 - DNA, 25 bp, Homo sapien
gaaggctctcttaccagcaaacaaa

SEQ ID NO: 350980 - DNA, 25 bp, Homo sapien
gagaaggctctcttaccagcaaaca

SEQ ID NO: 350981 - DNA, 25 bp, Homo sapien
gcttctgggagaaggctctcttacc

SEQ ID NO: 350982 - DNA, 25 bp, Homo sapien
tgggagaaggctctcttaccagcaa

SEQ ID NO: 350983 - DNA, 25 bp, Homo sapien
ttagatagtggttgagtatggcagt

SEQ ID NO: 350984 - DNA, 25 bp, Homo sapien
tagtggttgagtatggcagtggcaa

SEQ ID NO: 350985 - DNA, 25 bp, Homo sapien
tcagttagatagtggttgagtatgg

SEQ ID NO: 350986 - DNA, 25 bp, Homo sapien
gatagtggttgagtatggcagtggc

SEQ ID NO: 350987 - DNA, 25 bp, Homo sapien
ctttgtcagtcttcttctgtacaac

SEQ ID NO: 350988 - DNA, 25 bp, Homo sapien
cctttgtcagtcttcttctgtacaa

SEQ ID NO: 350989 - DNA, 25 bp, Homo sapien
attaattcttctctgcggaatcgct

SEQ ID NO: 350990 - DNA, 25 bp, Homo sapien
gaatcgctctgggtctagttccgag

SEQ ID NO: 350991 - DNA, 25 bp, Homo sapien
gggtctagttccgagtagtcccagc

SEQ ID NO: 350992 - DNA, 25 bp, Homo sapien
tctctgcggaatcgctctgggtcta

SEQ ID NO: 350993 - DNA, 25 bp, Homo sapien
tgaattcgtgcgtgtcgaaccagga

SEQ ID NO: 350994 - DNA, 25 bp, Homo sapien
tcagacttgaattcgtgcgtgtcga

SEQ ID NO: 350995 - DNA, 25 bp, Homo sapien
caggctcattgtgttacagatgtca

SEQ ID NO: 350996 - DNA, 25 bp, Homo sapien
tacagatgtcagacttgaattcgtg

SEQ ID NO: 350997 - DNA, 25 bp, Homo sapien
cagaagctggtgtacacggctttgc

SEQ ID NO: 350998 - DNA, 25 bp, Homo sapien
gcaacagaagctggtgtacacggct

SEQ ID NO: 350999 - DNA, 25 bp, Homo sapien
aacagaagctggtgtacacggcttt

SEQ ID NO: 351000 - DNA, 25 bp, Homo sapien
aagctggtgtacacggctttgctga

SEQ ID NO: 351001 - DNA, 25 bp, Homo sapien
tacacgaaacaaaagtaaggcatag

SEQ ID NO: 351002 - DNA, 25 bp, Homo sapien
tttaagagcgcctcttcagagtggg

SEQ ID NO: 351003 - DNA, 25 bp, Homo sapien
catagtgctgggctatccggtcaaa

SEQ ID NO: 351004 - DNA, 25 bp, Homo sapien
cagagtgggacttgggtacacgaaa

SEQ ID NO: 351005 - DNA, 25 bp, Homo sapien
tatccaccaaaagctatccagccag

SEQ ID NO: 351006 - DNA, 25 bp, Homo sapien
gtacctctcatgaaatatccaccaa

SEQ ID NO: 351007 - DNA, 25 bp, Homo sapien
tcatgaaatatccaccaaaagctat

SEQ ID NO: 351008 - DNA, 25 bp, Homo sapien
ctggtacctctcatgaaatatccac

SEQ ID NO: 351009 - DNA, 25 bp, Homo sapien
aaaaaaattcacagtattattattg

SEQ ID NO: 351010 - DNA, 25 bp, Homo sapien
cagtattattattgttgttatcttt

SEQ ID NO: 351011 - DNA, 25 bp, Homo sapien
aaaattcacagtattattattgttg

SEQ ID NO: 351012 - DNA, 25 bp, Homo sapien
acagtattattattgttgttatctt

SEQ ID NO: 351013 - DNA, 25 bp, Homo sapien
ctttaccatcaggaagcgtgcctct

SEQ ID NO: 351014 - DNA, 25 bp, Homo sapien
tctcctttaccatcaggaagcgtgc

SEQ ID NO: 351015 - DNA, 25 bp, Homo sapien
tttaccatcaggaagcgtgcctctt

SEQ ID NO: 351016 - DNA, 25 bp, Homo sapien
cctttaccatcaggaagcgtgcctc

SEQ ID NO: 351017 - DNA, 25 bp, Homo sapien
gctcagacacctgcaagcctgtggc

SEQ ID NO: 351018 - DNA, 25 bp, Homo sapien
ctgcatttgccccatgggttggcaa

SEQ ID NO: 351019 - DNA, 25 bp, Homo sapien
tgtggccctaggtgagttcctcagt

SEQ ID NO: 351020 - DNA, 25 bp, Homo sapien
gaagaccgttgctctggtagaagga

SEQ ID NO: 351021 - DNA, 25 bp, Homo sapien
actaaggcagtctctctcagcccgg

SEQ ID NO: 351022 - DNA, 25 bp, Homo sapien
acgttgcccaccatgtcacagaagt

SEQ ID NO: 351023 - DNA, 25 bp, Homo sapien
tgaagttggaatactggtacagctc

SEQ ID NO: 351024 - DNA, 25 bp, Homo sapien
cacgccattcggaagcttgtttggc

SEQ ID NO: 351025 - DNA, 25 bp, Homo sapien
cctttttataacagaagatctggca

SEQ ID NO: 351026 - DNA, 25 bp, Homo sapien
atctggcatgtctgagttcggagcc

SEQ ID NO: 351027 - DNA, 25 bp, Homo sapien
gcatgtctgagttcggagcctttgc

SEQ ID NO: 351028 - DNA, 25 bp, Homo sapien
gtctgagttcggagcctttgcagga

SEQ ID NO: 351029 - DNA, 25 bp, Homo sapien
cccatgaaaagagcatcaaggctga

SEQ ID NO: 351030 - DNA, 25 bp, Homo sapien
tcaaggctgagggaaaggtttttgc

SEQ ID NO: 351031 - DNA, 25 bp, Homo sapien
atgaaaagagcatcaaggctgaggg

SEQ ID NO: 351032 - DNA, 25 bp, Homo sapien
atcaaggctgagggaaaggtttttg

SEQ ID NO: 351033 - DNA, 25 bp, Homo sapien
tgctgcgagttttctctcttaaagc

SEQ ID NO: 351034 - DNA, 25 bp, Homo sapien
tttgtcttctggactgctgcgagtt

SEQ ID NO: 351035 - DNA, 25 bp, Homo sapien
tctccaactcaaatctctcaattgc

SEQ ID NO: 351036 - DNA, 25 bp, Homo sapien
ttcttctccaactcaaatctctcaa

SEQ ID NO: 351037 - DNA, 25 bp, Homo sapien
tcagtgtagacaccctgagaggtaa

SEQ ID NO: 351038 - DNA, 25 bp, Homo sapien
caaactactgcctgaaaactgaaca

SEQ ID NO: 351039 - DNA, 25 bp, Homo sapien
tccatcttgtgggagcctgctacac

SEQ ID NO: 351040 - DNA, 25 bp, Homo sapien
aaacctccatgggaaccagtagcaa

SEQ ID NO: 351041 - DNA, 25 bp, Homo sapien
ggttcacctggtgcatggagccaat

SEQ ID NO: 351042 - DNA, 25 bp, Homo sapien
ttggccgacggctcggtacgcagat

SEQ ID NO: 351043 - DNA, 25 bp, Homo sapien
cctggtgcatggagccaataaggca

SEQ ID NO: 351044 - DNA, 25 bp, Homo sapien
atttatgtcagcaatcttttggttc

SEQ ID NO: 351045 - DNA, 25 bp, Homo sapien
gacgagctgtaaggtcctccagaga

SEQ ID NO: 351046 - DNA, 25 bp, Homo sapien
tacaactcagggtcagaagtgagaa

SEQ ID NO: 351047 - DNA, 25 bp, Homo sapien
cagggcagtaagatgctggtagagc

SEQ ID NO: 351048 - DNA, 25 bp, Homo sapien
agttctgtgaccctggaatacaact

SEQ ID NO: 351049 - DNA, 25 bp, Homo sapien
tggacgatgccagaaggagcagatt

SEQ ID NO: 351050 - DNA, 25 bp, Homo sapien
ctggacgatgccagaaggagcagat

SEQ ID NO: 351051 - DNA, 25 bp, Homo sapien
gtattccgtgcgacaagcgagacag

SEQ ID NO: 351052 - DNA, 25 bp, Homo sapien
aggttgatgacctccatcttcctga

SEQ ID NO: 351053 - DNA, 25 bp, Homo sapien
tccactggtatcataggtagggtgg

SEQ ID NO: 351054 - DNA, 25 bp, Homo sapien
cctgaagtgattcattgtccaattt

SEQ ID NO: 351055 - DNA, 25 bp, Homo sapien
ctgaaagcatcggcggaatttgacg

SEQ ID NO: 351056 - DNA, 25 bp, Homo sapien
gcatcggcggaatttgacgaacccg

SEQ ID NO: 351057 - DNA, 25 bp, Homo sapien
catcggcggaatttgacgaacccgg

SEQ ID NO: 351058 - DNA, 25 bp, Homo sapien
aaagcatcggcggaatttgacgaac

SEQ ID NO: 351059 - DNA, 25 bp, Homo sapien
ccatagcaccaggatcgttagtagc

SEQ ID NO: 351060 - DNA, 25 bp, Homo sapien
gtgatccagctgcttgtacccctga

SEQ ID NO: 351061 - DNA, 25 bp, Homo sapien
tgagcaagtgcatgagacagacagc

SEQ ID NO: 351062 - DNA, 25 bp, Homo sapien
tcgttagtagccacatgataaaatg

SEQ ID NO: 351063 - DNA, 25 bp, Homo sapien
tccaacctgcattctgtgagtgtcg

SEQ ID NO: 351064 - DNA, 25 bp, Homo sapien
gaactcttgtttgggaatgatcgtc

SEQ ID NO: 351065 - DNA, 25 bp, Homo sapien
gaagaagacacctcctcggaagtcg

SEQ ID NO: 351066 - DNA, 25 bp, Homo sapien
tctttgggaatacgttcagtccgaa

SEQ ID NO: 351067 - DNA, 25 bp, Homo sapien
ggtggaccgaccgtaagcataatta

SEQ ID NO: 351068 - DNA, 25 bp, Homo sapien
gagaacaatctcttgcggctgaaag

SEQ ID NO: 351069 - DNA, 25 bp, Homo sapien
gaagttgtcacatagcatctcgccc

SEQ ID NO: 351070 - DNA, 25 bp, Homo sapien
cacagcacacgagggagaagttatt

SEQ ID NO: 351071 - DNA, 25 bp, Homo sapien
aatagctaattgtggtggtgcaccc

SEQ ID NO: 351072 - DNA, 25 bp, Homo sapien
agaggcaggagagcatacactgtag

SEQ ID NO: 351073 - DNA, 25 bp, Homo sapien
agcaaaatggcctgggttcctcacc

SEQ ID NO: 351074 - DNA, 25 bp, Homo sapien
cagccttggctgcaaagtaagatgc

SEQ ID NO: 351075 - DNA, 25 bp, Homo sapien
caagtacttgtggtcctgggtcatc

SEQ ID NO: 351076 - DNA, 25 bp, Homo sapien
tagactagggacaggctaccatggt

SEQ ID NO: 351077 - DNA, 25 bp, Homo sapien
tcaaaagacagaattggccggacgt

SEQ ID NO: 351078 - DNA, 25 bp, Homo sapien
tctgaatgcccggtacatgcctggc

SEQ ID NO: 351079 - DNA, 25 bp, Homo sapien
ccatccttacggccagcaaagcact

SEQ ID NO: 351080 - DNA, 25 bp, Homo sapien
tgctgtctgcagtccatccttacgg

SEQ ID NO: 351081 - DNA, 25 bp, Homo sapien
gctgctgtctgcagtccatccttac

SEQ ID NO: 351082 - DNA, 25 bp, Homo sapien
ctgtctgcagtccatccttacggcc

SEQ ID NO: 351083 - DNA, 25 bp, Homo sapien
ggcagatttgtagctccaacccata

SEQ ID NO: 351084 - DNA, 25 bp, Homo sapien
atgctggacacctcccgatgctgga

SEQ ID NO: 351085 - DNA, 25 bp, Homo sapien
gagtttgcttatgcctcggccggta

SEQ ID NO: 351086 - DNA, 25 bp, Homo sapien
aaggtagagcctccccgtgatggct

SEQ ID NO: 351087 - DNA, 25 bp, Homo sapien
ttgctgacacccttgtccactgatg

SEQ ID NO: 351088 - DNA, 25 bp, Homo sapien
gctgacacccttgtccactgatgcg

SEQ ID NO: 351089 - DNA, 25 bp, Homo sapien
ccttgtccactgatgcgacctccat

SEQ ID NO: 351090 - DNA, 25 bp, Homo sapien
tgacacccttgtccactgatgcgac

SEQ ID NO: 351091 - DNA, 25 bp, Homo sapien
aacagaatgactgcggtggcgcccc

SEQ ID NO: 351092 - DNA, 25 bp, Homo sapien
gaaagtgtcatcctaagtaccttga

SEQ ID NO: 351093 - DNA, 25 bp, Homo sapien
ggcacattgatctatctaaacctgg

SEQ ID NO: 351094 - DNA, 25 bp, Homo sapien
tgaatccctatgtatgagaggaggg

SEQ ID NO: 351095 - DNA, 25 bp, Homo sapien
tgtgcccctgaccattaacgactgt

SEQ ID NO: 351096 - DNA, 25 bp, Homo sapien
gccttgttgccccagatagtcttga

SEQ ID NO: 351097 - DNA, 25 bp, Homo sapien
tacaatctaggtggtactgttccca

SEQ ID NO: 351098 - DNA, 25 bp, Homo sapien
gaaaggtaattgctcaaggctgcag

SEQ ID NO: 351099 - DNA, 25 bp, Homo sapien
ggcccgctgggtatacatgatcttt

SEQ ID NO: 351100 - DNA, 25 bp, Homo sapien
ctttacacaattatagaattcaggc

SEQ ID NO: 351101 - DNA, 25 bp, Homo sapien
ttctttacacaattatagaattcag

SEQ ID NO: 351102 - DNA, 25 bp, Homo sapien
tctttacacaattatagaattcagg

SEQ ID NO: 351103 - DNA, 25 bp, Homo sapien
ccacgaccattgatctgagggccag

SEQ ID NO: 351104 - DNA, 25 bp, Homo sapien
tcaatgctgcgaaatggtagggaca

SEQ ID NO: 351105 - DNA, 25 bp, Homo sapien
tcattataaaactctgccgggtgcg

SEQ ID NO: 351106 - DNA, 25 bp, Homo sapien
gagaagatataacgcagtagccgct

SEQ ID NO: 351107 - DNA, 25 bp, Homo sapien
acacatcggtcctccaactctgatg

SEQ ID NO: 351108 - DNA, 25 bp, Homo sapien
tacacatcggtcctccaactctgat

SEQ ID NO: 351109 - DNA, 25 bp, Homo sapien
ttacacatcggtcctccaactctga

SEQ ID NO: 351110 - DNA, 25 bp, Homo sapien
cacatcggtcctccaactctgatga

SEQ ID NO: 351111 - DNA, 25 bp, Homo sapien
ctttcctcgcaaatgatgttttaga

SEQ ID NO: 351112 - DNA, 25 bp, Homo sapien
tctggtaccaccagcaggagttcac

SEQ ID NO: 351113 - DNA, 25 bp, Homo sapien
cttctggtaccaccagcaggagttc

SEQ ID NO: 351114 - DNA, 25 bp, Homo sapien
gttctttcctcgcaaatgatgtttt

SEQ ID NO: 351115 - DNA, 25 bp, Homo sapien
ggcagtttcagtggaccccagcata

SEQ ID NO: 351116 - DNA, 25 bp, Homo sapien
tcgaggttgtagtaggcccctccca

SEQ ID NO: 351117 - DNA, 25 bp, Homo sapien
acctctcgaacacagatccagtgct

SEQ ID NO: 351118 - DNA, 25 bp, Homo sapien
tcgaacacagatccagtgctgcctt

SEQ ID NO: 351119 - DNA, 25 bp, Homo sapien
gatgaagcccatgacgttagtgagg

SEQ ID NO: 351120 - DNA, 25 bp, Homo sapien
cccatgacgttagtgagggcaatga

SEQ ID NO: 351121 - DNA, 25 bp, Homo sapien
cgttagtgagggcaatgacaccgac

SEQ ID NO: 351122 - DNA, 25 bp, Homo sapien
atgatgaagcccatgacgttagtga

SEQ ID NO: 351123 - DNA, 25 bp, Homo sapien
ttcacatcgtagttgccatttccca

SEQ ID NO: 351124 - DNA, 25 bp, Homo sapien
ctgcgcttgtcccaccaaacagctt

SEQ ID NO: 351125 - DNA, 25 bp, Homo sapien
tgctcttcttgtgaggtgtcaccat

SEQ ID NO: 351126 - DNA, 25 bp, Homo sapien
gaagtgctgccataatgacattcac

SEQ ID NO: 351127 - DNA, 25 bp, Homo sapien
tagtgaggcctactggaatgcacga

SEQ ID NO: 351128 - DNA, 25 bp, Homo sapien
taaatactcaaaggcatacaggagc

SEQ ID NO: 351129 - DNA, 25 bp, Homo sapien
gatagtaactggtgtcactcctgct

SEQ ID NO: 351130 - DNA, 25 bp, Homo sapien
cctgctttctagttaaggcctgcaa

SEQ ID NO: 351131 - DNA, 25 bp, Homo sapien
cttccataggatcttccctggatcc

SEQ ID NO: 351132 - DNA, 25 bp, Homo sapien
tcacaccctatctcttccataggat

SEQ ID NO: 351133 - DNA, 25 bp, Homo sapien
caaatcctacagctccttcacaccc

SEQ ID NO: 351134 - DNA, 25 bp, Homo sapien
tatcctatttcctgttccaagccaa

SEQ ID NO: 351135 - DNA, 25 bp, Homo sapien
ccactgagttccatgggatcctgat

SEQ ID NO: 351136 - DNA, 25 bp, Homo sapien
cagtggaaagtattcttgagactcc

SEQ ID NO: 351137 - DNA, 25 bp, Homo sapien
ggatcctgatgattccagtggaaag

SEQ ID NO: 351138 - DNA, 25 bp, Homo sapien
tcatccacagccagaggttagagcc

SEQ ID NO: 351139 - DNA, 25 bp, Homo sapien
gaaaatctcttgcagcgtatcccgg

SEQ ID NO: 351140 - DNA, 25 bp, Homo sapien
tatcccgggtgaaggcattgctgtc

SEQ ID NO: 351141 - DNA, 25 bp, Homo sapien
cacaaagctccctgcgctgtttctc

SEQ ID NO: 351142 - DNA, 25 bp, Homo sapien
gaagacgttattgagggcgtggagg

SEQ ID NO: 351143 - DNA, 25 bp, Homo sapien
ggttccagagatggctataaacacc

SEQ ID NO: 351144 - DNA, 25 bp, Homo sapien
gatttatgctttgtcactgggagaa

SEQ ID NO: 351145 - DNA, 25 bp, Homo sapien
tcttttccggattcctgaggtccac

SEQ ID NO: 351146 - DNA, 25 bp, Homo sapien
ccctctagaggaagaatgtaagctt

SEQ ID NO: 351147 - DNA, 25 bp, Homo sapien
ccaatgactcgggagacaaggcctg

SEQ ID NO: 351148 - DNA, 25 bp, Homo sapien
tttgaaccacgacgccaatgactcg

SEQ ID NO: 351149 - DNA, 25 bp, Homo sapien
acgacgccaatgactcgggagacaa

SEQ ID NO: 351150 - DNA, 25 bp, Homo sapien
tcttccatttcttttgaaccacgac

SEQ ID NO: 351151 - DNA, 25 bp, Homo sapien
ggcgtgggaccgcgagccgcgcggg

SEQ ID NO: 351152 - DNA, 25 bp, Homo sapien
gcaggcgtgggaccgcgagccgcgc

SEQ ID NO: 351153 - DNA, 25 bp, Homo sapien
gcgtgggaccgcgagccgcgcgggg

SEQ ID NO: 351154 - DNA, 25 bp, Homo sapien
ccggcaggcgtgggaccgcgagccg

SEQ ID NO: 351155 - DNA, 25 bp, Homo sapien
ggcgcggattctagccctctggccg

SEQ ID NO: 351156 - DNA, 25 bp, Homo sapien
ggaaggcgcggattctagccctctg

SEQ ID NO: 351157 - DNA, 25 bp, Homo sapien
tcggaaggcgcggattctagccctc

SEQ ID NO: 351158 - DNA, 25 bp, Homo sapien
gctccctcggaaggcgcggattcta

SEQ ID NO: 351159 - DNA, 25 bp, Homo sapien
tgcggaggaggagacaactccggtc

SEQ ID NO: 351160 - DNA, 25 bp, Homo sapien
gaaggttccgcgcggcgaagggctg

SEQ ID NO: 351161 - DNA, 25 bp, Homo sapien
agacaactccggtcagcggcgagcg

SEQ ID NO: 351162 - DNA, 25 bp, Homo sapien
gggccggacagtcagcctcgcgctc

SEQ ID NO: 351163 - DNA, 25 bp, Homo sapien
gccgccgggactgctcgccgctggc

SEQ ID NO: 351164 - DNA, 25 bp, Homo sapien
gtcacgtgagcgcaggcccagacgc

SEQ ID NO: 351165 - DNA, 25 bp, Homo sapien
gccgggactgctcgccgctggcggt

SEQ ID NO: 351166 - DNA, 25 bp, Homo sapien
ctgctcgccgctggcggtcccctca

SEQ ID NO: 351167 - DNA, 25 bp, Homo sapien
tgagcccgacgtcagcggcccccgc

SEQ ID NO: 351168 - DNA, 25 bp, Homo sapien
ctgagcccgacgtcagcggcccccg

SEQ ID NO: 351169 - DNA, 25 bp, Homo sapien
gcgtcacgcctgacgtaagtctgac

SEQ ID NO: 351170 - DNA, 25 bp, Homo sapien
acgtcatcggcaccggcctgggagc

SEQ ID NO: 351171 - DNA, 25 bp, Homo sapien
gacgtaagtctgacgtcatcggcac

SEQ ID NO: 351172 - DNA, 25 bp, Homo sapien
cagttcaacggttggggtgttgcaa

SEQ ID NO: 351173 - DNA, 25 bp, Homo sapien
tatgtgtggttaacgcgcggctcac

SEQ ID NO: 351174 - DNA, 25 bp, Homo sapien
gctccttctgcgttgactgttttat

SEQ ID NO: 351175 - DNA, 25 bp, Homo sapien
gcttttcggccgaacgttctcgctc

SEQ ID NO: 351176 - DNA, 25 bp, Homo sapien
ctcaccaggggggattttgaagcac

SEQ ID NO: 351177 - DNA, 25 bp, Homo sapien
ctgattcggtcgggcgcaaattgcc

SEQ ID NO: 351178 - DNA, 25 bp, Homo sapien
ttcggtcgggcgcaaattgccttgg

SEQ ID NO: 351179 - DNA, 25 bp, Homo sapien
cgggcgcaaattgccttggttagtg

SEQ ID NO: 351180 - DNA, 25 bp, Homo sapien
caaattgccttggttagtgggcccg

SEQ ID NO: 351181 - DNA, 25 bp, Homo sapien
ccagggagcgtcaagggtaggtgtc

SEQ ID NO: 351182 - DNA, 25 bp, Homo sapien
tgtccagggagcgtcaagggtaggt

SEQ ID NO: 351183 - DNA, 25 bp, Homo sapien
tccagggagcgtcaagggtaggtgt

SEQ ID NO: 351184 - DNA, 25 bp, Homo sapien
ctgtccagggagcgtcaagggtagg

SEQ ID NO: 351185 - DNA, 25 bp, Homo sapien
gcagagacctctgcgcgaggtatac

SEQ ID NO: 351186 - DNA, 25 bp, Homo sapien
tgcagagacctctgcgcgaggtata

SEQ ID NO: 351187 - DNA, 25 bp, Homo sapien
gccgagacgctcatgaagacaggta

SEQ ID NO: 351188 - DNA, 25 bp, Homo sapien
gggattcggagaccgagagtctcct

SEQ ID NO: 351189 - DNA, 25 bp, Homo sapien
ccgagatcgtaacccctcggctctg

SEQ ID NO: 351190 - DNA, 25 bp, Homo sapien
acctgctagtctccgggacgtgcgg

SEQ ID NO: 351191 - DNA, 25 bp, Homo sapien
cacagtgaagagcatggcggaacag

SEQ ID NO: 351192 - DNA, 25 bp, Homo sapien
tgattacctggtccggaaacgagta

SEQ ID NO: 351193 - DNA, 25 bp, Homo sapien
gcggaacagatagaggccgatgtca

SEQ ID NO: 351194 - DNA, 25 bp, Homo sapien
ccttctgcgggaacggcaagaagct

SEQ ID NO: 351195 - DNA, 25 bp, Homo sapien
ccactttgttgtaggcaagcttcaa

SEQ ID NO: 351196 - DNA, 25 bp, Homo sapien
ctttataatccgttacactggtcag

SEQ ID NO: 351197 - DNA, 25 bp, Homo sapien
ggtcattgacgctcaagtgcttgat

SEQ ID NO: 351198 - DNA, 25 bp, Homo sapien
taagaattgccttctacagaggcga

SEQ ID NO: 351199 - DNA, 25 bp, Homo sapien
gagtgggatgttcatgtggtccaaa

SEQ ID NO: 351200 - DNA, 25 bp, Homo sapien
caaatctgacaagagtgggatgttc

SEQ ID NO: 351201 - DNA, 25 bp, Homo sapien
caggaagtttgctcaaatctgacaa

SEQ ID NO: 351202 - DNA, 25 bp, Homo sapien
cacaccgtagtctcaggaagtttgc

SEQ ID NO: 351203 - DNA, 25 bp, Homo sapien
tttcttggtgtatttatccaggcaa

SEQ ID NO: 351204 - DNA, 25 bp, Homo sapien
tcttggtgtatttatccaggcaaga

SEQ ID NO: 351205 - DNA, 25 bp, Homo sapien
ttcttggtgtatttatccaggcaag

SEQ ID NO: 351206 - DNA, 25 bp, Homo sapien
agccgatgctcagagtagccttccc

SEQ ID NO: 351207 - DNA, 25 bp, Homo sapien
tcacatgtcgggcagccgatgctca

SEQ ID NO: 351208 - DNA, 25 bp, Homo sapien
tcgggcagccgatgctcagagtagc

SEQ ID NO: 351209 - DNA, 25 bp, Homo sapien
gtaggaccacgaaggtgaaatccaa

SEQ ID NO: 351210 - DNA, 25 bp, Homo sapien
ggctgccggaagatccccgtgctgg

SEQ ID NO: 351211 - DNA, 25 bp, Homo sapien
cggaagatccccgtgctggtgcaga

SEQ ID NO: 351212 - DNA, 25 bp, Homo sapien
tgctggtgcagagcaaagatgatgt

SEQ ID NO: 351213 - DNA, 25 bp, Homo sapien
cgtgctggtgcagagcaaagatgat

SEQ ID NO: 351214 - DNA, 25 bp, Homo sapien
cctgaataggagcaatagaggccat

SEQ ID NO: 351215 - DNA, 25 bp, Homo sapien
tgtctgcctgcgtatctgtctctga

SEQ ID NO: 351216 - DNA, 25 bp, Homo sapien
cacagattcaggtcatgccaaaagc

SEQ ID NO: 351217 - DNA, 25 bp, Homo sapien
gccagacttccggaggactgaccat

SEQ ID NO: 351218 - DNA, 25 bp, Homo sapien
ctaggacttgggcattttaacaggg

SEQ ID NO: 351219 - DNA, 25 bp, Homo sapien
tctttgtcccgactctggccctgct

SEQ ID NO: 351220 - DNA, 25 bp, Homo sapien
cgtctggcgttgagacccctggcat

SEQ ID NO: 351221 - DNA, 25 bp, Homo sapien
ttctagttaagggaactgaagctca

SEQ ID NO: 351222 - DNA, 25 bp, Homo sapien
gtgcctccataacaagcgtctggcg

SEQ ID NO: 351223 - DNA, 25 bp, Homo sapien
tgactggatccatgctttactgtgt

SEQ ID NO: 351224 - DNA, 25 bp, Homo sapien
attcttgggattcaggagctcgggc

SEQ ID NO: 351225 - DNA, 25 bp, Homo sapien
caaacagcagtacttgccagaacca

SEQ ID NO: 351226 - DNA, 25 bp, Homo sapien
gatctgtgtagttgccaggcccaca

SEQ ID NO: 351227 - DNA, 25 bp, Homo sapien
cacagtcaggactgttctggcttat

SEQ ID NO: 351228 - DNA, 25 bp, Homo sapien
cagggatgaatatgccacgcacagg

SEQ ID NO: 351229 - DNA, 25 bp, Homo sapien
cagcaggtgtttgtggcgtctttcc

SEQ ID NO: 351230 - DNA, 25 bp, Homo sapien
tcccaggagtaaggcctgtgatggt

SEQ ID NO: 351231 - DNA, 25 bp, Homo sapien
tgtggttcatgcttccctaggtgga

SEQ ID NO: 351232 - DNA, 25 bp, Homo sapien
tttagggcacaagaagccccatggc

SEQ ID NO: 351233 - DNA, 25 bp, Homo sapien
gaagggcgactacctgaacaagagc

SEQ ID NO: 351234 - DNA, 25 bp, Homo sapien
ggagagcgcaaaacaaaccctggct

SEQ ID NO: 351235 - DNA, 25 bp, Homo sapien
agttagtcaggatccgcagctccac

SEQ ID NO: 351236 - DNA, 25 bp, Homo sapien
ctagtgggcgggctccccatgcact

SEQ ID NO: 351237 - DNA, 25 bp, Homo sapien
tgaagcggtagatgcaggtgtactc

SEQ ID NO: 351238 - DNA, 25 bp, Homo sapien
ggtggccccagttagtcaggatccg

SEQ ID NO: 351239 - DNA, 25 bp, Homo sapien
tcgcctagggccagatggctcccct

SEQ ID NO: 351240 - DNA, 25 bp, Homo sapien
ctgaagagaaccaggcttcaaaagc

SEQ ID NO: 351241 - DNA, 25 bp, Homo sapien
agagacctgtgaggcctcactgaca

SEQ ID NO: 351242 - DNA, 25 bp, Homo sapien
gagaaccaggcttcaaaagctccta

SEQ ID NO: 351243 - DNA, 25 bp, Homo sapien
gaaccaccttcatagagggcttcat

SEQ ID NO: 351244 - DNA, 25 bp, Homo sapien
gtgatcaacagatagaaccaccttc

SEQ ID NO: 351245 - DNA, 25 bp, Homo sapien
ttctccagtgcccatcgggcctctg

SEQ ID NO: 351246 - DNA, 25 bp, Homo sapien
agggcttcatagatgctgatgtggg

SEQ ID NO: 351247 - DNA, 25 bp, Homo sapien
ttagcagcatatcttacctgggcag

SEQ ID NO: 351248 - DNA, 25 bp, Homo sapien
gaatggtgttagcagcatatcttac

SEQ ID NO: 351249 - DNA, 25 bp, Homo sapien
ggtgttagcagcatatcttacctgg

SEQ ID NO: 351250 - DNA, 25 bp, Homo sapien
tgttgggaatggtgttagcagcata

SEQ ID NO: 351251 - DNA, 25 bp, Homo sapien
ctcgtctggcctctatactttccta

SEQ ID NO: 351252 - DNA, 25 bp, Homo sapien
gtctggcctctatactttcctaaag

SEQ ID NO: 351253 - DNA, 25 bp, Homo sapien
tcagagctgatgacaactcagttct

SEQ ID NO: 351254 - DNA, 25 bp, Homo sapien
tcttgcagcctagttacctcctcag

SEQ ID NO: 351255 - DNA, 25 bp, Homo sapien
ctgaaagtgaaacgtctgaataggc

SEQ ID NO: 351256 - DNA, 25 bp, Homo sapien
taggctcgccgtcctgatcgtaagt

SEQ ID NO: 351257 - DNA, 25 bp, Homo sapien
gatcgtaagtgaacttgccaaggag

SEQ ID NO: 351258 - DNA, 25 bp, Homo sapien
tgaacttgccaaggagtgtcccctc

SEQ ID NO: 351259 - DNA, 25 bp, Homo sapien
tagtgctgttgggtgacaaggcctt

SEQ ID NO: 351260 - DNA, 25 bp, Homo sapien
ggaccacggcgaagccttgtggccc

SEQ ID NO: 351261 - DNA, 25 bp, Homo sapien
catgctctaaggtaacggctgtggg

SEQ ID NO: 351262 - DNA, 25 bp, Homo sapien
gcggatgcgggcagagaggcggacc

SEQ ID NO: 351263 - DNA, 25 bp, Homo sapien
tcgtaggtctcagaacatcgggtgc

SEQ ID NO: 351264 - DNA, 25 bp, Homo sapien
ggtgactgggagtggtaccacaggg

SEQ ID NO: 351265 - DNA, 25 bp, Homo sapien
acatcgggtgctgatgacgctggcc

SEQ ID NO: 351266 - DNA, 25 bp, Homo sapien
agggccgtcttggtctcgtaggtct

SEQ ID NO: 351267 - DNA, 25 bp, Homo sapien
gcgtagtctgccagcccgatgcggt

SEQ ID NO: 351268 - DNA, 25 bp, Homo sapien
cagcccgatgcggtcctcactgtag

SEQ ID NO: 351269 - DNA, 25 bp, Homo sapien
cggtcctcactgtagcgctgcaggg

SEQ ID NO: 351270 - DNA, 25 bp, Homo sapien
gactccagggcgtagtctgccagcc

SEQ ID NO: 351271 - DNA, 25 bp, Homo sapien
ccacatgggtgaggatcttgctctc

SEQ ID NO: 351272 - DNA, 25 bp, Homo sapien
ctgactgatccaggccgggaactga

SEQ ID NO: 351273 - DNA, 25 bp, Homo sapien
tccacctcgggcaaggaactgactg

SEQ ID NO: 351274 - DNA, 25 bp, Homo sapien
tccaggccgggaactgagattccac

SEQ ID NO: 351275 - DNA, 25 bp, Homo sapien
tgcttcagtgccagagccgccagct

SEQ ID NO: 351276 - DNA, 25 bp, Homo sapien
gcttcagtgccagagccgccagctc

SEQ ID NO: 351277 - DNA, 25 bp, Homo sapien
ccacttcttccgccaccgagctctg

SEQ ID NO: 351278 - DNA, 25 bp, Homo sapien
gcagcaggcccacttcttccgccac

SEQ ID NO: 351279 - DNA, 25 bp, Homo sapien
tggtcccagagagagaagagtaagc

SEQ ID NO: 351280 - DNA, 25 bp, Homo sapien
agagagaagagtaagcctcggatct

SEQ ID NO: 351281 - DNA, 25 bp, Homo sapien
cagagagagaagagtaagcctcgga

SEQ ID NO: 351282 - DNA, 25 bp, Homo sapien
cccagagagagaagagtaagcctcg

SEQ ID NO: 351283 - DNA, 25 bp, Homo sapien
tgcttggcaagatgatcagaactct

SEQ ID NO: 351284 - DNA, 25 bp, Homo sapien
gcttggcaagatgatcagaactctc

SEQ ID NO: 351285 - DNA, 25 bp, Homo sapien
tggcaagatgatcagaactctctgc

SEQ ID NO: 351286 - DNA, 25 bp, Homo sapien
cttggcaagatgatcagaactctct

SEQ ID NO: 351287 - DNA, 25 bp, Homo sapien
cagctgctggatgcgagcctcggac

SEQ ID NO: 351288 - DNA, 25 bp, Homo sapien
tcagctgctggatgcgagcctcgga

SEQ ID NO: 351289 - DNA, 25 bp, Homo sapien
ttcagctgctggatgcgagcctcgg

SEQ ID NO: 351290 - DNA, 25 bp, Homo sapien
gctgctggatgcgagcctcggactc

SEQ ID NO: 351291 - DNA, 25 bp, Homo sapien
ggcccggacgatcttcttgaagagg

SEQ ID NO: 351292 - DNA, 25 bp, Homo sapien
ctgggaggcccggacgatcttcttg

SEQ ID NO: 351293 - DNA, 25 bp, Homo sapien
gggaggcccggacgatcttcttgaa

SEQ ID NO: 351294 - DNA, 25 bp, Homo sapien
gaggcccggacgatcttcttgaaga

SEQ ID NO: 351295 - DNA, 25 bp, Homo sapien
ctcgcacagctcactatgggggtgg

SEQ ID NO: 351296 - DNA, 25 bp, Homo sapien
taccatgctggggctttctactcgc

SEQ ID NO: 351297 - DNA, 25 bp, Homo sapien
ggagacacgatggcctccatcaaag

SEQ ID NO: 351298 - DNA, 25 bp, Homo sapien
tctactcgcacagctcactatgggg

SEQ ID NO: 351299 - DNA, 25 bp, Homo sapien
ccagagagtgtacccgggacataac

SEQ ID NO: 351300 - DNA, 25 bp, Homo sapien
agggtgtcctcgtggctcaggccac

SEQ ID NO: 351301 - DNA, 25 bp, Homo sapien
aatcctccttcagggcagcttcacg

SEQ ID NO: 351302 - DNA, 25 bp, Homo sapien
ccagacgccgctccagagagtgtac

SEQ ID NO: 351303 - DNA, 25 bp, Homo sapien
aaggcctcaaaggtctggttgcctt

SEQ ID NO: 351304 - DNA, 25 bp, Homo sapien
ggcctcaaaggtctggttgccttgg

SEQ ID NO: 351305 - DNA, 25 bp, Homo sapien
gccttggttctctcttgaaaccctg

SEQ ID NO: 351306 - DNA, 25 bp, Homo sapien
ggttgccttggttctctcttgaaac

SEQ ID NO: 351307 - DNA, 25 bp, Homo sapien
gcagggtggaatgtctgcagcccat

SEQ ID NO: 351308 - DNA, 25 bp, Homo sapien
gaaatgtggcgatgagtctctggct

SEQ ID NO: 351309 - DNA, 25 bp, Homo sapien
cccagccctcatccggcctcctgct

SEQ ID NO: 351310 - DNA, 25 bp, Homo sapien
tgcagcccataggggtagaaatacc

SEQ ID NO: 351311 - DNA, 25 bp, Homo sapien
actggatatgaaccagctgttcttg

SEQ ID NO: 351312 - DNA, 25 bp, Homo sapien
tggtgctcagttgccactggatatg

SEQ ID NO: 351313 - DNA, 25 bp, Homo sapien
gccactggatatgaaccagctgttc

SEQ ID NO: 351314 - DNA, 25 bp, Homo sapien
agggtggtgctcagttgccactgga

SEQ ID NO: 351315 - DNA, 25 bp, Homo sapien
atgcagagatgatccagggtccagg

SEQ ID NO: 351316 - DNA, 25 bp, Homo sapien
tgcccagggcggcacaaaagaggct

SEQ ID NO: 351317 - DNA, 25 bp, Homo sapien
tttcacccaatgttgcggcactagg

SEQ ID NO: 351318 - DNA, 25 bp, Homo sapien
taatgataatgggagggcatcccgc

SEQ ID NO: 351319 - DNA, 25 bp, Homo sapien
aggaacgtcttcagggacgagaagc

SEQ ID NO: 351320 - DNA, 25 bp, Homo sapien
cagaggaacgtcttcagggacgaga

SEQ ID NO: 351321 - DNA, 25 bp, Homo sapien
caggaaccagaggaacgtcttcagg

SEQ ID NO: 351322 - DNA, 25 bp, Homo sapien
aaccagaggaacgtcttcagggacg

SEQ ID NO: 351323 - DNA, 25 bp, Homo sapien
aacgaagacgtcaaggagggaggca

SEQ ID NO: 351324 - DNA, 25 bp, Homo sapien
tgtggtcaggcggtaccaggtggtg

SEQ ID NO: 351325 - DNA, 25 bp, Homo sapien
gcagctgtggtcaggcggtaccagg

SEQ ID NO: 351326 - DNA, 25 bp, Homo sapien
aggcggtaccaggtggtgccagccc

SEQ ID NO: 351327 - DNA, 25 bp, Homo sapien
atccagagtaaggagcccgcccgtg

SEQ ID NO: 351328 - DNA, 25 bp, Homo sapien
ttcggagccgcgagctggaactctg

SEQ ID NO: 351329 - DNA, 25 bp, Homo sapien
ctctgctggtccacatccgagtagc

SEQ ID NO: 351330 - DNA, 25 bp, Homo sapien
tggcgaagtggccaccatccagagt

SEQ ID NO: 351331 - DNA, 25 bp, Homo sapien
ctctgtcactttcgagcctcttcct

SEQ ID NO: 351332 - DNA, 25 bp, Homo sapien
aggacactggctcagtctctgtcac

SEQ ID NO: 351333 - DNA, 25 bp, Homo sapien
gaggacactggctcagtctctgtca

SEQ ID NO: 351334 - DNA, 25 bp, Homo sapien
gtctctgtcactttcgagcctcttc

SEQ ID NO: 351335 - DNA, 25 bp, Homo sapien
cttgcgccccacaagcccgctggcc

SEQ ID NO: 351336 - DNA, 25 bp, Homo sapien
ggagtagcccgaggaagagcccagg

SEQ ID NO: 351337 - DNA, 25 bp, Homo sapien
gaagtcctcggtggccttgcgcccc

SEQ ID NO: 351338 - DNA, 25 bp, Homo sapien
cagaggagtagcccgaggaagagcc

SEQ ID NO: 351339 - DNA, 25 bp, Homo sapien
gaaccaggggctcttctgggcctcc

SEQ ID NO: 351340 - DNA, 25 bp, Homo sapien
tgtgcagggaagaaccaggggctct

SEQ ID NO: 351341 - DNA, 25 bp, Homo sapien
aagaaccaggggctcttctgggcct

SEQ ID NO: 351342 - DNA, 25 bp, Homo sapien
agggaagaaccaggggctcttctgg

SEQ ID NO: 351343 - DNA, 25 bp, Homo sapien
cccgggacggagggctccacactca

SEQ ID NO: 351344 - DNA, 25 bp, Homo sapien
ccgggacggagggctccacactcac

SEQ ID NO: 351345 - DNA, 25 bp, Homo sapien
gagtatctcgcgggaggccgaggaa

SEQ ID NO: 351346 - DNA, 25 bp, Homo sapien
tgtgaggagtatctcgcgggaggcc

SEQ ID NO: 351347 - DNA, 25 bp, Homo sapien
ccagttggcgtcaccatgcagttcc

SEQ ID NO: 351348 - DNA, 25 bp, Homo sapien
cactgtagtaggaggtgtgtgcatc

SEQ ID NO: 351349 - DNA, 25 bp, Homo sapien
tgggaaccaggactcgtggaccagc

SEQ ID NO: 351350 - DNA, 25 bp, Homo sapien
tgtgtgcatcagaggacgggcccag

SEQ ID NO: 351351 - DNA, 25 bp, Homo sapien
tcgtcaccctgggagtagcgcgtga

SEQ ID NO: 351352 - DNA, 25 bp, Homo sapien
tagcgcgtgaggcgctggcttcttc

SEQ ID NO: 351353 - DNA, 25 bp, Homo sapien
ctgctgctgccgtcatcgtcaccct

SEQ ID NO: 351354 - DNA, 25 bp, Homo sapien
gagaggactgtctttaaacagggtg

SEQ ID NO: 351355 - DNA, 25 bp, Homo sapien
gtgggatgtggactcttcccctgaa

SEQ ID NO: 351356 - DNA, 25 bp, Homo sapien
gaggtgggatgtggactcttcccct

SEQ ID NO: 351357 - DNA, 25 bp, Homo sapien
tgggatgtggactcttcccctgaag

SEQ ID NO: 351358 - DNA, 25 bp, Homo sapien
ggtgggatgtggactcttcccctga

SEQ ID NO: 351359 - DNA, 25 bp, Homo sapien
tgctgagctccgcacaagccagaat

SEQ ID NO: 351360 - DNA, 25 bp, Homo sapien
gaattgggtcttcctcgacctctga

SEQ ID NO: 351361 - DNA, 25 bp, Homo sapien
ttcctcgacctctgacaagtagcag

SEQ ID NO: 351362 - DNA, 25 bp, Homo sapien
tccgcacaagccagaattgggtctt

SEQ ID NO: 351363 - DNA, 25 bp, Homo sapien
ccacgctcagccaaaaggatttttc

SEQ ID NO: 351364 - DNA, 25 bp, Homo sapien
aggtgtgcgccaccgggactggcta

SEQ ID NO: 351365 - DNA, 25 bp, Homo sapien
caggtgtgcgccaccgggactggct

SEQ ID NO: 351366 - DNA, 25 bp, Homo sapien
ccaccacgctcagccaaaaggattt

SEQ ID NO: 351367 - DNA, 25 bp, Homo sapien
tcctgatggcgcttgcactgtctgt

SEQ ID NO: 351368 - DNA, 25 bp, Homo sapien
gtccccacggtgcacactgtgctgc

SEQ ID NO: 351369 - DNA, 25 bp, Homo sapien
tgtctgtccccacggtgcacactgt

SEQ ID NO: 351370 - DNA, 25 bp, Homo sapien
cactgtctgtccccacggtgcacac

SEQ ID NO: 351371 - DNA, 25 bp, Homo sapien
gaggcaatgggtaacttgtccacag

SEQ ID NO: 351372 - DNA, 25 bp, Homo sapien
cacatgcgcaaaacaaggctgtata

SEQ ID NO: 351373 - DNA, 25 bp, Homo sapien
cccagcctgtaagtgccaaagccag

SEQ ID NO: 351374 - DNA, 25 bp, Homo sapien
ggaccgggctccttgtatacctcat

SEQ ID NO: 351375 - DNA, 25 bp, Homo sapien
tgctggcccgtacaacaaagtcact

SEQ ID NO: 351376 - DNA, 25 bp, Homo sapien
tgaaccactcaggtctagacacccg

SEQ ID NO: 351377 - DNA, 25 bp, Homo sapien
ggctctggaactgataatgaggaca

SEQ ID NO: 351378 - DNA, 25 bp, Homo sapien
tctcaacgttagtgcctctgctggc

SEQ ID NO: 351379 - DNA, 25 bp, Homo sapien
gcctgggtccttgtctctattcctg

SEQ ID NO: 351380 - DNA, 25 bp, Homo sapien
tggcatcccctctacttttagctgg

SEQ ID NO: 351381 - DNA, 25 bp, Homo sapien
tgtccttataaggtaatctcccctc

SEQ ID NO: 351382 - DNA, 25 bp, Homo sapien
gcctcatgtcctggccttgttggca

SEQ ID NO: 351383 - DNA, 25 bp, Homo sapien
gcctctgtcctgctgaaggaggtga

SEQ ID NO: 351384 - DNA, 25 bp, Homo sapien
acagggactcctcttagcctctgtc

SEQ ID NO: 351385 - DNA, 25 bp, Homo sapien
ccagctgcccacacagggactcctc

SEQ ID NO: 351386 - DNA, 25 bp, Homo sapien
tagcctctgtcctgctgaaggaggt

SEQ ID NO: 351387 - DNA, 25 bp, Homo sapien
tgtttataccatacccaagctgccg

SEQ ID NO: 351388 - DNA, 25 bp, Homo sapien
gcggcatcctggcatcacaaaacag

SEQ ID NO: 351389 - DNA, 25 bp, Homo sapien
cagaactcccagagatgcctctcag

SEQ ID NO: 351390 - DNA, 25 bp, Homo sapien
aaatattctgatggaggttgagcgg

SEQ ID NO: 351391 - DNA, 25 bp, Homo sapien
ggaaacgctcatcggaaagcatcct

SEQ ID NO: 351392 - DNA, 25 bp, Homo sapien
gggagctgaaatctactactgcgaa

SEQ ID NO: 351393 - DNA, 25 bp, Homo sapien
tactgcgaatcataatagacaccac

SEQ ID NO: 351394 - DNA, 25 bp, Homo sapien
tcacaagatgaaaaaggtcgaggcc

SEQ ID NO: 351395 - DNA, 25 bp, Homo sapien
agaaattgtcaccaaaggcgcgcct

SEQ ID NO: 351396 - DNA, 25 bp, Homo sapien
actgaacaaaacgggccttcctctg

SEQ ID NO: 351397 - DNA, 25 bp, Homo sapien
tgaacaaaacgggccttcctctgag

SEQ ID NO: 351398 - DNA, 25 bp, Homo sapien
attgtcaccaaaggcgcgcctcctg

SEQ ID NO: 351399 - DNA, 25 bp, Homo sapien
tccgctcagggcgacacagcggccg

SEQ ID NO: 351400 - DNA, 25 bp, Homo sapien
gcgcgggcacgcgaagagcggcgac

SEQ ID NO: 351401 - DNA, 25 bp, Homo sapien
cgggcggacaatgcggccggcggag

SEQ ID NO: 351402 - DNA, 25 bp, Homo sapien
gggcggcgcgcgtgtggccgactct

SEQ ID NO: 351403 - DNA, 25 bp, Homo sapien
tgtccagggtgttcctcctggactc

SEQ ID NO: 351404 - DNA, 25 bp, Homo sapien
aactcaggggctgacatagcctgct

SEQ ID NO: 351405 - DNA, 25 bp, Homo sapien
cactcctggtgaacgacgtgggcag

SEQ ID NO: 351406 - DNA, 25 bp, Homo sapien
agcctcttcatacatccaccaggtg

SEQ ID NO: 351407 - DNA, 25 bp, Homo sapien
acttcagactcgtgcccaggaggga

SEQ ID NO: 351408 - DNA, 25 bp, Homo sapien
aatacttaccgcttgcctgttctga

SEQ ID NO: 351409 - DNA, 25 bp, Homo sapien
gagccgatcatcacaacacttcaga

SEQ ID NO: 351410 - DNA, 25 bp, Homo sapien
ctcaaagggacccagtgtgactttc

SEQ ID NO: 351411 - DNA, 25 bp, Homo sapien
gcccggccaatggccttgttttcta

SEQ ID NO: 351412 - DNA, 25 bp, Homo sapien
tgagggaagcagctaggagatggac

SEQ ID NO: 351413 - DNA, 25 bp, Homo sapien
agcagctaggagatggacggcccaa

SEQ ID NO: 351414 - DNA, 25 bp, Homo sapien
aaatgctgcaactgccgtggagggt

SEQ ID NO: 351415 - DNA, 25 bp, Homo sapien
gggaggcctggcgatggtgagggaa

SEQ ID NO: 351416 - DNA, 25 bp, Homo sapien
tatgaccactaatgacaaggacggc

SEQ ID NO: 351417 - DNA, 25 bp, Homo sapien
cctggctctcaactgtacgggtcga

SEQ ID NO: 351418 - DNA, 25 bp, Homo sapien
gatgtcaagttcacacactgggcgt

SEQ ID NO: 351419 - DNA, 25 bp, Homo sapien
catgcggtccctgatgcgaagtcgc

SEQ ID NO: 351420 - DNA, 25 bp, Homo sapien
acgtgccaggaggagccgaacttct

SEQ ID NO: 351421 - DNA, 25 bp, Homo sapien
tcgtgggtgatctcaaacccaaagc

SEQ ID NO: 351422 - DNA, 25 bp, Homo sapien
tctctttgatcatcttggcggcgct

SEQ ID NO: 351423 - DNA, 25 bp, Homo sapien
ccgaagtacaggtagaggaggttct

SEQ ID NO: 351424 - DNA, 25 bp, Homo sapien
tgtgcctgctctttcaagacgtgcc

SEQ ID NO: 351425 - DNA, 25 bp, Homo sapien
tcaggaccaactggatggagagacc

SEQ ID NO: 351426 - DNA, 25 bp, Homo sapien
cctcagatgtaacctggacaagcgg

SEQ ID NO: 351427 - DNA, 25 bp, Homo sapien
gactgcgaggtacctgatgcgttca

SEQ ID NO: 351428 - DNA, 25 bp, Homo sapien
tagggctgggtgtgaccgtcagtgc

SEQ ID NO: 351429 - DNA, 25 bp, Homo sapien
tcctagcagtactgtctggagccaa

SEQ ID NO: 351430 - DNA, 25 bp, Homo sapien
gaaaggcaccctattcagcagccca

SEQ ID NO: 351431 - DNA, 25 bp, Homo sapien
gtgcctggagtcagcgccagcctct

SEQ ID NO: 351432 - DNA, 25 bp, Homo sapien
gccatcaaaagcacgaggggccgcc

SEQ ID NO: 351433 - DNA, 25 bp, Homo sapien
ccatcaaaagcacgaggggccgcct

SEQ ID NO: 351434 - DNA, 25 bp, Homo sapien
gggccatcaaaagcacgaggggccg

SEQ ID NO: 351435 - DNA, 25 bp, Homo sapien
ggccatcaaaagcacgaggggccgc

SEQ ID NO: 351436 - DNA, 25 bp, Homo sapien
tccatggtctccacgcgcatctcct

SEQ ID NO: 351437 - DNA, 25 bp, Homo sapien
tgtgacacatagctccatggtctcc

SEQ ID NO: 351438 - DNA, 25 bp, Homo sapien
ctcacaggctgtgacacatagctcc

SEQ ID NO: 351439 - DNA, 25 bp, Homo sapien
caggctgtgacacatagctccatgg

SEQ ID NO: 351440 - DNA, 25 bp, Homo sapien
gacagggcaggggtaacaaacaaga

SEQ ID NO: 351441 - DNA, 25 bp, Homo sapien
acaagagacaggcttagcccgtgac

SEQ ID NO: 351442 - DNA, 25 bp, Homo sapien
tctctgtcccaagcttaaggcatgg

SEQ ID NO: 351443 - DNA, 25 bp, Homo sapien
ccaagcttaaggcatggacagcagg

SEQ ID NO: 351444 - DNA, 25 bp, Homo sapien
gcagtcgcttataatcagcctcatc

SEQ ID NO: 351445 - DNA, 25 bp, Homo sapien
agggaaggtctgcagtcgcttataa

SEQ ID NO: 351446 - DNA, 25 bp, Homo sapien
ggtctgcagtcgcttataatcagcc

SEQ ID NO: 351447 - DNA, 25 bp, Homo sapien
gaaggtctgcagtcgcttataatca

SEQ ID NO: 351448 - DNA, 25 bp, Homo sapien
agtggggctttcaggaggtgctggg

SEQ ID NO: 351449 - DNA, 25 bp, Homo sapien
gtggggctttcaggaggtgctggga

SEQ ID NO: 351450 - DNA, 25 bp, Homo sapien
acccaggagattcaggaagcaggcc

SEQ ID NO: 351451 - DNA, 25 bp, Homo sapien
gccctgccaactcggtgggagcaga

SEQ ID NO: 351452 - DNA, 25 bp, Homo sapien
gacacacccaggagattcaggaagc

SEQ ID NO: 351453 - DNA, 25 bp, Homo sapien
tgccaactcggtgggagcagaaaat

SEQ ID NO: 351454 - DNA, 25 bp, Homo sapien
cgagcacggtaactaacaggcaggt

SEQ ID NO: 351455 - DNA, 25 bp, Homo sapien
cggtttcctgcctgtcggtgtttca

SEQ ID NO: 351456 - DNA, 25 bp, Homo sapien
taagcggatacaaatcaccaggttg

SEQ ID NO: 351457 - DNA, 25 bp, Homo sapien
caggtgatgacacgtgacggctgtc

SEQ ID NO: 351458 - DNA, 25 bp, Homo sapien
gaattaccaagcacaatttcattgt

SEQ ID NO: 351459 - DNA, 25 bp, Homo sapien
gctggtgaattaccaagcacaattt

SEQ ID NO: 351460 - DNA, 25 bp, Homo sapien
gtctctctctacaagctggtgaatt

SEQ ID NO: 351461 - DNA, 25 bp, Homo sapien
gctgtcctcctagccttactgcttc

SEQ ID NO: 351462 - DNA, 25 bp, Homo sapien
tttgattcaattcatcccggaggct

SEQ ID NO: 351463 - DNA, 25 bp, Homo sapien
tgctctaacatgcagaatcctgctg

SEQ ID NO: 351464 - DNA, 25 bp, Homo sapien
aaaaagtgctggcatgtaggagcca

SEQ ID NO: 351465 - DNA, 25 bp, Homo sapien
cagaggtggcggctacactgatgac

SEQ ID NO: 351466 - DNA, 25 bp, Homo sapien
caggaacaacggggaaaagccagtg

SEQ ID NO: 351467 - DNA, 25 bp, Homo sapien
tctcaggaacaacggggaaaagcca

SEQ ID NO: 351468 - DNA, 25 bp, Homo sapien
ctcaggaacaacggggaaaagccag

SEQ ID NO: 351469 - DNA, 25 bp, Homo sapien
gccgcaagccggagtgtgcaggcat

SEQ ID NO: 351470 - DNA, 25 bp, Homo sapien
taagaactgtgtgggccgcaagccg

SEQ ID NO: 351471 - DNA, 25 bp, Homo sapien
agctaagaactgtgtgggccgcaag

SEQ ID NO: 351472 - DNA, 25 bp, Homo sapien
ggccgcaagccggagtgtgcaggca

SEQ ID NO: 351473 - DNA, 25 bp, Homo sapien
gaaacgttaaagctctctgcgctgt

SEQ ID NO: 351474 - DNA, 25 bp, Homo sapien
tgctaccagcgttaatcagccagga

SEQ ID NO: 351475 - DNA, 25 bp, Homo sapien
ggaagctgttgcaagccccaggtat

SEQ ID NO: 351476 - DNA, 25 bp, Homo sapien
actaagggccctgactacaaagagc

SEQ ID NO: 351477 - DNA, 25 bp, Homo sapien
tggagaccaacaggcatacacaagg

SEQ ID NO: 351478 - DNA, 25 bp, Homo sapien
cacactcagtggtggcacactacag

SEQ ID NO: 351479 - DNA, 25 bp, Homo sapien
tcaactactcgactataatcatcag

SEQ ID NO: 351480 - DNA, 25 bp, Homo sapien
gaaagtagtgccacaagacaggcat

SEQ ID NO: 351481 - DNA, 25 bp, Homo sapien
tatggtacggcctatttctccaagg

SEQ ID NO: 351482 - DNA, 25 bp, Homo sapien
tttaagttgctggtaagatacgcag

SEQ ID NO: 351483 - DNA, 25 bp, Homo sapien
aatcaccaagtcatgggctatcggg

SEQ ID NO: 351484 - DNA, 25 bp, Homo sapien
gaagccatcaagtccaactatcgca

SEQ ID NO: 351485 - DNA, 25 bp, Homo sapien
tactccgcgaaaggtcgagggatca

SEQ ID NO: 351486 - DNA, 25 bp, Homo sapien
catcctctcggaagcctaaagttgg

SEQ ID NO: 351487 - DNA, 25 bp, Homo sapien
taccaaaggagatgcaccgacgtat

SEQ ID NO: 351488 - DNA, 25 bp, Homo sapien
gaatctatactggactggactctgt

SEQ ID NO: 351489 - DNA, 25 bp, Homo sapien
gccagggttgtcaaggagcgaaaca

SEQ ID NO: 351490 - DNA, 25 bp, Homo sapien
aaacaagagtgtcttagcaaccagc

SEQ ID NO: 351491 - DNA, 25 bp, Homo sapien
ccccgccagggttgtcaaggagcga

SEQ ID NO: 351492 - DNA, 25 bp, Homo sapien
caaggagcgaaacaagagtgtctta

SEQ ID NO: 351493 - DNA, 25 bp, Homo sapien
cacccttcccactacaacagcccac

SEQ ID NO: 351494 - DNA, 25 bp, Homo sapien
acccttcccactacaacagcccact

SEQ ID NO: 351495 - DNA, 25 bp, Homo sapien
cccactacaacagcccacttccagt

SEQ ID NO: 351496 - DNA, 25 bp, Homo sapien
cttcccactacaacagcccacttcc

SEQ ID NO: 351497 - DNA, 25 bp, Homo sapien
tggtggcacctggagaactctttac

SEQ ID NO: 351498 - DNA, 25 bp, Homo sapien
cccatggtgcacagtagagaatcac

SEQ ID NO: 351499 - DNA, 25 bp, Homo sapien
tatttctcatcagcacccatggtgc

SEQ ID NO: 351500 - DNA, 25 bp, Homo sapien
tagggccctactgctccaggatggt

SEQ ID NO: 351501 - DNA, 25 bp, Homo sapien
tctcatctggtgcatgttcctgtca

SEQ ID NO: 351502 - DNA, 25 bp, Homo sapien
tctatgagcccataaggttttggcc

SEQ ID NO: 351503 - DNA, 25 bp, Homo sapien
tccatgagtgcaacaatctcctagt

SEQ ID NO: 351504 - DNA, 25 bp, Homo sapien
tggcatttaagcctccccatggcgt

SEQ ID NO: 351505 - DNA, 25 bp, Homo sapien
tgctggagttagctgctgaggacat

SEQ ID NO: 351506 - DNA, 25 bp, Homo sapien
tatagccaattctttgctggagtta

SEQ ID NO: 351507 - DNA, 25 bp, Homo sapien
tggttgcctttttatagccaattct

SEQ ID NO: 351508 - DNA, 25 bp, Homo sapien
ccttcacatttccacttggttgcct

SEQ ID NO: 351509 - DNA, 25 bp, Homo sapien
tgagacacttgacccagcacttggg

SEQ ID NO: 351510 - DNA, 25 bp, Homo sapien
aacacgtctggagcaatggtgccca

SEQ ID NO: 351511 - DNA, 25 bp, Homo sapien
tgttggaaagcatctgacctcgcgg

SEQ ID NO: 351512 - DNA, 25 bp, Homo sapien
gagcaaatgaccaaagcgagggcct

SEQ ID NO: 351513 - DNA, 25 bp, Homo sapien
tgcagacatcgaaggcagcctttgt

SEQ ID NO: 351514 - DNA, 25 bp, Homo sapien
tgccttggccctccccttgcagaca

SEQ ID NO: 351515 - DNA, 25 bp, Homo sapien
cccttgcagacatcgaaggcagcct

SEQ ID NO: 351516 - DNA, 25 bp, Homo sapien
cttgcagacatcgaaggcagccttt

SEQ ID NO: 351517 - DNA, 25 bp, Homo sapien
gcatcaaaccggccacccagggtat

SEQ ID NO: 351518 - DNA, 25 bp, Homo sapien
tcagggcgtggtcccacaggttaaa

SEQ ID NO: 351519 - DNA, 25 bp, Homo sapien
tgggcaatgtcaccgacaaaggcct

SEQ ID NO: 351520 - DNA, 25 bp, Homo sapien
tggcgcagtgcagttggcaatgccc

SEQ ID NO: 351521 - DNA, 25 bp, Homo sapien
tgggccaagacagcagcagagaaag

SEQ ID NO: 351522 - DNA, 25 bp, Homo sapien
ctgggccaagacagcagcagagaaa

SEQ ID NO: 351523 - DNA, 25 bp, Homo sapien
cagagaaaggagaggcatggagtga

SEQ ID NO: 351524 - DNA, 25 bp, Homo sapien
ggcatggagtgagggagcagaaaag

SEQ ID NO: 351525 - DNA, 25 bp, Homo sapien
cataggccatcccttgtggtccagg

SEQ ID NO: 351526 - DNA, 25 bp, Homo sapien
tccaggcgatgcagatgtggtgcca

SEQ ID NO: 351527 - DNA, 25 bp, Homo sapien
tcctggtaggcagaccataggccat

SEQ ID NO: 351528 - DNA, 25 bp, Homo sapien
gataaggatcccatgaggcttgatg

SEQ ID NO: 351529 - DNA, 25 bp, Homo sapien
tctgtaaagtgaggtcagacaaggg

SEQ ID NO: 351530 - DNA, 25 bp, Homo sapien
gacatagccaatcaatcacgagcct

SEQ ID NO: 351531 - DNA, 25 bp, Homo sapien
gcctcgatttagctcagatccctca

SEQ ID NO: 351532 - DNA, 25 bp, Homo sapien
caagggatgacaagtctgcaaggga

SEQ ID NO: 351533 - DNA, 25 bp, Homo sapien
ggatgctgatcttgaaggcatctgg

SEQ ID NO: 351534 - DNA, 25 bp, Homo sapien
cacatgcaggcggtgaatgcgtaga

SEQ ID NO: 351535 - DNA, 25 bp, Homo sapien
cacgcgggcgtacatgtagttgtta

SEQ ID NO: 351536 - DNA, 25 bp, Homo sapien
tggcccgcctctagcagtacaatct

SEQ ID NO: 351537 - DNA, 25 bp, Homo sapien
ttcagaaagatggctaacagctccc

SEQ ID NO: 351538 - DNA, 25 bp, Homo sapien
atggtggaggtcggtggacaccgaa

SEQ ID NO: 351539 - DNA, 25 bp, Homo sapien
tcagaaagatggctaacagctccca

SEQ ID NO: 351540 - DNA, 25 bp, Homo sapien
tggtggaggtcggtggacaccgaaa

SEQ ID NO: 351541 - DNA, 25 bp, Homo sapien
gaccctgcaggacgtccaactcctt

SEQ ID NO: 351542 - DNA, 25 bp, Homo sapien
acgaccctgcaggacgtccaactcc

SEQ ID NO: 351543 - DNA, 25 bp, Homo sapien
ccagctcagccacacgaccctgcag

SEQ ID NO: 351544 - DNA, 25 bp, Homo sapien
acacgaccctgcaggacgtccaact

SEQ ID NO: 351545 - DNA, 25 bp, Homo sapien
gagtgtaggccggtgggcacagcag

SEQ ID NO: 351546 - DNA, 25 bp, Homo sapien
ttggagtgtaggccggtgggcacag

SEQ ID NO: 351547 - DNA, 25 bp, Homo sapien
agtgtaggccggtgggcacagcaga

SEQ ID NO: 351548 - DNA, 25 bp, Homo sapien
tggagtgtaggccggtgggcacagc

SEQ ID NO: 351549 - DNA, 25 bp, Homo sapien
cagctgagaggttcacacgggctgg

SEQ ID NO: 351550 - DNA, 25 bp, Homo sapien
gcagctgagaggttcacacgggctg

SEQ ID NO: 351551 - DNA, 25 bp, Homo sapien
agctgagaggttcacacgggctgga

SEQ ID NO: 351552 - DNA, 25 bp, Homo sapien
gctgagaggttcacacgggctggaa

SEQ ID NO: 351553 - DNA, 25 bp, Homo sapien
cacagggcagagaaacagaaatcaa

SEQ ID NO: 351554 - DNA, 25 bp, Homo sapien
ctgttcacagggcagagaaacagaa

SEQ ID NO: 351555 - DNA, 25 bp, Homo sapien
tgttcacagggcagagaaacagaaa

SEQ ID NO: 351556 - DNA, 25 bp, Homo sapien
ttcacagggcagagaaacagaaatc

SEQ ID NO: 351557 - DNA, 25 bp, Homo sapien
caggctgggaacactcagatgccta

SEQ ID NO: 351558 - DNA, 25 bp, Homo sapien
tgggaacactcagatgcctaccgcc

SEQ ID NO: 351559 - DNA, 25 bp, Homo sapien
ggacaggctgggaacactcagatgc

SEQ ID NO: 351560 - DNA, 25 bp, Homo sapien
tgcctaccgcccctgctcagtgacc

SEQ ID NO: 351561 - DNA, 25 bp, Homo sapien
cttcaggtgacactggatggcccac

SEQ ID NO: 351562 - DNA, 25 bp, Homo sapien
caggtgacactggatggcccacagg

SEQ ID NO: 351563 - DNA, 25 bp, Homo sapien
gccttcaggtgacactggatggccc

SEQ ID NO: 351564 - DNA, 25 bp, Homo sapien
ttcaggtgacactggatggcccaca

SEQ ID NO: 351565 - DNA, 25 bp, Homo sapien
gaaccagtgcccactaggcagaagc

SEQ ID NO: 351566 - DNA, 25 bp, Homo sapien
agacaccaagagatcctcgaagctg

SEQ ID NO: 351567 - DNA, 25 bp, Homo sapien
caaccaacggaatttagagaagaca

SEQ ID NO: 351568 - DNA, 25 bp, Homo sapien
cagaagcttctagaatgggcagcaa

SEQ ID NO: 351569 - DNA, 25 bp, Homo sapien
tgggcatcaccagtgctgcttgccc

SEQ ID NO: 351570 - DNA, 25 bp, Homo sapien
ccagtgctgcttgcccaggatttaa

SEQ ID NO: 351571 - DNA, 25 bp, Homo sapien
tcagaccacgacatcctcagccttg

SEQ ID NO: 351572 - DNA, 25 bp, Homo sapien
tgtgagtgggcatcaccagtgctgc

SEQ ID NO: 351573 - DNA, 25 bp, Homo sapien
caggcggtcgatgcggtcccgcagg

SEQ ID NO: 351574 - DNA, 25 bp, Homo sapien
ggcgcgcacggcgtcctccagctcc

SEQ ID NO: 351575 - DNA, 25 bp, Homo sapien
cagaatgagcgcaggcgagtcccag

SEQ ID NO: 351576 - DNA, 25 bp, Homo sapien
cagctccagaatgagcgcaggcgag

SEQ ID NO: 351577 - DNA, 25 bp, Homo sapien
gcggcccagcttgccggtgagctca

SEQ ID NO: 351578 - DNA, 25 bp, Homo sapien
tcgcagcggcccagcttgccggtga

SEQ ID NO: 351579 - DNA, 25 bp, Homo sapien
ccgcgcggcaggccgctctcgcagc

SEQ ID NO: 351580 - DNA, 25 bp, Homo sapien
gccgcgcggcaggccgctctcgcag

SEQ ID NO: 351581 - DNA, 25 bp, Homo sapien
gtgtcctggtcggcgcggatgcgcg

SEQ ID NO: 351582 - DNA, 25 bp, Homo sapien
tgcagcgccgtctggcgcagctgct

SEQ ID NO: 351583 - DNA, 25 bp, Homo sapien
agcagcagctcttcgcgctcgcccg

SEQ ID NO: 351584 - DNA, 25 bp, Homo sapien
tggtcggcgcggatgcgcgcctcct

SEQ ID NO: 351585 - DNA, 25 bp, Homo sapien
gcgcccgaggcgaccgaagcattgt

SEQ ID NO: 351586 - DNA, 25 bp, Homo sapien
acggcaccgaggaacgccagcatgc

SEQ ID NO: 351587 - DNA, 25 bp, Homo sapien
ccgaggcgaccgaagcattgtcggc

SEQ ID NO: 351588 - DNA, 25 bp, Homo sapien
gcacgctggcgatgatgcagatgac

SEQ ID NO: 351589 - DNA, 25 bp, Homo sapien
cgggcgcgctgggccgagcggggca

SEQ ID NO: 351590 - DNA, 25 bp, Homo sapien
cgaggcccccggcaggcgcggcggc

SEQ ID NO: 351591 - DNA, 25 bp, Homo sapien
gagcggggcaggcgcgggagccgga

SEQ ID NO: 351592 - DNA, 25 bp, Homo sapien
ccggagctggagctgtcgccgcggc

SEQ ID NO: 351593 - DNA, 25 bp, Homo sapien
aaggtccagttctccatacacggtc

SEQ ID NO: 351594 - DNA, 25 bp, Homo sapien
gtccattccttacaccaaggtccag

SEQ ID NO: 351595 - DNA, 25 bp, Homo sapien
tccaaggtgcccgtggcctctcttc

SEQ ID NO: 351596 - DNA, 25 bp, Homo sapien
gctgctgagtggcaaagttgttgtt

SEQ ID NO: 351597 - DNA, 25 bp, Homo sapien
aaagagcctgttgctggcgctgcag

SEQ ID NO: 351598 - DNA, 25 bp, Homo sapien
tcctgtttccttgctcacggctggg

SEQ ID NO: 351599 - DNA, 25 bp, Homo sapien
tgagcctttaccgagaactcctagg

SEQ ID NO: 351600 - DNA, 25 bp, Homo sapien
cgatcgttttaatgagtccccttgg

SEQ ID NO: 351601 - DNA, 25 bp, Homo sapien
aaaggctgattgctggcggccgtca

SEQ ID NO: 351602 - DNA, 25 bp, Homo sapien
taaaggctgattgctggcggccgtc

SEQ ID NO: 351603 - DNA, 25 bp, Homo sapien
ttgctggcggccgtcatttaaatgg

SEQ ID NO: 351604 - DNA, 25 bp, Homo sapien
ggccgtcatttaaatggaggctcat

SEQ ID NO: 351605 - DNA, 25 bp, Homo sapien
tgaccccaccgctgtggatcaggtg

SEQ ID NO: 351606 - DNA, 25 bp, Homo sapien
tggatcaggtgtccttgtgctcggc

SEQ ID NO: 351607 - DNA, 25 bp, Homo sapien
tcaggcctcattatcctcgccaggg

SEQ ID NO: 351608 - DNA, 25 bp, Homo sapien
tgatgctcagcgcgtgtggatgtct

SEQ ID NO: 351609 - DNA, 25 bp, Homo sapien
cagagccgctgccaaagcagaagcg

SEQ ID NO: 351610 - DNA, 25 bp, Homo sapien
ccgctgccaaagcagaagcgctcag

SEQ ID NO: 351611 - DNA, 25 bp, Homo sapien
aggccagagccgctgccaaagcaga

SEQ ID NO: 351612 - DNA, 25 bp, Homo sapien
gagccgctgccaaagcagaagcgct

SEQ ID NO: 351613 - DNA, 25 bp, Homo sapien
tggccacgggagtcatcgggagctt

SEQ ID NO: 351614 - DNA, 25 bp, Homo sapien
aggtggccacgggagtcatcgggag

SEQ ID NO: 351615 - DNA, 25 bp, Homo sapien
agcttgcaggtggaacgccaggcac

SEQ ID NO: 351616 - DNA, 25 bp, Homo sapien
ccacgggagtcatcgggagcttgca

SEQ ID NO: 351617 - DNA, 25 bp, Homo sapien
aggcatggaagtttgcctggggctg

SEQ ID NO: 351618 - DNA, 25 bp, Homo sapien
gaaggcatggaagtttgcctggggc

SEQ ID NO: 351619 - DNA, 25 bp, Homo sapien
ggggaaggcatggaagtttgcctgg

SEQ ID NO: 351620 - DNA, 25 bp, Homo sapien
gggaaggcatggaagtttgcctggg

SEQ ID NO: 351621 - DNA, 25 bp, Homo sapien
caagacagagtaatcggcacagacc

SEQ ID NO: 351622 - DNA, 25 bp, Homo sapien
gacggatgccccaaccaatattgaa

SEQ ID NO: 351623 - DNA, 25 bp, Homo sapien
tcttgggtccccataggccagagag

SEQ ID NO: 351624 - DNA, 25 bp, Homo sapien
aaagaggccgccttgggcaagtgca

SEQ ID NO: 351625 - DNA, 25 bp, Homo sapien
cggtcccatccactcgggcccccat

SEQ ID NO: 351626 - DNA, 25 bp, Homo sapien
tcggtcccatccactcgggccccca

SEQ ID NO: 351627 - DNA, 25 bp, Homo sapien
actgcccacctcaaggcggtgtgcc

SEQ ID NO: 351628 - DNA, 25 bp, Homo sapien
gcactgcccacctcaaggcggtgtg

SEQ ID NO: 351629 - DNA, 25 bp, Homo sapien
gggcactgcccacctcaaggcggtg

SEQ ID NO: 351630 - DNA, 25 bp, Homo sapien
tgcccacctcaaggcggtgtgcctg

SEQ ID NO: 351631 - DNA, 25 bp, Homo sapien
ccctttgagcaagcacgggtgtgga

SEQ ID NO: 351632 - DNA, 25 bp, Homo sapien
cacgaatgacacgaactctcaggaa

SEQ ID NO: 351633 - DNA, 25 bp, Homo sapien
ttgccgggacctgcagcttgggtta

SEQ ID NO: 351634 - DNA, 25 bp, Homo sapien
taactggcacccaggtggtcactca

SEQ ID NO: 351635 - DNA, 25 bp, Homo sapien
cattcttaggaccaaaggcgctagg

SEQ ID NO: 351636 - DNA, 25 bp, Homo sapien
gttagcaccgagaaatcagacgccg

SEQ ID NO: 351637 - DNA, 25 bp, Homo sapien
caatgcatgtatgaacccacggaca

SEQ ID NO: 351638 - DNA, 25 bp, Homo sapien
tcaaaggaactgtaaagggtgccac

SEQ ID NO: 351639 - DNA, 25 bp, Homo sapien
ccccaatgctgccaccgcccccagc

SEQ ID NO: 351640 - DNA, 25 bp, Homo sapien
gccccaatgctgccaccgcccccag

SEQ ID NO: 351641 - DNA, 25 bp, Homo sapien
ttgctcgccccaatgctgccaccgc

SEQ ID NO: 351642 - DNA, 25 bp, Homo sapien
ctcgccccaatgctgccaccgcccc

SEQ ID NO: 351643 - DNA, 25 bp, Homo sapien
tcggtgacgaccacattggagcagg

SEQ ID NO: 351644 - DNA, 25 bp, Homo sapien
gaattccttgattgtgaccgtcagg

SEQ ID NO: 351645 - DNA, 25 bp, Homo sapien
gcttgtacagcgcaaaggcgccgaa

SEQ ID NO: 351646 - DNA, 25 bp, Homo sapien
aaggcgccgaacttcatgtggcgga

SEQ ID NO: 351647 - DNA, 25 bp, Homo sapien
acgcaggacgctctcgctgaacttc

SEQ ID NO: 351648 - DNA, 25 bp, Homo sapien
ctgtgtacgcaggacgctctcgctg

SEQ ID NO: 351649 - DNA, 25 bp, Homo sapien
gtacgcaggacgctctcgctgaact

SEQ ID NO: 351650 - DNA, 25 bp, Homo sapien
gtgtacgcaggacgctctcgctgaa

SEQ ID NO: 351651 - DNA, 25 bp, Homo sapien
tgcctataacgcggttccgcgaggg

SEQ ID NO: 351652 - DNA, 25 bp, Homo sapien
ttgcctataacgcggttccgcgagg

SEQ ID NO: 351653 - DNA, 25 bp, Homo sapien
cttgcctataacgcggttccgcgag

SEQ ID NO: 351654 - DNA, 25 bp, Homo sapien
gcgggacatacggtggcagcggcgg

SEQ ID NO: 351655 - DNA, 25 bp, Homo sapien
caccttgcggttgatgatgcgcacc

SEQ ID NO: 351656 - DNA, 25 bp, Homo sapien
gatgatgcggttccgcttgggctcc

SEQ ID NO: 351657 - DNA, 25 bp, Homo sapien
accgtctccgagaagggcgaaatgg

SEQ ID NO: 351658 - DNA, 25 bp, Homo sapien
atcactgatgcggagggcctcggcc

SEQ ID NO: 351659 - DNA, 25 bp, Homo sapien
cacatcactgatgcggagggcctcg

SEQ ID NO: 351660 - DNA, 25 bp, Homo sapien
atgcacatcactgatgcggagggcc

SEQ ID NO: 351661 - DNA, 25 bp, Homo sapien
tgcacatcactgatgcggagggcct

SEQ ID NO: 351662 - DNA, 25 bp, Homo sapien
tatgcttccaagagtccagtggtga

SEQ ID NO: 351663 - DNA, 25 bp, Homo sapien
taactgaacagacctacccatgggt

SEQ ID NO: 351664 - DNA, 25 bp, Homo sapien
gatcagagagtacatggcacctgct

SEQ ID NO: 351665 - DNA, 25 bp, Homo sapien
tatctgctgaaccatcacagggcct

SEQ ID NO: 351666 - DNA, 25 bp, Homo sapien
gaacaatgtgttcagcccaagctaa

SEQ ID NO: 351667 - DNA, 25 bp, Homo sapien
gacatggactactcaaggcacaaga

SEQ ID NO: 351668 - DNA, 25 bp, Homo sapien
gatcccctaggatgtgcgtcgcttg

SEQ ID NO: 351669 - DNA, 25 bp, Homo sapien
tccgtagcactacaggaagacaggg

SEQ ID NO: 351670 - DNA, 25 bp, Homo sapien
tcttgggcccatacagctcacgctc

SEQ ID NO: 351671 - DNA, 25 bp, Homo sapien
tgggcccatacagctcacgctccct

SEQ ID NO: 351672 - DNA, 25 bp, Homo sapien
cttgggcccatacagctcacgctcc

SEQ ID NO: 351673 - DNA, 25 bp, Homo sapien
ttgggcccatacagctcacgctccc

SEQ ID NO: 351674 - DNA, 25 bp, Homo sapien
aatgagccgcgagtccaggatgttc

SEQ ID NO: 351675 - DNA, 25 bp, Homo sapien
ctgcaatgagccgcgagtccaggat

SEQ ID NO: 351676 - DNA, 25 bp, Homo sapien
gcaatgagccgcgagtccaggatgt

SEQ ID NO: 351677 - DNA, 25 bp, Homo sapien
tgagccgcgagtccaggatgttctc

SEQ ID NO: 351678 - DNA, 25 bp, Homo sapien
ttccatttcaccaggtactcgatgc

SEQ ID NO: 351679 - DNA, 25 bp, Homo sapien
cccttccatttcaccaggtactcga

SEQ ID NO: 351680 - DNA, 25 bp, Homo sapien
atttcaccaggtactcgatgcgtcc

SEQ ID NO: 351681 - DNA, 25 bp, Homo sapien
catttcaccaggtactcgatgcgtc

SEQ ID NO: 351682 - DNA, 25 bp, Homo sapien
gatccgccgtttgatgatggattcg

SEQ ID NO: 351683 - DNA, 25 bp, Homo sapien
ttcggatccgccgtttgatgatgga

SEQ ID NO: 351684 - DNA, 25 bp, Homo sapien
tgatgatggattcggccgcgaagac

SEQ ID NO: 351685 - DNA, 25 bp, Homo sapien
cgtttgatgatggattcggccgcga

SEQ ID NO: 351686 - DNA, 25 bp, Homo sapien
cttgctcagcggcacccacagccca

SEQ ID NO: 351687 - DNA, 25 bp, Homo sapien
ctcagcggcacccacagcccataat

SEQ ID NO: 351688 - DNA, 25 bp, Homo sapien
agcggcacccacagcccataatact

SEQ ID NO: 351689 - DNA, 25 bp, Homo sapien
ccataatactccctgcgcccgcggc

SEQ ID NO: 351690 - DNA, 25 bp, Homo sapien
gcgcacgcgccgcagcgcccaggcc

SEQ ID NO: 351691 - DNA, 25 bp, Homo sapien
tcgcgcacgcgccgcagcgcccagg

SEQ ID NO: 351692 - DNA, 25 bp, Homo sapien
cgcacgcgccgcagcgcccaggccc

SEQ ID NO: 351693 - DNA, 25 bp, Homo sapien
ctcgcgcacgcgccgcagcgcccag

SEQ ID NO: 351694 - DNA, 25 bp, Homo sapien
tatttgttgggtgtgccattgaagg

SEQ ID NO: 351695 - DNA, 25 bp, Homo sapien
ccattgaagggcttgttaagagtaa

SEQ ID NO: 351696 - DNA, 25 bp, Homo sapien
tgtatagggattcaggtccagcaac

SEQ ID NO: 351697 - DNA, 25 bp, Homo sapien
ttttgaccatataacatgtataggg

SEQ ID NO: 351698 - DNA, 25 bp, Homo sapien
cagccacatgatgctatttgaccta

SEQ ID NO: 351699 - DNA, 25 bp, Homo sapien
gccacatgatgctatttgacctagg

SEQ ID NO: 351700 - DNA, 25 bp, Homo sapien
acatgatgctatttgacctaggaag

SEQ ID NO: 351701 - DNA, 25 bp, Homo sapien
tccagccacatgatgctatttgacc

SEQ ID NO: 351702 - DNA, 25 bp, Homo sapien
ttcttcgttgggtctctttgaacca

SEQ ID NO: 351703 - DNA, 25 bp, Homo sapien
tcttcgttgggtctctttgaaccac

SEQ ID NO: 351704 - DNA, 25 bp, Homo sapien
tcacctgggatgcacctatgcatct

SEQ ID NO: 351705 - DNA, 25 bp, Homo sapien
aatatcaaaagcttgctgataggag

SEQ ID NO: 351706 - DNA, 25 bp, Homo sapien
cttgctgataggagatcggctgtga

SEQ ID NO: 351707 - DNA, 25 bp, Homo sapien
ataggagatcggctgtgaggttcct

SEQ ID NO: 351708 - DNA, 25 bp, Homo sapien
ccccttaaggggattgacaatatca

SEQ ID NO: 351709 - DNA, 25 bp, Homo sapien
tccgcagccggggaatttccaaatc

SEQ ID NO: 351710 - DNA, 25 bp, Homo sapien
gttcaccggctgctgctcgggtaac

SEQ ID NO: 351711 - DNA, 25 bp, Homo sapien
ctggcgagagaaaagagcctttgcc

SEQ ID NO: 351712 - DNA, 25 bp, Homo sapien
tgctcgggtaactggcgagagaaaa

SEQ ID NO: 351713 - DNA, 25 bp, Homo sapien
tactgccttcctcttcacattgtat

SEQ ID NO: 351714 - DNA, 25 bp, Homo sapien
tgtttactgccttcctcttcacatt

SEQ ID NO: 351715 - DNA, 25 bp, Homo sapien
cacattgtatagatttttggtttgg

SEQ ID NO: 351716 - DNA, 25 bp, Homo sapien
tttactgccttcctcttcacattgt

SEQ ID NO: 351717 - DNA, 25 bp, Homo sapien
aaattgagtacatgtaaatgagata

SEQ ID NO: 351718 - DNA, 25 bp, Homo sapien
cagaagtaatctagataaactgtta

SEQ ID NO: 351719 - DNA, 25 bp, Homo sapien
atgactagatttgtgtaacatctca

SEQ ID NO: 351720 - DNA, 25 bp, Homo sapien
gactagatttgtgtaacatctcagt

SEQ ID NO: 351721 - DNA, 25 bp, Homo sapien
ctgatgggtccaaatggaagcgttc

SEQ ID NO: 351722 - DNA, 25 bp, Homo sapien
ccaaatggaagcgttcctgggtatt

SEQ ID NO: 351723 - DNA, 25 bp, Homo sapien
atggaagcgttcctgggtatttttg

SEQ ID NO: 351724 - DNA, 25 bp, Homo sapien
ccactgatgggtccaaatggaagcg

SEQ ID NO: 351725 - DNA, 25 bp, Homo sapien
tcacaacatgagcactggtgaaaat

SEQ ID NO: 351726 - DNA, 25 bp, Homo sapien
actggtgaaaatccagttactccag

SEQ ID NO: 351727 - DNA, 25 bp, Homo sapien
aaatccagttactccagcagcaaga

SEQ ID NO: 351728 - DNA, 25 bp, Homo sapien
acaacatgagcactggtgaaaatcc

SEQ ID NO: 351729 - DNA, 25 bp, Homo sapien
aggaggcacccatcagcgctgttca

SEQ ID NO: 351730 - DNA, 25 bp, Homo sapien
ggaggcacccatcagcgctgttcat

SEQ ID NO: 351731 - DNA, 25 bp, Homo sapien
tcaaatccttgtacaaacagagaaa

SEQ ID NO: 351732 - DNA, 25 bp, Homo sapien
cagagctgagggtgcccttttggga

SEQ ID NO: 351733 - DNA, 25 bp, Homo sapien
cagagaaaccagactgacaaggggg

SEQ ID NO: 351734 - DNA, 25 bp, Homo sapien
ggtgcccttttgggacaggtgtcaa

SEQ ID NO: 351735 - DNA, 25 bp, Homo sapien
caatcagtaagctggacttaagggt

SEQ ID NO: 351736 - DNA, 25 bp, Homo sapien
gctgaggtacctgctttttgagtca

SEQ ID NO: 351737 - DNA, 25 bp, Homo sapien
cacagttgacagtgtactcatagga

SEQ ID NO: 351738 - DNA, 25 bp, Homo sapien
ggttagtagaacactcttctcacag

SEQ ID NO: 351739 - DNA, 25 bp, Homo sapien
gaaaagctagtgtgcctcccggagt

SEQ ID NO: 351740 - DNA, 25 bp, Homo sapien
agctgaaaagctagtgtgcctcccg

SEQ ID NO: 351741 - DNA, 25 bp, Homo sapien
agagctgaaaagctagtgtgcctcc

SEQ ID NO: 351742 - DNA, 25 bp, Homo sapien
ctgaaaagctagtgtgcctcccgga

SEQ ID NO: 351743 - DNA, 25 bp, Homo sapien
tatctgtagacagcggaccctgctg

SEQ ID NO: 351744 - DNA, 25 bp, Homo sapien
tttggcctctggagctgcgtatatc

SEQ ID NO: 351745 - DNA, 25 bp, Homo sapien
tcacgcttcgcctctgtctctgagt

SEQ ID NO: 351746 - DNA, 25 bp, Homo sapien
ttgagtccatcacgcttcgcctctg

SEQ ID NO: 351747 - DNA, 25 bp, Homo sapien
ggccagcttggacttatctgcacca

SEQ ID NO: 351748 - DNA, 25 bp, Homo sapien
gcatgtgacaaggagtgctcaggct

SEQ ID NO: 351749 - DNA, 25 bp, Homo sapien
gctcaggctcaggtatggtcagtct

SEQ ID NO: 351750 - DNA, 25 bp, Homo sapien
gcttcccacggcatgggtgaactgg

SEQ ID NO: 351751 - DNA, 25 bp, Homo sapien
aatcttcctgtcttaatgccgttcc

SEQ ID NO: 351752 - DNA, 25 bp, Homo sapien
gatgatgcttacaatcgtgccatga

SEQ ID NO: 351753 - DNA, 25 bp, Homo sapien
tcatgtggcagccaaatggttccac

SEQ ID NO: 351754 - DNA, 25 bp, Homo sapien
cgtgccatgatcttgttggcctcct

SEQ ID NO: 351755 - DNA, 25 bp, Homo sapien
ttcaaccccgtgagctctgttacgt

SEQ ID NO: 351756 - DNA, 25 bp, Homo sapien
tacgtttctcgttagctatggtcca

SEQ ID NO: 351757 - DNA, 25 bp, Homo sapien
gagaaggtgatacaagattccagga

SEQ ID NO: 351758 - DNA, 25 bp, Homo sapien
tcttttgcttgaaaccgaagatccc

SEQ ID NO: 351759 - DNA, 25 bp, Homo sapien
tgcacagcggaagacaccatacagt

SEQ ID NO: 351760 - DNA, 25 bp, Homo sapien
cagtgaacggccaagtgacacgagt

SEQ ID NO: 351761 - DNA, 25 bp, Homo sapien
gacaagcgacataccgtggagagac

SEQ ID NO: 351762 - DNA, 25 bp, Homo sapien
gacacgagtgacaccatgagcttgg

SEQ ID NO: 351763 - DNA, 25 bp, Homo sapien
agcgtcccaccccatagagaaggtg

SEQ ID NO: 351764 - DNA, 25 bp, Homo sapien
cagcgtcccaccccatagagaaggt

SEQ ID NO: 351765 - DNA, 25 bp, Homo sapien
cacaaacactagcaaatgtgtagat

SEQ ID NO: 351766 - DNA, 25 bp, Homo sapien
tccacaaacactagcaaatgtgtag

SEQ ID NO: 351767 - DNA, 25 bp, Homo sapien
agatgtctttccttgtgtagcggac

SEQ ID NO: 351768 - DNA, 25 bp, Homo sapien
gcaaatgtgtagatgtctttccttg

SEQ ID NO: 351769 - DNA, 25 bp, Homo sapien
gagccccgggcgctgattggaaggg

SEQ ID NO: 351770 - DNA, 25 bp, Homo sapien
ggacaggcccagcagtaagaggaca

SEQ ID NO: 351771 - DNA, 25 bp, Homo sapien
cccgggcgctgattggaagggacag

SEQ ID NO: 351772 - DNA, 25 bp, Homo sapien
ccccgggcgctgattggaagggaca

SEQ ID NO: 351773 - DNA, 25 bp, Homo sapien
agaggactttggcatttcccacgca

SEQ ID NO: 351774 - DNA, 25 bp, Homo sapien
gaggactttggcatttcccacgcag

SEQ ID NO: 351775 - DNA, 25 bp, Homo sapien
agcagaggactttggcatttcccac

SEQ ID NO: 351776 - DNA, 25 bp, Homo sapien
ggactttggcatttcccacgcaggg

SEQ ID NO: 351777 - DNA, 25 bp, Homo sapien
gaaaaacgtgcagtcattctgggca

SEQ ID NO: 351778 - DNA, 25 bp, Homo sapien
tgataacagtcctaactccacttgt

SEQ ID NO: 351779 - DNA, 25 bp, Homo sapien
ggaagcaagtgatgaaaaacgtgca

SEQ ID NO: 351780 - DNA, 25 bp, Homo sapien
caaagggaccagtgtaggggaggca

SEQ ID NO: 351781 - DNA, 25 bp, Homo sapien
agctgtgcttggtccgggtggccag

SEQ ID NO: 351782 - DNA, 25 bp, Homo sapien
tccccaggatgtggactctcttgca

SEQ ID NO: 351783 - DNA, 25 bp, Homo sapien
acctcagcgagcaccggccaggctg

SEQ ID NO: 351784 - DNA, 25 bp, Homo sapien
gatgtggactctcttgcatgagaca

SEQ ID NO: 351785 - DNA, 25 bp, Homo sapien
cggtcactctgaagtgatgtaagcc

SEQ ID NO: 351786 - DNA, 25 bp, Homo sapien
aggagcacatgctgtgaccgtcaca

SEQ ID NO: 351787 - DNA, 25 bp, Homo sapien
agcctcctgtgtcctaagagcaacc

SEQ ID NO: 351788 - DNA, 25 bp, Homo sapien
ctaagagcaaccagaggaggaccac

SEQ ID NO: 351789 - DNA, 25 bp, Homo sapien
ccacctttagagtggcacccaccat

SEQ ID NO: 351790 - DNA, 25 bp, Homo sapien
cccaccatttctggcaaatgcacca

SEQ ID NO: 351791 - DNA, 25 bp, Homo sapien
cacccaccatttctggcaaatgcac

SEQ ID NO: 351792 - DNA, 25 bp, Homo sapien
ggcacccaccatttctggcaaatgc

SEQ ID NO: 351793 - DNA, 25 bp, Homo sapien
aatatgcttagatgaacttaaataa

SEQ ID NO: 351794 - DNA, 25 bp, Homo sapien
tggccccaaatggttgcgtgcactg

SEQ ID NO: 351795 - DNA, 25 bp, Homo sapien
ccaaatggttgcgtgcactgttatt

SEQ ID NO: 351796 - DNA, 25 bp, Homo sapien
ggaccaggagtacaggaggaaagtg

SEQ ID NO: 351797 - DNA, 25 bp, Homo sapien
tagtggccccaaatggttgcgtgca

SEQ ID NO: 351798 - DNA, 25 bp, Homo sapien
cttactaaactcatcctaggctggg

SEQ ID NO: 351799 - DNA, 25 bp, Homo sapien
ttactaaactcatcctaggctgggc

SEQ ID NO: 351800 - DNA, 25 bp, Homo sapien
taaatggctgtaagtcttggactcc

SEQ ID NO: 351801 - DNA, 25 bp, Homo sapien
tggactccttgctccaaacgcagcg

SEQ ID NO: 351802 - DNA, 25 bp, Homo sapien
gcagcgactcagcaatagaacctcc

SEQ ID NO: 351803 - DNA, 25 bp, Homo sapien
ccatgggctttacatagggcaagag

SEQ ID NO: 351804 - DNA, 25 bp, Homo sapien
tggatggctaccttgcaggctgtca

SEQ ID NO: 351805 - DNA, 25 bp, Homo sapien
cctcccgagtaaaaggcatgcatca

SEQ ID NO: 351806 - DNA, 25 bp, Homo sapien
agagtgttgctcctcttgtccaggc

SEQ ID NO: 351807 - DNA, 25 bp, Homo sapien
tcaataagcatggactgcaaccacc

SEQ ID NO: 351808 - DNA, 25 bp, Homo sapien
gatgcctcatcacagtttggtgaac

SEQ ID NO: 351809 - DNA, 25 bp, Homo sapien
agtcctggcctacagcggtgctggc

SEQ ID NO: 351810 - DNA, 25 bp, Homo sapien
gagtcgtctgtatgctgggcagtcc

SEQ ID NO: 351811 - DNA, 25 bp, Homo sapien
catttcttaagtccgtggcccagac

SEQ ID NO: 351812 - DNA, 25 bp, Homo sapien
gctaacatattacttcaacgctgat

SEQ ID NO: 351813 - DNA, 25 bp, Homo sapien
ttcagatgctcagtagcgcccttgg

SEQ ID NO: 351814 - DNA, 25 bp, Homo sapien
gatgtgccgaggtctctcatcagag

SEQ ID NO: 351815 - DNA, 25 bp, Homo sapien
cataaaattcttcgcgagatagtga

SEQ ID NO: 351816 - DNA, 25 bp, Homo sapien
cctgcgagctgcacagtcacatggg

SEQ ID NO: 351817 - DNA, 25 bp, Homo sapien
gcagtttagtctgacatactgcccc

SEQ ID NO: 351818 - DNA, 25 bp, Homo sapien
cctgggatgtcgagtcactggtgct

SEQ ID NO: 351819 - DNA, 25 bp, Homo sapien
tgcccccccagctagagggcaagag

SEQ ID NO: 351820 - DNA, 25 bp, Homo sapien
gctcggccgcacaaccaaatcttat

SEQ ID NO: 351821 - DNA, 25 bp, Homo sapien
caaatcttattaaactcaatctagt

SEQ ID NO: 351822 - DNA, 25 bp, Homo sapien
agaactccagtttgagcaacagatc

SEQ ID NO: 351823 - DNA, 25 bp, Homo sapien
tgactcacgcctttcggaggcagag

SEQ ID NO: 351824 - DNA, 25 bp, Homo sapien
tgggaagtccactgtcaatgcacca

SEQ ID NO: 351825 - DNA, 25 bp, Homo sapien
gatgatgcttcaacagcaggactga

SEQ ID NO: 351826 - DNA, 25 bp, Homo sapien
ggaacaaggcagaccctagagggcc

SEQ ID NO: 351827 - DNA, 25 bp, Homo sapien
tgccagaattcacgcatgaggctct

SEQ ID NO: 351828 - DNA, 25 bp, Homo sapien
cctccatggctatccatccacccac

SEQ ID NO: 351829 - DNA, 25 bp, Homo sapien
gcctccatggctatccatccaccca

SEQ ID NO: 351830 - DNA, 25 bp, Homo sapien
attaaactcaccctaggctggccgc

SEQ ID NO: 351831 - DNA, 25 bp, Homo sapien
tattaaactcaccctaggctggccg

SEQ ID NO: 351832 - DNA, 25 bp, Homo sapien
aaactcaccctaggctggccgcggt

SEQ ID NO: 351833 - DNA, 25 bp, Homo sapien
ttaaactcaccctaggctggccgcg

SEQ ID NO: 351834 - DNA, 25 bp, Homo sapien
gcccaaagcaggtgatggtactgtt

SEQ ID NO: 351835 - DNA, 25 bp, Homo sapien
aacgcagttgcctgcttgtcatcag

SEQ ID NO: 351836 - DNA, 25 bp, Homo sapien
aactttgcagcacattttgggtaac

SEQ ID NO: 351837 - DNA, 25 bp, Homo sapien
tgttgtcctctacgcagatgcagcc

SEQ ID NO: 351838 - DNA, 25 bp, Homo sapien
gcagctggccacttcgaaagcaaaa

SEQ ID NO: 351839 - DNA, 25 bp, Homo sapien
aatgataatggtggtgtcccgggca

SEQ ID NO: 351840 - DNA, 25 bp, Homo sapien
tcgtggtaaacgtccctcagagaaa

SEQ ID NO: 351841 - DNA, 25 bp, Homo sapien
cacgggtctctacattcaaagcggg

SEQ ID NO: 351842 - DNA, 25 bp, Homo sapien
cggtcacggtcacctcacttgaggg

SEQ ID NO: 351843 - DNA, 25 bp, Homo sapien
tcagaacttcccactgcggtctcgg

SEQ ID NO: 351844 - DNA, 25 bp, Homo sapien
cctcgcggaaggtgacggtgatgga

SEQ ID NO: 351845 - DNA, 25 bp, Homo sapien
ggtctcggaagaagccctcagctgc

SEQ ID NO: 351846 - DNA, 25 bp, Homo sapien
tcttgcgcgagagccgcaggtactt

SEQ ID NO: 351847 - DNA, 25 bp, Homo sapien
agctccgcaggtccatgctgtacag

SEQ ID NO: 351848 - DNA, 25 bp, Homo sapien
aagagctcccgtcgatggctgtggc

SEQ ID NO: 351849 - DNA, 25 bp, Homo sapien
tcccgctgccgagtgggcacgtcag

SEQ ID NO: 351850 - DNA, 25 bp, Homo sapien
tggcttccaatatcctgcctggtgg

SEQ ID NO: 351851 - DNA, 25 bp, Homo sapien
tacaagtggaccaagaatcctgact

SEQ ID NO: 351852 - DNA, 25 bp, Homo sapien
caaggacgcttgacatggaccacat

SEQ ID NO: 351853 - DNA, 25 bp, Homo sapien
gggaagagataacgaacacacctgc

SEQ ID NO: 351854 - DNA, 25 bp, Homo sapien
tctcttcctataccccgatgctcgg

SEQ ID NO: 351855 - DNA, 25 bp, Homo sapien
tgggtttcggacctctcttcctata

SEQ ID NO: 351856 - DNA, 25 bp, Homo sapien
ttcctataccccgatgctcggtctc

SEQ ID NO: 351857 - DNA, 25 bp, Homo sapien
taccccgatgctcggtctctctcct

SEQ ID NO: 351858 - DNA, 25 bp, Homo sapien
gattcccaagtgtcgcaccctgttg

SEQ ID NO: 351859 - DNA, 25 bp, Homo sapien
taagaggtcctctagagacaccgtc

SEQ ID NO: 351860 - DNA, 25 bp, Homo sapien
cagtacagaggtcacgtggacaaca

SEQ ID NO: 351861 - DNA, 25 bp, Homo sapien
aatgggtgtactcttcagggtggcc

SEQ ID NO: 351862 - DNA, 25 bp, Homo sapien
ggggtccaagatgtgctcttctggc

SEQ ID NO: 351863 - DNA, 25 bp, Homo sapien
ggtccaagatgtgctcttctggctc

SEQ ID NO: 351864 - DNA, 25 bp, Homo sapien
ctcctcgtaggccatgacgaggcgg

SEQ ID NO: 351865 - DNA, 25 bp, Homo sapien
ttctcctcgtaggccatgacgaggc

SEQ ID NO: 351866 - DNA, 25 bp, Homo sapien
tagcagaggagctcaacactcagga

SEQ ID NO: 351867 - DNA, 25 bp, Homo sapien
gattaaatcaaggtcagctgtccag

SEQ ID NO: 351868 - DNA, 25 bp, Homo sapien
tcctgaaggctaacagctggtggcc

SEQ ID NO: 351869 - DNA, 25 bp, Homo sapien
cactcctgagaagaatggaatccct

SEQ ID NO: 351870 - DNA, 25 bp, Homo sapien
ccacttcaccagatactcgacttta

SEQ ID NO: 351871 - DNA, 25 bp, Homo sapien
cacttcaccagatactcgactttac

SEQ ID NO: 351872 - DNA, 25 bp, Homo sapien
tccacttcaccagatactcgacttt

SEQ ID NO: 351873 - DNA, 25 bp, Homo sapien
acttcaccagatactcgactttacc

SEQ ID NO: 351874 - DNA, 25 bp, Homo sapien
ttccggatgctctccacggcgaaca

SEQ ID NO: 351875 - DNA, 25 bp, Homo sapien
ttccgcacgcgcttcttccggatgc

SEQ ID NO: 351876 - DNA, 25 bp, Homo sapien
gctcgccgatggctgacagctccat

SEQ ID NO: 351877 - DNA, 25 bp, Homo sapien
ggcgaacacctgctcgccgatggct

SEQ ID NO: 351878 - DNA, 25 bp, Homo sapien
ccatttttgaacctgcgcaacgttt

SEQ ID NO: 351879 - DNA, 25 bp, Homo sapien
tcacgccgccgacgttccatttttg

SEQ ID NO: 351880 - DNA, 25 bp, Homo sapien
caacgttttcctcggcgccagcgag

SEQ ID NO: 351881 - DNA, 25 bp, Homo sapien
tgaacctgcgcaacgttttcctcgg

SEQ ID NO: 351882 - DNA, 25 bp, Homo sapien
cttagggagatagcactcagatttt

SEQ ID NO: 351883 - DNA, 25 bp, Homo sapien
tgtagacaccctttattagattgag

SEQ ID NO: 351884 - DNA, 25 bp, Homo sapien
gtctgtgaataacgacagctttaat

SEQ ID NO: 351885 - DNA, 25 bp, Homo sapien
taccagaatttgtgatgtcggctat

SEQ ID NO: 351886 - DNA, 25 bp, Homo sapien
ggtgcccagttcccgtccagagccc

SEQ ID NO: 351887 - DNA, 25 bp, Homo sapien
ggaggacagcaggattctctctgcc

SEQ ID NO: 351888 - DNA, 25 bp, Homo sapien
tgcccagttcccgtccagagccctg

SEQ ID NO: 351889 - DNA, 25 bp, Homo sapien
tggaggacagcaggattctctctgc

SEQ ID NO: 351890 - DNA, 25 bp, Homo sapien
ccttgcctgagcgtccaccatcagc

SEQ ID NO: 351891 - DNA, 25 bp, Homo sapien
gcccagcgctcggtgttgggtggat

SEQ ID NO: 351892 - DNA, 25 bp, Homo sapien
caggtggcgccagattcccggcgtc

SEQ ID NO: 351893 - DNA, 25 bp, Homo sapien
ctttccttgcctgagcgtccaccat

SEQ ID NO: 351894 - DNA, 25 bp, Homo sapien
tgcaggctgggtcacatcctgtttt

SEQ ID NO: 351895 - DNA, 25 bp, Homo sapien
aatcattggcaggaaccactgggct

SEQ ID NO: 351896 - DNA, 25 bp, Homo sapien
taaatggactagaatggtggcctcc

SEQ ID NO: 351897 - DNA, 25 bp, Homo sapien
catagtcacggtgcaggcatcaacc

SEQ ID NO: 351898 - DNA, 25 bp, Homo sapien
tatgcccttgagtggaacagctacc

SEQ ID NO: 351899 - DNA, 25 bp, Homo sapien
cctactgggtgctagttgatgtgcc

SEQ ID NO: 351900 - DNA, 25 bp, Homo sapien
gaatctcacaatcatcaggcagcgg

SEQ ID NO: 351901 - DNA, 25 bp, Homo sapien
tgaactgaatacgtcccctagcagg

SEQ ID NO: 351902 - DNA, 25 bp, Homo sapien
gagttccttctgcacgcattgagca

SEQ ID NO: 351903 - DNA, 25 bp, Homo sapien
agctggacctgcgttggggttacca

SEQ ID NO: 351904 - DNA, 25 bp, Homo sapien
ctggacctgcgttggggttaccaag

SEQ ID NO: 351905 - DNA, 25 bp, Homo sapien
gctggacctgcgttggggttaccaa

SEQ ID NO: 351906 - DNA, 25 bp, Homo sapien
agagctggacctgcgttggggttac

SEQ ID NO: 351907 - DNA, 25 bp, Homo sapien
ccttcaggctgtttggctttgtttg

SEQ ID NO: 351908 - DNA, 25 bp, Homo sapien
agccccctgccttcaggctgtttgg

SEQ ID NO: 351909 - DNA, 25 bp, Homo sapien
ctacattgtgttgggagggaaaacg

SEQ ID NO: 351910 - DNA, 25 bp, Homo sapien
acgtggggtccttggagccctgcca

SEQ ID NO: 351911 - DNA, 25 bp, Homo sapien
acaacacactggaatagaaccagcc

SEQ ID NO: 351912 - DNA, 25 bp, Homo sapien
caacacactggaatagaaccagcca

SEQ ID NO: 351913 - DNA, 25 bp, Homo sapien
gacaacacactggaatagaaccagc

SEQ ID NO: 351914 - DNA, 25 bp, Homo sapien
catcccagactatcgcagaagcaaa

SEQ ID NO: 351915 - DNA, 25 bp, Homo sapien
gatagaggacccatcttgtgccagt

SEQ ID NO: 351916 - DNA, 25 bp, Homo sapien
ggagactttgatcccttccttgggc

SEQ ID NO: 351917 - DNA, 25 bp, Homo sapien
gggactcagtatctctgtctgcaag

SEQ ID NO: 351918 - DNA, 25 bp, Homo sapien
tcagagacgaagtggttgagcacca

SEQ ID NO: 351919 - DNA, 25 bp, Homo sapien
ctatgctctgtcagagacgaagtgg

SEQ ID NO: 351920 - DNA, 25 bp, Homo sapien
ggcagccgctgttggcgggaaccca

SEQ ID NO: 351921 - DNA, 25 bp, Homo sapien
gggcagtctccccatcagagctatt

SEQ ID NO: 351922 - DNA, 25 bp, Homo sapien
ctcctgcagcaaggtgatggtgacg

SEQ ID NO: 351923 - DNA, 25 bp, Homo sapien
gcagcaaggtgatggtgacggtgaa

SEQ ID NO: 351924 - DNA, 25 bp, Homo sapien
tgtgcccactcctgcagcaaggtga

SEQ ID NO: 351925 - DNA, 25 bp, Homo sapien
caaggtgatggtgacggtgaagctc

SEQ ID NO: 351926 - DNA, 25 bp, Homo sapien
ctggggaggccattccagtccctca

SEQ ID NO: 351927 - DNA, 25 bp, Homo sapien
gggaggccattccagtccctcacgg

SEQ ID NO: 351928 - DNA, 25 bp, Homo sapien
gccattccagtccctcacggccccc

SEQ ID NO: 351929 - DNA, 25 bp, Homo sapien
ccattccagtccctcacggccccca

SEQ ID NO: 351930 - DNA, 25 bp, Homo sapien
gctgtagacaggaggtcattgtcca

SEQ ID NO: 351931 - DNA, 25 bp, Homo sapien
tcattgtccagcccgactgtgtcca

SEQ ID NO: 351932 - DNA, 25 bp, Homo sapien
tgtccagcccgactgtgtccagatc

SEQ ID NO: 351933 - DNA, 25 bp, Homo sapien
caaggaggctgtagacaggaggtca

SEQ ID NO: 351934 - DNA, 25 bp, Homo sapien
ggtcttctggggacccgcctgccat

SEQ ID NO: 351935 - DNA, 25 bp, Homo sapien
cagggtcttctggggacccgcctgc

SEQ ID NO: 351936 - DNA, 25 bp, Homo sapien
acagggtcttctggggacccgcctg

SEQ ID NO: 351937 - DNA, 25 bp, Homo sapien
gggtcttctggggacccgcctgcca

SEQ ID NO: 351938 - DNA, 25 bp, Homo sapien
tctaggataagtaaaaagcggtgga

SEQ ID NO: 351939 - DNA, 25 bp, Homo sapien
gataagtaaaaagcggtggatacac

SEQ ID NO: 351940 - DNA, 25 bp, Homo sapien
taggataagtaaaaagcggtggata

SEQ ID NO: 351941 - DNA, 25 bp, Homo sapien
ctctaggataagtaaaaagcggtgg

SEQ ID NO: 351942 - DNA, 25 bp, Homo sapien
agcaccaggagggaatgataaccag

SEQ ID NO: 351943 - DNA, 25 bp, Homo sapien
gggaatgataaccaggcttccctgt

SEQ ID NO: 351944 - DNA, 25 bp, Homo sapien
caggagggaatgataaccaggcttc

SEQ ID NO: 351945 - DNA, 25 bp, Homo sapien
gaatgataaccaggcttccctgtcc

SEQ ID NO: 351946 - DNA, 25 bp, Homo sapien
aggctgtgtagacagagtgggaaga

SEQ ID NO: 351947 - DNA, 25 bp, Homo sapien
ttctttacatgcaatccctgggaag

SEQ ID NO: 351948 - DNA, 25 bp, Homo sapien
tccctgggaaggctgtgtagacaga

SEQ ID NO: 351949 - DNA, 25 bp, Homo sapien
ctggttctttacatgcaatccctgg

SEQ ID NO: 351950 - DNA, 25 bp, Homo sapien
taacctccatggagtgagcggcagg

SEQ ID NO: 351951 - DNA, 25 bp, Homo sapien
ccgctgattttggtggtcatgttac

SEQ ID NO: 351952 - DNA, 25 bp, Homo sapien
gtggaggccaggtcaccgctgattt

SEQ ID NO: 351953 - DNA, 25 bp, Homo sapien
tctggagcgctagcttccagagggt

SEQ ID NO: 351954 - DNA, 25 bp, Homo sapien
agggtgaagaggacaccctcagtcc

SEQ ID NO: 351955 - DNA, 25 bp, Homo sapien
agcacaaggcaaacaggcaatgaca

SEQ ID NO: 351956 - DNA, 25 bp, Homo sapien
aggtcaagttcactgtgccaggtgt

SEQ ID NO: 351957 - DNA, 25 bp, Homo sapien
gcacaaggcaaacaggcaatgacaa

SEQ ID NO: 351958 - DNA, 25 bp, Homo sapien
tgctgccgggtgtcagttacatccg

SEQ ID NO: 351959 - DNA, 25 bp, Homo sapien
gacaggtgactgcaccatgcagagc

SEQ ID NO: 351960 - DNA, 25 bp, Homo sapien
tgagtgcccaggtactgacaggtga

SEQ ID NO: 351961 - DNA, 25 bp, Homo sapien
cacctgccgtctcttggctctgagt

SEQ ID NO: 351962 - DNA, 25 bp, Homo sapien
cgctgtgcactggagagctttgccc

SEQ ID NO: 351963 - DNA, 25 bp, Homo sapien
ttgcccagagctatgggctgagccc

SEQ ID NO: 351964 - DNA, 25 bp, Homo sapien
tggccgctgtgcactggagagcttt

SEQ ID NO: 351965 - DNA, 25 bp, Homo sapien
cattggttccttcatccgtccagcg

SEQ ID NO: 351966 - DNA, 25 bp, Homo sapien
tcttcgctgtctgatgcggctggtc

SEQ ID NO: 351967 - DNA, 25 bp, Homo sapien
ttctggctgattggaacaccctgaa

SEQ ID NO: 351968 - DNA, 25 bp, Homo sapien
gattggaacaccctgaaccctcact

SEQ ID NO: 351969 - DNA, 25 bp, Homo sapien
gccaagtccccttgccagctgagca

SEQ ID NO: 351970 - DNA, 25 bp, Homo sapien
gggtgaaccttgctgagcccttgtt

SEQ ID NO: 351971 - DNA, 25 bp, Homo sapien
gactgtggacttggtcgtttaccac

SEQ ID NO: 351972 - DNA, 25 bp, Homo sapien
ggagtctgcgccgtgaatctcccca

SEQ ID NO: 351973 - DNA, 25 bp, Homo sapien
ataactgtgtaacgggaagccggtg

SEQ ID NO: 351974 - DNA, 25 bp, Homo sapien
cctaagagttcgcaaggtgaagctg

SEQ ID NO: 351975 - DNA, 25 bp, Homo sapien
cttccgtgaaagctcctgaacaagg

SEQ ID NO: 351976 - DNA, 25 bp, Homo sapien
cagaggagagttcctaagagttcgc

SEQ ID NO: 351977 - DNA, 25 bp, Homo sapien
gctgagggccgggaccaagaagaca

SEQ ID NO: 351978 - DNA, 25 bp, Homo sapien
gactctgctgcgctgctgtatggga

SEQ ID NO: 351979 - DNA, 25 bp, Homo sapien
aaggcccacggactctgctgcgctg

SEQ ID NO: 351980 - DNA, 25 bp, Homo sapien
tgctgtatgggatggcacccaggaa

SEQ ID NO: 351981 - DNA, 25 bp, Homo sapien
caggcctcggaagtgcctgcagcaa

SEQ ID NO: 351982 - DNA, 25 bp, Homo sapien
aaaggttaattgtcacgcacgatgc

SEQ ID NO: 351983 - DNA, 25 bp, Homo sapien
tatgatgtgaacagtgctccctgca

SEQ ID NO: 351984 - DNA, 25 bp, Homo sapien
tgcacgccagtgtgtgagatcacgc

SEQ ID NO: 351985 - DNA, 25 bp, Homo sapien
tattatcactccaaggaccccatgg

SEQ ID NO: 351986 - DNA, 25 bp, Homo sapien
ctgcccacacactctcctgccgatg

SEQ ID NO: 351987 - DNA, 25 bp, Homo sapien
tgcccacacactctcctgccgatgc

SEQ ID NO: 351988 - DNA, 25 bp, Homo sapien
cccacacactctcctgccgatgccc

SEQ ID NO: 351989 - DNA, 25 bp, Homo sapien
gcccacacactctcctgccgatgcc

SEQ ID NO: 351990 - DNA, 25 bp, Homo sapien
tgtgcttgaatttccggtgcttgcc

SEQ ID NO: 351991 - DNA, 25 bp, Homo sapien
cgtccgaatggtcacccgagtttgg

SEQ ID NO: 351992 - DNA, 25 bp, Homo sapien
cagtgccgtcttgtcatgcgtgtgc

SEQ ID NO: 351993 - DNA, 25 bp, Homo sapien
taggctccaagggtctccttcagtg

SEQ ID NO: 351994 - DNA, 25 bp, Homo sapien
ctgtctcacacttgcatgccaggtg

SEQ ID NO: 351995 - DNA, 25 bp, Homo sapien
gattggcttcttccgcacaatctcg

SEQ ID NO: 351996 - DNA, 25 bp, Homo sapien
tcaccgtggccttcttaaagattgg

SEQ ID NO: 351997 - DNA, 25 bp, Homo sapien
cactgtctcacacttgcatgccagg

SEQ ID NO: 351998 - DNA, 25 bp, Homo sapien
tggaggacagagccacaaaatgcct

SEQ ID NO: 351999 - DNA, 25 bp, Homo sapien
ctggaggacagagccacaaaatgcc

SEQ ID NO: 352000 - DNA, 25 bp, Homo sapien
cagaaaggcatttccgggttgagct

SEQ ID NO: 352001 - DNA, 25 bp, Homo sapien
agaaaggcatttccgggttgagctg

SEQ ID NO: 352002 - DNA, 25 bp, Homo sapien
ctggggcctgcggtatcctcattcc

SEQ ID NO: 352003 - DNA, 25 bp, Homo sapien
ggtatcctcattcccggagcgccag

SEQ ID NO: 352004 - DNA, 25 bp, Homo sapien
tggaaggaagtggggggaggcttca

SEQ ID NO: 352005 - DNA, 25 bp, Homo sapien
tgcacgttgcggttgttgcagcagc

SEQ ID NO: 352006 - DNA, 25 bp, Homo sapien
gggagatctcgaacacctcggtgcg

SEQ ID NO: 352007 - DNA, 25 bp, Homo sapien
gccacaccaggaagttggcgttggt

SEQ ID NO: 352008 - DNA, 25 bp, Homo sapien
gcactcggcgatcatggccggctca

SEQ ID NO: 352009 - DNA, 25 bp, Homo sapien
atgttcaggtccaactcggccccat

SEQ ID NO: 352010 - DNA, 25 bp, Homo sapien
gcgggtcatgttcaggtccaactcg

SEQ ID NO: 352011 - DNA, 25 bp, Homo sapien
gctcgcctccagagtgggagcgggt

SEQ ID NO: 352012 - DNA, 25 bp, Homo sapien
ggagcgggtcatgttcaggtccaac

SEQ ID NO: 352013 - DNA, 25 bp, Homo sapien
tccacccagcgttcccataggaagt

SEQ ID NO: 352014 - DNA, 25 bp, Homo sapien
tgctactgtaagtgaaccctcctcg

SEQ ID NO: 352015 - DNA, 25 bp, Homo sapien
tctggagccccggacaatggccgcg

SEQ ID NO: 352016 - DNA, 25 bp, Homo sapien
ggacctagggcactgaaggccagtt

SEQ ID NO: 352017 - DNA, 25 bp, Homo sapien
cagcacaggcgggattgaaagggcc

SEQ ID NO: 352018 - DNA, 25 bp, Homo sapien
ccagcacaggcgggattgaaagggc

SEQ ID NO: 352019 - DNA, 25 bp, Homo sapien
agcacaggcgggattgaaagggccc

SEQ ID NO: 352020 - DNA, 25 bp, Homo sapien
cacaggcgggattgaaagggcccgg

SEQ ID NO: 352021 - DNA, 25 bp, Homo sapien
tctcataaagctcctcgggaatggg

SEQ ID NO: 352022 - DNA, 25 bp, Homo sapien
gatcgagtggtcactcagcatctca

SEQ ID NO: 352023 - DNA, 25 bp, Homo sapien
gcatctcataaagctcctcgggaat

SEQ ID NO: 352024 - DNA, 25 bp, Homo sapien
gagatcatcaaaggagcggatcgag

SEQ ID NO: 352025 - DNA, 25 bp, Homo sapien
tgcaggcacaggcactcgggctgca

SEQ ID NO: 352026 - DNA, 25 bp, Homo sapien
gcactcgggctgcacggtctggaca

SEQ ID NO: 352027 - DNA, 25 bp, Homo sapien
actcgggctgcacggtctggacaga

SEQ ID NO: 352028 - DNA, 25 bp, Homo sapien
acaggcactcgggctgcacggtctg

SEQ ID NO: 352029 - DNA, 25 bp, Homo sapien
cttcacaaaagggatgctgctttct

SEQ ID NO: 352030 - DNA, 25 bp, Homo sapien
cacaaaagggatgctgctttctcgc

SEQ ID NO: 352031 - DNA, 25 bp, Homo sapien
tcacaaaagggatgctgctttctcg

SEQ ID NO: 352032 - DNA, 25 bp, Homo sapien
aaaagggatgctgctttctcgctgc

SEQ ID NO: 352033 - DNA, 25 bp, Homo sapien
agggctgctgggcaacttgaggaaa

SEQ ID NO: 352034 - DNA, 25 bp, Homo sapien
tgcacgtgcaagacagaggagggta

SEQ ID NO: 352035 - DNA, 25 bp, Homo sapien
aactccgcccaatgtctaagggctg

SEQ ID NO: 352036 - DNA, 25 bp, Homo sapien
ttccttcaatatccgggcagccagg

SEQ ID NO: 352037 - DNA, 25 bp, Homo sapien
ctcaccattcctgctcagtcagtct

SEQ ID NO: 352038 - DNA, 25 bp, Homo sapien
tctctctcagatgcgcacacacaca

SEQ ID NO: 352039 - DNA, 25 bp, Homo sapien
accattcctgctcagtcagtctctc

SEQ ID NO: 352040 - DNA, 25 bp, Homo sapien
ctctctctctcagatgcgcacacac

SEQ ID NO: 352041 - DNA, 25 bp, Homo sapien
gccgccgttcccaggacgccctggc

SEQ ID NO: 352042 - DNA, 25 bp, Homo sapien
tcgcctccggccaggagtgtgcatg

SEQ ID NO: 352043 - DNA, 25 bp, Homo sapien
gtgagtgagcgagtcgggggcccgg

SEQ ID NO: 352044 - DNA, 25 bp, Homo sapien
tagtgcgtgcccgtcgctctgcgcg

SEQ ID NO: 352045 - DNA, 25 bp, Homo sapien
ctcccagcccgaagaggtcacccag

SEQ ID NO: 352046 - DNA, 25 bp, Homo sapien
ctcgcgggctgcaagggtccaaagt

SEQ ID NO: 352047 - DNA, 25 bp, Homo sapien
ccggcgtcaggctcgcgggctgcaa

SEQ ID NO: 352048 - DNA, 25 bp, Homo sapien
gaagaggtcacccagcgcccggcgt

SEQ ID NO: 352049 - DNA, 25 bp, Homo sapien
ctgaccagacgcaggtagcagcaga

SEQ ID NO: 352050 - DNA, 25 bp, Homo sapien
tgaccagacgcaggtagcagcagag

SEQ ID NO: 352051 - DNA, 25 bp, Homo sapien
agacgcaggtagcagcagagagaca

SEQ ID NO: 352052 - DNA, 25 bp, Homo sapien
accagacgcaggtagcagcagagag

SEQ ID NO: 352053 - DNA, 25 bp, Homo sapien
caggacctgggtccgaggccgctac

SEQ ID NO: 352054 - DNA, 25 bp, Homo sapien
gccccggacgcgtagatcgagcgcg

SEQ ID NO: 352055 - DNA, 25 bp, Homo sapien
ctgcagccgcggctcacccgcatgg

SEQ ID NO: 352056 - DNA, 25 bp, Homo sapien
cggcgatcaggcgctcaggcctctg

SEQ ID NO: 352057 - DNA, 25 bp, Homo sapien
ttcactcgccggctacaggcgtttt

SEQ ID NO: 352058 - DNA, 25 bp, Homo sapien
gcccgccggcttagcttttttgcaa

SEQ ID NO: 352059 - DNA, 25 bp, Homo sapien
accagccgaggcgtctagccgtgtg

SEQ ID NO: 352060 - DNA, 25 bp, Homo sapien
cacggcagtcgatggttcgtcttca

SEQ ID NO: 352061 - DNA, 25 bp, Homo sapien
ccccaaaatcggaaagcgcggagct

SEQ ID NO: 352062 - DNA, 25 bp, Homo sapien
aagttggctttgcaacggcagctcg

SEQ ID NO: 352063 - DNA, 25 bp, Homo sapien
gctgcaggaggagaagttgccaccc

SEQ ID NO: 352064 - DNA, 25 bp, Homo sapien
tgtgtgcgcgcaaagtatctctatc

SEQ ID NO: 352065 - DNA, 25 bp, Homo sapien
acagcatgcacacctggcatcgtca

SEQ ID NO: 352066 - DNA, 25 bp, Homo sapien
cagcatgcacacctggcatcgtcat

SEQ ID NO: 352067 - DNA, 25 bp, Homo sapien
cacagcatgcacacctggcatcgtc

SEQ ID NO: 352068 - DNA, 25 bp, Homo sapien
tcatctggcatacacggggtggggg

SEQ ID NO: 352069 - DNA, 25 bp, Homo sapien
tggccctgaatccaggacaatctgc

SEQ ID NO: 352070 - DNA, 25 bp, Homo sapien
gaagacctccggccaagccagtgtg

SEQ ID NO: 352071 - DNA, 25 bp, Homo sapien
tctggcgcccgctgcagtgtggcct

SEQ ID NO: 352072 - DNA, 25 bp, Homo sapien
tggcctgaagcgtgggcacagaaac

SEQ ID NO: 352073 - DNA, 25 bp, Homo sapien
gggggcaaaagccagcgcccctgca

SEQ ID NO: 352074 - DNA, 25 bp, Homo sapien
ggggcaaaagccagcgcccctgcat

SEQ ID NO: 352075 - DNA, 25 bp, Homo sapien
cacccacgtcctcggctccgggctc

SEQ ID NO: 352076 - DNA, 25 bp, Homo sapien
cctcacccacgtcctcggctccggg

SEQ ID NO: 352077 - DNA, 25 bp, Homo sapien
cccacgtcctcggctccgggctcat

SEQ ID NO: 352078 - DNA, 25 bp, Homo sapien
tcacccacgtcctcggctccgggct

SEQ ID NO: 352079 - DNA, 25 bp, Homo sapien
ctgtcctggtcgtaggacaaagggc

SEQ ID NO: 352080 - DNA, 25 bp, Homo sapien
cacccgcagctgctaggcctggtgg

SEQ ID NO: 352081 - DNA, 25 bp, Homo sapien
tcagcaacttagtctcccagccgaa

SEQ ID NO: 352082 - DNA, 25 bp, Homo sapien
ctccacgtggccttcagcaacttag

SEQ ID NO: 352083 - DNA, 25 bp, Homo sapien
gaatcaaacgctctaaatttagtct

SEQ ID NO: 352084 - DNA, 25 bp, Homo sapien
caggaatattgtcccgcccgggctg

SEQ ID NO: 352085 - DNA, 25 bp, Homo sapien
gcccgggctgaatcaaacgctctaa

SEQ ID NO: 352086 - DNA, 25 bp, Homo sapien
gctgccctcctttcaaggcgatgag

SEQ ID NO: 352087 - DNA, 25 bp, Homo sapien
tatgcaatgtgaggtgttcgtttgc

SEQ ID NO: 352088 - DNA, 25 bp, Homo sapien
aatgtgaggtgttcgtttgcatggc

SEQ ID NO: 352089 - DNA, 25 bp, Homo sapien
ggtgttcgtttgcatggcttctcat

SEQ ID NO: 352090 - DNA, 25 bp, Homo sapien
atttggttatatgcaatgtgaggtg

SEQ ID NO: 352091 - DNA, 25 bp, Homo sapien
ctgcctccccttcagtcctggtcca

SEQ ID NO: 352092 - DNA, 25 bp, Homo sapien
tgcctccccttcagtcctggtccac

SEQ ID NO: 352093 - DNA, 25 bp, Homo sapien
cctgcctccccttcagtcctggtcc

SEQ ID NO: 352094 - DNA, 25 bp, Homo sapien
cattgttccctcaattcattctgag

SEQ ID NO: 352095 - DNA, 25 bp, Homo sapien
tcattgttccctcaattcattctga

SEQ ID NO: 352096 - DNA, 25 bp, Homo sapien
attgttccctcaattcattctgagc

SEQ ID NO: 352097 - DNA, 25 bp, Homo sapien
ctggtcagcacggatccagccccct

SEQ ID NO: 352098 - DNA, 25 bp, Homo sapien
ccctcttgcgtgtccctttgtgcgg

SEQ ID NO: 352099 - DNA, 25 bp, Homo sapien
tcttgcgtgtccctttgtgcggagg

SEQ ID NO: 352100 - DNA, 25 bp, Homo sapien
cctttgtgcggagggtgctcacaga

SEQ ID NO: 352101 - DNA, 25 bp, Homo sapien
gagttccccagctgtctgctcccct

SEQ ID NO: 352102 - DNA, 25 bp, Homo sapien
cggcctgggagttccccagctgtct

SEQ ID NO: 352103 - DNA, 25 bp, Homo sapien
gttccccagctgtctgctcccctgg

SEQ ID NO: 352104 - DNA, 25 bp, Homo sapien
gggagttccccagctgtctgctccc

SEQ ID NO: 352105 - DNA, 25 bp, Homo sapien
tcagaaaggcgacaaatggtgttgc

SEQ ID NO: 352106 - DNA, 25 bp, Homo sapien
tgagcagccaaagcttcatcactgt

SEQ ID NO: 352107 - DNA, 25 bp, Homo sapien
gtgctcatcagaaaggcgacaaatg

SEQ ID NO: 352108 - DNA, 25 bp, Homo sapien
gcagccaaagcttcatcactgtgct

SEQ ID NO: 352109 - DNA, 25 bp, Homo sapien
aggcctgtaccttgtgagcctgcgc

SEQ ID NO: 352110 - DNA, 25 bp, Homo sapien
aaggcctgtaccttgtgagcctgcg

SEQ ID NO: 352111 - DNA, 25 bp, Homo sapien
acaaggcctgtaccttgtgagcctg

SEQ ID NO: 352112 - DNA, 25 bp, Homo sapien
tcacaaggcctgtaccttgtgagcc

SEQ ID NO: 352113 - DNA, 25 bp, Homo sapien
ctcggggagacacgcagtgaccatg

SEQ ID NO: 352114 - DNA, 25 bp, Homo sapien
agacacgcagtgaccatgacacaga

SEQ ID NO: 352115 - DNA, 25 bp, Homo sapien
gacacagaagtgcatcctgctgccg

SEQ ID NO: 352116 - DNA, 25 bp, Homo sapien
tgctgccggtggcaggcgacagtgc

SEQ ID NO: 352117 - DNA, 25 bp, Homo sapien
aggccgaggagacaacgctgtgcat

SEQ ID NO: 352118 - DNA, 25 bp, Homo sapien
tgccacgtgacgctcccaggccgag

SEQ ID NO: 352119 - DNA, 25 bp, Homo sapien
ctgcactgccacgtgacgctcccag

SEQ ID NO: 352120 - DNA, 25 bp, Homo sapien
ctcccaggccgaggagacaacgctg

SEQ ID NO: 352121 - DNA, 25 bp, Homo sapien
cgtgagtcttcagtaacagcggcca

SEQ ID NO: 352122 - DNA, 25 bp, Homo sapien
tctgtgcagtaaggcacacagtcct

SEQ ID NO: 352123 - DNA, 25 bp, Homo sapien
tgcctggggcccgtgagtcttcagt

SEQ ID NO: 352124 - DNA, 25 bp, Homo sapien
cttggatccccatctatcaagtggg

SEQ ID NO: 352125 - DNA, 25 bp, Homo sapien
ttgcaattcggtctttcttcagtgg

SEQ ID NO: 352126 - DNA, 25 bp, Homo sapien
ctttgcaattcggtctttcttcagt

SEQ ID NO: 352127 - DNA, 25 bp, Homo sapien
tcctttgcaattcggtctttcttca

SEQ ID NO: 352128 - DNA, 25 bp, Homo sapien
caattcggtctttcttcagtggtcc

SEQ ID NO: 352129 - DNA, 25 bp, Homo sapien
agaagatgacaggtgacagcagatg

SEQ ID NO: 352130 - DNA, 25 bp, Homo sapien
gagccaaaggcaggcggctgcccaa

SEQ ID NO: 352131 - DNA, 25 bp, Homo sapien
agaggcctaaggcatcaagaccacc

SEQ ID NO: 352132 - DNA, 25 bp, Homo sapien
cagccacaagagaggcctaaggcat

SEQ ID NO: 352133 - DNA, 25 bp, Homo sapien
ctcctccatggtctggaagcggcca

SEQ ID NO: 352134 - DNA, 25 bp, Homo sapien
tcttctcctccatggtctggaagcg

SEQ ID NO: 352135 - DNA, 25 bp, Homo sapien
ccatggtctggaagcggccatggcc

SEQ ID NO: 352136 - DNA, 25 bp, Homo sapien
cctccatggtctggaagcggccatg

SEQ ID NO: 352137 - DNA, 25 bp, Homo sapien
atcttctccagagcccgccgcttcg

SEQ ID NO: 352138 - DNA, 25 bp, Homo sapien
aatcttctccagagcccgccgcttc

SEQ ID NO: 352139 - DNA, 25 bp, Homo sapien
tcaatcttctccagagcccgccgct

SEQ ID NO: 352140 - DNA, 25 bp, Homo sapien
ggtcaatcttctccagagcccgccg

SEQ ID NO: 352141 - DNA, 25 bp, Homo sapien
gatttaggattacgaggagccaggc

SEQ ID NO: 352142 - DNA, 25 bp, Homo sapien
tgggaagccacacgatcaattcagc

SEQ ID NO: 352143 - DNA, 25 bp, Homo sapien
catctcaggacttcaaagccagtgt

SEQ ID NO: 352144 - DNA, 25 bp, Homo sapien
ctttcctcagcactgttcacagcgc

SEQ ID NO: 352145 - DNA, 25 bp, Homo sapien
agagcccccccatgacaagtcagga

SEQ ID NO: 352146 - DNA, 25 bp, Homo sapien
ccaccagcgtctgtggccttggatc

SEQ ID NO: 352147 - DNA, 25 bp, Homo sapien
catgacaagtcaggacctgcctcac

SEQ ID NO: 352148 - DNA, 25 bp, Homo sapien
ttggatcctccctctacaagagccc

SEQ ID NO: 352149 - DNA, 25 bp, Homo sapien
agtcattggtcacttcaccatagtg

SEQ ID NO: 352150 - DNA, 25 bp, Homo sapien
agcctttcagcatgacaaagtcatt

SEQ ID NO: 352151 - DNA, 25 bp, Homo sapien
gtcacttcaccatagtggacaaagc

SEQ ID NO: 352152 - DNA, 25 bp, Homo sapien
gcctttcagcatgacaaagtcattg

SEQ ID NO: 352153 - DNA, 25 bp, Homo sapien
aaacgagcatcggatcagcacaggc

SEQ ID NO: 352154 - DNA, 25 bp, Homo sapien
aacgagcatcggatcagcacaggcc

SEQ ID NO: 352155 - DNA, 25 bp, Homo sapien
ctggaaaacgagcatcggatcagca

SEQ ID NO: 352156 - DNA, 25 bp, Homo sapien
gaaaacgagcatcggatcagcacag

SEQ ID NO: 352157 - DNA, 25 bp, Homo sapien
ctccaggttcaggccctccctgacc

SEQ ID NO: 352158 - DNA, 25 bp, Homo sapien
tgacccctccaggttcaggccctcc

SEQ ID NO: 352159 - DNA, 25 bp, Homo sapien
cccctccaggttcaggccctccctg

SEQ ID NO: 352160 - DNA, 25 bp, Homo sapien
caggttcaggccctccctgaccaca

SEQ ID NO: 352161 - DNA, 25 bp, Homo sapien
ttctcagaaggaaggcaacaaggaa

SEQ ID NO: 352162 - DNA, 25 bp, Homo sapien
cattccaggcctcatcactgaacag

SEQ ID NO: 352163 - DNA, 25 bp, Homo sapien
acaaggaacggttccgcagtctgtc

SEQ ID NO: 352164 - DNA, 25 bp, Homo sapien
cgcagtctgtctcgggcgctgtgcc

SEQ ID NO: 352165 - DNA, 25 bp, Homo sapien
tgacaacatgccacttacaagggac

SEQ ID NO: 352166 - DNA, 25 bp, Homo sapien
cagttaacgatcctgctagcagccc

SEQ ID NO: 352167 - DNA, 25 bp, Homo sapien
acagctaggtgttgtgttggcttca

SEQ ID NO: 352168 - DNA, 25 bp, Homo sapien
caaccccgacgagtggactcagatg

SEQ ID NO: 352169 - DNA, 25 bp, Homo sapien
gttgatgctcttgtcagataggtca

SEQ ID NO: 352170 - DNA, 25 bp, Homo sapien
tgatgctcttgtcagataggtcata

SEQ ID NO: 352171 - DNA, 25 bp, Homo sapien
ggttgatgctcttgtcagataggtc

SEQ ID NO: 352172 - DNA, 25 bp, Homo sapien
atgctcttgtcagataggtcatagt

SEQ ID NO: 352173 - DNA, 25 bp, Homo sapien
cagcttgccgtccttgataaggtag

SEQ ID NO: 352174 - DNA, 25 bp, Homo sapien
gataaggtagccctggccaatctta

SEQ ID NO: 352175 - DNA, 25 bp, Homo sapien
ggtagccctggccaatcttataaat

SEQ ID NO: 352176 - DNA, 25 bp, Homo sapien
taaggtagccctggccaatcttata

SEQ ID NO: 352177 - DNA, 25 bp, Homo sapien
tctgtaaggcggctgggctaaaact

SEQ ID NO: 352178 - DNA, 25 bp, Homo sapien
gtcacagcgtatcccaaggtcagag

SEQ ID NO: 352179 - DNA, 25 bp, Homo sapien
gacaaataacccagacatgccagtg

SEQ ID NO: 352180 - DNA, 25 bp, Homo sapien
tgcaaagcacgctagaaggcagctg

SEQ ID NO: 352181 - DNA, 25 bp, Homo sapien
gggccagaactgaccatgagaagca

SEQ ID NO: 352182 - DNA, 25 bp, Homo sapien
aataagactagtatccccagccaca

SEQ ID NO: 352183 - DNA, 25 bp, Homo sapien
gcaccttacaaatcatcaagatggg

SEQ ID NO: 352184 - DNA, 25 bp, Homo sapien
tctacaggatggcaccttacaaatc

SEQ ID NO: 352185 - DNA, 25 bp, Homo sapien
ggctacacgagcaggatgccatgcc

SEQ ID NO: 352186 - DNA, 25 bp, Homo sapien
cagagaaggctacacgagcaggatg

SEQ ID NO: 352187 - DNA, 25 bp, Homo sapien
gaaggctacacgagcaggatgccat

SEQ ID NO: 352188 - DNA, 25 bp, Homo sapien
tgccacagagaaggctacacgagca

SEQ ID NO: 352189 - DNA, 25 bp, Homo sapien
gctacaaagagcaaagggtccagga

SEQ ID NO: 352190 - DNA, 25 bp, Homo sapien
ccctgtcaagctggataggctctgg

SEQ ID NO: 352191 - DNA, 25 bp, Homo sapien
tccaggaacgtgttaagaagttgtc

SEQ ID NO: 352192 - DNA, 25 bp, Homo sapien
caattaccaaccatggctgggtcat

SEQ ID NO: 352193 - DNA, 25 bp, Homo sapien
ggttctacactgtccgattcgggcg

SEQ ID NO: 352194 - DNA, 25 bp, Homo sapien
aaggaaggcagtagagaatggttct

SEQ ID NO: 352195 - DNA, 25 bp, Homo sapien
ccagcgctcactctgagcctcatca

SEQ ID NO: 352196 - DNA, 25 bp, Homo sapien
gattcgggcgctgtacccagcgctc

SEQ ID NO: 352197 - DNA, 25 bp, Homo sapien
gcaactcaagccaccgcaaagctca

SEQ ID NO: 352198 - DNA, 25 bp, Homo sapien
caactcaagccaccgcaaagctcac

SEQ ID NO: 352199 - DNA, 25 bp, Homo sapien
agcaactcaagccaccgcaaagctc

SEQ ID NO: 352200 - DNA, 25 bp, Homo sapien
cgatgacgtcgatcatctcatcctg

SEQ ID NO: 352201 - DNA, 25 bp, Homo sapien
gtcaccccgatgacgtcgatcatct

SEQ ID NO: 352202 - DNA, 25 bp, Homo sapien
accccgatgacgtcgatcatctcat

SEQ ID NO: 352203 - DNA, 25 bp, Homo sapien
ttggtcaccccgatgacgtcgatca

SEQ ID NO: 352204 - DNA, 25 bp, Homo sapien
agcttctcggccacagtgcctccgt

SEQ ID NO: 352205 - DNA, 25 bp, Homo sapien
ctcggccacagtgcctccgttcacc

SEQ ID NO: 352206 - DNA, 25 bp, Homo sapien
cacagtgcctccgttcacctggatc

SEQ ID NO: 352207 - DNA, 25 bp, Homo sapien
acagtgcctccgttcacctggatct

SEQ ID NO: 352208 - DNA, 25 bp, Homo sapien
ttcttctggcgcagaggaagcaggc

SEQ ID NO: 352209 - DNA, 25 bp, Homo sapien
cttcttctggcgcagaggaagcagg

SEQ ID NO: 352210 - DNA, 25 bp, Homo sapien
ggacatgcactctcatccgtggtgg

SEQ ID NO: 352211 - DNA, 25 bp, Homo sapien
aagaaaatgcatcaccgggagcggt

SEQ ID NO: 352212 - DNA, 25 bp, Homo sapien
taagggccagtaaggacacagtgcc

SEQ ID NO: 352213 - DNA, 25 bp, Homo sapien
agaagcctacccataagcgtgcggg

SEQ ID NO: 352214 - DNA, 25 bp, Homo sapien
tgtgggcaatgacacggatgacttg

SEQ ID NO: 352215 - DNA, 25 bp, Homo sapien
ctgggtgtgggcaatgacacggatg

SEQ ID NO: 352216 - DNA, 25 bp, Homo sapien
tgggcaatgacacggatgacttggc

SEQ ID NO: 352217 - DNA, 25 bp, Homo sapien
gggtgtgggcaatgacacggatgac

SEQ ID NO: 352218 - DNA, 25 bp, Homo sapien
ttttccaccagcaagcggagcctgg

SEQ ID NO: 352219 - DNA, 25 bp, Homo sapien
gggtgagcggaaggcacactggcac

SEQ ID NO: 352220 - DNA, 25 bp, Homo sapien
tcattgccggcttctaaggagcctt

SEQ ID NO: 352221 - DNA, 25 bp, Homo sapien
tggatggagctcatcgggcagagcc

SEQ ID NO: 352222 - DNA, 25 bp, Homo sapien
ttcgagaggcaaactaaacccaaga

SEQ ID NO: 352223 - DNA, 25 bp, Homo sapien
cctggtttctagttggactcctcaa

SEQ ID NO: 352224 - DNA, 25 bp, Homo sapien
tagcttccggctgaaaccagatggc

SEQ ID NO: 352225 - DNA, 25 bp, Homo sapien
ctccctgcctgctacagagctgaga

SEQ ID NO: 352226 - DNA, 25 bp, Homo sapien
gaaacgcctcttgcattcatcactg

SEQ ID NO: 352227 - DNA, 25 bp, Homo sapien
caaagacagtcttgaaggtccggag

SEQ ID NO: 352228 - DNA, 25 bp, Homo sapien
gggtggtgtctctacaatggtcaca

SEQ ID NO: 352229 - DNA, 25 bp, Homo sapien
attcttatagaaacgcctcttgcat

SEQ ID NO: 352230 - DNA, 25 bp, Homo sapien
tatcaggaccctagacagccaaata

SEQ ID NO: 352231 - DNA, 25 bp, Homo sapien
tgcagtacggactcacagggctgtc

SEQ ID NO: 352232 - DNA, 25 bp, Homo sapien
aacattaatgtctccatggctcagc

SEQ ID NO: 352233 - DNA, 25 bp, Homo sapien
caaagtgcccatttaggccggaagg

SEQ ID NO: 352234 - DNA, 25 bp, Homo sapien
tctgacaacgtgtaactcctgctta

SEQ ID NO: 352235 - DNA, 25 bp, Homo sapien
cacctaaagcaaacagtgctgacca

SEQ ID NO: 352236 - DNA, 25 bp, Homo sapien
tagttttcaagttaagcattcccat

SEQ ID NO: 352237 - DNA, 25 bp, Homo sapien
gcattcccattctgctgtcgcagca

SEQ ID NO: 352238 - DNA, 25 bp, Homo sapien
cgacttcccgcacgatgtgagtcat

SEQ ID NO: 352239 - DNA, 25 bp, Homo sapien
tgtcgacttcccgcacgatgtgagt

SEQ ID NO: 352240 - DNA, 25 bp, Homo sapien
cggcctgtcgacttcccgcacgatg

SEQ ID NO: 352241 - DNA, 25 bp, Homo sapien
cctgtcgacttcccgcacgatgtga

SEQ ID NO: 352242 - DNA, 25 bp, Homo sapien
tgctgctgcgcttccgaggcaggaa

SEQ ID NO: 352243 - DNA, 25 bp, Homo sapien
accttcccacgatgcctgctgctgc

SEQ ID NO: 352244 - DNA, 25 bp, Homo sapien
gcctgctgctgcgcttccgaggcag

SEQ ID NO: 352245 - DNA, 25 bp, Homo sapien
tggaccggcttggacgggtcatcct

SEQ ID NO: 352246 - DNA, 25 bp, Homo sapien
cacccagcaagccgaataaaaaggt

SEQ ID NO: 352247 - DNA, 25 bp, Homo sapien
cagacacccagcaagccgaataaaa

SEQ ID NO: 352248 - DNA, 25 bp, Homo sapien
ccagcaagccgaataaaaaggtcat

SEQ ID NO: 352249 - DNA, 25 bp, Homo sapien
gacacccagcaagccgaataaaaag

SEQ ID NO: 352250 - DNA, 25 bp, Homo sapien
gtccgcccgtcaataagttcatcat

SEQ ID NO: 352251 - DNA, 25 bp, Homo sapien
acacagtttctgtccgcccgtcaat

SEQ ID NO: 352252 - DNA, 25 bp, Homo sapien
aaatcagaacgtgacaatcagcaca

SEQ ID NO: 352253 - DNA, 25 bp, Homo sapien
gaacgtgacaatcagcacacagttt

SEQ ID NO: 352254 - DNA, 25 bp, Homo sapien
tattcaggaggactccacaacactc

SEQ ID NO: 352255 - DNA, 25 bp, Homo sapien
caccagcggccccagatattcagga

SEQ ID NO: 352256 - DNA, 25 bp, Homo sapien
cagaggccttcggagtgcaccagcg

SEQ ID NO: 352257 - DNA, 25 bp, Homo sapien
aggccttcggagtgcaccagcggcc

SEQ ID NO: 352258 - DNA, 25 bp, Homo sapien
gaattggtgaggtcgaaacttagaa

SEQ ID NO: 352259 - DNA, 25 bp, Homo sapien
tacccagacaagcaggttatgggcc

SEQ ID NO: 352260 - DNA, 25 bp, Homo sapien
tcccaatgagaacggcgccgagaac

SEQ ID NO: 352261 - DNA, 25 bp, Homo sapien
tatgggccctaatcccaactaatga

SEQ ID NO: 352262 - DNA, 25 bp, Homo sapien
aataggccagactgaagtccccgct

SEQ ID NO: 352263 - DNA, 25 bp, Homo sapien
aaagccagtcctccaagcgctcttc

SEQ ID NO: 352264 - DNA, 25 bp, Homo sapien
aagcgctcttcacaagcctctcgac

SEQ ID NO: 352265 - DNA, 25 bp, Homo sapien
tgggtcgcccgtgcccctaaagcaa

SEQ ID NO: 352266 - DNA, 25 bp, Homo sapien
gaaacggccgccattacaacacata

SEQ ID NO: 352267 - DNA, 25 bp, Homo sapien
cgatgcgtcgcggattcagccgtgc

SEQ ID NO: 352268 - DNA, 25 bp, Homo sapien
ttcagccgtgccgacgccggtgaca

SEQ ID NO: 352269 - DNA, 25 bp, Homo sapien
ggcgccggccaagacgggatggcgg

SEQ ID NO: 352270 - DNA, 25 bp, Homo sapien
tcggccttacgggtccgctatataa

SEQ ID NO: 352271 - DNA, 25 bp, Homo sapien
gtcggccttacgggtccgctatata

SEQ ID NO: 352272 - DNA, 25 bp, Homo sapien
gaaattacacactctacggcgaggg

SEQ ID NO: 352273 - DNA, 25 bp, Homo sapien
tgggtgagccacaaatctacggcgt

SEQ ID NO: 352274 - DNA, 25 bp, Homo sapien
tccagacctatgcatcagcgagggc

SEQ ID NO: 352275 - DNA, 25 bp, Homo sapien
cagtggcccgcgcttgattctgagg

SEQ ID NO: 352276 - DNA, 25 bp, Homo sapien
gaaactcccactcgaggttctggcc

SEQ ID NO: 352277 - DNA, 25 bp, Homo sapien
aatgggctagactgtcagggacccc

SEQ ID NO: 352278 - DNA, 25 bp, Homo sapien
gtctgcgaaggatgaccccatttaa

SEQ ID NO: 352279 - DNA, 25 bp, Homo sapien
gtaggatggcttgggtatgtatccc

SEQ ID NO: 352280 - DNA, 25 bp, Homo sapien
cagaacctcagtggccgcatctata

SEQ ID NO: 352281 - DNA, 25 bp, Homo sapien
taaatgaggtctagccctgaagggc

SEQ ID NO: 352282 - DNA, 25 bp, Homo sapien
tataaaatgggtacaacagcgccta

SEQ ID NO: 352283 - DNA, 25 bp, Homo sapien
tctgccactgagagtaaggccctgg

SEQ ID NO: 352284 - DNA, 25 bp, Homo sapien
tggttgacttagtgcctcgtcaggg

SEQ ID NO: 352285 - DNA, 25 bp, Homo sapien
tagggaagggttctagcagtaactc

SEQ ID NO: 352286 - DNA, 25 bp, Homo sapien
accatgcatgtgtgctgtagacaag

SEQ ID NO: 352287 - DNA, 25 bp, Homo sapien
tctggagagtatcagcacattccca

SEQ ID NO: 352288 - DNA, 25 bp, Homo sapien
tgcaagcatgagttgtcgcgcctgg

SEQ ID NO: 352289 - DNA, 25 bp, Homo sapien
ccttttggcaattagagctccagcc

SEQ ID NO: 352290 - DNA, 25 bp, Homo sapien
gcatctttcattcctacagacttgg

SEQ ID NO: 352291 - DNA, 25 bp, Homo sapien
ttggctcatggtctttgtggtccct

SEQ ID NO: 352292 - DNA, 25 bp, Homo sapien
gattcttgcacaaggtgggctcttc

SEQ ID NO: 352293 - DNA, 25 bp, Homo sapien
taagaatcctaagaggcaggcgatc

SEQ ID NO: 352294 - DNA, 25 bp, Homo sapien
cctgtgctggagataccaagggcat

SEQ ID NO: 352295 - DNA, 25 bp, Homo sapien
ggcctgaggaggtcataatctcttc

SEQ ID NO: 352296 - DNA, 25 bp, Homo sapien
ccatcttgggtgtttgtgacaggcc

SEQ ID NO: 352297 - DNA, 25 bp, Homo sapien
caggtaagcttaactccatcttggg

SEQ ID NO: 352298 - DNA, 25 bp, Homo sapien
gaaagctgtcaagactcctgccagg

SEQ ID NO: 352299 - DNA, 25 bp, Homo sapien
ggcactaggagacctcagggtactg

SEQ ID NO: 352300 - DNA, 25 bp, Homo sapien
tagaaaccgcagtgggcctgcaagc

SEQ ID NO: 352301 - DNA, 25 bp, Homo sapien
gtatagaaaccgcagtgggcctgca

SEQ ID NO: 352302 - DNA, 25 bp, Homo sapien
agggccaggtatagaaaccgcagtg

SEQ ID NO: 352303 - DNA, 25 bp, Homo sapien
caggtatagaaaccgcagtgggcct

SEQ ID NO: 352304 - DNA, 25 bp, Homo sapien
gatgaactgtctttaccactgatga

SEQ ID NO: 352305 - DNA, 25 bp, Homo sapien
ggcctgagttagactatttcccaca

SEQ ID NO: 352306 - DNA, 25 bp, Homo sapien
tctttgagacacagtaccctgggag

SEQ ID NO: 352307 - DNA, 25 bp, Homo sapien
ctctgccggctgagggtagcaagca

SEQ ID NO: 352308 - DNA, 25 bp, Homo sapien
cattttgtcagtatccaggaccccc

SEQ ID NO: 352309 - DNA, 25 bp, Homo sapien
aggaagcaggccgagagacttgcac

SEQ ID NO: 352310 - DNA, 25 bp, Homo sapien
agacttgcaccttggccaagccaca

SEQ ID NO: 352311 - DNA, 25 bp, Homo sapien
agggctgtcggccaggattgccact

SEQ ID NO: 352312 - DNA, 25 bp, Homo sapien
gaagtcaaaggcctgacagctctgt

SEQ ID NO: 352313 - DNA, 25 bp, Homo sapien
agtcaaaggcctgacagctctgtgg

SEQ ID NO: 352314 - DNA, 25 bp, Homo sapien
gtcaaaggcctgacagctctgtggc

SEQ ID NO: 352315 - DNA, 25 bp, Homo sapien
aagtcaaaggcctgacagctctgtg

SEQ ID NO: 352316 - DNA, 25 bp, Homo sapien
tcttccaagaatgcctctgtggtgc

SEQ ID NO: 352317 - DNA, 25 bp, Homo sapien
aatccattttcctgcggcagagcag

SEQ ID NO: 352318 - DNA, 25 bp, Homo sapien
cactccccactttgaagccatctct

SEQ ID NO: 352319 - DNA, 25 bp, Homo sapien
ctgtggtgctgtttggtctctagaa

SEQ ID NO: 352320 - DNA, 25 bp, Homo sapien
tcattctctcatgagctgggagctg

SEQ ID NO: 352321 - DNA, 25 bp, Homo sapien
ccacgatgcccgtgtcgggatgttc

SEQ ID NO: 352322 - DNA, 25 bp, Homo sapien
attctctcatgagctgggagctggc

SEQ ID NO: 352323 - DNA, 25 bp, Homo sapien
ggctccccacgatgcccgtgtcggg

SEQ ID NO: 352324 - DNA, 25 bp, Homo sapien
ttcccacgcggaggtgatgtcagcc

SEQ ID NO: 352325 - DNA, 25 bp, Homo sapien
gatgagctcggcatgagcacaggct

SEQ ID NO: 352326 - DNA, 25 bp, Homo sapien
gaaatttccgccgacaagggcatct

SEQ ID NO: 352327 - DNA, 25 bp, Homo sapien
cagatttctgccaatcccgatgagc

SEQ ID NO: 352328 - DNA, 25 bp, Homo sapien
gagtggacaaatagatggactgccc

SEQ ID NO: 352329 - DNA, 25 bp, Homo sapien
cagtcatcccagtagctcagggcca

SEQ ID NO: 352330 - DNA, 25 bp, Homo sapien
tacctgctgtgtgggagtcactccc

SEQ ID NO: 352331 - DNA, 25 bp, Homo sapien
gcccctgggatgtgtctaagaacat

SEQ ID NO: 352332 - DNA, 25 bp, Homo sapien
ggtcctactgctggcgcccatttta

SEQ ID NO: 352333 - DNA, 25 bp, Homo sapien
gactgggagacagttcagctccgta

SEQ ID NO: 352334 - DNA, 25 bp, Homo sapien
tgctgtcacatgtaagcggctccct

SEQ ID NO: 352335 - DNA, 25 bp, Homo sapien
ggctttctaagcgtgcgtgctgtca

SEQ ID NO: 352336 - DNA, 25 bp, Homo sapien
tccaggcctgcaagcgatttgacag

SEQ ID NO: 352337 - DNA, 25 bp, Homo sapien
gagttggtatccgtggcctcagaga

SEQ ID NO: 352338 - DNA, 25 bp, Homo sapien
tgacttgtgcactgggatcttctcg

SEQ ID NO: 352339 - DNA, 25 bp, Homo sapien
tattctgagagaaggactccaacct

SEQ ID NO: 352340 - DNA, 25 bp, Homo sapien
gtccacccagagatagcggcactgc

SEQ ID NO: 352341 - DNA, 25 bp, Homo sapien
acccagagatagcggcactgccaca

SEQ ID NO: 352342 - DNA, 25 bp, Homo sapien
gagtccacccagagatagcggcact

SEQ ID NO: 352343 - DNA, 25 bp, Homo sapien
cagagtccacccagagatagcggca

SEQ ID NO: 352344 - DNA, 25 bp, Homo sapien
ttctagactgtttcagactggaggc

SEQ ID NO: 352345 - DNA, 25 bp, Homo sapien
gaataattctgtgcaggccagcatg

SEQ ID NO: 352346 - DNA, 25 bp, Homo sapien
catggctatggctcgaggtcacacc

SEQ ID NO: 352347 - DNA, 25 bp, Homo sapien
gtcacaccaatggatggtccagttc

SEQ ID NO: 352348 - DNA, 25 bp, Homo sapien
ctgtttcccagcgcctctgccagct

SEQ ID NO: 352349 - DNA, 25 bp, Homo sapien
tctccccactgccagtctggcccca

SEQ ID NO: 352350 - DNA, 25 bp, Homo sapien
tccccactgccagtctggccccatc

SEQ ID NO: 352351 - DNA, 25 bp, Homo sapien
cccactgccagtctggccccatctg

SEQ ID NO: 352352 - DNA, 25 bp, Homo sapien
gaccctgtggccgatcccagatttc

SEQ ID NO: 352353 - DNA, 25 bp, Homo sapien
tgtggccgatcccagatttcctgag

SEQ ID NO: 352354 - DNA, 25 bp, Homo sapien
tcttcttccagttctactcgctggc

SEQ ID NO: 352355 - DNA, 25 bp, Homo sapien
gccgatcccagatttcctgagtgaa

SEQ ID NO: 352356 - DNA, 25 bp, Homo sapien
ctgccgagtgatgactcggcccagg

SEQ ID NO: 352357 - DNA, 25 bp, Homo sapien
tttgtggctgccgagtgatgactcg

SEQ ID NO: 352358 - DNA, 25 bp, Homo sapien
ctttgtggctgccgagtgatgactc

SEQ ID NO: 352359 - DNA, 25 bp, Homo sapien
tggctgccgagtgatgactcggccc

SEQ ID NO: 352360 - DNA, 25 bp, Homo sapien
acagcctccttgtcaggcagctcag

SEQ ID NO: 352361 - DNA, 25 bp, Homo sapien
agcctccttgtcaggcagctcagcc

SEQ ID NO: 352362 - DNA, 25 bp, Homo sapien
cagcctccttgtcaggcagctcagc

SEQ ID NO: 352363 - DNA, 25 bp, Homo sapien
cacagcctccttgtcaggcagctca

SEQ ID NO: 352364 - DNA, 25 bp, Homo sapien
ggagcacattcgctgggatatagaa

SEQ ID NO: 352365 - DNA, 25 bp, Homo sapien
tatagaataggtagcgcatccctgc

SEQ ID NO: 352366 - DNA, 25 bp, Homo sapien
cattcgctgggatatagaataggta

SEQ ID NO: 352367 - DNA, 25 bp, Homo sapien
tgggactattctggagcacattcgc

SEQ ID NO: 352368 - DNA, 25 bp, Homo sapien
ctagagcaaggccacgaggagccag

SEQ ID NO: 352369 - DNA, 25 bp, Homo sapien
ccctgagaggaatggcctagagcaa

SEQ ID NO: 352370 - DNA, 25 bp, Homo sapien
tggctgctctgtaggccccagaacg

SEQ ID NO: 352371 - DNA, 25 bp, Homo sapien
cagaacggaaccacttgaaaggcgg

SEQ ID NO: 352372 - DNA, 25 bp, Homo sapien
agaacgggacttgctgccccgcacg

SEQ ID NO: 352373 - DNA, 25 bp, Homo sapien
ccgtccacgcatacacagaacggga

SEQ ID NO: 352374 - DNA, 25 bp, Homo sapien
ggcccgcactccgaactacccgcat

SEQ ID NO: 352375 - DNA, 25 bp, Homo sapien
cttgctgccccgcacgcacaccagg

SEQ ID NO: 352376 - DNA, 25 bp, Homo sapien
tgcgggggctgcggccgtagctacc

SEQ ID NO: 352377 - DNA, 25 bp, Homo sapien
aggcccaagcgcagtcgggggctgg

SEQ ID NO: 352378 - DNA, 25 bp, Homo sapien
cagccgaggcccaagcgcagtcggg

SEQ ID NO: 352379 - DNA, 25 bp, Homo sapien
ggcagccgaggcccaagcgcagtcg

SEQ ID NO: 352380 - DNA, 25 bp, Homo sapien
cttcactgggcagcggccatgagaa

SEQ ID NO: 352381 - DNA, 25 bp, Homo sapien
cggccatgagaatcacgagagggct

SEQ ID NO: 352382 - DNA, 25 bp, Homo sapien
ctggaaaacgaggatgccgatgcca

SEQ ID NO: 352383 - DNA, 25 bp, Homo sapien
gatgccgatgccagctggcgggcca

SEQ ID NO: 352384 - DNA, 25 bp, Homo sapien
ctggacgtgaacggcagagagctga

SEQ ID NO: 352385 - DNA, 25 bp, Homo sapien
ggggaactgcgtggtcctcatgcaa

SEQ ID NO: 352386 - DNA, 25 bp, Homo sapien
ggaactgcgtggtcctcatgcaatt

SEQ ID NO: 352387 - DNA, 25 bp, Homo sapien
gacgtgaacggcagagagctgaggg

SEQ ID NO: 352388 - DNA, 25 bp, Homo sapien
gcacatggttgtggcaaattgtggt

SEQ ID NO: 352389 - DNA, 25 bp, Homo sapien
tgtggcaaattgtggtgggtgagtg

SEQ ID NO: 352390 - DNA, 25 bp, Homo sapien
gttgtggcaaattgtggtgggtgag

SEQ ID NO: 352391 - DNA, 25 bp, Homo sapien
ctggcacatggttgtggcaaattgt

SEQ ID NO: 352392 - DNA, 25 bp, Homo sapien
caggtgactggggatgggttgggcc

SEQ ID NO: 352393 - DNA, 25 bp, Homo sapien
gatgggttgggcccccgggctggca

SEQ ID NO: 352394 - DNA, 25 bp, Homo sapien
gagctgcaggtgactggggatgggt

SEQ ID NO: 352395 - DNA, 25 bp, Homo sapien
ctgccacaggagaggggcacaggga

SEQ ID NO: 352396 - DNA, 25 bp, Homo sapien
gtgagcctctgagcctggcctgata

SEQ ID NO: 352397 - DNA, 25 bp, Homo sapien
tgagcctctgagcctggcctgatac

SEQ ID NO: 352398 - DNA, 25 bp, Homo sapien
gagcctctgagcctggcctgataca

SEQ ID NO: 352399 - DNA, 25 bp, Homo sapien
gtgtgagcctctgagcctggcctga

SEQ ID NO: 352400 - DNA, 25 bp, Homo sapien
ctggttcctgctgagaaatgctctg

SEQ ID NO: 352401 - DNA, 25 bp, Homo sapien
ggttcctgctgagaaatgctctgaa

SEQ ID NO: 352402 - DNA, 25 bp, Homo sapien
tggttcctgctgagaaatgctctga

SEQ ID NO: 352403 - DNA, 25 bp, Homo sapien
cttgtgcattcctggttaattcagc

SEQ ID NO: 352404 - DNA, 25 bp, Homo sapien
cctggttaattcagcgagtgttgac

SEQ ID NO: 352405 - DNA, 25 bp, Homo sapien
taattcagcgagtgttgacagagtg

SEQ ID NO: 352406 - DNA, 25 bp, Homo sapien
cagcgagtgttgacagagtgcccac

SEQ ID NO: 352407 - DNA, 25 bp, Homo sapien
gccaggccctgacatgaagtctttg

SEQ ID NO: 352408 - DNA, 25 bp, Homo sapien
tgccaggccctgacatgaagtcttt

SEQ ID NO: 352409 - DNA, 25 bp, Homo sapien
cttgtgaagcacctgtcttgtggag

SEQ ID NO: 352410 - DNA, 25 bp, Homo sapien
gtcttgtggagccattgcagtgaga

SEQ ID NO: 352411 - DNA, 25 bp, Homo sapien
ccctcaccttgatgagcagcagtgg

SEQ ID NO: 352412 - DNA, 25 bp, Homo sapien
ctggagcagcaaagctagaatgtgg

SEQ ID NO: 352413 - DNA, 25 bp, Homo sapien
tgggcacattggcagctctgctgag

SEQ ID NO: 352414 - DNA, 25 bp, Homo sapien
aatgtgggtcttccagaacatggag

SEQ ID NO: 352415 - DNA, 25 bp, Homo sapien
caggaaattcctctccaggcttagg

SEQ ID NO: 352416 - DNA, 25 bp, Homo sapien
attgcactgttctctgtggtcagcc

SEQ ID NO: 352417 - DNA, 25 bp, Homo sapien
gatagcgtgggggaactcctgagca

SEQ ID NO: 352418 - DNA, 25 bp, Homo sapien
cctgagcaagacaagcaaacaggaa

SEQ ID NO: 352419 - DNA, 25 bp, Homo sapien
agcaggaatgctcaaagctctgggc

SEQ ID NO: 352420 - DNA, 25 bp, Homo sapien
ggaaggcaagggctaggaagaggga

SEQ ID NO: 352421 - DNA, 25 bp, Homo sapien
ccttccagggtagggtgtgatttct

SEQ ID NO: 352422 - DNA, 25 bp, Homo sapien
gctttttgtataaagctccccggca

SEQ ID NO: 352423 - DNA, 25 bp, Homo sapien
tacaatagctgtctggccgtctcct

SEQ ID NO: 352424 - DNA, 25 bp, Homo sapien
gatggacctgctttttactgagcgc

SEQ ID NO: 352425 - DNA, 25 bp, Homo sapien
tcccgccgtgccgagagtgtatttc

SEQ ID NO: 352426 - DNA, 25 bp, Homo sapien
tgcccggtactttgtcagagactcg

SEQ ID NO: 352427 - DNA, 25 bp, Homo sapien
cctcctttaagctgcaggagaccca

SEQ ID NO: 352428 - DNA, 25 bp, Homo sapien
agacccagacacggcgcactgtcca

SEQ ID NO: 352429 - DNA, 25 bp, Homo sapien
tcctgactttttggaccttgagcct

SEQ ID NO: 352430 - DNA, 25 bp, Homo sapien
ccagacacggcgcactgtccagggt

SEQ ID NO: 352431 - DNA, 25 bp, Homo sapien
tggtgtgagacttgtcccaactact

SEQ ID NO: 352432 - DNA, 25 bp, Homo sapien
ggtgtgagacttgtcccaactactc

SEQ ID NO: 352433 - DNA, 25 bp, Homo sapien
gatggagtctttgaccaggcctggc

SEQ ID NO: 352434 - DNA, 25 bp, Homo sapien
tctgtagtccgcctgtcagcttggg

SEQ ID NO: 352435 - DNA, 25 bp, Homo sapien
cacttgtgttgagcctggagcagaa

SEQ ID NO: 352436 - DNA, 25 bp, Homo sapien
cagaattcctcgatgctgggtgtca

SEQ ID NO: 352437 - DNA, 25 bp, Homo sapien
gagacgggcttcagcgcgaagccct

SEQ ID NO: 352438 - DNA, 25 bp, Homo sapien
gctgcaaagatgtgcctcctgcctt

SEQ ID NO: 352439 - DNA, 25 bp, Homo sapien
gggattgctgcaaagatgtgcctcc

SEQ ID NO: 352440 - DNA, 25 bp, Homo sapien
gaagccctttcgtacagttgaacta

SEQ ID NO: 352441 - DNA, 25 bp, Homo sapien
tgctggacatgtgacagctggcccc

SEQ ID NO: 352442 - DNA, 25 bp, Homo sapien
gagactgaggttgtttctggcatcc

SEQ ID NO: 352443 - DNA, 25 bp, Homo sapien
cctgctttactgctggacatgtgac

SEQ ID NO: 352444 - DNA, 25 bp, Homo sapien
tcatggacattacagggatgccctg

SEQ ID NO: 352445 - DNA, 25 bp, Homo sapien
tcacagcccgtcaggcttccaagca

SEQ ID NO: 352446 - DNA, 25 bp, Homo sapien
gctgccaggggatttagagtctgaa

SEQ ID NO: 352447 - DNA, 25 bp, Homo sapien
tgccaggggatttagagtctgaatg

SEQ ID NO: 352448 - DNA, 25 bp, Homo sapien
caggggatttagagtctgaatggca

SEQ ID NO: 352449 - DNA, 25 bp, Homo sapien
ccaggggatttagagtctgaatggc

SEQ ID NO: 352450 - DNA, 25 bp, Homo sapien
gtgactacgaggacaagcgggacct

SEQ ID NO: 352451 - DNA, 25 bp, Homo sapien
ttcagacagtatgagaaccgcaccg

SEQ ID NO: 352452 - DNA, 25 bp, Homo sapien
caagctctacgatggctggaccgag

SEQ ID NO: 352453 - DNA, 25 bp, Homo sapien
tatgcgcccaagtacctgctgaaga

SEQ ID NO: 352454 - DNA, 25 bp, Homo sapien
gaaaatatccctcctgttgggagag

SEQ ID NO: 352455 - DNA, 25 bp, Homo sapien
tgtgaatcaagggtcaggcctttga

SEQ ID NO: 352456 - DNA, 25 bp, Homo sapien
ttccctactgaagcccttgtgaatc

SEQ ID NO: 352457 - DNA, 25 bp, Homo sapien
gccgtgacgtctgggtggcccttat

SEQ ID NO: 352458 - DNA, 25 bp, Homo sapien
cctggtggggcaggtcctgttcaca

SEQ ID NO: 352459 - DNA, 25 bp, Homo sapien
ctgccttcctcacagacctggtggg

SEQ ID NO: 352460 - DNA, 25 bp, Homo sapien
ctggccatcggtggagagggcagct

SEQ ID NO: 352461 - DNA, 25 bp, Homo sapien
cgaaggaagataggagcagctcaga

SEQ ID NO: 352462 - DNA, 25 bp, Homo sapien
ccagggcacaggattgaagagtttc

SEQ ID NO: 352463 - DNA, 25 bp, Homo sapien
cagggccactccctcaatatgaagg

SEQ ID NO: 352464 - DNA, 25 bp, Homo sapien
caagctgaatgtgaccaccggcaca

SEQ ID NO: 352465 - DNA, 25 bp, Homo sapien
catatcatcacagcatacactggga

SEQ ID NO: 352466 - DNA, 25 bp, Homo sapien
tgctgcaggtacttggagtggggat

SEQ ID NO: 352467 - DNA, 25 bp, Homo sapien
agtggagaagatgtagacaccctac

SEQ ID NO: 352468 - DNA, 25 bp, Homo sapien
tgagggttgaattccacagggttga

SEQ ID NO: 352469 - DNA, 25 bp, Homo sapien
aggaagtggagaagatgtagacacc

SEQ ID NO: 352470 - DNA, 25 bp, Homo sapien
ttcggtgagcaagcttacattccct

SEQ ID NO: 352471 - DNA, 25 bp, Homo sapien
tcccatccccttggactgcagtaga

SEQ ID NO: 352472 - DNA, 25 bp, Homo sapien
ttgtcccatccccttggactgcagt

SEQ ID NO: 352473 - DNA, 25 bp, Homo sapien
ctgcaagagggcgttcggtgagcaa

SEQ ID NO: 352474 - DNA, 25 bp, Homo sapien
ttagaaactactatgcctctctcca

SEQ ID NO: 352475 - DNA, 25 bp, Homo sapien
tttcagagtaagacagacttggctt

SEQ ID NO: 352476 - DNA, 25 bp, Homo sapien
acatttcagagtaagacagacttgg

SEQ ID NO: 352477 - DNA, 25 bp, Homo sapien
actactatgcctctctccatcttgg

SEQ ID NO: 352478 - DNA, 25 bp, Homo sapien
gccctctgaacttctgccagcatcg

SEQ ID NO: 352479 - DNA, 25 bp, Homo sapien
cggtgcggcagccttgttggacagc

SEQ ID NO: 352480 - DNA, 25 bp, Homo sapien
ttctgccagcatcgggaccaccccg

SEQ ID NO: 352481 - DNA, 25 bp, Homo sapien
tgttggacagcgaggctacctcctg

SEQ ID NO: 352482 - DNA, 25 bp, Homo sapien
atgcggcccggagtcaggataccag

SEQ ID NO: 352483 - DNA, 25 bp, Homo sapien
cacggcctgcgggtgagtgagagaa

SEQ ID NO: 352484 - DNA, 25 bp, Homo sapien
gataccagcatgcagccgggggtct

SEQ ID NO: 352485 - DNA, 25 bp, Homo sapien
cagaggcgagtcctgcggagtggta

SEQ ID NO: 352486 - DNA, 25 bp, Homo sapien
tgctgggaaagttcgtggagcaccc

SEQ ID NO: 352487 - DNA, 25 bp, Homo sapien
tccggctccagcaaagggtaactca

SEQ ID NO: 352488 - DNA, 25 bp, Homo sapien
agaagtgctgtacacacggtccggc

SEQ ID NO: 352489 - DNA, 25 bp, Homo sapien
tgagccccttgtatgtgccaagcgc

SEQ ID NO: 352490 - DNA, 25 bp, Homo sapien
ggccttgaaggaacgcagccttaga

SEQ ID NO: 352491 - DNA, 25 bp, Homo sapien
ccttgtttgccgctgctgagattgc

SEQ ID NO: 352492 - DNA, 25 bp, Homo sapien
gcaagtgagcatgcacggacctctt

SEQ ID NO: 352493 - DNA, 25 bp, Homo sapien
cagcgtctgccataggaatgtgaga

SEQ ID NO: 352494 - DNA, 25 bp, Homo sapien
cactgggtatccgttagaggtaagg

SEQ ID NO: 352495 - DNA, 25 bp, Homo sapien
gcccctcttttgtcacagattagga

SEQ ID NO: 352496 - DNA, 25 bp, Homo sapien
tctgtatgcctgagtaccatcctgg

SEQ ID NO: 352497 - DNA, 25 bp, Homo sapien
tgagagagctcatctaccctgtctg

SEQ ID NO: 352498 - DNA, 25 bp, Homo sapien
ttaaagaagcgttgcagaggcccac

SEQ ID NO: 352499 - DNA, 25 bp, Homo sapien
taggagacttaggacagagctgacc

SEQ ID NO: 352500 - DNA, 25 bp, Homo sapien
taaatacagactactgcgagtgtcc

SEQ ID NO: 352501 - DNA, 25 bp, Homo sapien
tgctgaccatgactgggcaagccgt

SEQ ID NO: 352502 - DNA, 25 bp, Homo sapien
tctgtactgtcttggttagctctat

SEQ ID NO: 352503 - DNA, 25 bp, Homo sapien
ggaaataaaactgcggaatacaatg

SEQ ID NO: 352504 - DNA, 25 bp, Homo sapien
tgaggccaagtccacaacttgcctt

SEQ ID NO: 352505 - DNA, 25 bp, Homo sapien
tacaatgtccttccatagcatggga

SEQ ID NO: 352506 - DNA, 25 bp, Homo sapien
ccagtgaaatggaggcggaaactca

SEQ ID NO: 352507 - DNA, 25 bp, Homo sapien
cagcgctcatacttgtgtggcccag

SEQ ID NO: 352508 - DNA, 25 bp, Homo sapien
gttgaatgagcgcagcagatggcct

SEQ ID NO: 352509 - DNA, 25 bp, Homo sapien
ttattgggcgcttacatgtaccagg

SEQ ID NO: 352510 - DNA, 25 bp, Homo sapien
agggtccacggccaccatggcgtat

SEQ ID NO: 352511 - DNA, 25 bp, Homo sapien
ccacggccaccatggcgtattaggg

SEQ ID NO: 352512 - DNA, 25 bp, Homo sapien
cagatgtagttttctctgcgcgtgt

SEQ ID NO: 352513 - DNA, 25 bp, Homo sapien
tctctgcgcgtgtgcgttttccctc

SEQ ID NO: 352514 - DNA, 25 bp, Homo sapien
gagaagtcccgcctcataagtggaa

SEQ ID NO: 352515 - DNA, 25 bp, Homo sapien
cagaacagctaacctctaatgggag

SEQ ID NO: 352516 - DNA, 25 bp, Homo sapien
tgttcccgattctctagatggccga

SEQ ID NO: 352517 - DNA, 25 bp, Homo sapien
tcttggcggccggtggaagaatccc

SEQ ID NO: 352518 - DNA, 25 bp, Homo sapien
tggaggtggccaagcacttcaaacc

SEQ ID NO: 352519 - DNA, 25 bp, Homo sapien
gctcctccgaatggctggctgtgga

SEQ ID NO: 352520 - DNA, 25 bp, Homo sapien
catgggttctccagcgacaaggcta

SEQ ID NO: 352521 - DNA, 25 bp, Homo sapien
catgaccgaaatgagcttcctgagc

SEQ ID NO: 352522 - DNA, 25 bp, Homo sapien
cttctccgggacagattggatgttg

SEQ ID NO: 352523 - DNA, 25 bp, Homo sapien
gaaggagttcgacttggatgccctg

SEQ ID NO: 352524 - DNA, 25 bp, Homo sapien
tagatgacctggaaaccatgccaga

SEQ ID NO: 352525 - DNA, 25 bp, Homo sapien
ggatgccctgttgggtatagatgac

SEQ ID NO: 352526 - DNA, 25 bp, Homo sapien
cccctagtccaggagactaataagc

SEQ ID NO: 352527 - DNA, 25 bp, Homo sapien
tttgcccccctagtccaggagacta

SEQ ID NO: 352528 - DNA, 25 bp, Homo sapien
gcccccctagtccaggagactaata

SEQ ID NO: 352529 - DNA, 25 bp, Homo sapien
cctagtccaggagactaataagcag

SEQ ID NO: 352530 - DNA, 25 bp, Homo sapien
ctcagtgcataaaggaggaagacac

SEQ ID NO: 352531 - DNA, 25 bp, Homo sapien
tgaaggagataggaagccagactac

SEQ ID NO: 352532 - DNA, 25 bp, Homo sapien
gactacactgcttacgttgccatga

SEQ ID NO: 352533 - DNA, 25 bp, Homo sapien
caccccttcagataatgatagtggc

SEQ ID NO: 352534 - DNA, 25 bp, Homo sapien
ccctagttgaggatagtcaggagcg

SEQ ID NO: 352535 - DNA, 25 bp, Homo sapien
tgatagaagaggtccgcaaggcaag

SEQ ID NO: 352536 - DNA, 25 bp, Homo sapien
caaaccttacgatcctcctggagag

SEQ ID NO: 352537 - DNA, 25 bp, Homo sapien
caggaggctcttactggtgagtgca

SEQ ID NO: 352538 - DNA, 25 bp, Homo sapien
cctgtgttgcggatgaatgcttgaa

SEQ ID NO: 352539 - DNA, 25 bp, Homo sapien
tccaggcaggcgatgtcttttgtcc

SEQ ID NO: 352540 - DNA, 25 bp, Homo sapien
tgtgtccttcgggattagcctcgtt

SEQ ID NO: 352541 - DNA, 25 bp, Homo sapien
tgaatgcaaagatcagcgcagcccg

SEQ ID NO: 352542 - DNA, 25 bp, Homo sapien
tgcccagcatagactgtcacctgag

SEQ ID NO: 352543 - DNA, 25 bp, Homo sapien
tggcccgtaacgacctgcatggtgg

SEQ ID NO: 352544 - DNA, 25 bp, Homo sapien
cacctaggaggattttgagcaaaga

SEQ ID NO: 352545 - DNA, 25 bp, Homo sapien
aactgttgatggaatgcatgcagct

SEQ ID NO: 352546 - DNA, 25 bp, Homo sapien
cagcagctatttttgcctcaagagt

SEQ ID NO: 352547 - DNA, 25 bp, Homo sapien
aagtagcaacactcccactgccgga

SEQ ID NO: 352548 - DNA, 25 bp, Homo sapien
ggcgcaggcggaagtagcaacactc

SEQ ID NO: 352549 - DNA, 25 bp, Homo sapien
cgggtgaaatgctccgctcatggcg

SEQ ID NO: 352550 - DNA, 25 bp, Homo sapien
cacatttattgtaacttggaagccc

SEQ ID NO: 352551 - DNA, 25 bp, Homo sapien
ccacagcaaacagcccagaggcccc

SEQ ID NO: 352552 - DNA, 25 bp, Homo sapien
agccttgctccacagcaaacagccc

SEQ ID NO: 352553 - DNA, 25 bp, Homo sapien
acagcaaacagcccagaggccccac

SEQ ID NO: 352554 - DNA, 25 bp, Homo sapien
ttagccttgctccacagcaaacagc

SEQ ID NO: 352555 - DNA, 25 bp, Homo sapien
gccagctccggtctgtgtgtaaatc

SEQ ID NO: 352556 - DNA, 25 bp, Homo sapien
aacagatacgttcctttccggcagg

SEQ ID NO: 352557 - DNA, 25 bp, Homo sapien
tgtgtgtaaatcctccccaggactt

SEQ ID NO: 352558 - DNA, 25 bp, Homo sapien
tgcggaagccagctccggtctgtgt

SEQ ID NO: 352559 - DNA, 25 bp, Homo sapien
caggctggtcctgcatcgccatctg

SEQ ID NO: 352560 - DNA, 25 bp, Homo sapien
aaggcctcttcaccgtgccctccag

SEQ ID NO: 352561 - DNA, 25 bp, Homo sapien
ttgaaggcctcttcaccgtgccctc

SEQ ID NO: 352562 - DNA, 25 bp, Homo sapien
aggctggtcctgcatcgccatctgc

SEQ ID NO: 352563 - DNA, 25 bp, Homo sapien
tgccgaagtattcctgctggaactt

SEQ ID NO: 352564 - DNA, 25 bp, Homo sapien
gccgaagtattcctgctggaacttc

SEQ ID NO: 352565 - DNA, 25 bp, Homo sapien
ctagctgccgaagtattcctgctgg

SEQ ID NO: 352566 - DNA, 25 bp, Homo sapien
gctgccgaagtattcctgctggaac

SEQ ID NO: 352567 - DNA, 25 bp, Homo sapien
tcttggtcttggccacaggccggtc

SEQ ID NO: 352568 - DNA, 25 bp, Homo sapien
ttcttcttcttggtcttggccacag

SEQ ID NO: 352569 - DNA, 25 bp, Homo sapien
tcttcttggtcttggccacaggccg

SEQ ID NO: 352570 - DNA, 25 bp, Homo sapien
ttggtcttggccacaggccggtcac

SEQ ID NO: 352571 - DNA, 25 bp, Homo sapien
ggaccgagggcccatcatttcaaga

SEQ ID NO: 352572 - DNA, 25 bp, Homo sapien
gggagttcggcgcagggcagggctg

SEQ ID NO: 352573 - DNA, 25 bp, Homo sapien
caggtcccttcctatagtaccctcg

SEQ ID NO: 352574 - DNA, 25 bp, Homo sapien
ctgagaccgccatgggtccctaggg

SEQ ID NO: 352575 - DNA, 25 bp, Homo sapien
ggtttactctgaggtggtctcgaca

SEQ ID NO: 352576 - DNA, 25 bp, Homo sapien
tggtcagaaacttcaggtttactct

SEQ ID NO: 352577 - DNA, 25 bp, Homo sapien
acggtgcttctcgtcctggtcagaa

SEQ ID NO: 352578 - DNA, 25 bp, Homo sapien
ggtctcgacactctcgcttccggta

SEQ ID NO: 352579 - DNA, 25 bp, Homo sapien
ctggagctttcgcttcagtgagaga

SEQ ID NO: 352580 - DNA, 25 bp, Homo sapien
caggttattacagcggctgggctct

SEQ ID NO: 352581 - DNA, 25 bp, Homo sapien
tgaatactactcaccaagggagcta

SEQ ID NO: 352582 - DNA, 25 bp, Homo sapien
tagaagcgcaaacatttcatggaga

SEQ ID NO: 352583 - DNA, 25 bp, Homo sapien
taagtccccatcagagtaccgtagt

SEQ ID NO: 352584 - DNA, 25 bp, Homo sapien
ggagaccggctaggcttctgcaata

SEQ ID NO: 352585 - DNA, 25 bp, Homo sapien
tgcacttagcaatgacacactgggt

SEQ ID NO: 352586 - DNA, 25 bp, Homo sapien
taggtctagcaataccgggcgaacg

SEQ ID NO: 352587 - DNA, 25 bp, Homo sapien
agtttctgggcctgaattgccttcg

SEQ ID NO: 352588 - DNA, 25 bp, Homo sapien
ccctctcggcttggcctgacctgga

SEQ ID NO: 352589 - DNA, 25 bp, Homo sapien
gcctgaattgccttcgtcttccggg

SEQ ID NO: 352590 - DNA, 25 bp, Homo sapien
cttggccgagttccgcagtttctgg

SEQ ID NO: 352591 - DNA, 25 bp, Homo sapien
cactggggctaagcccggcctggat

SEQ ID NO: 352592 - DNA, 25 bp, Homo sapien
atgccactggggctaagcccggcct

SEQ ID NO: 352593 - DNA, 25 bp, Homo sapien
cccggcctggattgttttccatcca

SEQ ID NO: 352594 - DNA, 25 bp, Homo sapien
gcccgcagccactaccatcctcctg

SEQ ID NO: 352595 - DNA, 25 bp, Homo sapien
caggccccgccgcagcagggcggcg

SEQ ID NO: 352596 - DNA, 25 bp, Homo sapien
ggccccgccgcagcagggcggcgga

SEQ ID NO: 352597 - DNA, 25 bp, Homo sapien
cctcggacgccgccagcagctccag

SEQ ID NO: 352598 - DNA, 25 bp, Homo sapien
cccgccgcagcagggcggcggacat

SEQ ID NO: 352599 - DNA, 25 bp, Homo sapien
cagtccctgtcgtctcggcggaaac

SEQ ID NO: 352600 - DNA, 25 bp, Homo sapien
ccgagcccgaacagagggatccgga

SEQ ID NO: 352601 - DNA, 25 bp, Homo sapien
gaagtgcccatctttcttaggacgc

SEQ ID NO: 352602 - DNA, 25 bp, Homo sapien
ctcacactacttccgacctggcagt

SEQ ID NO: 352603 - DNA, 25 bp, Homo sapien
acagcccgcatttgggcacctgcga

SEQ ID NO: 352604 - DNA, 25 bp, Homo sapien
tgcgacctgccagtcttgacgttgg

SEQ ID NO: 352605 - DNA, 25 bp, Homo sapien
ttgacgttggccctgatgggtcaag

SEQ ID NO: 352606 - DNA, 25 bp, Homo sapien
atttgggcacctgcgacctgccagt

SEQ ID NO: 352607 - DNA, 25 bp, Homo sapien
gagcagccaataggagaaaaaccag

SEQ ID NO: 352608 - DNA, 25 bp, Homo sapien
tgaatgaagggctccgttgggcctg

SEQ ID NO: 352609 - DNA, 25 bp, Homo sapien
tccacgtgcaggaggcgggcattgg

SEQ ID NO: 352610 - DNA, 25 bp, Homo sapien
tgctgataccactgacggagcagcc

SEQ ID NO: 352611 - DNA, 25 bp, Homo sapien
cactctcagcaagtgtgagtctctg

SEQ ID NO: 352612 - DNA, 25 bp, Homo sapien
agggtctgcagggttcagggtggca

SEQ ID NO: 352613 - DNA, 25 bp, Homo sapien
gctcgtgttacactctcagcaagtg

SEQ ID NO: 352614 - DNA, 25 bp, Homo sapien
cagcaagtgtgagtctctgtcgtcc

SEQ ID NO: 352615 - DNA, 25 bp, Homo sapien
ctagtgggaagaactgtgggccagg

SEQ ID NO: 352616 - DNA, 25 bp, Homo sapien
caggttaggatgtgtgccaatggct

SEQ ID NO: 352617 - DNA, 25 bp, Homo sapien
tgggaagaactgtgggccaggttag

SEQ ID NO: 352618 - DNA, 25 bp, Homo sapien
ccaggttaggatgtgtgccaatggc

SEQ ID NO: 352619 - DNA, 25 bp, Homo sapien
tgacatgcccagggctgttcttgtt

SEQ ID NO: 352620 - DNA, 25 bp, Homo sapien
ttgttcatgtcagcactgaggggga

SEQ ID NO: 352621 - DNA, 25 bp, Homo sapien
gcttctgctggcttagtgcagttgg

SEQ ID NO: 352622 - DNA, 25 bp, Homo sapien
acacactgagtacccctgtgggtcc

SEQ ID NO: 352623 - DNA, 25 bp, Homo sapien
acaggcctggtacgcagaggtgatt

SEQ ID NO: 352624 - DNA, 25 bp, Homo sapien
gcttttggactgttgaagcttgcat

SEQ ID NO: 352625 - DNA, 25 bp, Homo sapien
ggtgattaacagatgcttttggact

SEQ ID NO: 352626 - DNA, 25 bp, Homo sapien
tctcgtaatgtcctccagccatggc

SEQ ID NO: 352627 - DNA, 25 bp, Homo sapien
ggtgcccgtgtccggcgggctgagc

SEQ ID NO: 352628 - DNA, 25 bp, Homo sapien
cactggatgggggaatcccgggcag

SEQ ID NO: 352629 - DNA, 25 bp, Homo sapien
gcggagaccccccctttggctggca

SEQ ID NO: 352630 - DNA, 25 bp, Homo sapien
gtgcccgtgtccggcgggctgagct

SEQ ID NO: 352631 - DNA, 25 bp, Homo sapien
tccttgatccgtggctgtctccact

SEQ ID NO: 352632 - DNA, 25 bp, Homo sapien
tgtggctccttgatccgtggctgtc

SEQ ID NO: 352633 - DNA, 25 bp, Homo sapien
cttcttctcttgattcctcagcccc

SEQ ID NO: 352634 - DNA, 25 bp, Homo sapien
tatgtggctccttgatccgtggctg

SEQ ID NO: 352635 - DNA, 25 bp, Homo sapien
gtggcttggtcgacagcccagcagc

SEQ ID NO: 352636 - DNA, 25 bp, Homo sapien
tccgggtggcttggtcgacagccca

SEQ ID NO: 352637 - DNA, 25 bp, Homo sapien
gcccgttgcccccgggagccagaga

SEQ ID NO: 352638 - DNA, 25 bp, Homo sapien
tcagctccgggtggcttggtcgaca

SEQ ID NO: 352639 - DNA, 25 bp, Homo sapien
gagttggaggattctggacccggtg

SEQ ID NO: 352640 - DNA, 25 bp, Homo sapien
ttggaggattctggacccggtggct

SEQ ID NO: 352641 - DNA, 25 bp, Homo sapien
ctacgagttggaggattctggaccc

SEQ ID NO: 352642 - DNA, 25 bp, Homo sapien
tacgagttggaggattctggacccg

SEQ ID NO: 352643 - DNA, 25 bp, Homo sapien
gcagagaggagcttcccgtttccag

SEQ ID NO: 352644 - DNA, 25 bp, Homo sapien
agtcggctgtgaaggccgcctctct

SEQ ID NO: 352645 - DNA, 25 bp, Homo sapien
catagtgcggaagccagtcggctgt

SEQ ID NO: 352646 - DNA, 25 bp, Homo sapien
cagtgatgcatagtgcggaagccag

SEQ ID NO: 352647 - DNA, 25 bp, Homo sapien
ggctcagagctgagtttagggtcac

SEQ ID NO: 352648 - DNA, 25 bp, Homo sapien
aggatggaaggacatttggggtcca

SEQ ID NO: 352649 - DNA, 25 bp, Homo sapien
caggttgctaatagcctggtgtgtg

SEQ ID NO: 352650 - DNA, 25 bp, Homo sapien
gcatgaggatggaaggacatttggg

SEQ ID NO: 352651 - DNA, 25 bp, Homo sapien
agaggatgtgcatgaggatggaagg

SEQ ID NO: 352652 - DNA, 25 bp, Homo sapien
gccctgctgcctccctcaaactgcc

SEQ ID NO: 352653 - DNA, 25 bp, Homo sapien
tgctgcctccctcaaactgcctcat

SEQ ID NO: 352654 - DNA, 25 bp, Homo sapien
ctgggcttctgccctgctgcctccc

SEQ ID NO: 352655 - DNA, 25 bp, Homo sapien
cctgctgcctccctcaaactgcctc

SEQ ID NO: 352656 - DNA, 25 bp, Homo sapien
tacccagagaacagcttgctcatcc

SEQ ID NO: 352657 - DNA, 25 bp, Homo sapien
ttgctcatccaggttcctcatggca

SEQ ID NO: 352658 - DNA, 25 bp, Homo sapien
tagggtgaccactgctgctgaaatc

SEQ ID NO: 352659 - DNA, 25 bp, Homo sapien
tgctgaaatcttgggggcattaccc

SEQ ID NO: 352660 - DNA, 25 bp, Homo sapien
ctgccaatccaggtctggggtgact

SEQ ID NO: 352661 - DNA, 25 bp, Homo sapien
gtgtcaagtcactgccaatccaggt

SEQ ID NO: 352662 - DNA, 25 bp, Homo sapien
tgtcaagtcactgccaatccaggtc

SEQ ID NO: 352663 - DNA, 25 bp, Homo sapien
caagtcactgccaatccaggtctgg

SEQ ID NO: 352664 - DNA, 25 bp, Homo sapien
gaagaggcttctgtgcctcctcgga

SEQ ID NO: 352665 - DNA, 25 bp, Homo sapien
aactccaggaagaggcttctgtgcc

SEQ ID NO: 352666 - DNA, 25 bp, Homo sapien
tccaggaagaggcttctgtgcctcc

SEQ ID NO: 352667 - DNA, 25 bp, Homo sapien
cctgaactccaggaagaggcttctg

SEQ ID NO: 352668 - DNA, 25 bp, Homo sapien
tgggcttcggttggctgcaggtcag

SEQ ID NO: 352669 - DNA, 25 bp, Homo sapien
ggtgcaggccgcctgcaaccacagg

SEQ ID NO: 352670 - DNA, 25 bp, Homo sapien
ttcgcagctgtgacgggcaggccat

SEQ ID NO: 352671 - DNA, 25 bp, Homo sapien
tgggcacaggtctgtcactgcggcc

SEQ ID NO: 352672 - DNA, 25 bp, Homo sapien
cagctgtgctatagcgccggtgcac

SEQ ID NO: 352673 - DNA, 25 bp, Homo sapien
tgagctgtgttaacctacggattgc

SEQ ID NO: 352674 - DNA, 25 bp, Homo sapien
tcatgcaagaaggacgtggcagagc

SEQ ID NO: 352675 - DNA, 25 bp, Homo sapien
gaaaagatgcaccacttcacagcag

SEQ ID NO: 352676 - DNA, 25 bp, Homo sapien
tttttacattccttccattcctcag

SEQ ID NO: 352677 - DNA, 25 bp, Homo sapien
tttacattccttccattcctcagaa

SEQ ID NO: 352678 - DNA, 25 bp, Homo sapien
tgtttttacattccttccattcctc

SEQ ID NO: 352679 - DNA, 25 bp, Homo sapien
ttatatgtttttacattccttccat

SEQ ID NO: 352680 - DNA, 25 bp, Homo sapien
ctggtctgatcagtggtggacaggg

SEQ ID NO: 352681 - DNA, 25 bp, Homo sapien
ggagtccaattagtcctggtctgat

SEQ ID NO: 352682 - DNA, 25 bp, Homo sapien
gtccaattagtcctggtctgatcag

SEQ ID NO: 352683 - DNA, 25 bp, Homo sapien
caggacaggagtccaattagtcctg

SEQ ID NO: 352684 - DNA, 25 bp, Homo sapien
gaaaagctgtataagctattcaccc

SEQ ID NO: 352685 - DNA, 25 bp, Homo sapien
gatgaaaagctgtataagctattca

SEQ ID NO: 352686 - DNA, 25 bp, Homo sapien
catgtgcgtctctatcacagatgaa

SEQ ID NO: 352687 - DNA, 25 bp, Homo sapien
tctttggaaggtgcccatgtgcgtc

SEQ ID NO: 352688 - DNA, 25 bp, Homo sapien
taaaagaaggtctgcaagctgcttg

SEQ ID NO: 352689 - DNA, 25 bp, Homo sapien
gaatgactatttactacggcgcgga

SEQ ID NO: 352690 - DNA, 25 bp, Homo sapien
gaattccaggaagcctttagagaga

SEQ ID NO: 352691 - DNA, 25 bp, Homo sapien
cagactgacgttccatcaaaaaggg

SEQ ID NO: 352692 - DNA, 25 bp, Homo sapien
gcagatgcgtgaccacccttccggt

SEQ ID NO: 352693 - DNA, 25 bp, Homo sapien
aaggtaccacatccgcaccgctgct

SEQ ID NO: 352694 - DNA, 25 bp, Homo sapien
tccggtcctcagttgtcaccaagtc

SEQ ID NO: 352695 - DNA, 25 bp, Homo sapien
ctgacttctggcagatgcgtgacca

SEQ ID NO: 352696 - DNA, 25 bp, Homo sapien
atgaatgtgatcatagaggctggcc

SEQ ID NO: 352697 - DNA, 25 bp, Homo sapien
gaatgtgatcatagaggctggcctg

SEQ ID NO: 352698 - DNA, 25 bp, Homo sapien
gaatgaatgtgatcatagaggctgg

SEQ ID NO: 352699 - DNA, 25 bp, Homo sapien
aatgtgatcatagaggctggcctgg

SEQ ID NO: 352700 - DNA, 25 bp, Homo sapien
gcacactgcggctgtaacgaatctg

SEQ ID NO: 352701 - DNA, 25 bp, Homo sapien
gctgttcccaagaagcgctccgtgt

SEQ ID NO: 352702 - DNA, 25 bp, Homo sapien
ctgtaacgaatctgccactctgagg

SEQ ID NO: 352703 - DNA, 25 bp, Homo sapien
cagagtgcgtggagcctctccagtc

SEQ ID NO: 352704 - DNA, 25 bp, Homo sapien
gaaggcagcactttacaggttcaca

SEQ ID NO: 352705 - DNA, 25 bp, Homo sapien
acctagtttcctcaccatagctggg

SEQ ID NO: 352706 - DNA, 25 bp, Homo sapien
tgatgctcactctcgctggctgggt

SEQ ID NO: 352707 - DNA, 25 bp, Homo sapien
gacccgagttcaattcctgatgctc

SEQ ID NO: 352708 - DNA, 25 bp, Homo sapien
agcctaaaggtcgaggtggagactt

SEQ ID NO: 352709 - DNA, 25 bp, Homo sapien
gctgcggctgaagcctaaaggtcga

SEQ ID NO: 352710 - DNA, 25 bp, Homo sapien
caggcctgcccttccgaatccagct

SEQ ID NO: 352711 - DNA, 25 bp, Homo sapien
tgtgggtgggacaaagggatctcca

SEQ ID NO: 352712 - DNA, 25 bp, Homo sapien
tccagccatgcggctctgcagtctc

SEQ ID NO: 352713 - DNA, 25 bp, Homo sapien
ccagccatgcggctctgcagtctct

SEQ ID NO: 352714 - DNA, 25 bp, Homo sapien
ctccagccatgcggctctgcagtct

SEQ ID NO: 352715 - DNA, 25 bp, Homo sapien
cacagggatgatgaaactaaccgct

SEQ ID NO: 352716 - DNA, 25 bp, Homo sapien
tgtgagatcggctaaacctggcctt

SEQ ID NO: 352717 - DNA, 25 bp, Homo sapien
tacacaatgcgtgtggagggaaagc

SEQ ID NO: 352718 - DNA, 25 bp, Homo sapien
gacagagaccccattgtagtaaacg

SEQ ID NO: 352719 - DNA, 25 bp, Homo sapien
ttggcttgctggttgctcgagggag

SEQ ID NO: 352720 - DNA, 25 bp, Homo sapien
tgccagcagtaatatgcagcatggt

SEQ ID NO: 352721 - DNA, 25 bp, Homo sapien
tgctcgagggaggtctgtttggtgg

SEQ ID NO: 352722 - DNA, 25 bp, Homo sapien
ggtgagacgtcaagagcattgccag

SEQ ID NO: 352723 - DNA, 25 bp, Homo sapien
taacccatttgaggtacagagcatg

SEQ ID NO: 352724 - DNA, 25 bp, Homo sapien
tctggcccttggttgcagaacctaa

SEQ ID NO: 352725 - DNA, 25 bp, Homo sapien
tatacaatgctaacgtaagtcttgg

SEQ ID NO: 352726 - DNA, 25 bp, Homo sapien
tttaactcctaacactagcatctgg

SEQ ID NO: 352727 - DNA, 25 bp, Homo sapien
ttcatgtaatctagcgatcgcacgt

SEQ ID NO: 352728 - DNA, 25 bp, Homo sapien
gttcttggatcactgtgctcagatc

SEQ ID NO: 352729 - DNA, 25 bp, Homo sapien
gttattgatgacattaagttcttgg

SEQ ID NO: 352730 - DNA, 25 bp, Homo sapien
cagactcatgctcatcaagatgtta

SEQ ID NO: 352731 - DNA, 25 bp, Homo sapien
cattttcctctacatcagaagacac

SEQ ID NO: 352732 - DNA, 25 bp, Homo sapien
aagtctttggttgactgaaaaccag

SEQ ID NO: 352733 - DNA, 25 bp, Homo sapien
ggaagaattcccagtagattgaggc

SEQ ID NO: 352734 - DNA, 25 bp, Homo sapien
gacagagggatgaactggtctacat

SEQ ID NO: 352735 - DNA, 25 bp, Homo sapien
agtccagaaggaaggtccggccaga

SEQ ID NO: 352736 - DNA, 25 bp, Homo sapien
ccagaattggtgataagagatgagc

SEQ ID NO: 352737 - DNA, 25 bp, Homo sapien
gagaggctaaatcaggagatgacat

SEQ ID NO: 352738 - DNA, 25 bp, Homo sapien
ggtccggccagaattggtgataaga

SEQ ID NO: 352739 - DNA, 25 bp, Homo sapien
gagaaaaggaagatgctccctcaga

SEQ ID NO: 352740 - DNA, 25 bp, Homo sapien
aggaagatgctccctcagaagcagt

SEQ ID NO: 352741 - DNA, 25 bp, Homo sapien
agatgctccctcagaagcagttgaa

SEQ ID NO: 352742 - DNA, 25 bp, Homo sapien
gaagatgctccctcagaagcagttg

SEQ ID NO: 352743 - DNA, 25 bp, Homo sapien
gttatcctatctcctacctagaggg

SEQ ID NO: 352744 - DNA, 25 bp, Homo sapien
tgtatggcacttgtcaactttgagc

SEQ ID NO: 352745 - DNA, 25 bp, Homo sapien
tggttttggtgacagtgcccacact

SEQ ID NO: 352746 - DNA, 25 bp, Homo sapien
tcagatgttggtaccccttgctgcc

SEQ ID NO: 352747 - DNA, 25 bp, Homo sapien
tgcctcttcaatggaggattccgag

SEQ ID NO: 352748 - DNA, 25 bp, Homo sapien
gttgatgtctgcgtactcctggacc

SEQ ID NO: 352749 - DNA, 25 bp, Homo sapien
cgagacaggattcataatgtcctcc

SEQ ID NO: 352750 - DNA, 25 bp, Homo sapien
tactcctggaccaggatcagtgcct

SEQ ID NO: 352751 - DNA, 25 bp, Homo sapien
tcacctccaatttcaccggccagat

SEQ ID NO: 352752 - DNA, 25 bp, Homo sapien
ctcacctccaatttcaccggccaga

SEQ ID NO: 352753 - DNA, 25 bp, Homo sapien
ctccaatttcaccggccagatcagc

SEQ ID NO: 352754 - DNA, 25 bp, Homo sapien
acctccaatttcaccggccagatca

SEQ ID NO: 352755 - DNA, 25 bp, Homo sapien
ttccccagcttatttgacgaacaca

SEQ ID NO: 352756 - DNA, 25 bp, Homo sapien
tagccagttgtcttatccatttcaa

SEQ ID NO: 352757 - DNA, 25 bp, Homo sapien
tcttcgcaggtcaattttagccagt

SEQ ID NO: 352758 - DNA, 25 bp, Homo sapien
gattttggcattagattctgctagc

SEQ ID NO: 352759 - DNA, 25 bp, Homo sapien
gattacaatctccttcactcggtca

SEQ ID NO: 352760 - DNA, 25 bp, Homo sapien
gagacagagtgtttctacagaggcc

SEQ ID NO: 352761 - DNA, 25 bp, Homo sapien
caatgttttaagaccttctgcagct

SEQ ID NO: 352762 - DNA, 25 bp, Homo sapien
cagaggcctggttatggaaagtaga

SEQ ID NO: 352763 - DNA, 25 bp, Homo sapien
ttgaggagaccttgcaaggagtcat

SEQ ID NO: 352764 - DNA, 25 bp, Homo sapien
ctgacaaaagtctccttgaggagac

SEQ ID NO: 352765 - DNA, 25 bp, Homo sapien
aaagtctccttgaggagaccttgca

SEQ ID NO: 352766 - DNA, 25 bp, Homo sapien
tctccttgaggagaccttgcaagga

SEQ ID NO: 352767 - DNA, 25 bp, Homo sapien
tttgctgggagagaatttctctgaa

SEQ ID NO: 352768 - DNA, 25 bp, Homo sapien
tgggagagaatttctctgaattcca

SEQ ID NO: 352769 - DNA, 25 bp, Homo sapien
gctgggagagaatttctctgaattc

SEQ ID NO: 352770 - DNA, 25 bp, Homo sapien
ctttgctgggagagaatttctctga

SEQ ID NO: 352771 - DNA, 25 bp, Homo sapien
ggttccccgatatatccggtgccat

SEQ ID NO: 352772 - DNA, 25 bp, Homo sapien
aggttccccgatatatccggtgcca

SEQ ID NO: 352773 - DNA, 25 bp, Homo sapien
ctttggctaatgtggccatccatgc

SEQ ID NO: 352774 - DNA, 25 bp, Homo sapien
tttggctaatgtggccatccatgcc

SEQ ID NO: 352775 - DNA, 25 bp, Homo sapien
ttggctaatgtggccatccatgccg

SEQ ID NO: 352776 - DNA, 25 bp, Homo sapien
tggctaatgtggccatccatgccgt

SEQ ID NO: 352777 - DNA, 25 bp, Homo sapien
catgaagcgtcattggattttatca

SEQ ID NO: 352778 - DNA, 25 bp, Homo sapien
tggcatttgtccttcattccactga

SEQ ID NO: 352779 - DNA, 25 bp, Homo sapien
actatgttcatcaggtatattagcc

SEQ ID NO: 352780 - DNA, 25 bp, Homo sapien
gaatcatggtaatgcttgtctccta

SEQ ID NO: 352781 - DNA, 25 bp, Homo sapien
gtcttgagctgaagttgccaaaatc

SEQ ID NO: 352782 - DNA, 25 bp, Homo sapien
ttgtcttgagctgaagttgccaaaa

SEQ ID NO: 352783 - DNA, 25 bp, Homo sapien
ttttgtcttgagctgaagttgccaa

SEQ ID NO: 352784 - DNA, 25 bp, Homo sapien
tcttgagctgaagttgccaaaatca

SEQ ID NO: 352785 - DNA, 25 bp, Homo sapien
gaaactagtttagcatgcagaaaga

SEQ ID NO: 352786 - DNA, 25 bp, Homo sapien
tgaggtggaagtattacagcatgac

SEQ ID NO: 352787 - DNA, 25 bp, Homo sapien
tcttctgggaacatagtgaaaggag

SEQ ID NO: 352788 - DNA, 25 bp, Homo sapien
gactttgtgattgccttgttgaaca

SEQ ID NO: 352789 - DNA, 25 bp, Homo sapien
gtggcagaagatcttccattctact

SEQ ID NO: 352790 - DNA, 25 bp, Homo sapien
cttctgcttctgacaagcaagtgat

SEQ ID NO: 352791 - DNA, 25 bp, Homo sapien
tagtaaaggcagctctggatcatca

SEQ ID NO: 352792 - DNA, 25 bp, Homo sapien
caagtgattggagagacaatggaag

SEQ ID NO: 352793 - DNA, 25 bp, Homo sapien
taaaggcagctctggatcatcatcc

SEQ ID NO: 352794 - DNA, 25 bp, Homo sapien
tttcctgggacaacatagtttctgt

SEQ ID NO: 352795 - DNA, 25 bp, Homo sapien
atttccaaccatgaatcttgagtgg

SEQ ID NO: 352796 - DNA, 25 bp, Homo sapien
gacaacatagtttctgtaggcaaat

SEQ ID NO: 352797 - DNA, 25 bp, Homo sapien
ttcaatcctgccttgcacacatttc

SEQ ID NO: 352798 - DNA, 25 bp, Homo sapien
gagatccctttggtcttgtaagcta

SEQ ID NO: 352799 - DNA, 25 bp, Homo sapien
tgagcccgcaccactcagataatac

SEQ ID NO: 352800 - DNA, 25 bp, Homo sapien
gaaagaagctgtacatcccactgag

SEQ ID NO: 352801 - DNA, 25 bp, Homo sapien
cattatcacttgctcggcattcagc

SEQ ID NO: 352802 - DNA, 25 bp, Homo sapien
ctatctatggaagatatagctttat

SEQ ID NO: 352803 - DNA, 25 bp, Homo sapien
cagcttcttcacaggagtagatttc

SEQ ID NO: 352804 - DNA, 25 bp, Homo sapien
tctatggaagatatagctttatgaa

SEQ ID NO: 352805 - DNA, 25 bp, Homo sapien
tatctatggaagatatagctttatg

SEQ ID NO: 352806 - DNA, 25 bp, Homo sapien
ttagaaaacaatatagagtgggagg

SEQ ID NO: 352807 - DNA, 25 bp, Homo sapien
gtcagtgagttacttgaaccaagtt

SEQ ID NO: 352808 - DNA, 25 bp, Homo sapien
tacgctgtctagtccgacatgccac

SEQ ID NO: 352809 - DNA, 25 bp, Homo sapien
ccaaacttaggaagcttatacttct

SEQ ID NO: 352810 - DNA, 25 bp, Homo sapien
tacacagcaatggttcatccatcag

SEQ ID NO: 352811 - DNA, 25 bp, Homo sapien
cttgcttagatttttcccggatata

SEQ ID NO: 352812 - DNA, 25 bp, Homo sapien
acagcaatggttcatccatcagcaa

SEQ ID NO: 352813 - DNA, 25 bp, Homo sapien
tgtgatgacttgcttagatttttcc

SEQ ID NO: 352814 - DNA, 25 bp, Homo sapien
tggcagaaggcaaggaagagcaagt

SEQ ID NO: 352815 - DNA, 25 bp, Homo sapien
gcagaaggcaaggaagagcaagtca

SEQ ID NO: 352816 - DNA, 25 bp, Homo sapien
catggcagaaggcaaggaagagcaa

SEQ ID NO: 352817 - DNA, 25 bp, Homo sapien
ggcagaaggcaaggaagagcaagtc

SEQ ID NO: 352818 - DNA, 25 bp, Homo sapien
gaccaagaatccaactttaggagag

SEQ ID NO: 352819 - DNA, 25 bp, Homo sapien
acatacagcggtgaggaaggaaaag

SEQ ID NO: 352820 - DNA, 25 bp, Homo sapien
agagacacacatacagcggtgagga

SEQ ID NO: 352821 - DNA, 25 bp, Homo sapien
gaatccaactttaggagagacacac

SEQ ID NO: 352822 - DNA, 25 bp, Homo sapien
gatttatacacgtggcgccagttct

SEQ ID NO: 352823 - DNA, 25 bp, Homo sapien
acatcagagaactagagggacccca

SEQ ID NO: 352824 - DNA, 25 bp, Homo sapien
tgaaggttacagaacccctctctgc

SEQ ID NO: 352825 - DNA, 25 bp, Homo sapien
tccattagggtaagggatttataca

SEQ ID NO: 352826 - DNA, 25 bp, Homo sapien
taacagtttatgtcacgggtttata

SEQ ID NO: 352827 - DNA, 25 bp, Homo sapien
tataaaactcttgacaggtaattgg

SEQ ID NO: 352828 - DNA, 25 bp, Homo sapien
gtaattggtccccagttctgctgct

SEQ ID NO: 352829 - DNA, 25 bp, Homo sapien
aagtaatacaagttccaaggtgaga

SEQ ID NO: 352830 - DNA, 25 bp, Homo sapien
ctgagaggaaagtcggccgctgccc

SEQ ID NO: 352831 - DNA, 25 bp, Homo sapien
caggatattccacctactccagcca

SEQ ID NO: 352832 - DNA, 25 bp, Homo sapien
gctgcccaacgaccaaacttcctct

SEQ ID NO: 352833 - DNA, 25 bp, Homo sapien
tcctctccccaggatattccaccta

SEQ ID NO: 352834 - DNA, 25 bp, Homo sapien
caatgagttcgatgtctgcaaaacc

SEQ ID NO: 352835 - DNA, 25 bp, Homo sapien
gaggatatgcgacaatgagttcgat

SEQ ID NO: 352836 - DNA, 25 bp, Homo sapien
aagataggaataagtgtgaatggcc

SEQ ID NO: 352837 - DNA, 25 bp, Homo sapien
ggccatttcctccttgcggtgagga

SEQ ID NO: 352838 - DNA, 25 bp, Homo sapien
ttcagcaaacgctttcactgtgacc

SEQ ID NO: 352839 - DNA, 25 bp, Homo sapien
gttcagcaaacgctttcactgtgac

SEQ ID NO: 352840 - DNA, 25 bp, Homo sapien
tgctttctgcagcacactctttctt

SEQ ID NO: 352841 - DNA, 25 bp, Homo sapien
ctttctgcagcacactctttcttct

SEQ ID NO: 352842 - DNA, 25 bp, Homo sapien
tctttttcttctgcatcactctgca

SEQ ID NO: 352843 - DNA, 25 bp, Homo sapien
tctgctttctgcagcacactctttc

SEQ ID NO: 352844 - DNA, 25 bp, Homo sapien
ctagaattgcttctcccagagagaa

SEQ ID NO: 352845 - DNA, 25 bp, Homo sapien
ctttttttcatgctcacttctgtga

SEQ ID NO: 352846 - DNA, 25 bp, Homo sapien
tttttcatgctcacttctgtgagag

SEQ ID NO: 352847 - DNA, 25 bp, Homo sapien
ccagagagaaacttgtctcttctca

SEQ ID NO: 352848 - DNA, 25 bp, Homo sapien
tgatggtgaggcacagtgccctgac

SEQ ID NO: 352849 - DNA, 25 bp, Homo sapien
aggcacagtgccctgactggacctc

SEQ ID NO: 352850 - DNA, 25 bp, Homo sapien
aaagtgatggtgaggcacagtgccc

SEQ ID NO: 352851 - DNA, 25 bp, Homo sapien
cttctctgtagtggaaagtgatggt

SEQ ID NO: 352852 - DNA, 25 bp, Homo sapien
gcactgagcaaggggtagataactt

SEQ ID NO: 352853 - DNA, 25 bp, Homo sapien
gcaaggggtagataacttcaagtcc

SEQ ID NO: 352854 - DNA, 25 bp, Homo sapien
tgagcaaggggtagataacttcaag

SEQ ID NO: 352855 - DNA, 25 bp, Homo sapien
actgagcaaggggtagataacttca

SEQ ID NO: 352856 - DNA, 25 bp, Homo sapien
gccagaggatgaatcgttattcggg

SEQ ID NO: 352857 - DNA, 25 bp, Homo sapien
gacagctctgttggcggctttcaga

SEQ ID NO: 352858 - DNA, 25 bp, Homo sapien
agacagctctgttggcggctttcag

SEQ ID NO: 352859 - DNA, 25 bp, Homo sapien
gcagccagaggatgaatcgttattc

SEQ ID NO: 352860 - DNA, 25 bp, Homo sapien
gatctaatggtaaaggctcagccca

SEQ ID NO: 352861 - DNA, 25 bp, Homo sapien
catcacttgtgagtccagactggca

SEQ ID NO: 352862 - DNA, 25 bp, Homo sapien
aaagaagttatcgtccagtggcagg

SEQ ID NO: 352863 - DNA, 25 bp, Homo sapien
tctctagccctggttcgaatgtgtc

SEQ ID NO: 352864 - DNA, 25 bp, Homo sapien
aggacaaattccatctccagacaga

SEQ ID NO: 352865 - DNA, 25 bp, Homo sapien
caggacaaattccatctccagacag

SEQ ID NO: 352866 - DNA, 25 bp, Homo sapien
ctacaggacaaattccatctccaga

SEQ ID NO: 352867 - DNA, 25 bp, Homo sapien
attccatctccagacagaagcagat

SEQ ID NO: 352868 - DNA, 25 bp, Homo sapien
gctgtggcgttggaatcctcagccc

SEQ ID NO: 352869 - DNA, 25 bp, Homo sapien
ctccgagctgccttcgggaggctgt

SEQ ID NO: 352870 - DNA, 25 bp, Homo sapien
ccgtggttggtaagggcagctttct

SEQ ID NO: 352871 - DNA, 25 bp, Homo sapien
tcctcagcccaggatctatgctggg

SEQ ID NO: 352872 - DNA, 25 bp, Homo sapien
ttcattggaacaagagggtggagct

SEQ ID NO: 352873 - DNA, 25 bp, Homo sapien
tgctgatggttaaccctgatgtaat

SEQ ID NO: 352874 - DNA, 25 bp, Homo sapien
agctgctgatggttaaccctgatgt

SEQ ID NO: 352875 - DNA, 25 bp, Homo sapien
ttctggagaactaaagctttcattg

SEQ ID NO: 352876 - DNA, 25 bp, Homo sapien
ggtggccagatctgcctcccttttc

SEQ ID NO: 352877 - DNA, 25 bp, Homo sapien
tatttggggacaagcttccaatcca

SEQ ID NO: 352878 - DNA, 25 bp, Homo sapien
aagcagagcctatttggggacaagc

SEQ ID NO: 352879 - DNA, 25 bp, Homo sapien
ttcttagagcgtgcaaagcagagcc

SEQ ID NO: 352880 - DNA, 25 bp, Homo sapien
gaatcagccagttgtggaaaggcag

SEQ ID NO: 352881 - DNA, 25 bp, Homo sapien
tgtactgagctccaggtgaacagca

SEQ ID NO: 352882 - DNA, 25 bp, Homo sapien
cttcctgggaattgatggctgaatc

SEQ ID NO: 352883 - DNA, 25 bp, Homo sapien
gagctccaggtgaacagcagcttcc

SEQ ID NO: 352884 - DNA, 25 bp, Homo sapien
aacagggcacttgggttgtgttacg

SEQ ID NO: 352885 - DNA, 25 bp, Homo sapien
agagtccggagccgctgagtgggca

SEQ ID NO: 352886 - DNA, 25 bp, Homo sapien
ccttggacttggctgtaggcagagt

SEQ ID NO: 352887 - DNA, 25 bp, Homo sapien
ctgcagccaagctgagggccttgga

SEQ ID NO: 352888 - DNA, 25 bp, Homo sapien
ggctgcctggctcctcgggagctca

SEQ ID NO: 352889 - DNA, 25 bp, Homo sapien
tctggaagtgtcgtgttccctgagc

SEQ ID NO: 352890 - DNA, 25 bp, Homo sapien
ttaatcagcaccgttggcagggcct

SEQ ID NO: 352891 - DNA, 25 bp, Homo sapien
cacggcattgagcagaggaacgaca

SEQ ID NO: 352892 - DNA, 25 bp, Homo sapien
ctatatgccagtcaccatgctagat

SEQ ID NO: 352893 - DNA, 25 bp, Homo sapien
gctagatgctttagtaacatgaagg

SEQ ID NO: 352894 - DNA, 25 bp, Homo sapien
taaggttgtatgatgagaagcgcaa

SEQ ID NO: 352895 - DNA, 25 bp, Homo sapien
gtaacatgaaggtttcaaactaaga

SEQ ID NO: 352896 - DNA, 25 bp, Homo sapien
gatcccacgtcacagagaatgcagg

SEQ ID NO: 352897 - DNA, 25 bp, Homo sapien
tcctgggagacgcagtagcatcttt

SEQ ID NO: 352898 - DNA, 25 bp, Homo sapien
ccttatattccccatgacaggtgtg

SEQ ID NO: 352899 - DNA, 25 bp, Homo sapien
ctgacttgcctgagacgctgcttcc

SEQ ID NO: 352900 - DNA, 25 bp, Homo sapien
tcagtacagagaattagccaggtga

SEQ ID NO: 352901 - DNA, 25 bp, Homo sapien
tgctgcctggcacgataggtaccca

SEQ ID NO: 352902 - DNA, 25 bp, Homo sapien
taaatgattgaagacttgactgcca

SEQ ID NO: 352903 - DNA, 25 bp, Homo sapien
cctgcttctagatgccatgtgctgc

SEQ ID NO: 352904 - DNA, 25 bp, Homo sapien
gaatgctgctatagggaaagaaccc

SEQ ID NO: 352905 - DNA, 25 bp, Homo sapien
tacatcgtctaaggtggaggcacta

SEQ ID NO: 352906 - DNA, 25 bp, Homo sapien
caaggagccggcacgtatggattcc

SEQ ID NO: 352907 - DNA, 25 bp, Homo sapien
catttcggtcgcaaaagctcactgg

SEQ ID NO: 352908 - DNA, 25 bp, Homo sapien
gaaacattgccatatcctttagttt

SEQ ID NO: 352909 - DNA, 25 bp, Homo sapien
ctgcccagtacttgaatcttgaaat

SEQ ID NO: 352910 - DNA, 25 bp, Homo sapien
atctggaaacattgccatatccttt

SEQ ID NO: 352911 - DNA, 25 bp, Homo sapien
tggaaacattgccatatcctttagt

SEQ ID NO: 352912 - DNA, 25 bp, Homo sapien
gagactgcaggcatacatcactacg

SEQ ID NO: 352913 - DNA, 25 bp, Homo sapien
gatgtcatcctactaattattccca

SEQ ID NO: 352914 - DNA, 25 bp, Homo sapien
cagttgttctcaaggtaagcatgtg

SEQ ID NO: 352915 - DNA, 25 bp, Homo sapien
tgaggtttccctaacggagcgctta

SEQ ID NO: 352916 - DNA, 25 bp, Homo sapien
gaatttagccctttgtaattataga

SEQ ID NO: 352917 - DNA, 25 bp, Homo sapien
aggatttttatgtcttctcaatgaa

SEQ ID NO: 352918 - DNA, 25 bp, Homo sapien
attatagaacgtttccttatccctg

SEQ ID NO: 352919 - DNA, 25 bp, Homo sapien
catgcatcttgagcctctgtaacta

SEQ ID NO: 352920 - DNA, 25 bp, Homo sapien
aaagatccctatcttgtattgtttc

SEQ ID NO: 352921 - DNA, 25 bp, Homo sapien
tgttgtattgttaaagatccctatc

SEQ ID NO: 352922 - DNA, 25 bp, Homo sapien
gctttacctttagcttgacaatgtg

SEQ ID NO: 352923 - DNA, 25 bp, Homo sapien
tccagtaatactgtagtatggatgc

SEQ ID NO: 352924 - DNA, 25 bp, Homo sapien
ctgttggatgtcttgccagactttt

SEQ ID NO: 352925 - DNA, 25 bp, Homo sapien
gctgttggatgtcttgccagacttt

SEQ ID NO: 352926 - DNA, 25 bp, Homo sapien
tgttggatgtcttgccagacttttc

SEQ ID NO: 352927 - DNA, 25 bp, Homo sapien
gttggatgtcttgccagacttttct

SEQ ID NO: 352928 - DNA, 25 bp, Homo sapien
catggtagacaccttagtttattct

SEQ ID NO: 352929 - DNA, 25 bp, Homo sapien
gcctcatggagaagataattttaag

SEQ ID NO: 352930 - DNA, 25 bp, Homo sapien
tttttcttcattctgcctcatggag

SEQ ID NO: 352931 - DNA, 25 bp, Homo sapien
tcttcattctgcctcatggagaaga

SEQ ID NO: 352932 - DNA, 25 bp, Homo sapien
gatcctccagcagatgatgccatat

SEQ ID NO: 352933 - DNA, 25 bp, Homo sapien
cctccagcagatgatgccatattta

SEQ ID NO: 352934 - DNA, 25 bp, Homo sapien
cagatcctccagcagatgatgccat

SEQ ID NO: 352935 - DNA, 25 bp, Homo sapien
tcagatcctccagcagatgatgcca

SEQ ID NO: 352936 - DNA, 25 bp, Homo sapien
tcgcttcttactgaattctccataa

SEQ ID NO: 352937 - DNA, 25 bp, Homo sapien
ttcgcttcttactgaattctccata

SEQ ID NO: 352938 - DNA, 25 bp, Homo sapien
tacctctgatcctgatggcaaatgc

SEQ ID NO: 352939 - DNA, 25 bp, Homo sapien
gatacctctgatcctgatggcaaat

SEQ ID NO: 352940 - DNA, 25 bp, Homo sapien
tgggcttaccccattgatacctctg

SEQ ID NO: 352941 - DNA, 25 bp, Homo sapien
ctttgggcttaccccattgatacct

SEQ ID NO: 352942 - DNA, 25 bp, Homo sapien
gcttttcttgccaccctcgccattc

SEQ ID NO: 352943 - DNA, 25 bp, Homo sapien
ttcttgccaccctcgccattcgaat

SEQ ID NO: 352944 - DNA, 25 bp, Homo sapien
cagcttttcttgccaccctcgccat

SEQ ID NO: 352945 - DNA, 25 bp, Homo sapien
ttttcttgccaccctcgccattcga

SEQ ID NO: 352946 - DNA, 25 bp, Homo sapien
atgttccttgtgacagtgcttcgct

SEQ ID NO: 352947 - DNA, 25 bp, Homo sapien
ctatgttccttgtgacagtgcttcg

SEQ ID NO: 352948 - DNA, 25 bp, Homo sapien
gtgcttcgctttttcatggataaac

SEQ ID NO: 352949 - DNA, 25 bp, Homo sapien
ttcgctttttcatggataaacttcc

SEQ ID NO: 352950 - DNA, 25 bp, Homo sapien
ttctcaggcgcttgatcttcagctc

SEQ ID NO: 352951 - DNA, 25 bp, Homo sapien
cgcttgatcttcagctctgcaaaat

SEQ ID NO: 352952 - DNA, 25 bp, Homo sapien
ttctttctcaggcgcttgatcttca

SEQ ID NO: 352953 - DNA, 25 bp, Homo sapien
gcgcttgatcttcagctctgcaaaa

SEQ ID NO: 352954 - DNA, 25 bp, Homo sapien
tacaccctccgtggttccagccgga

SEQ ID NO: 352955 - DNA, 25 bp, Homo sapien
tttctacaccctccgtggttccagc

SEQ ID NO: 352956 - DNA, 25 bp, Homo sapien
tctacaccctccgtggttccagccg

SEQ ID NO: 352957 - DNA, 25 bp, Homo sapien
cttcttcttttctacaccctccgtg

SEQ ID NO: 352958 - DNA, 25 bp, Homo sapien
ccaatataatgtgtatctcggagga

SEQ ID NO: 352959 - DNA, 25 bp, Homo sapien
gaagaaaatggacccgtggatatta

SEQ ID NO: 352960 - DNA, 25 bp, Homo sapien
tcagacatggtccttgctatcaagg

SEQ ID NO: 352961 - DNA, 25 bp, Homo sapien
gtatctcggaggaggaacactttgt

SEQ ID NO: 352962 - DNA, 25 bp, Homo sapien
gcttagctatagaaccacaaatttt

SEQ ID NO: 352963 - DNA, 25 bp, Homo sapien
tctcctttctgctacatggaacaca

SEQ ID NO: 352964 - DNA, 25 bp, Homo sapien
tcttcctaagtaagtgacaggttct

SEQ ID NO: 352965 - DNA, 25 bp, Homo sapien
agcaggatgtaaagtgcagcttcca

SEQ ID NO: 352966 - DNA, 25 bp, Homo sapien
tgttctaattttgaagccaaatacc

SEQ ID NO: 352967 - DNA, 25 bp, Homo sapien
tctaattttgaagccaaataccaat

SEQ ID NO: 352968 - DNA, 25 bp, Homo sapien
ccaggttcaagccattctgccccag

SEQ ID NO: 352969 - DNA, 25 bp, Homo sapien
caggttcaagccattctgccccagc

SEQ ID NO: 352970 - DNA, 25 bp, Homo sapien
gaagtctcagaatcgtaataaattc

SEQ ID NO: 352971 - DNA, 25 bp, Homo sapien
tacacagtagtaagctagacatcag

SEQ ID NO: 352972 - DNA, 25 bp, Homo sapien
ctgtataatcttgaacagcttttgg

SEQ ID NO: 352973 - DNA, 25 bp, Homo sapien
ccacaaagaggttcagtagatgata

SEQ ID NO: 352974 - DNA, 25 bp, Homo sapien
tgttacccttatgctgttgccactt

SEQ ID NO: 352975 - DNA, 25 bp, Homo sapien
tgttcatctgttacccttatgctgt

SEQ ID NO: 352976 - DNA, 25 bp, Homo sapien
tcatctgttacccttatgctgttgc

SEQ ID NO: 352977 - DNA, 25 bp, Homo sapien
tctgttacccttatgctgttgccac

SEQ ID NO: 352978 - DNA, 25 bp, Homo sapien
actggtggtgttgcaaatcgacatt

SEQ ID NO: 352979 - DNA, 25 bp, Homo sapien
gatttatatggatcttgtctaaccg

SEQ ID NO: 352980 - DNA, 25 bp, Homo sapien
gttgcaaatcgacatttgtctagca

SEQ ID NO: 352981 - DNA, 25 bp, Homo sapien
ggatcttgtctaaccgttttcactg

SEQ ID NO: 352982 - DNA, 25 bp, Homo sapien
aagctgaaaacttgctttctcagag

SEQ ID NO: 352983 - DNA, 25 bp, Homo sapien
tcctccccctatcattgtgagagtg

SEQ ID NO: 352984 - DNA, 25 bp, Homo sapien
taaattccattactcctaatgcagg

SEQ ID NO: 352985 - DNA, 25 bp, Homo sapien
atgtaatgcttctcggtctggtggg

SEQ ID NO: 352986 - DNA, 25 bp, Homo sapien
ccctggctctgagaggccttgtttt

SEQ ID NO: 352987 - DNA, 25 bp, Homo sapien
ttttcctaatttgtatcctcctgat

SEQ ID NO: 352988 - DNA, 25 bp, Homo sapien
ggcatgagaaagagactgttcttct

SEQ ID NO: 352989 - DNA, 25 bp, Homo sapien
ttgtatcctcctgatttatgctgtg

SEQ ID NO: 352990 - DNA, 25 bp, Homo sapien
ggcaaccccacatcaaatgtccctt

SEQ ID NO: 352991 - DNA, 25 bp, Homo sapien
gggagagaaggtgcttcttggatgc

SEQ ID NO: 352992 - DNA, 25 bp, Homo sapien
ctggcaaccccacatcaaatgtccc

SEQ ID NO: 352993 - DNA, 25 bp, Homo sapien
aaggtgcttcttggatgcactttac

SEQ ID NO: 352994 - DNA, 25 bp, Homo sapien
ggtgtgataatgctatcagctggtt

SEQ ID NO: 352995 - DNA, 25 bp, Homo sapien
gataatgctatcagctggttgtggg

SEQ ID NO: 352996 - DNA, 25 bp, Homo sapien
gccctggtgtgataatgctatcagc

SEQ ID NO: 352997 - DNA, 25 bp, Homo sapien
cctgccctggtgtgataatgctatc

SEQ ID NO: 352998 - DNA, 25 bp, Homo sapien
cctggcactccgtaggcacttcata

SEQ ID NO: 352999 - DNA, 25 bp, Homo sapien
gttgacttgtacctggaagagagga

SEQ ID NO: 353000 - DNA, 25 bp, Homo sapien
cacttcataaagttagttgacttgt

SEQ ID NO: 353001 - DNA, 25 bp, Homo sapien
ggagaaaaatctccccgcagagaag

SEQ ID NO: 353002 - DNA, 25 bp, Homo sapien
aaagactgcaaagagaaccggctgc

SEQ ID NO: 353003 - DNA, 25 bp, Homo sapien
taaaacatgtggaacagcgccaccc

SEQ ID NO: 353004 - DNA, 25 bp, Homo sapien
cttcactgagagaggagatgcgtta

SEQ ID NO: 353005 - DNA, 25 bp, Homo sapien
tgctggtgaatatgcatgacagtgc

SEQ ID NO: 353006 - DNA, 25 bp, Homo sapien
tctgtataccctgcttgaaaaacca

SEQ ID NO: 353007 - DNA, 25 bp, Homo sapien
gaatagttaggcgagctttgctcag

SEQ ID NO: 353008 - DNA, 25 bp, Homo sapien
tgtcttgagaactttgcctgatgag

SEQ ID NO: 353009 - DNA, 25 bp, Homo sapien
tagtgtaagccaagaaaatactgtc

SEQ ID NO: 353010 - DNA, 25 bp, Homo sapien
ggaaccactgaatattctagcccca

SEQ ID NO: 353011 - DNA, 25 bp, Homo sapien
gaaccactgaatattctagccccat

SEQ ID NO: 353012 - DNA, 25 bp, Homo sapien
caggaaccactgaatattctagccc

SEQ ID NO: 353013 - DNA, 25 bp, Homo sapien
cttcaggaaccactgaatattctag

SEQ ID NO: 353014 - DNA, 25 bp, Homo sapien
tctttgccaatgagagatgcctgaa

SEQ ID NO: 353015 - DNA, 25 bp, Homo sapien
tctccatccaaaaagtaattcaggc

SEQ ID NO: 353016 - DNA, 25 bp, Homo sapien
tgtttgtcccatgacattggcattg

SEQ ID NO: 353017 - DNA, 25 bp, Homo sapien
cacggaaaggaaagacctagtgatc

SEQ ID NO: 353018 - DNA, 25 bp, Homo sapien
taattgatggccactctaggcaacc

SEQ ID NO: 353019 - DNA, 25 bp, Homo sapien
gggaatcttaagtcgcctctgcgta

SEQ ID NO: 353020 - DNA, 25 bp, Homo sapien
cccatttgcggtctattgctgagga

SEQ ID NO: 353021 - DNA, 25 bp, Homo sapien
tgcgtaccgctctacagaatgctga

SEQ ID NO: 353022 - DNA, 25 bp, Homo sapien
tcttacattaagacctaaggtgtcc

SEQ ID NO: 353023 - DNA, 25 bp, Homo sapien
aatgaaacctggcacccatcctagg

SEQ ID NO: 353024 - DNA, 25 bp, Homo sapien
tgtcctttgaagtcaagcaaaaccg

SEQ ID NO: 353025 - DNA, 25 bp, Homo sapien
gtagtttacagcactccggagaatt

SEQ ID NO: 353026 - DNA, 25 bp, Homo sapien
agccaggtgtggtgcctcgttcctg

SEQ ID NO: 353027 - DNA, 25 bp, Homo sapien
cctagcaacagagtaagattccgtc

SEQ ID NO: 353028 - DNA, 25 bp, Homo sapien
aggtgtggtgcctcgttcctgtagt

SEQ ID NO: 353029 - DNA, 25 bp, Homo sapien
agcctagcaacagagtaagattccg

SEQ ID NO: 353030 - DNA, 25 bp, Homo sapien
tataagttgccaagattacctttta

SEQ ID NO: 353031 - DNA, 25 bp, Homo sapien
ccttagtatgtagatagtagaattc

SEQ ID NO: 353032 - DNA, 25 bp, Homo sapien
catacaagtcacatgtcttaggtgc

SEQ ID NO: 353033 - DNA, 25 bp, Homo sapien
tttaaatctgtattgggcagagtcc

SEQ ID NO: 353034 - DNA, 25 bp, Homo sapien
tcagtctgtgccttccggtctgtgc

SEQ ID NO: 353035 - DNA, 25 bp, Homo sapien
ctagtagaagagagccaagtcagtc

SEQ ID NO: 353036 - DNA, 25 bp, Homo sapien
aagtcacttcaggtgctctgatgct

SEQ ID NO: 353037 - DNA, 25 bp, Homo sapien
taaaagcagccatgccgcagaaagt

SEQ ID NO: 353038 - DNA, 25 bp, Homo sapien
tggacgccttctccacatagatgtc

SEQ ID NO: 353039 - DNA, 25 bp, Homo sapien
ccccatggacgccttctccacatag

SEQ ID NO: 353040 - DNA, 25 bp, Homo sapien
accacccccatggacgccttctcca

SEQ ID NO: 353041 - DNA, 25 bp, Homo sapien
catggacgccttctccacatagatg

SEQ ID NO: 353042 - DNA, 25 bp, Homo sapien
caggaaatactcaggctgtggttgc

SEQ ID NO: 353043 - DNA, 25 bp, Homo sapien
gccagcctgcctgagatgatcaaca

SEQ ID NO: 353044 - DNA, 25 bp, Homo sapien
aatataacaggatctgtggccagcc

SEQ ID NO: 353045 - DNA, 25 bp, Homo sapien
agcaacatgggcatgaggaacccca

SEQ ID NO: 353046 - DNA, 25 bp, Homo sapien
gaagatacagtagtgaattcaccca

SEQ ID NO: 353047 - DNA, 25 bp, Homo sapien
caaaacctggttgtcttaattcatg

SEQ ID NO: 353048 - DNA, 25 bp, Homo sapien
tctaattcagtggagcaaaacctgg

SEQ ID NO: 353049 - DNA, 25 bp, Homo sapien
taattcatgtgtacgggaagataca

SEQ ID NO: 353050 - DNA, 25 bp, Homo sapien
cggtttgtccggcagagttgtccaa

SEQ ID NO: 353051 - DNA, 25 bp, Homo sapien
tgtctgatcttacctgtttccccac

SEQ ID NO: 353052 - DNA, 25 bp, Homo sapien
tttgcctcagagcatgcccctctgc

SEQ ID NO: 353053 - DNA, 25 bp, Homo sapien
gagtggttagaatgtaccttacctc

SEQ ID NO: 353054 - DNA, 25 bp, Homo sapien
gctttgatcatccagcttctcgccg

SEQ ID NO: 353055 - DNA, 25 bp, Homo sapien
ttaggctgatgctgctaaaggagca

SEQ ID NO: 353056 - DNA, 25 bp, Homo sapien
caaagaagggttccattcacattca

SEQ ID NO: 353057 - DNA, 25 bp, Homo sapien
cattgtttagcgttggcagaacaca

SEQ ID NO: 353058 - DNA, 25 bp, Homo sapien
tcttcttctcttacctcagctgaca

SEQ ID NO: 353059 - DNA, 25 bp, Homo sapien
caccttggtactgtaaatctccttc

SEQ ID NO: 353060 - DNA, 25 bp, Homo sapien
cccaccttggtactgtaaatctcct

SEQ ID NO: 353061 - DNA, 25 bp, Homo sapien
cttggtactgtaaatctccttcttc

SEQ ID NO: 353062 - DNA, 25 bp, Homo sapien
attttttttaatgatccaggcatgg

SEQ ID NO: 353063 - DNA, 25 bp, Homo sapien
ttttttttaatgatccaggcatggt

SEQ ID NO: 353064 - DNA, 25 bp, Homo sapien
aggatagattgagtctgggaggcga

SEQ ID NO: 353065 - DNA, 25 bp, Homo sapien
ggtgggaggatagattgagtctggg

SEQ ID NO: 353066 - DNA, 25 bp, Homo sapien
gaatgtcccagatctcaaccttcga

SEQ ID NO: 353067 - DNA, 25 bp, Homo sapien
tagtcagtgccaggtgatcttacca

SEQ ID NO: 353068 - DNA, 25 bp, Homo sapien
tcaactccacagactactcataggt

SEQ ID NO: 353069 - DNA, 25 bp, Homo sapien
tcataggttgccttacaggttaaca

SEQ ID NO: 353070 - DNA, 25 bp, Homo sapien
tgcagacagcacagacgtagaacgt

SEQ ID NO: 353071 - DNA, 25 bp, Homo sapien
tgttactctttcagcgggaatcccc

SEQ ID NO: 353072 - DNA, 25 bp, Homo sapien
tctctcgctgagaatgcaaggcaaa

SEQ ID NO: 353073 - DNA, 25 bp, Homo sapien
tgcaggaagttctgcacagcactgt

SEQ ID NO: 353074 - DNA, 25 bp, Homo sapien
aaatgaagcagttgggtaactctga

SEQ ID NO: 353075 - DNA, 25 bp, Homo sapien
aatgaagcagttgggtaactctgaa

SEQ ID NO: 353076 - DNA, 25 bp, Homo sapien
tagtcccacctcagtcgggaagctg

SEQ ID NO: 353077 - DNA, 25 bp, Homo sapien
cctgggcaggccaatcggctgttca

SEQ ID NO: 353078 - DNA, 25 bp, Homo sapien
gaagaatcttgtatgaccatcctca

SEQ ID NO: 353079 - DNA, 25 bp, Homo sapien
taaaaggttataagagcaagtcacc

SEQ ID NO: 353080 - DNA, 25 bp, Homo sapien
tggtttctacctaccacacgagtag

SEQ ID NO: 353081 - DNA, 25 bp, Homo sapien
gacctctgctgtcaattagatccag

SEQ ID NO: 353082 - DNA, 25 bp, Homo sapien
tctcacaccagacagaggacctctg

SEQ ID NO: 353083 - DNA, 25 bp, Homo sapien
tagaggtgtgtacatctcctgaaca

SEQ ID NO: 353084 - DNA, 25 bp, Homo sapien
attttttatattctgccatcttgac

SEQ ID NO: 353085 - DNA, 25 bp, Homo sapien
cagcagacttggctctaatagccat

SEQ ID NO: 353086 - DNA, 25 bp, Homo sapien
aggatgttttcagcagacttggctc

SEQ ID NO: 353087 - DNA, 25 bp, Homo sapien
tttctctgcagagtaaacaggatgt

SEQ ID NO: 353088 - DNA, 25 bp, Homo sapien
tctgcagagtaaacaggatgttttc

SEQ ID NO: 353089 - DNA, 25 bp, Homo sapien
tatctataagatctttagaagtgag

SEQ ID NO: 353090 - DNA, 25 bp, Homo sapien
tagaagtgagataaatttttcgctg

SEQ ID NO: 353091 - DNA, 25 bp, Homo sapien
tctaagattagggaacaattgagtc

SEQ ID NO: 353092 - DNA, 25 bp, Homo sapien
gtcacacttcatgtgtatgcattaa

SEQ ID NO: 353093 - DNA, 25 bp, Homo sapien
tctgcaagtacagggagtccataca

SEQ ID NO: 353094 - DNA, 25 bp, Homo sapien
cctgctgcgcactacatttacttct

SEQ ID NO: 353095 - DNA, 25 bp, Homo sapien
atctagatttccagagttagtgcag

SEQ ID NO: 353096 - DNA, 25 bp, Homo sapien
gacctcatggtcgttaagaaaatag

SEQ ID NO: 353097 - DNA, 25 bp, Homo sapien
gattgtggcatacccctaatatttg

SEQ ID NO: 353098 - DNA, 25 bp, Homo sapien
gaccagatcccgagtgattgtggca

SEQ ID NO: 353099 - DNA, 25 bp, Homo sapien
gaaagaggccatgaacctacgaggt

SEQ ID NO: 353100 - DNA, 25 bp, Homo sapien
ggccagcgccaaaggtgtgtgtatt

SEQ ID NO: 353101 - DNA, 25 bp, Homo sapien
cacatgggcgtcacatcacgttgct

SEQ ID NO: 353102 - DNA, 25 bp, Homo sapien
tgaggcggccattacattcccacat

SEQ ID NO: 353103 - DNA, 25 bp, Homo sapien
ggcagcacgcttttaccctttgagt

SEQ ID NO: 353104 - DNA, 25 bp, Homo sapien
cacattcatgcatgtaaacaaggca

SEQ ID NO: 353105 - DNA, 25 bp, Homo sapien
tgcagttcctgtcaaccaatgtggt

SEQ ID NO: 353106 - DNA, 25 bp, Homo sapien
tttgcaacacacagtatcgtaagcg

SEQ ID NO: 353107 - DNA, 25 bp, Homo sapien
gattcttgatcctagccgtgcagtg

SEQ ID NO: 353108 - DNA, 25 bp, Homo sapien
gaatcatagcgcctgcattgctctg

SEQ ID NO: 353109 - DNA, 25 bp, Homo sapien
tcttgtacaatgctcccaaagggct

SEQ ID NO: 353110 - DNA, 25 bp, Homo sapien
tattgcttgcctagatttgggcacc

SEQ ID NO: 353111 - DNA, 25 bp, Homo sapien
tccatgagctcgaagcgacattaag

SEQ ID NO: 353112 - DNA, 25 bp, Homo sapien
gatttgggcactgttcaccttggaa

SEQ ID NO: 353113 - DNA, 25 bp, Homo sapien
gcatagaggtttaatcaaactccca

SEQ ID NO: 353114 - DNA, 25 bp, Homo sapien
aaactaggcactttagaggtgcact

SEQ ID NO: 353115 - DNA, 25 bp, Homo sapien
gaaattgctcctcatattactggtt

SEQ ID NO: 353116 - DNA, 25 bp, Homo sapien
taaggaattaagtcgtcgtcatttc

SEQ ID NO: 353117 - DNA, 25 bp, Homo sapien
ccccaccagagtcactaattttagc

SEQ ID NO: 353118 - DNA, 25 bp, Homo sapien
cccaccagagtcactaattttagca

SEQ ID NO: 353119 - DNA, 25 bp, Homo sapien
ctgttaaaaccatatgaaagcgtga

SEQ ID NO: 353120 - DNA, 25 bp, Homo sapien
ggtgaaagcagaattatgtctgtag

SEQ ID NO: 353121 - DNA, 25 bp, Homo sapien
taaacgaaaatcattgttaattgct

SEQ ID NO: 353122 - DNA, 25 bp, Homo sapien
ccatatgaaagcgtgatgaaggtga

SEQ ID NO: 353123 - DNA, 25 bp, Homo sapien
caaagagcgttgaagttgactctgc

SEQ ID NO: 353124 - DNA, 25 bp, Homo sapien
tttccagctgcctcaagtttagtcc

SEQ ID NO: 353125 - DNA, 25 bp, Homo sapien
tgattgagtcaatggtcagatacct

SEQ ID NO: 353126 - DNA, 25 bp, Homo sapien
tctttcaaggcatattttccagctg

SEQ ID NO: 353127 - DNA, 25 bp, Homo sapien
tcatctgcttactctccagatagcc

SEQ ID NO: 353128 - DNA, 25 bp, Homo sapien
ctcaatgaaggttttggcaggagcc

SEQ ID NO: 353129 - DNA, 25 bp, Homo sapien
ccagatagcctgttattcagctggt

SEQ ID NO: 353130 - DNA, 25 bp, Homo sapien
cctggagtggatgtaggaacagcct

SEQ ID NO: 353131 - DNA, 25 bp, Homo sapien
cactctaaagacatgaaacaggctg

SEQ ID NO: 353132 - DNA, 25 bp, Homo sapien
aaacaggctgggcttatgtctgtaa

SEQ ID NO: 353133 - DNA, 25 bp, Homo sapien
tagcctgcaagctaacactctaaag

SEQ ID NO: 353134 - DNA, 25 bp, Homo sapien
gtgacttttctcacccttctctaga

SEQ ID NO: 353135 - DNA, 25 bp, Homo sapien
gctttaatctcatgagttgctgtga

SEQ ID NO: 353136 - DNA, 25 bp, Homo sapien
tgtttgctatatataccagtcacag

SEQ ID NO: 353137 - DNA, 25 bp, Homo sapien
gaagttcaacttacggctctgctgc

SEQ ID NO: 353138 - DNA, 25 bp, Homo sapien
ggaaacagtacggtagtcggagcac

SEQ ID NO: 353139 - DNA, 25 bp, Homo sapien
agtgttcgggttacatatgtgagcc

SEQ ID NO: 353140 - DNA, 25 bp, Homo sapien
gagatgaacccaaaggatccttcta

SEQ ID NO: 353141 - DNA, 25 bp, Homo sapien
tgcaccccagtactaaagaagttaa

SEQ ID NO: 353142 - DNA, 25 bp, Homo sapien
gactttgtgtgagtccctttgccct

SEQ ID NO: 353143 - DNA, 25 bp, Homo sapien
cataaagggtgatataaatgatcaa

SEQ ID NO: 353144 - DNA, 25 bp, Homo sapien
gaggcagctgagaaatttgtatgat

SEQ ID NO: 353145 - DNA, 25 bp, Homo sapien
tgatactatggatgttcacctcaga

SEQ ID NO: 353146 - DNA, 25 bp, Homo sapien
tcttctgctgatgccagttttggag

SEQ ID NO: 353147 - DNA, 25 bp, Homo sapien
ccaaagcctctgtaacagtcaggaa

SEQ ID NO: 353148 - DNA, 25 bp, Homo sapien
aagcaggagggagcgtctctcccat

SEQ ID NO: 353149 - DNA, 25 bp, Homo sapien
cagctcatagttctgagggaaaccc

SEQ ID NO: 353150 - DNA, 25 bp, Homo sapien
tggcctttatcctaaacttggcttg

SEQ ID NO: 353151 - DNA, 25 bp, Homo sapien
cctgagtgggctattgggaagtcca

SEQ ID NO: 353152 - DNA, 25 bp, Homo sapien
tataaatggaccttttggtcctgag

SEQ ID NO: 353153 - DNA, 25 bp, Homo sapien
ggaagtccatctgccaggccagaac

SEQ ID NO: 353154 - DNA, 25 bp, Homo sapien
ctgagtctctagtccatttctgttg

SEQ ID NO: 353155 - DNA, 25 bp, Homo sapien
agggatgctctaggccaaaccacag

SEQ ID NO: 353156 - DNA, 25 bp, Homo sapien
tgccccaccagggtccttagggatg

SEQ ID NO: 353157 - DNA, 25 bp, Homo sapien
gggccgcgggatatcaatatcaggc

SEQ ID NO: 353158 - DNA, 25 bp, Homo sapien
tgggagcagagggtaccctgcccca

SEQ ID NO: 353159 - DNA, 25 bp, Homo sapien
cagcccagaatgtgaagccagtggc

SEQ ID NO: 353160 - DNA, 25 bp, Homo sapien
caaccatgtggagaggccgaatcac

SEQ ID NO: 353161 - DNA, 25 bp, Homo sapien
gagagccacgcattggagtaccctg

SEQ ID NO: 353162 - DNA, 25 bp, Homo sapien
attgtagccagacagacagtgcccc

SEQ ID NO: 353163 - DNA, 25 bp, Homo sapien
ctgggctcaggaacaaagtgcaatt

SEQ ID NO: 353164 - DNA, 25 bp, Homo sapien
cagcatctggctatggaggtcgtca

SEQ ID NO: 353165 - DNA, 25 bp, Homo sapien
tcatggccatcgaggaagtctgtgg

SEQ ID NO: 353166 - DNA, 25 bp, Homo sapien
aagtgcaattccgaggtgtccatgg

SEQ ID NO: 353167 - DNA, 25 bp, Homo sapien
cagggatggcggctccttgaaatct

SEQ ID NO: 353168 - DNA, 25 bp, Homo sapien
gtcttcggggatggcttctccttcc

SEQ ID NO: 353169 - DNA, 25 bp, Homo sapien
caggggggacccacagactgtcttc

SEQ ID NO: 353170 - DNA, 25 bp, Homo sapien
cctgggggagctcagcagaaggtga

SEQ ID NO: 353171 - DNA, 25 bp, Homo sapien
cagtgagatacacctcaaacccact

SEQ ID NO: 353172 - DNA, 25 bp, Homo sapien
cagaagccaagcctgtatatctaca

SEQ ID NO: 353173 - DNA, 25 bp, Homo sapien
ccactggagtggctactgtaaaatt

SEQ ID NO: 353174 - DNA, 25 bp, Homo sapien
tatccggaatacacagagaacttct

SEQ ID NO: 353175 - DNA, 25 bp, Homo sapien
caaacaggtcgtccatctgctggct

SEQ ID NO: 353176 - DNA, 25 bp, Homo sapien
tgagaatgtcaaacaggtcgtccat

SEQ ID NO: 353177 - DNA, 25 bp, Homo sapien
atctgctggcttgaggaaccatttt

SEQ ID NO: 353178 - DNA, 25 bp, Homo sapien
ctccgctctgaatgagaatgtcaaa

SEQ ID NO: 353179 - DNA, 25 bp, Homo sapien
cttcctcatagccaggtggttcctt

SEQ ID NO: 353180 - DNA, 25 bp, Homo sapien
gctggctcatggcttcctcatagcc

SEQ ID NO: 353181 - DNA, 25 bp, Homo sapien
gctgcagtgggtgctccaggtccat

SEQ ID NO: 353182 - DNA, 25 bp, Homo sapien
ctgctgtttgggctgctggctcatg

SEQ ID NO: 353183 - DNA, 25 bp, Homo sapien
agggggcaggcgctggagagccagg

SEQ ID NO: 353184 - DNA, 25 bp, Homo sapien
agagggggcaggcgctggagagcca

SEQ ID NO: 353185 - DNA, 25 bp, Homo sapien
ggcagagggggcaggcgctggagag

SEQ ID NO: 353186 - DNA, 25 bp, Homo sapien
gcagagggggcaggcgctggagagc

SEQ ID NO: 353187 - DNA, 25 bp, Homo sapien
gtgggaggtgcaacccccttgatga

SEQ ID NO: 353188 - DNA, 25 bp, Homo sapien
gctgtctgcattcttattggtcacg

SEQ ID NO: 353189 - DNA, 25 bp, Homo sapien
aggtgcaacccccttgatgaggctg

SEQ ID NO: 353190 - DNA, 25 bp, Homo sapien
ttattggtcacggtgaggacaaggt

SEQ ID NO: 353191 - DNA, 25 bp, Homo sapien
acagcacaagggtctatgtggttgg

SEQ ID NO: 353192 - DNA, 25 bp, Homo sapien
gcacaagggtctatgtggttggtgg

SEQ ID NO: 353193 - DNA, 25 bp, Homo sapien
cagcacaagggtctatgtggttggt

SEQ ID NO: 353194 - DNA, 25 bp, Homo sapien
cacagcacaagggtctatgtggttg

SEQ ID NO: 353195 - DNA, 25 bp, Homo sapien
caggctggggttgaatgggtgagcg

SEQ ID NO: 353196 - DNA, 25 bp, Homo sapien
cgccaggctggggttgaatgggtga

SEQ ID NO: 353197 - DNA, 25 bp, Homo sapien
ttgaatgggtgagcggggcccaggg

SEQ ID NO: 353198 - DNA, 25 bp, Homo sapien
ggttgaatgggtgagcggggcccag

SEQ ID NO: 353199 - DNA, 25 bp, Homo sapien
ccagctgcagcttgagccgctccac

SEQ ID NO: 353200 - DNA, 25 bp, Homo sapien
cgggctgctgggctcgcttctcctg

SEQ ID NO: 353201 - DNA, 25 bp, Homo sapien
ctgcttcacgggggtgccgaggggg

SEQ ID NO: 353202 - DNA, 25 bp, Homo sapien
ggggcgggctgctgggctcgcttct

SEQ ID NO: 353203 - DNA, 25 bp, Homo sapien
cgcgtcagcgcctcgatctgcttgt

SEQ ID NO: 353204 - DNA, 25 bp, Homo sapien
tgcagcatctggtccttgtcgcgcc

SEQ ID NO: 353205 - DNA, 25 bp, Homo sapien
gggtcagctgcgtcagaggtgatgt

SEQ ID NO: 353206 - DNA, 25 bp, Homo sapien
tgcttctgccggagcatgcgcgtca

SEQ ID NO: 353207 - DNA, 25 bp, Homo sapien
ttttcatcgcccgtgctgagcagtg

SEQ ID NO: 353208 - DNA, 25 bp, Homo sapien
gtcttgataggctcgaaggcgctca

SEQ ID NO: 353209 - DNA, 25 bp, Homo sapien
ggcagtgatcgcaacttcagctcct

SEQ ID NO: 353210 - DNA, 25 bp, Homo sapien
caatcagctcagttttggtgcccga

SEQ ID NO: 353211 - DNA, 25 bp, Homo sapien
ccgagctggagctgctattggtagt

SEQ ID NO: 353212 - DNA, 25 bp, Homo sapien
gggcgcccgagctggagctgctatt

SEQ ID NO: 353213 - DNA, 25 bp, Homo sapien
tcatgtcgtccaggttggccggcag

SEQ ID NO: 353214 - DNA, 25 bp, Homo sapien
gagctgctattggtagtggagaggc

SEQ ID NO: 353215 - DNA, 25 bp, Homo sapien
ttgctgcgctgtgacttctcactgg

SEQ ID NO: 353216 - DNA, 25 bp, Homo sapien
gcgctgtgacttctcactggcagac

SEQ ID NO: 353217 - DNA, 25 bp, Homo sapien
gatcttggcgtaggatgagtccatg

SEQ ID NO: 353218 - DNA, 25 bp, Homo sapien
tactggtggtacttgagcttcttca

SEQ ID NO: 353219 - DNA, 25 bp, Homo sapien
gcttctgagaagacatccccatcca

SEQ ID NO: 353220 - DNA, 25 bp, Homo sapien
cgtacaccccgtgaaaagcagaaat

SEQ ID NO: 353221 - DNA, 25 bp, Homo sapien
gaccgtacaccccgtgaaaagcaga

SEQ ID NO: 353222 - DNA, 25 bp, Homo sapien
gtgtggcttctgagaagacatcccc

SEQ ID NO: 353223 - DNA, 25 bp, Homo sapien
aaagtgaacatgtggcaggtgagaa

SEQ ID NO: 353224 - DNA, 25 bp, Homo sapien
ccaggattgccccagaagaagggaa

SEQ ID NO: 353225 - DNA, 25 bp, Homo sapien
agagggcagagcctaaggagcaccc

SEQ ID NO: 353226 - DNA, 25 bp, Homo sapien
tggaagaacagacaaagtgaacatg

SEQ ID NO: 353227 - DNA, 25 bp, Homo sapien
gatagtggttccattggtgaggctg

SEQ ID NO: 353228 - DNA, 25 bp, Homo sapien
ggaatcccggcccatcggaagttga

SEQ ID NO: 353229 - DNA, 25 bp, Homo sapien
agcatttctctggaatcccggccca

SEQ ID NO: 353230 - DNA, 25 bp, Homo sapien
atcccggcccatcggaagttgagac

SEQ ID NO: 353231 - DNA, 25 bp, Homo sapien
ctccaggggtgacggcacagaaccc

SEQ ID NO: 353232 - DNA, 25 bp, Homo sapien
ctcgggggataaggcatcgctgctg

SEQ ID NO: 353233 - DNA, 25 bp, Homo sapien
tggttcgctgactcgggcctccagg

SEQ ID NO: 353234 - DNA, 25 bp, Homo sapien
tggcactgagcagtggttcgctgac

SEQ ID NO: 353235 - DNA, 25 bp, Homo sapien
tgagtctctctaggcgccaaggacc

SEQ ID NO: 353236 - DNA, 25 bp, Homo sapien
gacaacagcagcaaccattgtgtga

SEQ ID NO: 353237 - DNA, 25 bp, Homo sapien
gaatgagtgttattgctgacaacag

SEQ ID NO: 353238 - DNA, 25 bp, Homo sapien
gttacactgtccattacagcagctg

SEQ ID NO: 353239 - DNA, 25 bp, Homo sapien
agaagtcaagagcctcagcccaatt

SEQ ID NO: 353240 - DNA, 25 bp, Homo sapien
caggcactatcccaagttcatacaa

SEQ ID NO: 353241 - DNA, 25 bp, Homo sapien
caaggctaagcaggaagtcaaagat

SEQ ID NO: 353242 - DNA, 25 bp, Homo sapien
agttcatacaacctgtgcatgaggc

SEQ ID NO: 353243 - DNA, 25 bp, Homo sapien
ttctcattgaggtcatcggctagtc

SEQ ID NO: 353244 - DNA, 25 bp, Homo sapien
caacaggaaggatgttcttctccac

SEQ ID NO: 353245 - DNA, 25 bp, Homo sapien
cattgaggtcatcggctagtctggc

SEQ ID NO: 353246 - DNA, 25 bp, Homo sapien
ggtcatcggctagtctggctctctt

SEQ ID NO: 353247 - DNA, 25 bp, Homo sapien
ggaagatatatgagtggacgtggtt

SEQ ID NO: 353248 - DNA, 25 bp, Homo sapien
tgcaggaagatatatgagtggacgt

SEQ ID NO: 353249 - DNA, 25 bp, Homo sapien
caggaagatatatgagtggacgtgg

SEQ ID NO: 353250 - DNA, 25 bp, Homo sapien
gcaggaagatatatgagtggacgtg

SEQ ID NO: 353251 - DNA, 25 bp, Homo sapien
aggaaatgggtagtgcagtagtgag

SEQ ID NO: 353252 - DNA, 25 bp, Homo sapien
aaatgggtagtgcagtagtgagtac

SEQ ID NO: 353253 - DNA, 25 bp, Homo sapien
gggtagtgcagtagtgagtacacac

SEQ ID NO: 353254 - DNA, 25 bp, Homo sapien
atgggtagtgcagtagtgagtacac

SEQ ID NO: 353255 - DNA, 25 bp, Homo sapien
ggaaaagcaattccaatctccacac

SEQ ID NO: 353256 - DNA, 25 bp, Homo sapien
gtgagaactggatctagatggaaaa

SEQ ID NO: 353257 - DNA, 25 bp, Homo sapien
agatggaaaagcaattccaatctcc

SEQ ID NO: 353258 - DNA, 25 bp, Homo sapien
agtgagaactggatctagatggaaa

SEQ ID NO: 353259 - DNA, 25 bp, Homo sapien
tcttccgtttgagatagtcctctgt

SEQ ID NO: 353260 - DNA, 25 bp, Homo sapien
cagctccgatctctccggccgggaa

SEQ ID NO: 353261 - DNA, 25 bp, Homo sapien
cgggaacgaatcttccgtttgagat

SEQ ID NO: 353262 - DNA, 25 bp, Homo sapien
atcctgaccagctccgatctctccg

SEQ ID NO: 353263 - DNA, 25 bp, Homo sapien
aggtgccgcaagtcttcacagatga

SEQ ID NO: 353264 - DNA, 25 bp, Homo sapien
cagtgggcagaagtactgcctcagc

SEQ ID NO: 353265 - DNA, 25 bp, Homo sapien
gcagcagagattggtagagcaggtg

SEQ ID NO: 353266 - DNA, 25 bp, Homo sapien
gggcagaagtactgcctcagctgca

SEQ ID NO: 353267 - DNA, 25 bp, Homo sapien
gctccttctctgctcatgaaatgcg

SEQ ID NO: 353268 - DNA, 25 bp, Homo sapien
tccttctctgctcatgaaatgcggc

SEQ ID NO: 353269 - DNA, 25 bp, Homo sapien
cttctctgctcatgaaatgcggctg

SEQ ID NO: 353270 - DNA, 25 bp, Homo sapien
tctctgctcatgaaatgcggctgga

SEQ ID NO: 353271 - DNA, 25 bp, Homo sapien
ttgagagaagaaccgtaaagattac

SEQ ID NO: 353272 - DNA, 25 bp, Homo sapien
ctgttgagagaagaaccgtaaagat

SEQ ID NO: 353273 - DNA, 25 bp, Homo sapien
aagattaccttcaagcgaagcatca

SEQ ID NO: 353274 - DNA, 25 bp, Homo sapien
ccgtaaagattaccttcaagcgaag

SEQ ID NO: 353275 - DNA, 25 bp, Homo sapien
cactatccaggattccccacttctt

SEQ ID NO: 353276 - DNA, 25 bp, Homo sapien
ggcactatccaggattccccacttc

SEQ ID NO: 353277 - DNA, 25 bp, Homo sapien
ctgggcactatccaggattccccac

SEQ ID NO: 353278 - DNA, 25 bp, Homo sapien
gggcactatccaggattccccactt

SEQ ID NO: 353279 - DNA, 25 bp, Homo sapien
aaattttggcgaaagcatagcaggc

SEQ ID NO: 353280 - DNA, 25 bp, Homo sapien
tgtaacctacagcaagtcccatgac

SEQ ID NO: 353281 - DNA, 25 bp, Homo sapien
gccatctgctagaagctatgttaag

SEQ ID NO: 353282 - DNA, 25 bp, Homo sapien
tgcctatctttcagtgcccgtgtaa

SEQ ID NO: 353283 - DNA, 25 bp, Homo sapien
ggacacatcatctcactaggtaggg

SEQ ID NO: 353284 - DNA, 25 bp, Homo sapien
gcttcaactctagggatcaggtcag

SEQ ID NO: 353285 - DNA, 25 bp, Homo sapien
gactgatgtgccttctcctgtgata

SEQ ID NO: 353286 - DNA, 25 bp, Homo sapien
caaatgcaacgtaaaatgcctggga

SEQ ID NO: 353287 - DNA, 25 bp, Homo sapien
acagcataatgtaggtaaatagtct

SEQ ID NO: 353288 - DNA, 25 bp, Homo sapien
gcataatgtaggtaaatagtctggc

SEQ ID NO: 353289 - DNA, 25 bp, Homo sapien
tgtaggtaaatagtctggcagtgaa

SEQ ID NO: 353290 - DNA, 25 bp, Homo sapien
gaactgggggtagagagtccttcac

SEQ ID NO: 353291 - DNA, 25 bp, Homo sapien
cacaatacaccaggctcaagatctg

SEQ ID NO: 353292 - DNA, 25 bp, Homo sapien
caatacaccaggctcaagatctgcc

SEQ ID NO: 353293 - DNA, 25 bp, Homo sapien
aatacaccaggctcaagatctgccc

SEQ ID NO: 353294 - DNA, 25 bp, Homo sapien
tacaccaggctcaagatctgcccct

SEQ ID NO: 353295 - DNA, 25 bp, Homo sapien
ttcttcccgggtccggcgctgctgg

SEQ ID NO: 353296 - DNA, 25 bp, Homo sapien
agttcttcccgggtccggcgctgct

SEQ ID NO: 353297 - DNA, 25 bp, Homo sapien
tccggcgctgctggagtttcaactg

SEQ ID NO: 353298 - DNA, 25 bp, Homo sapien
ggtccggcgctgctggagtttcaac

SEQ ID NO: 353299 - DNA, 25 bp, Homo sapien
tagtgtgaaagaagggtccccttga

SEQ ID NO: 353300 - DNA, 25 bp, Homo sapien
ggatgtagtgtgaaagaagggtccc

SEQ ID NO: 353301 - DNA, 25 bp, Homo sapien
gatgtagtgtgaaagaagggtcccc

SEQ ID NO: 353302 - DNA, 25 bp, Homo sapien
atgtagtgtgaaagaagggtcccct

SEQ ID NO: 353303 - DNA, 25 bp, Homo sapien
gaatactgtcaaggatgaaggctct

SEQ ID NO: 353304 - DNA, 25 bp, Homo sapien
taaaaaacatggatttgccctagct

SEQ ID NO: 353305 - DNA, 25 bp, Homo sapien
ttaatgaagtaggttcctgggctgg

SEQ ID NO: 353306 - DNA, 25 bp, Homo sapien
tcagatatggatgttcaaccagcaa

SEQ ID NO: 353307 - DNA, 25 bp, Homo sapien
gccagagttcaagacttttctgagc

SEQ ID NO: 353308 - DNA, 25 bp, Homo sapien
ggtgtagtagtccttgcctgtagtc

SEQ ID NO: 353309 - DNA, 25 bp, Homo sapien
aggtgtagtagtccttgcctgtagt

SEQ ID NO: 353310 - DNA, 25 bp, Homo sapien
tttattcagatcaccccaagggagt

SEQ ID NO: 353311 - DNA, 25 bp, Homo sapien
gcagatcccgacttacgcctttaaa

SEQ ID NO: 353312 - DNA, 25 bp, Homo sapien
tacctgaatgccctagagtagcttt

SEQ ID NO: 353313 - DNA, 25 bp, Homo sapien
aaggtcggtgcaggaatgagccatc

SEQ ID NO: 353314 - DNA, 25 bp, Homo sapien
tcatccccacacttgttaggctgtc

SEQ ID NO: 353315 - DNA, 25 bp, Homo sapien
tctttataactaatcttataggact

SEQ ID NO: 353316 - DNA, 25 bp, Homo sapien
cacttgttaggctgtctattcaata

SEQ ID NO: 353317 - DNA, 25 bp, Homo sapien
aatcttataggactgcagtttcaga

SEQ ID NO: 353318 - DNA, 25 bp, Homo sapien
aagactgcaactttctttggcaaga

SEQ ID NO: 353319 - DNA, 25 bp, Homo sapien
gcaccaagctcggttgaacatttta

SEQ ID NO: 353320 - DNA, 25 bp, Homo sapien
caggaaatgattcgattacggatat

SEQ ID NO: 353321 - DNA, 25 bp, Homo sapien
gttttgtaactatgagattgcacca

SEQ ID NO: 353322 - DNA, 25 bp, Homo sapien
cttcccgcaaactgtgataatgggt

SEQ ID NO: 353323 - DNA, 25 bp, Homo sapien
cacactgctgagtaatagctgtcct

SEQ ID NO: 353324 - DNA, 25 bp, Homo sapien
agtggcagaatcctgcaggtggact

SEQ ID NO: 353325 - DNA, 25 bp, Homo sapien
cttcaggacaatccacgagagtggc

SEQ ID NO: 353326 - DNA, 25 bp, Homo sapien
ttaacatgtcattaaaactactagg

SEQ ID NO: 353327 - DNA, 25 bp, Homo sapien
ctttatttgtgattgccaaaaagtg

SEQ ID NO: 353328 - DNA, 25 bp, Homo sapien
aaaattatatacaggccagatgcgg

SEQ ID NO: 353329 - DNA, 25 bp, Homo sapien
gctatatgtgaatattcgtagcagc

SEQ ID NO: 353330 - DNA, 25 bp, Homo sapien
tttagtaacattgaatcggttgacc

SEQ ID NO: 353331 - DNA, 25 bp, Homo sapien
atatttagtaacattgaatcggttg

SEQ ID NO: 353332 - DNA, 25 bp, Homo sapien
gtaacattgaatcggttgaccaaaa

SEQ ID NO: 353333 - DNA, 25 bp, Homo sapien
aacattgaatcggttgaccaaaagc

SEQ ID NO: 353334 - DNA, 25 bp, Homo sapien
tcctggcaccgaggtcctaaaattg

SEQ ID NO: 353335 - DNA, 25 bp, Homo sapien
caaatgatccaacctgaggagaggc

SEQ ID NO: 353336 - DNA, 25 bp, Homo sapien
ctcagacagaagttgtggataacct

SEQ ID NO: 353337 - DNA, 25 bp, Homo sapien
gggctggagattgacctactcatca

SEQ ID NO: 353338 - DNA, 25 bp, Homo sapien
tttagcgttacctaccagtgctgcc

SEQ ID NO: 353339 - DNA, 25 bp, Homo sapien
tagtcagctcacttcttggaaagag

SEQ ID NO: 353340 - DNA, 25 bp, Homo sapien
catgcttgcttacttccttcaggag

SEQ ID NO: 353341 - DNA, 25 bp, Homo sapien
tcagggccacctatagagatggtcc

SEQ ID NO: 353342 - DNA, 25 bp, Homo sapien
cacacaaggccaaggttcattcatt

SEQ ID NO: 353343 - DNA, 25 bp, Homo sapien
agctattttgaaaaagctgctatga

SEQ ID NO: 353344 - DNA, 25 bp, Homo sapien
tcatcaactgaaagacatgtgggtt

SEQ ID NO: 353345 - DNA, 25 bp, Homo sapien
cagtgatttctttttatgagtgaat

SEQ ID NO: 353346 - DNA, 25 bp, Homo sapien
gctaggtcacaggatctatgtttaa

SEQ ID NO: 353347 - DNA, 25 bp, Homo sapien
tactggcactgttagtcaacataca

SEQ ID NO: 353348 - DNA, 25 bp, Homo sapien
cacaggccctgacaatatgaagaac

SEQ ID NO: 353349 - DNA, 25 bp, Homo sapien
aagagctcatgtatcctttactcag

SEQ ID NO: 353350 - DNA, 25 bp, Homo sapien
ttccaggtgatacaaaggctgccag

SEQ ID NO: 353351 - DNA, 25 bp, Homo sapien
gccagaccttggaacatactttgag

SEQ ID NO: 353352 - DNA, 25 bp, Homo sapien
cagattgtgattccgcaggtctgag

SEQ ID NO: 353353 - DNA, 25 bp, Homo sapien
gcattcctaataggcttccaggtga

SEQ ID NO: 353354 - DNA, 25 bp, Homo sapien
cccagctactcaggaatctgtggtg

SEQ ID NO: 353355 - DNA, 25 bp, Homo sapien
ctagtgatgtgcacttgcagtccca

SEQ ID NO: 353356 - DNA, 25 bp, Homo sapien
cagctactcaggaatctgtggtggg

SEQ ID NO: 353357 - DNA, 25 bp, Homo sapien
ctactcaggaatctgtggtgggagg

SEQ ID NO: 353358 - DNA, 25 bp, Homo sapien
tggagtgcctccttatcatgcagta

SEQ ID NO: 353359 - DNA, 25 bp, Homo sapien
taactgtacctacctgtgtatgtgc

SEQ ID NO: 353360 - DNA, 25 bp, Homo sapien
cagtggagggagcactttgactgca

SEQ ID NO: 353361 - DNA, 25 bp, Homo sapien
gaaaacttctgagaggttcagcaaa

SEQ ID NO: 353362 - DNA, 25 bp, Homo sapien
gccaggcctgaaagtttgtatataa

SEQ ID NO: 353363 - DNA, 25 bp, Homo sapien
ccccaagctccaaatattcaaatga

SEQ ID NO: 353364 - DNA, 25 bp, Homo sapien
cataccctggaactttgctatcata

SEQ ID NO: 353365 - DNA, 25 bp, Homo sapien
tagcagtctcacctataaagcatat

SEQ ID NO: 353366 - DNA, 25 bp, Homo sapien
caggtctccgcaactgaataatctt

SEQ ID NO: 353367 - DNA, 25 bp, Homo sapien
acagtgagaccaattctgccagaga

SEQ ID NO: 353368 - DNA, 25 bp, Homo sapien
tactacctaaaatgctccccaagga

SEQ ID NO: 353369 - DNA, 25 bp, Homo sapien
tattaagggcatttccacagaacca

SEQ ID NO: 353370 - DNA, 25 bp, Homo sapien
gccatcattaacatctcaggttcca

SEQ ID NO: 353371 - DNA, 25 bp, Homo sapien
taccaatttatccacccttcaggcg

SEQ ID NO: 353372 - DNA, 25 bp, Homo sapien
tggttagaacagtgagcaagctcct

SEQ ID NO: 353373 - DNA, 25 bp, Homo sapien
gatgccttatgctcaaatcagactg

SEQ ID NO: 353374 - DNA, 25 bp, Homo sapien
cagatttgaattactgccgacagga

SEQ ID NO: 353375 - DNA, 25 bp, Homo sapien
aattccttaatatcagttaaacaat

SEQ ID NO: 353376 - DNA, 25 bp, Homo sapien
ccgcgcccagccgacgacaactatt

SEQ ID NO: 353377 - DNA, 25 bp, Homo sapien
gagtcaagacctgtaaacctgggag

SEQ ID NO: 353378 - DNA, 25 bp, Homo sapien
tagacacctcgtattgggcaccact

SEQ ID NO: 353379 - DNA, 25 bp, Homo sapien
aagataacataacccagcatgcagg

SEQ ID NO: 353380 - DNA, 25 bp, Homo sapien
tgtcatgggctccaaccacttaaga

SEQ ID NO: 353381 - DNA, 25 bp, Homo sapien
aaagacttaacttgccacttcacaa

SEQ ID NO: 353382 - DNA, 25 bp, Homo sapien
gaagatgtctgcaatacacttaagc

SEQ ID NO: 353383 - DNA, 25 bp, Homo sapien
gcaacaacaaactagtattccggat

SEQ ID NO: 353384 - DNA, 25 bp, Homo sapien
aagaggaaatacaggccagggccag

SEQ ID NO: 353385 - DNA, 25 bp, Homo sapien
tgaagagataaaacaaagtaatgga

SEQ ID NO: 353386 - DNA, 25 bp, Homo sapien
tatatatataccacttacatctaca

SEQ ID NO: 353387 - DNA, 25 bp, Homo sapien
tatatataccacttacatctacaaa

SEQ ID NO: 353388 - DNA, 25 bp, Homo sapien
ttgaagagataaaacaaagtaatgg

SEQ ID NO: 353389 - DNA, 25 bp, Homo sapien
gctcctgcagttcattggcaacagc

SEQ ID NO: 353390 - DNA, 25 bp, Homo sapien
cattcttccgctcactaagtggagg

SEQ ID NO: 353391 - DNA, 25 bp, Homo sapien
gactgggtgccgcagataaggacac

SEQ ID NO: 353392 - DNA, 25 bp, Homo sapien
taaggacacgagcactggttcatca

SEQ ID NO: 353393 - DNA, 25 bp, Homo sapien
aatgtttcacccaggcgcgatggct

SEQ ID NO: 353394 - DNA, 25 bp, Homo sapien
tatgataatctagagacaagaccca

SEQ ID NO: 353395 - DNA, 25 bp, Homo sapien
tcatgacccatgacaaaaaggtggt

SEQ ID NO: 353396 - DNA, 25 bp, Homo sapien
ttcacatatgatcaacagcagccag

SEQ ID NO: 353397 - DNA, 25 bp, Homo sapien
tacgtacctagaaacaacagcatga

SEQ ID NO: 353398 - DNA, 25 bp, Homo sapien
taagtggtcatctcaaagtagtaag

SEQ ID NO: 353399 - DNA, 25 bp, Homo sapien
caatggtgacaaatagccaatggca

SEQ ID NO: 353400 - DNA, 25 bp, Homo sapien
tctcaacgaattgggtagccaaggt

SEQ ID NO: 353401 - DNA, 25 bp, Homo sapien
ggttctacagggaatcagtcatcca

SEQ ID NO: 353402 - DNA, 25 bp, Homo sapien
taggtgatgagagcttaactcctcc

SEQ ID NO: 353403 - DNA, 25 bp, Homo sapien
cagccccttgcatagagaagatact

SEQ ID NO: 353404 - DNA, 25 bp, Homo sapien
catctgcagactccactttgtgaac

SEQ ID NO: 353405 - DNA, 25 bp, Homo sapien
tgaactcctggactagactataagc

SEQ ID NO: 353406 - DNA, 25 bp, Homo sapien
gactgtactagagcaataggttgca

SEQ ID NO: 353407 - DNA, 25 bp, Homo sapien
gcattaaaatgccactgctcgctta

SEQ ID NO: 353408 - DNA, 25 bp, Homo sapien
tgctcgcttatccatttctctgtag

SEQ ID NO: 353409 - DNA, 25 bp, Homo sapien
tgtagacctgatttgtccattctga

SEQ ID NO: 353410 - DNA, 25 bp, Homo sapien
tgcagaagtgcctcaagaccaaaga

SEQ ID NO: 353411 - DNA, 25 bp, Homo sapien
tggattaggcacactcaagccacaa

SEQ ID NO: 353412 - DNA, 25 bp, Homo sapien
gctcacaaactaggcagtcagaact

SEQ ID NO: 353413 - DNA, 25 bp, Homo sapien
catagctccctatgatgacactagg

SEQ ID NO: 353414 - DNA, 25 bp, Homo sapien
gatttgttcaaaaagcttcctgcca

SEQ ID NO: 353415 - DNA, 25 bp, Homo sapien
gatgaatcttcctgcaacgtgcttg

SEQ ID NO: 353416 - DNA, 25 bp, Homo sapien
gcatcactggaatgcgaagcacaaa

SEQ ID NO: 353417 - DNA, 25 bp, Homo sapien
gaaacagctttacaccaagtgccac

SEQ ID NO: 353418 - DNA, 25 bp, Homo sapien
taattctaggaatgtttcggaaggc

SEQ ID NO: 353419 - DNA, 25 bp, Homo sapien
tacaatcatcttcattagagacgat

SEQ ID NO: 353420 - DNA, 25 bp, Homo sapien
acgatgcagggtcccttgcgctgga

SEQ ID NO: 353421 - DNA, 25 bp, Homo sapien
ttcggaaggctttgacaatacaatc

SEQ ID NO: 353422 - DNA, 25 bp, Homo sapien
atagcccttttttgtatcactccag

SEQ ID NO: 353423 - DNA, 25 bp, Homo sapien
tgctgagaggcatagcccttttttg

SEQ ID NO: 353424 - DNA, 25 bp, Homo sapien
tagcccttttttgtatcactccagg

SEQ ID NO: 353425 - DNA, 25 bp, Homo sapien
ttcaactttatctctgaccaccaaa

SEQ ID NO: 353426 - DNA, 25 bp, Homo sapien
ccttcaactttatctctgaccacca

SEQ ID NO: 353427 - DNA, 25 bp, Homo sapien
cttcaactttatctctgaccaccaa

SEQ ID NO: 353428 - DNA, 25 bp, Homo sapien
tctacagtgccaacagtgccaggtt

SEQ ID NO: 353429 - DNA, 25 bp, Homo sapien
accctggccaaaagagtgagtccca

SEQ ID NO: 353430 - DNA, 25 bp, Homo sapien
tttggattgtgttcactctacagtg

SEQ ID NO: 353431 - DNA, 25 bp, Homo sapien
gtggcctccatgacagatatttcca

SEQ ID NO: 353432 - DNA, 25 bp, Homo sapien
acctgctaattcactaacaagatag

SEQ ID NO: 353433 - DNA, 25 bp, Homo sapien
taattcactaacaagatagggctgt

SEQ ID NO: 353434 - DNA, 25 bp, Homo sapien
tcactaacaagatagggctgtctgt

SEQ ID NO: 353435 - DNA, 25 bp, Homo sapien
cctgctaattcactaacaagatagg

SEQ ID NO: 353436 - DNA, 25 bp, Homo sapien
tacactgataacagtggatcagcac

SEQ ID NO: 353437 - DNA, 25 bp, Homo sapien
tcccctttttcagagtacactgata

SEQ ID NO: 353438 - DNA, 25 bp, Homo sapien
tttcagagtacactgataacagtgg

SEQ ID NO: 353439 - DNA, 25 bp, Homo sapien
aacagtggatcagcacatccatggg

SEQ ID NO: 353440 - DNA, 25 bp, Homo sapien
ttttttcatagcactacgcagtgcc

SEQ ID NO: 353441 - DNA, 25 bp, Homo sapien
ttttcatagcactacgcagtgccga

SEQ ID NO: 353442 - DNA, 25 bp, Homo sapien
cgcagtgccgaaatcttatattcaa

SEQ ID NO: 353443 - DNA, 25 bp, Homo sapien
ttcatagcactacgcagtgccgaaa

SEQ ID NO: 353444 - DNA, 25 bp, Homo sapien
tagacagcagcgtcaattccaaggc

SEQ ID NO: 353445 - DNA, 25 bp, Homo sapien
cttcctagacagcagcgtcaattcc

SEQ ID NO: 353446 - DNA, 25 bp, Homo sapien
tccttcctagacagcagcgtcaatt

SEQ ID NO: 353447 - DNA, 25 bp, Homo sapien
tcctagacagcagcgtcaattccaa

SEQ ID NO: 353448 - DNA, 25 bp, Homo sapien
gaaattcaattccatgccaaccata

SEQ ID NO: 353449 - DNA, 25 bp, Homo sapien
cttgcttacaattcccacagacaga

SEQ ID NO: 353450 - DNA, 25 bp, Homo sapien
ttccatgccaaccataccctccgat

SEQ ID NO: 353451 - DNA, 25 bp, Homo sapien
tacaattcccacagacagatgaaat

SEQ ID NO: 353452 - DNA, 25 bp, Homo sapien
aataaaagttcatgcaatataaaca

SEQ ID NO: 353453 - DNA, 25 bp, Homo sapien
taaaagttcatgcaatataaacagt

SEQ ID NO: 353454 - DNA, 25 bp, Homo sapien
aaaagttcatgcaatataaacagtt

SEQ ID NO: 353455 - DNA, 25 bp, Homo sapien
aaataaaagttcatgcaatataaac

SEQ ID NO: 353456 - DNA, 25 bp, Homo sapien
ggtgtgcaccattacgtcgggctat

SEQ ID NO: 353457 - DNA, 25 bp, Homo sapien
tttaaataaacataggcaatctcta

SEQ ID NO: 353458 - DNA, 25 bp, Homo sapien
tgcaccattacgtcgggctattttt

SEQ ID NO: 353459 - DNA, 25 bp, Homo sapien
cataggcaatctctaccaccgtagg

SEQ ID NO: 353460 - DNA, 25 bp, Homo sapien
tagtagagcgccaaaggagcaaacc

SEQ ID NO: 353461 - DNA, 25 bp, Homo sapien
tactctccagatcgttatgcaaagg

SEQ ID NO: 353462 - DNA, 25 bp, Homo sapien
cacatattaatcgagtctgccaggt

SEQ ID NO: 353463 - DNA, 25 bp, Homo sapien
tcagtcacccaaggcaacaggcatt

SEQ ID NO: 353464 - DNA, 25 bp, Homo sapien
tacattctcaccaattcttggaact

SEQ ID NO: 353465 - DNA, 25 bp, Homo sapien
tggctgtaccatgtcacactcctac

SEQ ID NO: 353466 - DNA, 25 bp, Homo sapien
caaacacctaagagtagtattgcta

SEQ ID NO: 353467 - DNA, 25 bp, Homo sapien
atatctaaccttgtaagaaactgac

SEQ ID NO: 353468 - DNA, 25 bp, Homo sapien
catgccaacaatatactagaactaa

SEQ ID NO: 353469 - DNA, 25 bp, Homo sapien
taacaagtggataccttagagcatg

SEQ ID NO: 353470 - DNA, 25 bp, Homo sapien
caaagtctacactccttcatgccaa

SEQ ID NO: 353471 - DNA, 25 bp, Homo sapien
tcttcaatttgccacagttcctacc

SEQ ID NO: 353472 - DNA, 25 bp, Homo sapien
aaggtactcttgacaagcactcaga

SEQ ID NO: 353473 - DNA, 25 bp, Homo sapien
gaaactaacagaaagacgatcctcg

SEQ ID NO: 353474 - DNA, 25 bp, Homo sapien
tttagattcccaagcaacatactga

SEQ ID NO: 353475 - DNA, 25 bp, Homo sapien
tcctagataatctggatgggcctga

SEQ ID NO: 353476 - DNA, 25 bp, Homo sapien
ctatgataggctgaaaaatggccca

SEQ ID NO: 353477 - DNA, 25 bp, Homo sapien
tggaacagacgagcagagaagagac

SEQ ID NO: 353478 - DNA, 25 bp, Homo sapien
catagcctaataccgggaatctgtg

SEQ ID NO: 353479 - DNA, 25 bp, Homo sapien
tttacagcaaaaagggctaggagtc

SEQ ID NO: 353480 - DNA, 25 bp, Homo sapien
ttaagtcaacagaatcgtttttctg

SEQ ID NO: 353481 - DNA, 25 bp, Homo sapien
tctgttgtacaaaatcagagatttc

SEQ ID NO: 353482 - DNA, 25 bp, Homo sapien
cactgtgctctaccctaggcaagag

SEQ ID NO: 353483 - DNA, 25 bp, Homo sapien
ctctaccctaggcaagagaacgaga

SEQ ID NO: 353484 - DNA, 25 bp, Homo sapien
ccacgtctgctaattctttaacttt

SEQ ID NO: 353485 - DNA, 25 bp, Homo sapien
tgtggagacaagctatcattatgtt

SEQ ID NO: 353486 - DNA, 25 bp, Homo sapien
ttgcccaagcgggtctcaactcgaa

SEQ ID NO: 353487 - DNA, 25 bp, Homo sapien
tcaccgcacattcaggatggagggc

SEQ ID NO: 353488 - DNA, 25 bp, Homo sapien
caagctgggctagtgcttaaaggca

SEQ ID NO: 353489 - DNA, 25 bp, Homo sapien
ggctggcaagcaagttaaccattca

SEQ ID NO: 353490 - DNA, 25 bp, Homo sapien
cttcggcttgatgtagaaaggaccc

SEQ ID NO: 353491 - DNA, 25 bp, Homo sapien
tcttaacgttacaggcttcggcttg

SEQ ID NO: 353492 - DNA, 25 bp, Homo sapien
cgcgtctcctctcgaggctcactgt

SEQ ID NO: 353493 - DNA, 25 bp, Homo sapien
tgggaaagatgggaccgtcgctctc

SEQ ID NO: 353494 - DNA, 25 bp, Homo sapien
tgtggccagcggcaaccaagagggt

SEQ ID NO: 353495 - DNA, 25 bp, Homo sapien
tcgccgccagcggagggcgtgtggc

SEQ ID NO: 353496 - DNA, 25 bp, Homo sapien
agcaaaaggactgcattaagccagg

SEQ ID NO: 353497 - DNA, 25 bp, Homo sapien
caactgcaagtgacaggaaacagac

SEQ ID NO: 353498 - DNA, 25 bp, Homo sapien
gtttcacatgctggcaagctggagc

SEQ ID NO: 353499 - DNA, 25 bp, Homo sapien
ttcaggactccagaatataaccagg

SEQ ID NO: 353500 - DNA, 25 bp, Homo sapien
agaggagacgaccttgtgctcagta

SEQ ID NO: 353501 - DNA, 25 bp, Homo sapien
acgaccttgtgctcagtacagccca

SEQ ID NO: 353502 - DNA, 25 bp, Homo sapien
ggttcaccaccctgtcataccagga

SEQ ID NO: 353503 - DNA, 25 bp, Homo sapien
catcctcttgatgtcactgtatttg

SEQ ID NO: 353504 - DNA, 25 bp, Homo sapien
catcagtagtcttctaggtggcact

SEQ ID NO: 353505 - DNA, 25 bp, Homo sapien
tgcagccatcacactacaatttccc

SEQ ID NO: 353506 - DNA, 25 bp, Homo sapien
agtagtcttctaggtggcactgaag

SEQ ID NO: 353507 - DNA, 25 bp, Homo sapien
cccagaggtaccatcagtagtcttc

SEQ ID NO: 353508 - DNA, 25 bp, Homo sapien
catgagtccttccatggtgccaaag

SEQ ID NO: 353509 - DNA, 25 bp, Homo sapien
tggtcatgagtccttccatggtgcc

SEQ ID NO: 353510 - DNA, 25 bp, Homo sapien
atgagtccttccatggtgccaaagt

SEQ ID NO: 353511 - DNA, 25 bp, Homo sapien
gtcatgagtccttccatggtgccaa

SEQ ID NO: 353512 - DNA, 25 bp, Homo sapien
gtttccatacttctcatgattcaca

SEQ ID NO: 353513 - DNA, 25 bp, Homo sapien
catctaagtaagtcccagccttctc

SEQ ID NO: 353514 - DNA, 25 bp, Homo sapien
tgataatcttgaggctgtttccata

SEQ ID NO: 353515 - DNA, 25 bp, Homo sapien
gggttaagcaactggtggtgcagga

SEQ ID NO: 353516 - DNA, 25 bp, Homo sapien
ctctataacataatcagcaccagca

SEQ ID NO: 353517 - DNA, 25 bp, Homo sapien
tctataacataatcagcaccagcat

SEQ ID NO: 353518 - DNA, 25 bp, Homo sapien
tataacataatcagcaccagcatca

SEQ ID NO: 353519 - DNA, 25 bp, Homo sapien
ataacataatcagcaccagcatcac

SEQ ID NO: 353520 - DNA, 25 bp, Homo sapien
tccactggtgacaagcttcgcgttt

SEQ ID NO: 353521 - DNA, 25 bp, Homo sapien
aagcttcgcgttttcagcctgatgg

SEQ ID NO: 353522 - DNA, 25 bp, Homo sapien
gacaagcttcgcgttttcagcctga

SEQ ID NO: 353523 - DNA, 25 bp, Homo sapien
tggtgacaagcttcgcgttttcagc

SEQ ID NO: 353524 - DNA, 25 bp, Homo sapien
tggcaacaatatccattgtgctaga

SEQ ID NO: 353525 - DNA, 25 bp, Homo sapien
ccagccttcgcttttcccttggtgc

SEQ ID NO: 353526 - DNA, 25 bp, Homo sapien
tggtaaccaggcatccaatatgtcc

SEQ ID NO: 353527 - DNA, 25 bp, Homo sapien
cagccttcgcttttcccttggtgcc

SEQ ID NO: 353528 - DNA, 25 bp, Homo sapien
gccatagacactgggtgagacccct

SEQ ID NO: 353529 - DNA, 25 bp, Homo sapien
agaatcggatagcactggagttggc

SEQ ID NO: 353530 - DNA, 25 bp, Homo sapien
aatagttcatgccaaggaagacgcc

SEQ ID NO: 353531 - DNA, 25 bp, Homo sapien
tcagtctctcttactggcgaaaggg

SEQ ID NO: 353532 - DNA, 25 bp, Homo sapien
cagctccgtgtcttgccttgtgcag

SEQ ID NO: 353533 - DNA, 25 bp, Homo sapien
cctgggaatactatgccccgccttt

SEQ ID NO: 353534 - DNA, 25 bp, Homo sapien
tggggggaatcggtaccatctctcc

SEQ ID NO: 353535 - DNA, 25 bp, Homo sapien
taagacttaggtccgtcattgcctc

SEQ ID NO: 353536 - DNA, 25 bp, Homo sapien
caaactgaatactcatgaggcacac

SEQ ID NO: 353537 - DNA, 25 bp, Homo sapien
tcaaagaaacgcagagacgccagag

SEQ ID NO: 353538 - DNA, 25 bp, Homo sapien
tggagtcgtgctcaccgcattgcaa

SEQ ID NO: 353539 - DNA, 25 bp, Homo sapien
gagaaaccatgcctcttatgccagc

SEQ ID NO: 353540 - DNA, 25 bp, Homo sapien
tcaagcatgaaaaccagagaagtgg

SEQ ID NO: 353541 - DNA, 25 bp, Homo sapien
gaacacacttattggctaggatcag

SEQ ID NO: 353542 - DNA, 25 bp, Homo sapien
tcagtcacatgggtatccccactgt

SEQ ID NO: 353543 - DNA, 25 bp, Homo sapien
caattacgtggttgtaacagcagcc

SEQ ID NO: 353544 - DNA, 25 bp, Homo sapien
tcagcagggcactccaaaaggccca

SEQ ID NO: 353545 - DNA, 25 bp, Homo sapien
ggagtgtcagcagggcactccaaaa

SEQ ID NO: 353546 - DNA, 25 bp, Homo sapien
cagggagtgtcagcagggcactcca

SEQ ID NO: 353547 - DNA, 25 bp, Homo sapien
gtgtcagcagggcactccaaaaggc

SEQ ID NO: 353548 - DNA, 25 bp, Homo sapien
agttaagagtgaaagtgggaccgca

SEQ ID NO: 353549 - DNA, 25 bp, Homo sapien
gatggtctcgaacgactggcttcag

SEQ ID NO: 353550 - DNA, 25 bp, Homo sapien
gaccgcaggccaacgctagtatgga

SEQ ID NO: 353551 - DNA, 25 bp, Homo sapien
gcccgagctgtttattggtgatcaa

SEQ ID NO: 353552 - DNA, 25 bp, Homo sapien
gaggtcagtgctcctagctcttgct

SEQ ID NO: 353553 - DNA, 25 bp, Homo sapien
gcaaaacagtgttcctgggtagtcc

SEQ ID NO: 353554 - DNA, 25 bp, Homo sapien
gagtgaaaaagatcctcccaggtgg

SEQ ID NO: 353555 - DNA, 25 bp, Homo sapien
tagactgggacttacatcattgtgc

SEQ ID NO: 353556 - DNA, 25 bp, Homo sapien
tcattgaacctttttgtattgagaa

SEQ ID NO: 353557 - DNA, 25 bp, Homo sapien
aatatattctaaccaggcaccgtgg

SEQ ID NO: 353558 - DNA, 25 bp, Homo sapien
gaccggcctgatggtgaaaaccctg

SEQ ID NO: 353559 - DNA, 25 bp, Homo sapien
ggcaccgtggctatcttagcacttt

SEQ ID NO: 353560 - DNA, 25 bp, Homo sapien
gcggcccggcagaagtgcccctcac

SEQ ID NO: 353561 - DNA, 25 bp, Homo sapien
gggcggcccggcagaagtgcccctc

SEQ ID NO: 353562 - DNA, 25 bp, Homo sapien
ggcccggcagaagtgcccctcacct

SEQ ID NO: 353563 - DNA, 25 bp, Homo sapien
gcccggcagaagtgcccctcacctc

SEQ ID NO: 353564 - DNA, 25 bp, Homo sapien
caaacgggaagattgagaggtcatc

SEQ ID NO: 353565 - DNA, 25 bp, Homo sapien
ggcatttggctcctcaagtcaccat

SEQ ID NO: 353566 - DNA, 25 bp, Homo sapien
ccaaggtgagtcactagctcaatca

SEQ ID NO: 353567 - DNA, 25 bp, Homo sapien
cactgccaggcaagtaattaattca

SEQ ID NO: 353568 - DNA, 25 bp, Homo sapien
aatcacttcttctcatgggtcaggg

SEQ ID NO: 353569 - DNA, 25 bp, Homo sapien
gaaactctgggttgcgtgcccagca

SEQ ID NO: 353570 - DNA, 25 bp, Homo sapien
tggaccacactgagcaacaggactc

SEQ ID NO: 353571 - DNA, 25 bp, Homo sapien
gcttgtggcagtactaccgtctgat

SEQ ID NO: 353572 - DNA, 25 bp, Homo sapien
ctgaccagggcttgtaagaatggac

SEQ ID NO: 353573 - DNA, 25 bp, Homo sapien
gacacctctccttaagcagggaaaa

SEQ ID NO: 353574 - DNA, 25 bp, Homo sapien
caattaaggtgacaacaggtccagt

SEQ ID NO: 353575 - DNA, 25 bp, Homo sapien
tctcttcactcaggaggaaacctcc

SEQ ID NO: 353576 - DNA, 25 bp, Homo sapien
cccataactgtgaaggtggcagctg

SEQ ID NO: 353577 - DNA, 25 bp, Homo sapien
tcagtgttggtgtgcacgcttcagc

SEQ ID NO: 353578 - DNA, 25 bp, Homo sapien
gtgcacgcttcagccccataactgt

SEQ ID NO: 353579 - DNA, 25 bp, Homo sapien
gccccataactgtgaaggtggcagc

SEQ ID NO: 353580 - DNA, 25 bp, Homo sapien
tcagtacagcctcaatctgccgggc

SEQ ID NO: 353581 - DNA, 25 bp, Homo sapien
cagtacagcctcaatctgccgggct

SEQ ID NO: 353582 - DNA, 25 bp, Homo sapien
gctcagtacagcctcaatctgccgg

SEQ ID NO: 353583 - DNA, 25 bp, Homo sapien
ctcagtacagcctcaatctgccggg

SEQ ID NO: 353584 - DNA, 25 bp, Homo sapien
cgttggtgaagaagatagagaatat

SEQ ID NO: 353585 - DNA, 25 bp, Homo sapien
ctgggtttagtctatgacgcccaaa

SEQ ID NO: 353586 - DNA, 25 bp, Homo sapien
tgaagaagatagagaatattccgaa

SEQ ID NO: 353587 - DNA, 25 bp, Homo sapien
attccgaagacttcccaatgttctg

SEQ ID NO: 353588 - DNA, 25 bp, Homo sapien
ccaccgcgcccaaccgatctgatgg

SEQ ID NO: 353589 - DNA, 25 bp, Homo sapien
gagttccccctgcacttgtccttgc

SEQ ID NO: 353590 - DNA, 25 bp, Homo sapien
ccgcgcccaaccgatctgatggttt

SEQ ID NO: 353591 - DNA, 25 bp, Homo sapien
cctgcacttgtccttgctgccgcca

SEQ ID NO: 353592 - DNA, 25 bp, Homo sapien
ttatttaccactgcatgcccaggtc

SEQ ID NO: 353593 - DNA, 25 bp, Homo sapien
ttctctcttccactagctccataag

SEQ ID NO: 353594 - DNA, 25 bp, Homo sapien
ctcttccactagctccataagggca

SEQ ID NO: 353595 - DNA, 25 bp, Homo sapien
ctctcttccactagctccataaggg

SEQ ID NO: 353596 - DNA, 25 bp, Homo sapien
cctcagaattgactgtaccgtctgc

SEQ ID NO: 353597 - DNA, 25 bp, Homo sapien
agaattgactgtaccgtctgcaggg

SEQ ID NO: 353598 - DNA, 25 bp, Homo sapien
ggtcaccgtggtggcaatcgctttg

SEQ ID NO: 353599 - DNA, 25 bp, Homo sapien
ggctactgcaccaatgatgaacaca

SEQ ID NO: 353600 - DNA, 25 bp, Homo sapien
cataaaacatgaactggatggcagg

SEQ ID NO: 353601 - DNA, 25 bp, Homo sapien
tgtgccattccataaagccgagatt

SEQ ID NO: 353602 - DNA, 25 bp, Homo sapien
gccgagattccttcatcgcgaatga

SEQ ID NO: 353603 - DNA, 25 bp, Homo sapien
tcgcgaatgatctgatgaaaagcat

SEQ ID NO: 353604 - DNA, 25 bp, Homo sapien
ttacattaggtaaaagcaatggcaa

SEQ ID NO: 353605 - DNA, 25 bp, Homo sapien
catttacattaggtaaaagcaatgg

SEQ ID NO: 353606 - DNA, 25 bp, Homo sapien
gtacagaatgggagataatttttac

SEQ ID NO: 353607 - DNA, 25 bp, Homo sapien
cgtacagaatgggagataattttta

SEQ ID NO: 353608 - DNA, 25 bp, Homo sapien
cccagagtggagttgttagcaacac

SEQ ID NO: 353609 - DNA, 25 bp, Homo sapien
ttcagtctggtgtttaccacccaga

SEQ ID NO: 353610 - DNA, 25 bp, Homo sapien
gatacctttgtagtttgttggtaca

SEQ ID NO: 353611 - DNA, 25 bp, Homo sapien
tttgttggtacaatgtcttcattcc

SEQ ID NO: 353612 - DNA, 25 bp, Homo sapien
tgacctcttaggagacctaaggtaa

SEQ ID NO: 353613 - DNA, 25 bp, Homo sapien
gctttaaagctacataccaatattc

SEQ ID NO: 353614 - DNA, 25 bp, Homo sapien
tctctttgtgccagggtacaacaca

SEQ ID NO: 353615 - DNA, 25 bp, Homo sapien
tatatctctgtcactgacctcttag

SEQ ID NO: 353616 - DNA, 25 bp, Homo sapien
gaagctcgctgaagagttcctcctt

SEQ ID NO: 353617 - DNA, 25 bp, Homo sapien
tacttaagtagctcacacggtttga

SEQ ID NO: 353618 - DNA, 25 bp, Homo sapien
cattaggataggcaggcagcaagca

SEQ ID NO: 353619 - DNA, 25 bp, Homo sapien
tgatagcaaaatggctggcggcagc

SEQ ID NO: 353620 - DNA, 25 bp, Homo sapien
gccccccaaggttgcctcagagtag

SEQ ID NO: 353621 - DNA, 25 bp, Homo sapien
tggccccccaaggttgcctcagagt

SEQ ID NO: 353622 - DNA, 25 bp, Homo sapien
ggccccccaaggttgcctcagagta

SEQ ID NO: 353623 - DNA, 25 bp, Homo sapien
ccccccaaggttgcctcagagtaga

SEQ ID NO: 353624 - DNA, 25 bp, Homo sapien
tgtctggctctagtcaagatctgaa

SEQ ID NO: 353625 - DNA, 25 bp, Homo sapien
ggaaatacagtctaaccaaggataa

SEQ ID NO: 353626 - DNA, 25 bp, Homo sapien
aaaaagcacacatccaactgtctgg

SEQ ID NO: 353627 - DNA, 25 bp, Homo sapien
taaacttgacaaaacagccaagaga

SEQ ID NO: 353628 - DNA, 25 bp, Homo sapien
ctgtcttgccagatttaaggccaga

SEQ ID NO: 353629 - DNA, 25 bp, Homo sapien
tgccagatttaaggccagagggcag

SEQ ID NO: 353630 - DNA, 25 bp, Homo sapien
tcttgccagatttaaggccagaggg

SEQ ID NO: 353631 - DNA, 25 bp, Homo sapien
ttgccagatttaaggccagagggca

SEQ ID NO: 353632 - DNA, 25 bp, Homo sapien
attgctaactcatacgtttgcaggg

SEQ ID NO: 353633 - DNA, 25 bp, Homo sapien
tctttattgtccaagcgaactaggc

SEQ ID NO: 353634 - DNA, 25 bp, Homo sapien
tagcatctagaactggatttagcac

SEQ ID NO: 353635 - DNA, 25 bp, Homo sapien
gatttagcacatactagacacccaa

SEQ ID NO: 353636 - DNA, 25 bp, Homo sapien
gatgaggctggacaataataaacac

SEQ ID NO: 353637 - DNA, 25 bp, Homo sapien
caaagataggcagggaaagtctaga

SEQ ID NO: 353638 - DNA, 25 bp, Homo sapien
tagaggacttagaattgaaccagct

SEQ ID NO: 353639 - DNA, 25 bp, Homo sapien
tgaaccagctccatacaaaaatgaa

SEQ ID NO: 353640 - DNA, 25 bp, Homo sapien
aatgccactggatatatcggctggc

SEQ ID NO: 353641 - DNA, 25 bp, Homo sapien
gaggtagccaacaacggccacactc

SEQ ID NO: 353642 - DNA, 25 bp, Homo sapien
cactggatatatcggctggcagatt

SEQ ID NO: 353643 - DNA, 25 bp, Homo sapien
tcgtattctcatagtatgggttcca

SEQ ID NO: 353644 - DNA, 25 bp, Homo sapien
cacttggtcccggcaggagtatgac

SEQ ID NO: 353645 - DNA, 25 bp, Homo sapien
cttggtcccggcaggagtatgacag

SEQ ID NO: 353646 - DNA, 25 bp, Homo sapien
tggtcccggcaggagtatgacagat

SEQ ID NO: 353647 - DNA, 25 bp, Homo sapien
ataccacttggtcccggcaggagta

SEQ ID NO: 353648 - DNA, 25 bp, Homo sapien
tgggctgcagcccggtccctgcgtc

SEQ ID NO: 353649 - DNA, 25 bp, Homo sapien
tcgaggcatgggctgcagcccggtc

SEQ ID NO: 353650 - DNA, 25 bp, Homo sapien
ctgctcgaggcatgggctgcagccc

SEQ ID NO: 353651 - DNA, 25 bp, Homo sapien
aggcatgggctgcagcccggtccct

SEQ ID NO: 353652 - DNA, 25 bp, Homo sapien
gaggatccctgatgccagcgactca

SEQ ID NO: 353653 - DNA, 25 bp, Homo sapien
tgacacgccacggaggatccctgat

SEQ ID NO: 353654 - DNA, 25 bp, Homo sapien
atgccgatgacacgccacggaggat

SEQ ID NO: 353655 - DNA, 25 bp, Homo sapien
gggcccgacgatgccgatgacacgc

SEQ ID NO: 353656 - DNA, 25 bp, Homo sapien
caggctctcaaagagagagctacac

SEQ ID NO: 353657 - DNA, 25 bp, Homo sapien
agtcatgtcacatgctgtatggcat

SEQ ID NO: 353658 - DNA, 25 bp, Homo sapien
aaaaagtaaggaagtcatgtcacat

SEQ ID NO: 353659 - DNA, 25 bp, Homo sapien
caagtagtgtatgattcgacttata

SEQ ID NO: 353660 - DNA, 25 bp, Homo sapien
cagtggtagaatgttgacctttgac

SEQ ID NO: 353661 - DNA, 25 bp, Homo sapien
acctttgacccagagtgctttgagg

SEQ ID NO: 353662 - DNA, 25 bp, Homo sapien
tggtagaatgttgacctttgaccca

SEQ ID NO: 353663 - DNA, 25 bp, Homo sapien
ctgcaacaaacccaactaccagatc

SEQ ID NO: 353664 - DNA, 25 bp, Homo sapien
ctggaaaccaccctcgatatggtgc

SEQ ID NO: 353665 - DNA, 25 bp, Homo sapien
atcactggaaaccaccctcgatatg

SEQ ID NO: 353666 - DNA, 25 bp, Homo sapien
cactggaaaccaccctcgatatggt

SEQ ID NO: 353667 - DNA, 25 bp, Homo sapien
tcactggaaaccaccctcgatatgg

SEQ ID NO: 353668 - DNA, 25 bp, Homo sapien
cttcttctttaatgatctccaggag

SEQ ID NO: 353669 - DNA, 25 bp, Homo sapien
cttctttaatgatctccaggagcac

SEQ ID NO: 353670 - DNA, 25 bp, Homo sapien
ctttaatgatctccaggagcaccat

SEQ ID NO: 353671 - DNA, 25 bp, Homo sapien
tccttcttctttaatgatctccagg

SEQ ID NO: 353672 - DNA, 25 bp, Homo sapien
agttttggattttcttttctcatca

SEQ ID NO: 353673 - DNA, 25 bp, Homo sapien
tagttttggattttcttttctcatc

SEQ ID NO: 353674 - DNA, 25 bp, Homo sapien
gttttggattttcttttctcatcaa

SEQ ID NO: 353675 - DNA, 25 bp, Homo sapien
tgtagttttggattttcttttctca

SEQ ID NO: 353676 - DNA, 25 bp, Homo sapien
tactattgaaagctaatcttactca

SEQ ID NO: 353677 - DNA, 25 bp, Homo sapien
gaattactattgaaagctaatctta

SEQ ID NO: 353678 - DNA, 25 bp, Homo sapien
tgcaagttctggcataggtttacaa

SEQ ID NO: 353679 - DNA, 25 bp, Homo sapien
tcatctcttcatgcaagttctggca

SEQ ID NO: 353680 - DNA, 25 bp, Homo sapien
ctgggcaaaaagctctggaaaagct

SEQ ID NO: 353681 - DNA, 25 bp, Homo sapien
gatatggtcttgatctttgcctgtc

SEQ ID NO: 353682 - DNA, 25 bp, Homo sapien
ttgtcagcaacaactgggcaaaaag

SEQ ID NO: 353683 - DNA, 25 bp, Homo sapien
ttcgaaggggctgttgatatggtct

SEQ ID NO: 353684 - DNA, 25 bp, Homo sapien
tatccaggggaaaaaacactgtcat

SEQ ID NO: 353685 - DNA, 25 bp, Homo sapien
ctgtatccaggggaaaaaacactgt

SEQ ID NO: 353686 - DNA, 25 bp, Homo sapien
tgtatccaggggaaaaaacactgtc

SEQ ID NO: 353687 - DNA, 25 bp, Homo sapien
gtatccaggggaaaaaacactgtca

SEQ ID NO: 353688 - DNA, 25 bp, Homo sapien
tttctccagacgacactgacacagg

SEQ ID NO: 353689 - DNA, 25 bp, Homo sapien
cccaagcccagagcaagtgtgtact

SEQ ID NO: 353690 - DNA, 25 bp, Homo sapien
ggctcgctggtacctagatgtgcaa

SEQ ID NO: 353691 - DNA, 25 bp, Homo sapien
caattcgggcttcaaaggactagca

SEQ ID NO: 353692 - DNA, 25 bp, Homo sapien
gcgtaagccaccgagcattaaatat

SEQ ID NO: 353693 - DNA, 25 bp, Homo sapien
taatcgatcaaagcaaagcatgcac

SEQ ID NO: 353694 - DNA, 25 bp, Homo sapien
tagtaaatttttaatcgatcaaagc

SEQ ID NO: 353695 - DNA, 25 bp, Homo sapien
cagagaggcaattaaattcttctag

SEQ ID NO: 353696 - DNA, 25 bp, Homo sapien
tgtctgactcccctattgcaatgca

SEQ ID NO: 353697 - DNA, 25 bp, Homo sapien
tgtactccttgcacctagaacagcg

SEQ ID NO: 353698 - DNA, 25 bp, Homo sapien
ctcaataaaggtgtttaatgaacat

SEQ ID NO: 353699 - DNA, 25 bp, Homo sapien
gaaaaagaccttctctactgtactc

SEQ ID NO: 353700 - DNA, 25 bp, Homo sapien
ttttctcggcctcttaatggttagc

SEQ ID NO: 353701 - DNA, 25 bp, Homo sapien
agcatctgacccagctggtctactt

SEQ ID NO: 353702 - DNA, 25 bp, Homo sapien
cacgtggctttcactcttagttctt

SEQ ID NO: 353703 - DNA, 25 bp, Homo sapien
tcctgcagtactgatccatccttcg

SEQ ID NO: 353704 - DNA, 25 bp, Homo sapien
tccaacaactttccgccaatggccc

SEQ ID NO: 353705 - DNA, 25 bp, Homo sapien
taccccgcagtctctaggagaccag

SEQ ID NO: 353706 - DNA, 25 bp, Homo sapien
accctgagcgggcacgtgtgaacac

SEQ ID NO: 353707 - DNA, 25 bp, Homo sapien
aggaggtggcggagtctcggccctt

SEQ ID NO: 353708 - DNA, 25 bp, Homo sapien
ggctccggccacggcgtggaccagg

SEQ ID NO: 353709 - DNA, 25 bp, Homo sapien
cggctccggccacggcgtggaccag

SEQ ID NO: 353710 - DNA, 25 bp, Homo sapien
cacggctccggccacggcgtggacc

SEQ ID NO: 353711 - DNA, 25 bp, Homo sapien
acggctccggccacggcgtggacca

SEQ ID NO: 353712 - DNA, 25 bp, Homo sapien
ctttcgtaggacagcacggaagcca

SEQ ID NO: 353713 - DNA, 25 bp, Homo sapien
tttcgtaggacagcacggaagccat

SEQ ID NO: 353714 - DNA, 25 bp, Homo sapien
gcggctcctcgaagacccagccaca

SEQ ID NO: 353715 - DNA, 25 bp, Homo sapien
gtgcggctcctcgaagacccagcca

SEQ ID NO: 353716 - DNA, 25 bp, Homo sapien
tggtgcggctcctcgaagacccagc

SEQ ID NO: 353717 - DNA, 25 bp, Homo sapien
ggtgcggctcctcgaagacccagcc

SEQ ID NO: 353718 - DNA, 25 bp, Homo sapien
atgccgcagccagtggagttaggaa

SEQ ID NO: 353719 - DNA, 25 bp, Homo sapien
aggagcaccggagctcagggtgtga

SEQ ID NO: 353720 - DNA, 25 bp, Homo sapien
agctcagggtgtgagagtcgcaatc

SEQ ID NO: 353721 - DNA, 25 bp, Homo sapien
gtgtgagagtcgcaatccccgccct

SEQ ID NO: 353722 - DNA, 25 bp, Homo sapien
tgtacacatcagcacatcaagtgtg

SEQ ID NO: 353723 - DNA, 25 bp, Homo sapien
tccaccagcactatatgaaaggtct

SEQ ID NO: 353724 - DNA, 25 bp, Homo sapien
gaatcaaccttgtacacagaggcag

SEQ ID NO: 353725 - DNA, 25 bp, Homo sapien
tatactggttgtaaatactggcaca

SEQ ID NO: 353726 - DNA, 25 bp, Homo sapien
gcccaatatctagtttgaaaccgta

SEQ ID NO: 353727 - DNA, 25 bp, Homo sapien
cctagtaaataacctgagtaccaga

SEQ ID NO: 353728 - DNA, 25 bp, Homo sapien
tagtctgcagcctaatatacctagt

SEQ ID NO: 353729 - DNA, 25 bp, Homo sapien
agactgtgtttcgtgatctcagctc

SEQ ID NO: 353730 - DNA, 25 bp, Homo sapien
agaaactgttcttgagttaagccaa

SEQ ID NO: 353731 - DNA, 25 bp, Homo sapien
gaagaaactgttcttgagttaagcc

SEQ ID NO: 353732 - DNA, 25 bp, Homo sapien
gaaactgttcttgagttaagccaag

SEQ ID NO: 353733 - DNA, 25 bp, Homo sapien
aagaaactgttcttgagttaagcca

SEQ ID NO: 353734 - DNA, 25 bp, Homo sapien
gcaatgtcaggtacaatgcctatac

SEQ ID NO: 353735 - DNA, 25 bp, Homo sapien
tacagaaggccttatcccttgaaaa

SEQ ID NO: 353736 - DNA, 25 bp, Homo sapien
cactggtagaaacgtagcaatgtca

SEQ ID NO: 353737 - DNA, 25 bp, Homo sapien
gtgatgatgccggtggaaaaagcct

SEQ ID NO: 353738 - DNA, 25 bp, Homo sapien
caacacaaactttatcctcaaatga

SEQ ID NO: 353739 - DNA, 25 bp, Homo sapien
aaaatgcatcaggaaccacatatcc

SEQ ID NO: 353740 - DNA, 25 bp, Homo sapien
atcaggaaccacatatccaacacaa

SEQ ID NO: 353741 - DNA, 25 bp, Homo sapien
aaaagacaagtcaaaatgcatcagg

SEQ ID NO: 353742 - DNA, 25 bp, Homo sapien
tgtaattcctagtaggaaaacatta

SEQ ID NO: 353743 - DNA, 25 bp, Homo sapien
tcctagtaggaaaacattatctgaa

SEQ ID NO: 353744 - DNA, 25 bp, Homo sapien
ggtttgtattattgcgacatccata

SEQ ID NO: 353745 - DNA, 25 bp, Homo sapien
ggggtagggattatcttcaaagcac

SEQ ID NO: 353746 - DNA, 25 bp, Homo sapien
tcagcaagggctttatttatcagaa

SEQ ID NO: 353747 - DNA, 25 bp, Homo sapien
caagggctttatttatcagaaggac

SEQ ID NO: 353748 - DNA, 25 bp, Homo sapien
cttcagcaagggctttatttatcag

SEQ ID NO: 353749 - DNA, 25 bp, Homo sapien
tttccttcagcaagggctttattta

SEQ ID NO: 353750 - DNA, 25 bp, Homo sapien
tggaaagccaccataacttctggat

SEQ ID NO: 353751 - DNA, 25 bp, Homo sapien
cctttgggttgctctggtattttga

SEQ ID NO: 353752 - DNA, 25 bp, Homo sapien
agccacatcctggaaagccaccata

SEQ ID NO: 353753 - DNA, 25 bp, Homo sapien
tgagattcataacctttgggttgct

SEQ ID NO: 353754 - DNA, 25 bp, Homo sapien
cattccagccattccaggcatgccc

SEQ ID NO: 353755 - DNA, 25 bp, Homo sapien
tccaggcattcctccgggaaaatta

SEQ ID NO: 353756 - DNA, 25 bp, Homo sapien
tttcattgagtccaggcattccagc

SEQ ID NO: 353757 - DNA, 25 bp, Homo sapien
ccattccaggcattcctccgggaaa

SEQ ID NO: 353758 - DNA, 25 bp, Homo sapien
caggttcaaagaatatgggtgccac

SEQ ID NO: 353759 - DNA, 25 bp, Homo sapien
aagtacaggttcaaagaatatgggt

SEQ ID NO: 353760 - DNA, 25 bp, Homo sapien
tacaggttcaaagaatatgggtgcc

SEQ ID NO: 353761 - DNA, 25 bp, Homo sapien
ggttcaaagaatatgggtgccacta

SEQ ID NO: 353762 - DNA, 25 bp, Homo sapien
taacagttccttagataattataaa

SEQ ID NO: 353763 - DNA, 25 bp, Homo sapien
ttatatcaagttggccgggccgctc

SEQ ID NO: 353764 - DNA, 25 bp, Homo sapien
aaagactaatctcgccttaaaagca

SEQ ID NO: 353765 - DNA, 25 bp, Homo sapien
ccttaaaagcaaagagtcatctaac

SEQ ID NO: 353766 - DNA, 25 bp, Homo sapien
aacgaaattactgacccaaagcttg

SEQ ID NO: 353767 - DNA, 25 bp, Homo sapien
tagtactagcccaacattagcagtc

SEQ ID NO: 353768 - DNA, 25 bp, Homo sapien
catcggatcatgcaactaagttcta

SEQ ID NO: 353769 - DNA, 25 bp, Homo sapien
gtgacatataagcatacgtagcctc

SEQ ID NO: 353770 - DNA, 25 bp, Homo sapien
agctcctgactgtcgtctggcttct

SEQ ID NO: 353771 - DNA, 25 bp, Homo sapien
catactgagctcctgactgtcgtct

SEQ ID NO: 353772 - DNA, 25 bp, Homo sapien
actgagctcctgactgtcgtctggc

SEQ ID NO: 353773 - DNA, 25 bp, Homo sapien
ctggaaaagagccatactgagctcc

SEQ ID NO: 353774 - DNA, 25 bp, Homo sapien
tctcgagccttcttaactcgttcta

SEQ ID NO: 353775 - DNA, 25 bp, Homo sapien
tctcgctcttcacgttttcgctcat

SEQ ID NO: 353776 - DNA, 25 bp, Homo sapien
cgctcatactttctccgatgttctg

SEQ ID NO: 353777 - DNA, 25 bp, Homo sapien
ttctcgagccttcttaactcgttct

SEQ ID NO: 353778 - DNA, 25 bp, Homo sapien
gcctggccggaaagcctgaaacttc

SEQ ID NO: 353779 - DNA, 25 bp, Homo sapien
cctggccggaaagcctgaaacttct

SEQ ID NO: 353780 - DNA, 25 bp, Homo sapien
ctgcttcttcccagtggcctagaag

SEQ ID NO: 353781 - DNA, 25 bp, Homo sapien
taatccaatttacaggcaagggcaa

SEQ ID NO: 353782 - DNA, 25 bp, Homo sapien
cattgcactagcatcttcatcataa

SEQ ID NO: 353783 - DNA, 25 bp, Homo sapien
agggcaagatcatgggctgcttctt

SEQ ID NO: 353784 - DNA, 25 bp, Homo sapien
gtgtgctttcccccgccacttgtaa

SEQ ID NO: 353785 - DNA, 25 bp, Homo sapien
aatggctctgtcacagtctcggatg

SEQ ID NO: 353786 - DNA, 25 bp, Homo sapien
tgtgtgctttcccccgccacttgta

SEQ ID NO: 353787 - DNA, 25 bp, Homo sapien
cacagtctcggatggcagcatttgg

SEQ ID NO: 353788 - DNA, 25 bp, Homo sapien
tgtgaataagtcaatggctttctgg

SEQ ID NO: 353789 - DNA, 25 bp, Homo sapien
tcttggcatacaaaatggccaagcg

SEQ ID NO: 353790 - DNA, 25 bp, Homo sapien
ggcatacaaaatggccaagcgagga

SEQ ID NO: 353791 - DNA, 25 bp, Homo sapien
gatggcatctgtgaataagtcaatg

SEQ ID NO: 353792 - DNA, 25 bp, Homo sapien
ttcaatagcagccacttttttatca

SEQ ID NO: 353793 - DNA, 25 bp, Homo sapien
tagggcttcaatagcagccactttt

SEQ ID NO: 353794 - DNA, 25 bp, Homo sapien
atagcagccacttttttatcatttg

SEQ ID NO: 353795 - DNA, 25 bp, Homo sapien
catttagggcttcaatagcagccac

SEQ ID NO: 353796 - DNA, 25 bp, Homo sapien
gacttagtatcagacgatgtggcat

SEQ ID NO: 353797 - DNA, 25 bp, Homo sapien
tgaagatgagtcacaaactagcaga

SEQ ID NO: 353798 - DNA, 25 bp, Homo sapien
taaactcctgaaacagacccacaat

SEQ ID NO: 353799 - DNA, 25 bp, Homo sapien
taaacaggagttcgcaaatgccagt

SEQ ID NO: 353800 - DNA, 25 bp, Homo sapien
gtgtctggttcaatcacaccttctt

SEQ ID NO: 353801 - DNA, 25 bp, Homo sapien
atttcttgaggagcatcagtgtctg

SEQ ID NO: 353802 - DNA, 25 bp, Homo sapien
agtgtctggttcaatcacaccttct

SEQ ID NO: 353803 - DNA, 25 bp, Homo sapien
tccgcattttcatctcccatttctt

SEQ ID NO: 353804 - DNA, 25 bp, Homo sapien
ccaaagtcgagaaaatgacaataag

SEQ ID NO: 353805 - DNA, 25 bp, Homo sapien
aaagtcgagaaaatgacaataagac

SEQ ID NO: 353806 - DNA, 25 bp, Homo sapien
ctgccaaagtcgagaaaatgacaat

SEQ ID NO: 353807 - DNA, 25 bp, Homo sapien
tgccaaagtcgagaaaatgacaata

SEQ ID NO: 353808 - DNA, 25 bp, Homo sapien
ggttctgtgatataagagacttcca

SEQ ID NO: 353809 - DNA, 25 bp, Homo sapien
gtggcagagcgaaactcaagtcttc

SEQ ID NO: 353810 - DNA, 25 bp, Homo sapien
tgccagtagaatgtaagacctctaa

SEQ ID NO: 353811 - DNA, 25 bp, Homo sapien
caaagataatttgattcaggccagg

SEQ ID NO: 353812 - DNA, 25 bp, Homo sapien
gatggttcgtctgcctttaagtctt

SEQ ID NO: 353813 - DNA, 25 bp, Homo sapien
ttgatggttcgtctgcctttaagtc

SEQ ID NO: 353814 - DNA, 25 bp, Homo sapien
ttcctccaccttcttactatcaggt

SEQ ID NO: 353815 - DNA, 25 bp, Homo sapien
ctccaccttcttactatcaggtttt

SEQ ID NO: 353816 - DNA, 25 bp, Homo sapien
gagtagcaggtggtactttaccacc

SEQ ID NO: 353817 - DNA, 25 bp, Homo sapien
tctgagtagcaggtggtactttacc

SEQ ID NO: 353818 - DNA, 25 bp, Homo sapien
gtagcaggtggtactttaccaccca

SEQ ID NO: 353819 - DNA, 25 bp, Homo sapien
ctttctgagtagcaggtggtacttt

SEQ ID NO: 353820 - DNA, 25 bp, Homo sapien
cacagtacccttaatatggaatagc

SEQ ID NO: 353821 - DNA, 25 bp, Homo sapien
ccattctgataggtgcctactggca

SEQ ID NO: 353822 - DNA, 25 bp, Homo sapien
cacgccttggccaatgcttagctat

SEQ ID NO: 353823 - DNA, 25 bp, Homo sapien
tcataagggtatgtgcaggctgaat

SEQ ID NO: 353824 - DNA, 25 bp, Homo sapien
taaatccaatcctaagggaaggcca

SEQ ID NO: 353825 - DNA, 25 bp, Homo sapien
gagactacgtgacatggcaactaaa

SEQ ID NO: 353826 - DNA, 25 bp, Homo sapien
taccatacctgcaatttttctgagc

SEQ ID NO: 353827 - DNA, 25 bp, Homo sapien
tttagagtgacatccagacatagta

SEQ ID NO: 353828 - DNA, 25 bp, Homo sapien
tagcatcaggcctaggaagacgtct

SEQ ID NO: 353829 - DNA, 25 bp, Homo sapien
gagtaaccctaacagtagcatcagg

SEQ ID NO: 353830 - DNA, 25 bp, Homo sapien
gaataaagtccctacatatgccatg

SEQ ID NO: 353831 - DNA, 25 bp, Homo sapien
tgacacaaacgcaaaggcctcagag

SEQ ID NO: 353832 - DNA, 25 bp, Homo sapien
tcaattaactccttgcacgtagcga

SEQ ID NO: 353833 - DNA, 25 bp, Homo sapien
ttaactccttgcacgtagcgaagta

SEQ ID NO: 353834 - DNA, 25 bp, Homo sapien
aactccttgcacgtagcgaagtact

SEQ ID NO: 353835 - DNA, 25 bp, Homo sapien
aattaactccttgcacgtagcgaag

SEQ ID NO: 353836 - DNA, 25 bp, Homo sapien
tttttctcagacgtgtttggagtga

SEQ ID NO: 353837 - DNA, 25 bp, Homo sapien
tttctcagacgtgtttggagtgata

SEQ ID NO: 353838 - DNA, 25 bp, Homo sapien
gattatatcctggaaacatgccagg

SEQ ID NO: 353839 - DNA, 25 bp, Homo sapien
ttttctcagacgtgtttggagtgat

SEQ ID NO: 353840 - DNA, 25 bp, Homo sapien
cggtgtgcagaacgctcggatcctg

SEQ ID NO: 353841 - DNA, 25 bp, Homo sapien
atttcctcggtgtgcagaacgctcg

SEQ ID NO: 353842 - DNA, 25 bp, Homo sapien
ggcccgaagctcgttcactttgcgg

SEQ ID NO: 353843 - DNA, 25 bp, Homo sapien
tcctcggtgtgcagaacgctcggat

SEQ ID NO: 353844 - DNA, 25 bp, Homo sapien
ggcgtgaccgcgcagaagggggcgg

SEQ ID NO: 353845 - DNA, 25 bp, Homo sapien
tcggcgtgaccgcgcagaagggggc

SEQ ID NO: 353846 - DNA, 25 bp, Homo sapien
ctggctcggcgtgaccgcgcagaag

SEQ ID NO: 353847 - DNA, 25 bp, Homo sapien
ggctcggcgtgaccgcgcagaaggg

SEQ ID NO: 353848 - DNA, 25 bp, Homo sapien
tctcatattcttaactaggaaccag

SEQ ID NO: 353849 - DNA, 25 bp, Homo sapien
tgttcgtgctgttgcctgcctccct

SEQ ID NO: 353850 - DNA, 25 bp, Homo sapien
tccctagaatcttctagaagcgtgg

SEQ ID NO: 353851 - DNA, 25 bp, Homo sapien
tattcttaactaggaaccagctccc

SEQ ID NO: 353852 - DNA, 25 bp, Homo sapien
gaacaatgtgtgaaccagaacgtat

SEQ ID NO: 353853 - DNA, 25 bp, Homo sapien
tatggtatttgacatcaaagctatg

SEQ ID NO: 353854 - DNA, 25 bp, Homo sapien
gtttatgttgatatacttgaattca

SEQ ID NO: 353855 - DNA, 25 bp, Homo sapien
tgtcttggcatatgtttatgttgat

SEQ ID NO: 353856 - DNA, 25 bp, Homo sapien
tacccggactgtcgtgaaattctga

SEQ ID NO: 353857 - DNA, 25 bp, Homo sapien
gagtgattcactgatggcctaccat

SEQ ID NO: 353858 - DNA, 25 bp, Homo sapien
tgaggaattcaggataagactggcc

SEQ ID NO: 353859 - DNA, 25 bp, Homo sapien
gcagtctttctaccagcttcccgag

SEQ ID NO: 353860 - DNA, 25 bp, Homo sapien
cttttgcacctctttacgcttcttt

SEQ ID NO: 353861 - DNA, 25 bp, Homo sapien
tcttttgcacctctttacgcttctt

SEQ ID NO: 353862 - DNA, 25 bp, Homo sapien
accctctttgactcctgctgagaaa

SEQ ID NO: 353863 - DNA, 25 bp, Homo sapien
caccctctttgactcctgctgagaa

SEQ ID NO: 353864 - DNA, 25 bp, Homo sapien
cctgctgagaaaatagggggatctc

SEQ ID NO: 353865 - DNA, 25 bp, Homo sapien
aatagggggatctctgttgctggta

SEQ ID NO: 353866 - DNA, 25 bp, Homo sapien
cattgtccacgaaagtatattgaga

SEQ ID NO: 353867 - DNA, 25 bp, Homo sapien
cagatatgtagttgtccatcccact

SEQ ID NO: 353868 - DNA, 25 bp, Homo sapien
agaaagaagtaaggccttcatgccc

SEQ ID NO: 353869 - DNA, 25 bp, Homo sapien
catcccactattatcaaaagccagg

SEQ ID NO: 353870 - DNA, 25 bp, Homo sapien
cttatggaatgtgaagccgtactca

SEQ ID NO: 353871 - DNA, 25 bp, Homo sapien
gataatacctcgtatgcctcagcta

SEQ ID NO: 353872 - DNA, 25 bp, Homo sapien
tcctcaagcgagtcttcaaagaagt

SEQ ID NO: 353873 - DNA, 25 bp, Homo sapien
ttatcagggtgccatttaagtgcca

SEQ ID NO: 353874 - DNA, 25 bp, Homo sapien
ctagaacttcatagtaatccaccat

SEQ ID NO: 353875 - DNA, 25 bp, Homo sapien
gtattgagaaccgtggtttcctcag

SEQ ID NO: 353876 - DNA, 25 bp, Homo sapien
tggtgatagaggtagtgactgcaaa

SEQ ID NO: 353877 - DNA, 25 bp, Homo sapien
tttaacagatagttggaagtgggtg

SEQ ID NO: 353878 - DNA, 25 bp, Homo sapien
tgggtgtgctgggtattgagaaccg

SEQ ID NO: 353879 - DNA, 25 bp, Homo sapien
gcaagtccattagtgacagcccaag

SEQ ID NO: 353880 - DNA, 25 bp, Homo sapien
tctgtgaaccagtccaattgcctgg

SEQ ID NO: 353881 - DNA, 25 bp, Homo sapien
gaattgccctcagttctagaacagt

SEQ ID NO: 353882 - DNA, 25 bp, Homo sapien
cctaggaggaaaagactacttgctc

SEQ ID NO: 353883 - DNA, 25 bp, Homo sapien
tgaggcagagttttgatctgtcgcc

SEQ ID NO: 353884 - DNA, 25 bp, Homo sapien
agacgcccaccagcacgcccggctt

SEQ ID NO: 353885 - DNA, 25 bp, Homo sapien
acgcccaccagcacgcccggcttat

SEQ ID NO: 353886 - DNA, 25 bp, Homo sapien
aggcagagttttgatctgtcgccca

SEQ ID NO: 353887 - DNA, 25 bp, Homo sapien
tgcacgtgtgctttctgagtgtctc

SEQ ID NO: 353888 - DNA, 25 bp, Homo sapien
cattgaacagatatgcagccaggct

SEQ ID NO: 353889 - DNA, 25 bp, Homo sapien
tcaaaatgggtgtcttctggcagcc

SEQ ID NO: 353890 - DNA, 25 bp, Homo sapien
taatatatgcattccatttgggagc

SEQ ID NO: 353891 - DNA, 25 bp, Homo sapien
tgtgctgcgcaggagcagatcctct

SEQ ID NO: 353892 - DNA, 25 bp, Homo sapien
tctttgatactagcactgggagtgc

SEQ ID NO: 353893 - DNA, 25 bp, Homo sapien
tacccttttagctgttgtgctgcgc

SEQ ID NO: 353894 - DNA, 25 bp, Homo sapien
tagtagcgcccagttttcagagaag

SEQ ID NO: 353895 - DNA, 25 bp, Homo sapien
caggcagtgacttcctcaagagaca

SEQ ID NO: 353896 - DNA, 25 bp, Homo sapien
tcttatcagggaaacccagggtaca

SEQ ID NO: 353897 - DNA, 25 bp, Homo sapien
gatgaacagggctagattaccacag

SEQ ID NO: 353898 - DNA, 25 bp, Homo sapien
ctgcgcccggtgtaagagtcatatt

SEQ ID NO: 353899 - DNA, 25 bp, Homo sapien
tatttacagggtaaataatgatgtt

SEQ ID NO: 353900 - DNA, 25 bp, Homo sapien
tacgtatttacagggtaaataatga

SEQ ID NO: 353901 - DNA, 25 bp, Homo sapien
cgtatttacagggtaaataatgatg

SEQ ID NO: 353902 - DNA, 25 bp, Homo sapien
gtatttacagggtaaataatgatgt

SEQ ID NO: 353903 - DNA, 25 bp, Homo sapien
tcaccataattaggaaacagactgt

SEQ ID NO: 353904 - DNA, 25 bp, Homo sapien
ccctgaattgaagatacatggttag

SEQ ID NO: 353905 - DNA, 25 bp, Homo sapien
taacaataccacctaaatgaaggaa

SEQ ID NO: 353906 - DNA, 25 bp, Homo sapien
gcccagccgagcctttagttctaag

SEQ ID NO: 353907 - DNA, 25 bp, Homo sapien
tagttacgtcattgcccatcaaggg

SEQ ID NO: 353908 - DNA, 25 bp, Homo sapien
tccagcggtgacctcggagtccttt

SEQ ID NO: 353909 - DNA, 25 bp, Homo sapien
tatccacgttaggaaaatgcttctg

SEQ ID NO: 353910 - DNA, 25 bp, Homo sapien
gacccactggaatcaaggcttcttg

SEQ ID NO: 353911 - DNA, 25 bp, Homo sapien
gtcagggcctgtaggcacacaacaa

SEQ ID NO: 353912 - DNA, 25 bp, Homo sapien
ttacaatgggtttctagtattcctg

SEQ ID NO: 353913 - DNA, 25 bp, Homo sapien
tcttttcccggatctgttgttgctg

SEQ ID NO: 353914 - DNA, 25 bp, Homo sapien
tcttgtagccctttaaggtctcaca

SEQ ID NO: 353915 - DNA, 25 bp, Homo sapien
ttcccaaacagctggtattatagac

SEQ ID NO: 353916 - DNA, 25 bp, Homo sapien
ttcatccgggaactaaaatgatttg

SEQ ID NO: 353917 - DNA, 25 bp, Homo sapien
tgaggattttgtatgttaggcccaa

SEQ ID NO: 353918 - DNA, 25 bp, Homo sapien
gatttcctgtccttacagtagaagg

SEQ ID NO: 353919 - DNA, 25 bp, Homo sapien
gacaagaatgttgatcacaccagga

SEQ ID NO: 353920 - DNA, 25 bp, Homo sapien
ctaaaattgtcttgtcagggcctcc

SEQ ID NO: 353921 - DNA, 25 bp, Homo sapien
gcatttaacgtctccaatcctgggt

SEQ ID NO: 353922 - DNA, 25 bp, Homo sapien
tggccttccaagagtgtgacagctg

SEQ ID NO: 353923 - DNA, 25 bp, Homo sapien
gcatgacacagggataagagattct

SEQ ID NO: 353924 - DNA, 25 bp, Homo sapien
tgttgggaccctttggccaggctca

SEQ ID NO: 353925 - DNA, 25 bp, Homo sapien
tacaaaccagctccatgaattaggc

SEQ ID NO: 353926 - DNA, 25 bp, Homo sapien
gattctctgagagagcctgccgtag

SEQ ID NO: 353927 - DNA, 25 bp, Homo sapien
aggaagtatattgggctctttgccc

SEQ ID NO: 353928 - DNA, 25 bp, Homo sapien
tgccactaccctgtgggacctgttg

SEQ ID NO: 353929 - DNA, 25 bp, Homo sapien
gctttgttggaaatacccttgcatc

SEQ ID NO: 353930 - DNA, 25 bp, Homo sapien
gacctgttgtcgctcgatggctgag

SEQ ID NO: 353931 - DNA, 25 bp, Homo sapien
tcgctggctcaaaacacgacaggtg

SEQ ID NO: 353932 - DNA, 25 bp, Homo sapien
gaaatttcttggagggctatagagg

SEQ ID NO: 353933 - DNA, 25 bp, Homo sapien
ggaaatttcttggagggctatagag

SEQ ID NO: 353934 - DNA, 25 bp, Homo sapien
aaatttcttggagggctatagaggt

SEQ ID NO: 353935 - DNA, 25 bp, Homo sapien
gagactggaatgtcgctcagtaggc

SEQ ID NO: 353936 - DNA, 25 bp, Homo sapien
atgtcgctcagtaggccgcaggcct

SEQ ID NO: 353937 - DNA, 25 bp, Homo sapien
tccctgtctgcgcaatctggcctgg

SEQ ID NO: 353938 - DNA, 25 bp, Homo sapien
tggaatgtcgctcagtaggccgcag

SEQ ID NO: 353939 - DNA, 25 bp, Homo sapien
ctgcagaagtgtccgctgcttctca

SEQ ID NO: 353940 - DNA, 25 bp, Homo sapien
gtccgctgcttctcagcacccacag

SEQ ID NO: 353941 - DNA, 25 bp, Homo sapien
cagaagtgtccgctgcttctcagca

SEQ ID NO: 353942 - DNA, 25 bp, Homo sapien
gaagtgtccgctgcttctcagcacc

SEQ ID NO: 353943 - DNA, 25 bp, Homo sapien
cagctttcgaagagccaagtaaaaa

SEQ ID NO: 353944 - DNA, 25 bp, Homo sapien
caagtttgttgaccaagagccagct

SEQ ID NO: 353945 - DNA, 25 bp, Homo sapien
caagagccagctttcgaagagccaa

SEQ ID NO: 353946 - DNA, 25 bp, Homo sapien
gaggacaagtttgttgaccaagagc

SEQ ID NO: 353947 - DNA, 25 bp, Homo sapien
gacttgggaaatccagttgccttaa

SEQ ID NO: 353948 - DNA, 25 bp, Homo sapien
cccgtgcttgtcagaccagatttcc

SEQ ID NO: 353949 - DNA, 25 bp, Homo sapien
taatttcagacgagaatcccgtgct

SEQ ID NO: 353950 - DNA, 25 bp, Homo sapien
tccagggctgggctaatttcagacg

SEQ ID NO: 353951 - DNA, 25 bp, Homo sapien
ttctctgggccactcttcttgtacc

SEQ ID NO: 353952 - DNA, 25 bp, Homo sapien
actcttcttgtaccaggtggagaac

SEQ ID NO: 353953 - DNA, 25 bp, Homo sapien
gggccactcttcttgtaccaggtgg

SEQ ID NO: 353954 - DNA, 25 bp, Homo sapien
ctctgggccactcttcttgtaccag

SEQ ID NO: 353955 - DNA, 25 bp, Homo sapien
cctgcagcatcctgcacctcaccag

SEQ ID NO: 353956 - DNA, 25 bp, Homo sapien
ctgcagcatcctgcacctcaccagg

SEQ ID NO: 353957 - DNA, 25 bp, Homo sapien
cagggccaagctgacctcgcaaagg

SEQ ID NO: 353958 - DNA, 25 bp, Homo sapien
tcagggccaagctgacctcgcaaag

SEQ ID NO: 353959 - DNA, 25 bp, Homo sapien
ctcagggccaagctgacctcgcaaa

SEQ ID NO: 353960 - DNA, 25 bp, Homo sapien
gcaggacactgtctttcagaggcat

SEQ ID NO: 353961 - DNA, 25 bp, Homo sapien
tttgcaggacactgtctttcagagg

SEQ ID NO: 353962 - DNA, 25 bp, Homo sapien
tgcaggacactgtctttcagaggca

SEQ ID NO: 353963 - DNA, 25 bp, Homo sapien
cttttgcaggacactgtctttcaga

SEQ ID NO: 353964 - DNA, 25 bp, Homo sapien
caccacgtccggctggttactacta

SEQ ID NO: 353965 - DNA, 25 bp, Homo sapien
gtttaaccctccaacagcagagacc

SEQ ID NO: 353966 - DNA, 25 bp, Homo sapien
ggctggttactactattcctgagtg

SEQ ID NO: 353967 - DNA, 25 bp, Homo sapien
tattcctgagtgtttaaccctccaa

SEQ ID NO: 353968 - DNA, 25 bp, Homo sapien
aaaaggcagggtattgccatgttgc

SEQ ID NO: 353969 - DNA, 25 bp, Homo sapien
agtgccgtggctggctgttcacagg

SEQ ID NO: 353970 - DNA, 25 bp, Homo sapien
ggagtgccgtggctggctgttcaca

SEQ ID NO: 353971 - DNA, 25 bp, Homo sapien
ctggagtgccgtggctggctgttca

SEQ ID NO: 353972 - DNA, 25 bp, Homo sapien
caggcactgcaatcccaagacaatc

SEQ ID NO: 353973 - DNA, 25 bp, Homo sapien
tataacaatataccacgctcgtgct

SEQ ID NO: 353974 - DNA, 25 bp, Homo sapien
tgttctaagaggcccagtggatgcc

SEQ ID NO: 353975 - DNA, 25 bp, Homo sapien
accgaataaggataacttggacaca

SEQ ID NO: 353976 - DNA, 25 bp, Homo sapien
ggtcgtataccaaatgtagtgacac

SEQ ID NO: 353977 - DNA, 25 bp, Homo sapien
cactgggaggtcgtataccaaatgt

SEQ ID NO: 353978 - DNA, 25 bp, Homo sapien
gggaggtcgtataccaaatgtagtg

SEQ ID NO: 353979 - DNA, 25 bp, Homo sapien
tagcactgggaggtcgtataccaaa

SEQ ID NO: 353980 - DNA, 25 bp, Homo sapien
cctgtgtggactagggaaaggaccg

SEQ ID NO: 353981 - DNA, 25 bp, Homo sapien
ttatttaacttggtctcaagtcagt

SEQ ID NO: 353982 - DNA, 25 bp, Homo sapien
ttttatttaacttggtctcaagtca

SEQ ID NO: 353983 - DNA, 25 bp, Homo sapien
ctgtgtggactagggaaaggaccgg

SEQ ID NO: 353984 - DNA, 25 bp, Homo sapien
gaggggccggactggtcatacttct

SEQ ID NO: 353985 - DNA, 25 bp, Homo sapien
gccggactggtcatacttctgcttg

SEQ ID NO: 353986 - DNA, 25 bp, Homo sapien
ccggactggtcatacttctgcttgc

SEQ ID NO: 353987 - DNA, 25 bp, Homo sapien
gggccggactggtcatacttctgct

SEQ ID NO: 353988 - DNA, 25 bp, Homo sapien
tgctagggcggtgatcttcttctgc

SEQ ID NO: 353989 - DNA, 25 bp, Homo sapien
ggtgctagggcggtgatcttcttct

SEQ ID NO: 353990 - DNA, 25 bp, Homo sapien
gatcttcatcatgctgggtgctagg

SEQ ID NO: 353991 - DNA, 25 bp, Homo sapien
cttcatcatgctgggtgctagggcg

SEQ ID NO: 353992 - DNA, 25 bp, Homo sapien
atgatgtagttgaaggtagttttgt

SEQ ID NO: 353993 - DNA, 25 bp, Homo sapien
tctttgcagatgtccacgtcacact

SEQ ID NO: 353994 - DNA, 25 bp, Homo sapien
tcatgatgtagttgaaggtagtttt

SEQ ID NO: 353995 - DNA, 25 bp, Homo sapien
gtgttggtgtacaggtctttgcaga

SEQ ID NO: 353996 - DNA, 25 bp, Homo sapien
ggctggaagagcgcctcggggcagt

SEQ ID NO: 353997 - DNA, 25 bp, Homo sapien
ggaagagcgcctcggggcagtggaa

SEQ ID NO: 353998 - DNA, 25 bp, Homo sapien
ctggaagagcgcctcggggcagtgg

SEQ ID NO: 353999 - DNA, 25 bp, Homo sapien
aaggctggaagagcgcctcggggca

SEQ ID NO: 354000 - DNA, 25 bp, Homo sapien
gggcgacgtagcacagcttcttgat

SEQ ID NO: 354001 - DNA, 25 bp, Homo sapien
gcttcttgatgtcacgcacgatttc

SEQ ID NO: 354002 - DNA, 25 bp, Homo sapien
tggaggccaccatggccatctcccg

SEQ ID NO: 354003 - DNA, 25 bp, Homo sapien
tggccatcgagcagcttgtagctct

SEQ ID NO: 354004 - DNA, 25 bp, Homo sapien
gtagccgtgctcagtgaggatctcc

SEQ ID NO: 354005 - DNA, 25 bp, Homo sapien
tagccgtgctcagtgaggatctcca

SEQ ID NO: 354006 - DNA, 25 bp, Homo sapien
tgtagccgtgctcagtgaggatctc

SEQ ID NO: 354007 - DNA, 25 bp, Homo sapien
agccgtgctcagtgaggatctccat

SEQ ID NO: 354008 - DNA, 25 bp, Homo sapien
ggacggaggcgtacagggacagcat

SEQ ID NO: 354009 - DNA, 25 bp, Homo sapien
gacagcatggcctggatggccacat

SEQ ID NO: 354010 - DNA, 25 bp, Homo sapien
cagcatggcctggatggccacatac

SEQ ID NO: 354011 - DNA, 25 bp, Homo sapien
gcatggcctggatggccacatacat

SEQ ID NO: 354012 - DNA, 25 bp, Homo sapien
ggtcatcttctcacagttggctttg

SEQ ID NO: 354013 - DNA, 25 bp, Homo sapien
tcttctcacagttggctttggggtt

SEQ ID NO: 354014 - DNA, 25 bp, Homo sapien
cttctcacagttggctttggggttc

SEQ ID NO: 354015 - DNA, 25 bp, Homo sapien
tctgggtcatcttctcacagttggc

SEQ ID NO: 354016 - DNA, 25 bp, Homo sapien
tagaagatgtggtgccgtatcttct

SEQ ID NO: 354017 - DNA, 25 bp, Homo sapien
tgtgtagaagatgtggtgccgtatc

SEQ ID NO: 354018 - DNA, 25 bp, Homo sapien
tgtagaagatgtggtgccgtatctt

SEQ ID NO: 354019 - DNA, 25 bp, Homo sapien
cttgtgtagaagatgtggtgccgta

SEQ ID NO: 354020 - DNA, 25 bp, Homo sapien
ctctgggcctcgttgcccacatagg

SEQ ID NO: 354021 - DNA, 25 bp, Homo sapien
gcctcgttgcccacataggagtcct

SEQ ID NO: 354022 - DNA, 25 bp, Homo sapien
ctgggcctcgttgcccacataggag

SEQ ID NO: 354023 - DNA, 25 bp, Homo sapien
ttgctctgggcctcgttgcccacat

SEQ ID NO: 354024 - DNA, 25 bp, Homo sapien
acaacgagcgcagcaatatcatcat

SEQ ID NO: 354025 - DNA, 25 bp, Homo sapien
tgtcaacaacgagcgcagcaatatc

SEQ ID NO: 354026 - DNA, 25 bp, Homo sapien
ccagagctgttgtcaacaacgagcg

SEQ ID NO: 354027 - DNA, 25 bp, Homo sapien
aggggacatcgtcacccgcgaagcc

SEQ ID NO: 354028 - DNA, 25 bp, Homo sapien
gatagcaggaccatgtgaagagtac

SEQ ID NO: 354029 - DNA, 25 bp, Homo sapien
ccattgtaagagtaggagtgtccaa

SEQ ID NO: 354030 - DNA, 25 bp, Homo sapien
tttcaaaattcaacagctgtcagca

SEQ ID NO: 354031 - DNA, 25 bp, Homo sapien
tggagtattagagatcttgcctgtc

SEQ ID NO: 354032 - DNA, 25 bp, Homo sapien
tgagacccaagcttcaggccatgct

SEQ ID NO: 354033 - DNA, 25 bp, Homo sapien
caccaccccccaagatgtagtcttg

SEQ ID NO: 354034 - DNA, 25 bp, Homo sapien
tctgagacccaagcttcaggccatg

SEQ ID NO: 354035 - DNA, 25 bp, Homo sapien
gcttctgagacccaagcttcaggcc

SEQ ID NO: 354036 - DNA, 25 bp, Homo sapien
cacatccggcctatatccagctaat

SEQ ID NO: 354037 - DNA, 25 bp, Homo sapien
ttgtagagaggtggtctttctcccc

SEQ ID NO: 354038 - DNA, 25 bp, Homo sapien
gagaggtggtctttctcccctcggc

SEQ ID NO: 354039 - DNA, 25 bp, Homo sapien
gagctaccacatccggcctatatcc

SEQ ID NO: 354040 - DNA, 25 bp, Homo sapien
tctttatcctttgttactatggcga

SEQ ID NO: 354041 - DNA, 25 bp, Homo sapien
cctttgttactatggcgaatgacag

SEQ ID NO: 354042 - DNA, 25 bp, Homo sapien
ctttatcctttgttactatggcgaa

SEQ ID NO: 354043 - DNA, 25 bp, Homo sapien
tatcctttgttactatggcgaatga

SEQ ID NO: 354044 - DNA, 25 bp, Homo sapien
taccaggcttaaacagtcttctcgc

SEQ ID NO: 354045 - DNA, 25 bp, Homo sapien
caacctaccaggcttaaacagtctt

SEQ ID NO: 354046 - DNA, 25 bp, Homo sapien
aggcttaaacagtcttctcgcctca

SEQ ID NO: 354047 - DNA, 25 bp, Homo sapien
acctaccaggcttaaacagtcttct

SEQ ID NO: 354048 - DNA, 25 bp, Homo sapien
tgacctcaagaaaccctcctgcctt

SEQ ID NO: 354049 - DNA, 25 bp, Homo sapien
gctgttgtcaaactcctgacctcaa

SEQ ID NO: 354050 - DNA, 25 bp, Homo sapien
caccatgttccccaggctgttgtca

SEQ ID NO: 354051 - DNA, 25 bp, Homo sapien
cactgcgcccggctgttttttgggg

SEQ ID NO: 354052 - DNA, 25 bp, Homo sapien
tacattcgtatctgcatcatatggg

SEQ ID NO: 354053 - DNA, 25 bp, Homo sapien
gagctgcctcatggagcaataatag

SEQ ID NO: 354054 - DNA, 25 bp, Homo sapien
tcaagatgttcctttaaataattca

SEQ ID NO: 354055 - DNA, 25 bp, Homo sapien
tgggcagtaggattgcggttttatt

SEQ ID NO: 354056 - DNA, 25 bp, Homo sapien
ggacatctccttagaagagcagcag

SEQ ID NO: 354057 - DNA, 25 bp, Homo sapien
aaatgttgagcatttcctctctcag

SEQ ID NO: 354058 - DNA, 25 bp, Homo sapien
gcttgaatgtacagcccttgatgga

SEQ ID NO: 354059 - DNA, 25 bp, Homo sapien
aggtcttcctctcctatgcctgagg

SEQ ID NO: 354060 - DNA, 25 bp, Homo sapien
tgagttaagtcattcccctcatttc

SEQ ID NO: 354061 - DNA, 25 bp, Homo sapien
tcagggttccctgtgttagtacacc

SEQ ID NO: 354062 - DNA, 25 bp, Homo sapien
taaatagccttgactaaaatgcagg

SEQ ID NO: 354063 - DNA, 25 bp, Homo sapien
cctgctgtgtgctaagtatccacat

SEQ ID NO: 354064 - DNA, 25 bp, Homo sapien
agcatcttcgtagtctggtttcccc

SEQ ID NO: 354065 - DNA, 25 bp, Homo sapien
tatgagtgacaagcatcttcgtagt

SEQ ID NO: 354066 - DNA, 25 bp, Homo sapien
accccccagaggtgaaaattatctg

SEQ ID NO: 354067 - DNA, 25 bp, Homo sapien
agctaaatatgagtgacaagcatct

SEQ ID NO: 354068 - DNA, 25 bp, Homo sapien
gtgcctggtcccatggactcttatt

SEQ ID NO: 354069 - DNA, 25 bp, Homo sapien
agctgggataactacattcatgtgc

SEQ ID NO: 354070 - DNA, 25 bp, Homo sapien
tagctgggataactacattcatgtg

SEQ ID NO: 354071 - DNA, 25 bp, Homo sapien
gctgggataactacattcatgtgcc

SEQ ID NO: 354072 - DNA, 25 bp, Homo sapien
gtagctgggataactacattcatgt

SEQ ID NO: 354073 - DNA, 25 bp, Homo sapien
tctcgctgtcgcccatagtggcgca

SEQ ID NO: 354074 - DNA, 25 bp, Homo sapien
tcgctgtcgcccatagtggcgcagt

SEQ ID NO: 354075 - DNA, 25 bp, Homo sapien
gctgtcgcccatagtggcgcagtct

SEQ ID NO: 354076 - DNA, 25 bp, Homo sapien
tgtcgcccatagtggcgcagtctca

SEQ ID NO: 354077 - DNA, 25 bp, Homo sapien
tccctgaagggttcacggcggagtc

SEQ ID NO: 354078 - DNA, 25 bp, Homo sapien
gatgagcttcacaaataacgatgtg

SEQ ID NO: 354079 - DNA, 25 bp, Homo sapien
gccaggcactgctagttactacaaa

SEQ ID NO: 354080 - DNA, 25 bp, Homo sapien
taataaaaacgtatagggatcacca

SEQ ID NO: 354081 - DNA, 25 bp, Homo sapien
ttcttccgtcctaaatgcttgagga

SEQ ID NO: 354082 - DNA, 25 bp, Homo sapien
gtgttcatttcttccgtcctaaatg

SEQ ID NO: 354083 - DNA, 25 bp, Homo sapien
gaggactgcagtctatcatgaaatc

SEQ ID NO: 354084 - DNA, 25 bp, Homo sapien
tcctaaatgcttgaggactgcagtc

SEQ ID NO: 354085 - DNA, 25 bp, Homo sapien
tgaggagggcatgcttcataccaca

SEQ ID NO: 354086 - DNA, 25 bp, Homo sapien
aaatattgactttaggccaggcctt

SEQ ID NO: 354087 - DNA, 25 bp, Homo sapien
aagaagttttcctaagcagcccagc

SEQ ID NO: 354088 - DNA, 25 bp, Homo sapien
catggcatgcatgatggtgctacca

SEQ ID NO: 354089 - DNA, 25 bp, Homo sapien
cattttactatctcggttctcagac

SEQ ID NO: 354090 - DNA, 25 bp, Homo sapien
tcctctcagggtttgtccaatggta

SEQ ID NO: 354091 - DNA, 25 bp, Homo sapien
tctcgattgttcagtcagactcctc

SEQ ID NO: 354092 - DNA, 25 bp, Homo sapien
attgataacgaaagccaggagaatt

SEQ ID NO: 354093 - DNA, 25 bp, Homo sapien
gaggcgtatggtggtgaaactaact

SEQ ID NO: 354094 - DNA, 25 bp, Homo sapien
tagtcagtctcaagagaccaaagag

SEQ ID NO: 354095 - DNA, 25 bp, Homo sapien
gagaccaaagaggtaaagcaggaaa

SEQ ID NO: 354096 - DNA, 25 bp, Homo sapien
cattcgccagtctcattggtgctca

SEQ ID NO: 354097 - DNA, 25 bp, Homo sapien
ctctgggtgcaaagatgttcattct

SEQ ID NO: 354098 - DNA, 25 bp, Homo sapien
tattctgtaagtctgagcgtaaaac

SEQ ID NO: 354099 - DNA, 25 bp, Homo sapien
ttttaacatgcaaaatgtccctggg

SEQ ID NO: 354100 - DNA, 25 bp, Homo sapien
taagaaacgattccggtgggatgat

SEQ ID NO: 354101 - DNA, 25 bp, Homo sapien
tggcctgttggactccaaagccatt

SEQ ID NO: 354102 - DNA, 25 bp, Homo sapien
ctgagatggatgaatcacgtgaggt

SEQ ID NO: 354103 - DNA, 25 bp, Homo sapien
tggatcatagaccaaaacataaaca

SEQ ID NO: 354104 - DNA, 25 bp, Homo sapien
tgtttataaggttgccaaaataatc

SEQ ID NO: 354105 - DNA, 25 bp, Homo sapien
ggttgccaaaataatccaatggaga

SEQ ID NO: 354106 - DNA, 25 bp, Homo sapien
ctcatcagttttccattggtctaca

SEQ ID NO: 354107 - DNA, 25 bp, Homo sapien
catcagttttccattggtctacaga

SEQ ID NO: 354108 - DNA, 25 bp, Homo sapien
gatggagtctcatcagttttccatt

SEQ ID NO: 354109 - DNA, 25 bp, Homo sapien
tggagtctcatcagttttccattgg

SEQ ID NO: 354110 - DNA, 25 bp, Homo sapien
tgagacatgaaccttctcacatcct

SEQ ID NO: 354111 - DNA, 25 bp, Homo sapien
tggcacaggtcccttgcacatgtgt

SEQ ID NO: 354112 - DNA, 25 bp, Homo sapien
gaggcctgttcgtgacatgagcttg

SEQ ID NO: 354113 - DNA, 25 bp, Homo sapien
ccattctgccttggatgcctttgct

SEQ ID NO: 354114 - DNA, 25 bp, Homo sapien
gatggtgccttttggcataataatg

SEQ ID NO: 354115 - DNA, 25 bp, Homo sapien
ccttttggcataataatgttttcca

SEQ ID NO: 354116 - DNA, 25 bp, Homo sapien
tgccttttggcataataatgttttc

SEQ ID NO: 354117 - DNA, 25 bp, Homo sapien
gagatggtgccttttggcataataa

SEQ ID NO: 354118 - DNA, 25 bp, Homo sapien
atattccttccaataatttgttagg

SEQ ID NO: 354119 - DNA, 25 bp, Homo sapien
gcttaataatggcagttgccctgcc

SEQ ID NO: 354120 - DNA, 25 bp, Homo sapien
ccgagtgcttaataatggcagttgc

SEQ ID NO: 354121 - DNA, 25 bp, Homo sapien
cgggcggccgagtgcttaataatgg

SEQ ID NO: 354122 - DNA, 25 bp, Homo sapien
taataatggcagttgccctgccagc

SEQ ID NO: 354123 - DNA, 25 bp, Homo sapien
tgggcacggtcctcgctgctcggcc

SEQ ID NO: 354124 - DNA, 25 bp, Homo sapien
aatccagcccggacactctgagggc

SEQ ID NO: 354125 - DNA, 25 bp, Homo sapien
ggtcctcgctgctcggccgagtgca

SEQ ID NO: 354126 - DNA, 25 bp, Homo sapien
gcaatccagcccggacactctgagg

SEQ ID NO: 354127 - DNA, 25 bp, Homo sapien
cccgctgtccagcagtcccggctgg

SEQ ID NO: 354128 - DNA, 25 bp, Homo sapien
ctggcactggtaggacgcccgcagc

SEQ ID NO: 354129 - DNA, 25 bp, Homo sapien
acagccgtcactgaccgctcgctcg

SEQ ID NO: 354130 - DNA, 25 bp, Homo sapien
ccagctcagtggtccagaggctcgg

SEQ ID NO: 354131 - DNA, 25 bp, Homo sapien
cagagcacaggggcacgcggtacat

SEQ ID NO: 354132 - DNA, 25 bp, Homo sapien
agtgcgcagagcacaggggcacgcg

SEQ ID NO: 354133 - DNA, 25 bp, Homo sapien
tgcgcagagcacaggggcacgcggt

SEQ ID NO: 354134 - DNA, 25 bp, Homo sapien
cgcagagcacaggggcacgcggtac

SEQ ID NO: 354135 - DNA, 25 bp, Homo sapien
tgaatctagcgctgtagtacacacc

SEQ ID NO: 354136 - DNA, 25 bp, Homo sapien
tgagaaagttgaagcccacagaagt

SEQ ID NO: 354137 - DNA, 25 bp, Homo sapien
cctctttggagcagtctaggtccca

SEQ ID NO: 354138 - DNA, 25 bp, Homo sapien
gcccaaggccctatagctagttagg

SEQ ID NO: 354139 - DNA, 25 bp, Homo sapien
catttgtaaatccacagaggagcct

SEQ ID NO: 354140 - DNA, 25 bp, Homo sapien
ccggagttataacagcagtgtgggc

SEQ ID NO: 354141 - DNA, 25 bp, Homo sapien
cctatctggaggagtcaagtgaagc

SEQ ID NO: 354142 - DNA, 25 bp, Homo sapien
gaggagcctggtgaattcctaacac

SEQ ID NO: 354143 - DNA, 25 bp, Homo sapien
tcttctcactttcctctgacaaact

SEQ ID NO: 354144 - DNA, 25 bp, Homo sapien
gacaggagctaccatgcctagtttc

SEQ ID NO: 354145 - DNA, 25 bp, Homo sapien
taccatgcctagtttcttctcactt

SEQ ID NO: 354146 - DNA, 25 bp, Homo sapien
ttcctctgacaaacttttcaacact

SEQ ID NO: 354147 - DNA, 25 bp, Homo sapien
ttgacatctgtagccaagggaggcc

SEQ ID NO: 354148 - DNA, 25 bp, Homo sapien
tgggaccagcatctgcaacactgct

SEQ ID NO: 354149 - DNA, 25 bp, Homo sapien
ccaggttttgaagggcccatcactt

SEQ ID NO: 354150 - DNA, 25 bp, Homo sapien
tataggttcctgaagctacgctcca

SEQ ID NO: 354151 - DNA, 25 bp, Homo sapien
tgcttggcttcactcccggtctgaa

SEQ ID NO: 354152 - DNA, 25 bp, Homo sapien
gagacggatggcgttaccactcgct

SEQ ID NO: 354153 - DNA, 25 bp, Homo sapien
catgatggaacttggtgctagctga

SEQ ID NO: 354154 - DNA, 25 bp, Homo sapien
tgtttcaagcacgtgagtgccctgg

SEQ ID NO: 354155 - DNA, 25 bp, Homo sapien
gtgccaggaagatctcgtcggagcc

SEQ ID NO: 354156 - DNA, 25 bp, Homo sapien
aagaatcccgcccactaagacgcga

SEQ ID NO: 354157 - DNA, 25 bp, Homo sapien
actaagacgcgacccctcagacagg

SEQ ID NO: 354158 - DNA, 25 bp, Homo sapien
tgttcctggcgagagtaagagccac

SEQ ID NO: 354159 - DNA, 25 bp, Homo sapien
tcagagacgacccttctccttcccc

SEQ ID NO: 354160 - DNA, 25 bp, Homo sapien
cagagacgacccttctccttcccca

SEQ ID NO: 354161 - DNA, 25 bp, Homo sapien
ccttgagctgctttctgtgtttgtg

SEQ ID NO: 354162 - DNA, 25 bp, Homo sapien
ggatgtggattttggcgacctgtgt

SEQ ID NO: 354163 - DNA, 25 bp, Homo sapien
tgtgtttgtgaggactgactcccat

SEQ ID NO: 354164 - DNA, 25 bp, Homo sapien
ttttggcgacctgtgtggtggcctt

SEQ ID NO: 354165 - DNA, 25 bp, Homo sapien
aggcagagccaatgatgcacctgca

SEQ ID NO: 354166 - DNA, 25 bp, Homo sapien
ctgcacttccactctccccatccct

SEQ ID NO: 354167 - DNA, 25 bp, Homo sapien
gcagagccaatgatgcacctgcact

SEQ ID NO: 354168 - DNA, 25 bp, Homo sapien
agccaatgatgcacctgcacttcca

SEQ ID NO: 354169 - DNA, 25 bp, Homo sapien
tcttcctttgatgggggttctcctg

SEQ ID NO: 354170 - DNA, 25 bp, Homo sapien
cacactgtcttcctttgatgggggt

SEQ ID NO: 354171 - DNA, 25 bp, Homo sapien
ctgtcttcctttgatgggggttctc

SEQ ID NO: 354172 - DNA, 25 bp, Homo sapien
tccacactgtcttcctttgatgggg

SEQ ID NO: 354173 - DNA, 25 bp, Homo sapien
accctctggccacgggcattgggag

SEQ ID NO: 354174 - DNA, 25 bp, Homo sapien
ccagcccgggcagtcttcaaagaca

SEQ ID NO: 354175 - DNA, 25 bp, Homo sapien
tggtgtccgcttggcctttctggca

SEQ ID NO: 354176 - DNA, 25 bp, Homo sapien
tggaggctggtgtccgcttggcctt

SEQ ID NO: 354177 - DNA, 25 bp, Homo sapien
ccgcaggttcagcccagtaagccac

SEQ ID NO: 354178 - DNA, 25 bp, Homo sapien
aagggattgctgctgaggtcgatga

SEQ ID NO: 354179 - DNA, 25 bp, Homo sapien
tggaagggattgctgctgaggtcga

SEQ ID NO: 354180 - DNA, 25 bp, Homo sapien
acagtggaagggattgctgctgagg

SEQ ID NO: 354181 - DNA, 25 bp, Homo sapien
ttgctgctgaggtcgatgagctcca

SEQ ID NO: 354182 - DNA, 25 bp, Homo sapien
agggcccgaagctggttcttctgca

SEQ ID NO: 354183 - DNA, 25 bp, Homo sapien
caggcagggcccgaagctggttctt

SEQ ID NO: 354184 - DNA, 25 bp, Homo sapien
gcagggcccgaagctggttcttctg

SEQ ID NO: 354185 - DNA, 25 bp, Homo sapien
ggcagggcccgaagctggttcttct

SEQ ID NO: 354186 - DNA, 25 bp, Homo sapien
gacacttcggtgatgcggtttccac

SEQ ID NO: 354187 - DNA, 25 bp, Homo sapien
gtgccaggcggtccacagcgttgtc

SEQ ID NO: 354188 - DNA, 25 bp, Homo sapien
tcgcagctgattcctgtccaggtgc

SEQ ID NO: 354189 - DNA, 25 bp, Homo sapien
ggtttccactcaggtagacccagcg

SEQ ID NO: 354190 - DNA, 25 bp, Homo sapien
tgaggcctgcgagctggttgtcgga

SEQ ID NO: 354191 - DNA, 25 bp, Homo sapien
tgcaggaaacggttgcgttctaggt

SEQ ID NO: 354192 - DNA, 25 bp, Homo sapien
cgttctaggtacaggtagccgaggc

SEQ ID NO: 354193 - DNA, 25 bp, Homo sapien
tccgcgatgccgcagtgctgcaggt

SEQ ID NO: 354194 - DNA, 25 bp, Homo sapien
gggaagccgcggggcaccgcctgca

SEQ ID NO: 354195 - DNA, 25 bp, Homo sapien
accgcctgcaggccgcagccctcgc

SEQ ID NO: 354196 - DNA, 25 bp, Homo sapien
cgcctgcaggccgcagccctcgcag

SEQ ID NO: 354197 - DNA, 25 bp, Homo sapien
ctgcaggccgcagccctcgcagctg

SEQ ID NO: 354198 - DNA, 25 bp, Homo sapien
tcggggacgcacacgcaggcgcgag

SEQ ID NO: 354199 - DNA, 25 bp, Homo sapien
ggcgcgagggcaaggcgcgactgcc

SEQ ID NO: 354200 - DNA, 25 bp, Homo sapien
gggacgcacacgcaggcgcgagggc

SEQ ID NO: 354201 - DNA, 25 bp, Homo sapien
gcgcgagggcaaggcgcgactgccc

SEQ ID NO: 354202 - DNA, 25 bp, Homo sapien
ccggggccgcgcggagggccgcgcg

SEQ ID NO: 354203 - DNA, 25 bp, Homo sapien
gggccgcgcggagggccgcgcggag

SEQ ID NO: 354204 - DNA, 25 bp, Homo sapien
ggggccgcgcggagggccgcgcgga

SEQ ID NO: 354205 - DNA, 25 bp, Homo sapien
gccgcgcggagggccgcgcggaggg

SEQ ID NO: 354206 - DNA, 25 bp, Homo sapien
aggcgccgcggcccctggcacgcgc

SEQ ID NO: 354207 - DNA, 25 bp, Homo sapien
cgccgtccgagcgcacgcgcgcccg

SEQ ID NO: 354208 - DNA, 25 bp, Homo sapien
gccactcgagtaggggccgcgcctg

SEQ ID NO: 354209 - DNA, 25 bp, Homo sapien
cgtccgagcgcacgcgcgcccgcgc

SEQ ID NO: 354210 - DNA, 25 bp, Homo sapien
tgtgcaggcgcggacagtgtgcgaa

SEQ ID NO: 354211 - DNA, 25 bp, Homo sapien
gacagtgtgcgaaggccctgggacc

SEQ ID NO: 354212 - DNA, 25 bp, Homo sapien
ttcccgcggaggtcgagggtgtgca

SEQ ID NO: 354213 - DNA, 25 bp, Homo sapien
ggcagggtgtctagctggttcccgc

SEQ ID NO: 354214 - DNA, 25 bp, Homo sapien
ccagcacgctgagcgcgttgtgcga

SEQ ID NO: 354215 - DNA, 25 bp, Homo sapien
agcggacgcgcagtagcccctggaa

SEQ ID NO: 354216 - DNA, 25 bp, Homo sapien
cgttgtgcgacagccgcagccagcg

SEQ ID NO: 354217 - DNA, 25 bp, Homo sapien
gccaggtttagcgtggccagcgcac

SEQ ID NO: 354218 - DNA, 25 bp, Homo sapien
cggggatcaccttcagcaaattgcc

SEQ ID NO: 354219 - DNA, 25 bp, Homo sapien
tgcggggatcaccttcagcaaattg

SEQ ID NO: 354220 - DNA, 25 bp, Homo sapien
ctgcggggatcaccttcagcaaatt

SEQ ID NO: 354221 - DNA, 25 bp, Homo sapien
gcggggatcaccttcagcaaattgc

SEQ ID NO: 354222 - DNA, 25 bp, Homo sapien
acgtgtcgcctggagttgtcacaga

SEQ ID NO: 354223 - DNA, 25 bp, Homo sapien
ctcagggatggcgtctggcacctca

SEQ ID NO: 354224 - DNA, 25 bp, Homo sapien
tctggtaccggcaggcaacgtgtcg

SEQ ID NO: 354225 - DNA, 25 bp, Homo sapien
tggcgtctggcacctcagtgaggtt

SEQ ID NO: 354226 - DNA, 25 bp, Homo sapien
cagaagtacaagaagcggcagcacc

SEQ ID NO: 354227 - DNA, 25 bp, Homo sapien
agtacaagaagcggcagcaccaagg

SEQ ID NO: 354228 - DNA, 25 bp, Homo sapien
agaagtacaagaagcggcagcacca

SEQ ID NO: 354229 - DNA, 25 bp, Homo sapien
tacaagaagcggcagcaccaagggg

SEQ ID NO: 354230 - DNA, 25 bp, Homo sapien
tggactatcgtctgttttggagtct

SEQ ID NO: 354231 - DNA, 25 bp, Homo sapien
aggctccagcccctgcgttggagtt

SEQ ID NO: 354232 - DNA, 25 bp, Homo sapien
cctgcgttggagttggtggcttctc

SEQ ID NO: 354233 - DNA, 25 bp, Homo sapien
tccagcccctgcgttggagttggtg

SEQ ID NO: 354234 - DNA, 25 bp, Homo sapien
tgctctgaatccccccttgcaccat

SEQ ID NO: 354235 - DNA, 25 bp, Homo sapien
ctgctctgaatccccccttgcacca

SEQ ID NO: 354236 - DNA, 25 bp, Homo sapien
gctgctctgaatccccccttgcacc

SEQ ID NO: 354237 - DNA, 25 bp, Homo sapien
gcttacccattcctctagtgataga

SEQ ID NO: 354238 - DNA, 25 bp, Homo sapien
tatcatgtgctgacaagtctaaaca

SEQ ID NO: 354239 - DNA, 25 bp, Homo sapien
taccacaccgtaccacaagtagctt

SEQ ID NO: 354240 - DNA, 25 bp, Homo sapien
tagaaagagcactgtagccgggcat

SEQ ID NO: 354241 - DNA, 25 bp, Homo sapien
tcccaagggaggtggcttccatagt

SEQ ID NO: 354242 - DNA, 25 bp, Homo sapien
tacgtggccgactgccaatgagaaa

SEQ ID NO: 354243 - DNA, 25 bp, Homo sapien
tagtgaaggagcaacgcagaagcca

SEQ ID NO: 354244 - DNA, 25 bp, Homo sapien
cagtggagcaaaggatcccaaggga

SEQ ID NO: 354245 - DNA, 25 bp, Homo sapien
aggtcctttaagagcagcgtccaga

SEQ ID NO: 354246 - DNA, 25 bp, Homo sapien
gtccagatgcagctcggacattggg

SEQ ID NO: 354247 - DNA, 25 bp, Homo sapien
tcagggaggtcatacagcatctgcc

SEQ ID NO: 354248 - DNA, 25 bp, Homo sapien
tttatttgtgaagcccccgggcaca

SEQ ID NO: 354249 - DNA, 25 bp, Homo sapien
gaaacaacccaatcacaacacagag

SEQ ID NO: 354250 - DNA, 25 bp, Homo sapien
aggccagtcacagacgacatctcag

SEQ ID NO: 354251 - DNA, 25 bp, Homo sapien
ggcttggtgacgagaagcagcccca

SEQ ID NO: 354252 - DNA, 25 bp, Homo sapien
tcttcaggctgagcggtcagcacag

SEQ ID NO: 354253 - DNA, 25 bp, Homo sapien
gtaggctgcgcctcagttcatccga

SEQ ID NO: 354254 - DNA, 25 bp, Homo sapien
tgtccaaggcaatggcgtaggctgc

SEQ ID NO: 354255 - DNA, 25 bp, Homo sapien
ctgggccagcagaagacgttaaaac

SEQ ID NO: 354256 - DNA, 25 bp, Homo sapien
gacaggaggcacagacctgcacatg

SEQ ID NO: 354257 - DNA, 25 bp, Homo sapien
gcagcagactgtggcgggcgaagga

SEQ ID NO: 354258 - DNA, 25 bp, Homo sapien
tggcgggcgaaggagcaggattcca

SEQ ID NO: 354259 - DNA, 25 bp, Homo sapien
gcaggattccagggcgctgttgggc

SEQ ID NO: 354260 - DNA, 25 bp, Homo sapien
agcgtctgcagcagactgtggcggg

SEQ ID NO: 354261 - DNA, 25 bp, Homo sapien
caggtcggtggatgcctcttggcct

SEQ ID NO: 354262 - DNA, 25 bp, Homo sapien
tggcccactagagtccaatctggat

SEQ ID NO: 354263 - DNA, 25 bp, Homo sapien
cagggaatccttactggctgccagt

SEQ ID NO: 354264 - DNA, 25 bp, Homo sapien
tttgcacaacgactcagcaagagag

SEQ ID NO: 354265 - DNA, 25 bp, Homo sapien
cagctcccgtggcaatgtgtgtccc

SEQ ID NO: 354266 - DNA, 25 bp, Homo sapien
tgctagcgtgtgaccaagggaaact

SEQ ID NO: 354267 - DNA, 25 bp, Homo sapien
tgagggcctctcatgcacctgagtg

SEQ ID NO: 354268 - DNA, 25 bp, Homo sapien
aaagccactccggagatgtcaccaa

SEQ ID NO: 354269 - DNA, 25 bp, Homo sapien
gtacaggttggcaatggccttgacc

SEQ ID NO: 354270 - DNA, 25 bp, Homo sapien
accatgtggttcagcgccatcaggg

SEQ ID NO: 354271 - DNA, 25 bp, Homo sapien
gaaatagtcctgctgcaccatgtgg

SEQ ID NO: 354272 - DNA, 25 bp, Homo sapien
ggccgtacaggttggcaatggcctt

SEQ ID NO: 354273 - DNA, 25 bp, Homo sapien
ttggagttgaaggacgaggagttga

SEQ ID NO: 354274 - DNA, 25 bp, Homo sapien
cttgagcagacccatgtgcacgagc

SEQ ID NO: 354275 - DNA, 25 bp, Homo sapien
tgaaggacgaggagttgaaagcctt

SEQ ID NO: 354276 - DNA, 25 bp, Homo sapien
gcacgagcagcctggtgaggaaggt

SEQ ID NO: 354277 - DNA, 25 bp, Homo sapien
gcagaagcagcaggggcaggctgct

SEQ ID NO: 354278 - DNA, 25 bp, Homo sapien
gggcagaagcagcaggggcaggctg

SEQ ID NO: 354279 - DNA, 25 bp, Homo sapien
agaagcagcaggggcaggctgctgg

SEQ ID NO: 354280 - DNA, 25 bp, Homo sapien
ctgtagggcagaagcagcaggggca

SEQ ID NO: 354281 - DNA, 25 bp, Homo sapien
ctatggcagagggctgggccaaggc

SEQ ID NO: 354282 - DNA, 25 bp, Homo sapien
gctgggccaaggcacccagggttcc

SEQ ID NO: 354283 - DNA, 25 bp, Homo sapien
agggctgggccaaggcacccagggt

SEQ ID NO: 354284 - DNA, 25 bp, Homo sapien
cagagggctgggccaaggcacccag

SEQ ID NO: 354285 - DNA, 25 bp, Homo sapien
atcctcacagtagcttcgtccttga

SEQ ID NO: 354286 - DNA, 25 bp, Homo sapien
caccttctcggggtcagacgtgtca

SEQ ID NO: 354287 - DNA, 25 bp, Homo sapien
agcttcgtccttgaacacagatgac

SEQ ID NO: 354288 - DNA, 25 bp, Homo sapien
gtagcttcgtccttgaacacagatg

SEQ ID NO: 354289 - DNA, 25 bp, Homo sapien
tgagctgttcgtcccttttctctaa

SEQ ID NO: 354290 - DNA, 25 bp, Homo sapien
gtctctgagctgttcgtcccttttc

SEQ ID NO: 354291 - DNA, 25 bp, Homo sapien
gctgttcgtcccttttctctaacag

SEQ ID NO: 354292 - DNA, 25 bp, Homo sapien
gcacgtacagcgtgggggtcgaggg

SEQ ID NO: 354293 - DNA, 25 bp, Homo sapien
agctcttgggccctaggcgcagcag

SEQ ID NO: 354294 - DNA, 25 bp, Homo sapien
cacggagctcttgggccctaggcgc

SEQ ID NO: 354295 - DNA, 25 bp, Homo sapien
ctatcagcacggagctcttgggccc

SEQ ID NO: 354296 - DNA, 25 bp, Homo sapien
tcttgggccctaggcgcagcagctt

SEQ ID NO: 354297 - DNA, 25 bp, Homo sapien
gggaggacagcacgggagctggctc

SEQ ID NO: 354298 - DNA, 25 bp, Homo sapien
tggagagggaaaagccaggaaggtg

SEQ ID NO: 354299 - DNA, 25 bp, Homo sapien
aaggtggagacgtctgcaggaggtg

SEQ ID NO: 354300 - DNA, 25 bp, Homo sapien
ggggaggacagcacgggagctggct

SEQ ID NO: 354301 - DNA, 25 bp, Homo sapien
tagggtccagaatcttccgtgaggg

SEQ ID NO: 354302 - DNA, 25 bp, Homo sapien
cagtgttagggtccagaatcttccg

SEQ ID NO: 354303 - DNA, 25 bp, Homo sapien
ccgtgagggcgtggctgacttctct

SEQ ID NO: 354304 - DNA, 25 bp, Homo sapien
cagaatcttccgtgagggcgtggct

SEQ ID NO: 354305 - DNA, 25 bp, Homo sapien
cttggccatgttgaagccctccagc

SEQ ID NO: 354306 - DNA, 25 bp, Homo sapien
ttggccatgttgaagccctccagca

SEQ ID NO: 354307 - DNA, 25 bp, Homo sapien
cctcctgaagctgttcacagccttc

SEQ ID NO: 354308 - DNA, 25 bp, Homo sapien
ctgttcacagccttcttctcccagg

SEQ ID NO: 354309 - DNA, 25 bp, Homo sapien
tgtgcagaggcctcccccatccgac

SEQ ID NO: 354310 - DNA, 25 bp, Homo sapien
ctgtgcagaggcctcccccatccga

SEQ ID NO: 354311 - DNA, 25 bp, Homo sapien
gatttcacagaatgacaagttcagc

SEQ ID NO: 354312 - DNA, 25 bp, Homo sapien
ccagagggaggacgtcaggcgtcca

SEQ ID NO: 354313 - DNA, 25 bp, Homo sapien
ccccagagggaggacgtcaggcgtc

SEQ ID NO: 354314 - DNA, 25 bp, Homo sapien
agggaggacgtcaggcgtccaggct

SEQ ID NO: 354315 - DNA, 25 bp, Homo sapien
agagggaggacgtcaggcgtccagg

SEQ ID NO: 354316 - DNA, 25 bp, Homo sapien
tgcacccttggagcgcaccaggcag

SEQ ID NO: 354317 - DNA, 25 bp, Homo sapien
aggccgccgcggatggcatctgcaa

SEQ ID NO: 354318 - DNA, 25 bp, Homo sapien
tctgcaatggcaactgcacccttgg

SEQ ID NO: 354319 - DNA, 25 bp, Homo sapien
tccacctgccgcaaggtcttcaagg

SEQ ID NO: 354320 - DNA, 25 bp, Homo sapien
agggtggttgatcccattctgtggc

SEQ ID NO: 354321 - DNA, 25 bp, Homo sapien
ggttgatcccattctgtggcatgtg

SEQ ID NO: 354322 - DNA, 25 bp, Homo sapien
ggggttgacagcgaaagcctgggcc

SEQ ID NO: 354323 - DNA, 25 bp, Homo sapien
gatcccattctgtggcatgtggacc

SEQ ID NO: 354324 - DNA, 25 bp, Homo sapien
acggtggtcctcatcctgcctacat

SEQ ID NO: 354325 - DNA, 25 bp, Homo sapien
ggcctggcttaactgtgccaaggaa

SEQ ID NO: 354326 - DNA, 25 bp, Homo sapien
cattcaaagcctatattccgtctgc

SEQ ID NO: 354327 - DNA, 25 bp, Homo sapien
tcttcaggtgctcagtgcagcacag

SEQ ID NO: 354328 - DNA, 25 bp, Homo sapien
gaattctatccacatactggggggg

SEQ ID NO: 354329 - DNA, 25 bp, Homo sapien
taatcaaaggtcacactacatattt

SEQ ID NO: 354330 - DNA, 25 bp, Homo sapien
ttatgtgggtagtcacaggcctttc

SEQ ID NO: 354331 - DNA, 25 bp, Homo sapien
gctgtgaggtttattgtctacattt

SEQ ID NO: 354332 - DNA, 25 bp, Homo sapien
acacaaggcagatctctgcgatgtt

SEQ ID NO: 354333 - DNA, 25 bp, Homo sapien
cagggagggatccaaggatggcagt

SEQ ID NO: 354334 - DNA, 25 bp, Homo sapien
caaggcagatctctgcgatgttcac

SEQ ID NO: 354335 - DNA, 25 bp, Homo sapien
agatctctgcgatgttcacttggca

SEQ ID NO: 354336 - DNA, 25 bp, Homo sapien
ttccggtgacattcggtcagagctg

SEQ ID NO: 354337 - DNA, 25 bp, Homo sapien
tccagacggtttctgccagccacaa

SEQ ID NO: 354338 - DNA, 25 bp, Homo sapien
actggatttccggtgacattcggtc

SEQ ID NO: 354339 - DNA, 25 bp, Homo sapien
cagacggtttctgccagccacaaag

SEQ ID NO: 354340 - DNA, 25 bp, Homo sapien
ggggacgcaggactgctaacagctc

SEQ ID NO: 354341 - DNA, 25 bp, Homo sapien
cgccacccatcggtgcaggtcaggg

SEQ ID NO: 354342 - DNA, 25 bp, Homo sapien
actgctaacagctcaacagtcacac

SEQ ID NO: 354343 - DNA, 25 bp, Homo sapien
taaatatgtccagcacttcagttac

SEQ ID NO: 354344 - DNA, 25 bp, Homo sapien
tcaatcaaactccagggtaggcctg

SEQ ID NO: 354345 - DNA, 25 bp, Homo sapien
tatgccactcactctaggttgggcc

SEQ ID NO: 354346 - DNA, 25 bp, Homo sapien
cattacaagtataggacaggccaga

SEQ ID NO: 354347 - DNA, 25 bp, Homo sapien
gctcccaagaggcataggtcagcaa

SEQ ID NO: 354348 - DNA, 25 bp, Homo sapien
ggtgaagcaggctgagctcttgagc

SEQ ID NO: 354349 - DNA, 25 bp, Homo sapien
cgtcgggcccgaatgcgttgtcgct

SEQ ID NO: 354350 - DNA, 25 bp, Homo sapien
gagcttgagttcctgcagggtgaag

SEQ ID NO: 354351 - DNA, 25 bp, Homo sapien
caatgcccatgccacagttgttgag

SEQ ID NO: 354352 - DNA, 25 bp, Homo sapien
gcagccttcccgtgaacatgtcact

SEQ ID NO: 354353 - DNA, 25 bp, Homo sapien
ggtgggatctcggtccgcagccttc

SEQ ID NO: 354354 - DNA, 25 bp, Homo sapien
cagggctggtgggatctcggtccgc

SEQ ID NO: 354355 - DNA, 25 bp, Homo sapien
ggtccgcagccttcccgtgaacatg

SEQ ID NO: 354356 - DNA, 25 bp, Homo sapien
ttcttctctaaggccttggcgatga

SEQ ID NO: 354357 - DNA, 25 bp, Homo sapien
tggctgcttccacgcccactgtgtt

SEQ ID NO: 354358 - DNA, 25 bp, Homo sapien
caaagtcttcaatctctttaatcac

SEQ ID NO: 354359 - DNA, 25 bp, Homo sapien
tgtgttgccttccagacgcagagcc

SEQ ID NO: 354360 - DNA, 25 bp, Homo sapien
cacatgtgcataaaacaaggtctag

SEQ ID NO: 354361 - DNA, 25 bp, Homo sapien
tataccagcactgctatgaaagatg

SEQ ID NO: 354362 - DNA, 25 bp, Homo sapien
tagcagttctctctagctggtagga

SEQ ID NO: 354363 - DNA, 25 bp, Homo sapien
taggttactcaagcatttgggctga

SEQ ID NO: 354364 - DNA, 25 bp, Homo sapien
cagcttggcaatgtcttccgaggcc

SEQ ID NO: 354365 - DNA, 25 bp, Homo sapien
ttgaaactcagctgtcccccggcca

SEQ ID NO: 354366 - DNA, 25 bp, Homo sapien
cacctgagtcttggcaagtgtctct

SEQ ID NO: 354367 - DNA, 25 bp, Homo sapien
tgccagcttggcaatgtcttccgag

SEQ ID NO: 354368 - DNA, 25 bp, Homo sapien
cagtaagaaaaaggagtctcctggg

SEQ ID NO: 354369 - DNA, 25 bp, Homo sapien
ctgaggaggccaaagttgcagtaag

SEQ ID NO: 354370 - DNA, 25 bp, Homo sapien
aggccaaagttgcagtaagaaaaag

SEQ ID NO: 354371 - DNA, 25 bp, Homo sapien
gcagtaagaaaaaggagtctcctgg

SEQ ID NO: 354372 - DNA, 25 bp, Homo sapien
cccctgctatggagaccctagagat

SEQ ID NO: 354373 - DNA, 25 bp, Homo sapien
tcaggagtctgaccctacctcccct

SEQ ID NO: 354374 - DNA, 25 bp, Homo sapien
tctgaccctacctcccctgctatgg

SEQ ID NO: 354375 - DNA, 25 bp, Homo sapien
ccctgctatggagaccctagagata

SEQ ID NO: 354376 - DNA, 25 bp, Homo sapien
gaaggaacagttctagaaggtgcag

SEQ ID NO: 354377 - DNA, 25 bp, Homo sapien
gggccccttcagtgaatggcagtca

SEQ ID NO: 354378 - DNA, 25 bp, Homo sapien
gcagtcaagtcccaaaccaaaggct

SEQ ID NO: 354379 - DNA, 25 bp, Homo sapien
tcctctgctaaactgccgcagctgg

SEQ ID NO: 354380 - DNA, 25 bp, Homo sapien
gcttgagcatcttggctgttctctg

SEQ ID NO: 354381 - DNA, 25 bp, Homo sapien
ctgcttgagcatcttggctgttctc

SEQ ID NO: 354382 - DNA, 25 bp, Homo sapien
cagatcattcatcccagagaatgcc

SEQ ID NO: 354383 - DNA, 25 bp, Homo sapien
ggctatgggatccagatcattcatc

SEQ ID NO: 354384 - DNA, 25 bp, Homo sapien
cagagatcgccacatcacaacagct

SEQ ID NO: 354385 - DNA, 25 bp, Homo sapien
acagcgggaggctctatctctaaaa

SEQ ID NO: 354386 - DNA, 25 bp, Homo sapien
cacgtctggtttcaaccgtggccgg

SEQ ID NO: 354387 - DNA, 25 bp, Homo sapien
cagggacagggctgctacctatgaa

SEQ ID NO: 354388 - DNA, 25 bp, Homo sapien
cagaaaccagcccagtgcaataact

SEQ ID NO: 354389 - DNA, 25 bp, Homo sapien
tgctgctgtacttctggagaccctg

SEQ ID NO: 354390 - DNA, 25 bp, Homo sapien
ctgctgtacttctggagaccctgtt

SEQ ID NO: 354391 - DNA, 25 bp, Homo sapien
aaccagcccagtgcaataactcaca

SEQ ID NO: 354392 - DNA, 25 bp, Homo sapien
gaagccgacgctgcagttcagcggt

SEQ ID NO: 354393 - DNA, 25 bp, Homo sapien
gaagatcactttagaccagggttcg

SEQ ID NO: 354394 - DNA, 25 bp, Homo sapien
ctttagaccagggttcgagacaagc

SEQ ID NO: 354395 - DNA, 25 bp, Homo sapien
tcagcggtgatcgttccactacact

SEQ ID NO: 354396 - DNA, 25 bp, Homo sapien
tataaaccaagaaactggagcacag

SEQ ID NO: 354397 - DNA, 25 bp, Homo sapien
tgctcctgcaaagcgtcagcagtga

SEQ ID NO: 354398 - DNA, 25 bp, Homo sapien
caaggtcagcaaaggatcagcgcca

SEQ ID NO: 354399 - DNA, 25 bp, Homo sapien
gctccgcagcaacgtcagagacttt

SEQ ID NO: 354400 - DNA, 25 bp, Homo sapien
tgctctggcgagtcagacgcccttt

SEQ ID NO: 354401 - DNA, 25 bp, Homo sapien
tatgagacgccactgctagcagctg

SEQ ID NO: 354402 - DNA, 25 bp, Homo sapien
tacaggccgcaaatgataggcgggc

SEQ ID NO: 354403 - DNA, 25 bp, Homo sapien
gcaccgcctccggttgacaacaatg

SEQ ID NO: 354404 - DNA, 25 bp, Homo sapien
ccgtcgaaggctaagtgaagaaggc

SEQ ID NO: 354405 - DNA, 25 bp, Homo sapien
agaaggcgcacacgggcgccacgcc

SEQ ID NO: 354406 - DNA, 25 bp, Homo sapien
tcgaaggctaagtgaagaaggccga

SEQ ID NO: 354407 - DNA, 25 bp, Homo sapien
cgctcggccgtcgaaggctaagtga

SEQ ID NO: 354408 - DNA, 25 bp, Homo sapien
tgttccaggcaggtgacggggaaag

SEQ ID NO: 354409 - DNA, 25 bp, Homo sapien
ctgttccaggcaggtgacggggaaa

SEQ ID NO: 354410 - DNA, 25 bp, Homo sapien
tccaggcaggtgacggggaaaggaa

SEQ ID NO: 354411 - DNA, 25 bp, Homo sapien
caggcaggtgacggggaaaggaaag

SEQ ID NO: 354412 - DNA, 25 bp, Homo sapien
agctcccggcctcacgcgcttccag

SEQ ID NO: 354413 - DNA, 25 bp, Homo sapien
gtggggggaatcgagcgcgcgcctc

SEQ ID NO: 354414 - DNA, 25 bp, Homo sapien
ccagccggctagtctgttagctctc

SEQ ID NO: 354415 - DNA, 25 bp, Homo sapien
tctgttagctctctcgagctcccgg

SEQ ID NO: 354416 - DNA, 25 bp, Homo sapien
aggaggattttgaaagccggcagtt

SEQ ID NO: 354417 - DNA, 25 bp, Homo sapien
tttgaaagccggcagtttctttgct

SEQ ID NO: 354418 - DNA, 25 bp, Homo sapien
gatttgatttgttcgaggccccggc

SEQ ID NO: 354419 - DNA, 25 bp, Homo sapien
ctcgcgcggcctctcgggtagagta

SEQ ID NO: 354420 - DNA, 25 bp, Homo sapien
tacagggttatgtaagagactgccc

SEQ ID NO: 354421 - DNA, 25 bp, Homo sapien
tgatgtctgcaacctttatggttaa

SEQ ID NO: 354422 - DNA, 25 bp, Homo sapien
tataaaggacaatactgaaacagca

SEQ ID NO: 354423 - DNA, 25 bp, Homo sapien
tctggttgaagaatatgggagttct

SEQ ID NO: 354424 - DNA, 25 bp, Homo sapien
ctctacaaaaaaattgtctagccgg

SEQ ID NO: 354425 - DNA, 25 bp, Homo sapien
taatcccagcactttgggaggccga

SEQ ID NO: 354426 - DNA, 25 bp, Homo sapien
gctcacgcctgtaatcccagcactt

SEQ ID NO: 354427 - DNA, 25 bp, Homo sapien
aaaaattgtctagccgggcgcggtg

SEQ ID NO: 354428 - DNA, 25 bp, Homo sapien
cctggcgctggggagacttggccgc

SEQ ID NO: 354429 - DNA, 25 bp, Homo sapien
gcgctggggagacttggccgcccct

SEQ ID NO: 354430 - DNA, 25 bp, Homo sapien
tgtggccgggggcacctggcgctgg

SEQ ID NO: 354431 - DNA, 25 bp, Homo sapien
gggcacctggcgctggggagacttg

SEQ ID NO: 354432 - DNA, 25 bp, Homo sapien
tctcgggttgctagctttggcatca

SEQ ID NO: 354433 - DNA, 25 bp, Homo sapien
tggcatcagactttgaaccccaact

SEQ ID NO: 354434 - DNA, 25 bp, Homo sapien
tgatggctgtattgccaacagggca

SEQ ID NO: 354435 - DNA, 25 bp, Homo sapien
cactctgatagaacctgatggctgt

SEQ ID NO: 354436 - DNA, 25 bp, Homo sapien
catcacgcccaactgacttaatttt

SEQ ID NO: 354437 - DNA, 25 bp, Homo sapien
ccatcacgcccaactgacttaattt

SEQ ID NO: 354438 - DNA, 25 bp, Homo sapien
tcctcactgttcctcccatagcctc

SEQ ID NO: 354439 - DNA, 25 bp, Homo sapien
cctcactgttcctcccatagcctca

SEQ ID NO: 354440 - DNA, 25 bp, Homo sapien
ctcctcactgttcctcccatagcct

SEQ ID NO: 354441 - DNA, 25 bp, Homo sapien
ctcactgttcctcccatagcctcag

SEQ ID NO: 354442 - DNA, 25 bp, Homo sapien
tgtgtgactttatagatgtccaaaa

SEQ ID NO: 354443 - DNA, 25 bp, Homo sapien
ttttggacatctataaagtcacaca

SEQ ID NO: 354444 - DNA, 25 bp, Homo sapien
tcctcactgttcctcccatagcctc

SEQ ID NO: 354445 - DNA, 25 bp, Homo sapien
cctcactgttcctcccatagcctca

SEQ ID NO: 354446 - DNA, 25 bp, Homo sapien
ctcctcactgttcctcccatagcct

SEQ ID NO: 354447 - DNA, 25 bp, Homo sapien
ctcactgttcctcccatagcctcag

SEQ ID NO: 354448 - DNA, 25 bp, Homo sapien
tcgtctgacatgtctgtgtgcaccc

SEQ ID NO: 354449 - DNA, 25 bp, Homo sapien
taccttccatcaaccagggcagatc

SEQ ID NO: 354450 - DNA, 25 bp, Homo sapien
tctcaagcaaggattgccagcgcgc

SEQ ID NO: 354451 - DNA, 25 bp, Homo sapien
tcctgataatcgtggcatgcgccct

SEQ ID NO: 354452 - DNA, 25 bp, Homo sapien
gagaccatgccattgcactccagcc

SEQ ID NO: 354453 - DNA, 25 bp, Homo sapien
ggaggctgaggtgcaagaaccactt

SEQ ID NO: 354454 - DNA, 25 bp, Homo sapien
tgggtgacagagtgagattctgtct

SEQ ID NO: 354455 - DNA, 25 bp, Homo sapien
cgggaggcagaggttgcagtgagct

SEQ ID NO: 354456 - DNA, 25 bp, Homo sapien
taatttgggaaagagcataatttgg

SEQ ID NO: 354457 - DNA, 25 bp, Homo sapien
aggagggtaattaagagtataagct

SEQ ID NO: 354458 - DNA, 25 bp, Homo sapien
acttgtaaggatgaggcagtgagcc

SEQ ID NO: 354459 - DNA, 25 bp, Homo sapien
caaagcactgcttagaaaccagcta

SEQ ID NO: 354460 - DNA, 25 bp, Homo sapien
gagttgctgccacgcttgctcaaga

SEQ ID NO: 354461 - DNA, 25 bp, Homo sapien
cacaggtgaaggcatgatgtccgac

SEQ ID NO: 354462 - DNA, 25 bp, Homo sapien
tgaggctcagaagcgcacaggtgaa

SEQ ID NO: 354463 - DNA, 25 bp, Homo sapien
tgtacggcagaatcgagaacctggc

SEQ ID NO: 354464 - DNA, 25 bp, Homo sapien
gagttaactttgaccgagcacatgc

SEQ ID NO: 354465 - DNA, 25 bp, Homo sapien
tgtgaaagtgtctgcaaaccgtgag

SEQ ID NO: 354466 - DNA, 25 bp, Homo sapien
taaggacatcgacgctcagagagag

SEQ ID NO: 354467 - DNA, 25 bp, Homo sapien
taacaggcaggatctcagtaggact

SEQ ID NO: 354468 - DNA, 25 bp, Homo sapien
aaaccgtggctatctggtagtggct

SEQ ID NO: 354469 - DNA, 25 bp, Homo sapien
cgtctttgactgcagaaaccgtggc

SEQ ID NO: 354470 - DNA, 25 bp, Homo sapien
tcaagggccgactaaagtggaagca

SEQ ID NO: 354471 - DNA, 25 bp, Homo sapien
tagactcatgcagtccaaacccctg

SEQ ID NO: 354472 - DNA, 25 bp, Homo sapien
tttagtatttgcgctgctgaggcaa

SEQ ID NO: 354473 - DNA, 25 bp, Homo sapien
ttttagtatttgcgctgctgaggca

SEQ ID NO: 354474 - DNA, 25 bp, Homo sapien
ttagtatttgcgctgctgaggcaag

SEQ ID NO: 354475 - DNA, 25 bp, Homo sapien
tccaggtggatattgctctcttacg

SEQ ID NO: 354476 - DNA, 25 bp, Homo sapien
tccttggaacgcaaagggccgagga

SEQ ID NO: 354477 - DNA, 25 bp, Homo sapien
ggcagaagcagaccgtagcccattg

SEQ ID NO: 354478 - DNA, 25 bp, Homo sapien
cattggccttatgtgcgtgtgtgcg

SEQ ID NO: 354479 - DNA, 25 bp, Homo sapien
ccaggtggagctgtagacacgtcct

SEQ ID NO: 354480 - DNA, 25 bp, Homo sapien
gacagcggtgttgtatcaccaccag

SEQ ID NO: 354481 - DNA, 25 bp, Homo sapien
gccctccaatggctactggcatacg

SEQ ID NO: 354482 - DNA, 25 bp, Homo sapien
gtggtccaagggcttgcacagaagc

SEQ ID NO: 354483 - DNA, 25 bp, Homo sapien
gccttggcctcgcacttgcgcgccg

SEQ ID NO: 354484 - DNA, 25 bp, Homo sapien
tcgcacttgcgcgccggctgtgtgc

SEQ ID NO: 354485 - DNA, 25 bp, Homo sapien
cggcctcctctaggccgagctctgt

SEQ ID NO: 354486 - DNA, 25 bp, Homo sapien
gtgagccagcctcgaccaggggcct

SEQ ID NO: 354487 - DNA, 25 bp, Homo sapien
tgaccgtcctcgttaggattcttgg

SEQ ID NO: 354488 - DNA, 25 bp, Homo sapien
tccagcagagcacggcgggtagtgc

SEQ ID NO: 354489 - DNA, 25 bp, Homo sapien
cgcgttccgctttgcgcccaaaggg

SEQ ID NO: 354490 - DNA, 25 bp, Homo sapien
tagtgcccgcgggagtggctgtgac

SEQ ID NO: 354491 - DNA, 25 bp, Homo sapien
ccaactactcgggagcctgggcgac

SEQ ID NO: 354492 - DNA, 25 bp, Homo sapien
caactactcgggagcctgggcgaca

SEQ ID NO: 354493 - DNA, 25 bp, Homo sapien
tcgtctgggtgcatatagctcctcg

SEQ ID NO: 354494 - DNA, 25 bp, Homo sapien
gtgttgaagtatgagacctgggttt

SEQ ID NO: 354495 - DNA, 25 bp, Homo sapien
tgggtgcatatagctcctcggccgc

SEQ ID NO: 354496 - DNA, 25 bp, Homo sapien
ggagcctcgtctgggtgcatatagc

SEQ ID NO: 354497 - DNA, 25 bp, Homo sapien
ccctccgctgacagcatgacaggga

SEQ ID NO: 354498 - DNA, 25 bp, Homo sapien
accttcagagggatgggccaggcca

SEQ ID NO: 354499 - DNA, 25 bp, Homo sapien
aggaccctccgctgacagcatgaca

SEQ ID NO: 354500 - DNA, 25 bp, Homo sapien
tataccttcagagggatgggccagg

SEQ ID NO: 354501 - DNA, 25 bp, Homo sapien
aaataggaatgagcaggtgaaggcc

SEQ ID NO: 354502 - DNA, 25 bp, Homo sapien
aataggaatgagcaggtgaaggcca

SEQ ID NO: 354503 - DNA, 25 bp, Homo sapien
ctgccgtgtcaggacctttgtctac

SEQ ID NO: 354504 - DNA, 25 bp, Homo sapien
cctttgtctacatgaaataggaatg

SEQ ID NO: 354505 - DNA, 25 bp, Homo sapien
gacggaagaaagtgaaacccctgca

SEQ ID NO: 354506 - DNA, 25 bp, Homo sapien
cttccagttcgcaaacttggttggg

SEQ ID NO: 354507 - DNA, 25 bp, Homo sapien
caggccagggcctcgttatcctgga

SEQ ID NO: 354508 - DNA, 25 bp, Homo sapien
gtgcccaaggttgggtggtcagccc

SEQ ID NO: 354509 - DNA, 25 bp, Homo sapien
agaaactgtacagatttgatcaatc

SEQ ID NO: 354510 - DNA, 25 bp, Homo sapien
gaaactgtacagatttgatcaatct

SEQ ID NO: 354511 - DNA, 25 bp, Homo sapien
tgtacagatttgatcaatctttttg

SEQ ID NO: 354512 - DNA, 25 bp, Homo sapien
aactgtacagatttgatcaatcttt

SEQ ID NO: 354513 - DNA, 25 bp, Homo sapien
taaataaggacttgcgacccagaat

SEQ ID NO: 354514 - DNA, 25 bp, Homo sapien
tatgatccaatacatcaggcgggag

SEQ ID NO: 354515 - DNA, 25 bp, Homo sapien
caaataaatcacaggccggtgggcg

SEQ ID NO: 354516 - DNA, 25 bp, Homo sapien
tgtgagaaacaagccgacctggtgt

SEQ ID NO: 354517 - DNA, 25 bp, Homo sapien
tgcatggtgttcaggttgtagctga

SEQ ID NO: 354518 - DNA, 25 bp, Homo sapien
tgctgctgttgcaggtgccagcccc

SEQ ID NO: 354519 - DNA, 25 bp, Homo sapien
ctccaaatacctgggccatgtcaaa

SEQ ID NO: 354520 - DNA, 25 bp, Homo sapien
tacctgggccatgtcaaagctgctg

SEQ ID NO: 354521 - DNA, 25 bp, Homo sapien
ttccacaaagggtgtcttctccagg

SEQ ID NO: 354522 - DNA, 25 bp, Homo sapien
cttggcattgggtgagagctgggac

SEQ ID NO: 354523 - DNA, 25 bp, Homo sapien
tgggtgagccaccaccgttgtacac

SEQ ID NO: 354524 - DNA, 25 bp, Homo sapien
ggccatcggccgcatcaaagaagag

SEQ ID NO: 354525 - DNA, 25 bp, Homo sapien
ccgtgatgaagttcagtgaatgcat

SEQ ID NO: 354526 - DNA, 25 bp, Homo sapien
ccgccccactgctggctacaccccc

SEQ ID NO: 354527 - DNA, 25 bp, Homo sapien
cgccccactgctggctacaccccca

SEQ ID NO: 354528 - DNA, 25 bp, Homo sapien
gccccactgctggctacacccccac

SEQ ID NO: 354529 - DNA, 25 bp, Homo sapien
ctggtaggacacctcaaagggatca

SEQ ID NO: 354530 - DNA, 25 bp, Homo sapien
acacctgggcgtcagggttgaagct

SEQ ID NO: 354531 - DNA, 25 bp, Homo sapien
tgactggccaaaggatggcgatggg

SEQ ID NO: 354532 - DNA, 25 bp, Homo sapien
gctgccaatgggcacgaacacctgg

SEQ ID NO: 354533 - DNA, 25 bp, Homo sapien
agagaatcagcacagggcacgtgta

SEQ ID NO: 354534 - DNA, 25 bp, Homo sapien
ctaggcagagaatcagcacagggca

SEQ ID NO: 354535 - DNA, 25 bp, Homo sapien
cacagggcacgtgtacagccttggg

SEQ ID NO: 354536 - DNA, 25 bp, Homo sapien
tcagcacagggcacgtgtacagcct

SEQ ID NO: 354537 - DNA, 25 bp, Homo sapien
gatcacacagaaccaggagcctatt

SEQ ID NO: 354538 - DNA, 25 bp, Homo sapien
tggtggtgaccaacagctagggata

SEQ ID NO: 354539 - DNA, 25 bp, Homo sapien
gaggcaccgtgagaaaatatgcaga

SEQ ID NO: 354540 - DNA, 25 bp, Homo sapien
gctagggatagacagaaaagcacca

SEQ ID NO: 354541 - DNA, 25 bp, Homo sapien
tagtacacacggggtttcatcacgt

SEQ ID NO: 354542 - DNA, 25 bp, Homo sapien
tttagtacacacggggtttcatcac

SEQ ID NO: 354543 - DNA, 25 bp, Homo sapien
ccatgtccagcctcatttttttttg

SEQ ID NO: 354544 - DNA, 25 bp, Homo sapien
caaagtggtaggtttacaggcctga

SEQ ID NO: 354545 - DNA, 25 bp, Homo sapien
tctgtttatgaggatcaggctcatc

SEQ ID NO: 354546 - DNA, 25 bp, Homo sapien
catagaggtgtccaacaaggagcag

SEQ ID NO: 354547 - DNA, 25 bp, Homo sapien
cagaggtctgaagggccacatagtc

SEQ ID NO: 354548 - DNA, 25 bp, Homo sapien
ggctcatcagcagatacaaaactac

SEQ ID NO: 354549 - DNA, 25 bp, Homo sapien
taaagggattcgcttaagtggctgc

SEQ ID NO: 354550 - DNA, 25 bp, Homo sapien
taactacctgtcaataaagggaaca

SEQ ID NO: 354551 - DNA, 25 bp, Homo sapien
taaccccagtgtaggcacaaacggc

SEQ ID NO: 354552 - DNA, 25 bp, Homo sapien
cacaaacggcgaaaaagggagcaag

SEQ ID NO: 354553 - DNA, 25 bp, Homo sapien
ttccagcagcaaagttaaacctgga

SEQ ID NO: 354554 - DNA, 25 bp, Homo sapien
agcagcaaagttaaacctggattct

SEQ ID NO: 354555 - DNA, 25 bp, Homo sapien
cagcagcaaagttaaacctggattc

SEQ ID NO: 354556 - DNA, 25 bp, Homo sapien
ccagcagcaaagttaaacctggatt

SEQ ID NO: 354557 - DNA, 25 bp, Homo sapien
gggcgtgaagctcaaaagaagcctc

SEQ ID NO: 354558 - DNA, 25 bp, Homo sapien
gtgtgtgtgtcacacgcgcgcgcat

SEQ ID NO: 354559 - DNA, 25 bp, Homo sapien
tctgcctgctctaatgtcagaagcg

SEQ ID NO: 354560 - DNA, 25 bp, Homo sapien
aagcctcagtcagtgcagattccag

SEQ ID NO: 354561 - DNA, 25 bp, Homo sapien
ggtgatggaatccactgagccccaa

SEQ ID NO: 354562 - DNA, 25 bp, Homo sapien
taatggtgatggaatccactgagcc

SEQ ID NO: 354563 - DNA, 25 bp, Homo sapien
aaaaggagggataatggtgatggaa

SEQ ID NO: 354564 - DNA, 25 bp, Homo sapien
gagggataatggtgatggaatccac

SEQ ID NO: 354565 - DNA, 25 bp, Homo sapien
aaggaagatctagcgagtagctagg

SEQ ID NO: 354566 - DNA, 25 bp, Homo sapien
agtagctaggatataaagaaccggg

SEQ ID NO: 354567 - DNA, 25 bp, Homo sapien
aacaaggaagatctagcgagtagct

SEQ ID NO: 354568 - DNA, 25 bp, Homo sapien
ccaggagagggccactcttggaact

SEQ ID NO: 354569 - DNA, 25 bp, Homo sapien
atgctggccaggcggggagggagcg

SEQ ID NO: 354570 - DNA, 25 bp, Homo sapien
aaatgctggccaggcggggagggag

SEQ ID NO: 354571 - DNA, 25 bp, Homo sapien
atggggaaagaaaatgctggccagg

SEQ ID NO: 354572 - DNA, 25 bp, Homo sapien
gccaggcggggagggagcggcagca

SEQ ID NO: 354573 - DNA, 25 bp, Homo sapien
ttcagctcttaggaggtcgggctcg

SEQ ID NO: 354574 - DNA, 25 bp, Homo sapien
ccggcccgaagtgagcaaagtcaat

SEQ ID NO: 354575 - DNA, 25 bp, Homo sapien
taccactctgaacttgtgcgcgtcg

SEQ ID NO: 354576 - DNA, 25 bp, Homo sapien
tcggagcccatggttcggacgtttg

SEQ ID NO: 354577 - DNA, 25 bp, Homo sapien
tgggcgtcgcttcacagtcagttcc

SEQ ID NO: 354578 - DNA, 25 bp, Homo sapien
agtagtaggcatgttttctggcagc

SEQ ID NO: 354579 - DNA, 25 bp, Homo sapien
tactgtaccccactgtagctggaca

SEQ ID NO: 354580 - DNA, 25 bp, Homo sapien
tccgatatggtgtgccagagtgctc

SEQ ID NO: 354581 - DNA, 25 bp, Homo sapien
gaagaggtctgtcttagagctcccc

SEQ ID NO: 354582 - DNA, 25 bp, Homo sapien
gtctgtcttagagctccccagattg

SEQ ID NO: 354583 - DNA, 25 bp, Homo sapien
gctccccagattgacaatctttggg

SEQ ID NO: 354584 - DNA, 25 bp, Homo sapien
cttagagctccccagattgacaatc

SEQ ID NO: 354585 - DNA, 25 bp, Homo sapien
tgggtttgtaaatgtgtccaaacac

SEQ ID NO: 354586 - DNA, 25 bp, Homo sapien
gagaagttgttaagtctttgagcct

SEQ ID NO: 354587 - DNA, 25 bp, Homo sapien
ggtcacagagttcaaattctcatct

SEQ ID NO: 354588 - DNA, 25 bp, Homo sapien
gccagctactgtaccccactgtagg

SEQ ID NO: 354589 - DNA, 25 bp, Homo sapien
ctcctggttattcttgtggctttga

SEQ ID NO: 354590 - DNA, 25 bp, Homo sapien
taagaacctacaaatcagtcctctg

SEQ ID NO: 354591 - DNA, 25 bp, Homo sapien
gattacatgatgtggcaccataaga

SEQ ID NO: 354592 - DNA, 25 bp, Homo sapien
tataaatgagaatacctagcttagc

SEQ ID NO: 354593 - DNA, 25 bp, Homo sapien
caattatgaaagttgcaggaagaca

SEQ ID NO: 354594 - DNA, 25 bp, Homo sapien
tgcaggaagacaataataacaaggg

SEQ ID NO: 354595 - DNA, 25 bp, Homo sapien
ctgtctaattcccttatcaattatg

SEQ ID NO: 354596 - DNA, 25 bp, Homo sapien
cccttatcaattatgaaagttgcag

SEQ ID NO: 354597 - DNA, 25 bp, Homo sapien
ggatccaaaggtatcagttcacaca

SEQ ID NO: 354598 - DNA, 25 bp, Homo sapien
tgcataggaaagagcctcggccact

SEQ ID NO: 354599 - DNA, 25 bp, Homo sapien
tgagagcctggatcatgtcactgga

SEQ ID NO: 354600 - DNA, 25 bp, Homo sapien
agttcacacaccacattcagaggag

SEQ ID NO: 354601 - DNA, 25 bp, Homo sapien
gaaccctgctgccaatactaaccga

SEQ ID NO: 354602 - DNA, 25 bp, Homo sapien
gaaagtagccactgccactacacag

SEQ ID NO: 354603 - DNA, 25 bp, Homo sapien
aagacctattcttcgctcatgggaa

SEQ ID NO: 354604 - DNA, 25 bp, Homo sapien
gcctgggcttgtcagaggaactaca

SEQ ID NO: 354605 - DNA, 25 bp, Homo sapien
tcacgatatacacccaaatagtgct

SEQ ID NO: 354606 - DNA, 25 bp, Homo sapien
cccaaatagtgcttaatgatagatt

SEQ ID NO: 354607 - DNA, 25 bp, Homo sapien
aaattcaactttgtcacgatataca

SEQ ID NO: 354608 - DNA, 25 bp, Homo sapien
ttgaattgtcccaaattcaactttg

SEQ ID NO: 354609 - DNA, 25 bp, Homo sapien
atgggctgtacaggacttataaaca

SEQ ID NO: 354610 - DNA, 25 bp, Homo sapien
tgtacaggacttataaacagacagg

SEQ ID NO: 354611 - DNA, 25 bp, Homo sapien
ggctgtacaggacttataaacagac

SEQ ID NO: 354612 - DNA, 25 bp, Homo sapien
tacaggacttataaacagacagggt

SEQ ID NO: 354613 - DNA, 25 bp, Homo sapien
gcagtgagccttgcacatgatcatg

SEQ ID NO: 354614 - DNA, 25 bp, Homo sapien
agtgagccttgcacatgatcatgcc

SEQ ID NO: 354615 - DNA, 25 bp, Homo sapien
tgagccttgcacatgatcatgccac

SEQ ID NO: 354616 - DNA, 25 bp, Homo sapien
tgcagtgagccttgcacatgatcat

SEQ ID NO: 354617 - DNA, 25 bp, Homo sapien
acacagcgcccctggtaagatccat

SEQ ID NO: 354618 - DNA, 25 bp, Homo sapien
tcacacagcgcccctggtaagatcc

SEQ ID NO: 354619 - DNA, 25 bp, Homo sapien
cacagcgcccctggtaagatccata

SEQ ID NO: 354620 - DNA, 25 bp, Homo sapien
cagcgcccctggtaagatccatagt

SEQ ID NO: 354621 - DNA, 25 bp, Homo sapien
gatggtaaaaagtacaattagaata

SEQ ID NO: 354622 - DNA, 25 bp, Homo sapien
tgaaagatggtaaaaagtacaatta

SEQ ID NO: 354623 - DNA, 25 bp, Homo sapien
agatggtaaaaagtacaattagaat

SEQ ID NO: 354624 - DNA, 25 bp, Homo sapien
gcttgcggcaaaagatcaaatcagg

SEQ ID NO: 354625 - DNA, 25 bp, Homo sapien
cttgcggcaaaagatcaaatcagga

SEQ ID NO: 354626 - DNA, 25 bp, Homo sapien
tgcttgcggcaaaagatcaaatcag

SEQ ID NO: 354627 - DNA, 25 bp, Homo sapien
gctcctaactaagccggccaccgga

SEQ ID NO: 354628 - DNA, 25 bp, Homo sapien
ctaactaagccggccaccggaagct

SEQ ID NO: 354629 - DNA, 25 bp, Homo sapien
ctaagccggccaccggaagcttcgg

SEQ ID NO: 354630 - DNA, 25 bp, Homo sapien
agctcctaactaagccggccaccgg

SEQ ID NO: 354631 - DNA, 25 bp, Homo sapien
gtaatcggcctgccttggcctccca

SEQ ID NO: 354632 - DNA, 25 bp, Homo sapien
agtgactctcctgccctcagcttcc

SEQ ID NO: 354633 - DNA, 25 bp, Homo sapien
aagtaatcggcctgccttggcctcc

SEQ ID NO: 354634 - DNA, 25 bp, Homo sapien
tcaagtaatcggcctgccttggcct

SEQ ID NO: 354635 - DNA, 25 bp, Homo sapien
tatctgagtcctattgcttggcaca

SEQ ID NO: 354636 - DNA, 25 bp, Homo sapien
tgagtcctattgcttggcacataat

SEQ ID NO: 354637 - DNA, 25 bp, Homo sapien
tctgagtcctattgcttggcacata

SEQ ID NO: 354638 - DNA, 25 bp, Homo sapien
gtatctgagtcctattgcttggcac

SEQ ID NO: 354639 - DNA, 25 bp, Homo sapien
gaaggctgtggctaagccagaaggg

SEQ ID NO: 354640 - DNA, 25 bp, Homo sapien
gctgtggctaagccagaagggcctg

SEQ ID NO: 354641 - DNA, 25 bp, Homo sapien
tgaaggctgtggctaagccagaagg

SEQ ID NO: 354642 - DNA, 25 bp, Homo sapien
caagtgtgaacgtgtatatcctggg

SEQ ID NO: 354643 - DNA, 25 bp, Homo sapien
tgtgtccatttacatccaccctgta

SEQ ID NO: 354644 - DNA, 25 bp, Homo sapien
ccaccctgtatgtatgaaacctgcc

SEQ ID NO: 354645 - DNA, 25 bp, Homo sapien
ttcttttggtggacagttggacagt

SEQ ID NO: 354646 - DNA, 25 bp, Homo sapien
tgacgccacgtcatgagttagcctg

SEQ ID NO: 354647 - DNA, 25 bp, Homo sapien
ggcctcaagtgcaagtcccagttca

SEQ ID NO: 354648 - DNA, 25 bp, Homo sapien
cattttccctcggtaggagctaggc

SEQ ID NO: 354649 - DNA, 25 bp, Homo sapien
tgcctttgtcacgtccccagaggtg

SEQ ID NO: 354650 - DNA, 25 bp, Homo sapien
gcacggatggcaagaagttcaggct

SEQ ID NO: 354651 - DNA, 25 bp, Homo sapien
tgagcaggtttgcatcataccagca

SEQ ID NO: 354652 - DNA, 25 bp, Homo sapien
tggccattgcgggaaccctcaagtt

SEQ ID NO: 354653 - DNA, 25 bp, Homo sapien
caggagtggcaattggtgctgacca

SEQ ID NO: 354654 - DNA, 25 bp, Homo sapien
tgaaggacttcacccctggcaaggt

SEQ ID NO: 354655 - DNA, 25 bp, Homo sapien
tctgagccgctgagatctaggacat

SEQ ID NO: 354656 - DNA, 25 bp, Homo sapien
tggcagtgccctcaacagaatgaag

SEQ ID NO: 354657 - DNA, 25 bp, Homo sapien
cagattgagtggttccgcgctggca

SEQ ID NO: 354658 - DNA, 25 bp, Homo sapien
tatctccttagcatcggcctcagct

SEQ ID NO: 354659 - DNA, 25 bp, Homo sapien
ttcccgcaggctggtagggtccact

SEQ ID NO: 354660 - DNA, 25 bp, Homo sapien
gggtcttttcagtcaaggtcagtgg

SEQ ID NO: 354661 - DNA, 25 bp, Homo sapien
gtttgttgtcaagtccagggtccag

SEQ ID NO: 354662 - DNA, 25 bp, Homo sapien
agttgctggtccaccaggagagaag

SEQ ID NO: 354663 - DNA, 25 bp, Homo sapien
ctagttgctggtccaccaggagaga

SEQ ID NO: 354664 - DNA, 25 bp, Homo sapien
ccaggcctggctcactgatggatcc

SEQ ID NO: 354665 - DNA, 25 bp, Homo sapien
gcccaggcctggctcactgatggat

SEQ ID NO: 354666 - DNA, 25 bp, Homo sapien
tgccagggataaagaacacgcacat

SEQ ID NO: 354667 - DNA, 25 bp, Homo sapien
cactgacatgctggcttgaaccaac

SEQ ID NO: 354668 - DNA, 25 bp, Homo sapien
tcactgacatgctggcttgaaccaa

SEQ ID NO: 354669 - DNA, 25 bp, Homo sapien
ccagggataaagaacacgcacattt

SEQ ID NO: 354670 - DNA, 25 bp, Homo sapien
catgtagaggtcgtgtgctccttcc

SEQ ID NO: 354671 - DNA, 25 bp, Homo sapien
gacgtgtcaacaaagctctcgtcca

SEQ ID NO: 354672 - DNA, 25 bp, Homo sapien
gtacggagcctccttctttggcagc

SEQ ID NO: 354673 - DNA, 25 bp, Homo sapien
tctcctcgccggtgtccatgtagag

SEQ ID NO: 354674 - DNA, 25 bp, Homo sapien
gggggatgagaatgtcatcgaagaa

SEQ ID NO: 354675 - DNA, 25 bp, Homo sapien
gggatgagaatgtcatcgaagaagc

SEQ ID NO: 354676 - DNA, 25 bp, Homo sapien
ctggggggatgagaatgtcatcgaa

SEQ ID NO: 354677 - DNA, 25 bp, Homo sapien
tctggggggatgagaatgtcatcga

SEQ ID NO: 354678 - DNA, 25 bp, Homo sapien
agtcttgtctgaggcgtcagggcca

SEQ ID NO: 354679 - DNA, 25 bp, Homo sapien
cacagtgttcccaagtcttgtctga

SEQ ID NO: 354680 - DNA, 25 bp, Homo sapien
tctgaggcgtcagggccactgttac

SEQ ID NO: 354681 - DNA, 25 bp, Homo sapien
tcccaagtcttgtctgaggcgtcag

SEQ ID NO: 354682 - DNA, 25 bp, Homo sapien
gaatctcatctaggaatggatgaaa

SEQ ID NO: 354683 - DNA, 25 bp, Homo sapien
aatggatgaaacaccacgcagcgaa

SEQ ID NO: 354684 - DNA, 25 bp, Homo sapien
cccaatgagaatctcatctaggaat

SEQ ID NO: 354685 - DNA, 25 bp, Homo sapien
aggaatggatgaaacaccacgcagc

SEQ ID NO: 354686 - DNA, 25 bp, Homo sapien
gagaattgcgctctgagtgcccaag

SEQ ID NO: 354687 - DNA, 25 bp, Homo sapien
ccttcagaatgtgagaccgtcctag

SEQ ID NO: 354688 - DNA, 25 bp, Homo sapien
caagattctgactcaggcggaggga

SEQ ID NO: 354689 - DNA, 25 bp, Homo sapien
tgtcaccgggtcaattcctggccga

SEQ ID NO: 354690 - DNA, 25 bp, Homo sapien
ttggtgtgtgatgcgccatccccag

SEQ ID NO: 354691 - DNA, 25 bp, Homo sapien
aatgcagagtcccacgttgtacacg

SEQ ID NO: 354692 - DNA, 25 bp, Homo sapien
tccccagggaatacataggcatcct

SEQ ID NO: 354693 - DNA, 25 bp, Homo sapien
ggtgatatcaaacagacaaatgcag

SEQ ID NO: 354694 - DNA, 25 bp, Homo sapien
tatctcctttcacggtgaagaaaag

SEQ ID NO: 354695 - DNA, 25 bp, Homo sapien
tgcccgcgagccgtgggcccagtac

SEQ ID NO: 354696 - DNA, 25 bp, Homo sapien
acggccagggcttggcatgaccgag

SEQ ID NO: 354697 - DNA, 25 bp, Homo sapien
tcttttgatccccttcaatatctcc

SEQ ID NO: 354698 - DNA, 25 bp, Homo sapien
tcaaactgccaaggggggatccgga

SEQ ID NO: 354699 - DNA, 25 bp, Homo sapien
ggatccggacggtgtccaccatttc

SEQ ID NO: 354700 - DNA, 25 bp, Homo sapien
aatggagtcgttgagcttcctctca

SEQ ID NO: 354701 - DNA, 25 bp, Homo sapien
ccaccatttccaccaggacgaacat

SEQ ID NO: 354702 - DNA, 25 bp, Homo sapien
agagggaggcactctccgtccacag

SEQ ID NO: 354703 - DNA, 25 bp, Homo sapien
cgctactacaacatgaggaaactga

SEQ ID NO: 354704 - DNA, 25 bp, Homo sapien
ttggtcccgtcccagtcgctgaggc

SEQ ID NO: 354705 - DNA, 25 bp, Homo sapien
caggctggcggtgaggttgcacggg

SEQ ID NO: 354706 - DNA, 25 bp, Homo sapien
actgcgggcgagattccgaatccat

SEQ ID NO: 354707 - DNA, 25 bp, Homo sapien
gcgactgcgggcgagattccgaatc

SEQ ID NO: 354708 - DNA, 25 bp, Homo sapien
cgcacagccgctcgcgcttgcgcga

SEQ ID NO: 354709 - DNA, 25 bp, Homo sapien
cgcttgcgcgactgcgggcgagatt

SEQ ID NO: 354710 - DNA, 25 bp, Homo sapien
tgttgctaggcgacctccgtgcaat

SEQ ID NO: 354711 - DNA, 25 bp, Homo sapien
tgcctgtgtgctcgcgcacagcgtg

SEQ ID NO: 354712 - DNA, 25 bp, Homo sapien
tgcaatcccgcctgattatccctcg

SEQ ID NO: 354713 - DNA, 25 bp, Homo sapien
cccgacagcgctttctgttgctagg

SEQ ID NO: 354714 - DNA, 25 bp, Homo sapien
ttctttgtgtgggatcatgggacta

SEQ ID NO: 354715 - DNA, 25 bp, Homo sapien
ctttgtgtgggatcatgggactata

SEQ ID NO: 354716 - DNA, 25 bp, Homo sapien
ggaatcttctttgtgtgggatcatg

SEQ ID NO: 354717 - DNA, 25 bp, Homo sapien
tcttctttgtgtgggatcatgggac

SEQ ID NO: 354718 - DNA, 25 bp, Homo sapien
tggcccgaccataaaagccactttc

SEQ ID NO: 354719 - DNA, 25 bp, Homo sapien
ctgggcagggcaaattataccgtgg

SEQ ID NO: 354720 - DNA, 25 bp, Homo sapien
gcaaattataccgtggcccgaccat

SEQ ID NO: 354721 - DNA, 25 bp, Homo sapien
taccgtggcccgaccataaaagcca

SEQ ID NO: 354722 - DNA, 25 bp, Homo sapien
taggcctaggccaaactcttcagaa

SEQ ID NO: 354723 - DNA, 25 bp, Homo sapien
cagtgccactaggagcagactggct

SEQ ID NO: 354724 - DNA, 25 bp, Homo sapien
ggcagggcaggctagatctcgtacc

SEQ ID NO: 354725 - DNA, 25 bp, Homo sapien
ggacggttgtccacacagactctgg

SEQ ID NO: 354726 - DNA, 25 bp, Homo sapien
atctcccggcatcgctgcaccgtgt

SEQ ID NO: 354727 - DNA, 25 bp, Homo sapien
ggaagaaaatctcccggcatcgctg

SEQ ID NO: 354728 - DNA, 25 bp, Homo sapien
aaatctcccggcatcgctgcaccgt

SEQ ID NO: 354729 - DNA, 25 bp, Homo sapien
agaaaatctcccggcatcgctgcac

SEQ ID NO: 354730 - DNA, 25 bp, Homo sapien
gggtcggcaaagatctcaaagtcgt

SEQ ID NO: 354731 - DNA, 25 bp, Homo sapien
tgaggagacaccacgctgtggccaa

SEQ ID NO: 354732 - DNA, 25 bp, Homo sapien
caaagatctcaaagtcgttcccacc

SEQ ID NO: 354733 - DNA, 25 bp, Homo sapien
acaccacgctgtggccaacagtccg

SEQ ID NO: 354734 - DNA, 25 bp, Homo sapien
agtagcgcttgtcccagccctcggg

SEQ ID NO: 354735 - DNA, 25 bp, Homo sapien
ctcgttcccaaagaagtggatggtg

SEQ ID NO: 354736 - DNA, 25 bp, Homo sapien
agctgtcctggtccaggctatccag

SEQ ID NO: 354737 - DNA, 25 bp, Homo sapien
gttcccaaagaagtggatggtgtcg

SEQ ID NO: 354738 - DNA, 25 bp, Homo sapien
gagagaacctcagccctttgccagc

SEQ ID NO: 354739 - DNA, 25 bp, Homo sapien
ctcgagagaacctcagccctttgcc

SEQ ID NO: 354740 - DNA, 25 bp, Homo sapien
agaacctcagccctttgccagcaaa

SEQ ID NO: 354741 - DNA, 25 bp, Homo sapien
tttcagggcttccacgaacttctcc

SEQ ID NO: 354742 - DNA, 25 bp, Homo sapien
gaagtaatgaatgacccctgcctgc

SEQ ID NO: 354743 - DNA, 25 bp, Homo sapien
gagcattctaggtgggtaggacccc

SEQ ID NO: 354744 - DNA, 25 bp, Homo sapien
cagggcgcacagatcaggaaggttc

SEQ ID NO: 354745 - DNA, 25 bp, Homo sapien
tgcagatgcgcaaactaaggctcag

SEQ ID NO: 354746 - DNA, 25 bp, Homo sapien
catcccccagtctattttactgatg

SEQ ID NO: 354747 - DNA, 25 bp, Homo sapien
tgaggccctacaggcctaagattgc

SEQ ID NO: 354748 - DNA, 25 bp, Homo sapien
ctacaggcctaagattgcatagcta

SEQ ID NO: 354749 - DNA, 25 bp, Homo sapien
gccctacaggcctaagattgcatag

SEQ ID NO: 354750 - DNA, 25 bp, Homo sapien
tccagggtgcagctccggccgatgg

SEQ ID NO: 354751 - DNA, 25 bp, Homo sapien
ccgatgggcgagatgttcagcatgc

SEQ ID NO: 354752 - DNA, 25 bp, Homo sapien
catgccattccggaactcgatgaag

SEQ ID NO: 354753 - DNA, 25 bp, Homo sapien
ttgtccagttcggagaactcgatcc

SEQ ID NO: 354754 - DNA, 25 bp, Homo sapien
tgaattcaaatctagccccacctgg

SEQ ID NO: 354755 - DNA, 25 bp, Homo sapien
caaaggggacaagaatccacactcc

SEQ ID NO: 354756 - DNA, 25 bp, Homo sapien
gccagagagaaccagaacggccctg

SEQ ID NO: 354757 - DNA, 25 bp, Homo sapien
aatcaggggcccaagtatctccagg

SEQ ID NO: 354758 - DNA, 25 bp, Homo sapien
agcagggccatgtagctgaggcaga

SEQ ID NO: 354759 - DNA, 25 bp, Homo sapien
gagcagggccatgtagctgaggcag

SEQ ID NO: 354760 - DNA, 25 bp, Homo sapien
cagaagttgatcaagtcctgcagca

SEQ ID NO: 354761 - DNA, 25 bp, Homo sapien
gcagaagttgatcaagtcctgcagc

SEQ ID NO: 354762 - DNA, 25 bp, Homo sapien
tgcttggagagcagtcgtccgtgct

SEQ ID NO: 354763 - DNA, 25 bp, Homo sapien
cgttctcggcaaacacataatcaaa

SEQ ID NO: 354764 - DNA, 25 bp, Homo sapien
ttatactgcaccgtcccgttctcgg

SEQ ID NO: 354765 - DNA, 25 bp, Homo sapien
agtcgtccgtgcttatactgcaccg

SEQ ID NO: 354766 - DNA, 25 bp, Homo sapien
tcgcactgggttctcaaggctggct

SEQ ID NO: 354767 - DNA, 25 bp, Homo sapien
catgcagtactctctggcagagggc

SEQ ID NO: 354768 - DNA, 25 bp, Homo sapien
tgaccccacgggcaagtaaagagag

SEQ ID NO: 354769 - DNA, 25 bp, Homo sapien
gagagaggaagcctacacccttggt

SEQ ID NO: 354770 - DNA, 25 bp, Homo sapien
gatcttacagtagtcagagccgccc

SEQ ID NO: 354771 - DNA, 25 bp, Homo sapien
cccagctgctcagcgatcttacagt

SEQ ID NO: 354772 - DNA, 25 bp, Homo sapien
tgctcagcgatcttacagtagtcag

SEQ ID NO: 354773 - DNA, 25 bp, Homo sapien
acagtagtcagagccgcccaccaca

SEQ ID NO: 354774 - DNA, 25 bp, Homo sapien
cactctacttcgtagcttctgcagg

SEQ ID NO: 354775 - DNA, 25 bp, Homo sapien
ctctacttcgtagcttctgcaggaa

SEQ ID NO: 354776 - DNA, 25 bp, Homo sapien
tctacttcgtagcttctgcaggaag

SEQ ID NO: 354777 - DNA, 25 bp, Homo sapien
ctgcactctacttcgtagcttctgc

SEQ ID NO: 354778 - DNA, 25 bp, Homo sapien
aattagacaggttggacactgtggc

SEQ ID NO: 354779 - DNA, 25 bp, Homo sapien
gccctcacttagtgctgagaaccca

SEQ ID NO: 354780 - DNA, 25 bp, Homo sapien
tgaagcagtacaaagcttagacacc

SEQ ID NO: 354781 - DNA, 25 bp, Homo sapien
cacattctacctggatctgaagcag

SEQ ID NO: 354782 - DNA, 25 bp, Homo sapien
agcaaacaggctaggcctggagcct

SEQ ID NO: 354783 - DNA, 25 bp, Homo sapien
tcataaacgaatttgaaaagaagcc

SEQ ID NO: 354784 - DNA, 25 bp, Homo sapien
cctcacagcaaacaggctaggcctg

SEQ ID NO: 354785 - DNA, 25 bp, Homo sapien
tctcacatccgggtgggtagagctc

SEQ ID NO: 354786 - DNA, 25 bp, Homo sapien
ggccttagcggcgtgtgacagcctc

SEQ ID NO: 354787 - DNA, 25 bp, Homo sapien
cccaccagatgatgactgacgcttg

SEQ ID NO: 354788 - DNA, 25 bp, Homo sapien
ccactggtgtgtcgtagggctgaac

SEQ ID NO: 354789 - DNA, 25 bp, Homo sapien
tgcttgtgtgcctggaaccccggtt

SEQ ID NO: 354790 - DNA, 25 bp, Homo sapien
tggcgagccggcgtgagggtcccgt

SEQ ID NO: 354791 - DNA, 25 bp, Homo sapien
aggacgcgctccttcctgcgggctg

SEQ ID NO: 354792 - DNA, 25 bp, Homo sapien
gggtcccgtccacgtcaaacaggca

SEQ ID NO: 354793 - DNA, 25 bp, Homo sapien
ccacgtcaaacaggcagaggacgcg

SEQ ID NO: 354794 - DNA, 25 bp, Homo sapien
gggcggagtcccgaagatgcaacgg

SEQ ID NO: 354795 - DNA, 25 bp, Homo sapien
gagtcccgaagatgcaacggcagaa

SEQ ID NO: 354796 - DNA, 25 bp, Homo sapien
tcccgaagatgcaacggcagaagca

SEQ ID NO: 354797 - DNA, 25 bp, Homo sapien
gcggagtcccgaagatgcaacggca

SEQ ID NO: 354798 - DNA, 25 bp, Homo sapien
cagtggactgcctgattggccaaat

SEQ ID NO: 354799 - DNA, 25 bp, Homo sapien
tgatagtgattgcaacaggccgatt

SEQ ID NO: 354800 - DNA, 25 bp, Homo sapien
ttggattgctccaaacaaggcggag

SEQ ID NO: 354801 - DNA, 25 bp, Homo sapien
tgtaggaaatctcctgagccgggcg

SEQ ID NO: 354802 - DNA, 25 bp, Homo sapien
gagataagcacccttggccccttaa

SEQ ID NO: 354803 - DNA, 25 bp, Homo sapien
gttatttgccctgaggtacagaccc

SEQ ID NO: 354804 - DNA, 25 bp, Homo sapien
gatgaagtgcgaattcctgggccct

SEQ ID NO: 354805 - DNA, 25 bp, Homo sapien
tattcctttactatgggctgaccac

SEQ ID NO: 354806 - DNA, 25 bp, Homo sapien
aacagcatccgaagtgaacgcacag

SEQ ID NO: 354807 - DNA, 25 bp, Homo sapien
tagtcatcctgaaaccggtcccatg

SEQ ID NO: 354808 - DNA, 25 bp, Homo sapien
aaaccctagggcacaggcaatggca

SEQ ID NO: 354809 - DNA, 25 bp, Homo sapien
cattgtctacatgcggcctgacggt

SEQ ID NO: 354810 - DNA, 25 bp, Homo sapien
gggccgaagtgcctgtccaaagggc

SEQ ID NO: 354811 - DNA, 25 bp, Homo sapien
agctctggccgttgggtctgcccac

SEQ ID NO: 354812 - DNA, 25 bp, Homo sapien
cctggaggctggatctgaatggagt

SEQ ID NO: 354813 - DNA, 25 bp, Homo sapien
caggaggggccgaagtgcctgtcca

SEQ ID NO: 354814 - DNA, 25 bp, Homo sapien
ccataaataaggttgcccagaaact

SEQ ID NO: 354815 - DNA, 25 bp, Homo sapien
aaagggctcctaggttgctctcata

SEQ ID NO: 354816 - DNA, 25 bp, Homo sapien
tggctactccagtttgctcagggcc

SEQ ID NO: 354817 - DNA, 25 bp, Homo sapien
tgtgggactgcaaactcatcgaatg

SEQ ID NO: 354818 - DNA, 25 bp, Homo sapien
taaggccatagttcaggagaaactg

SEQ ID NO: 354819 - DNA, 25 bp, Homo sapien
gcacatcaggacagaacgggctgca

SEQ ID NO: 354820 - DNA, 25 bp, Homo sapien
gggcctgcgaaacctgccaggatct

SEQ ID NO: 354821 - DNA, 25 bp, Homo sapien
tgaatgcaatcaacgacaagaggga

SEQ ID NO: 354822 - DNA, 25 bp, Homo sapien
ccacttcgttgctgaaggtgttaca

SEQ ID NO: 354823 - DNA, 25 bp, Homo sapien
aacttcagagggcaggtctgtgatg

SEQ ID NO: 354824 - DNA, 25 bp, Homo sapien
ttcaaagaggttgtaggcctcacct

SEQ ID NO: 354825 - DNA, 25 bp, Homo sapien
gaatcttccgcccagtcaggaactg

SEQ ID NO: 354826 - DNA, 25 bp, Homo sapien
aaggtttgcagaacatatatgagaa

SEQ ID NO: 354827 - DNA, 25 bp, Homo sapien
tgaaaggtttgcagaacatatatga

SEQ ID NO: 354828 - DNA, 25 bp, Homo sapien
tgcagaacatatatgagaaaccagc

SEQ ID NO: 354829 - DNA, 25 bp, Homo sapien
ggtttgcagaacatatatgagaaac

SEQ ID NO: 354830 - DNA, 25 bp, Homo sapien
gtctggaggcccaagcaatgtccct

SEQ ID NO: 354831 - DNA, 25 bp, Homo sapien
ggagaggtactccagaaagatttct

SEQ ID NO: 354832 - DNA, 25 bp, Homo sapien
gtgacttctgtactccccacatcaa

SEQ ID NO: 354833 - DNA, 25 bp, Homo sapien
ccagggaggagaggtactccagaaa

SEQ ID NO: 354834 - DNA, 25 bp, Homo sapien
agtagaccacaaacactctgttctg

SEQ ID NO: 354835 - DNA, 25 bp, Homo sapien
gagccaacccaaaggaagtcattaa

SEQ ID NO: 354836 - DNA, 25 bp, Homo sapien
taagttaccatctccactgaatgtt

SEQ ID NO: 354837 - DNA, 25 bp, Homo sapien
gtggcttcccacagtagaccacaaa

SEQ ID NO: 354838 - DNA, 25 bp, Homo sapien
gcttaacatcagttgcgttcctagg

SEQ ID NO: 354839 - DNA, 25 bp, Homo sapien
aaggtctcagctcgcaaggagctta

SEQ ID NO: 354840 - DNA, 25 bp, Homo sapien
ttcctaggatgagccggacactgtg

SEQ ID NO: 354841 - DNA, 25 bp, Homo sapien
tcagctcgcaaggagcttacacagt

SEQ ID NO: 354842 - DNA, 25 bp, Homo sapien
gagataccaccactgccgaagaaga

SEQ ID NO: 354843 - DNA, 25 bp, Homo sapien
ccttgtgcacaactatggatgtgtg

SEQ ID NO: 354844 - DNA, 25 bp, Homo sapien
gaagaactcatccttgtgcacaact

SEQ ID NO: 354845 - DNA, 25 bp, Homo sapien
caccactgccgaagaagaactcatc

SEQ ID NO: 354846 - DNA, 25 bp, Homo sapien
tctattggacgcactgtttaaacta

SEQ ID NO: 354847 - DNA, 25 bp, Homo sapien
gagactatatgtgtaccacccaggc

SEQ ID NO: 354848 - DNA, 25 bp, Homo sapien
gctgagaacactaagcctgagctgt

SEQ ID NO: 354849 - DNA, 25 bp, Homo sapien
tgtccaatatggtgaccactgacca

SEQ ID NO: 354850 - DNA, 25 bp, Homo sapien
aatcttcaagcttaagttcaagtct

SEQ ID NO: 354851 - DNA, 25 bp, Homo sapien
caccatggcctctcttatttcaaag

SEQ ID NO: 354852 - DNA, 25 bp, Homo sapien
tggcacctaatcataatctgtttta

SEQ ID NO: 354853 - DNA, 25 bp, Homo sapien
gttcatgcaccactcactcactttg

SEQ ID NO: 354854 - DNA, 25 bp, Homo sapien
ccactttcaaagtcactacccttga

SEQ ID NO: 354855 - DNA, 25 bp, Homo sapien
tactaccctcctgtggctacttctt

SEQ ID NO: 354856 - DNA, 25 bp, Homo sapien
ctgttactcccttactaccctcctg

SEQ ID NO: 354857 - DNA, 25 bp, Homo sapien
ttatttaaaataggtctcttcactg

SEQ ID NO: 354858 - DNA, 25 bp, Homo sapien
cacgtagagcttcaccggatagaga

SEQ ID NO: 354859 - DNA, 25 bp, Homo sapien
gcctttggacaggtcgtacacgtag

SEQ ID NO: 354860 - DNA, 25 bp, Homo sapien
ccggatagagattcggcggctccat

SEQ ID NO: 354861 - DNA, 25 bp, Homo sapien
gacaggtcgtacacgtagagcttca

SEQ ID NO: 354862 - DNA, 25 bp, Homo sapien
gcggccacgacggccctcgggcacc

SEQ ID NO: 354863 - DNA, 25 bp, Homo sapien
acgacggccctcgggcacccggcag

SEQ ID NO: 354864 - DNA, 25 bp, Homo sapien
gacggccctcgggcacccggcagcg

SEQ ID NO: 354865 - DNA, 25 bp, Homo sapien
cacgacggccctcgggcacccggca

SEQ ID NO: 354866 - DNA, 25 bp, Homo sapien
tacccgacgggagtgcgaagcggag

SEQ ID NO: 354867 - DNA, 25 bp, Homo sapien
acgggagtgcgaagcggagggagag

SEQ ID NO: 354868 - DNA, 25 bp, Homo sapien
cgtacccgacgggagtgcgaagcgg

SEQ ID NO: 354869 - DNA, 25 bp, Homo sapien
cccgacgggagtgcgaagcggaggg

SEQ ID NO: 354870 - DNA, 25 bp, Homo sapien
aacgactactgtgaggtgacagaga

SEQ ID NO: 354871 - DNA, 25 bp, Homo sapien
ccggcaacgactactgtgaggtgac

SEQ ID NO: 354872 - DNA, 25 bp, Homo sapien
gcaacgactactgtgaggtgacaga

SEQ ID NO: 354873 - DNA, 25 bp, Homo sapien
ctaccggcaacgactactgtgaggt

SEQ ID NO: 354874 - DNA, 25 bp, Homo sapien
tgtccaagttggtcgcttccctgcg

SEQ ID NO: 354875 - DNA, 25 bp, Homo sapien
catttgtgttgttcgccagctaggc

SEQ ID NO: 354876 - DNA, 25 bp, Homo sapien
ttgattgggaccgagtacagggccc

SEQ ID NO: 354877 - DNA, 25 bp, Homo sapien
cgtgccagcctgacgcgatatagtg

SEQ ID NO: 354878 - DNA, 25 bp, Homo sapien
cttgcaggacattaaaacacagact

SEQ ID NO: 354879 - DNA, 25 bp, Homo sapien
aatggaacccttgatgcctaaagac

SEQ ID NO: 354880 - DNA, 25 bp, Homo sapien
tctttgaggatatgatgacagctac

SEQ ID NO: 354881 - DNA, 25 bp, Homo sapien
taatttcagagagttaatggaaccc

SEQ ID NO: 354882 - DNA, 25 bp, Homo sapien
tatcgtcaactctccttcaagcagc

SEQ ID NO: 354883 - DNA, 25 bp, Homo sapien
gccaccaaatggttgatgttgttag

SEQ ID NO: 354884 - DNA, 25 bp, Homo sapien
gagaatttcccggtatgattttgtg

SEQ ID NO: 354885 - DNA, 25 bp, Homo sapien
tatattaggtgcttgccccaggaac

SEQ ID NO: 354886 - DNA, 25 bp, Homo sapien
gtaaacaccaccgcacttggacgag

SEQ ID NO: 354887 - DNA, 25 bp, Homo sapien
taaacaccaccgcacttggacgagc

SEQ ID NO: 354888 - DNA, 25 bp, Homo sapien
aaacaccaccgcacttggacgagcc

SEQ ID NO: 354889 - DNA, 25 bp, Homo sapien
cagagtgctaggactgtaagcgtga

SEQ ID NO: 354890 - DNA, 25 bp, Homo sapien
cccagagtgctaggactgtaagcgt

SEQ ID NO: 354891 - DNA, 25 bp, Homo sapien
cctcacctggccaataattcacttt

SEQ ID NO: 354892 - DNA, 25 bp, Homo sapien
cacctcacctggccaataattcact

SEQ ID NO: 354893 - DNA, 25 bp, Homo sapien
gggtgacttagagatactttgtctc

SEQ ID NO: 354894 - DNA, 25 bp, Homo sapien
cagcgtgggtgacttagagatactt

SEQ ID NO: 354895 - DNA, 25 bp, Homo sapien
gacttagagatactttgtctctaca

SEQ ID NO: 354896 - DNA, 25 bp, Homo sapien
cgtgggtgacttagagatactttgt

SEQ ID NO: 354897 - DNA, 25 bp, Homo sapien
caagggtacgctgggcaagttcact

SEQ ID NO: 354898 - DNA, 25 bp, Homo sapien
aatgtgtttctcctgagctaggaag

SEQ ID NO: 354899 - DNA, 25 bp, Homo sapien
aaggcccaaggtggagtattcagaa

SEQ ID NO: 354900 - DNA, 25 bp, Homo sapien
tctacccgacataagtcgagggact

SEQ ID NO: 354901 - DNA, 25 bp, Homo sapien
taaacgacacttggacatagccgaa

SEQ ID NO: 354902 - DNA, 25 bp, Homo sapien
gtgccaagtgtccaccaaagaaagt

SEQ ID NO: 354903 - DNA, 25 bp, Homo sapien
tgttacagctaccagccaggtctcc

SEQ ID NO: 354904 - DNA, 25 bp, Homo sapien
gaaaccccttgatcacttgaacacg

SEQ ID NO: 354905 - DNA, 25 bp, Homo sapien
accccgcacacaacaggaagctagt

SEQ ID NO: 354906 - DNA, 25 bp, Homo sapien
tctgtctgctctgaacacttgttcc

SEQ ID NO: 354907 - DNA, 25 bp, Homo sapien
tctttctgcctttcaacggtgccac

SEQ ID NO: 354908 - DNA, 25 bp, Homo sapien
ctagtggctgaaagctggaaccaga

SEQ ID NO: 354909 - DNA, 25 bp, Homo sapien
cttggagcgcacaaacacgtagggc

SEQ ID NO: 354910 - DNA, 25 bp, Homo sapien
gagcgcacaaacacgtagggcacat

SEQ ID NO: 354911 - DNA, 25 bp, Homo sapien
gcgcacaaacacgtagggcacattc

SEQ ID NO: 354912 - DNA, 25 bp, Homo sapien
ttggagcgcacaaacacgtagggca

SEQ ID NO: 354913 - DNA, 25 bp, Homo sapien
ggcagccacaacaaactgggaagaa

SEQ ID NO: 354914 - DNA, 25 bp, Homo sapien
gaatgcctaggcacacacaattatg

SEQ ID NO: 354915 - DNA, 25 bp, Homo sapien
accggccctgggatatgataaagga

SEQ ID NO: 354916 - DNA, 25 bp, Homo sapien
aattatgtgtcctagaccggccctg

SEQ ID NO: 354917 - DNA, 25 bp, Homo sapien
catctatcccatgtggcattttcca

SEQ ID NO: 354918 - DNA, 25 bp, Homo sapien
tgctgggtttgaattgaagaaaaaa

SEQ ID NO: 354919 - DNA, 25 bp, Homo sapien
aggagttatgctgggtttgaattga

SEQ ID NO: 354920 - DNA, 25 bp, Homo sapien
tcatctatcccatgtggcattttcc

SEQ ID NO: 354921 - DNA, 25 bp, Homo sapien
catattgggtactgtccatgctggt

SEQ ID NO: 354922 - DNA, 25 bp, Homo sapien
atccatattgggtactgtccatgct

SEQ ID NO: 354923 - DNA, 25 bp, Homo sapien
tcatccatattgggtactgtccatg

SEQ ID NO: 354924 - DNA, 25 bp, Homo sapien
ccatattgggtactgtccatgctgg

SEQ ID NO: 354925 - DNA, 25 bp, Homo sapien
accaccacagttgctatctcttgaa

SEQ ID NO: 354926 - DNA, 25 bp, Homo sapien
tttaagcctgctggcctcctttggg

SEQ ID NO: 354927 - DNA, 25 bp, Homo sapien
tttctcttttcagcacgcatctttc

SEQ ID NO: 354928 - DNA, 25 bp, Homo sapien
agtttgagaatacttttaagcctgc

SEQ ID NO: 354929 - DNA, 25 bp, Homo sapien
acttactccgtaagcttttagccat

SEQ ID NO: 354930 - DNA, 25 bp, Homo sapien
ccctacaaaagtcataggagtgact

SEQ ID NO: 354931 - DNA, 25 bp, Homo sapien
taagtgttaagtaagatcatagcaa

SEQ ID NO: 354932 - DNA, 25 bp, Homo sapien
tccttagaatccctcaagcatgcct

SEQ ID NO: 354933 - DNA, 25 bp, Homo sapien
taacagtggcctacatggtctcatg

SEQ ID NO: 354934 - DNA, 25 bp, Homo sapien
aagtgagagtatcctatatcacctc

SEQ ID NO: 354935 - DNA, 25 bp, Homo sapien
agagtatcctatatcacctctgggc

SEQ ID NO: 354936 - DNA, 25 bp, Homo sapien
taatgaataaagtgagagtatccta

SEQ ID NO: 354937 - DNA, 25 bp, Homo sapien
catgcatacataattattctactga

SEQ ID NO: 354938 - DNA, 25 bp, Homo sapien
gctgaacgaggtccagtagcttctt

SEQ ID NO: 354939 - DNA, 25 bp, Homo sapien
tacatgactgctgaacgaggtccag

SEQ ID NO: 354940 - DNA, 25 bp, Homo sapien
ggctcctttccgaagctgcttatag

SEQ ID NO: 354941 - DNA, 25 bp, Homo sapien
ctttccgaagctgcttatagttaca

SEQ ID NO: 354942 - DNA, 25 bp, Homo sapien
tgtgcctttcctaaatgctgtatta

SEQ ID NO: 354943 - DNA, 25 bp, Homo sapien
ccttgtggttagcaatttggtatac

SEQ ID NO: 354944 - DNA, 25 bp, Homo sapien
atccagtggcaggactttgttcaaa

SEQ ID NO: 354945 - DNA, 25 bp, Homo sapien
taggcggtaaccaggtagaagatga

SEQ ID NO: 354946 - DNA, 25 bp, Homo sapien
tcgtgtgtaacgtgcgaatcgcgag

SEQ ID NO: 354947 - DNA, 25 bp, Homo sapien
cagtcgctggagacggagatggcct

SEQ ID NO: 354948 - DNA, 25 bp, Homo sapien
gagtgattcactgcggctaccacct

SEQ ID NO: 354949 - DNA, 25 bp, Homo sapien
ggccccacatgtcgccatcgtgtgt

SEQ ID NO: 354950 - DNA, 25 bp, Homo sapien
gataccacgcgtgtcggtttggacg

SEQ ID NO: 354951 - DNA, 25 bp, Homo sapien
ggtttggacggtctgctgcccagca

SEQ ID NO: 354952 - DNA, 25 bp, Homo sapien
tcttggtagtctcttgccggacacc

SEQ ID NO: 354953 - DNA, 25 bp, Homo sapien
tatcttaggcgaatttgtcttggtc

SEQ ID NO: 354954 - DNA, 25 bp, Homo sapien
ccagacagccaaaacttgcaaggtt

SEQ ID NO: 354955 - DNA, 25 bp, Homo sapien
tactgcgtgcttactctgtaccaag

SEQ ID NO: 354956 - DNA, 25 bp, Homo sapien
tccctacctagcatgatcagtttgg

SEQ ID NO: 354957 - DNA, 25 bp, Homo sapien
ttggtttcgctgtacaccagacagc

SEQ ID NO: 354958 - DNA, 25 bp, Homo sapien
tgccaaccaaaactactacgccagg

SEQ ID NO: 354959 - DNA, 25 bp, Homo sapien
gcaaagttcaacctgagaccatccg

SEQ ID NO: 354960 - DNA, 25 bp, Homo sapien
tcagggagctgcgttaaagcgagca

SEQ ID NO: 354961 - DNA, 25 bp, Homo sapien
gaagcttcaagttctaggctcagcc

SEQ ID NO: 354962 - DNA, 25 bp, Homo sapien
aaagtcagagacgaccaagagttta

SEQ ID NO: 354963 - DNA, 25 bp, Homo sapien
gaccaagagtttagagacgccgcac

SEQ ID NO: 354964 - DNA, 25 bp, Homo sapien
ctttccctagatgtttaaaagtcag

SEQ ID NO: 354965 - DNA, 25 bp, Homo sapien
agagtttagagacgccgcacgtggt

SEQ ID NO: 354966 - DNA, 25 bp, Homo sapien
ccgccttgcaggagaagcctttcct

SEQ ID NO: 354967 - DNA, 25 bp, Homo sapien
tgagtcgcgctcacttcatgttccc

SEQ ID NO: 354968 - DNA, 25 bp, Homo sapien
ctctaggtccctggcgcgtgtgact

SEQ ID NO: 354969 - DNA, 25 bp, Homo sapien
taagcgcagacccatgggagatctc

SEQ ID NO: 354970 - DNA, 25 bp, Homo sapien
gagcgcagctgacgtttcagaagca

SEQ ID NO: 354971 - DNA, 25 bp, Homo sapien
cgaaggtgacgctacgcgagcgagt

SEQ ID NO: 354972 - DNA, 25 bp, Homo sapien
cgtgcaccggaaaaactcacagaag

SEQ ID NO: 354973 - DNA, 25 bp, Homo sapien
ttccgcgggctcagcactcctaggg

SEQ ID NO: 354974 - DNA, 25 bp, Homo sapien
ggctggtctcaaacggctattctca

SEQ ID NO: 354975 - DNA, 25 bp, Homo sapien
caggcactacggatacatagataga

SEQ ID NO: 354976 - DNA, 25 bp, Homo sapien
ttttccttgggtatttactctgtgc

SEQ ID NO: 354977 - DNA, 25 bp, Homo sapien
gatactggatcaggcactacggata

SEQ ID NO: 354978 - DNA, 25 bp, Homo sapien
tttcaaactcccgtcttcagtggat

SEQ ID NO: 354979 - DNA, 25 bp, Homo sapien
gttctttcgacagatgccatctcag

SEQ ID NO: 354980 - DNA, 25 bp, Homo sapien
cagtggataccaaaaatcggaaagc

SEQ ID NO: 354981 - DNA, 25 bp, Homo sapien
caatctaaaaatggaggcactgttc

SEQ ID NO: 354982 - DNA, 25 bp, Homo sapien
cgagggcctcttttatcctggtcaa

SEQ ID NO: 354983 - DNA, 25 bp, Homo sapien
tatcctggtcaacgggagtgctaac

SEQ ID NO: 354984 - DNA, 25 bp, Homo sapien
gcatgtttgtcagacccgagggcct

SEQ ID NO: 354985 - DNA, 25 bp, Homo sapien
taaccctatgcatgtttgtcagacc

SEQ ID NO: 354986 - DNA, 25 bp, Homo sapien
tctatgctgagctggaagtcttcca

SEQ ID NO: 354987 - DNA, 25 bp, Homo sapien
tagagattgctcagggtgcagtagc

SEQ ID NO: 354988 - DNA, 25 bp, Homo sapien
tgaccagcaggttacatgaagcggg

SEQ ID NO: 354989 - DNA, 25 bp, Homo sapien
taagagcaatgtcaatcagaggcat

SEQ ID NO: 354990 - DNA, 25 bp, Homo sapien
tatgcaccctcgtgggtagatcctg

SEQ ID NO: 354991 - DNA, 25 bp, Homo sapien
tggtgtttatgcaccctcgtgggta

SEQ ID NO: 354992 - DNA, 25 bp, Homo sapien
tcagaactggtgtttatgcaccctc

SEQ ID NO: 354993 - DNA, 25 bp, Homo sapien
cctcgtgggtagatcctgggaatgc

SEQ ID NO: 354994 - DNA, 25 bp, Homo sapien
gaaccagacgatgacagtggagctg

SEQ ID NO: 354995 - DNA, 25 bp, Homo sapien
tagtggcttgaaccagacgatgaca

SEQ ID NO: 354996 - DNA, 25 bp, Homo sapien
tgtggcagttgatagtggcttgaac

SEQ ID NO: 354997 - DNA, 25 bp, Homo sapien
gagctgctgagaaatggtcaggttc

SEQ ID NO: 354998 - DNA, 25 bp, Homo sapien
caaaagatgactaggcactgccagg

SEQ ID NO: 354999 - DNA, 25 bp, Homo sapien
tctgacccggctaggttaggctgag

SEQ ID NO: 355000 - DNA, 25 bp, Homo sapien
ggatcaggattcactcacagagaca

SEQ ID NO: 355001 - DNA, 25 bp, Homo sapien
gctagtcctagttgggcctaccaca

SEQ ID NO: 355002 - DNA, 25 bp, Homo sapien
gaagtttacaacacgaccagctgca

SEQ ID NO: 355003 - DNA, 25 bp, Homo sapien
tctgagctgctgatcgatgacgcgc

SEQ ID NO: 355004 - DNA, 25 bp, Homo sapien
ggagggacctcactatgcaaatctg

SEQ ID NO: 355005 - DNA, 25 bp, Homo sapien
gttaagatgatgaccggacggctac

SEQ ID NO: 355006 - DNA, 25 bp, Homo sapien
gaagagataaatgcagcagctaatt

SEQ ID NO: 355007 - DNA, 25 bp, Homo sapien
acatccccgttgtgcagatgaagaa

SEQ ID NO: 355008 - DNA, 25 bp, Homo sapien
tgcagcagctaattgaaaaggatct

SEQ ID NO: 355009 - DNA, 25 bp, Homo sapien
ccttgcaggcatgtatgatggctac

SEQ ID NO: 355010 - DNA, 25 bp, Homo sapien
tcaagttcagctgggtaacacacta

SEQ ID NO: 355011 - DNA, 25 bp, Homo sapien
taggcaaacccttgcacacctgtgt

SEQ ID NO: 355012 - DNA, 25 bp, Homo sapien
tctgaacattgcttatctgcgtaca

SEQ ID NO: 355013 - DNA, 25 bp, Homo sapien
catgggcgtgtatcttccaaagagg

SEQ ID NO: 355014 - DNA, 25 bp, Homo sapien
gttacgtctgtaatggttgacactg

SEQ ID NO: 355015 - DNA, 25 bp, Homo sapien
caaagtagcatgttcagtgtgatct

SEQ ID NO: 355016 - DNA, 25 bp, Homo sapien
ggaacagggtgcaaagtagcatgtt

SEQ ID NO: 355017 - DNA, 25 bp, Homo sapien
tgcaagcaagccttgtagaggaaga

SEQ ID NO: 355018 - DNA, 25 bp, Homo sapien
gattcacgcgctttcattatctctg

SEQ ID NO: 355019 - DNA, 25 bp, Homo sapien
aaaagataactgtccaacaatgctg

SEQ ID NO: 355020 - DNA, 25 bp, Homo sapien
gctcagggctaagccctttacactc

SEQ ID NO: 355021 - DNA, 25 bp, Homo sapien
ttatctcatttagccctgctgcaag

SEQ ID NO: 355022 - DNA, 25 bp, Homo sapien
agaaatcatggttattaagaatcca

SEQ ID NO: 355023 - DNA, 25 bp, Homo sapien
cttagaaatcatggttattaagaat

SEQ ID NO: 355024 - DNA, 25 bp, Homo sapien
tagaaatcatggttattaagaatcc

SEQ ID NO: 355025 - DNA, 25 bp, Homo sapien
ttagaaatcatggttattaagaatc

SEQ ID NO: 355026 - DNA, 25 bp, Homo sapien
tcgaaagtttaaaatagccagtggc

SEQ ID NO: 355027 - DNA, 25 bp, Homo sapien
gcactgcacacctcaagctttggaa

SEQ ID NO: 355028 - DNA, 25 bp, Homo sapien
gactgccttggcacacgatttgaga

SEQ ID NO: 355029 - DNA, 25 bp, Homo sapien
ccaaaggaagctagtgtggtctcaa

SEQ ID NO: 355030 - DNA, 25 bp, Homo sapien
gaatgatgttatcccggcaagtgga

SEQ ID NO: 355031 - DNA, 25 bp, Homo sapien
tctgaagccgttacattcgctgatg

SEQ ID NO: 355032 - DNA, 25 bp, Homo sapien
catgaaacagcgctgctcctgtggg

SEQ ID NO: 355033 - DNA, 25 bp, Homo sapien
ttagagcccagtaaaggtcagaacc

SEQ ID NO: 355034 - DNA, 25 bp, Homo sapien
gaggtttcaccatgtcattcaggct

SEQ ID NO: 355035 - DNA, 25 bp, Homo sapien
ggtcttgaactcctgatctcgggca

SEQ ID NO: 355036 - DNA, 25 bp, Homo sapien
tcctgatctcgggcaatccgcctgc

SEQ ID NO: 355037 - DNA, 25 bp, Homo sapien
tgaactcctgatctcgggcaatccg

SEQ ID NO: 355038 - DNA, 25 bp, Homo sapien
tagagccaaggctgtagcatttcct

SEQ ID NO: 355039 - DNA, 25 bp, Homo sapien
gactcagcaggtaagttgtccaaag

SEQ ID NO: 355040 - DNA, 25 bp, Homo sapien
ctatcaagcagacccttaaccggcg

SEQ ID NO: 355041 - DNA, 25 bp, Homo sapien
tccctgaagtagatgtgacacccta

SEQ ID NO: 355042 - DNA, 25 bp, Homo sapien
ggaaagaggataccaaacctctctg

SEQ ID NO: 355043 - DNA, 25 bp, Homo sapien
cggaaagaggataccaaacctctct

SEQ ID NO: 355044 - DNA, 25 bp, Homo sapien
taaagatacggaaagaggataccaa

SEQ ID NO: 355045 - DNA, 25 bp, Homo sapien
ctttctaaagatacggaaagaggat

SEQ ID NO: 355046 - DNA, 25 bp, Homo sapien
agcatcttcccgctgagagtggtgg

SEQ ID NO: 355047 - DNA, 25 bp, Homo sapien
ttaaagctgctgtcactagatgccc

SEQ ID NO: 355048 - DNA, 25 bp, Homo sapien
gtcttcttagctgtcacctgccgag

SEQ ID NO: 355049 - DNA, 25 bp, Homo sapien
tgggcagccctgacttgatagcagc

SEQ ID NO: 355050 - DNA, 25 bp, Homo sapien
cccgcctgcgtgttgtgtgtatgtc

SEQ ID NO: 355051 - DNA, 25 bp, Homo sapien
gcactaggaatgaggtcccctgcct

SEQ ID NO: 355052 - DNA, 25 bp, Homo sapien
actgtaatttatggaccctgcccgc

SEQ ID NO: 355053 - DNA, 25 bp, Homo sapien
cctcgatgcgggtcctaggagaaaa

SEQ ID NO: 355054 - DNA, 25 bp, Homo sapien
aagagctggccttacggcaggcgct

SEQ ID NO: 355055 - DNA, 25 bp, Homo sapien
atttacaagacgaacccgcggcctg

SEQ ID NO: 355056 - DNA, 25 bp, Homo sapien
cactgccgttgaggcagacagaaga

SEQ ID NO: 355057 - DNA, 25 bp, Homo sapien
ctgaggctccgacgggcagacagga

SEQ ID NO: 355058 - DNA, 25 bp, Homo sapien
tgctattggtccttaggtaccggga

SEQ ID NO: 355059 - DNA, 25 bp, Homo sapien
ggagctgcgggttgaaggtctcagg

SEQ ID NO: 355060 - DNA, 25 bp, Homo sapien
tcacacggtgacctcggtcttgcta

SEQ ID NO: 355061 - DNA, 25 bp, Homo sapien
acactgaactggcgccgggccgcgt

SEQ ID NO: 355062 - DNA, 25 bp, Homo sapien
ccgagccgtcgggtggctgagcggg

SEQ ID NO: 355063 - DNA, 25 bp, Homo sapien
gggccgggcgactggaggtccaggc

SEQ ID NO: 355064 - DNA, 25 bp, Homo sapien
gtccaggcggcataggggcccggcg

SEQ ID NO: 355065 - DNA, 25 bp, Homo sapien
ctggaaggcccgagccgtcgggtgg

SEQ ID NO: 355066 - DNA, 25 bp, Homo sapien
gaaacgctgacagaagtcccgcggg

SEQ ID NO: 355067 - DNA, 25 bp, Homo sapien
ttgccgcggggacggctcgagggcg

SEQ ID NO: 355068 - DNA, 25 bp, Homo sapien
gtccagcggcgcaggcaagtccggg

SEQ ID NO: 355069 - DNA, 25 bp, Homo sapien
gcggggaaacgctgacagaagtccc

SEQ ID NO: 355070 - DNA, 25 bp, Homo sapien
ccttgagcgcggcggccttgaacgt

SEQ ID NO: 355071 - DNA, 25 bp, Homo sapien
tggctgcagcgtcaggctgccgccg

SEQ ID NO: 355072 - DNA, 25 bp, Homo sapien
gcgtacttggcgtagtctggctgca

SEQ ID NO: 355073 - DNA, 25 bp, Homo sapien
cggcggccttgaacgtggcgtactt

SEQ ID NO: 355074 - DNA, 25 bp, Homo sapien
gggcgcgttgttgaggcgcttcttg

SEQ ID NO: 355075 - DNA, 25 bp, Homo sapien
ggcgcgttgttgaggcgcttcttgt

SEQ ID NO: 355076 - DNA, 25 bp, Homo sapien
ccccggggcgcgttgttgaggcgct

SEQ ID NO: 355077 - DNA, 25 bp, Homo sapien
cggggcgcgttgttgaggcgcttct

SEQ ID NO: 355078 - DNA, 25 bp, Homo sapien
cgttctccgggcgaggctgcgagcc

SEQ ID NO: 355079 - DNA, 25 bp, Homo sapien
cccgaggccgttcggtgagaacctg

SEQ ID NO: 355080 - DNA, 25 bp, Homo sapien
acagggcctggctccgagtcacgcg

SEQ ID NO: 355081 - DNA, 25 bp, Homo sapien
gccaagcctgtcttcgccgcagcct

SEQ ID NO: 355082 - DNA, 25 bp, Homo sapien
cgggggaggccgtcccccatctgca

SEQ ID NO: 355083 - DNA, 25 bp, Homo sapien
ggggcccggctgcttcagaagctct

SEQ ID NO: 355084 - DNA, 25 bp, Homo sapien
ggcccggctgcttcagaagctctgt

SEQ ID NO: 355085 - DNA, 25 bp, Homo sapien
ctgcttcagaagctctgtcagcgcc

SEQ ID NO: 355086 - DNA, 25 bp, Homo sapien
acagccacccaggggtgggcccagg

SEQ ID NO: 355087 - DNA, 25 bp, Homo sapien
ttatttacctgcctgcctaactgcc

SEQ ID NO: 355088 - DNA, 25 bp, Homo sapien
ccggcccaggatgccttatttacct

SEQ ID NO: 355089 - DNA, 25 bp, Homo sapien
catcacgggcatgaaggacagatgg

SEQ ID NO: 355090 - DNA, 25 bp, Homo sapien
acctgggataaagctgccatcacgg

SEQ ID NO: 355091 - DNA, 25 bp, Homo sapien
cgcgcgggctgtgcgccctctccag

SEQ ID NO: 355092 - DNA, 25 bp, Homo sapien
cgcgcgcgcgggctgtgcgccctct

SEQ ID NO: 355093 - DNA, 25 bp, Homo sapien
tctccagtcccaggcgcgccccgat

SEQ ID NO: 355094 - DNA, 25 bp, Homo sapien
tggtcactgtgcgccgcgcgcgcgg

SEQ ID NO: 355095 - DNA, 25 bp, Homo sapien
gcgacgccgcacacagcgtagacgg

SEQ ID NO: 355096 - DNA, 25 bp, Homo sapien
acacagcgtagacggccgtatggct

SEQ ID NO: 355097 - DNA, 25 bp, Homo sapien
gccgcacacagcgtagacggccgta

SEQ ID NO: 355098 - DNA, 25 bp, Homo sapien
tgcgacgccgcacacagcgtagacg

SEQ ID NO: 355099 - DNA, 25 bp, Homo sapien
ggtcccggggcgctgcggtgtcgcg

SEQ ID NO: 355100 - DNA, 25 bp, Homo sapien
gggcgggcggccggcctgtctggac

SEQ ID NO: 355101 - DNA, 25 bp, Homo sapien
cggggcgctgcggtgtcgcgggcgc

SEQ ID NO: 355102 - DNA, 25 bp, Homo sapien
ggcgctgcggtgtcgcgggcgcggg

SEQ ID NO: 355103 - DNA, 25 bp, Homo sapien
gcggcccgtcgtggcagcagaagcg

SEQ ID NO: 355104 - DNA, 25 bp, Homo sapien
cgtgtcgtagttggaacagcggctc

SEQ ID NO: 355105 - DNA, 25 bp, Homo sapien
aacagcggctctggtcgaggcgccg

SEQ ID NO: 355106 - DNA, 25 bp, Homo sapien
cgtagttggaacagcggctctggtc

SEQ ID NO: 355107 - DNA, 25 bp, Homo sapien
cagaagctgtaggctccggagctgc

SEQ ID NO: 355108 - DNA, 25 bp, Homo sapien
gcagaagctgtaggctccggagctg

SEQ ID NO: 355109 - DNA, 25 bp, Homo sapien
cactggcccatcacgtcgtagtagc

SEQ ID NO: 355110 - DNA, 25 bp, Homo sapien
tcccactggcccatcacgtcgtagt

SEQ ID NO: 355111 - DNA, 25 bp, Homo sapien
acgcgagccgaagcgcgagcgcgag

SEQ ID NO: 355112 - DNA, 25 bp, Homo sapien
cggccgcgccagcagcaacgcgagc

SEQ ID NO: 355113 - DNA, 25 bp, Homo sapien
agcagcaacgcgagccgaagcgcga

SEQ ID NO: 355114 - DNA, 25 bp, Homo sapien
ggaggacggcggccgccgagcagtc

SEQ ID NO: 355115 - DNA, 25 bp, Homo sapien
cgcacgccgcctcggccgtcggcct

SEQ ID NO: 355116 - DNA, 25 bp, Homo sapien
tactgcgcccggtgcatggccgggc

SEQ ID NO: 355117 - DNA, 25 bp, Homo sapien
tccgctcccgcagggatcgcgctgg

SEQ ID NO: 355118 - DNA, 25 bp, Homo sapien
gaggccgcacctccggtgggcgcgt

SEQ ID NO: 355119 - DNA, 25 bp, Homo sapien
ctcggacccgagctgcccggtccgc

SEQ ID NO: 355120 - DNA, 25 bp, Homo sapien
ggacccgagctgcccggtccgcgtc

SEQ ID NO: 355121 - DNA, 25 bp, Homo sapien
tcggacccgagctgcccggtccgcg

SEQ ID NO: 355122 - DNA, 25 bp, Homo sapien
cggacccgagctgcccggtccgcgt

SEQ ID NO: 355123 - DNA, 25 bp, Homo sapien
cgcgggccgcccgactgcgctacct

SEQ ID NO: 355124 - DNA, 25 bp, Homo sapien
gcaggtgtgcgggtcttggccctag

SEQ ID NO: 355125 - DNA, 25 bp, Homo sapien
gtcttggccctagcggaggccgcgc

SEQ ID NO: 355126 - DNA, 25 bp, Homo sapien
tgtgcgggtcttggccctagcggag

SEQ ID NO: 355127 - DNA, 25 bp, Homo sapien
cagaacccctcgaacgctgggctgg

SEQ ID NO: 355128 - DNA, 25 bp, Homo sapien
gcgcgagcccagttccagaacccct

SEQ ID NO: 355129 - DNA, 25 bp, Homo sapien
ggctgacgcacttccgcgatctgct

SEQ ID NO: 355130 - DNA, 25 bp, Homo sapien
atccctgcgtcgatgggcacggctt

SEQ ID NO: 355131 - DNA, 25 bp, Homo sapien
gagggcccacggctgtctttgtctc

SEQ ID NO: 355132 - DNA, 25 bp, Homo sapien
ggctccaaagccctcagtgtacgtg

SEQ ID NO: 355133 - DNA, 25 bp, Homo sapien
tttgtctcccgcgaggcaactctga

SEQ ID NO: 355134 - DNA, 25 bp, Homo sapien
tgcgaatccggagcggacaccgaga

SEQ ID NO: 355135 - DNA, 25 bp, Homo sapien
gcggaagccgcgcagagactcgctt

SEQ ID NO: 355136 - DNA, 25 bp, Homo sapien
agagactcgcttgccccgaagtcgc

SEQ ID NO: 355137 - DNA, 25 bp, Homo sapien
cccgaagtcgctggattcgggcctg

SEQ ID NO: 355138 - DNA, 25 bp, Homo sapien
gggctgacggcggaagccgcgcaga

SEQ ID NO: 355139 - DNA, 25 bp, Homo sapien
tactggacacgggtcatttcttccc

SEQ ID NO: 355140 - DNA, 25 bp, Homo sapien
gaaaaatacaccacacactcgaggc

SEQ ID NO: 355141 - DNA, 25 bp, Homo sapien
gactacatcatggattccggtccag

SEQ ID NO: 355142 - DNA, 25 bp, Homo sapien
gaggagaaccttgcatacaacccct

SEQ ID NO: 355143 - DNA, 25 bp, Homo sapien
cagtttaaaagcaggacggctctga

SEQ ID NO: 355144 - DNA, 25 bp, Homo sapien
tgagagagctacctgccagcatgtt

SEQ ID NO: 355145 - DNA, 25 bp, Homo sapien
gatggccaaataagcccagcactgg

SEQ ID NO: 355146 - DNA, 25 bp, Homo sapien
caaaatggcatcttaggttctggca

SEQ ID NO: 355147 - DNA, 25 bp, Homo sapien
tagcctggtcccagaaagagggcat

SEQ ID NO: 355148 - DNA, 25 bp, Homo sapien
gctgggctaccaccttcaagggctg

SEQ ID NO: 355149 - DNA, 25 bp, Homo sapien
tcaaagatggtgaggtctgaagcca

SEQ ID NO: 355150 - DNA, 25 bp, Homo sapien
cattttggcttaatggtgccttccc

SEQ ID NO: 355151 - DNA, 25 bp, Homo sapien
tattgttgctcagggccggccgtct

SEQ ID NO: 355152 - DNA, 25 bp, Homo sapien
ctattgttgctcagggccggccgtc

SEQ ID NO: 355153 - DNA, 25 bp, Homo sapien
ttgttgctcagggccggccgtcttg

SEQ ID NO: 355154 - DNA, 25 bp, Homo sapien
gttgctcagggccggccgtcttggt

SEQ ID NO: 355155 - DNA, 25 bp, Homo sapien
agcccagctctgtggctggcacagg

SEQ ID NO: 355156 - DNA, 25 bp, Homo sapien
cagctctgtggctggcacagggaca

SEQ ID NO: 355157 - DNA, 25 bp, Homo sapien
cagttcagtggagcccagctctgtg

SEQ ID NO: 355158 - DNA, 25 bp, Homo sapien
cccagctctgtggctggcacaggga

SEQ ID NO: 355159 - DNA, 25 bp, Homo sapien
tcagagattcccggagacagaatga

SEQ ID NO: 355160 - DNA, 25 bp, Homo sapien
cagagattcccggagacagaatgat

SEQ ID NO: 355161 - DNA, 25 bp, Homo sapien
agagattcccggagacagaatgatg

SEQ ID NO: 355162 - DNA, 25 bp, Homo sapien
gcgcccaccgactcctgcggctgca

SEQ ID NO: 355163 - DNA, 25 bp, Homo sapien
ggctgcagcgccgtcctgggcgcag

SEQ ID NO: 355164 - DNA, 25 bp, Homo sapien
ctgcggaggacgcgccgcgaagccg

SEQ ID NO: 355165 - DNA, 25 bp, Homo sapien
acgcgccgcgaagccgccgctgtcg

SEQ ID NO: 355166 - DNA, 25 bp, Homo sapien
ggtcgaagcactcggccgggacgca

SEQ ID NO: 355167 - DNA, 25 bp, Homo sapien
gcggcgtgcgcaggagcccgcaggc

SEQ ID NO: 355168 - DNA, 25 bp, Homo sapien
tggcggaccagcaggtcgaagcact

SEQ ID NO: 355169 - DNA, 25 bp, Homo sapien
cggtttcggccgcggcgtgcgcagg

SEQ ID NO: 355170 - DNA, 25 bp, Homo sapien
gccgcacaagctgcggggactgagg

SEQ ID NO: 355171 - DNA, 25 bp, Homo sapien
ccgacgccgccgcacaagctgcggg

SEQ ID NO: 355172 - DNA, 25 bp, Homo sapien
gtgccgacgccgccgcacaagctgc

SEQ ID NO: 355173 - DNA, 25 bp, Homo sapien
ggtgccgacgccgccgcacaagctg

SEQ ID NO: 355174 - DNA, 25 bp, Homo sapien
cacacttgtgctgatgggggaagac

SEQ ID NO: 355175 - DNA, 25 bp, Homo sapien
ggaagacagcctcgcagcaagggca

SEQ ID NO: 355176 - DNA, 25 bp, Homo sapien
gcccaagtagcatgtgggtctgccc

SEQ ID NO: 355177 - DNA, 25 bp, Homo sapien
ccctgagggaatctcacacttgtgc

SEQ ID NO: 355178 - DNA, 25 bp, Homo sapien
aaggtgggccggaaggcttcatgga

SEQ ID NO: 355179 - DNA, 25 bp, Homo sapien
ggcttcatggagagggcgatggtga

SEQ ID NO: 355180 - DNA, 25 bp, Homo sapien
ctgcaagggtccctctctctggcac

SEQ ID NO: 355181 - DNA, 25 bp, Homo sapien
actgtggcccacgtccagggcaggt

SEQ ID NO: 355182 - DNA, 25 bp, Homo sapien
ctctggcactgtggcccacgtccag

SEQ ID NO: 355183 - DNA, 25 bp, Homo sapien
tgcaagggtccctctctctggcact

SEQ ID NO: 355184 - DNA, 25 bp, Homo sapien
aaataatgggcttgaggccagcaat

SEQ ID NO: 355185 - DNA, 25 bp, Homo sapien
aaaggcatcggttagcctggcgcca

SEQ ID NO: 355186 - DNA, 25 bp, Homo sapien
cttgccgagggtgagtgacctgcct

SEQ ID NO: 355187 - DNA, 25 bp, Homo sapien
ctcaactagctaggaagaaaggcat

SEQ ID NO: 355188 - DNA, 25 bp, Homo sapien
gcaaagacacgcattctggccaagg

SEQ ID NO: 355189 - DNA, 25 bp, Homo sapien
tcagggaccaaagtgaaggttcacc

SEQ ID NO: 355190 - DNA, 25 bp, Homo sapien
cagactcttggctggagaatgcgat

SEQ ID NO: 355191 - DNA, 25 bp, Homo sapien
gcaaaaagtgacatcccagatcagg

SEQ ID NO: 355192 - DNA, 25 bp, Homo sapien
tgaattggggaaacatcatctacct

SEQ ID NO: 355193 - DNA, 25 bp, Homo sapien
aaacatcatctacctcacaggtctg

SEQ ID NO: 355194 - DNA, 25 bp, Homo sapien
tgacaacggtctgtttcatgaactg

SEQ ID NO: 355195 - DNA, 25 bp, Homo sapien
gtgtgactgtgacacacctcccatg

SEQ ID NO: 355196 - DNA, 25 bp, Homo sapien
gtaatctcggttcaacaccacctcc

SEQ ID NO: 355197 - DNA, 25 bp, Homo sapien
taatctcggttcaacaccacctccg

SEQ ID NO: 355198 - DNA, 25 bp, Homo sapien
tgtaatctcggttcaacaccacctc

SEQ ID NO: 355199 - DNA, 25 bp, Homo sapien
cctgccctactcttaattgttctga

SEQ ID NO: 355200 - DNA, 25 bp, Homo sapien
ttcctcatctacaaagtcaaagtgg

SEQ ID NO: 355201 - DNA, 25 bp, Homo sapien
ttaattgttctgagtcagtttcctc

SEQ ID NO: 355202 - DNA, 25 bp, Homo sapien
aagtcaaagtggtgaatgagaccag

SEQ ID NO: 355203 - DNA, 25 bp, Homo sapien
tgtcaagccctgactggacatcctc

SEQ ID NO: 355204 - DNA, 25 bp, Homo sapien
gggctacagtctcgccagctgggcc

SEQ ID NO: 355205 - DNA, 25 bp, Homo sapien
tgtttatggagtcagcacgaagcca

SEQ ID NO: 355206 - DNA, 25 bp, Homo sapien
aatggagatgtaacacgccagctgc

SEQ ID NO: 355207 - DNA, 25 bp, Homo sapien
agagctgagacaccgggcacgtggc

SEQ ID NO: 355208 - DNA, 25 bp, Homo sapien
acaccgggcacgtggccagcacaga

SEQ ID NO: 355209 - DNA, 25 bp, Homo sapien
acagatctgcagcacgcgcaccagg

SEQ ID NO: 355210 - DNA, 25 bp, Homo sapien
agatctgcagcacgcgcaccaggcg

SEQ ID NO: 355211 - DNA, 25 bp, Homo sapien
tacttgggggtagctcaggtcacca

SEQ ID NO: 355212 - DNA, 25 bp, Homo sapien
tcattcatgccacacctcagagtag

SEQ ID NO: 355213 - DNA, 25 bp, Homo sapien
acacctcagagtagcttccaactgc

SEQ ID NO: 355214 - DNA, 25 bp, Homo sapien
acagcagtgagatagaatgctggcc

SEQ ID NO: 355215 - DNA, 25 bp, Homo sapien
tcccacactcggcccatgcacttgc

SEQ ID NO: 355216 - DNA, 25 bp, Homo sapien
aagtcccacactcggcccatgcact

SEQ ID NO: 355217 - DNA, 25 bp, Homo sapien
ggcaagtcccacactcggcccatgc

SEQ ID NO: 355218 - DNA, 25 bp, Homo sapien
cccacactcggcccatgcacttgct

SEQ ID NO: 355219 - DNA, 25 bp, Homo sapien
cacggtgtgccggtgaatgctgcag

SEQ ID NO: 355220 - DNA, 25 bp, Homo sapien
tttgataggtgtgggccagcttcac

SEQ ID NO: 355221 - DNA, 25 bp, Homo sapien
caggtcacagtagagcagggggctt

SEQ ID NO: 355222 - DNA, 25 bp, Homo sapien
gggctttgataggtgtgggccagct

SEQ ID NO: 355223 - DNA, 25 bp, Homo sapien
agagaacgataagctgacccagaga

SEQ ID NO: 355224 - DNA, 25 bp, Homo sapien
gggcaacttaacctcatgactgtaa

SEQ ID NO: 355225 - DNA, 25 bp, Homo sapien
gggtgcctcagcaagaagcctacgg

SEQ ID NO: 355226 - DNA, 25 bp, Homo sapien
gattttaccgaaagccacaggcaac

SEQ ID NO: 355227 - DNA, 25 bp, Homo sapien
cacctgtggcgaggaaacacacctt

SEQ ID NO: 355228 - DNA, 25 bp, Homo sapien
acctgtggcgaggaaacacaccttc

SEQ ID NO: 355229 - DNA, 25 bp, Homo sapien
caaaactttacaacggagaaagcag

SEQ ID NO: 355230 - DNA, 25 bp, Homo sapien
tttacaacggagaaagcagaagtcc

SEQ ID NO: 355231 - DNA, 25 bp, Homo sapien
aacggagaaagcagaagtccttgct

SEQ ID NO: 355232 - DNA, 25 bp, Homo sapien
cagagaacaaaactttacaacggag

SEQ ID NO: 355233 - DNA, 25 bp, Homo sapien
cattgtgcccggccgttgtgtattt

SEQ ID NO: 355234 - DNA, 25 bp, Homo sapien
aacattgtgcactgaccactggctc

SEQ ID NO: 355235 - DNA, 25 bp, Homo sapien
tcctcaccttacagattgacctcag

SEQ ID NO: 355236 - DNA, 25 bp, Homo sapien
gttaggtcaccgtctcagcacagtc

SEQ ID NO: 355237 - DNA, 25 bp, Homo sapien
acaaacacgatcaggtcaattcggg

SEQ ID NO: 355238 - DNA, 25 bp, Homo sapien
ctgtgaagattaaccacaaacacga

SEQ ID NO: 355239 - DNA, 25 bp, Homo sapien
taaccacaaacacgatcaggtcaat

SEQ ID NO: 355240 - DNA, 25 bp, Homo sapien
gaagattaaccacaaacacgatcag

SEQ ID NO: 355241 - DNA, 25 bp, Homo sapien
gagggcaaagggagggactttgcca

SEQ ID NO: 355242 - DNA, 25 bp, Homo sapien
tggagggcaaagggagggactttgc

SEQ ID NO: 355243 - DNA, 25 bp, Homo sapien
caaagggagggactttgccaagtgg

SEQ ID NO: 355244 - DNA, 25 bp, Homo sapien
gcaaagggagggactttgccaagtg

SEQ ID NO: 355245 - DNA, 25 bp, Homo sapien
gctgctgcagaagagcatcctccgt

SEQ ID NO: 355246 - DNA, 25 bp, Homo sapien
ttgagcatcgagtccgccagctgct

SEQ ID NO: 355247 - DNA, 25 bp, Homo sapien
tgctgcagaagagcatcctccgtgc

SEQ ID NO: 355248 - DNA, 25 bp, Homo sapien
aggcgcagtcctctttgagcatcga

SEQ ID NO: 355249 - DNA, 25 bp, Homo sapien
ccagcaggcggctcggaggacattt

SEQ ID NO: 355250 - DNA, 25 bp, Homo sapien
ctgaggtttggacccgctgcaggcc

SEQ ID NO: 355251 - DNA, 25 bp, Homo sapien
agagagagcggacagtcgagcccta

SEQ ID NO: 355252 - DNA, 25 bp, Homo sapien
catttcccgagaagtggaccccgcg

SEQ ID NO: 355253 - DNA, 25 bp, Homo sapien
gtgttcaggccgggcagcttgtcca

SEQ ID NO: 355254 - DNA, 25 bp, Homo sapien
cgtgttcaggccgggcagcttgtcc

SEQ ID NO: 355255 - DNA, 25 bp, Homo sapien
tgttcaggccgggcagcttgtccag

SEQ ID NO: 355256 - DNA, 25 bp, Homo sapien
ggccgtgttcaggccgggcagcttg

SEQ ID NO: 355257 - DNA, 25 bp, Homo sapien
gccgatctttcaaaccgccctgagt

SEQ ID NO: 355258 - DNA, 25 bp, Homo sapien
ttgctcctgcggtgcgcgccgatct

SEQ ID NO: 355259 - DNA, 25 bp, Homo sapien
gaccaaccgttgctcctgcggtgcg

SEQ ID NO: 355260 - DNA, 25 bp, Homo sapien
cacagccgcaggaccaaccgttgct

SEQ ID NO: 355261 - DNA, 25 bp, Homo sapien
tgcctccttataggcggggcttcgc

SEQ ID NO: 355262 - DNA, 25 bp, Homo sapien
tgaggggcgttccagcgctacccgt

SEQ ID NO: 355263 - DNA, 25 bp, Homo sapien
cctgggggcacgtgcctccttatag

SEQ ID NO: 355264 - DNA, 25 bp, Homo sapien
ctccttttctgaggggcgttccagc

SEQ ID NO: 355265 - DNA, 25 bp, Homo sapien
gccagcatttttcaaatcggcttct

SEQ ID NO: 355266 - DNA, 25 bp, Homo sapien
ttttcaaatcggcttctgtggagcc

SEQ ID NO: 355267 - DNA, 25 bp, Homo sapien
ttcaaatcggcttctgtggagccct

SEQ ID NO: 355268 - DNA, 25 bp, Homo sapien
gcatttttcaaatcggcttctgtgg

SEQ ID NO: 355269 - DNA, 25 bp, Homo sapien
tttccacctaggtcagttccctgag

SEQ ID NO: 355270 - DNA, 25 bp, Homo sapien
tatagatcatctggtaaccccatcc

SEQ ID NO: 355271 - DNA, 25 bp, Homo sapien
catctgcagggcgtgaggtgggtct

SEQ ID NO: 355272 - DNA, 25 bp, Homo sapien
gacagcagctgcgaatgagtccacg

SEQ ID NO: 355273 - DNA, 25 bp, Homo sapien
gggctccggatggatgcaggaccag

SEQ ID NO: 355274 - DNA, 25 bp, Homo sapien
gctccggatggatgcaggaccagga

SEQ ID NO: 355275 - DNA, 25 bp, Homo sapien
agaggggctccggatggatgcagga

SEQ ID NO: 355276 - DNA, 25 bp, Homo sapien
ccggatggatgcaggaccaggaaac

SEQ ID NO: 355277 - DNA, 25 bp, Homo sapien
gacacagattggcaacctgcctcac

SEQ ID NO: 355278 - DNA, 25 bp, Homo sapien
tcctcctgtgtggagactctgttgc

SEQ ID NO: 355279 - DNA, 25 bp, Homo sapien
gttgccccactttggacacagattg

SEQ ID NO: 355280 - DNA, 25 bp, Homo sapien
cgccccccttcgctggggcttccat

SEQ ID NO: 355281 - DNA, 25 bp, Homo sapien
tctaaaatagggcaacacaagggct

SEQ ID NO: 355282 - DNA, 25 bp, Homo sapien
tgagtcgttagattgtcagacccct

SEQ ID NO: 355283 - DNA, 25 bp, Homo sapien
tatatggaagtcctacacagaactc

SEQ ID NO: 355284 - DNA, 25 bp, Homo sapien
tgttaaaatctctactttgggcagc

SEQ ID NO: 355285 - DNA, 25 bp, Homo sapien
gccgcccgcagctgccactggtccc

SEQ ID NO: 355286 - DNA, 25 bp, Homo sapien
ggccgcccgcagctgccactggtcc

SEQ ID NO: 355287 - DNA, 25 bp, Homo sapien
gggtgccactaatcatcctgtaatg

SEQ ID NO: 355288 - DNA, 25 bp, Homo sapien
cacagatgtgggcttcagagcagtg

SEQ ID NO: 355289 - DNA, 25 bp, Homo sapien
ggacctggactggatgatactaaga

SEQ ID NO: 355290 - DNA, 25 bp, Homo sapien
cagcccctgggttagatgcacagat

SEQ ID NO: 355291 - DNA, 25 bp, Homo sapien
gcgggcagcaccaaggatcccattt

SEQ ID NO: 355292 - DNA, 25 bp, Homo sapien
ctgctgggctacatcggcatcgaca

SEQ ID NO: 355293 - DNA, 25 bp, Homo sapien
gagcagatgcgcaagaagaccatga

SEQ ID NO: 355294 - DNA, 25 bp, Homo sapien
catcatggtcgttggtacggaaggc

SEQ ID NO: 355295 - DNA, 25 bp, Homo sapien
ctggtggaaggattggatgaagggt

SEQ ID NO: 355296 - DNA, 25 bp, Homo sapien
agctggtggaaggattggatgaagg

SEQ ID NO: 355297 - DNA, 25 bp, Homo sapien
gctggtggaaggattggatgaaggg

SEQ ID NO: 355298 - DNA, 25 bp, Homo sapien
gagctggtggaaggattggatgaag

SEQ ID NO: 355299 - DNA, 25 bp, Homo sapien
cacgcacaaggacatatgagtagag

SEQ ID NO: 355300 - DNA, 25 bp, Homo sapien
agacagtagtccacagatgctccca

SEQ ID NO: 355301 - DNA, 25 bp, Homo sapien
gagttcatgaaacacctcagcaagg

SEQ ID NO: 355302 - DNA, 25 bp, Homo sapien
cagcttgcgacctctggatcttgag

SEQ ID NO: 355303 - DNA, 25 bp, Homo sapien
cctgggcgggtcttgatgattctga

SEQ ID NO: 355304 - DNA, 25 bp, Homo sapien
gccttgtccaaagcacataacttgt

SEQ ID NO: 355305 - DNA, 25 bp, Homo sapien
gaagctcaggttaaaagccttgtcc

SEQ ID NO: 355306 - DNA, 25 bp, Homo sapien
cagagtataagctaccaaagcaccg

SEQ ID NO: 355307 - DNA, 25 bp, Homo sapien
gactctcttggtaagaaatagccac

SEQ ID NO: 355308 - DNA, 25 bp, Homo sapien
tcatcttcagttggcgtcaggtcgg

SEQ ID NO: 355309 - DNA, 25 bp, Homo sapien
tatgtcatctcacccatgtgtggag

SEQ ID NO: 355310 - DNA, 25 bp, Homo sapien
caggtcgggcctcagtcattatttt

SEQ ID NO: 355311 - DNA, 25 bp, Homo sapien
gaatgctcaagatagccgggcgcgg

SEQ ID NO: 355312 - DNA, 25 bp, Homo sapien
agaatgctcaagatagccgggcgcg

SEQ ID NO: 355313 - DNA, 25 bp, Homo sapien
atcacaagatcgggagttcaggagc

SEQ ID NO: 355314 - DNA, 25 bp, Homo sapien
aaggtgaaccaaaaggttgaggcag

SEQ ID NO: 355315 - DNA, 25 bp, Homo sapien
tacatgtacttcttggtttcatcat

SEQ ID NO: 355316 - DNA, 25 bp, Homo sapien
catgtacttcttggtttcatcatac

SEQ ID NO: 355317 - DNA, 25 bp, Homo sapien
acatgtacttcttggtttcatcata

SEQ ID NO: 355318 - DNA, 25 bp, Homo sapien
caaatggtgttaaatgaataggaag

SEQ ID NO: 355319 - DNA, 25 bp, Homo sapien
tccaactgatgacaatgtgagtgtt

SEQ ID NO: 355320 - DNA, 25 bp, Homo sapien
cagtctgtgcatcatccaactgatg

SEQ ID NO: 355321 - DNA, 25 bp, Homo sapien
catgtagcagcaaatggtgttaaat

SEQ ID NO: 355322 - DNA, 25 bp, Homo sapien
cagcaggcagctcggtagataatac

SEQ ID NO: 355323 - DNA, 25 bp, Homo sapien
ggcagcaggcagctcggtagataat

SEQ ID NO: 355324 - DNA, 25 bp, Homo sapien
atagttaccgaagtaggcagcaggc

SEQ ID NO: 355325 - DNA, 25 bp, Homo sapien
gtcatagttaccgaagtaggcagca

SEQ ID NO: 355326 - DNA, 25 bp, Homo sapien
ccacatcagctgctacacgagtatg

SEQ ID NO: 355327 - DNA, 25 bp, Homo sapien
gaaacctcgcaattccctttcagct

SEQ ID NO: 355328 - DNA, 25 bp, Homo sapien
tcttaactaggcagtcaccgaaacc

SEQ ID NO: 355329 - DNA, 25 bp, Homo sapien
tgctacacgagtatgggcaaaatca

SEQ ID NO: 355330 - DNA, 25 bp, Homo sapien
cgcaccaggacaggactccgtgctc

SEQ ID NO: 355331 - DNA, 25 bp, Homo sapien
caccaggacaggactccgtgctcct

SEQ ID NO: 355332 - DNA, 25 bp, Homo sapien
ggactccgtgctccttgggaataca

SEQ ID NO: 355333 - DNA, 25 bp, Homo sapien
caggactccgtgctccttgggaata

SEQ ID NO: 355334 - DNA, 25 bp, Homo sapien
catgcagtctctaatgcccttgtat

SEQ ID NO: 355335 - DNA, 25 bp, Homo sapien
tgcagtgatctgcttgctggcatgc

SEQ ID NO: 355336 - DNA, 25 bp, Homo sapien
cccttgtattgcttatctgcagtga

SEQ ID NO: 355337 - DNA, 25 bp, Homo sapien
atgcagtctctaatgcccttgtatt

SEQ ID NO: 355338 - DNA, 25 bp, Homo sapien
cccgctcgatgggtgctaccgccat

SEQ ID NO: 355339 - DNA, 25 bp, Homo sapien
ttgacccgctcgatgggtgctaccg

SEQ ID NO: 355340 - DNA, 25 bp, Homo sapien
gctcgatgggtgctaccgccatctt

SEQ ID NO: 355341 - DNA, 25 bp, Homo sapien
tccttggcgaaggacacagcagcct

SEQ ID NO: 355342 - DNA, 25 bp, Homo sapien
ctgtgatgtcgaaagaggaggcagg

SEQ ID NO: 355343 - DNA, 25 bp, Homo sapien
acttccacactgtgttttgatgaag

SEQ ID NO: 355344 - DNA, 25 bp, Homo sapien
tgacagtaaggtgagtccaagtttt

SEQ ID NO: 355345 - DNA, 25 bp, Homo sapien
gatgagtgacagtaaggtgagtcca

SEQ ID NO: 355346 - DNA, 25 bp, Homo sapien
gtgacagtaaggtgagtccaagttt

SEQ ID NO: 355347 - DNA, 25 bp, Homo sapien
tgatgagtgacagtaaggtgagtcc

SEQ ID NO: 355348 - DNA, 25 bp, Homo sapien
gatatggagccccacctcccggata

SEQ ID NO: 355349 - DNA, 25 bp, Homo sapien
tggagccccacctcccggatacgga

SEQ ID NO: 355350 - DNA, 25 bp, Homo sapien
ctgcaggatatggagccccacctcc

SEQ ID NO: 355351 - DNA, 25 bp, Homo sapien
atatggagccccacctcccggatac

SEQ ID NO: 355352 - DNA, 25 bp, Homo sapien
tatggagcccaacccgtaggaaatg

SEQ ID NO: 355353 - DNA, 25 bp, Homo sapien
ccgtaggaaatgaaggcccgcctgt

SEQ ID NO: 355354 - DNA, 25 bp, Homo sapien
cccgcctgtgggatacagagcctca

SEQ ID NO: 355355 - DNA, 25 bp, Homo sapien
ctgcaggatatggagcccaacccgt

SEQ ID NO: 355356 - DNA, 25 bp, Homo sapien
ggaaccccacctctcggatatggag

SEQ ID NO: 355357 - DNA, 25 bp, Homo sapien
tatggagccccacctctaggatatg

SEQ ID NO: 355358 - DNA, 25 bp, Homo sapien
tcttggatacggagccccacctgca

SEQ ID NO: 355359 - DNA, 25 bp, Homo sapien
atggagccccacctctcggatatgg

SEQ ID NO: 355360 - DNA, 25 bp, Homo sapien
tatgtgatcacaggcttctcgcagg

SEQ ID NO: 355361 - DNA, 25 bp, Homo sapien
ctaaaattgaagtcaggataaggag

SEQ ID NO: 355362 - DNA, 25 bp, Homo sapien
tcaggataaggaggacgactcaggt

SEQ ID NO: 355363 - DNA, 25 bp, Homo sapien
gcttctcgcaggtagttgttccacc

SEQ ID NO: 355364 - DNA, 25 bp, Homo sapien
ggtctcgcgcttgtccctggctttt

SEQ ID NO: 355365 - DNA, 25 bp, Homo sapien
tgtagctattaaacacagttggtga

SEQ ID NO: 355366 - DNA, 25 bp, Homo sapien
tatctattacctgtatatagttacc

SEQ ID NO: 355367 - DNA, 25 bp, Homo sapien
ggccatgcctagttgctgcagccag

SEQ ID NO: 355368 - DNA, 25 bp, Homo sapien
ctttcccgattgtgtgttcttagca

SEQ ID NO: 355369 - DNA, 25 bp, Homo sapien
tcttcgaggaattttgcagtttcaa

SEQ ID NO: 355370 - DNA, 25 bp, Homo sapien
tgtgtagatacccagtttttccagt

SEQ ID NO: 355371 - DNA, 25 bp, Homo sapien
tcttagcacccttgtcaaagtaagt

SEQ ID NO: 355372 - DNA, 25 bp, Homo sapien
cagtgataagagtgagcatcctttc

SEQ ID NO: 355373 - DNA, 25 bp, Homo sapien
tatgtatatggtcatggcatgcaaa

SEQ ID NO: 355374 - DNA, 25 bp, Homo sapien
ttgtgtcctgaaactacggaattca

SEQ ID NO: 355375 - DNA, 25 bp, Homo sapien
gctgagtcccgtaaattcctaagta

SEQ ID NO: 355376 - DNA, 25 bp, Homo sapien
gccactgcgtccagctggatttttt

SEQ ID NO: 355377 - DNA, 25 bp, Homo sapien
gtatgatcattgctcactgcagcct

SEQ ID NO: 355378 - DNA, 25 bp, Homo sapien
ctgttgcctaggctgcagtgcagtg

SEQ ID NO: 355379 - DNA, 25 bp, Homo sapien
tctttttcgagatagggtcttactc

SEQ ID NO: 355380 - DNA, 25 bp, Homo sapien
aggtctgtctttgtaggccttcaca

SEQ ID NO: 355381 - DNA, 25 bp, Homo sapien
tattattttacacaccccaagtcag

SEQ ID NO: 355382 - DNA, 25 bp, Homo sapien
ggactgtcttgaggaatactttctg

SEQ ID NO: 355383 - DNA, 25 bp, Homo sapien
cttgaagctctttaaacaggaacca

SEQ ID NO: 355384 - DNA, 25 bp, Homo sapien
gaaagataggcaaccgtaagtactg

SEQ ID NO: 355385 - DNA, 25 bp, Homo sapien
gccatgtgttatttgtacagaaaga

SEQ ID NO: 355386 - DNA, 25 bp, Homo sapien
ccgtaagtactgtaattccagaaca

SEQ ID NO: 355387 - DNA, 25 bp, Homo sapien
tatttgtacagaaagataggcaacc

SEQ ID NO: 355388 - DNA, 25 bp, Homo sapien
ggcaggtttctacagtgactgatga

SEQ ID NO: 355389 - DNA, 25 bp, Homo sapien
cacctggccaatgttgggcatcttt

SEQ ID NO: 355390 - DNA, 25 bp, Homo sapien
tgctgcatcccatcctgcgagttgt

SEQ ID NO: 355391 - DNA, 25 bp, Homo sapien
caatgcatgtacttttgtgtctggc

SEQ ID NO: 355392 - DNA, 25 bp, Homo sapien
tatgtctaggtatggagctctttga

SEQ ID NO: 355393 - DNA, 25 bp, Homo sapien
tatatgggtacatttggtggtatcc

SEQ ID NO: 355394 - DNA, 25 bp, Homo sapien
tattgagactcccttgtgtgatgag

SEQ ID NO: 355395 - DNA, 25 bp, Homo sapien
tgatacaggcattgcattcctgtaa

SEQ ID NO: 355396 - DNA, 25 bp, Homo sapien
tctgggttgccgcaagcttttggct

SEQ ID NO: 355397 - DNA, 25 bp, Homo sapien
gggagcaaactttcagtagttcgta

SEQ ID NO: 355398 - DNA, 25 bp, Homo sapien
tactggactattttactggatcttg

SEQ ID NO: 355399 - DNA, 25 bp, Homo sapien
caatgcttttatgaagggagcaaac

SEQ ID NO: 355400 - DNA, 25 bp, Homo sapien
ctgttagagacatagtggtttttag

SEQ ID NO: 355401 - DNA, 25 bp, Homo sapien
tgttagagacatagtggtttttagg

SEQ ID NO: 355402 - DNA, 25 bp, Homo sapien
tctgttagagacatagtggttttta

SEQ ID NO: 355403 - DNA, 25 bp, Homo sapien
atctgttagagacatagtggttttt

SEQ ID NO: 355404 - DNA, 25 bp, Homo sapien
aaatacggaccaaagcaagacaggc

SEQ ID NO: 355405 - DNA, 25 bp, Homo sapien
cctgaggagtatgggagatccaccc

SEQ ID NO: 355406 - DNA, 25 bp, Homo sapien
gacccaaaggcagagctatgcacgg

SEQ ID NO: 355407 - DNA, 25 bp, Homo sapien
aaagccttcctggagctagcaagag

SEQ ID NO: 355408 - DNA, 25 bp, Homo sapien
ctgggagcattgctacttggcctca

SEQ ID NO: 355409 - DNA, 25 bp, Homo sapien
tgccagacatcatccatagaggtga

SEQ ID NO: 355410 - DNA, 25 bp, Homo sapien
ggcaagtctggcatctctaggaagt

SEQ ID NO: 355411 - DNA, 25 bp, Homo sapien
agatttgaatccagcaccccgtgta

SEQ ID NO: 355412 - DNA, 25 bp, Homo sapien
tttcagagtcaacagcaaggtcaga

SEQ ID NO: 355413 - DNA, 25 bp, Homo sapien
cactcccaggtggtatcaggctgca

SEQ ID NO: 355414 - DNA, 25 bp, Homo sapien
caaggccctctatgggtagaaaagc

SEQ ID NO: 355415 - DNA, 25 bp, Homo sapien
gtttattggtgacctgagggagcca

SEQ ID NO: 355416 - DNA, 25 bp, Homo sapien
ccatggtctaggctcagtggtgcca

SEQ ID NO: 355417 - DNA, 25 bp, Homo sapien
tgggcatgccaaggctccatggtct

SEQ ID NO: 355418 - DNA, 25 bp, Homo sapien
tacgcttggacagggcatagaacct

SEQ ID NO: 355419 - DNA, 25 bp, Homo sapien
tagaacctggccgtgagattgcact

SEQ ID NO: 355420 - DNA, 25 bp, Homo sapien
tgctgggacatctccaggttcttga

SEQ ID NO: 355421 - DNA, 25 bp, Homo sapien
tccaggttcttgatgggatacaggt

SEQ ID NO: 355422 - DNA, 25 bp, Homo sapien
atctccaggttcttgatgggataca

SEQ ID NO: 355423 - DNA, 25 bp, Homo sapien
gctgggacatctccaggttcttgat

SEQ ID NO: 355424 - DNA, 25 bp, Homo sapien
acatcactacccctgaagggttgat

SEQ ID NO: 355425 - DNA, 25 bp, Homo sapien
ggtttcatctcggaggccactgatg

SEQ ID NO: 355426 - DNA, 25 bp, Homo sapien
ggttgatgatcactgtgaagttggt

SEQ ID NO: 355427 - DNA, 25 bp, Homo sapien
cggaggccactgatgatgtcacctg

SEQ ID NO: 355428 - DNA, 25 bp, Homo sapien
cccggtgaagttcagctggccaagg

SEQ ID NO: 355429 - DNA, 25 bp, Homo sapien
gccaagggaggagtggtagcgataa

SEQ ID NO: 355430 - DNA, 25 bp, Homo sapien
gataaggcatatcggtcctgcagct

SEQ ID NO: 355431 - DNA, 25 bp, Homo sapien
agacccggtgaagttcagctggcca

SEQ ID NO: 355432 - DNA, 25 bp, Homo sapien
ttgttggacagaggccgcatgtaca

SEQ ID NO: 355433 - DNA, 25 bp, Homo sapien
tagccttgttggacagaggccgcat

SEQ ID NO: 355434 - DNA, 25 bp, Homo sapien
ccttgttggacagaggccgcatgta

SEQ ID NO: 355435 - DNA, 25 bp, Homo sapien
ctagccttgttggacagaggccgca

SEQ ID NO: 355436 - DNA, 25 bp, Homo sapien
tctgggcccgggattgctctaagct

SEQ ID NO: 355437 - DNA, 25 bp, Homo sapien
tacgcaggtctgtggacatcaagag

SEQ ID NO: 355438 - DNA, 25 bp, Homo sapien
gctctaagctgagaccaaagttccc

SEQ ID NO: 355439 - DNA, 25 bp, Homo sapien
aatcctgcgtccctggatgcctaag

SEQ ID NO: 355440 - DNA, 25 bp, Homo sapien
tggctgcagtatgtcctggtgctcc

SEQ ID NO: 355441 - DNA, 25 bp, Homo sapien
caattcaggatggagagcacgctcc

SEQ ID NO: 355442 - DNA, 25 bp, Homo sapien
gcagatgtccgccagcagactgtag

SEQ ID NO: 355443 - DNA, 25 bp, Homo sapien
tcatagttacgccagaggttgcaga

SEQ ID NO: 355444 - DNA, 25 bp, Homo sapien
cgatggggcggcctgtggcattcag

SEQ ID NO: 355445 - DNA, 25 bp, Homo sapien
caggagaaggcgatggggcggcctg

SEQ ID NO: 355446 - DNA, 25 bp, Homo sapien
gggggaggccgccttcataggctgg

SEQ ID NO: 355447 - DNA, 25 bp, Homo sapien
gaggccgccttcataggctggccag

SEQ ID NO: 355448 - DNA, 25 bp, Homo sapien
agagaaagcccaacctgtttcagtc

SEQ ID NO: 355449 - DNA, 25 bp, Homo sapien
tagagaaagcccaacctgtttcagt

SEQ ID NO: 355450 - DNA, 25 bp, Homo sapien
ctagagaaagcccaacctgtttcag

SEQ ID NO: 355451 - DNA, 25 bp, Homo sapien
cactcggcgaaggtctgagcatcct

SEQ ID NO: 355452 - DNA, 25 bp, Homo sapien
gagcatgtctaccttccactcggcg

SEQ ID NO: 355453 - DNA, 25 bp, Homo sapien
tccgcgtagatacccaacttcaggc

SEQ ID NO: 355454 - DNA, 25 bp, Homo sapien
taacccatgcaggtgaagttgccca

SEQ ID NO: 355455 - DNA, 25 bp, Homo sapien
cttgggatccggcatcaggcggcca

SEQ ID NO: 355456 - DNA, 25 bp, Homo sapien
gatccagcagtcatcaatgttgagg

SEQ ID NO: 355457 - DNA, 25 bp, Homo sapien
gtatgtgtagcccatgtcccgccat

SEQ ID NO: 355458 - DNA, 25 bp, Homo sapien
gtcagccaggaaaggaatgccatga

SEQ ID NO: 355459 - DNA, 25 bp, Homo sapien
tgggccacatgtcccagcaagagca

SEQ ID NO: 355460 - DNA, 25 bp, Homo sapien
acctgggccacatgtcccagcaaga

SEQ ID NO: 355461 - DNA, 25 bp, Homo sapien
tgcagcggaagcgttcccaggccag

SEQ ID NO: 355462 - DNA, 25 bp, Homo sapien
atcacagttaatgttgcagcggaag

SEQ ID NO: 355463 - DNA, 25 bp, Homo sapien
tcagcttccgaggacctgaccagat

SEQ ID NO: 355464 - DNA, 25 bp, Homo sapien
gacctgaccagatctggtctgcgtg

SEQ ID NO: 355465 - DNA, 25 bp, Homo sapien
ggtctgcgtgtatcagctgtatgtg

SEQ ID NO: 355466 - DNA, 25 bp, Homo sapien
ctggactcagcttccgaggacctga

SEQ ID NO: 355467 - DNA, 25 bp, Homo sapien
gaaacgtctgaaaagcactggggtc

SEQ ID NO: 355468 - DNA, 25 bp, Homo sapien
aaacgtctgaaaagcactggggtca

SEQ ID NO: 355469 - DNA, 25 bp, Homo sapien
ctaagaaacgtctgaaaagcactgg

SEQ ID NO: 355470 - DNA, 25 bp, Homo sapien
aagaaacgtctgaaaagcactgggg

SEQ ID NO: 355471 - DNA, 25 bp, Homo sapien
cttcagaaatacgaaacaacgtgtc

SEQ ID NO: 355472 - DNA, 25 bp, Homo sapien
tggatcgtacactcggtccccaagt

SEQ ID NO: 355473 - DNA, 25 bp, Homo sapien
catcacttcccggagcttcagttct

SEQ ID NO: 355474 - DNA, 25 bp, Homo sapien
ggccgccctcaaccttaggcgtgga

SEQ ID NO: 355475 - DNA, 25 bp, Homo sapien
gaagcgttcagacctgccgccgctt

SEQ ID NO: 355476 - DNA, 25 bp, Homo sapien
gaatccggtaacctgataagtccga

SEQ ID NO: 355477 - DNA, 25 bp, Homo sapien
taagtccgaagcgttccagtgaggg

SEQ ID NO: 355478 - DNA, 25 bp, Homo sapien
cgccgcttctgactcgaatccggta

SEQ ID NO: 355479 - DNA, 25 bp, Homo sapien
ggcgggagacttcgatttgtccact

SEQ ID NO: 355480 - DNA, 25 bp, Homo sapien
taattcaacagatccctcctgaggg

SEQ ID NO: 355481 - DNA, 25 bp, Homo sapien
tcgtcgtgggatgaaggaaacaaac

SEQ ID NO: 355482 - DNA, 25 bp, Homo sapien
taaacacatatgacatcgtcgtggg

SEQ ID NO: 355483 - DNA, 25 bp, Homo sapien
gatcggtaatgtgcctacatggtaa

SEQ ID NO: 355484 - DNA, 25 bp, Homo sapien
tcggtaatgtgcctacatggtaaca

SEQ ID NO: 355485 - DNA, 25 bp, Homo sapien
cagatcggtaatgtgcctacatggt

SEQ ID NO: 355486 - DNA, 25 bp, Homo sapien
gtcagatcggtaatgtgcctacatg

SEQ ID NO: 355487 - DNA, 25 bp, Homo sapien
aaagtgagtgtcctcctggagacgg

SEQ ID NO: 355488 - DNA, 25 bp, Homo sapien
cgctgattgataggagccaaggcca

SEQ ID NO: 355489 - DNA, 25 bp, Homo sapien
taccgtagactggaaggcggaccaa

SEQ ID NO: 355490 - DNA, 25 bp, Homo sapien
gaaagatggcgatgtctccgccgca

SEQ ID NO: 355491 - DNA, 25 bp, Homo sapien
gctgaggacgcagcatccgggtttc

SEQ ID NO: 355492 - DNA, 25 bp, Homo sapien
caaatgaagaatcgggctagagcgg

SEQ ID NO: 355493 - DNA, 25 bp, Homo sapien
acagtcctgatagatgtgcagggaa

SEQ ID NO: 355494 - DNA, 25 bp, Homo sapien
gtgaagctcgtatccaaggccagcg

SEQ ID NO: 355495 - DNA, 25 bp, Homo sapien
tcccctttctctatgtcgggacact

SEQ ID NO: 355496 - DNA, 25 bp, Homo sapien
gggacactcattagcaagaactttg

SEQ ID NO: 355497 - DNA, 25 bp, Homo sapien
cttctccgtgtgttctccattgtga

SEQ ID NO: 355498 - DNA, 25 bp, Homo sapien
ctctgcagatgtccttcggccttct

SEQ ID NO: 355499 - DNA, 25 bp, Homo sapien
taatgttgggcacttcgggcctcag

SEQ ID NO: 355500 - DNA, 25 bp, Homo sapien
gagagaacttggaagctccacgccc

SEQ ID NO: 355501 - DNA, 25 bp, Homo sapien
acttggctttgcaaagtggcacgcc

SEQ ID NO: 355502 - DNA, 25 bp, Homo sapien
gctttcggagaacagaacacttggc

SEQ ID NO: 355503 - DNA, 25 bp, Homo sapien
gagagaacacaaaaacaccttgagt

SEQ ID NO: 355504 - DNA, 25 bp, Homo sapien
tattgagtgagagaacacaaaaaca

SEQ ID NO: 355505 - DNA, 25 bp, Homo sapien
aagggatccttggtgccataaggtt

SEQ ID NO: 355506 - DNA, 25 bp, Homo sapien
tgccataaggtttggggccatgcac

SEQ ID NO: 355507 - DNA, 25 bp, Homo sapien
tgccactgagaggtacaccagggtt

SEQ ID NO: 355508 - DNA, 25 bp, Homo sapien
ctgccactgagaggtacaccagggt

SEQ ID NO: 355509 - DNA, 25 bp, Homo sapien
tctgccactgagaggtacaccaggg

SEQ ID NO: 355510 - DNA, 25 bp, Homo sapien
gaacagctgtgcacctaagcagggt

SEQ ID NO: 355511 - DNA, 25 bp, Homo sapien
tttgcgcctgttagtgctgccctga

SEQ ID NO: 355512 - DNA, 25 bp, Homo sapien
cagaacccaaggaaaactagcccat

SEQ ID NO: 355513 - DNA, 25 bp, Homo sapien
ttgttacaagtagcggagccaagcc

SEQ ID NO: 355514 - DNA, 25 bp, Homo sapien
tccttcctgtttactgacatgcaag

SEQ ID NO: 355515 - DNA, 25 bp, Homo sapien
ctcaggcaaaaagaggctgcagaaa

SEQ ID NO: 355516 - DNA, 25 bp, Homo sapien
tcacaatttttgaacagatggcctc

SEQ ID NO: 355517 - DNA, 25 bp, Homo sapien
tgtgtataccaaggtcccacttgct

SEQ ID NO: 355518 - DNA, 25 bp, Homo sapien
gtatagtgagtttatttgtgctcta

SEQ ID NO: 355519 - DNA, 25 bp, Homo sapien
tatagtgagtttatttgtgctctaa

SEQ ID NO: 355520 - DNA, 25 bp, Homo sapien
tagtatcaacgtgcatctttccact

SEQ ID NO: 355521 - DNA, 25 bp, Homo sapien
aatagtatcaacgtgcatctttcca

SEQ ID NO: 355522 - DNA, 25 bp, Homo sapien
tatcaacgtgcatctttccactgaa

SEQ ID NO: 355523 - DNA, 25 bp, Homo sapien
gtatcaacgtgcatctttccactga

SEQ ID NO: 355524 - DNA, 25 bp, Homo sapien
acttggataggaaatcctttggcct

SEQ ID NO: 355525 - DNA, 25 bp, Homo sapien
gtgtccgctgcttccatactttaat

SEQ ID NO: 355526 - DNA, 25 bp, Homo sapien
gtttcatggaagaaccgcataacat

SEQ ID NO: 355527 - DNA, 25 bp, Homo sapien
gcataacatgtgtccgctgcttcca

SEQ ID NO: 355528 - DNA, 25 bp, Homo sapien
cataaacatttctcggactttatcc

SEQ ID NO: 355529 - DNA, 25 bp, Homo sapien
ttatcccgtcccattttcacagtga

SEQ ID NO: 355530 - DNA, 25 bp, Homo sapien
tgaccagaagatcaaccaccctggg

SEQ ID NO: 355531 - DNA, 25 bp, Homo sapien
tcttcataaacatttctcggacttt

SEQ ID NO: 355532 - DNA, 25 bp, Homo sapien
gaccactgaatttgaagaggcagta

SEQ ID NO: 355533 - DNA, 25 bp, Homo sapien
attgaacacatacaggtcgcccatt

SEQ ID NO: 355534 - DNA, 25 bp, Homo sapien
gattcatggtatttgctctcaagga

SEQ ID NO: 355535 - DNA, 25 bp, Homo sapien
aaaattagcctgaccctaggctagg

SEQ ID NO: 355536 - DNA, 25 bp, Homo sapien
atggataccataaaacccgtgtggc

SEQ ID NO: 355537 - DNA, 25 bp, Homo sapien
cccgtgtggcacaggtttgagtaac

SEQ ID NO: 355538 - DNA, 25 bp, Homo sapien
gagtaactggccagctacagatcac

SEQ ID NO: 355539 - DNA, 25 bp, Homo sapien
cccatagggatgcatactccttgac

SEQ ID NO: 355540 - DNA, 25 bp, Homo sapien
tcacacagctagttgagggcagcgc

SEQ ID NO: 355541 - DNA, 25 bp, Homo sapien
gggcagcgcctgaagaaaagtccgt

SEQ ID NO: 355542 - DNA, 25 bp, Homo sapien
gactcgacagccctgaggagtggca

SEQ ID NO: 355543 - DNA, 25 bp, Homo sapien
gaatagatgaaataactggcccaag

SEQ ID NO: 355544 - DNA, 25 bp, Homo sapien
tcgcctctgcccaagttggtgacct

SEQ ID NO: 355545 - DNA, 25 bp, Homo sapien
cgccaggtccggcccatggtaggct

SEQ ID NO: 355546 - DNA, 25 bp, Homo sapien
tggtaggctcgggtgaccctcttcc

SEQ ID NO: 355547 - DNA, 25 bp, Homo sapien
cggctacgaccttgagcggcggcct

SEQ ID NO: 355548 - DNA, 25 bp, Homo sapien
gtgttcggcacctcccgataccagg

SEQ ID NO: 355549 - DNA, 25 bp, Homo sapien
taccaggcgcggtagagctcgcgca

SEQ ID NO: 355550 - DNA, 25 bp, Homo sapien
acctcccgataccaggcgcggtaga

SEQ ID NO: 355551 - DNA, 25 bp, Homo sapien
agtgttcggcacctcccgataccag

SEQ ID NO: 355552 - DNA, 25 bp, Homo sapien
ttggcctcgttcatgtcccgactga

SEQ ID NO: 355553 - DNA, 25 bp, Homo sapien
cctccgcttggcctcgttcatgtcc

SEQ ID NO: 355554 - DNA, 25 bp, Homo sapien
ccgcttggcctcgttcatgtcccga

SEQ ID NO: 355555 - DNA, 25 bp, Homo sapien
catgtcccgactgaaaatgggcttc

SEQ ID NO: 355556 - DNA, 25 bp, Homo sapien
cggtagaagtagcttggcggacgcc

SEQ ID NO: 355557 - DNA, 25 bp, Homo sapien
tggcggtagaagtagcttggcggac

SEQ ID NO: 355558 - DNA, 25 bp, Homo sapien
ctggcggtagaagtagcttggcgga

SEQ ID NO: 355559 - DNA, 25 bp, Homo sapien
tagaagtagcttggcggacgccgct

SEQ ID NO: 355560 - DNA, 25 bp, Homo sapien
ctctcggattggctgggaagcctct

SEQ ID NO: 355561 - DNA, 25 bp, Homo sapien
cctttgcaagcagcgcgtgcggacc

SEQ ID NO: 355562 - DNA, 25 bp, Homo sapien
ctctggctgagcgaacggtgggtgc

SEQ ID NO: 355563 - DNA, 25 bp, Homo sapien
gaacgccccgcctgtatgctgggtg

SEQ ID NO: 355564 - DNA, 25 bp, Homo sapien
catgatggagattaatgaagtatca

SEQ ID NO: 355565 - DNA, 25 bp, Homo sapien
ggagattaatgaagtatcatgagag

SEQ ID NO: 355566 - DNA, 25 bp, Homo sapien
tgttttattgagtgtagacatctgg

SEQ ID NO: 355567 - DNA, 25 bp, Homo sapien
ttcaaaaaggagcaagccacattgt

SEQ ID NO: 355568 - DNA, 25 bp, Homo sapien
tatttgtcccattggttttcagaaa

SEQ ID NO: 355569 - DNA, 25 bp, Homo sapien
tgtatgtttatctgagcagtaacta

SEQ ID NO: 355570 - DNA, 25 bp, Homo sapien
taaggtgtgttaaatttgaagaaga

SEQ ID NO: 355571 - DNA, 25 bp, Homo sapien
taaaaaatcagatgccttttggaag

SEQ ID NO: 355572 - DNA, 25 bp, Homo sapien
tagttggagtgctgcaaacccagcc

SEQ ID NO: 355573 - DNA, 25 bp, Homo sapien
ttgtgtcatgttcgcttccagatac

SEQ ID NO: 355574 - DNA, 25 bp, Homo sapien
tgcagcctgaggagccttagtccct

SEQ ID NO: 355575 - DNA, 25 bp, Homo sapien
tacttcagccataatgaatcccttt

SEQ ID NO: 355576 - DNA, 25 bp, Homo sapien
caagtagaccattggttttgaagtc

SEQ ID NO: 355577 - DNA, 25 bp, Homo sapien
tttcagaaagattaaccaagtagac

SEQ ID NO: 355578 - DNA, 25 bp, Homo sapien
gtcattccaatcatgatagaagcga

SEQ ID NO: 355579 - DNA, 25 bp, Homo sapien
caatcatgatagaagcgaacaggtt

SEQ ID NO: 355580 - DNA, 25 bp, Homo sapien
ctataacccaggattttactttgca

SEQ ID NO: 355581 - DNA, 25 bp, Homo sapien
tataacccaggattttactttgcac

SEQ ID NO: 355582 - DNA, 25 bp, Homo sapien
tttagttttttatctcctcctctca

SEQ ID NO: 355583 - DNA, 25 bp, Homo sapien
ctctcacagccaccttttctagttt

SEQ ID NO: 355584 - DNA, 25 bp, Homo sapien
attatatcatatttgggttttagtt

SEQ ID NO: 355585 - DNA, 25 bp, Homo sapien
cctcctctcacagccaccttttcta

SEQ ID NO: 355586 - DNA, 25 bp, Homo sapien
aggatctacactttcttcaacatgt

SEQ ID NO: 355587 - DNA, 25 bp, Homo sapien
ggatctacactttcttcaacatgtg

SEQ ID NO: 355588 - DNA, 25 bp, Homo sapien
gagataaaaaagcattccccaggcc

SEQ ID NO: 355589 - DNA, 25 bp, Homo sapien
tttcacaaggccagcaatatccact

SEQ ID NO: 355590 - DNA, 25 bp, Homo sapien
tatccactacatttagaaaggcagg

SEQ ID NO: 355591 - DNA, 25 bp, Homo sapien
aaagatgccatcacaagcactaaaa

SEQ ID NO: 355592 - DNA, 25 bp, Homo sapien
tcgtgctcagcctgggctatgacac

SEQ ID NO: 355593 - DNA, 25 bp, Homo sapien
cctcccttttgagggggcatcgtgc

SEQ ID NO: 355594 - DNA, 25 bp, Homo sapien
acctcccttttgagggggcatcgtg

SEQ ID NO: 355595 - DNA, 25 bp, Homo sapien
gcatcgtgctcagcctgggctatga

SEQ ID NO: 355596 - DNA, 25 bp, Homo sapien
caggcgtgatagtttacacctataa

SEQ ID NO: 355597 - DNA, 25 bp, Homo sapien
aatttttattagatcggtattgaag

SEQ ID NO: 355598 - DNA, 25 bp, Homo sapien
gatcggtattgaagatttacattat

SEQ ID NO: 355599 - DNA, 25 bp, Homo sapien
ttattaaactatgtaaacaggccag

SEQ ID NO: 355600 - DNA, 25 bp, Homo sapien
ttagtgaagtacaacctccggttgc

SEQ ID NO: 355601 - DNA, 25 bp, Homo sapien
ttgcagtacatttagacagatcacg

SEQ ID NO: 355602 - DNA, 25 bp, Homo sapien
tgagctccccattcacccttatgct

SEQ ID NO: 355603 - DNA, 25 bp, Homo sapien
tttcatggagacatacctcaggagc

SEQ ID NO: 355604 - DNA, 25 bp, Homo sapien
atgaataaatgctacactgtgccca

SEQ ID NO: 355605 - DNA, 25 bp, Homo sapien
ataaatgctacactgtgcccactca

SEQ ID NO: 355606 - DNA, 25 bp, Homo sapien
gtgggggctaatgaataaatgctac

SEQ ID NO: 355607 - DNA, 25 bp, Homo sapien
gcccacaggggagatggtcaggcca

SEQ ID NO: 355608 - DNA, 25 bp, Homo sapien
tcaacgtacccgtctcaaatgcggc

SEQ ID NO: 355609 - DNA, 25 bp, Homo sapien
cagggaatgttctggcacctgccga

SEQ ID NO: 355610 - DNA, 25 bp, Homo sapien
cctggcatatagctccctgacatga

SEQ ID NO: 355611 - DNA, 25 bp, Homo sapien
tatgggcaagggtaactgacatctg

SEQ ID NO: 355612 - DNA, 25 bp, Homo sapien
ttgctttattgtacattagagcctc

SEQ ID NO: 355613 - DNA, 25 bp, Homo sapien
tttattgtacattagagcctctggc

SEQ ID NO: 355614 - DNA, 25 bp, Homo sapien
ttgtacattagagcctctggctagg

SEQ ID NO: 355615 - DNA, 25 bp, Homo sapien
gtacattagagcctctggctaggga

SEQ ID NO: 355616 - DNA, 25 bp, Homo sapien
gggtcaccagaaagctgacgacacg

SEQ ID NO: 355617 - DNA, 25 bp, Homo sapien
tagcggggcacagcacaaagctcgt

SEQ ID NO: 355618 - DNA, 25 bp, Homo sapien
aaagctgacgacacgagagtggctg

SEQ ID NO: 355619 - DNA, 25 bp, Homo sapien
ccggcggccacggagaagctgaagt

SEQ ID NO: 355620 - DNA, 25 bp, Homo sapien
gcgtcagtgagcctggctcctgggt

SEQ ID NO: 355621 - DNA, 25 bp, Homo sapien
aggggcgtcagtgagcctggctcct

SEQ ID NO: 355622 - DNA, 25 bp, Homo sapien
gctcctgggtgatacccctgcaaga

SEQ ID NO: 355623 - DNA, 25 bp, Homo sapien
agcctggctcctgggtgatacccct

SEQ ID NO: 355624 - DNA, 25 bp, Homo sapien
catccaggaagtgttcggggtggaa

SEQ ID NO: 355625 - DNA, 25 bp, Homo sapien
tccttcagcaccgatgacaggttgg

SEQ ID NO: 355626 - DNA, 25 bp, Homo sapien
tcatccttcagcaccgatgacaggt

SEQ ID NO: 355627 - DNA, 25 bp, Homo sapien
cttcagcaccgatgacaggttggtg

SEQ ID NO: 355628 - DNA, 25 bp, Homo sapien
gagcctggtcacccatctctggtcg

SEQ ID NO: 355629 - DNA, 25 bp, Homo sapien
cacctgccctatcacgtcgtcgatc

SEQ ID NO: 355630 - DNA, 25 bp, Homo sapien
acgtcgtcgatctcctgttggacac

SEQ ID NO: 355631 - DNA, 25 bp, Homo sapien
gatgtcatatgggtcacactcaggg

SEQ ID NO: 355632 - DNA, 25 bp, Homo sapien
ctggacagacatgcgtccccacaat

SEQ ID NO: 355633 - DNA, 25 bp, Homo sapien
acatgcgtccccacaatgggtcagc

SEQ ID NO: 355634 - DNA, 25 bp, Homo sapien
tgggtcagcacccaggggacactct

SEQ ID NO: 355635 - DNA, 25 bp, Homo sapien
acagacatgcgtccccacaatgggt

SEQ ID NO: 355636 - DNA, 25 bp, Homo sapien
gttaggcttacaggagcctggccac

SEQ ID NO: 355637 - DNA, 25 bp, Homo sapien
gcctggccacgcctgtgctggaagc

SEQ ID NO: 355638 - DNA, 25 bp, Homo sapien
cagctgtacccttcctccctcagtc

SEQ ID NO: 355639 - DNA, 25 bp, Homo sapien
ccgggtgtcccagctaagcccaggg

SEQ ID NO: 355640 - DNA, 25 bp, Homo sapien
ggtcaccatcccggcaaggaacagg

SEQ ID NO: 355641 - DNA, 25 bp, Homo sapien
gtggtcaccatcccggcaaggaaca

SEQ ID NO: 355642 - DNA, 25 bp, Homo sapien
aggtggtcaccatcccggcaaggaa

SEQ ID NO: 355643 - DNA, 25 bp, Homo sapien
gaggtggtcaccatcccggcaagga

SEQ ID NO: 355644 - DNA, 25 bp, Homo sapien
tcatcattgaagctgctctcagggc

SEQ ID NO: 355645 - DNA, 25 bp, Homo sapien
ctatgcgcaggttctcatcattgaa

SEQ ID NO: 355646 - DNA, 25 bp, Homo sapien
aagctgctctcagggctccccttgg

SEQ ID NO: 355647 - DNA, 25 bp, Homo sapien
cactatgcgcaggttctcatcattg

SEQ ID NO: 355648 - DNA, 25 bp, Homo sapien
gccgagaggatactcaggggataga

SEQ ID NO: 355649 - DNA, 25 bp, Homo sapien
cgagaggatactcaggggatagaac

SEQ ID NO: 355650 - DNA, 25 bp, Homo sapien
tactcaggggatagaacggggtagc

SEQ ID NO: 355651 - DNA, 25 bp, Homo sapien
agggccgagaggatactcaggggat

SEQ ID NO: 355652 - DNA, 25 bp, Homo sapien
gctcgccgggtgatgcactggtcca

SEQ ID NO: 355653 - DNA, 25 bp, Homo sapien
cattcctcctgggacgttcaaccca

SEQ ID NO: 355654 - DNA, 25 bp, Homo sapien
ctgtcagcccagatgcggctcgccg

SEQ ID NO: 355655 - DNA, 25 bp, Homo sapien
cctcattcctcctgggacgttcaac

SEQ ID NO: 355656 - DNA, 25 bp, Homo sapien
tcaggaaagccttttggaagcgtag

SEQ ID NO: 355657 - DNA, 25 bp, Homo sapien
agctgggtcaggaaagccttttgga

SEQ ID NO: 355658 - DNA, 25 bp, Homo sapien
tgggtcaggaaagccttttggaagc

SEQ ID NO: 355659 - DNA, 25 bp, Homo sapien
cctcagtcaggtctcggggtggctg

SEQ ID NO: 355660 - DNA, 25 bp, Homo sapien
ccagccagcgctgggatgtgcggga

SEQ ID NO: 355661 - DNA, 25 bp, Homo sapien
gccagcgctgggatgtgcgggagga

SEQ ID NO: 355662 - DNA, 25 bp, Homo sapien
ccagcgctgggatgtgcgggaggac

SEQ ID NO: 355663 - DNA, 25 bp, Homo sapien
agccagcgctgggatgtgcgggagg

SEQ ID NO: 355664 - DNA, 25 bp, Homo sapien
acggctttgtccaagaggccgttgg

SEQ ID NO: 355665 - DNA, 25 bp, Homo sapien
gatcacgttgctcacggctttgtcc

SEQ ID NO: 355666 - DNA, 25 bp, Homo sapien
ggtcgtcgtactcgaagcggcgccc

SEQ ID NO: 355667 - DNA, 25 bp, Homo sapien
tgagggaggcgatcacgttgctcac

SEQ ID NO: 355668 - DNA, 25 bp, Homo sapien
cccaggcccaagttgcgcaaggtgg

SEQ ID NO: 355669 - DNA, 25 bp, Homo sapien
ttatctctgtttcacgtccaggacc

SEQ ID NO: 355670 - DNA, 25 bp, Homo sapien
ccactcgctggcctttatctctgtt

SEQ ID NO: 355671 - DNA, 25 bp, Homo sapien
gccctgtcggcgctgcttgggctac

SEQ ID NO: 355672 - DNA, 25 bp, Homo sapien
cccgtgcaggtggtttcctggccca

SEQ ID NO: 355673 - DNA, 25 bp, Homo sapien
ggcccacggaaacgcggtctctgtc

SEQ ID NO: 355674 - DNA, 25 bp, Homo sapien
gcccacggaaacgcggtctctgtcc

SEQ ID NO: 355675 - DNA, 25 bp, Homo sapien
agcccattgagcacgaccaccggcg

SEQ ID NO: 355676 - DNA, 25 bp, Homo sapien
ttgagcacgaccaccggcgtccagg

SEQ ID NO: 355677 - DNA, 25 bp, Homo sapien
gtgtcctcgccgcgggtcaccatcg

SEQ ID NO: 355678 - DNA, 25 bp, Homo sapien
cattgagcacgaccaccggcgtcca

SEQ ID NO: 355679 - DNA, 25 bp, Homo sapien
ccaaaattgccgagaggccccagtt

SEQ ID NO: 355680 - DNA, 25 bp, Homo sapien
ggaactcagtttggatgcgtcaccc

SEQ ID NO: 355681 - DNA, 25 bp, Homo sapien
cacaccttctgtgatggaggaactc

SEQ ID NO: 355682 - DNA, 25 bp, Homo sapien
cattcccagatgatggtccatgccg

SEQ ID NO: 355683 - DNA, 25 bp, Homo sapien
aagtccacatgcagcaaggttgccc

SEQ ID NO: 355684 - DNA, 25 bp, Homo sapien
gcccagcgttggtgccggtgcatca

SEQ ID NO: 355685 - DNA, 25 bp, Homo sapien
tggcgggtagcgtgcagcccagcgt

SEQ ID NO: 355686 - DNA, 25 bp, Homo sapien
tggaagtccacatgcagcaaggttg

SEQ ID NO: 355687 - DNA, 25 bp, Homo sapien
tgcctcactaccaactgggctcctc

SEQ ID NO: 355688 - DNA, 25 bp, Homo sapien
ggaccaggcaggacactctcggcac

SEQ ID NO: 355689 - DNA, 25 bp, Homo sapien
ggcaggacactctcggcacaccgag

SEQ ID NO: 355690 - DNA, 25 bp, Homo sapien
ggctgcctcactaccaactgggctc

SEQ ID NO: 355691 - DNA, 25 bp, Homo sapien
ccagctgaggagcaactctagcggg

SEQ ID NO: 355692 - DNA, 25 bp, Homo sapien
tttattgtacaacagggtcccagct

SEQ ID NO: 355693 - DNA, 25 bp, Homo sapien
gactaatttattgtacaacagggtc

SEQ ID NO: 355694 - DNA, 25 bp, Homo sapien
ggcacagcacaaagctcataggggg

SEQ ID NO: 355695 - DNA, 25 bp, Homo sapien
ccgacgacacgagagtggctgggcc

SEQ ID NO: 355696 - DNA, 25 bp, Homo sapien
cgacgacacgagagtggctgggccg

SEQ ID NO: 355697 - DNA, 25 bp, Homo sapien
cagaaagccgacgacacgagagtgg

SEQ ID NO: 355698 - DNA, 25 bp, Homo sapien
aaagccgacgacacgagagtggctg

SEQ ID NO: 355699 - DNA, 25 bp, Homo sapien
ggggctccccgaggcatgcacggcg

SEQ ID NO: 355700 - DNA, 25 bp, Homo sapien
gggctccccgaggcatgcacggcgg

SEQ ID NO: 355701 - DNA, 25 bp, Homo sapien
ggctccccgaggcatgcacggcggc

SEQ ID NO: 355702 - DNA, 25 bp, Homo sapien
aggggcgtcagtgagcctggctccc

SEQ ID NO: 355703 - DNA, 25 bp, Homo sapien
gctcccgggtgatacccctgcaaga

SEQ ID NO: 355704 - DNA, 25 bp, Homo sapien
tggctcccgggtgatacccctgcaa

SEQ ID NO: 355705 - DNA, 25 bp, Homo sapien
agtgagcctggctcccgggtgatac

SEQ ID NO: 355706 - DNA, 25 bp, Homo sapien
cgatgacaggttggtgaagagcatc

SEQ ID NO: 355707 - DNA, 25 bp, Homo sapien
gatgacaggttggtgaagagcatca

SEQ ID NO: 355708 - DNA, 25 bp, Homo sapien
atgacaggttggtgaagagcatcat

SEQ ID NO: 355709 - DNA, 25 bp, Homo sapien
tgacaggttggtgaagagcatcatc

SEQ ID NO: 355710 - DNA, 25 bp, Homo sapien
cacgggatgtcatatgggtcacacc

SEQ ID NO: 355711 - DNA, 25 bp, Homo sapien
cgggatgtcatatgggtcacaccca

SEQ ID NO: 355712 - DNA, 25 bp, Homo sapien
gatgtcatatgggtcacacccaggg

SEQ ID NO: 355713 - DNA, 25 bp, Homo sapien
gggatgtcatatgggtcacacccag

SEQ ID NO: 355714 - DNA, 25 bp, Homo sapien
atcacgttgtcgatctgttggacac

SEQ ID NO: 355715 - DNA, 25 bp, Homo sapien
acgttgtcgatctgttggacacggc

SEQ ID NO: 355716 - DNA, 25 bp, Homo sapien
cctatcacgttgtcgatctgttgga

SEQ ID NO: 355717 - DNA, 25 bp, Homo sapien
ctgccctatcacgttgtcgatctgt

SEQ ID NO: 355718 - DNA, 25 bp, Homo sapien
caagcctgtgcttggagtcccgggt

SEQ ID NO: 355719 - DNA, 25 bp, Homo sapien
ccgggtgtcccagctaagctcaggg

SEQ ID NO: 355720 - DNA, 25 bp, Homo sapien
gacacgcgtccccacaatgggtcag

SEQ ID NO: 355721 - DNA, 25 bp, Homo sapien
gaggttaggcttacaggaacctggc

SEQ ID NO: 355722 - DNA, 25 bp, Homo sapien
gaggtggtcaccatcccggcaaaga

SEQ ID NO: 355723 - DNA, 25 bp, Homo sapien
tgagagggtactcaggggacagaac

SEQ ID NO: 355724 - DNA, 25 bp, Homo sapien
tactcaggggacagaacgggaaagc

SEQ ID NO: 355725 - DNA, 25 bp, Homo sapien
ctgagagggtactcaggggacagaa

SEQ ID NO: 355726 - DNA, 25 bp, Homo sapien
caggaaggcctcagtcaggtctcgg

SEQ ID NO: 355727 - DNA, 25 bp, Homo sapien
aggcctcagtcaggtctcggggtgg

SEQ ID NO: 355728 - DNA, 25 bp, Homo sapien
gaaggcctcagtcaggtctcggggt

SEQ ID NO: 355729 - DNA, 25 bp, Homo sapien
tgccaggaaggcctcagtcaggtct

SEQ ID NO: 355730 - DNA, 25 bp, Homo sapien
taggctgggtcccagatcattctgt

SEQ ID NO: 355731 - DNA, 25 bp, Homo sapien
ccagatcattctgtgctcggtcagc

SEQ ID NO: 355732 - DNA, 25 bp, Homo sapien
agctgggtcaggaaagccttttggg

SEQ ID NO: 355733 - DNA, 25 bp, Homo sapien
tcaggaaagccttttgggagcgtag

SEQ ID NO: 355734 - DNA, 25 bp, Homo sapien
agggtcgtcgtactcgaagcggcac

SEQ ID NO: 355735 - DNA, 25 bp, Homo sapien
caatcccttctgagctaggtccagt

SEQ ID NO: 355736 - DNA, 25 bp, Homo sapien
gttgctcgccgctttgttcaggagg

SEQ ID NO: 355737 - DNA, 25 bp, Homo sapien
tgagggaggcgatcacgttgctcgc

SEQ ID NO: 355738 - DNA, 25 bp, Homo sapien
ctcgcgccacgcgtgtccgtagtgt

SEQ ID NO: 355739 - DNA, 25 bp, Homo sapien
gtgtccgtagtgtgccagaaacacc

SEQ ID NO: 355740 - DNA, 25 bp, Homo sapien
cttggtcggcgaaggcggcacagag

SEQ ID NO: 355741 - DNA, 25 bp, Homo sapien
cacgcgtgtccgtagtgtgccagaa

SEQ ID NO: 355742 - DNA, 25 bp, Homo sapien
ccaggacccacggaaacgcagtctc

SEQ ID NO: 355743 - DNA, 25 bp, Homo sapien
caggacccacggaaacgcagtctct

SEQ ID NO: 355744 - DNA, 25 bp, Homo sapien
aggacctggtagatgggcgcaggcg

SEQ ID NO: 355745 - DNA, 25 bp, Homo sapien
gacctggtagatgggcgcaggcggg

SEQ ID NO: 355746 - DNA, 25 bp, Homo sapien
ggacctggtagatgggcgcaggcgg

SEQ ID NO: 355747 - DNA, 25 bp, Homo sapien
ttgagcacgaccaccggcatccagg

SEQ ID NO: 355748 - DNA, 25 bp, Homo sapien
cagagcctcacgcacggccgccagc

SEQ ID NO: 355749 - DNA, 25 bp, Homo sapien
cattgagcacgaccaccggcatcca

SEQ ID NO: 355750 - DNA, 25 bp, Homo sapien
agcccattgagcacgaccaccggca

SEQ ID NO: 355751 - DNA, 25 bp, Homo sapien
aaggtgtatatgttctggaagtcca

SEQ ID NO: 355752 - DNA, 25 bp, Homo sapien
ctggttgaaggtgtatatgttctgg

SEQ ID NO: 355753 - DNA, 25 bp, Homo sapien
tggaagtccacatgcagcaagttgc

SEQ ID NO: 355754 - DNA, 25 bp, Homo sapien
tggcgggtagcgtgcagtccagcgt

SEQ ID NO: 355755 - DNA, 25 bp, Homo sapien
ctcctctggacacacctggcacctc

SEQ ID NO: 355756 - DNA, 25 bp, Homo sapien
ggctgcctcactgcccattgggctc

SEQ ID NO: 355757 - DNA, 25 bp, Homo sapien
tcactgcccattgggctcctctgga

SEQ ID NO: 355758 - DNA, 25 bp, Homo sapien
caccccaccaggcacagaggaccag

SEQ ID NO: 355759 - DNA, 25 bp, Homo sapien
ccaacagaagttttgaagctactca

SEQ ID NO: 355760 - DNA, 25 bp, Homo sapien
ggtgcacatcattacgctcggctaa

SEQ ID NO: 355761 - DNA, 25 bp, Homo sapien
aatgttcctgtcctacatggcagca

SEQ ID NO: 355762 - DNA, 25 bp, Homo sapien
gatcctattttagcgtcccgagtag

SEQ ID NO: 355763 - DNA, 25 bp, Homo sapien
taacccactctgatcacagcgacag

SEQ ID NO: 355764 - DNA, 25 bp, Homo sapien
aacataaagaatcacgtagcatggg

SEQ ID NO: 355765 - DNA, 25 bp, Homo sapien
gcagagtgacccctgaaagatgcac

SEQ ID NO: 355766 - DNA, 25 bp, Homo sapien
gggctgcctatctgacaggtcctct

SEQ ID NO: 355767 - DNA, 25 bp, Homo sapien
cacaccccgtccttcatgagatgag

SEQ ID NO: 355768 - DNA, 25 bp, Homo sapien
tgtgagacaggctaaagatcaacgc

SEQ ID NO: 355769 - DNA, 25 bp, Homo sapien
ggctgcacggtaggacgatttccat

SEQ ID NO: 355770 - DNA, 25 bp, Homo sapien
tactcttgaaaacatggaccatccc

SEQ ID NO: 355771 - DNA, 25 bp, Homo sapien
cgtggtacccctgggagctttcagc

SEQ ID NO: 355772 - DNA, 25 bp, Homo sapien
caccaacagccgctgttccgtggta

SEQ ID NO: 355773 - DNA, 25 bp, Homo sapien
agggtccaccaccaacagccgctgt

SEQ ID NO: 355774 - DNA, 25 bp, Homo sapien
cgctgttccgtggtacccctgggag

SEQ ID NO: 355775 - DNA, 25 bp, Homo sapien
gccatctgatgtggaaaggtctcaa

SEQ ID NO: 355776 - DNA, 25 bp, Homo sapien
gtggaacgcttcatgggccatctga

SEQ ID NO: 355777 - DNA, 25 bp, Homo sapien
tggattgtaccaaaggtccctgtgg

SEQ ID NO: 355778 - DNA, 25 bp, Homo sapien
cccacgtaggacagatggattgtac

SEQ ID NO: 355779 - DNA, 25 bp, Homo sapien
catccagggtttcgtcttgggccaa

SEQ ID NO: 355780 - DNA, 25 bp, Homo sapien
catgtagcccaaagcgacgtggcca

SEQ ID NO: 355781 - DNA, 25 bp, Homo sapien
taaagctcaggaaggcgacacatgt

SEQ ID NO: 355782 - DNA, 25 bp, Homo sapien
gaatgaagcacatgtcagcagccag

SEQ ID NO: 355783 - DNA, 25 bp, Homo sapien
gcctcatccgtggcctgaacccggg

SEQ ID NO: 355784 - DNA, 25 bp, Homo sapien
ggcctcatccgtggcctgaacccgg

SEQ ID NO: 355785 - DNA, 25 bp, Homo sapien
tgtgcagggtacatagcatccagga

SEQ ID NO: 355786 - DNA, 25 bp, Homo sapien
tctggaggtgtaaccctggactgcc

SEQ ID NO: 355787 - DNA, 25 bp, Homo sapien
gcatagttacatgccccgctctggg

SEQ ID NO: 355788 - DNA, 25 bp, Homo sapien
gatggtgcaaagacagacgtggtcc

SEQ ID NO: 355789 - DNA, 25 bp, Homo sapien
tgattctatccccagtcaccagggc

SEQ ID NO: 355790 - DNA, 25 bp, Homo sapien
cacaaatgaaggacggtgaccaccc

SEQ ID NO: 355791 - DNA, 25 bp, Homo sapien
tctgtcagaacatggcgcactagga

SEQ ID NO: 355792 - DNA, 25 bp, Homo sapien
gagacgactctcttcaatgggtgag

SEQ ID NO: 355793 - DNA, 25 bp, Homo sapien
tccagaaggtggtcaggcacatggt

SEQ ID NO: 355794 - DNA, 25 bp, Homo sapien
tgccggaagggacacgtctagcgta

SEQ ID NO: 355795 - DNA, 25 bp, Homo sapien
caaactcctgaggtcgacacagaag

SEQ ID NO: 355796 - DNA, 25 bp, Homo sapien
tgtagcagcaagtgccacaaggtac

SEQ ID NO: 355797 - DNA, 25 bp, Homo sapien
cctggcgttgtcatccacaggatga

SEQ ID NO: 355798 - DNA, 25 bp, Homo sapien
tgcccaagaaagagacctaaaagcc

SEQ ID NO: 355799 - DNA, 25 bp, Homo sapien
agaagagacctttgactggaaccct

SEQ ID NO: 355800 - DNA, 25 bp, Homo sapien
tgcccagcctcgagatttttaagag

SEQ ID NO: 355801 - DNA, 25 bp, Homo sapien
tccattcccacgagcacactgcccc

SEQ ID NO: 355802 - DNA, 25 bp, Homo sapien
cctttccattcccacgagcacactg

SEQ ID NO: 355803 - DNA, 25 bp, Homo sapien
cattcccacgagcacactgcccccc

SEQ ID NO: 355804 - DNA, 25 bp, Homo sapien
tttccattcccacgagcacactgcc

SEQ ID NO: 355805 - DNA, 25 bp, Homo sapien
tgctgaggctgcctttcgcggtctt

SEQ ID NO: 355806 - DNA, 25 bp, Homo sapien
tgaggctgcctttcgcggtcttgtt

SEQ ID NO: 355807 - DNA, 25 bp, Homo sapien
cccgctccgactgctctgtgctgag

SEQ ID NO: 355808 - DNA, 25 bp, Homo sapien
ccccgctccgactgctctgtgctga

SEQ ID NO: 355809 - DNA, 25 bp, Homo sapien
ctgcaagggggggagagggcacgga

SEQ ID NO: 355810 - DNA, 25 bp, Homo sapien
tgcaagggggggagagggcacggaa

SEQ ID NO: 355811 - DNA, 25 bp, Homo sapien
actagatttaagactgcgagtgacc

SEQ ID NO: 355812 - DNA, 25 bp, Homo sapien
cttctagtactttcggccctactag

SEQ ID NO: 355813 - DNA, 25 bp, Homo sapien
tctggacaacctccttctagtactt

SEQ ID NO: 355814 - DNA, 25 bp, Homo sapien
gtggcagtggtctccgttctgatcc

SEQ ID NO: 355815 - DNA, 25 bp, Homo sapien
cccatccactgtgcatcaggctgct

SEQ ID NO: 355816 - DNA, 25 bp, Homo sapien
ctttctaaaggaagcgaccacgaga

SEQ ID NO: 355817 - DNA, 25 bp, Homo sapien
gaagtggagcccgagacagcccatc

SEQ ID NO: 355818 - DNA, 25 bp, Homo sapien
gccttgtggtcagctcgacttctag

SEQ ID NO: 355819 - DNA, 25 bp, Homo sapien
tcaccgagaagttctcctcatgtag

SEQ ID NO: 355820 - DNA, 25 bp, Homo sapien
gaagttctcctcatgtagcaaacaa

SEQ ID NO: 355821 - DNA, 25 bp, Homo sapien
gcttagggcacctcaccgagaagtt

SEQ ID NO: 355822 - DNA, 25 bp, Homo sapien
ttgtgcttagggcacctcaccgaga

SEQ ID NO: 355823 - DNA, 25 bp, Homo sapien
agcaggtcgctacacttacttctaa

SEQ ID NO: 355824 - DNA, 25 bp, Homo sapien
caaaactgcttgaaaaaaccaggat

SEQ ID NO: 355825 - DNA, 25 bp, Homo sapien
gagacaacccaagtaagctatgata

SEQ ID NO: 355826 - DNA, 25 bp, Homo sapien
catgatggatatcggtcacttaaaa

SEQ ID NO: 355827 - DNA, 25 bp, Homo sapien
tctttttaactgtttctcctacaga

SEQ ID NO: 355828 - DNA, 25 bp, Homo sapien
gtaatggtatcggaaggagcagcct

SEQ ID NO: 355829 - DNA, 25 bp, Homo sapien
aggagcagcctttgttgtagcagcc

SEQ ID NO: 355830 - DNA, 25 bp, Homo sapien
atcaatggcacacgggtaatggtat

SEQ ID NO: 355831 - DNA, 25 bp, Homo sapien
ttgtagcagcccaaggtggcgcctg

SEQ ID NO: 355832 - DNA, 25 bp, Homo sapien
gtgaaactcttgagacaccaaaggg

SEQ ID NO: 355833 - DNA, 25 bp, Homo sapien
ttccaggtcagagctgagattctgg

SEQ ID NO: 355834 - DNA, 25 bp, Homo sapien
cttgttccaggtcagagctgagatt

SEQ ID NO: 355835 - DNA, 25 bp, Homo sapien
gaaactcttgagacaccaaagggaa

SEQ ID NO: 355836 - DNA, 25 bp, Homo sapien
ggaggttacattgcttctacgtgtc

SEQ ID NO: 355837 - DNA, 25 bp, Homo sapien
atatttaaatggcatccaaaggccc

SEQ ID NO: 355838 - DNA, 25 bp, Homo sapien
ggttacattgcttctacgtgtctct

SEQ ID NO: 355839 - DNA, 25 bp, Homo sapien
cccactggaggttacattgcttcta

SEQ ID NO: 355840 - DNA, 25 bp, Homo sapien
tggagtgtgatgagacccaccagaa

SEQ ID NO: 355841 - DNA, 25 bp, Homo sapien
gttggcccttcttgacctagcagtt

SEQ ID NO: 355842 - DNA, 25 bp, Homo sapien
cactgaggtagcagtaaacaggctc

SEQ ID NO: 355843 - DNA, 25 bp, Homo sapien
tggacctcaaatctcacctggagtg

SEQ ID NO: 355844 - DNA, 25 bp, Homo sapien
ggaaccctgaccagcacagatggtg

SEQ ID NO: 355845 - DNA, 25 bp, Homo sapien
tcctatgggcagagcgacgattccc

SEQ ID NO: 355846 - DNA, 25 bp, Homo sapien
gattgcggcattcttctacgaacag

SEQ ID NO: 355847 - DNA, 25 bp, Homo sapien
gcacgaggctgcattctgaaactga

SEQ ID NO: 355848 - DNA, 25 bp, Homo sapien
tcctgagtgtgttcgtgttggctga

SEQ ID NO: 355849 - DNA, 25 bp, Homo sapien
atctgagggcggtcaccagtctgca

SEQ ID NO: 355850 - DNA, 25 bp, Homo sapien
tgagctagctgcactatgatggaac

SEQ ID NO: 355851 - DNA, 25 bp, Homo sapien
agagtactgagtgagcttgctaaca

SEQ ID NO: 355852 - DNA, 25 bp, Homo sapien
agccttgagggtcccgcgaaattgg

SEQ ID NO: 355853 - DNA, 25 bp, Homo sapien
ctgatctgcagtagcaagccttgag

SEQ ID NO: 355854 - DNA, 25 bp, Homo sapien
tccaataaattggacgaatctgatc

SEQ ID NO: 355855 - DNA, 25 bp, Homo sapien
tcccgcgaaattggccttggcttgg

SEQ ID NO: 355856 - DNA, 25 bp, Homo sapien
tgatcccttcccacgaaaaagtgga

SEQ ID NO: 355857 - DNA, 25 bp, Homo sapien
aagtggataaacttgcaagataaac

SEQ ID NO: 355858 - DNA, 25 bp, Homo sapien
tggataaacttgcaagataaactca

SEQ ID NO: 355859 - DNA, 25 bp, Homo sapien
tcatgacaccatgagcaatgggaag

SEQ ID NO: 355860 - DNA, 25 bp, Homo sapien
taactatagcgcagacttccaggag

SEQ ID NO: 355861 - DNA, 25 bp, Homo sapien
gagggctccgtactctgtcaagaaa

SEQ ID NO: 355862 - DNA, 25 bp, Homo sapien
cagttctgctcgtaaaaccagggcc

SEQ ID NO: 355863 - DNA, 25 bp, Homo sapien
ggtccccataagcatgagcccgagt

SEQ ID NO: 355864 - DNA, 25 bp, Homo sapien
gcatgagaattaggactgggcatca

SEQ ID NO: 355865 - DNA, 25 bp, Homo sapien
tccccagtctgcatgagaggagatg

SEQ ID NO: 355866 - DNA, 25 bp, Homo sapien
acctcaggctggttgtactgcccca

SEQ ID NO: 355867 - DNA, 25 bp, Homo sapien
tctgtttctggaacccataggcaca

SEQ ID NO: 355868 - DNA, 25 bp, Homo sapien
caaaattcttcatagattgaggctg

SEQ ID NO: 355869 - DNA, 25 bp, Homo sapien
gatagctgtaattggattgtgttcc

SEQ ID NO: 355870 - DNA, 25 bp, Homo sapien
cataagcctgtgcattagaacccac

SEQ ID NO: 355871 - DNA, 25 bp, Homo sapien
gctgcccctgttgggtcccttgtgg

SEQ ID NO: 355872 - DNA, 25 bp, Homo sapien
tgtccttcatactgagatccagcat

SEQ ID NO: 355873 - DNA, 25 bp, Homo sapien
gaagcagaagactgatagtgttggc

SEQ ID NO: 355874 - DNA, 25 bp, Homo sapien
gactgatagtgttggccaaactgac

SEQ ID NO: 355875 - DNA, 25 bp, Homo sapien
cagaagactgatagtgttggccaaa

SEQ ID NO: 355876 - DNA, 25 bp, Homo sapien
gaagactgatagtgttggccaaact

SEQ ID NO: 355877 - DNA, 25 bp, Homo sapien
tgggatgagctggatgctggttggc

SEQ ID NO: 355878 - DNA, 25 bp, Homo sapien
tcttaactggtaaccagcagcagag

SEQ ID NO: 355879 - DNA, 25 bp, Homo sapien
tggatgctggttggccagtggcctg

SEQ ID NO: 355880 - DNA, 25 bp, Homo sapien
ttgagggccgctgcattggctgtag

SEQ ID NO: 355881 - DNA, 25 bp, Homo sapien
ctggctggaagcctgctgttggtac

SEQ ID NO: 355882 - DNA, 25 bp, Homo sapien
tgctgctggctggaagcctgctgtt

SEQ ID NO: 355883 - DNA, 25 bp, Homo sapien
gctgctggctggaagcctgctgttg

SEQ ID NO: 355884 - DNA, 25 bp, Homo sapien
tgctggctggaagcctgctgttggt

SEQ ID NO: 355885 - DNA, 25 bp, Homo sapien
ttgatggccagaggtctcgctagcc

SEQ ID NO: 355886 - DNA, 25 bp, Homo sapien
gaaaccctggtaaccttgatggcca

SEQ ID NO: 355887 - DNA, 25 bp, Homo sapien
gagtgctgtgcttgaaactggccca

SEQ ID NO: 355888 - DNA, 25 bp, Homo sapien
tcttctagccgggatgagccgtgta

SEQ ID NO: 355889 - DNA, 25 bp, Homo sapien
ccgtggtaactgctttgctcccgaa

SEQ ID NO: 355890 - DNA, 25 bp, Homo sapien
tgctggtttccgtggtaactgcttt

SEQ ID NO: 355891 - DNA, 25 bp, Homo sapien
tcctgtgggtagctttgctggtttc

SEQ ID NO: 355892 - DNA, 25 bp, Homo sapien
aactgctttgctcccgaaaggactg

SEQ ID NO: 355893 - DNA, 25 bp, Homo sapien
gcacagcagcaggccaacagccctc

SEQ ID NO: 355894 - DNA, 25 bp, Homo sapien
actgttcagcagcacagcagcaggc

SEQ ID NO: 355895 - DNA, 25 bp, Homo sapien
agcacagcagcaggccaacagccct

SEQ ID NO: 355896 - DNA, 25 bp, Homo sapien
agcagcacagcagcaggccaacagc

SEQ ID NO: 355897 - DNA, 25 bp, Homo sapien
aaaacattagacacgcatctccttg

SEQ ID NO: 355898 - DNA, 25 bp, Homo sapien
gaaaaacattagacacgcatctcct

SEQ ID NO: 355899 - DNA, 25 bp, Homo sapien
ataaaatcaagtctagatgatggag

SEQ ID NO: 355900 - DNA, 25 bp, Homo sapien
gatgatggagggaataaagatgaat

SEQ ID NO: 355901 - DNA, 25 bp, Homo sapien
ctttcaagtccagtgcaaatcgcac

SEQ ID NO: 355902 - DNA, 25 bp, Homo sapien
cagtgcaaatcgcacttttccctta

SEQ ID NO: 355903 - DNA, 25 bp, Homo sapien
gcaaatcgcacttttcccttaacac

SEQ ID NO: 355904 - DNA, 25 bp, Homo sapien
agtccagtgcaaatcgcacttttcc

SEQ ID NO: 355905 - DNA, 25 bp, Homo sapien
agcctccgtgtagctggcgttacag

SEQ ID NO: 355906 - DNA, 25 bp, Homo sapien
aaactctttacctcacctcaagtga

SEQ ID NO: 355907 - DNA, 25 bp, Homo sapien
gtcttaaactctttacctcacctca

SEQ ID NO: 355908 - DNA, 25 bp, Homo sapien
tacctcacctcaagtgacccatccg

SEQ ID NO: 355909 - DNA, 25 bp, Homo sapien
cacgaagactttcaacaagagaaga

SEQ ID NO: 355910 - DNA, 25 bp, Homo sapien
tcagcacatgcgctagccaatgtag

SEQ ID NO: 355911 - DNA, 25 bp, Homo sapien
tctctacacttctgccatggagtaa

SEQ ID NO: 355912 - DNA, 25 bp, Homo sapien
gcaggctgtgatgtccttcattcca

SEQ ID NO: 355913 - DNA, 25 bp, Homo sapien
taatatacggctagagatgggaagg

SEQ ID NO: 355914 - DNA, 25 bp, Homo sapien
tacaaatttgcgatgaaacagacac

SEQ ID NO: 355915 - DNA, 25 bp, Homo sapien
caggcggttctctgggttcttcacc

SEQ ID NO: 355916 - DNA, 25 bp, Homo sapien
taaaccgctaatattccatctgacc

SEQ ID NO: 355917 - DNA, 25 bp, Homo sapien
gggatcacactgggttctgagttcc

SEQ ID NO: 355918 - DNA, 25 bp, Homo sapien
tattcttactacccaacgccaatca

SEQ ID NO: 355919 - DNA, 25 bp, Homo sapien
cccaggaatgtcctcaatccaacat

SEQ ID NO: 355920 - DNA, 25 bp, Homo sapien
aatttacgcatgctctggtttcaca

SEQ ID NO: 355921 - DNA, 25 bp, Homo sapien
aaaaaggctaggcttgccagagtgc

SEQ ID NO: 355922 - DNA, 25 bp, Homo sapien
tggagggccgtgaacaaaagcagca

SEQ ID NO: 355923 - DNA, 25 bp, Homo sapien
gccatcatcatgttccaggtaagag

SEQ ID NO: 355924 - DNA, 25 bp, Homo sapien
taagcagacacatacgactcttggc

SEQ ID NO: 355925 - DNA, 25 bp, Homo sapien
gaggtgacagttaattccactagca

SEQ ID NO: 355926 - DNA, 25 bp, Homo sapien
tcttcagcatctgcggagcactggc

SEQ ID NO: 355927 - DNA, 25 bp, Homo sapien
tattgggctcatatccggcccagca

SEQ ID NO: 355928 - DNA, 25 bp, Homo sapien
cactagcataccatttcacaggaga

SEQ ID NO: 355929 - DNA, 25 bp, Homo sapien
cccctcgaggctcgctccggcccgc

SEQ ID NO: 355930 - DNA, 25 bp, Homo sapien
gcccctcgaggctcgctccggcccg

SEQ ID NO: 355931 - DNA, 25 bp, Homo sapien
ccacgggaaggcagtgccacatgct

SEQ ID NO: 355932 - DNA, 25 bp, Homo sapien
ttgtctgggctccacgggaaggcag

SEQ ID NO: 355933 - DNA, 25 bp, Homo sapien
cctgaaagctcaagacttttagcca

SEQ ID NO: 355934 - DNA, 25 bp, Homo sapien
gacttttagccacatcattgtctgg

SEQ ID NO: 355935 - DNA, 25 bp, Homo sapien
gatgccaaggcgattgtcttctgga

SEQ ID NO: 355936 - DNA, 25 bp, Homo sapien
gatgcttaatcaactccgtctctcc

SEQ ID NO: 355937 - DNA, 25 bp, Homo sapien
gagaagccaagaaacgcagatgccg

SEQ ID NO: 355938 - DNA, 25 bp, Homo sapien
ctgccttctcaataggagaagccaa

SEQ ID NO: 355939 - DNA, 25 bp, Homo sapien
cactgacaaatggcctgctggaggt

SEQ ID NO: 355940 - DNA, 25 bp, Homo sapien
aaaacaactcctgagccgaggcggg

SEQ ID NO: 355941 - DNA, 25 bp, Homo sapien
tgccagcccggcgaccacgggggag

SEQ ID NO: 355942 - DNA, 25 bp, Homo sapien
cagaccccttgccagcccggcgacc

SEQ ID NO: 355943 - DNA, 25 bp, Homo sapien
gaaaacaactcctgagccgaggcgg

SEQ ID NO: 355944 - DNA, 25 bp, Homo sapien
ttgtccctaggtgggtgccaaacaa

SEQ ID NO: 355945 - DNA, 25 bp, Homo sapien
cctagggctcggcattcagacagac

SEQ ID NO: 355946 - DNA, 25 bp, Homo sapien
caaaggtcagctcattccctagggc

SEQ ID NO: 355947 - DNA, 25 bp, Homo sapien
gagctggatacacctgtcttgcaag

SEQ ID NO: 355948 - DNA, 25 bp, Homo sapien
ccattgggtgtggaaggcgacagca

SEQ ID NO: 355949 - DNA, 25 bp, Homo sapien
gggcacatgggcgattgacccaaag

SEQ ID NO: 355950 - DNA, 25 bp, Homo sapien
gattgacccaaagggccgactgttg

SEQ ID NO: 355951 - DNA, 25 bp, Homo sapien
acaggcagggtttgacatcagcgga

SEQ ID NO: 355952 - DNA, 25 bp, Homo sapien
tatttagtcttcaccacgcgtaccg

SEQ ID NO: 355953 - DNA, 25 bp, Homo sapien
cacactatcgtgcagaggagaccga

SEQ ID NO: 355954 - DNA, 25 bp, Homo sapien
agacagaaacggctcatcctagtgg

SEQ ID NO: 355955 - DNA, 25 bp, Homo sapien
ttacaccgttttccagccgagggca

SEQ ID NO: 355956 - DNA, 25 bp, Homo sapien
gctgtgttatctcccgaacagctgc

SEQ ID NO: 355957 - DNA, 25 bp, Homo sapien
gcacaacgtccccagggtcttagaa

SEQ ID NO: 355958 - DNA, 25 bp, Homo sapien
ccagggtcttagaagtgtacccagg

SEQ ID NO: 355959 - DNA, 25 bp, Homo sapien
tctgcacaacgtccccagggtctta

SEQ ID NO: 355960 - DNA, 25 bp, Homo sapien
tagaagtgtacccagggccatggca

SEQ ID NO: 355961 - DNA, 25 bp, Homo sapien
ggtccctgcggggctggcgactggg

SEQ ID NO: 355962 - DNA, 25 bp, Homo sapien
tccctgcggggctggcgactgggac

SEQ ID NO: 355963 - DNA, 25 bp, Homo sapien
ctgcggcaggctctgggcaggggtc

SEQ ID NO: 355964 - DNA, 25 bp, Homo sapien
ggggtccctgcggggctggcgactg

SEQ ID NO: 355965 - DNA, 25 bp, Homo sapien
gggcagatgcctaatgcgaatcgct

SEQ ID NO: 355966 - DNA, 25 bp, Homo sapien
taatgcgaatcgcttctgtcatcag

SEQ ID NO: 355967 - DNA, 25 bp, Homo sapien
ctgaagataaacttggaggtgatgt

SEQ ID NO: 355968 - DNA, 25 bp, Homo sapien
cgtctcttccggatgtgtgctctgg

SEQ ID NO: 355969 - DNA, 25 bp, Homo sapien
tgccagagcgccgatgggctctcag

SEQ ID NO: 355970 - DNA, 25 bp, Homo sapien
ggcttgacacggaccagctgccgct

SEQ ID NO: 355971 - DNA, 25 bp, Homo sapien
gccgatgggctctcagcgaaattga

SEQ ID NO: 355972 - DNA, 25 bp, Homo sapien
tcagcgaaattgatggccattgtca

SEQ ID NO: 355973 - DNA, 25 bp, Homo sapien
gatggccgacattaatctcttccct

SEQ ID NO: 355974 - DNA, 25 bp, Homo sapien
ctaatgaagatggccgacattaatc

SEQ ID NO: 355975 - DNA, 25 bp, Homo sapien
ctctcccgacaggtcaatttatagt

SEQ ID NO: 355976 - DNA, 25 bp, Homo sapien
ttccctctcccgacaggtcaattta

SEQ ID NO: 355977 - DNA, 25 bp, Homo sapien
cggctgctgcataatcagtgagcag

SEQ ID NO: 355978 - DNA, 25 bp, Homo sapien
agcagagaggcctcagggcccacag

SEQ ID NO: 355979 - DNA, 25 bp, Homo sapien
gtgagcagagaggcctcagggccca

SEQ ID NO: 355980 - DNA, 25 bp, Homo sapien
gctgctgcataatcagtgagcagag

SEQ ID NO: 355981 - DNA, 25 bp, Homo sapien
ctttagtttcataaaactcagcatt

SEQ ID NO: 355982 - DNA, 25 bp, Homo sapien
aaattgcatttaatacagggcaaga

SEQ ID NO: 355983 - DNA, 25 bp, Homo sapien
aagaaaattgcatttaatacagggc

SEQ ID NO: 355984 - DNA, 25 bp, Homo sapien
aattgcatttaatacagggcaagac

SEQ ID NO: 355985 - DNA, 25 bp, Homo sapien
gaaaattgcatttaatacagggcaa

SEQ ID NO: 355986 - DNA, 25 bp, Homo sapien
tacagctggagggaaaccgatttca

SEQ ID NO: 355987 - DNA, 25 bp, Homo sapien
ctgatatgtcggatttctttgtggc

SEQ ID NO: 355988 - DNA, 25 bp, Homo sapien
gacttcacgcctgttactacagctg

SEQ ID NO: 355989 - DNA, 25 bp, Homo sapien
tggcatccacttcatcgctcagcag

SEQ ID NO: 355990 - DNA, 25 bp, Homo sapien
tgatattaaatgtcaggcagaaacc

SEQ ID NO: 355991 - DNA, 25 bp, Homo sapien
catttgggctttgacctcaggtctc

SEQ ID NO: 355992 - DNA, 25 bp, Homo sapien
aatggatgtttcttacccgtcagga

SEQ ID NO: 355993 - DNA, 25 bp, Homo sapien
gatgacaggagtaactaggtccaga

SEQ ID NO: 355994 - DNA, 25 bp, Homo sapien
cacacaaacatatgtgactcttaag

SEQ ID NO: 355995 - DNA, 25 bp, Homo sapien
ctaagaacctccctagaaatgcggg

SEQ ID NO: 355996 - DNA, 25 bp, Homo sapien
tcactgctgaattgcgcatgcccgg

SEQ ID NO: 355997 - DNA, 25 bp, Homo sapien
ggtcccatgctatgagagtccatca

SEQ ID NO: 355998 - DNA, 25 bp, Homo sapien
gggtatctcctccagccaagggaaa

SEQ ID NO: 355999 - DNA, 25 bp, Homo sapien
ccccgggttgctgaagggtgcctcg

SEQ ID NO: 356000 - DNA, 25 bp, Homo sapien
gagtccccgggactgccgacctcag

SEQ ID NO: 356001 - DNA, 25 bp, Homo sapien
ttgctgaagggtgcctcggtcacgg

SEQ ID NO: 356002 - DNA, 25 bp, Homo sapien
cgcgtctccacaggctcaacagctg

SEQ ID NO: 356003 - DNA, 25 bp, Homo sapien
tctcgagatccttcagagcgcggac

SEQ ID NO: 356004 - DNA, 25 bp, Homo sapien
aaccccgggtcaccggagatgctgc

SEQ ID NO: 356005 - DNA, 25 bp, Homo sapien
cgcagtcccgtatgcggcgaaaccg

SEQ ID NO: 356006 - DNA, 25 bp, Homo sapien
agatgctgcagctcgagggtcccgc

SEQ ID NO: 356007 - DNA, 25 bp, Homo sapien
cacacattttgcgataacatcgatg

SEQ ID NO: 356008 - DNA, 25 bp, Homo sapien
tctggccctcaggacaaaaaggccc

SEQ ID NO: 356009 - DNA, 25 bp, Homo sapien
ttgcgataacatcgatggcgaaaga

SEQ ID NO: 356010 - DNA, 25 bp, Homo sapien
aaatgttgtaaatcctcctgcggcc

SEQ ID NO: 356011 - DNA, 25 bp, Homo sapien
ataagaggaatgtgaggctgccagc

SEQ ID NO: 356012 - DNA, 25 bp, Homo sapien
ggatcagagcatacaggctgccagg

SEQ ID NO: 356013 - DNA, 25 bp, Homo sapien
catctctgaaggaaacctgttcttc

SEQ ID NO: 356014 - DNA, 25 bp, Homo sapien
gccaattacagcagcattatccggg

SEQ ID NO: 356015 - DNA, 25 bp, Homo sapien
ttgactgtcactgcaaactgaggct

SEQ ID NO: 356016 - DNA, 25 bp, Homo sapien
gggcacagactgacctccagaagaa

SEQ ID NO: 356017 - DNA, 25 bp, Homo sapien
cattgcaaggaatggagtgacgcca

SEQ ID NO: 356018 - DNA, 25 bp, Homo sapien
gagtcttgaaggaaatgcacaccca

SEQ ID NO: 356019 - DNA, 25 bp, Homo sapien
gagggagcttcaggccattcattca

SEQ ID NO: 356020 - DNA, 25 bp, Homo sapien
ccaaggagatgacagagtgcacgta

SEQ ID NO: 356021 - DNA, 25 bp, Homo sapien
caaacaggcccggagttcattcaaa

SEQ ID NO: 356022 - DNA, 25 bp, Homo sapien
caagctctatgagcggtggagccca

SEQ ID NO: 356023 - DNA, 25 bp, Homo sapien
ttttcatagaccaggttaagttcgc

SEQ ID NO: 356024 - DNA, 25 bp, Homo sapien
catcttcgaatctatgcggtctctc

SEQ ID NO: 356025 - DNA, 25 bp, Homo sapien
tcgccatcatcttcgaatctatgcg

SEQ ID NO: 356026 - DNA, 25 bp, Homo sapien
ggttaagttcgccatcatcttcgaa

SEQ ID NO: 356027 - DNA, 25 bp, Homo sapien
cacttcaccagtgatgggagggtca

SEQ ID NO: 356028 - DNA, 25 bp, Homo sapien
ttgcccccccacttcaccagtgatg

SEQ ID NO: 356029 - DNA, 25 bp, Homo sapien
tccatgtcccatttgcccccccact

SEQ ID NO: 356030 - DNA, 25 bp, Homo sapien
ccccacttcaccagtgatgggaggg

SEQ ID NO: 356031 - DNA, 25 bp, Homo sapien
tcctcattctcgatgcaggcataga

SEQ ID NO: 356032 - DNA, 25 bp, Homo sapien
gagctgccatcctcattctcgatgc

SEQ ID NO: 356033 - DNA, 25 bp, Homo sapien
ggggctctgcttggcggtgggtgag

SEQ ID NO: 356034 - DNA, 25 bp, Homo sapien
ggctctgcttggcggtgggtgagct

SEQ ID NO: 356035 - DNA, 25 bp, Homo sapien
ctttccttcctgagtgtacgtgtca

SEQ ID NO: 356036 - DNA, 25 bp, Homo sapien
tgtcatatggatgccggctggttgc

SEQ ID NO: 356037 - DNA, 25 bp, Homo sapien
gctggttgccaaggaggcggtttcc

SEQ ID NO: 356038 - DNA, 25 bp, Homo sapien
caaggaggcggtttccctggcaaca

SEQ ID NO: 356039 - DNA, 25 bp, Homo sapien
accatcgcagccagggggcgtgcac

SEQ ID NO: 356040 - DNA, 25 bp, Homo sapien
agcacgtacgagcagaacccaagca

SEQ ID NO: 356041 - DNA, 25 bp, Homo sapien
aacgacagcacgtacgagcagaacc

SEQ ID NO: 356042 - DNA, 25 bp, Homo sapien
gaacagaaacgacagcacgtacgag

SEQ ID NO: 356043 - DNA, 25 bp, Homo sapien
atgcacccacatctccaggaaaatt

SEQ ID NO: 356044 - DNA, 25 bp, Homo sapien
tggcagatcttggatctgggcactt

SEQ ID NO: 356045 - DNA, 25 bp, Homo sapien
ggcagatcttggatctgggcacttc

SEQ ID NO: 356046 - DNA, 25 bp, Homo sapien
ggcaaatgcctacaagacctgcatc

SEQ ID NO: 356047 - DNA, 25 bp, Homo sapien
gcaaatgcctacaagacctgcatca

SEQ ID NO: 356048 - DNA, 25 bp, Homo sapien
aagacctgcatcaagccattcctgc

SEQ ID NO: 356049 - DNA, 25 bp, Homo sapien
caaatgcctacaagacctgcatcaa

SEQ ID NO: 356050 - DNA, 25 bp, Homo sapien
tggggagtcacgaggcggtacaggc

SEQ ID NO: 356051 - DNA, 25 bp, Homo sapien
gaaagctcccgctggtcacagtgga

SEQ ID NO: 356052 - DNA, 25 bp, Homo sapien
tggagaaagctcccgctggtcacag

SEQ ID NO: 356053 - DNA, 25 bp, Homo sapien
gtcacgaggcggtacaggcagccct

SEQ ID NO: 356054 - DNA, 25 bp, Homo sapien
aggacactcaggaggccggtgaagc

SEQ ID NO: 356055 - DNA, 25 bp, Homo sapien
tgcgggggctctcggtaccctgcgt

SEQ ID NO: 356056 - DNA, 25 bp, Homo sapien
tagtaggtgccagtggccgatgctc

SEQ ID NO: 356057 - DNA, 25 bp, Homo sapien
ccctggagatcttcatgaaagtagc

SEQ ID NO: 356058 - DNA, 25 bp, Homo sapien
cctctcaccgtggagtgtggccagt

SEQ ID NO: 356059 - DNA, 25 bp, Homo sapien
tccagggtggcagtttgttggcttc

SEQ ID NO: 356060 - DNA, 25 bp, Homo sapien
tgggcaggccggtgtgggtcactga

SEQ ID NO: 356061 - DNA, 25 bp, Homo sapien
ccggtgtgggtcactgactgtcctc

SEQ ID NO: 356062 - DNA, 25 bp, Homo sapien
aggccggtgtgggtcactgactgtc

SEQ ID NO: 356063 - DNA, 25 bp, Homo sapien
ggcaggccggtgtgggtcactgact

SEQ ID NO: 356064 - DNA, 25 bp, Homo sapien
ctgccagtcgcagggtcccgggcag

SEQ ID NO: 356065 - DNA, 25 bp, Homo sapien
ggaggcctggcagggcccgccacct

SEQ ID NO: 356066 - DNA, 25 bp, Homo sapien
gagcccaggagggcgtgggaggcct

SEQ ID NO: 356067 - DNA, 25 bp, Homo sapien
ctggcagggcccgccacctcacagg

SEQ ID NO: 356068 - DNA, 25 bp, Homo sapien
gccacctcacaggctggttctccat

SEQ ID NO: 356069 - DNA, 25 bp, Homo sapien
cctgcttgtctgcggcgactcttta

SEQ ID NO: 356070 - DNA, 25 bp, Homo sapien
tgcttgtctgcggcgactctttagt

SEQ ID NO: 356071 - DNA, 25 bp, Homo sapien
cttgtctgcggcgactctttagttc

SEQ ID NO: 356072 - DNA, 25 bp, Homo sapien
tgtctgcggcgactctttagttcac

SEQ ID NO: 356073 - DNA, 25 bp, Homo sapien
gctgcgtttggcactaggtgggaag

SEQ ID NO: 356074 - DNA, 25 bp, Homo sapien
tgcgtttggcactaggtgggaagga

SEQ ID NO: 356075 - DNA, 25 bp, Homo sapien
gtttggcactaggtgggaaggagct

SEQ ID NO: 356076 - DNA, 25 bp, Homo sapien
aggctgcgtttggcactaggtggga

SEQ ID NO: 356077 - DNA, 25 bp, Homo sapien
ctggcagctgtggggtagctccagc

SEQ ID NO: 356078 - DNA, 25 bp, Homo sapien
caggtggcctggaggacccagccct

SEQ ID NO: 356079 - DNA, 25 bp, Homo sapien
ctggctggttcatgggcaggtggcc

SEQ ID NO: 356080 - DNA, 25 bp, Homo sapien
tggctggttcatgggcaggtggcct

SEQ ID NO: 356081 - DNA, 25 bp, Homo sapien
gccggacaggtaagcggaatcaaga

SEQ ID NO: 356082 - DNA, 25 bp, Homo sapien
ctgggccggacaggtaagcggaatc

SEQ ID NO: 356083 - DNA, 25 bp, Homo sapien
gggccggacaggtaagcggaatcaa

SEQ ID NO: 356084 - DNA, 25 bp, Homo sapien
gcggaatcaagagatggggccagtt

SEQ ID NO: 356085 - DNA, 25 bp, Homo sapien
catgatcgtatatgagagagggagc

SEQ ID NO: 356086 - DNA, 25 bp, Homo sapien
ctcaagggaggcgtcgatgctctca

SEQ ID NO: 356087 - DNA, 25 bp, Homo sapien
taaacaacctgctcgagcctttggt

SEQ ID NO: 356088 - DNA, 25 bp, Homo sapien
gatgctctcaggcactgaacttgtt

SEQ ID NO: 356089 - DNA, 25 bp, Homo sapien
cagcttcggtgagtacagtggccag

SEQ ID NO: 356090 - DNA, 25 bp, Homo sapien
ccagacttttgtgagtgagatccga

SEQ ID NO: 356091 - DNA, 25 bp, Homo sapien
tgaagagttcgcttcctccagtggg

SEQ ID NO: 356092 - DNA, 25 bp, Homo sapien
tagaagcaagatcgtgggctgagcc

SEQ ID NO: 356093 - DNA, 25 bp, Homo sapien
aggcaactgccgcaagggacacagg

SEQ ID NO: 356094 - DNA, 25 bp, Homo sapien
caactgccgcaagggacacagggat

SEQ ID NO: 356095 - DNA, 25 bp, Homo sapien
acctcaggcaactgccgcaagggac

SEQ ID NO: 356096 - DNA, 25 bp, Homo sapien
tctgacctcaggcaactgccgcaag

SEQ ID NO: 356097 - DNA, 25 bp, Homo sapien
gagggagtgagggaatgtcacccac

SEQ ID NO: 356098 - DNA, 25 bp, Homo sapien
gggagggagtgagggaatgtcaccc

SEQ ID NO: 356099 - DNA, 25 bp, Homo sapien
gctggggagggagtgagggaatgtc

SEQ ID NO: 356100 - DNA, 25 bp, Homo sapien
tggggagggagtgagggaatgtcac

SEQ ID NO: 356101 - DNA, 25 bp, Homo sapien
tcgtgggcggaatggtgagtagatg

SEQ ID NO: 356102 - DNA, 25 bp, Homo sapien
tccttataccaggaagttggtgtaa

SEQ ID NO: 356103 - DNA, 25 bp, Homo sapien
taaacggtggagactcctggtagag

SEQ ID NO: 356104 - DNA, 25 bp, Homo sapien
gaaggagaaggtacctgggacagaa

SEQ ID NO: 356105 - DNA, 25 bp, Homo sapien
gcagccagccattgtaattgttttt

SEQ ID NO: 356106 - DNA, 25 bp, Homo sapien
ctgactttaatcacacagccatacc

SEQ ID NO: 356107 - DNA, 25 bp, Homo sapien
tggcccaccatagacgatttttaag

SEQ ID NO: 356108 - DNA, 25 bp, Homo sapien
gaaacgaagcactgacatgggctcc

SEQ ID NO: 356109 - DNA, 25 bp, Homo sapien
tccaaataggacacacggcagagac

SEQ ID NO: 356110 - DNA, 25 bp, Homo sapien
tatggctgcattcacgttcaagtcc

SEQ ID NO: 356111 - DNA, 25 bp, Homo sapien
ttctcatgcactgggaaagacccct

SEQ ID NO: 356112 - DNA, 25 bp, Homo sapien
tttataggctcccaaaccacagcag

SEQ ID NO: 356113 - DNA, 25 bp, Homo sapien
agtgatcagtccctagaggcctggg

SEQ ID NO: 356114 - DNA, 25 bp, Homo sapien
tacccggccaggattgtagactttc

SEQ ID NO: 356115 - DNA, 25 bp, Homo sapien
ctggtgttttatggtcacctaccca

SEQ ID NO: 356116 - DNA, 25 bp, Homo sapien
tgtaggtggggatggcctttgcccg

SEQ ID NO: 356117 - DNA, 25 bp, Homo sapien
tgcacccatcacgccagtgggcatg

SEQ ID NO: 356118 - DNA, 25 bp, Homo sapien
ttgcccgggttcctgggagcacctg

SEQ ID NO: 356119 - DNA, 25 bp, Homo sapien
gctgtctcctggctaataatctcca

SEQ ID NO: 356120 - DNA, 25 bp, Homo sapien
tcttttctcacgaggactacttcgg

SEQ ID NO: 356121 - DNA, 25 bp, Homo sapien
gcaggctgctcacgtcatctcatta

SEQ ID NO: 356122 - DNA, 25 bp, Homo sapien
tgcagttttcttggcgttgtcacca

SEQ ID NO: 356123 - DNA, 25 bp, Homo sapien
ggtcggaatttgcgctgggcccgca

SEQ ID NO: 356124 - DNA, 25 bp, Homo sapien
aacttcttgcgcagctgcgctagat

SEQ ID NO: 356125 - DNA, 25 bp, Homo sapien
gtcggaatttgcgctgggcccgcag

SEQ ID NO: 356126 - DNA, 25 bp, Homo sapien
tcggaatttgcgctgggcccgcagc

SEQ ID NO: 356127 - DNA, 25 bp, Homo sapien
tctcgatgctgccaggcgtagaagt

SEQ ID NO: 356128 - DNA, 25 bp, Homo sapien
ctctctcgatgctgccaggcgtaga

SEQ ID NO: 356129 - DNA, 25 bp, Homo sapien
agttgagcagctcttttcggctgcg

SEQ ID NO: 356130 - DNA, 25 bp, Homo sapien
cgatgctgccaggcgtagaagttga

SEQ ID NO: 356131 - DNA, 25 bp, Homo sapien
agagtctgcgtagtcactgatccac

SEQ ID NO: 356132 - DNA, 25 bp, Homo sapien
gagtctgcgtagtcactgatccact

SEQ ID NO: 356133 - DNA, 25 bp, Homo sapien
ccaaggccgctgacaccccacttgg

SEQ ID NO: 356134 - DNA, 25 bp, Homo sapien
agggtggctctctgtggacaccagc

SEQ ID NO: 356135 - DNA, 25 bp, Homo sapien
gtgaatgccactcttcacagggtgg

SEQ ID NO: 356136 - DNA, 25 bp, Homo sapien
tggcttctggaacaccacataggct

SEQ ID NO: 356137 - DNA, 25 bp, Homo sapien
gctctcagccaggtccggcttctcc

SEQ ID NO: 356138 - DNA, 25 bp, Homo sapien
aactctacagactggacgaggccac

SEQ ID NO: 356139 - DNA, 25 bp, Homo sapien
caactctacagactggacgaggcca

SEQ ID NO: 356140 - DNA, 25 bp, Homo sapien
caagtgtgagcatccgcagggccat

SEQ ID NO: 356141 - DNA, 25 bp, Homo sapien
agagggaagccaagtgtgagcatcc

SEQ ID NO: 356142 - DNA, 25 bp, Homo sapien
tgcaccatgggtggcgctgccaggg

SEQ ID NO: 356143 - DNA, 25 bp, Homo sapien
acatctgcccaagccgggagactgt

SEQ ID NO: 356144 - DNA, 25 bp, Homo sapien
tacctgaatcagcagtagtgaccct

SEQ ID NO: 356145 - DNA, 25 bp, Homo sapien
catgctgcacttcaaaaaaggtcag

SEQ ID NO: 356146 - DNA, 25 bp, Homo sapien
tctgtctctgggatgcagcgagctg

SEQ ID NO: 356147 - DNA, 25 bp, Homo sapien
tgtgcccggcatattcctgctctct

SEQ ID NO: 356148 - DNA, 25 bp, Homo sapien
ccagcaattcccttggccaggggcg

SEQ ID NO: 356149 - DNA, 25 bp, Homo sapien
aaatccagcaattcccttggccagg

SEQ ID NO: 356150 - DNA, 25 bp, Homo sapien
tttgaaaacaaatccagcaattccc

SEQ ID NO: 356151 - DNA, 25 bp, Homo sapien
ctgaagggggcggattacttcaggt

SEQ ID NO: 356152 - DNA, 25 bp, Homo sapien
gccgtgtgctctcacatagaggtag

SEQ ID NO: 356153 - DNA, 25 bp, Homo sapien
gacaaaaagagtcctcttctgaggc

SEQ ID NO: 356154 - DNA, 25 bp, Homo sapien
tctgaggccaggtggacttggtgcc

SEQ ID NO: 356155 - DNA, 25 bp, Homo sapien
tctgtgcagtatgggggcacattga

SEQ ID NO: 356156 - DNA, 25 bp, Homo sapien
aggagagccttagcatcacctccgc

SEQ ID NO: 356157 - DNA, 25 bp, Homo sapien
aggtttagctcaaacctcgcttcct

SEQ ID NO: 356158 - DNA, 25 bp, Homo sapien
cctcaggagagccttagcatcacct

SEQ ID NO: 356159 - DNA, 25 bp, Homo sapien
tcaaacctcgcttcctcaggagagc

SEQ ID NO: 356160 - DNA, 25 bp, Homo sapien
agtgtggacagaggcgggctcaccc

SEQ ID NO: 356161 - DNA, 25 bp, Homo sapien
cccaagggaagcgtggaccaagttg

SEQ ID NO: 356162 - DNA, 25 bp, Homo sapien
ccaagttgggctcgccccgggagag

SEQ ID NO: 356163 - DNA, 25 bp, Homo sapien
gagcaggcagaagggcgccgcctgg

SEQ ID NO: 356164 - DNA, 25 bp, Homo sapien
cgcgcggcgcacttcctcctgcgcg

SEQ ID NO: 356165 - DNA, 25 bp, Homo sapien
gcggcgcacttcctcctgcgcgcca

SEQ ID NO: 356166 - DNA, 25 bp, Homo sapien
gcgcacttcctcctgcgcgccacca

SEQ ID NO: 356167 - DNA, 25 bp, Homo sapien
ggtcccgcgcggcgcacttcctcct

SEQ ID NO: 356168 - DNA, 25 bp, Homo sapien
ggagttgcggttcggcgccggcgcg

SEQ ID NO: 356169 - DNA, 25 bp, Homo sapien
cgggagttgcggttcggcgccggcg

SEQ ID NO: 356170 - DNA, 25 bp, Homo sapien
gggagttgcggttcggcgccggcgc

SEQ ID NO: 356171 - DNA, 25 bp, Homo sapien
cgccgggagttgcggttcggcgccg

SEQ ID NO: 356172 - DNA, 25 bp, Homo sapien
agagataaatcagcgcgcgaaagtg

SEQ ID NO: 356173 - DNA, 25 bp, Homo sapien
taaatcagcgcgcgaaagtgggagc

SEQ ID NO: 356174 - DNA, 25 bp, Homo sapien
tcagagataaatcagcgcgcgaaag

SEQ ID NO: 356175 - DNA, 25 bp, Homo sapien
ccgctcagagataaatcagcgcgcg

SEQ ID NO: 356176 - DNA, 25 bp, Homo sapien
ggataactgtgggcaatcagtcagg

SEQ ID NO: 356177 - DNA, 25 bp, Homo sapien
ccggataactgtgggcaatcagtca

SEQ ID NO: 356178 - DNA, 25 bp, Homo sapien
taactgtgggcaatcagtcaggccc

SEQ ID NO: 356179 - DNA, 25 bp, Homo sapien
ataactgtgggcaatcagtcaggcc

SEQ ID NO: 356180 - DNA, 25 bp, Homo sapien
tgtaccttccccgagatggtggata

SEQ ID NO: 356181 - DNA, 25 bp, Homo sapien
taaacttatcttgctggacacgccg

SEQ ID NO: 356182 - DNA, 25 bp, Homo sapien
ggagtccagccatcaccaaggtctg

SEQ ID NO: 356183 - DNA, 25 bp, Homo sapien
aagcgggctttcgtgcatgctgtca

SEQ ID NO: 356184 - DNA, 25 bp, Homo sapien
atacagatttctagaccaggcacag

SEQ ID NO: 356185 - DNA, 25 bp, Homo sapien
tacagatttctagaccaggcacagt

SEQ ID NO: 356186 - DNA, 25 bp, Homo sapien
aatacagatttctagaccaggcaca

SEQ ID NO: 356187 - DNA, 25 bp, Homo sapien
aaatacagatttctagaccaggcac

SEQ ID NO: 356188 - DNA, 25 bp, Homo sapien
ccttccacttgagtcttcccagtag

SEQ ID NO: 356189 - DNA, 25 bp, Homo sapien
tgacgggaccgtctcccttcatggc

SEQ ID NO: 356190 - DNA, 25 bp, Homo sapien
caccatgctcggcgcgcgcgtgtgt

SEQ ID NO: 356191 - DNA, 25 bp, Homo sapien
gtgtacacgcaacaaggccatttat

SEQ ID NO: 356192 - DNA, 25 bp, Homo sapien
tcttcgaccgagtgcacagtttcgg

SEQ ID NO: 356193 - DNA, 25 bp, Homo sapien
gaccgagtgcacagtttcgggaggg

SEQ ID NO: 356194 - DNA, 25 bp, Homo sapien
cttcgaccgagtgcacagtttcggg

SEQ ID NO: 356195 - DNA, 25 bp, Homo sapien
tcgaccgagtgcacagtttcgggag

SEQ ID NO: 356196 - DNA, 25 bp, Homo sapien
cagagtctcgctcttgttgcaaagg

SEQ ID NO: 356197 - DNA, 25 bp, Homo sapien
gagtctcgctcttgttgcaaaggct

SEQ ID NO: 356198 - DNA, 25 bp, Homo sapien
ttattattattgatacagagtctcg

SEQ ID NO: 356199 - DNA, 25 bp, Homo sapien
gtctcgctcttgttgcaaaggctgg

SEQ ID NO: 356200 - DNA, 25 bp, Homo sapien
attttcgtatcacgcttgcacaggg

SEQ ID NO: 356201 - DNA, 25 bp, Homo sapien
acgctaatcatctctttgttgttcc

SEQ ID NO: 356202 - DNA, 25 bp, Homo sapien
gggccacgctaatcatctctttgtt

SEQ ID NO: 356203 - DNA, 25 bp, Homo sapien
tcacaattttcgtatcacgcttgca

SEQ ID NO: 356204 - DNA, 25 bp, Homo sapien
gtggcccgagtttggctgcctgcaa

SEQ ID NO: 356205 - DNA, 25 bp, Homo sapien
tggcccgagtttggctgcctgcaac

SEQ ID NO: 356206 - DNA, 25 bp, Homo sapien
cggtggcccgagtttggctgcctgc

SEQ ID NO: 356207 - DNA, 25 bp, Homo sapien
gtgcggtggcccgagtttggctgcc

SEQ ID NO: 356208 - DNA, 25 bp, Homo sapien
caaaaagcttggtcacaccctgctg

SEQ ID NO: 356209 - DNA, 25 bp, Homo sapien
cttgggaacagtatgggaacccctg

SEQ ID NO: 356210 - DNA, 25 bp, Homo sapien
ccctgtttcagggaaggcacttcag

SEQ ID NO: 356211 - DNA, 25 bp, Homo sapien
tatgagaacacgcaggccttgggaa

SEQ ID NO: 356212 - DNA, 25 bp, Homo sapien
ctcacaggcatacccggtggcaaag

SEQ ID NO: 356213 - DNA, 25 bp, Homo sapien
atctcacaggcatacccggtggcaa

SEQ ID NO: 356214 - DNA, 25 bp, Homo sapien
tctcacaggcatacccggtggcaaa

SEQ ID NO: 356215 - DNA, 25 bp, Homo sapien
tcacaggcatacccggtggcaaagg

SEQ ID NO: 356216 - DNA, 25 bp, Homo sapien
ccaaggagacatgggcgccaggaat

SEQ ID NO: 356217 - DNA, 25 bp, Homo sapien
ctccaagttctctgcgtgtcgacca

SEQ ID NO: 356218 - DNA, 25 bp, Homo sapien
tccaagttctctgcgtgtcgaccac

SEQ ID NO: 356219 - DNA, 25 bp, Homo sapien
acatgggcgccaggaatctccggga

SEQ ID NO: 356220 - DNA, 25 bp, Homo sapien
gaattgtagactatcaacgggagga

SEQ ID NO: 356221 - DNA, 25 bp, Homo sapien
actgtggtcagtccctagaggccta

SEQ ID NO: 356222 - DNA, 25 bp, Homo sapien
gcagtccacggatattttgattcaa

SEQ ID NO: 356223 - DNA, 25 bp, Homo sapien
ttctcatgcactgggaagaccctgg

SEQ ID NO: 356224 - DNA, 25 bp, Homo sapien
aaggacaagtcctcctctaggcacg

SEQ ID NO: 356225 - DNA, 25 bp, Homo sapien
ctcattatcttttctcacgggtacc

SEQ ID NO: 356226 - DNA, 25 bp, Homo sapien
gctccttcttacagtgcacacacat

SEQ ID NO: 356227 - DNA, 25 bp, Homo sapien
gctttctcctggctaataataaata

SEQ ID NO: 356228 - DNA, 25 bp, Homo sapien
cctgcacctccagccatccactgcg

SEQ ID NO: 356229 - DNA, 25 bp, Homo sapien
ccctgcacctccagccatccactgc

SEQ ID NO: 356230 - DNA, 25 bp, Homo sapien
aacttcttgcgcagctgcgctagat

SEQ ID NO: 356231 - DNA, 25 bp, Homo sapien
gtcggaatttgcgctgggcccgcag

SEQ ID NO: 356232 - DNA, 25 bp, Homo sapien
tcggaatttgcgctgggcccgcagc

SEQ ID NO: 356233 - DNA, 25 bp, Homo sapien
ggtcggaatttgcgctgggcccgca

SEQ ID NO: 356234 - DNA, 25 bp, Homo sapien
caggcgtagttgagcagctcttttt

SEQ ID NO: 356235 - DNA, 25 bp, Homo sapien
cgtagttgagcagctctttttggct

SEQ ID NO: 356236 - DNA, 25 bp, Homo sapien
tctcgatgctgccaggcgtagttga

SEQ ID NO: 356237 - DNA, 25 bp, Homo sapien
ctctctcgatgctgccaggcgtagt

SEQ ID NO: 356238 - DNA, 25 bp, Homo sapien
ctcagcgatcttctggtcatatgcc

SEQ ID NO: 356239 - DNA, 25 bp, Homo sapien
cgatcttctggtcatatgcctccat

SEQ ID NO: 356240 - DNA, 25 bp, Homo sapien
tcagcgatcttctggtcatatgcct

SEQ ID NO: 356241 - DNA, 25 bp, Homo sapien
agcgatcttctggtcatatgcctcc

SEQ ID NO: 356242 - DNA, 25 bp, Homo sapien
agagtctgcgtagtcactgatccat

SEQ ID NO: 356243 - DNA, 25 bp, Homo sapien
gaacaccacgtaggctacctggaaa

SEQ ID NO: 356244 - DNA, 25 bp, Homo sapien
acttggcttctggaacaccacgtag

SEQ ID NO: 356245 - DNA, 25 bp, Homo sapien
gtgaatgccactcttcacagggtgg

SEQ ID NO: 356246 - DNA, 25 bp, Homo sapien
ttctggaacaccacgtaggctacct

SEQ ID NO: 356247 - DNA, 25 bp, Homo sapien
gtggccagcagagacggtccgtgag

SEQ ID NO: 356248 - DNA, 25 bp, Homo sapien
caaggccacaggtggactggaggca

SEQ ID NO: 356249 - DNA, 25 bp, Homo sapien
aaggccacaggtggactggaggcag

SEQ ID NO: 356250 - DNA, 25 bp, Homo sapien
acctgaatcagcagtagcgacccta

SEQ ID NO: 356251 - DNA, 25 bp, Homo sapien
tttactacctgaatcagcagtagcg

SEQ ID NO: 356252 - DNA, 25 bp, Homo sapien
tactacctgaatcagcagtagcgac

SEQ ID NO: 356253 - DNA, 25 bp, Homo sapien
ctgtgtctccacctgggtgctgact

SEQ ID NO: 356254 - DNA, 25 bp, Homo sapien
gccgtgtgctctcacatagaggtag

SEQ ID NO: 356255 - DNA, 25 bp, Homo sapien
gacaaaaagagtcctcttctgaggc

SEQ ID NO: 356256 - DNA, 25 bp, Homo sapien
tctgtgcagtatgggggcacattga

SEQ ID NO: 356257 - DNA, 25 bp, Homo sapien
tctgaggccaggtggacttggtgcc

SEQ ID NO: 356258 - DNA, 25 bp, Homo sapien
tgctggccgcccccggtctcgcgtt

SEQ ID NO: 356259 - DNA, 25 bp, Homo sapien
acacctcccggcgatgctggccgcc

SEQ ID NO: 356260 - DNA, 25 bp, Homo sapien
cggtctcgcgttccggatcccctca

SEQ ID NO: 356261 - DNA, 25 bp, Homo sapien
ccaaacacctcccggcgatgctggc

SEQ ID NO: 356262 - DNA, 25 bp, Homo sapien
cagaggcaaatcagcgcgccaaagt

SEQ ID NO: 356263 - DNA, 25 bp, Homo sapien
tctgagcaactaagaggatggtgtt

SEQ ID NO: 356264 - DNA, 25 bp, Homo sapien
ggccagcttagggaaaatcgagtag

SEQ ID NO: 356265 - DNA, 25 bp, Homo sapien
tgactgacatgggtagactgcagga

SEQ ID NO: 356266 - DNA, 25 bp, Homo sapien
atgtttattcagaaatggataagta

SEQ ID NO: 356267 - DNA, 25 bp, Homo sapien
ttcagaaatggataagtaatacata

SEQ ID NO: 356268 - DNA, 25 bp, Homo sapien
ttattcagaaatggataagtaatac

SEQ ID NO: 356269 - DNA, 25 bp, Homo sapien
cagaaatggataagtaatacataat

SEQ ID NO: 356270 - DNA, 25 bp, Homo sapien
ccctcaatgtaccagatggtcacct

SEQ ID NO: 356271 - DNA, 25 bp, Homo sapien
ggtcccctcaatgtaccagatggtc

SEQ ID NO: 356272 - DNA, 25 bp, Homo sapien
cctcaatgtaccagatggtcaccta

SEQ ID NO: 356273 - DNA, 25 bp, Homo sapien
tcccctcaatgtaccagatggtcac

SEQ ID NO: 356274 - DNA, 25 bp, Homo sapien
accatccctaccctaagcacagtgc

SEQ ID NO: 356275 - DNA, 25 bp, Homo sapien
agggaggataaagccatgcagggag

SEQ ID NO: 356276 - DNA, 25 bp, Homo sapien
gaggataaagccatgcagggaggat

SEQ ID NO: 356277 - DNA, 25 bp, Homo sapien
cagtgcaagcagtgagcccccggct

SEQ ID NO: 356278 - DNA, 25 bp, Homo sapien
tcaaaggcccaaccagaagagagct

SEQ ID NO: 356279 - DNA, 25 bp, Homo sapien
gagctggcggctacacaaaaccagg

SEQ ID NO: 356280 - DNA, 25 bp, Homo sapien
gaagtttcgtcccaactgtctgcgc

SEQ ID NO: 356281 - DNA, 25 bp, Homo sapien
ttccagctgctaacgagaagtctgc

SEQ ID NO: 356282 - DNA, 25 bp, Homo sapien
tgccaggcgaggtgagaaccgggag

SEQ ID NO: 356283 - DNA, 25 bp, Homo sapien
gtgccaggcgaggtgagaaccggga

SEQ ID NO: 356284 - DNA, 25 bp, Homo sapien
ccaagccaagagcttagatagactc

SEQ ID NO: 356285 - DNA, 25 bp, Homo sapien
acgacacgggactccaagccaagag

SEQ ID NO: 356286 - DNA, 25 bp, Homo sapien
tcctctgggtggagacgacacggga

SEQ ID NO: 356287 - DNA, 25 bp, Homo sapien
agatagactcttcccagcggtgcag

SEQ ID NO: 356288 - DNA, 25 bp, Homo sapien
acctccactgacaagacagaggagc

SEQ ID NO: 356289 - DNA, 25 bp, Homo sapien
actgacaagacagaggagcggcaca

SEQ ID NO: 356290 - DNA, 25 bp, Homo sapien
tccactgacaagacagaggagcggc

SEQ ID NO: 356291 - DNA, 25 bp, Homo sapien
cactgacaagacagaggagcggcac

SEQ ID NO: 356292 - DNA, 25 bp, Homo sapien
agaaaggcgggtcccatccagtgag

SEQ ID NO: 356293 - DNA, 25 bp, Homo sapien
cattggtcataagctttgccttggg

SEQ ID NO: 356294 - DNA, 25 bp, Homo sapien
aacgttaacgtagagagaagagcac

SEQ ID NO: 356295 - DNA, 25 bp, Homo sapien
caagcctaccttggcgatgagatga

SEQ ID NO: 356296 - DNA, 25 bp, Homo sapien
cctttttcattgatgggctgtcact

SEQ ID NO: 356297 - DNA, 25 bp, Homo sapien
gcagagttcaccctgcgaggcagct

SEQ ID NO: 356298 - DNA, 25 bp, Homo sapien
aattctgtgggctgcgtggtcacag

SEQ ID NO: 356299 - DNA, 25 bp, Homo sapien
gaagagtgccttcaggatggtgtca

SEQ ID NO: 356300 - DNA, 25 bp, Homo sapien
taagcatatgaaacggccagctgcc

SEQ ID NO: 356301 - DNA, 25 bp, Homo sapien
cataatgctagtccctatagggtca

SEQ ID NO: 356302 - DNA, 25 bp, Homo sapien
gatgatgcacacagctaggagaccc

SEQ ID NO: 356303 - DNA, 25 bp, Homo sapien
gatgcaggcagtttacccattagaa

SEQ ID NO: 356304 - DNA, 25 bp, Homo sapien
ggctggtctgaggtgataacattcc

SEQ ID NO: 356305 - DNA, 25 bp, Homo sapien
catgtgaaggttgcacttcatcggc

SEQ ID NO: 356306 - DNA, 25 bp, Homo sapien
gataacattcccattcatgtgaagg

SEQ ID NO: 356307 - DNA, 25 bp, Homo sapien
tgaaggttgcacttcatcggctgcc

SEQ ID NO: 356308 - DNA, 25 bp, Homo sapien
cccactgtatacaaagcataacatg

SEQ ID NO: 356309 - DNA, 25 bp, Homo sapien
gggccatgtgggagtaacatttcca

SEQ ID NO: 356310 - DNA, 25 bp, Homo sapien
taggaagaccacactcccactgtat

SEQ ID NO: 356311 - DNA, 25 bp, Homo sapien
gcataacatgtgtaacggtaatagc

SEQ ID NO: 356312 - DNA, 25 bp, Homo sapien
ggccttggtccacagtaggcactca

SEQ ID NO: 356313 - DNA, 25 bp, Homo sapien
tcacccaggtgccaagatttagcca

SEQ ID NO: 356314 - DNA, 25 bp, Homo sapien
caaatcagaactccactgactcacc

SEQ ID NO: 356315 - DNA, 25 bp, Homo sapien
gacagaattcttctctacaggctgt

SEQ ID NO: 356316 - DNA, 25 bp, Homo sapien
gatggcatcgtcctttttcacaaac

SEQ ID NO: 356317 - DNA, 25 bp, Homo sapien
cagacaccggttgttgtacttctta

SEQ ID NO: 356318 - DNA, 25 bp, Homo sapien
caggatggaccagtcgagctcgctt

SEQ ID NO: 356319 - DNA, 25 bp, Homo sapien
cagtcgagctcgcttgagggcccca

SEQ ID NO: 356320 - DNA, 25 bp, Homo sapien
tgactcgagggtgcagattattcac

SEQ ID NO: 356321 - DNA, 25 bp, Homo sapien
actcgagggtgcagattattcacag

SEQ ID NO: 356322 - DNA, 25 bp, Homo sapien
tcagtgactcgagggtgcagattat

SEQ ID NO: 356323 - DNA, 25 bp, Homo sapien
tcgagggtgcagattattcacagtc

SEQ ID NO: 356324 - DNA, 25 bp, Homo sapien
agtgtccgggacatgttggtcaagg

SEQ ID NO: 356325 - DNA, 25 bp, Homo sapien
accagtgtccgggacatgttggtca

SEQ ID NO: 356326 - DNA, 25 bp, Homo sapien
cagtgtccgggacatgttggtcaag

SEQ ID NO: 356327 - DNA, 25 bp, Homo sapien
ccagtgtccgggacatgttggtcaa

SEQ ID NO: 356328 - DNA, 25 bp, Homo sapien
tgtgtatgcatcattctgaaccact

SEQ ID NO: 356329 - DNA, 25 bp, Homo sapien
cttttgttcgaatagaggaagggag

SEQ ID NO: 356330 - DNA, 25 bp, Homo sapien
caggagctgtgtatgcatcattctg

SEQ ID NO: 356331 - DNA, 25 bp, Homo sapien
gggccttggacatggaaagcttgga

SEQ ID NO: 356332 - DNA, 25 bp, Homo sapien
ggccagagaggcacatcagagcatg

SEQ ID NO: 356333 - DNA, 25 bp, Homo sapien
agctccgactgtcagggacactcgg

SEQ ID NO: 356334 - DNA, 25 bp, Homo sapien
gatcaccactcttaagaaggcccag

SEQ ID NO: 356335 - DNA, 25 bp, Homo sapien
ggacactcgggcatttggcagtgca

SEQ ID NO: 356336 - DNA, 25 bp, Homo sapien
tcccttgatagcagacttgagcagt

SEQ ID NO: 356337 - DNA, 25 bp, Homo sapien
tgatagcagacttgagcagtctaat

SEQ ID NO: 356338 - DNA, 25 bp, Homo sapien
tagcagacttgagcagtctaattac

SEQ ID NO: 356339 - DNA, 25 bp, Homo sapien
gacttgagcagtctaattactggaa

SEQ ID NO: 356340 - DNA, 25 bp, Homo sapien
tacgaagcatgcagaatggccagcc

SEQ ID NO: 356341 - DNA, 25 bp, Homo sapien
cagctctgaaaatcttacggcccaa

SEQ ID NO: 356342 - DNA, 25 bp, Homo sapien
tgcctgatcagacacgcagtgtaag

SEQ ID NO: 356343 - DNA, 25 bp, Homo sapien
gagctgcagccctgtacttcacttg

SEQ ID NO: 356344 - DNA, 25 bp, Homo sapien
ggctgcaaacttcatctgtttagta

SEQ ID NO: 356345 - DNA, 25 bp, Homo sapien
tagtaggaacggaagctataccatc

SEQ ID NO: 356346 - DNA, 25 bp, Homo sapien
tcatctgtttagtaggaacggaagc

SEQ ID NO: 356347 - DNA, 25 bp, Homo sapien
gaacggaagctataccatcatcatc

SEQ ID NO: 356348 - DNA, 25 bp, Homo sapien
tgtaaggaactatggcaaaatttca

SEQ ID NO: 356349 - DNA, 25 bp, Homo sapien
aaaagaagcgtacatgtaaggaact

SEQ ID NO: 356350 - DNA, 25 bp, Homo sapien
gttttctatattaagcacatagaac

SEQ ID NO: 356351 - DNA, 25 bp, Homo sapien
caaaatttcaacagtgactggcttt

SEQ ID NO: 356352 - DNA, 25 bp, Homo sapien
attgattctcattccggcaggatgg

SEQ ID NO: 356353 - DNA, 25 bp, Homo sapien
ttgattctcattccggcaggatggg

SEQ ID NO: 356354 - DNA, 25 bp, Homo sapien
ctgtttggcctggtggttattgaca

SEQ ID NO: 356355 - DNA, 25 bp, Homo sapien
cctggtggttattgacaacattgat

SEQ ID NO: 356356 - DNA, 25 bp, Homo sapien
aacactcagtggtcagaatccaccc

SEQ ID NO: 356357 - DNA, 25 bp, Homo sapien
ctcagtggtcagaatccaccccaca

SEQ ID NO: 356358 - DNA, 25 bp, Homo sapien
cactcagtggtcagaatccacccca

SEQ ID NO: 356359 - DNA, 25 bp, Homo sapien
gaaacactcagtggtcagaatccac

SEQ ID NO: 356360 - DNA, 25 bp, Homo sapien
taaggagcaaagtctgtattatgcc

SEQ ID NO: 356361 - DNA, 25 bp, Homo sapien
tcacagatattaagggcctgccaca

SEQ ID NO: 356362 - DNA, 25 bp, Homo sapien
tccttggctataacgtacttaaagc

SEQ ID NO: 356363 - DNA, 25 bp, Homo sapien
tcacctgggaaagtcaccaaatttc

SEQ ID NO: 356364 - DNA, 25 bp, Homo sapien
ttgagccgggcatctgagaggccaa

SEQ ID NO: 356365 - DNA, 25 bp, Homo sapien
gctggatcccaactcgagatcggac

SEQ ID NO: 356366 - DNA, 25 bp, Homo sapien
gaggccaatcttctgccgggcatca

SEQ ID NO: 356367 - DNA, 25 bp, Homo sapien
tctgctgcttgcgagagttcaacat

SEQ ID NO: 356368 - DNA, 25 bp, Homo sapien
tcttatagtagcctaaacggactaa

SEQ ID NO: 356369 - DNA, 25 bp, Homo sapien
ggtcggcatgcacgattagaaagaa

SEQ ID NO: 356370 - DNA, 25 bp, Homo sapien
ttggcctccaaagcgttacgattac

SEQ ID NO: 356371 - DNA, 25 bp, Homo sapien
taaggtttacttggccattcctgtc

SEQ ID NO: 356372 - DNA, 25 bp, Homo sapien
ccgcgcttcctgatgagttcgtcca

SEQ ID NO: 356373 - DNA, 25 bp, Homo sapien
cctgatgagttcgtccagggagatg

SEQ ID NO: 356374 - DNA, 25 bp, Homo sapien
gcttcctgatgagttcgtccaggga

SEQ ID NO: 356375 - DNA, 25 bp, Homo sapien
tgatgagttcgtccagggagatgtc

SEQ ID NO: 356376 - DNA, 25 bp, Homo sapien
ccttcggccgctagggagcgacgaa

SEQ ID NO: 356377 - DNA, 25 bp, Homo sapien
agcgacgaactacttccggcgtccg

SEQ ID NO: 356378 - DNA, 25 bp, Homo sapien
gagcaagccgaaagcagtcgagacc

SEQ ID NO: 356379 - DNA, 25 bp, Homo sapien
acgttccccgtgagccttcgcggtg

SEQ ID NO: 356380 - DNA, 25 bp, Homo sapien
gccggtctaaggttgcccacagtat

SEQ ID NO: 356381 - DNA, 25 bp, Homo sapien
caatttccatgtgtgcggccttacc

SEQ ID NO: 356382 - DNA, 25 bp, Homo sapien
cacagtattgacgttgggacccacg

SEQ ID NO: 356383 - DNA, 25 bp, Homo sapien
tcttgtcgctggctgtggacgctct

SEQ ID NO: 356384 - DNA, 25 bp, Homo sapien
cttcagaaagataagtccggccccg

SEQ ID NO: 356385 - DNA, 25 bp, Homo sapien
tcagaaagataagtccggccccggc

SEQ ID NO: 356386 - DNA, 25 bp, Homo sapien
cacaagctggttccaacggcagggc

SEQ ID NO: 356387 - DNA, 25 bp, Homo sapien
catgcagatggcatcctctgacttt

SEQ ID NO: 356388 - DNA, 25 bp, Homo sapien
tcctgctgccccgttttaagaacag

SEQ ID NO: 356389 - DNA, 25 bp, Homo sapien
aggctcatctgaccctgacaggagg

SEQ ID NO: 356390 - DNA, 25 bp, Homo sapien
cgcaagaggctaacacaactgtagt

SEQ ID NO: 356391 - DNA, 25 bp, Homo sapien
tctgaaaaagccaatacgcaagagg

SEQ ID NO: 356392 - DNA, 25 bp, Homo sapien
actgtagtctaaaggcaacgtcgag

SEQ ID NO: 356393 - DNA, 25 bp, Homo sapien
caacgtcgaggtcactgatatgtcc

SEQ ID NO: 356394 - DNA, 25 bp, Homo sapien
aggcggtgcagtgggctgccaaccc

SEQ ID NO: 356395 - DNA, 25 bp, Homo sapien
aggagagccaagctcccggctggcc

SEQ ID NO: 356396 - DNA, 25 bp, Homo sapien
gaccccaaaaccctgaggcggtgca

SEQ ID NO: 356397 - DNA, 25 bp, Homo sapien
tacatgtggttgtgggagttctgcc

SEQ ID NO: 356398 - DNA, 25 bp, Homo sapien
caatgtctcatgcagcgtcaggtgg

SEQ ID NO: 356399 - DNA, 25 bp, Homo sapien
tgacatcccgactatggtccacggc

SEQ ID NO: 356400 - DNA, 25 bp, Homo sapien
ggtaaggaccagtaagtgccaggca

SEQ ID NO: 356401 - DNA, 25 bp, Homo sapien
caggcaggacgtactctgaaggctc

SEQ ID NO: 356402 - DNA, 25 bp, Homo sapien
cagaagacgaagcagcgctccgtgg

SEQ ID NO: 356403 - DNA, 25 bp, Homo sapien
acgaagcagcgctccgtggggtggc

SEQ ID NO: 356404 - DNA, 25 bp, Homo sapien
aagcagcgctccgtggggtggccca

SEQ ID NO: 356405 - DNA, 25 bp, Homo sapien
tcagaagacgaagcagcgctccgtg

SEQ ID NO: 356406 - DNA, 25 bp, Homo sapien
gaaggcaggcgtactggatcatggg

SEQ ID NO: 356407 - DNA, 25 bp, Homo sapien
gatcatctcctcattcacgaagccc

SEQ ID NO: 356408 - DNA, 25 bp, Homo sapien
attcacgaagccctggccgtagtcc

SEQ ID NO: 356409 - DNA, 25 bp, Homo sapien
gggccacacatcagcaccagcggct

SEQ ID NO: 356410 - DNA, 25 bp, Homo sapien
gggctctgtccagcgtgtaccagag

SEQ ID NO: 356411 - DNA, 25 bp, Homo sapien
tgtaccagagcttgaagcgtgcaga

SEQ ID NO: 356412 - DNA, 25 bp, Homo sapien
agctcaggtcgcagcaggatgtcct

SEQ ID NO: 356413 - DNA, 25 bp, Homo sapien
agaatgtttgttcctgagttcctcc

SEQ ID NO: 356414 - DNA, 25 bp, Homo sapien
actcaacagagacgcgcctcgtcat

SEQ ID NO: 356415 - DNA, 25 bp, Homo sapien
acacgcttgcggagctttcaggagg

SEQ ID NO: 356416 - DNA, 25 bp, Homo sapien
aaggatgggtggcagactgcccctg

SEQ ID NO: 356417 - DNA, 25 bp, Homo sapien
tgcccctggagacactcaacagaga

SEQ ID NO: 356418 - DNA, 25 bp, Homo sapien
ggcacacagtgtggtcatcagggtc

SEQ ID NO: 356419 - DNA, 25 bp, Homo sapien
cacacagtgtggtcatcagggtcct

SEQ ID NO: 356420 - DNA, 25 bp, Homo sapien
tggcacacagtgtggtcatcagggt

SEQ ID NO: 356421 - DNA, 25 bp, Homo sapien
gcacacagtgtggtcatcagggtcc

SEQ ID NO: 356422 - DNA, 25 bp, Homo sapien
ccgggcctcgcacgtgctgagcgag

SEQ ID NO: 356423 - DNA, 25 bp, Homo sapien
ggccgggcctcgcacgtgctgagcg

SEQ ID NO: 356424 - DNA, 25 bp, Homo sapien
gccgggcctcgcacgtgctgagcga

SEQ ID NO: 356425 - DNA, 25 bp, Homo sapien
ccaaccccacccttaacatgagccg

SEQ ID NO: 356426 - DNA, 25 bp, Homo sapien
cccacccttaacatgagccgccgga

SEQ ID NO: 356427 - DNA, 25 bp, Homo sapien
ggcactcagaacctgcgcctcaccc

SEQ ID NO: 356428 - DNA, 25 bp, Homo sapien
catgagccgccggacgcctcagtgg

SEQ ID NO: 356429 - DNA, 25 bp, Homo sapien
ttgtcaggtcggatggcgaacttcc

SEQ ID NO: 356430 - DNA, 25 bp, Homo sapien
gatgatagggttggactttttgtca

SEQ ID NO: 356431 - DNA, 25 bp, Homo sapien
tcactgtcctgatgatagggttgga

SEQ ID NO: 356432 - DNA, 25 bp, Homo sapien
gtccctcccgcgatcatgcccacag

SEQ ID NO: 356433 - DNA, 25 bp, Homo sapien
gcccggccatcaaacatgccatgtg

SEQ ID NO: 356434 - DNA, 25 bp, Homo sapien
catcaaacatgccatgtgtggtggc

SEQ ID NO: 356435 - DNA, 25 bp, Homo sapien
gggtgaggcccggccatcaaacatg

SEQ ID NO: 356436 - DNA, 25 bp, Homo sapien
ctgcccccactgtgaggtccgaggt

SEQ ID NO: 356437 - DNA, 25 bp, Homo sapien
gagcctgccgtgtaaccaagggatt

SEQ ID NO: 356438 - DNA, 25 bp, Homo sapien
gctggcctgacgagagtcacccatc

SEQ ID NO: 356439 - DNA, 25 bp, Homo sapien
cctctacagccagggagactcagtt

SEQ ID NO: 356440 - DNA, 25 bp, Homo sapien
gatgctgagaaagccaaatagaggc

SEQ ID NO: 356441 - DNA, 25 bp, Homo sapien
gggccccggaactcaatggtgtctc

SEQ ID NO: 356442 - DNA, 25 bp, Homo sapien
tccctccagcgggaaacttgggatg

SEQ ID NO: 356443 - DNA, 25 bp, Homo sapien
gaaacttgggatgggtgtccttgaa

SEQ ID NO: 356444 - DNA, 25 bp, Homo sapien
gtctccaatctgcatgctctccagg

SEQ ID NO: 356445 - DNA, 25 bp, Homo sapien
aattcgagccgagaggtagatgtgc

SEQ ID NO: 356446 - DNA, 25 bp, Homo sapien
catcatcgctggagatgggtgtata

SEQ ID NO: 356447 - DNA, 25 bp, Homo sapien
gcccttgtcatcatcgctggagatg

SEQ ID NO: 356448 - DNA, 25 bp, Homo sapien
gggccggacgaccaggtttccatca

SEQ ID NO: 356449 - DNA, 25 bp, Homo sapien
tcaaagcctggcctggcgtcagctc

SEQ ID NO: 356450 - DNA, 25 bp, Homo sapien
attccaacagactcgccctcaaagg

SEQ ID NO: 356451 - DNA, 25 bp, Homo sapien
gtgacccctgggtcttgtcaaccca

SEQ ID NO: 356452 - DNA, 25 bp, Homo sapien
ggccagagatcatcctgcgggtgac

SEQ ID NO: 356453 - DNA, 25 bp, Homo sapien
aaagcggaagcgccgggtgtcatgg

SEQ ID NO: 356454 - DNA, 25 bp, Homo sapien
aagcggaagcgccgggtgtcatggc

SEQ ID NO: 356455 - DNA, 25 bp, Homo sapien
ggcaaagcggaagcgccgggtgtca

SEQ ID NO: 356456 - DNA, 25 bp, Homo sapien
cagggcaaagcggaagcgccgggtg

SEQ ID NO: 356457 - DNA, 25 bp, Homo sapien
gtgcctgcttgtccttgtaagacgt

SEQ ID NO: 356458 - DNA, 25 bp, Homo sapien
tgacgccgacgccaagcacagatgc

SEQ ID NO: 356459 - DNA, 25 bp, Homo sapien
cacacatgcacgctgcgtgtgaggt

SEQ ID NO: 356460 - DNA, 25 bp, Homo sapien
agctgctgaacggtccccagggcag

SEQ ID NO: 356461 - DNA, 25 bp, Homo sapien
gaggcgcttacatccaaacgtggca

SEQ ID NO: 356462 - DNA, 25 bp, Homo sapien
gagctgagactaaaacccctgaggt

SEQ ID NO: 356463 - DNA, 25 bp, Homo sapien
taagtgggtcttacgctcaggccag

SEQ ID NO: 356464 - DNA, 25 bp, Homo sapien
tcaggccagggacgatcacataatc

SEQ ID NO: 356465 - DNA, 25 bp, Homo sapien
tccacacacccgtgtatgaacgtga

SEQ ID NO: 356466 - DNA, 25 bp, Homo sapien
ccacatagggtctggcaggctcacg

SEQ ID NO: 356467 - DNA, 25 bp, Homo sapien
tatgaacgtgatacccacatagggt

SEQ ID NO: 356468 - DNA, 25 bp, Homo sapien
tctggcaggctcacgctgagctgtg

SEQ ID NO: 356469 - DNA, 25 bp, Homo sapien
cagggtttaaattcctctgctactt

SEQ ID NO: 356470 - DNA, 25 bp, Homo sapien
gaccagggtttaaattcctctgcta

SEQ ID NO: 356471 - DNA, 25 bp, Homo sapien
aagagacatcaccttgctttctcca

SEQ ID NO: 356472 - DNA, 25 bp, Homo sapien
ttcctggtggccttagcaagagaca

SEQ ID NO: 356473 - DNA, 25 bp, Homo sapien
ggtacttgatgtccgggctctcgag

SEQ ID NO: 356474 - DNA, 25 bp, Homo sapien
gtgatggctggcgtggagcgctgga

SEQ ID NO: 356475 - DNA, 25 bp, Homo sapien
tcgatgagccgcagcgggtacttga

SEQ ID NO: 356476 - DNA, 25 bp, Homo sapien
ggcgtggagcgctggaacagcttca

SEQ ID NO: 356477 - DNA, 25 bp, Homo sapien
gactgggaagagcaccatatggccc

SEQ ID NO: 356478 - DNA, 25 bp, Homo sapien
ctgggaagagcaccatatggcccaa

SEQ ID NO: 356479 - DNA, 25 bp, Homo sapien
agactgggaagagcaccatatggcc

SEQ ID NO: 356480 - DNA, 25 bp, Homo sapien
actgggaagagcaccatatggccca

SEQ ID NO: 356481 - DNA, 25 bp, Homo sapien
tatgctcagtaccatgagaaaaagc

SEQ ID NO: 356482 - DNA, 25 bp, Homo sapien
gggcttctatgctcagtaccatgag

SEQ ID NO: 356483 - DNA, 25 bp, Homo sapien
tctatgctcagtaccatgagaaaaa

SEQ ID NO: 356484 - DNA, 25 bp, Homo sapien
gcttctatgctcagtaccatgagaa

SEQ ID NO: 356485 - DNA, 25 bp, Homo sapien
catgggttggaactgcttgattcac

SEQ ID NO: 356486 - DNA, 25 bp, Homo sapien
tgaacatgggttggaactgcttgat

SEQ ID NO: 356487 - DNA, 25 bp, Homo sapien
aacatgggttggaactgcttgattc

SEQ ID NO: 356488 - DNA, 25 bp, Homo sapien
cttgaacatgggttggaactgcttg

SEQ ID NO: 356489 - DNA, 25 bp, Homo sapien
tcagatgttaagactggtcttcaaa

SEQ ID NO: 356490 - DNA, 25 bp, Homo sapien
gatagcagtctgatcacacctggtc

SEQ ID NO: 356491 - DNA, 25 bp, Homo sapien
caaatataatcagatgttaagactg

SEQ ID NO: 356492 - DNA, 25 bp, Homo sapien
cctggtccaacaacactcaaataat

SEQ ID NO: 356493 - DNA, 25 bp, Homo sapien
ctctctgacataaaaccacgtcgac

SEQ ID NO: 356494 - DNA, 25 bp, Homo sapien
tctctctgacataaaaccacgtcga

SEQ ID NO: 356495 - DNA, 25 bp, Homo sapien
tctctgacataaaaccacgtcgaca

SEQ ID NO: 356496 - DNA, 25 bp, Homo sapien
ctctgacataaaaccacgtcgacac

SEQ ID NO: 356497 - DNA, 25 bp, Homo sapien
gtggtgtagtaccaaaatgcggcca

SEQ ID NO: 356498 - DNA, 25 bp, Homo sapien
caaccgtggtgtagtaccaaaatgc

SEQ ID NO: 356499 - DNA, 25 bp, Homo sapien
aaccgtggtgtagtaccaaaatgcg

SEQ ID NO: 356500 - DNA, 25 bp, Homo sapien
ccgtggtgtagtaccaaaatgcggc

SEQ ID NO: 356501 - DNA, 25 bp, Homo sapien
gtccatcatcccgaatggccagctg

SEQ ID NO: 356502 - DNA, 25 bp, Homo sapien
ccggaaggaccctgcgtggttcact

SEQ ID NO: 356503 - DNA, 25 bp, Homo sapien
ggaccctgcgtggttcacttattta

SEQ ID NO: 356504 - DNA, 25 bp, Homo sapien
atcccgaatggccagctgaaggtca

SEQ ID NO: 356505 - DNA, 25 bp, Homo sapien
tcctgccagaatctgagcggcacct

SEQ ID NO: 356506 - DNA, 25 bp, Homo sapien
ggatctgggccgcagagtaagcatg

SEQ ID NO: 356507 - DNA, 25 bp, Homo sapien
cgccagcggtcctgccagaatctga

SEQ ID NO: 356508 - DNA, 25 bp, Homo sapien
ccgcagagtaagcatggggctgcca

SEQ ID NO: 356509 - DNA, 25 bp, Homo sapien
tgtcagcctgtcagggtcgctgagc

SEQ ID NO: 356510 - DNA, 25 bp, Homo sapien
gttcaggatggcagaccaagctcca

SEQ ID NO: 356511 - DNA, 25 bp, Homo sapien
tgtcagggtcgctgagcactcacag

SEQ ID NO: 356512 - DNA, 25 bp, Homo sapien
tggcagaccaagctccaatgttttc

SEQ ID NO: 356513 - DNA, 25 bp, Homo sapien
ccgccgccgagaccgtcgcgcccgg

SEQ ID NO: 356514 - DNA, 25 bp, Homo sapien
cgccgccgagaccgtcgcgcccggg

SEQ ID NO: 356515 - DNA, 25 bp, Homo sapien
gccgccgagaccgtcgcgcccgggc

SEQ ID NO: 356516 - DNA, 25 bp, Homo sapien
tggaatgcaggagcctgatcacagc

SEQ ID NO: 356517 - DNA, 25 bp, Homo sapien
gcccagactggaatgcaggagcctg

SEQ ID NO: 356518 - DNA, 25 bp, Homo sapien
cagactggaatgcaggagcctgatc

SEQ ID NO: 356519 - DNA, 25 bp, Homo sapien
tttggtaaagcagggtctcactctt

SEQ ID NO: 356520 - DNA, 25 bp, Homo sapien
ggatctctgacccatcctgctgagg

SEQ ID NO: 356521 - DNA, 25 bp, Homo sapien
ccatcctgctgaggagtttgatcct

SEQ ID NO: 356522 - DNA, 25 bp, Homo sapien
ttagctgaggatctctgacccatcc

SEQ ID NO: 356523 - DNA, 25 bp, Homo sapien
gctgaggagtttgatccttgggaaa

SEQ ID NO: 356524 - DNA, 25 bp, Homo sapien
gaggtgttcaggttccttcgagtcc

SEQ ID NO: 356525 - DNA, 25 bp, Homo sapien
tcaggttccttcgagtccgtgtccc

SEQ ID NO: 356526 - DNA, 25 bp, Homo sapien
tctggaggtgttcaggttccttcga

SEQ ID NO: 356527 - DNA, 25 bp, Homo sapien
tccacgctctggaggtgttcaggtt

SEQ ID NO: 356528 - DNA, 25 bp, Homo sapien
ttgtccaggcgccctctggatccgg

SEQ ID NO: 356529 - DNA, 25 bp, Homo sapien
cttgtccaggcgccctctggatccg

SEQ ID NO: 356530 - DNA, 25 bp, Homo sapien
cagatcacctcttctagggagcaat

SEQ ID NO: 356531 - DNA, 25 bp, Homo sapien
ctgacgatttcctgcaagttccttg

SEQ ID NO: 356532 - DNA, 25 bp, Homo sapien
gcagcccgaattggcctgacgattt

SEQ ID NO: 356533 - DNA, 25 bp, Homo sapien
ggaagatcatagtacccagccctga

SEQ ID NO: 356534 - DNA, 25 bp, Homo sapien
ttgatgttggtgattaagtttaaaa

SEQ ID NO: 356535 - DNA, 25 bp, Homo sapien
gtctaacttcctattgtcttctcct

SEQ ID NO: 356536 - DNA, 25 bp, Homo sapien
cctcctgtctaacttcctattgtct

SEQ ID NO: 356537 - DNA, 25 bp, Homo sapien
tcctgtctaacttcctattgtcttc

SEQ ID NO: 356538 - DNA, 25 bp, Homo sapien
ccgtgtccaccggtcagcatgggat

SEQ ID NO: 356539 - DNA, 25 bp, Homo sapien
ctgaggattcacactctccatccct

SEQ ID NO: 356540 - DNA, 25 bp, Homo sapien
gggggagatgcttacaggcaaaaca

SEQ ID NO: 356541 - DNA, 25 bp, Homo sapien
ctctagacaaccctccctgaggatt

SEQ ID NO: 356542 - DNA, 25 bp, Homo sapien
ctcaaattactaggaagggactgga

SEQ ID NO: 356543 - DNA, 25 bp, Homo sapien
gaatgactaggactggcttagacca

SEQ ID NO: 356544 - DNA, 25 bp, Homo sapien
gaatggccgtggataaggagtcaac

SEQ ID NO: 356545 - DNA, 25 bp, Homo sapien
tcttcaaggatgcagtatggtgaca

SEQ ID NO: 356546 - DNA, 25 bp, Homo sapien
gcttccacaatgcaaaccagctggg

SEQ ID NO: 356547 - DNA, 25 bp, Homo sapien
gaaaacgacacataacctgctcttg

SEQ ID NO: 356548 - DNA, 25 bp, Homo sapien
cacgctgctcaagacggtctgtggg

SEQ ID NO: 356549 - DNA, 25 bp, Homo sapien
gcagaaaacggaggccaatgaatgc

SEQ ID NO: 356550 - DNA, 25 bp, Homo sapien
tcaatcttgcctccccgggaagggc

SEQ ID NO: 356551 - DNA, 25 bp, Homo sapien
tcctgtgtttataatgcgggcggca

SEQ ID NO: 356552 - DNA, 25 bp, Homo sapien
acagcctgcctaagcccggtggcag

SEQ ID NO: 356553 - DNA, 25 bp, Homo sapien
gctatggcaccatgtgtcagccctg

SEQ ID NO: 356554 - DNA, 25 bp, Homo sapien
cgtggcctcgaaccgcgtgccctgg

SEQ ID NO: 356555 - DNA, 25 bp, Homo sapien
ctggacgtggcctcgaaccgcgtgc

SEQ ID NO: 356556 - DNA, 25 bp, Homo sapien
cttcttgttccacacgtggacagca

SEQ ID NO: 356557 - DNA, 25 bp, Homo sapien
ttttcatggcctcgtgcgtcgtggg

SEQ ID NO: 356558 - DNA, 25 bp, Homo sapien
acttcttgaagacccgcgtgagcag

SEQ ID NO: 356559 - DNA, 25 bp, Homo sapien
ggagcatctggacattcgggaagca

SEQ ID NO: 356560 - DNA, 25 bp, Homo sapien
gaagtccgtgtccaggtagatgccg

SEQ ID NO: 356561 - DNA, 25 bp, Homo sapien
gaacttgaagccgatgatgaacagg

SEQ ID NO: 356562 - DNA, 25 bp, Homo sapien
ggtatccccagatcagaccaggagc

SEQ ID NO: 356563 - DNA, 25 bp, Homo sapien
ccccagatcagaccaggagcttcca

SEQ ID NO: 356564 - DNA, 25 bp, Homo sapien
atccccagatcagaccaggagcttc

SEQ ID NO: 356565 - DNA, 25 bp, Homo sapien
tatccccagatcagaccaggagctt

SEQ ID NO: 356566 - DNA, 25 bp, Homo sapien
ggcacatgacgctgactggtactac

SEQ ID NO: 356567 - DNA, 25 bp, Homo sapien
gggcaagttacggagctctctgagc

SEQ ID NO: 356568 - DNA, 25 bp, Homo sapien
caccgacaggataggacgctggaac

SEQ ID NO: 356569 - DNA, 25 bp, Homo sapien
caactctgcctgaaccggctgtgtg

SEQ ID NO: 356570 - DNA, 25 bp, Homo sapien
ggagaggtggctagccaatgtacct

SEQ ID NO: 356571 - DNA, 25 bp, Homo sapien
gcatgctgacctgaactgtatcgat

SEQ ID NO: 356572 - DNA, 25 bp, Homo sapien
tagccaatgtacctggtgtgttgga

SEQ ID NO: 356573 - DNA, 25 bp, Homo sapien
actgtatcgatgttaacagccagcg

SEQ ID NO: 356574 - DNA, 25 bp, Homo sapien
gggagacacgccctggctcagcagc

SEQ ID NO: 356575 - DNA, 25 bp, Homo sapien
gctcagcagccgaccttctttgcca

SEQ ID NO: 356576 - DNA, 25 bp, Homo sapien
gaccttctttgccaacacgaacacg

SEQ ID NO: 356577 - DNA, 25 bp, Homo sapien
ttccacacacttgcagcggctgcaa

SEQ ID NO: 356578 - DNA, 25 bp, Homo sapien
cagtggagaagggacgctgtcaccc

SEQ ID NO: 356579 - DNA, 25 bp, Homo sapien
tcgatattctgcagtggagaaggga

SEQ ID NO: 356580 - DNA, 25 bp, Homo sapien
ctcgatattctgcagtggagaaggg

SEQ ID NO: 356581 - DNA, 25 bp, Homo sapien
gcaggacaaaggaccgtgctgcgca

SEQ ID NO: 356582 - DNA, 25 bp, Homo sapien
gaattatcccttgagtcatggacac

SEQ ID NO: 356583 - DNA, 25 bp, Homo sapien
ggagctgagagaggacttagaatta

SEQ ID NO: 356584 - DNA, 25 bp, Homo sapien
ggatagcactaacaggccacatctg

SEQ ID NO: 356585 - DNA, 25 bp, Homo sapien
tgtgaagaatcgattgagataactt

SEQ ID NO: 356586 - DNA, 25 bp, Homo sapien
gtgcagtggtaagacgggggaagga

SEQ ID NO: 356587 - DNA, 25 bp, Homo sapien
gtgaagaatcgattgagataacttg

SEQ ID NO: 356588 - DNA, 25 bp, Homo sapien
ctagttaagtgcagtggtaagacgg

SEQ ID NO: 356589 - DNA, 25 bp, Homo sapien
ggcctgagaggtggcgccgttcacg

SEQ ID NO: 356590 - DNA, 25 bp, Homo sapien
cgctggctgacggtgacgggcgtgt

SEQ ID NO: 356591 - DNA, 25 bp, Homo sapien
ccgttcacggaactgggagggccat

SEQ ID NO: 356592 - DNA, 25 bp, Homo sapien
ggtggcgccgttcacggaactggga

SEQ ID NO: 356593 - DNA, 25 bp, Homo sapien
ggcctccagagtggcctgaatggct

SEQ ID NO: 356594 - DNA, 25 bp, Homo sapien
aggtgagggcctccagagtggcctg

SEQ ID NO: 356595 - DNA, 25 bp, Homo sapien
tccagagtggcctgaatggcttggt

SEQ ID NO: 356596 - DNA, 25 bp, Homo sapien
tgaatggcttggtgggggccgcagg

SEQ ID NO: 356597 - DNA, 25 bp, Homo sapien
tgaaatgggaatatgacctgctggg

SEQ ID NO: 356598 - DNA, 25 bp, Homo sapien
aaatgggaatatgacctgctgggag

SEQ ID NO: 356599 - DNA, 25 bp, Homo sapien
tgtgaaatgggaatatgacctgctg

SEQ ID NO: 356600 - DNA, 25 bp, Homo sapien
catgtgaaatgggaatatgacctgc

SEQ ID NO: 356601 - DNA, 25 bp, Homo sapien
ccctaagtttattgtctgtatctga

SEQ ID NO: 356602 - DNA, 25 bp, Homo sapien
ggccctaagtttattgtctgtatct

SEQ ID NO: 356603 - DNA, 25 bp, Homo sapien
tgctggccctaagtttattgtctgt

SEQ ID NO: 356604 - DNA, 25 bp, Homo sapien
ttttgctggccctaagtttattgtc

SEQ ID NO: 356605 - DNA, 25 bp, Homo sapien
gcattttgggaaggttccacctctc

SEQ ID NO: 356606 - DNA, 25 bp, Homo sapien
tcttttcatagactggattctctcg

SEQ ID NO: 356607 - DNA, 25 bp, Homo sapien
ttcttttcatagactggattctctc

SEQ ID NO: 356608 - DNA, 25 bp, Homo sapien
ttttcatagactggattctctcgta

SEQ ID NO: 356609 - DNA, 25 bp, Homo sapien
ttcatagactggattctctcgtata

SEQ ID NO: 356610 - DNA, 25 bp, Homo sapien
tcgtcatcttcttccattaagtagc

SEQ ID NO: 356611 - DNA, 25 bp, Homo sapien
atcttcttccattaagtagcgcatg

SEQ ID NO: 356612 - DNA, 25 bp, Homo sapien
ttcttccattaagtagcgcatgtaa

SEQ ID NO: 356613 - DNA, 25 bp, Homo sapien
cgtcatcttcttccattaagtagcg

SEQ ID NO: 356614 - DNA, 25 bp, Homo sapien
attctggcccatgaagtgcttctgg

SEQ ID NO: 356615 - DNA, 25 bp, Homo sapien
ctgcaacattctggcccatgaagtg

SEQ ID NO: 356616 - DNA, 25 bp, Homo sapien
cccatgaagtgcttctggtgtactc

SEQ ID NO: 356617 - DNA, 25 bp, Homo sapien
acattctggcccatgaagtgcttct

SEQ ID NO: 356618 - DNA, 25 bp, Homo sapien
ggaatcatttggtgctgtgagggac

SEQ ID NO: 356619 - DNA, 25 bp, Homo sapien
ataaccagggaatcatttggtgctg

SEQ ID NO: 356620 - DNA, 25 bp, Homo sapien
ccagggaatcatttggtgctgtgag

SEQ ID NO: 356621 - DNA, 25 bp, Homo sapien
gaatcatttggtgctgtgagggaca

SEQ ID NO: 356622 - DNA, 25 bp, Homo sapien
cacaactcccttcagggcgccaaaa

SEQ ID NO: 356623 - DNA, 25 bp, Homo sapien
atccacaactcccttcagggcgcca

SEQ ID NO: 356624 - DNA, 25 bp, Homo sapien
aagcctccatccacaactcccttca

SEQ ID NO: 356625 - DNA, 25 bp, Homo sapien
tccatccacaactcccttcagggcg

SEQ ID NO: 356626 - DNA, 25 bp, Homo sapien
gcatccatacagcaggtgaaggcac

SEQ ID NO: 356627 - DNA, 25 bp, Homo sapien
tgcatccatacagcaggtgaaggca

SEQ ID NO: 356628 - DNA, 25 bp, Homo sapien
ctgcatccatacagcaggtgaaggc

SEQ ID NO: 356629 - DNA, 25 bp, Homo sapien
ccacattgtatttatcgccagtcac

SEQ ID NO: 356630 - DNA, 25 bp, Homo sapien
catcagtactttccacattgtattt

SEQ ID NO: 356631 - DNA, 25 bp, Homo sapien
ctttccacattgtatttatcgccag

SEQ ID NO: 356632 - DNA, 25 bp, Homo sapien
ttccacattgtatttatcgccagtc

SEQ ID NO: 356633 - DNA, 25 bp, Homo sapien
tctgtcagttacacgaacaatcatc

SEQ ID NO: 356634 - DNA, 25 bp, Homo sapien
gatatctctgtcagttacacgaaca

SEQ ID NO: 356635 - DNA, 25 bp, Homo sapien
tatctctgtcagttacacgaacaat

SEQ ID NO: 356636 - DNA, 25 bp, Homo sapien
tctctgtcagttacacgaacaatca

SEQ ID NO: 356637 - DNA, 25 bp, Homo sapien
gtgttgtatttatttttatcctgta

SEQ ID NO: 356638 - DNA, 25 bp, Homo sapien
tgtatttatttttatcctgtatcac

SEQ ID NO: 356639 - DNA, 25 bp, Homo sapien
ctatacttgggtgtgttgtatttat

SEQ ID NO: 356640 - DNA, 25 bp, Homo sapien
gttgtatttatttttatcctgtatc

SEQ ID NO: 356641 - DNA, 25 bp, Homo sapien
agagacccgcgtccgcggctcgaca

SEQ ID NO: 356642 - DNA, 25 bp, Homo sapien
acaaaccccatccagcggaacagag

SEQ ID NO: 356643 - DNA, 25 bp, Homo sapien
agcggaacagagacccgcgtccgcg

SEQ ID NO: 356644 - DNA, 25 bp, Homo sapien
cccatccagcggaacagagacccgc

SEQ ID NO: 356645 - DNA, 25 bp, Homo sapien
ctgcaggcccagcggtgccagggag

SEQ ID NO: 356646 - DNA, 25 bp, Homo sapien
gcaggcccagcggtgccagggaggg

SEQ ID NO: 356647 - DNA, 25 bp, Homo sapien
ggcccagcggtgccagggaggggaa

SEQ ID NO: 356648 - DNA, 25 bp, Homo sapien
cccagcggtgccagggaggggaaga

SEQ ID NO: 356649 - DNA, 25 bp, Homo sapien
tcaatctcatggatgaaaccaagtg

SEQ ID NO: 356650 - DNA, 25 bp, Homo sapien
tcttcccacacagaatcatgatgct

SEQ ID NO: 356651 - DNA, 25 bp, Homo sapien
atgaaaccaagtgtctcccatcggg

SEQ ID NO: 356652 - DNA, 25 bp, Homo sapien
cagaaattgaatgaccacctcatat

SEQ ID NO: 356653 - DNA, 25 bp, Homo sapien
tgtgtcagctcaccacgacagcaga

SEQ ID NO: 356654 - DNA, 25 bp, Homo sapien
ggcagggtgtacaacagaggcacaa

SEQ ID NO: 356655 - DNA, 25 bp, Homo sapien
tctcttgcctgactcgatctatcag

SEQ ID NO: 356656 - DNA, 25 bp, Homo sapien
cctgactcgatctatcagctggcag

SEQ ID NO: 356657 - DNA, 25 bp, Homo sapien
ctagcgtggacagaagcccagagct

SEQ ID NO: 356658 - DNA, 25 bp, Homo sapien
ccagcttcccgctcgccagctggtg

SEQ ID NO: 356659 - DNA, 25 bp, Homo sapien
cctgcccttaatctccggcagagtg

SEQ ID NO: 356660 - DNA, 25 bp, Homo sapien
gggctgccccaagctagcgtggaca

SEQ ID NO: 356661 - DNA, 25 bp, Homo sapien
gagtgggtgctgtcgacagggaaca

SEQ ID NO: 356662 - DNA, 25 bp, Homo sapien
tgacccacgggttcctcattgtcct

SEQ ID NO: 356663 - DNA, 25 bp, Homo sapien
gctccaccatgtcaggaccaggaca

SEQ ID NO: 356664 - DNA, 25 bp, Homo sapien
gcaggtagggtgctccgtgacccac

SEQ ID NO: 356665 - DNA, 25 bp, Homo sapien
ggctagtgggccagggtctcagtac

SEQ ID NO: 356666 - DNA, 25 bp, Homo sapien
caggcgtctgcgtgccatcaataga

SEQ ID NO: 356667 - DNA, 25 bp, Homo sapien
tcctcacgcaggaaattgaccagag

SEQ ID NO: 356668 - DNA, 25 bp, Homo sapien
cgtgccatcaatagaaaccctgggc

SEQ ID NO: 356669 - DNA, 25 bp, Homo sapien
cacagatcctcgtggagatgaatga

SEQ ID NO: 356670 - DNA, 25 bp, Homo sapien
ctcctcaatggcattgccatgctgg

SEQ ID NO: 356671 - DNA, 25 bp, Homo sapien
tgtagtcgtagtggaagtcatctac

SEQ ID NO: 356672 - DNA, 25 bp, Homo sapien
cctctaagggcccatagcacagatc

SEQ ID NO: 356673 - DNA, 25 bp, Homo sapien
tgggccagggtgtcacagtgctcct

SEQ ID NO: 356674 - DNA, 25 bp, Homo sapien
tggccgccatccctgggccagggtg

SEQ ID NO: 356675 - DNA, 25 bp, Homo sapien
tctggccgccatccctgggccaggg

SEQ ID NO: 356676 - DNA, 25 bp, Homo sapien
catccctgggccagggtgtcacagt

SEQ ID NO: 356677 - DNA, 25 bp, Homo sapien
tccacacccttcctagcaggctcag

SEQ ID NO: 356678 - DNA, 25 bp, Homo sapien
cacacccttcctagcaggctcagga

SEQ ID NO: 356679 - DNA, 25 bp, Homo sapien
cgtccacacccttcctagcaggctc

SEQ ID NO: 356680 - DNA, 25 bp, Homo sapien
ccttcctagcaggctcaggaaaagc

SEQ ID NO: 356681 - DNA, 25 bp, Homo sapien
agtgtccaggtcgtagctcattgca

SEQ ID NO: 356682 - DNA, 25 bp, Homo sapien
gacttattacgaaagctttcaggga

SEQ ID NO: 356683 - DNA, 25 bp, Homo sapien
tgctcctgtgctacaaacaacatcc

SEQ ID NO: 356684 - DNA, 25 bp, Homo sapien
cacaccaaaaacctcgacttacgat

SEQ ID NO: 356685 - DNA, 25 bp, Homo sapien
aatatattctaatgctgtctaaaac

SEQ ID NO: 356686 - DNA, 25 bp, Homo sapien
ttctatttagaagtctacaaatttg

SEQ ID NO: 356687 - DNA, 25 bp, Homo sapien
gaacaatatattctaatgctgtcta

SEQ ID NO: 356688 - DNA, 25 bp, Homo sapien
tctatttagaagtctacaaatttga

SEQ ID NO: 356689 - DNA, 25 bp, Homo sapien
gtttatacacattcggtaatttctg

SEQ ID NO: 356690 - DNA, 25 bp, Homo sapien
ttgtttatacacattcggtaatttc

SEQ ID NO: 356691 - DNA, 25 bp, Homo sapien
tatacacattcggtaatttctgaaa

SEQ ID NO: 356692 - DNA, 25 bp, Homo sapien
acacattcggtaatttctgaaaagc

SEQ ID NO: 356693 - DNA, 25 bp, Homo sapien
gatatacacagagacgccaaaggag

SEQ ID NO: 356694 - DNA, 25 bp, Homo sapien
aaaactatctggacttcactgccgc

SEQ ID NO: 356695 - DNA, 25 bp, Homo sapien
ggaaagctcctacatcagaactcag

SEQ ID NO: 356696 - DNA, 25 bp, Homo sapien
cactgccgcctgagatgtggttact

SEQ ID NO: 356697 - DNA, 25 bp, Homo sapien
tcaggcatgtgacatggacgctgca

SEQ ID NO: 356698 - DNA, 25 bp, Homo sapien
gaagttcacgaccattcagcagcga

SEQ ID NO: 356699 - DNA, 25 bp, Homo sapien
accccgagggtgtgctcatctggaa

SEQ ID NO: 356700 - DNA, 25 bp, Homo sapien
tcatcttgcagaagtgacctaacct

SEQ ID NO: 356701 - DNA, 25 bp, Homo sapien
gaaaacggctacatccagagtcctg

SEQ ID NO: 356702 - DNA, 25 bp, Homo sapien
tggcctcgactctcatgcgcaagta

SEQ ID NO: 356703 - DNA, 25 bp, Homo sapien
tgaacctaccgtcatagccagtgag

SEQ ID NO: 356704 - DNA, 25 bp, Homo sapien
ggaactctccggaatgggtgcacct

SEQ ID NO: 356705 - DNA, 25 bp, Homo sapien
tagcaaagacggagagttttccagc

SEQ ID NO: 356706 - DNA, 25 bp, Homo sapien
ttccagcaaccgatctcactccctg

SEQ ID NO: 356707 - DNA, 25 bp, Homo sapien
gactccattagcaaagacggagagt

SEQ ID NO: 356708 - DNA, 25 bp, Homo sapien
tgaattgaagtcacgactccattag

SEQ ID NO: 356709 - DNA, 25 bp, Homo sapien
cgttgggcagcacactggacaggct

SEQ ID NO: 356710 - DNA, 25 bp, Homo sapien
agcacactggacaggctgtagttcc

SEQ ID NO: 356711 - DNA, 25 bp, Homo sapien
ggcagcacactggacaggctgtagt

SEQ ID NO: 356712 - DNA, 25 bp, Homo sapien
gccatgtcgggggcgttgggcagca

SEQ ID NO: 356713 - DNA, 25 bp, Homo sapien
taagtacccagcaaaaggcagatgg

SEQ ID NO: 356714 - DNA, 25 bp, Homo sapien
tcaaggtgcttaacatagccctggc

SEQ ID NO: 356715 - DNA, 25 bp, Homo sapien
gagagaatccacacgacagaaaatg

SEQ ID NO: 356716 - DNA, 25 bp, Homo sapien
cagagtgctcaacggctccagagaa

SEQ ID NO: 356717 - DNA, 25 bp, Homo sapien
aatgaggctggaaaggccagtggga

SEQ ID NO: 356718 - DNA, 25 bp, Homo sapien
tgaggctggaaaggccagtgggaac

SEQ ID NO: 356719 - DNA, 25 bp, Homo sapien
tcacgagaaatgaggctggaaaggc

SEQ ID NO: 356720 - DNA, 25 bp, Homo sapien
gaaatgaggctggaaaggccagtgg

SEQ ID NO: 356721 - DNA, 25 bp, Homo sapien
agcacagatgactgtgttctgaaag

SEQ ID NO: 356722 - DNA, 25 bp, Homo sapien
taagccgcatgacaaccttgtgagg

SEQ ID NO: 356723 - DNA, 25 bp, Homo sapien
caagtaactgactgcccaagggaaa

SEQ ID NO: 356724 - DNA, 25 bp, Homo sapien
tgtagggtactctcacaaggcatcc

SEQ ID NO: 356725 - DNA, 25 bp, Homo sapien
tgagggcagtgctttcgaggtcaca

SEQ ID NO: 356726 - DNA, 25 bp, Homo sapien
ttcctcggctcctcgaacagatcag

SEQ ID NO: 356727 - DNA, 25 bp, Homo sapien
acagcctctctaggcgggccctggt

SEQ ID NO: 356728 - DNA, 25 bp, Homo sapien
cagccgagcttatggaggaacttgc

SEQ ID NO: 356729 - DNA, 25 bp, Homo sapien
tggaggaacttgccgacagcctctc

SEQ ID NO: 356730 - DNA, 25 bp, Homo sapien
gcacatgatcagttatacagacctg

SEQ ID NO: 356731 - DNA, 25 bp, Homo sapien
caagagaggaataagacaactgtga

SEQ ID NO: 356732 - DNA, 25 bp, Homo sapien
aagatactggataatggctattcaa

SEQ ID NO: 356733 - DNA, 25 bp, Homo sapien
ccttgtcttgtaaacattcctcttg

SEQ ID NO: 356734 - DNA, 25 bp, Homo sapien
ttatggggcacccaaagaaactctc

SEQ ID NO: 356735 - DNA, 25 bp, Homo sapien
cataatctggcttgcggcgagcagt

SEQ ID NO: 356736 - DNA, 25 bp, Homo sapien
aactggctcataatctggcttgcgg

SEQ ID NO: 356737 - DNA, 25 bp, Homo sapien
cagcctgggattgtcttccaaaata

SEQ ID NO: 356738 - DNA, 25 bp, Homo sapien
aaaatacatatctgatgaaatggcc

SEQ ID NO: 356739 - DNA, 25 bp, Homo sapien
tgtggttttcagaactgtttcagta

SEQ ID NO: 356740 - DNA, 25 bp, Homo sapien
gaactgctccttaactccactggct

SEQ ID NO: 356741 - DNA, 25 bp, Homo sapien
caataggaatctgaactgtcatccc

SEQ ID NO: 356742 - DNA, 25 bp, Homo sapien
aactgtttcagtatctttgctggtc

SEQ ID NO: 356743 - DNA, 25 bp, Homo sapien
taacccaaaggtggtcctcaatgtg

SEQ ID NO: 356744 - DNA, 25 bp, Homo sapien
acataagtgatggagccttccagta

SEQ ID NO: 356745 - DNA, 25 bp, Homo sapien
gacaggaacaccttcagttttcatg

SEQ ID NO: 356746 - DNA, 25 bp, Homo sapien
cagacaactctaatgccctcagaga

SEQ ID NO: 356747 - DNA, 25 bp, Homo sapien
taaaatatgaatcgtcactgtcatc

SEQ ID NO: 356748 - DNA, 25 bp, Homo sapien
ctggaagtaaaatatgaatcgtcac

SEQ ID NO: 356749 - DNA, 25 bp, Homo sapien
gccataatgggtgattcctgctcta

SEQ ID NO: 356750 - DNA, 25 bp, Homo sapien
tgaagtcactgaatgtgaaataaca

SEQ ID NO: 356751 - DNA, 25 bp, Homo sapien
gagtctgtctgagtcaacatttttt

SEQ ID NO: 356752 - DNA, 25 bp, Homo sapien
tccaaatcccatgccgagtctgtct

SEQ ID NO: 356753 - DNA, 25 bp, Homo sapien
tttgaatttcaagatccttataggc

SEQ ID NO: 356754 - DNA, 25 bp, Homo sapien
tataggctaatcgtaatgatgaaac

SEQ ID NO: 356755 - DNA, 25 bp, Homo sapien
gcagtggtggtcattaaggcacagt

SEQ ID NO: 356756 - DNA, 25 bp, Homo sapien
tctgaacaaggccatgaaagttgcc

SEQ ID NO: 356757 - DNA, 25 bp, Homo sapien
caagtgaagtctggttgttgcttcc

SEQ ID NO: 356758 - DNA, 25 bp, Homo sapien
cacctgtactttctacgggtttgag

SEQ ID NO: 356759 - DNA, 25 bp, Homo sapien
tggagacacgaccagagccatagtc

SEQ ID NO: 356760 - DNA, 25 bp, Homo sapien
aaggtgctccacattatcgttccaa

SEQ ID NO: 356761 - DNA, 25 bp, Homo sapien
aaaagcaggcctggaccattagcag

SEQ ID NO: 356762 - DNA, 25 bp, Homo sapien
cagtggtttcagcacattcacaaag

SEQ ID NO: 356763 - DNA, 25 bp, Homo sapien
cctgaaaatgtattaatataatgaa

SEQ ID NO: 356764 - DNA, 25 bp, Homo sapien
tccctgaaaatgtattaatataatg

SEQ ID NO: 356765 - DNA, 25 bp, Homo sapien
ccctgaaaatgtattaatataatga

SEQ ID NO: 356766 - DNA, 25 bp, Homo sapien
attccctgaaaatgtattaatataa

SEQ ID NO: 356767 - DNA, 25 bp, Homo sapien
ttgccagtttctgagctcccaaact

SEQ ID NO: 356768 - DNA, 25 bp, Homo sapien
cattttatccgcagcttgagcttgt

SEQ ID NO: 356769 - DNA, 25 bp, Homo sapien
tgctccttcattttatccgcagctt

SEQ ID NO: 356770 - DNA, 25 bp, Homo sapien
tctttagataccaccttggccaggt

SEQ ID NO: 356771 - DNA, 25 bp, Homo sapien
aattggtttcacgaccctgtggata

SEQ ID NO: 356772 - DNA, 25 bp, Homo sapien
cctgtggataacaaaatctgcgatg

SEQ ID NO: 356773 - DNA, 25 bp, Homo sapien
gactatagtctacacgagctgtttg

SEQ ID NO: 356774 - DNA, 25 bp, Homo sapien
tgtggcttagtcctcagaactctgt

SEQ ID NO: 356775 - DNA, 25 bp, Homo sapien
ctaaaatgacgaagcggctttttag

SEQ ID NO: 356776 - DNA, 25 bp, Homo sapien
ataaaactaaaatgacgaagcggct

SEQ ID NO: 356777 - DNA, 25 bp, Homo sapien
ggtttcttttttatgatagaggata

SEQ ID NO: 356778 - DNA, 25 bp, Homo sapien
ttcttttttatgatagaggatacct

SEQ ID NO: 356779 - DNA, 25 bp, Homo sapien
ttggtttcttttttatgatagagga

SEQ ID NO: 356780 - DNA, 25 bp, Homo sapien
tttcttttttatgatagaggatacc

SEQ ID NO: 356781 - DNA, 25 bp, Homo sapien
gagaaatagagcctgagcttgcccc

SEQ ID NO: 356782 - DNA, 25 bp, Homo sapien
cattacctcccagatcaagggagcc

SEQ ID NO: 356783 - DNA, 25 bp, Homo sapien
aacagaactttgtcaaaatggtgtc

SEQ ID NO: 356784 - DNA, 25 bp, Homo sapien
tcagtatttccacgcagtctccaaa

SEQ ID NO: 356785 - DNA, 25 bp, Homo sapien
ttatcaagtgctactcttcaaaaac

SEQ ID NO: 356786 - DNA, 25 bp, Homo sapien
atgccacaactcttttatcaagtgc

SEQ ID NO: 356787 - DNA, 25 bp, Homo sapien
catgccacaactcttttatcaagtg

SEQ ID NO: 356788 - DNA, 25 bp, Homo sapien
ccatgccacaactcttttatcaagt

SEQ ID NO: 356789 - DNA, 25 bp, Homo sapien
taaagtagcctttgttggtacatta

SEQ ID NO: 356790 - DNA, 25 bp, Homo sapien
ttgttggtacattaagaccttccac

SEQ ID NO: 356791 - DNA, 25 bp, Homo sapien
ctaaagtagcctttgttggtacatt

SEQ ID NO: 356792 - DNA, 25 bp, Homo sapien
tggtacattaagaccttccacactt

SEQ ID NO: 356793 - DNA, 25 bp, Homo sapien
tacctctgtggactatacataccca

SEQ ID NO: 356794 - DNA, 25 bp, Homo sapien
gacctgtcaaaagatacttactacc

SEQ ID NO: 356795 - DNA, 25 bp, Homo sapien
tctggtgatttaatgtgacctgtca

SEQ ID NO: 356796 - DNA, 25 bp, Homo sapien
tgctcagtgctacatcttatccaat

SEQ ID NO: 356797 - DNA, 25 bp, Homo sapien
ggcctcaaagcccttttatgctaat

SEQ ID NO: 356798 - DNA, 25 bp, Homo sapien
gcctcaaagcccttttatgctaata

SEQ ID NO: 356799 - DNA, 25 bp, Homo sapien
tggcctcaaagcccttttatgctaa

SEQ ID NO: 356800 - DNA, 25 bp, Homo sapien
cattctggcctaacaaaggatgcac

SEQ ID NO: 356801 - DNA, 25 bp, Homo sapien
caacccgcggttggtgactgcttca

SEQ ID NO: 356802 - DNA, 25 bp, Homo sapien
tgtctacgcctataccagcaaaatg

SEQ ID NO: 356803 - DNA, 25 bp, Homo sapien
ctgttaagacagaagggtcggccag

SEQ ID NO: 356804 - DNA, 25 bp, Homo sapien
attacatgacagttctaaggactcc

SEQ ID NO: 356805 - DNA, 25 bp, Homo sapien
ccatagaatagtattacatgacagt

SEQ ID NO: 356806 - DNA, 25 bp, Homo sapien
ctgaaccatagaatagtattacatg

SEQ ID NO: 356807 - DNA, 25 bp, Homo sapien
gaatagtattacatgacagttctaa

SEQ ID NO: 356808 - DNA, 25 bp, Homo sapien
tccacaggccttgatgttaaagaag

SEQ ID NO: 356809 - DNA, 25 bp, Homo sapien
gctattgctgatgcccacgctgtgt

SEQ ID NO: 356810 - DNA, 25 bp, Homo sapien
ttaaagaagatggttctgctattgc

SEQ ID NO: 356811 - DNA, 25 bp, Homo sapien
ttccacaggccttgatgttaaagaa

SEQ ID NO: 356812 - DNA, 25 bp, Homo sapien
tccaagacagaggtaggcacacgtt

SEQ ID NO: 356813 - DNA, 25 bp, Homo sapien
acaaatcgtgctccttacccagtgg

SEQ ID NO: 356814 - DNA, 25 bp, Homo sapien
agctgctttagaccctgagatggaa

SEQ ID NO: 356815 - DNA, 25 bp, Homo sapien
tctaagtgatctgaggagaggccac

SEQ ID NO: 356816 - DNA, 25 bp, Homo sapien
acaaaggtggaaccacacaactatc

SEQ ID NO: 356817 - DNA, 25 bp, Homo sapien
gacaaaggtggaaccacacaactat

SEQ ID NO: 356818 - DNA, 25 bp, Homo sapien
ggacaaaggtggaaccacacaacta

SEQ ID NO: 356819 - DNA, 25 bp, Homo sapien
tgtatctaaaggaaacaatccagcc

SEQ ID NO: 356820 - DNA, 25 bp, Homo sapien
tagtgcagcaaaaaatgagttgccc

SEQ ID NO: 356821 - DNA, 25 bp, Homo sapien
cagggctgagcatttcatccggcct

SEQ ID NO: 356822 - DNA, 25 bp, Homo sapien
gtaacatccctacagaggacctctg

SEQ ID NO: 356823 - DNA, 25 bp, Homo sapien
gaggcgagcgatttgattttctccc

SEQ ID NO: 356824 - DNA, 25 bp, Homo sapien
tgcttgagaggcgagcgatttgatt

SEQ ID NO: 356825 - DNA, 25 bp, Homo sapien
attttctccctatagagctgagcag

SEQ ID NO: 356826 - DNA, 25 bp, Homo sapien
tctccctatagagctgagcagcacg

SEQ ID NO: 356827 - DNA, 25 bp, Homo sapien
ctgttgtacttggcattggtgtcat

SEQ ID NO: 356828 - DNA, 25 bp, Homo sapien
tgttgtacttggcattggtgtcatt

SEQ ID NO: 356829 - DNA, 25 bp, Homo sapien
ggtggaacacccatgttgatgaaaa

SEQ ID NO: 356830 - DNA, 25 bp, Homo sapien
tggtggaacacccatgttgatgaaa

SEQ ID NO: 356831 - DNA, 25 bp, Homo sapien
tcgtaaaactacgtatggccaggcg

SEQ ID NO: 356832 - DNA, 25 bp, Homo sapien
ttcgtaaaactacgtatggccaggc

SEQ ID NO: 356833 - DNA, 25 bp, Homo sapien
acctaggctggagggtagtgtggca

SEQ ID NO: 356834 - DNA, 25 bp, Homo sapien
caccgctcctggcccttttctttgt

SEQ ID NO: 356835 - DNA, 25 bp, Homo sapien
gagatggtctgactctgtcacctag

SEQ ID NO: 356836 - DNA, 25 bp, Homo sapien
ggagggtagtgtggcatgatcatgg

SEQ ID NO: 356837 - DNA, 25 bp, Homo sapien
tctcattagggaaacattggatcca

SEQ ID NO: 356838 - DNA, 25 bp, Homo sapien
aaaggtcacctctacctgacaaaat

SEQ ID NO: 356839 - DNA, 25 bp, Homo sapien
gctattttagacctctgactttaac

SEQ ID NO: 356840 - DNA, 25 bp, Homo sapien
tttttatgcttagggacaacgaaga

SEQ ID NO: 356841 - DNA, 25 bp, Homo sapien
ataggcaggttccactatgccttgc

SEQ ID NO: 356842 - DNA, 25 bp, Homo sapien
taggcaggttccactatgccttgct

SEQ ID NO: 356843 - DNA, 25 bp, Homo sapien
tataggcaggttccactatgccttg

SEQ ID NO: 356844 - DNA, 25 bp, Homo sapien
tttttataaacagagggtcttgcca

SEQ ID NO: 356845 - DNA, 25 bp, Homo sapien
gacaccacacctgacttgtttgttt

SEQ ID NO: 356846 - DNA, 25 bp, Homo sapien
tttataaacagagggtcttgccatg

SEQ ID NO: 356847 - DNA, 25 bp, Homo sapien
gagacaccacacctgacttgtttgt

SEQ ID NO: 356848 - DNA, 25 bp, Homo sapien
gcgtttcctccgacttgcatgcatc

SEQ ID NO: 356849 - DNA, 25 bp, Homo sapien
gaaaccatgaccagttggaatccaa

SEQ ID NO: 356850 - DNA, 25 bp, Homo sapien
tgcatgcatcgcaactgaaaccatg

SEQ ID NO: 356851 - DNA, 25 bp, Homo sapien
tgcactagcgtttcctccgacttgc

SEQ ID NO: 356852 - DNA, 25 bp, Homo sapien
atctgggaggcggaagttgaggtga

SEQ ID NO: 356853 - DNA, 25 bp, Homo sapien
gctacttaggagactgagggcagga

SEQ ID NO: 356854 - DNA, 25 bp, Homo sapien
agtacaaaacttagatggacgtggt

SEQ ID NO: 356855 - DNA, 25 bp, Homo sapien
ggcacatgcctgtaatcccagctac

SEQ ID NO: 356856 - DNA, 25 bp, Homo sapien
taggtatccgcatacaaaagaatga

SEQ ID NO: 356857 - DNA, 25 bp, Homo sapien
gaaaaactaggtatccgcatacaaa

SEQ ID NO: 356858 - DNA, 25 bp, Homo sapien
ctaggtatccgcatacaaaagaatg

SEQ ID NO: 356859 - DNA, 25 bp, Homo sapien
tgatggaaaaactaggtatccgcat

SEQ ID NO: 356860 - DNA, 25 bp, Homo sapien
cataggttatgcttgcccagctggg

SEQ ID NO: 356861 - DNA, 25 bp, Homo sapien
caagtgaccggtgggaccctgagca

SEQ ID NO: 356862 - DNA, 25 bp, Homo sapien
tgaacaccaagtgaccggtgggacc

SEQ ID NO: 356863 - DNA, 25 bp, Homo sapien
tcaatgcaaaggaacactccatagg

SEQ ID NO: 356864 - DNA, 25 bp, Homo sapien
atgcaatgagcggagaccactccac

SEQ ID NO: 356865 - DNA, 25 bp, Homo sapien
gaggatgcaatgagcggagaccact

SEQ ID NO: 356866 - DNA, 25 bp, Homo sapien
catattagatatataggctgggtgc

SEQ ID NO: 356867 - DNA, 25 bp, Homo sapien
tacatattagatatataggctgggt

SEQ ID NO: 356868 - DNA, 25 bp, Homo sapien
tgagctgacatggagatggccctct

SEQ ID NO: 356869 - DNA, 25 bp, Homo sapien
tgaacaagggaatctgctggccatc

SEQ ID NO: 356870 - DNA, 25 bp, Homo sapien
tgcggtaatacacaagggccaagcc

SEQ ID NO: 356871 - DNA, 25 bp, Homo sapien
taccgaacacattgccgaaaaggac

SEQ ID NO: 356872 - DNA, 25 bp, Homo sapien
gagtcaggtctagttcatgccccat

SEQ ID NO: 356873 - DNA, 25 bp, Homo sapien
tagcagtttggacaatacaagcctg

SEQ ID NO: 356874 - DNA, 25 bp, Homo sapien
gacaaagtggtcaagtaacctgtcc

SEQ ID NO: 356875 - DNA, 25 bp, Homo sapien
tagtttacacattgctaaccgcaga

SEQ ID NO: 356876 - DNA, 25 bp, Homo sapien
tgagctaggatcaaggcactacact

SEQ ID NO: 356877 - DNA, 25 bp, Homo sapien
gactactcggcaactttatcagaag

SEQ ID NO: 356878 - DNA, 25 bp, Homo sapien
ggaagccaaagcgtagactactcgg

SEQ ID NO: 356879 - DNA, 25 bp, Homo sapien
cagtgggaaccagacaacactcgtg

SEQ ID NO: 356880 - DNA, 25 bp, Homo sapien
cttgttagtgggcaccgagcggagg

SEQ ID NO: 356881 - DNA, 25 bp, Homo sapien
aggcgcttgaagatggtcaagatgt

SEQ ID NO: 356882 - DNA, 25 bp, Homo sapien
tggtcaagatgtcctgcttgctggg

SEQ ID NO: 356883 - DNA, 25 bp, Homo sapien
gcaccgagcggaggcgcttgaagat

SEQ ID NO: 356884 - DNA, 25 bp, Homo sapien
gggctgcgcgtaacggtcaggctcc

SEQ ID NO: 356885 - DNA, 25 bp, Homo sapien
taagagtcgacgaaaagcggctacc

SEQ ID NO: 356886 - DNA, 25 bp, Homo sapien
agctggcccagccaaccggtaagag

SEQ ID NO: 356887 - DNA, 25 bp, Homo sapien
taccgcctcagcaggagcgacgagg

SEQ ID NO: 356888 - DNA, 25 bp, Homo sapien
ctggctttctgaaaccaagggcttt

SEQ ID NO: 356889 - DNA, 25 bp, Homo sapien
ggcttttgtgtcacgttcatggaga

SEQ ID NO: 356890 - DNA, 25 bp, Homo sapien
agggcttttgtgtcacgttcatgga

SEQ ID NO: 356891 - DNA, 25 bp, Homo sapien
gggcttttgtgtcacgttcatggag

SEQ ID NO: 356892 - DNA, 25 bp, Homo sapien
agcatggtttatttgcagtctcagg

SEQ ID NO: 356893 - DNA, 25 bp, Homo sapien
gcatggtttatttgcagtctcaggg

SEQ ID NO: 356894 - DNA, 25 bp, Homo sapien
tttatttgcagtctcaggggctcat

SEQ ID NO: 356895 - DNA, 25 bp, Homo sapien
tggtttatttgcagtctcaggggct

SEQ ID NO: 356896 - DNA, 25 bp, Homo sapien
ttgtccgtcttgtagagtatttgca

SEQ ID NO: 356897 - DNA, 25 bp, Homo sapien
tccgtcttgtagagtatttgcattc

SEQ ID NO: 356898 - DNA, 25 bp, Homo sapien
agtattgtccgtcttgtagagtatt

SEQ ID NO: 356899 - DNA, 25 bp, Homo sapien
tattgtccgtcttgtagagtatttg

SEQ ID NO: 356900 - DNA, 25 bp, Homo sapien
cagtgtaacccaccattgactcgga

SEQ ID NO: 356901 - DNA, 25 bp, Homo sapien
tgaggctaagcctacacacggcgtg

SEQ ID NO: 356902 - DNA, 25 bp, Homo sapien
caactactgcaaagacgcgggcact

SEQ ID NO: 356903 - DNA, 25 bp, Homo sapien
gactggtgcgcatcaatctgtgcca

SEQ ID NO: 356904 - DNA, 25 bp, Homo sapien
gccaacttgcccgttgtccaagcgt

SEQ ID NO: 356905 - DNA, 25 bp, Homo sapien
gttgtccaagcgtcccttgcaccag

SEQ ID NO: 356906 - DNA, 25 bp, Homo sapien
tttgccgggtataggccaacttgcc

SEQ ID NO: 356907 - DNA, 25 bp, Homo sapien
cactggatcgcctccacataatttg

SEQ ID NO: 356908 - DNA, 25 bp, Homo sapien
accactgtaacccagcttggctaac

SEQ ID NO: 356909 - DNA, 25 bp, Homo sapien
cgtgcccggacaagataacactttt

SEQ ID NO: 356910 - DNA, 25 bp, Homo sapien
gtaacccagcttggctaacagagtg

SEQ ID NO: 356911 - DNA, 25 bp, Homo sapien
gattatcattgaagaccattcaaag

SEQ ID NO: 356912 - DNA, 25 bp, Homo sapien
cacacaagttgctgcctgagacaag

SEQ ID NO: 356913 - DNA, 25 bp, Homo sapien
tctgtgtgactagccagtgccctgc

SEQ ID NO: 356914 - DNA, 25 bp, Homo sapien
ctctcctgagggcttctctggcagt

SEQ ID NO: 356915 - DNA, 25 bp, Homo sapien
cagactacatatgggggaacctggt

SEQ ID NO: 356916 - DNA, 25 bp, Homo sapien
tctgaccagtcggtgggatagctct

SEQ ID NO: 356917 - DNA, 25 bp, Homo sapien
ccccattggcatccgtggaggagaa

SEQ ID NO: 356918 - DNA, 25 bp, Homo sapien
cgaatggattcgagtccccattggc

SEQ ID NO: 356919 - DNA, 25 bp, Homo sapien
tctgggtcttctcgtagctgctcac

SEQ ID NO: 356920 - DNA, 25 bp, Homo sapien
acggtgctgcccgtgtcgtcctcat

SEQ ID NO: 356921 - DNA, 25 bp, Homo sapien
tcgtccttctcactgacggtgctgc

SEQ ID NO: 356922 - DNA, 25 bp, Homo sapien
tcctcatcctcgaaggggttgtagc

SEQ ID NO: 356923 - DNA, 25 bp, Homo sapien
ttttggccttagtgtcgtccttctc

SEQ ID NO: 356924 - DNA, 25 bp, Homo sapien
ttgatgcccgtcagggtgacgccgt

SEQ ID NO: 356925 - DNA, 25 bp, Homo sapien
ttcgattcaggtctgcggaccactc

SEQ ID NO: 356926 - DNA, 25 bp, Homo sapien
tctctccggctgagggttcgattca

SEQ ID NO: 356927 - DNA, 25 bp, Homo sapien
tactcggcagagactggtcgcctgt

SEQ ID NO: 356928 - DNA, 25 bp, Homo sapien
aagcagagtacgctcctcctggaag

SEQ ID NO: 356929 - DNA, 25 bp, Homo sapien
ttctcgggtggcgaactggcttcac

SEQ ID NO: 356930 - DNA, 25 bp, Homo sapien
ccgcactgaaaatggactagggcaa

SEQ ID NO: 356931 - DNA, 25 bp, Homo sapien
tgcccgcaggtgtttaatgagctct

SEQ ID NO: 356932 - DNA, 25 bp, Homo sapien
tatgaggcgcccaggaggtttctga

SEQ ID NO: 356933 - DNA, 25 bp, Homo sapien
tctaagggacccaggcgaatttcac

SEQ ID NO: 356934 - DNA, 25 bp, Homo sapien
gaaaggcatggtcccgtaacagctg

SEQ ID NO: 356935 - DNA, 25 bp, Homo sapien
aaatcctcgctgtgtctgaaacccc

SEQ ID NO: 356936 - DNA, 25 bp, Homo sapien
gacataaccgcgacttcaggagagg

SEQ ID NO: 356937 - DNA, 25 bp, Homo sapien
tgccagtggccaaaaagtgacagtc

SEQ ID NO: 356938 - DNA, 25 bp, Homo sapien
tgacgccacgtgcttaagcctcagg

SEQ ID NO: 356939 - DNA, 25 bp, Homo sapien
agaatctgaatgcagcccgggctct

SEQ ID NO: 356940 - DNA, 25 bp, Homo sapien
gcccgtgattggctcggaaccacct

SEQ ID NO: 356941 - DNA, 25 bp, Homo sapien
ttggctcggaaccacctcaggtcct

SEQ ID NO: 356942 - DNA, 25 bp, Homo sapien
cactgcatcagctgctctgatgctc

SEQ ID NO: 356943 - DNA, 25 bp, Homo sapien
catgcccggcccgtgattggctcgg

SEQ ID NO: 356944 - DNA, 25 bp, Homo sapien
ggtgtgccctggtcgagttccttca

SEQ ID NO: 356945 - DNA, 25 bp, Homo sapien
gccacattggacaggtctaggtgct

SEQ ID NO: 356946 - DNA, 25 bp, Homo sapien
cagaacctcccggaagaagcgaagg

SEQ ID NO: 356947 - DNA, 25 bp, Homo sapien
gaagcgaaggcgtttctcctcgaac

SEQ ID NO: 356948 - DNA, 25 bp, Homo sapien
acgctgcatggtgggctttctttgc

SEQ ID NO: 356949 - DNA, 25 bp, Homo sapien
gatgggtctgccttgctgttggctt

SEQ ID NO: 356950 - DNA, 25 bp, Homo sapien
tgcaatttcttgagctgttcagggt

SEQ ID NO: 356951 - DNA, 25 bp, Homo sapien
tggcttctcgtgagatagccagctt

SEQ ID NO: 356952 - DNA, 25 bp, Homo sapien
gaagtcatcgttcatcagtgaggcc

SEQ ID NO: 356953 - DNA, 25 bp, Homo sapien
tcggacatgaaggccatccaggcct

SEQ ID NO: 356954 - DNA, 25 bp, Homo sapien
tgaggccttcacctcgaggtgcagc

SEQ ID NO: 356955 - DNA, 25 bp, Homo sapien
tgtgccttccgaaagccgtcctcag

SEQ ID NO: 356956 - DNA, 25 bp, Homo sapien
gtcgatccgcttcacagtccgcttg

SEQ ID NO: 356957 - DNA, 25 bp, Homo sapien
acaggcggtggccatcgtcgatccg

SEQ ID NO: 356958 - DNA, 25 bp, Homo sapien
gcagttcatgaggtcgctgcacagg

SEQ ID NO: 356959 - DNA, 25 bp, Homo sapien
tgcgcatacgccttctcgatgcgcg

SEQ ID NO: 356960 - DNA, 25 bp, Homo sapien
ttttctaaaatctctttgcctggcc

SEQ ID NO: 356961 - DNA, 25 bp, Homo sapien
cttttctaaaatctctttgcctggc

SEQ ID NO: 356962 - DNA, 25 bp, Homo sapien
cagagacacctctgtatgtgggtgc

SEQ ID NO: 356963 - DNA, 25 bp, Homo sapien
atgcaagtgccctacgatgacccag

SEQ ID NO: 356964 - DNA, 25 bp, Homo sapien
caaggcagctctacgcctgtggact

SEQ ID NO: 356965 - DNA, 25 bp, Homo sapien
tctgtgcacaactaggcagtcatta

SEQ ID NO: 356966 - DNA, 25 bp, Homo sapien
tgcagcccgtccttgctggagcacc

SEQ ID NO: 356967 - DNA, 25 bp, Homo sapien
gcgtggagcaccaacccagtctaca

SEQ ID NO: 356968 - DNA, 25 bp, Homo sapien
agcccgtccttgctggagcaccagc

SEQ ID NO: 356969 - DNA, 25 bp, Homo sapien
gcaccagcgtggagcaccaacccag

SEQ ID NO: 356970 - DNA, 25 bp, Homo sapien
ccacagacaggggagactcatctga

SEQ ID NO: 356971 - DNA, 25 bp, Homo sapien
gccatgatggcccttgtgaacaccg

SEQ ID NO: 356972 - DNA, 25 bp, Homo sapien
catgatggcccttgtgaacaccgtc

SEQ ID NO: 356973 - DNA, 25 bp, Homo sapien
tgatggcccttgtgaacaccgtccc

SEQ ID NO: 356974 - DNA, 25 bp, Homo sapien
gggcgtcttccttccgtggttcagc

SEQ ID NO: 356975 - DNA, 25 bp, Homo sapien
tttctgagcgtctggcaacactctc

SEQ ID NO: 356976 - DNA, 25 bp, Homo sapien
ggttcagctcggaccagctggctcg

SEQ ID NO: 356977 - DNA, 25 bp, Homo sapien
gaccagctctgggtcagacattcga

SEQ ID NO: 356978 - DNA, 25 bp, Homo sapien
gtagagaggacgctcagagaccact

SEQ ID NO: 356979 - DNA, 25 bp, Homo sapien
tagacttggccttgccatgcaggtg

SEQ ID NO: 356980 - DNA, 25 bp, Homo sapien
aacaggctcattggtgccgctggcc

SEQ ID NO: 356981 - DNA, 25 bp, Homo sapien
tgtggctgcagaaacggtaagtgta

SEQ ID NO: 356982 - DNA, 25 bp, Homo sapien
tcccagtatcgggaatggctgagca

SEQ ID NO: 356983 - DNA, 25 bp, Homo sapien
tgcgacggtgcaccccaaattctgc

SEQ ID NO: 356984 - DNA, 25 bp, Homo sapien
cacgcaggccgaagacaatgttgta

SEQ ID NO: 356985 - DNA, 25 bp, Homo sapien
tcctccactgaaagtggaatttgat

SEQ ID NO: 356986 - DNA, 25 bp, Homo sapien
gcaggccatcacacggaaaagtccg

SEQ ID NO: 356987 - DNA, 25 bp, Homo sapien
acagtgctcctgcaaggctgacaca

SEQ ID NO: 356988 - DNA, 25 bp, Homo sapien
tcgcttcgtgcttgcgctcagggca

SEQ ID NO: 356989 - DNA, 25 bp, Homo sapien
ggtattgacattcgctcgcttcgtg

SEQ ID NO: 356990 - DNA, 25 bp, Homo sapien
gcgggacctgattactgtgaacctg

SEQ ID NO: 356991 - DNA, 25 bp, Homo sapien
gctgccagctccataagcgctcctg

SEQ ID NO: 356992 - DNA, 25 bp, Homo sapien
gccagccagcgggacctgattactg

SEQ ID NO: 356993 - DNA, 25 bp, Homo sapien
gctccataagcgctcctgcactaat

SEQ ID NO: 356994 - DNA, 25 bp, Homo sapien
cggaatcatcatatgtgacagacat

SEQ ID NO: 356995 - DNA, 25 bp, Homo sapien
tactccaacggaatcatcatatgtg

SEQ ID NO: 356996 - DNA, 25 bp, Homo sapien
ggacacttctactccaacggaatca

SEQ ID NO: 356997 - DNA, 25 bp, Homo sapien
gtcgctggacacttctactccaacg

SEQ ID NO: 356998 - DNA, 25 bp, Homo sapien
tagtcaggggtcaacttcgaacgct

SEQ ID NO: 356999 - DNA, 25 bp, Homo sapien
agcagcaaagtatacttagtcaggg

SEQ ID NO: 357000 - DNA, 25 bp, Homo sapien
aacttcgaacgctcaaaatctgtag

SEQ ID NO: 357001 - DNA, 25 bp, Homo sapien
tgagggagcagcaaagtatacttag

SEQ ID NO: 357002 - DNA, 25 bp, Homo sapien
gttcttggccggcaccctgggcttc

SEQ ID NO: 357003 - DNA, 25 bp, Homo sapien
tccttcagctccacagtcacaagga

SEQ ID NO: 357004 - DNA, 25 bp, Homo sapien
gcattgttcttggccggcaccctgg

SEQ ID NO: 357005 - DNA, 25 bp, Homo sapien
cagtcacaaggaatgcaggtaaagg

SEQ ID NO: 357006 - DNA, 25 bp, Homo sapien
ctgtaacaacgcagaaacaaggccg

SEQ ID NO: 357007 - DNA, 25 bp, Homo sapien
gtggaagctgtaacaacgcagaaac

SEQ ID NO: 357008 - DNA, 25 bp, Homo sapien
gaggacgtgctggaagagagcagcc

SEQ ID NO: 357009 - DNA, 25 bp, Homo sapien
aacaaggccgcaccgcccatggtgg

SEQ ID NO: 357010 - DNA, 25 bp, Homo sapien
gggtttcgtcgtattgcccaagctg

SEQ ID NO: 357011 - DNA, 25 bp, Homo sapien
tcaagtgatccactgtgcctgctcc

SEQ ID NO: 357012 - DNA, 25 bp, Homo sapien
atccactgtgcctgctccagggtca

SEQ ID NO: 357013 - DNA, 25 bp, Homo sapien
agtgatccactgtgcctgctccagg

SEQ ID NO: 357014 - DNA, 25 bp, Homo sapien
tgcactgagcacaggctgacctgca

SEQ ID NO: 357015 - DNA, 25 bp, Homo sapien
ctgcagctcgtttcctcttcactat

SEQ ID NO: 357016 - DNA, 25 bp, Homo sapien
ctggctgggttctggccgctccaca

SEQ ID NO: 357017 - DNA, 25 bp, Homo sapien
cgctccacaggccttgcactgagca

SEQ ID NO: 357018 - DNA, 25 bp, Homo sapien
aaaaatttatcctgactgggcatgg

SEQ ID NO: 357019 - DNA, 25 bp, Homo sapien
gcccggcctcaactatttcctctaa

SEQ ID NO: 357020 - DNA, 25 bp, Homo sapien
tctaaaaatttatcctgactgggca

SEQ ID NO: 357021 - DNA, 25 bp, Homo sapien
cgcccggcctcaactatttcctcta

SEQ ID NO: 357022 - DNA, 25 bp, Homo sapien
ccgggcttgagctcattatcagggt

SEQ ID NO: 357023 - DNA, 25 bp, Homo sapien
tccgggcttgagctcattatcaggg

SEQ ID NO: 357024 - DNA, 25 bp, Homo sapien
cacagtcagcataaagaaagtccat

SEQ ID NO: 357025 - DNA, 25 bp, Homo sapien
gaaacaagccacagtcagcataaag

SEQ ID NO: 357026 - DNA, 25 bp, Homo sapien
caagccacagtcagcataaagaaag

SEQ ID NO: 357027 - DNA, 25 bp, Homo sapien
agccacagtcagcataaagaaagtc

SEQ ID NO: 357028 - DNA, 25 bp, Homo sapien
ttctgcaagcagatatccagttgtc

SEQ ID NO: 357029 - DNA, 25 bp, Homo sapien
ttccacagggattttagaattggct

SEQ ID NO: 357030 - DNA, 25 bp, Homo sapien
tatatgtggcatgaggcagagatcc

SEQ ID NO: 357031 - DNA, 25 bp, Homo sapien
aactgttctgactattcttggtccc

SEQ ID NO: 357032 - DNA, 25 bp, Homo sapien
tgttgcagaacaggcatcaccaagg

SEQ ID NO: 357033 - DNA, 25 bp, Homo sapien
catccgttacagagaactagcaggt

SEQ ID NO: 357034 - DNA, 25 bp, Homo sapien
caaaaattggaaacgagtcagctgc

SEQ ID NO: 357035 - DNA, 25 bp, Homo sapien
caacttataaggtgaggactgtagc

SEQ ID NO: 357036 - DNA, 25 bp, Homo sapien
cattactgtgactctaccatggtgg

SEQ ID NO: 357037 - DNA, 25 bp, Homo sapien
ttctccatgacattactgtgactct

SEQ ID NO: 357038 - DNA, 25 bp, Homo sapien
gcagccacttgtttagtccccgact

SEQ ID NO: 357039 - DNA, 25 bp, Homo sapien
tgcagccacttgtttagtccccgac

SEQ ID NO: 357040 - DNA, 25 bp, Homo sapien
ggccacatacttcccgacgacgcct

SEQ ID NO: 357041 - DNA, 25 bp, Homo sapien
aaattctctgtgcggctccattccc

SEQ ID NO: 357042 - DNA, 25 bp, Homo sapien
tccccttcgtgccagtcttcaggat

SEQ ID NO: 357043 - DNA, 25 bp, Homo sapien
gcagccacggccacatacttcccga

SEQ ID NO: 357044 - DNA, 25 bp, Homo sapien
tggcaaatttgcaggatttaaaaaa

SEQ ID NO: 357045 - DNA, 25 bp, Homo sapien
gaaggaatggtaagcaaatatgcag

SEQ ID NO: 357046 - DNA, 25 bp, Homo sapien
ggataaatctaaatagcattagctg

SEQ ID NO: 357047 - DNA, 25 bp, Homo sapien
aagttgagagggcatatggagttaa

SEQ ID NO: 357048 - DNA, 25 bp, Homo sapien
tctcaaatttcggaggcatggtagg

SEQ ID NO: 357049 - DNA, 25 bp, Homo sapien
caggacatagtgatggatgatgcca

SEQ ID NO: 357050 - DNA, 25 bp, Homo sapien
aaacagtcacgtggttagtggctac

SEQ ID NO: 357051 - DNA, 25 bp, Homo sapien
cacactggacatcgcagttctggag

SEQ ID NO: 357052 - DNA, 25 bp, Homo sapien
gagttctgttaaatcagtcactcag

SEQ ID NO: 357053 - DNA, 25 bp, Homo sapien
ttctgttaaatcagtcactcagtga

SEQ ID NO: 357054 - DNA, 25 bp, Homo sapien
ggtgagagttctgttaaatcagtca

SEQ ID NO: 357055 - DNA, 25 bp, Homo sapien
tgagagttctgttaaatcagtcact

SEQ ID NO: 357056 - DNA, 25 bp, Homo sapien
ggaaatgcaagccttccacagcaca

SEQ ID NO: 357057 - DNA, 25 bp, Homo sapien
aaaggaaatgcaagccttccacagc

SEQ ID NO: 357058 - DNA, 25 bp, Homo sapien
cttaaaggaaatgcaagccttccac

SEQ ID NO: 357059 - DNA, 25 bp, Homo sapien
aaatgcaagccttccacagcacact

SEQ ID NO: 357060 - DNA, 25 bp, Homo sapien
tgccggctaactctgcagctcagct

SEQ ID NO: 357061 - DNA, 25 bp, Homo sapien
tttctgtcagatgccggctaactct

SEQ ID NO: 357062 - DNA, 25 bp, Homo sapien
atttttctgtcagatgccggctaac

SEQ ID NO: 357063 - DNA, 25 bp, Homo sapien
gtcagatgccggctaactctgcagc

SEQ ID NO: 357064 - DNA, 25 bp, Homo sapien
ggctgccgagataaggtcattccca

SEQ ID NO: 357065 - DNA, 25 bp, Homo sapien
aggtcattcccatacactgctgcat

SEQ ID NO: 357066 - DNA, 25 bp, Homo sapien
taaggtcattcccatacactgctgc

SEQ ID NO: 357067 - DNA, 25 bp, Homo sapien
atttcctgttggctgccgagataag

SEQ ID NO: 357068 - DNA, 25 bp, Homo sapien
atgagaggttatgcaacttgctaag

SEQ ID NO: 357069 - DNA, 25 bp, Homo sapien
gacttccctcaacggtcagaactgg

SEQ ID NO: 357070 - DNA, 25 bp, Homo sapien
tgtaagccaggctacacaacactgc

SEQ ID NO: 357071 - DNA, 25 bp, Homo sapien
ccacttagggctgctggttatggga

SEQ ID NO: 357072 - DNA, 25 bp, Homo sapien
ccaggaaaagttaataatgagtaca

SEQ ID NO: 357073 - DNA, 25 bp, Homo sapien
aattcttcctgccctcaatgaaaag

SEQ ID NO: 357074 - DNA, 25 bp, Homo sapien
tgagctaccacccactacctagcac

SEQ ID NO: 357075 - DNA, 25 bp, Homo sapien
actacctagcacttagcacttttta

SEQ ID NO: 357076 - DNA, 25 bp, Homo sapien
ggcacataccatgacacctggctag

SEQ ID NO: 357077 - DNA, 25 bp, Homo sapien
acataccatgacacctggctagttt

SEQ ID NO: 357078 - DNA, 25 bp, Homo sapien
cacaggcacataccatgacacctgg

SEQ ID NO: 357079 - DNA, 25 bp, Homo sapien
accacaggcacataccatgacacct

SEQ ID NO: 357080 - DNA, 25 bp, Homo sapien
gtaaaatgacagtgcagtgcgctcc

SEQ ID NO: 357081 - DNA, 25 bp, Homo sapien
gaatgtggcccaaaaggttcctgaa

SEQ ID NO: 357082 - DNA, 25 bp, Homo sapien
tgtcatcagcaaagccctagaggga

SEQ ID NO: 357083 - DNA, 25 bp, Homo sapien
tcccaagccccatgtgtcagatagg

SEQ ID NO: 357084 - DNA, 25 bp, Homo sapien
gtggccataagcactcacaaccttg

SEQ ID NO: 357085 - DNA, 25 bp, Homo sapien
tggctgagctgatgcaggaatgtgg

SEQ ID NO: 357086 - DNA, 25 bp, Homo sapien
gctccaaggattaatcatcaagtag

SEQ ID NO: 357087 - DNA, 25 bp, Homo sapien
ccttgggaacgtggaacattagctc

SEQ ID NO: 357088 - DNA, 25 bp, Homo sapien
ccgcaacatgaaaaaggaccctcct

SEQ ID NO: 357089 - DNA, 25 bp, Homo sapien
taagaagtcagcaatccgcaacatg

SEQ ID NO: 357090 - DNA, 25 bp, Homo sapien
cacctagtgatggagctcgaaccca

SEQ ID NO: 357091 - DNA, 25 bp, Homo sapien
catttggccaaaagccgcacagtca

SEQ ID NO: 357092 - DNA, 25 bp, Homo sapien
caggacgcgcattggtgacttctcc

SEQ ID NO: 357093 - DNA, 25 bp, Homo sapien
tttgcggtttcgtcggcatccaggg

SEQ ID NO: 357094 - DNA, 25 bp, Homo sapien
gagggtggcgcagattactctccca

SEQ ID NO: 357095 - DNA, 25 bp, Homo sapien
tgtccattggctaccggacaccgag

SEQ ID NO: 357096 - DNA, 25 bp, Homo sapien
ctcatttggagaattcgggtttaca

SEQ ID NO: 357097 - DNA, 25 bp, Homo sapien
tataaactccggcaatagtccctcc

SEQ ID NO: 357098 - DNA, 25 bp, Homo sapien
agtgggccagtgtcaacaatttcaa

SEQ ID NO: 357099 - DNA, 25 bp, Homo sapien
tgaatccagattgccttagtgtaag

SEQ ID NO: 357100 - DNA, 25 bp, Homo sapien
gcctggaacccctggactaaagcaa

SEQ ID NO: 357101 - DNA, 25 bp, Homo sapien
atgtcttttcacagcttgatagttc

SEQ ID NO: 357102 - DNA, 25 bp, Homo sapien
tgggcaggctggcctatccagcctg

SEQ ID NO: 357103 - DNA, 25 bp, Homo sapien
tcaaatgatcagcttgcctcgccct

SEQ ID NO: 357104 - DNA, 25 bp, Homo sapien
aaaagagcgagttttatacatccgc

SEQ ID NO: 357105 - DNA, 25 bp, Homo sapien
tatacatccgcatgaattgtttcct

SEQ ID NO: 357106 - DNA, 25 bp, Homo sapien
tttagcactagtcaaacagactcca

SEQ ID NO: 357107 - DNA, 25 bp, Homo sapien
gaattgtttcctttagcactagtca

SEQ ID NO: 357108 - DNA, 25 bp, Homo sapien
agaagtgccttcgtttatttacagg

SEQ ID NO: 357109 - DNA, 25 bp, Homo sapien
tgccttcgtttatttacagggctta

SEQ ID NO: 357110 - DNA, 25 bp, Homo sapien
agtgccttcgtttatttacagggct

SEQ ID NO: 357111 - DNA, 25 bp, Homo sapien
aagaagtgccttcgtttatttacag

SEQ ID NO: 357112 - DNA, 25 bp, Homo sapien
tagttttgataaggtccaggtggga

SEQ ID NO: 357113 - DNA, 25 bp, Homo sapien
gagtctctcgatcggcctgctctgg

SEQ ID NO: 357114 - DNA, 25 bp, Homo sapien
ccagagactgaccctgacggcttct

SEQ ID NO: 357115 - DNA, 25 bp, Homo sapien
tccaggtggtgaggaccgctctccc

SEQ ID NO: 357116 - DNA, 25 bp, Homo sapien
caccctgggccaattcttcatcata

SEQ ID NO: 357117 - DNA, 25 bp, Homo sapien
taattgccgaggacttccttaggtg

SEQ ID NO: 357118 - DNA, 25 bp, Homo sapien
taggtggcgacttgttccatttgca

SEQ ID NO: 357119 - DNA, 25 bp, Homo sapien
cagtctgggatttcaccattcggga

SEQ ID NO: 357120 - DNA, 25 bp, Homo sapien
tacttgaggattcggtcattggcag

SEQ ID NO: 357121 - DNA, 25 bp, Homo sapien
gatgtcgtagccatagcattcaaag

SEQ ID NO: 357122 - DNA, 25 bp, Homo sapien
cgatgatgatgtcgtagccatagca

SEQ ID NO: 357123 - DNA, 25 bp, Homo sapien
cagggcttcagcttgtcgtcgatga

SEQ ID NO: 357124 - DNA, 25 bp, Homo sapien
gcttgtcgtcgatgatgatgtcgta

SEQ ID NO: 357125 - DNA, 25 bp, Homo sapien
tagagccgcaggttactcactgtcc

SEQ ID NO: 357126 - DNA, 25 bp, Homo sapien
gatccagtggatctcgtcgaacagc

SEQ ID NO: 357127 - DNA, 25 bp, Homo sapien
ccacttgcccccatggatgtggttg

SEQ ID NO: 357128 - DNA, 25 bp, Homo sapien
cttgccgcgggtgctctccaggtag

SEQ ID NO: 357129 - DNA, 25 bp, Homo sapien
gcgacgttggtgagatgaacgaaca

SEQ ID NO: 357130 - DNA, 25 bp, Homo sapien
gagatgaacgaacatgttgtccagc

SEQ ID NO: 357131 - DNA, 25 bp, Homo sapien
tgtatttcactgtgcagaaccggca

SEQ ID NO: 357132 - DNA, 25 bp, Homo sapien
cagctcactggtactcggggtgtat

SEQ ID NO: 357133 - DNA, 25 bp, Homo sapien
tagagagagatcacgtaggcttcct

SEQ ID NO: 357134 - DNA, 25 bp, Homo sapien
gtggacaccagaacgtacaagcgca

SEQ ID NO: 357135 - DNA, 25 bp, Homo sapien
tgtaacagcgcagtggacggtacgt

SEQ ID NO: 357136 - DNA, 25 bp, Homo sapien
tagtaacgggttgttaatatagaga

SEQ ID NO: 357137 - DNA, 25 bp, Homo sapien
cctctacaaacaggttgtagtcagc

SEQ ID NO: 357138 - DNA, 25 bp, Homo sapien
tctgtgagagcttgttgataaggaa

SEQ ID NO: 357139 - DNA, 25 bp, Homo sapien
gctgtcccgggaccactttttgatc

SEQ ID NO: 357140 - DNA, 25 bp, Homo sapien
atgatccaggtgctggacgggctct

SEQ ID NO: 357141 - DNA, 25 bp, Homo sapien
aaaacatgagccggtggaagacgca

SEQ ID NO: 357142 - DNA, 25 bp, Homo sapien
tgaaaacatgagccggtggaagacg

SEQ ID NO: 357143 - DNA, 25 bp, Homo sapien
gaaaacatgagccggtggaagacgc

SEQ ID NO: 357144 - DNA, 25 bp, Homo sapien
aaacatgagccggtggaagacgcac

SEQ ID NO: 357145 - DNA, 25 bp, Homo sapien
catcaggtccttccgggtcagttca

SEQ ID NO: 357146 - DNA, 25 bp, Homo sapien
tttggtcatctgagagccgatatcc

SEQ ID NO: 357147 - DNA, 25 bp, Homo sapien
gcttcaacgctgaacacatttcgga

SEQ ID NO: 357148 - DNA, 25 bp, Homo sapien
gagagccgatatccagcttcaacgc

SEQ ID NO: 357149 - DNA, 25 bp, Homo sapien
ggaaactcatttaaacaggatctgt

SEQ ID NO: 357150 - DNA, 25 bp, Homo sapien
tcatttaaacaggatctgtaccgaa

SEQ ID NO: 357151 - DNA, 25 bp, Homo sapien
caggaaactcatttaaacaggatct

SEQ ID NO: 357152 - DNA, 25 bp, Homo sapien
taaacaggatctgtaccgaaattca

SEQ ID NO: 357153 - DNA, 25 bp, Homo sapien
ccaggcatgtatgatttttactgta

SEQ ID NO: 357154 - DNA, 25 bp, Homo sapien
caggcatgtatgatttttactgtat

SEQ ID NO: 357155 - DNA, 25 bp, Homo sapien
ccagtcctcgttttctgtcacttgg

SEQ ID NO: 357156 - DNA, 25 bp, Homo sapien
gtcacttggacccatcctctctttt

SEQ ID NO: 357157 - DNA, 25 bp, Homo sapien
aaattccagtcctcgttttctgtca

SEQ ID NO: 357158 - DNA, 25 bp, Homo sapien
gacttctcgatatcagtgacccatt

SEQ ID NO: 357159 - DNA, 25 bp, Homo sapien
ggcaatgtctagagagtctggttgt

SEQ ID NO: 357160 - DNA, 25 bp, Homo sapien
ccagggatgctgctcgatgtccgac

SEQ ID NO: 357161 - DNA, 25 bp, Homo sapien
atgtccgactgcacagatgacccct

SEQ ID NO: 357162 - DNA, 25 bp, Homo sapien
gttgtcatgaccaggggatgcctct

SEQ ID NO: 357163 - DNA, 25 bp, Homo sapien
tggcaacgcccacgctcacctcggt

SEQ ID NO: 357164 - DNA, 25 bp, Homo sapien
cagagcaccactggcaacgcccacg

SEQ ID NO: 357165 - DNA, 25 bp, Homo sapien
acgctcacctcggtctcgctgacgt

SEQ ID NO: 357166 - DNA, 25 bp, Homo sapien
gtctcgctgacgtcactgacgccgg

SEQ ID NO: 357167 - DNA, 25 bp, Homo sapien
gaagaatgggtgattccttcccaac

SEQ ID NO: 357168 - DNA, 25 bp, Homo sapien
acattagatagcaacctcctgcggg

SEQ ID NO: 357169 - DNA, 25 bp, Homo sapien
gactaatacagcaggaattctccgc

SEQ ID NO: 357170 - DNA, 25 bp, Homo sapien
tgtagacaagtgatccaccgggcca

SEQ ID NO: 357171 - DNA, 25 bp, Homo sapien
gatatcagattgttttattgttgct

SEQ ID NO: 357172 - DNA, 25 bp, Homo sapien
tatcagattgttttattgttgcttc

SEQ ID NO: 357173 - DNA, 25 bp, Homo sapien
ctgatatcagattgttttattgttg

SEQ ID NO: 357174 - DNA, 25 bp, Homo sapien
cagattgttttattgttgcttcctc

SEQ ID NO: 357175 - DNA, 25 bp, Homo sapien
ttaacaagctgtaaggcctgcctgc

SEQ ID NO: 357176 - DNA, 25 bp, Homo sapien
gcgaggagcacaggagacacattta

SEQ ID NO: 357177 - DNA, 25 bp, Homo sapien
caactgggtaggatcgtcatgagct

SEQ ID NO: 357178 - DNA, 25 bp, Homo sapien
acattaaactgagagcccagatggg

SEQ ID NO: 357179 - DNA, 25 bp, Homo sapien
gatgcaattgcaacagtcggacagc

SEQ ID NO: 357180 - DNA, 25 bp, Homo sapien
gaaccgcattttcgcagccgcgtag

SEQ ID NO: 357181 - DNA, 25 bp, Homo sapien
taagtcataggaactcagcggacgg

SEQ ID NO: 357182 - DNA, 25 bp, Homo sapien
ggatccggcaagcagcatctgaacc

SEQ ID NO: 357183 - DNA, 25 bp, Homo sapien
agggactcggaggagcgccctgcag

SEQ ID NO: 357184 - DNA, 25 bp, Homo sapien
agggatgcctcgagccgcgccctcg

SEQ ID NO: 357185 - DNA, 25 bp, Homo sapien
agtacgcagccgactgccaggcgca

SEQ ID NO: 357186 - DNA, 25 bp, Homo sapien
ctccggcgctcgcaggagtacgcag

SEQ ID NO: 357187 - DNA, 25 bp, Homo sapien
gctcctttgggctccatacctcggg

SEQ ID NO: 357188 - DNA, 25 bp, Homo sapien
tatttccggagtcagacttgcctgg

SEQ ID NO: 357189 - DNA, 25 bp, Homo sapien
gccggcgctgcgactatttccggag

SEQ ID NO: 357190 - DNA, 25 bp, Homo sapien
cagggcttggatcctaggaaatgcc

SEQ ID NO: 357191 - DNA, 25 bp, Homo sapien
ttcaccttcgctccagtctgatgct

SEQ ID NO: 357192 - DNA, 25 bp, Homo sapien
tgccagccaatagcacacacaagta

SEQ ID NO: 357193 - DNA, 25 bp, Homo sapien
acaagtacttcaccttcgctccagt

SEQ ID NO: 357194 - DNA, 25 bp, Homo sapien
gccgctgtcacagtgccagccaata

SEQ ID NO: 357195 - DNA, 25 bp, Homo sapien
cacctagaaggattagggagaggcc

SEQ ID NO: 357196 - DNA, 25 bp, Homo sapien
tttctagccccaaggggctgaggcc

SEQ ID NO: 357197 - DNA, 25 bp, Homo sapien
ctgaggcccagagcgcaggcctcct

SEQ ID NO: 357198 - DNA, 25 bp, Homo sapien
tctggctttgtcaggcccttttcta

SEQ ID NO: 357199 - DNA, 25 bp, Homo sapien
caggtgagtgcccccgaccctgctg

SEQ ID NO: 357200 - DNA, 25 bp, Homo sapien
tcgagcccggcggttagcgcccagg

SEQ ID NO: 357201 - DNA, 25 bp, Homo sapien
ccagctcgagcccggcggttagcgc

SEQ ID NO: 357202 - DNA, 25 bp, Homo sapien
gtgagtgcccccgaccctgctgccg

SEQ ID NO: 357203 - DNA, 25 bp, Homo sapien
gtcgtgcggacccggccagaccgta

SEQ ID NO: 357204 - DNA, 25 bp, Homo sapien
tcagtctccgcgcctgtgcaatggg

SEQ ID NO: 357205 - DNA, 25 bp, Homo sapien
aggtccccgacgggcgatcgtgcca

SEQ ID NO: 357206 - DNA, 25 bp, Homo sapien
tccagtgcggcttccgggcacccgg

SEQ ID NO: 357207 - DNA, 25 bp, Homo sapien
tctggcctcctaaatgcgatcgctt

SEQ ID NO: 357208 - DNA, 25 bp, Homo sapien
tggtaaattggaggtgcgcccctgc

SEQ ID NO: 357209 - DNA, 25 bp, Homo sapien
gacgcccagaaagtccggaacagga

SEQ ID NO: 357210 - DNA, 25 bp, Homo sapien
tttgctagaatgagccactcgtggg

SEQ ID NO: 357211 - DNA, 25 bp, Homo sapien
gggtccctgctctgttctggggcca

SEQ ID NO: 357212 - DNA, 25 bp, Homo sapien
cactgggtccctgctctgttctggg

SEQ ID NO: 357213 - DNA, 25 bp, Homo sapien
ttcactgggtccctgctctgttctg

SEQ ID NO: 357214 - DNA, 25 bp, Homo sapien
cggctttcactgggtccctgctctg

SEQ ID NO: 357215 - DNA, 25 bp, Homo sapien
cactgtgacggacggaggtctccca

SEQ ID NO: 357216 - DNA, 25 bp, Homo sapien
tttccactgtgacggacggaggtct

SEQ ID NO: 357217 - DNA, 25 bp, Homo sapien
gccggatgcggcactggcacttggc

SEQ ID NO: 357218 - DNA, 25 bp, Homo sapien
agtttccactgtgacggacggaggt

SEQ ID NO: 357219 - DNA, 25 bp, Homo sapien
ggctgttgattgtgttaaccagctt

SEQ ID NO: 357220 - DNA, 25 bp, Homo sapien
aaatgggcagtagtgtatgttttca

SEQ ID NO: 357221 - DNA, 25 bp, Homo sapien
tttatggagcccctgctaggtggtg

SEQ ID NO: 357222 - DNA, 25 bp, Homo sapien
cctgctgggttacactggagttgtg

SEQ ID NO: 357223 - DNA, 25 bp, Homo sapien
agatttgcatcctaacctcttaggg

SEQ ID NO: 357224 - DNA, 25 bp, Homo sapien
tggcgcctggtgtttccactggtga

SEQ ID NO: 357225 - DNA, 25 bp, Homo sapien
cgtgggtgtggtactcttttctgca

SEQ ID NO: 357226 - DNA, 25 bp, Homo sapien
aatagggcttctgactggcgcctgg

SEQ ID NO: 357227 - DNA, 25 bp, Homo sapien
ccagcctaggcccagttggtgatgg

SEQ ID NO: 357228 - DNA, 25 bp, Homo sapien
ttgaggctgctaccttgagattagg

SEQ ID NO: 357229 - DNA, 25 bp, Homo sapien
cccagaggccagatggttaaaggtt

SEQ ID NO: 357230 - DNA, 25 bp, Homo sapien
tagggagccgaacagagcagtgaca

SEQ ID NO: 357231 - DNA, 25 bp, Homo sapien
tcgtcatctacatctaaggctgttt

SEQ ID NO: 357232 - DNA, 25 bp, Homo sapien
cattatcgtcatctacatctaaggc

SEQ ID NO: 357233 - DNA, 25 bp, Homo sapien
cacagtcatcgtcattatcgtcatc

SEQ ID NO: 357234 - DNA, 25 bp, Homo sapien
ttagatttccgtgccacagtcatcg

SEQ ID NO: 357235 - DNA, 25 bp, Homo sapien
actggcatgggattcgcaatgatca

SEQ ID NO: 357236 - DNA, 25 bp, Homo sapien
tcatagttaggaaggcctttggtgg

SEQ ID NO: 357237 - DNA, 25 bp, Homo sapien
catgatgaaacatgtactggcatgg

SEQ ID NO: 357238 - DNA, 25 bp, Homo sapien
tacatgatggtgaatcaggtcgcag

SEQ ID NO: 357239 - DNA, 25 bp, Homo sapien
cactctgctcttcttggtcagccac

SEQ ID NO: 357240 - DNA, 25 bp, Homo sapien
ctgctcttcttggtcagccactgca

SEQ ID NO: 357241 - DNA, 25 bp, Homo sapien
agctcagtgacaccctcaggcctgg

SEQ ID NO: 357242 - DNA, 25 bp, Homo sapien
gttggaggagacagctcagtgacac

SEQ ID NO: 357243 - DNA, 25 bp, Homo sapien
gaccagaactgggttacatggttgt

SEQ ID NO: 357244 - DNA, 25 bp, Homo sapien
gaactgggttacatggttgtcacca

SEQ ID NO: 357245 - DNA, 25 bp, Homo sapien
tcattgaccagaactgggttacatg

SEQ ID NO: 357246 - DNA, 25 bp, Homo sapien
cctggctgtgtctactccctggcat

SEQ ID NO: 357247 - DNA, 25 bp, Homo sapien
agctctccgaggtggccatgcacag

SEQ ID NO: 357248 - DNA, 25 bp, Homo sapien
ggctatactgaaacccttggctgct

SEQ ID NO: 357249 - DNA, 25 bp, Homo sapien
ggtgctacgtgagctcggatcctag

SEQ ID NO: 357250 - DNA, 25 bp, Homo sapien
gagcccagatggtacatttccaccg

SEQ ID NO: 357251 - DNA, 25 bp, Homo sapien
taaaccccgagatagtgctggaaca

SEQ ID NO: 357252 - DNA, 25 bp, Homo sapien
ccctgtgtgatatgtgatgccctcg

SEQ ID NO: 357253 - DNA, 25 bp, Homo sapien
gatgccctcggcaaagaatctactg

SEQ ID NO: 357254 - DNA, 25 bp, Homo sapien
accggttaactgtggcctgtgccca

SEQ ID NO: 357255 - DNA, 25 bp, Homo sapien
gggagttttgtgatggttgcccagg

SEQ ID NO: 357256 - DNA, 25 bp, Homo sapien
gatgggagttttgtgatggttgccc

SEQ ID NO: 357257 - DNA, 25 bp, Homo sapien
gagatgggagttttgtgatggttgc

SEQ ID NO: 357258 - DNA, 25 bp, Homo sapien
gttttgtgatggttgcccaggttgg

SEQ ID NO: 357259 - DNA, 25 bp, Homo sapien
catacttaatattggcgcaggagct

SEQ ID NO: 357260 - DNA, 25 bp, Homo sapien
tgagatggcacacctgcctatggtg

SEQ ID NO: 357261 - DNA, 25 bp, Homo sapien
caaggacctttctaccagaacagag

SEQ ID NO: 357262 - DNA, 25 bp, Homo sapien
tatgtccataaatgtgggcctctgt

SEQ ID NO: 357263 - DNA, 25 bp, Homo sapien
caggtccacatgttcgagggtctgc

SEQ ID NO: 357264 - DNA, 25 bp, Homo sapien
ccacatgttcgagggtctgcagcac

SEQ ID NO: 357265 - DNA, 25 bp, Homo sapien
ggtccacatgttcgagggtctgcag

SEQ ID NO: 357266 - DNA, 25 bp, Homo sapien
gtccaggtccacatgttcgagggtc

SEQ ID NO: 357267 - DNA, 25 bp, Homo sapien
tgcctgtatctatgcgcgtggacgt

SEQ ID NO: 357268 - DNA, 25 bp, Homo sapien
tgtggaatgcgccactaaccggcaa

SEQ ID NO: 357269 - DNA, 25 bp, Homo sapien
tatatggcatgcatcgtctgctccc

SEQ ID NO: 357270 - DNA, 25 bp, Homo sapien
cctgccagggcctacttcgaaagtt

SEQ ID NO: 357271 - DNA, 25 bp, Homo sapien
gaggaattcttctggagaaaccgta

SEQ ID NO: 357272 - DNA, 25 bp, Homo sapien
gaattcttctggagaaaccgtagag

SEQ ID NO: 357273 - DNA, 25 bp, Homo sapien
ggaattcttctggagaaaccgtaga

SEQ ID NO: 357274 - DNA, 25 bp, Homo sapien
aattcttctggagaaaccgtagagc

SEQ ID NO: 357275 - DNA, 25 bp, Homo sapien
cctcgggcgagccaatagctccaaa

SEQ ID NO: 357276 - DNA, 25 bp, Homo sapien
ccatttcacaatgcagggtctagga

SEQ ID NO: 357277 - DNA, 25 bp, Homo sapien
ttagtctgtcagtgttccctagaga

SEQ ID NO: 357278 - DNA, 25 bp, Homo sapien
gaaggaaagagctctcctcttgatg

SEQ ID NO: 357279 - DNA, 25 bp, Homo sapien
gaaagaggtagttggacacttcaca

SEQ ID NO: 357280 - DNA, 25 bp, Homo sapien
gtcctgaaatcaccctgcaatctgg

SEQ ID NO: 357281 - DNA, 25 bp, Homo sapien
ttgaacttggactgaggctggccga

SEQ ID NO: 357282 - DNA, 25 bp, Homo sapien
taaagacttgcagtgttcccgggct

SEQ ID NO: 357283 - DNA, 25 bp, Homo sapien
catactctcgtgttgcaggtgctgc

SEQ ID NO: 357284 - DNA, 25 bp, Homo sapien
acaggatagcgggttagacagttca

SEQ ID NO: 357285 - DNA, 25 bp, Homo sapien
ggcagtgtcccttacccctaatgag

SEQ ID NO: 357286 - DNA, 25 bp, Homo sapien
gacagttcagcaagcagatttcatg

SEQ ID NO: 357287 - DNA, 25 bp, Homo sapien
ccagcagcagcaacacagttctcaa

SEQ ID NO: 357288 - DNA, 25 bp, Homo sapien
ttccatggctccggcaaacactagg

SEQ ID NO: 357289 - DNA, 25 bp, Homo sapien
gcagcagcaacacagttctcaatca

SEQ ID NO: 357290 - DNA, 25 bp, Homo sapien
ccatggctccggcaaacactagggc

SEQ ID NO: 357291 - DNA, 25 bp, Homo sapien
cctcctgtcacggggcctcgggcct

SEQ ID NO: 357292 - DNA, 25 bp, Homo sapien
tcctgtcacggggcctcgggcctca

SEQ ID NO: 357293 - DNA, 25 bp, Homo sapien
cctgtcacggggcctcgggcctcac

SEQ ID NO: 357294 - DNA, 25 bp, Homo sapien
ctcctgtcacggggcctcgggcctc

SEQ ID NO: 357295 - DNA, 25 bp, Homo sapien
ggtagttgagcagaccgcggcccat

SEQ ID NO: 357296 - DNA, 25 bp, Homo sapien
gatgccacgaagatcgcgggctgac

SEQ ID NO: 357297 - DNA, 25 bp, Homo sapien
cagcaggtcgtagcccagcacgcgg

SEQ ID NO: 357298 - DNA, 25 bp, Homo sapien
gatgtagtttctcgacagcggccag

SEQ ID NO: 357299 - DNA, 25 bp, Homo sapien
gccccggtcgcatctcgcagcagct

SEQ ID NO: 357300 - DNA, 25 bp, Homo sapien
ctacccgtgcgacccggacgctcat

SEQ ID NO: 357301 - DNA, 25 bp, Homo sapien
aagcccctgacccacgctacccgtg

SEQ ID NO: 357302 - DNA, 25 bp, Homo sapien
gaggcaccgggaagctcgaggcgcc

SEQ ID NO: 357303 - DNA, 25 bp, Homo sapien
gcccgcgcgcgttaccgtggcgacc

SEQ ID NO: 357304 - DNA, 25 bp, Homo sapien
acctgcccgcgcgcgttaccgtggc

SEQ ID NO: 357305 - DNA, 25 bp, Homo sapien
ctgcccgcgcgcgttaccgtggcga

SEQ ID NO: 357306 - DNA, 25 bp, Homo sapien
ccgcgcgcgttaccgtggcgaccga

SEQ ID NO: 357307 - DNA, 25 bp, Homo sapien
tgctagcaagaaacttacaggccag

SEQ ID NO: 357308 - DNA, 25 bp, Homo sapien
ggctttcccgatgctcaccggtgca

SEQ ID NO: 357309 - DNA, 25 bp, Homo sapien
tccaagacgcccagagttgaattcc

SEQ ID NO: 357310 - DNA, 25 bp, Homo sapien
ttgatgcccaacagatcacgctctg

SEQ ID NO: 357311 - DNA, 25 bp, Homo sapien
ttatcatgctgtctgactgtctcga

SEQ ID NO: 357312 - DNA, 25 bp, Homo sapien
accagctgttaagcttctggacaga

SEQ ID NO: 357313 - DNA, 25 bp, Homo sapien
cagagtccgtgtgagcatcagtcct

SEQ ID NO: 357314 - DNA, 25 bp, Homo sapien
tgagcatcagtcctgagacctgccc

SEQ ID NO: 357315 - DNA, 25 bp, Homo sapien
aggaccgaggctcccggccggcttg

SEQ ID NO: 357316 - DNA, 25 bp, Homo sapien
cagcacatggaaatcagactgtggg

SEQ ID NO: 357317 - DNA, 25 bp, Homo sapien
ccactagagctgtggggccactcga

SEQ ID NO: 357318 - DNA, 25 bp, Homo sapien
gtggaggcctgcgatataaaggcca

SEQ ID NO: 357319 - DNA, 25 bp, Homo sapien
gaagatggcctttattgcagcacga

SEQ ID NO: 357320 - DNA, 25 bp, Homo sapien
cctttattgcagcacgaactgaggg

SEQ ID NO: 357321 - DNA, 25 bp, Homo sapien
agagaagatggcctttattgcagca

SEQ ID NO: 357322 - DNA, 25 bp, Homo sapien
gatggcctttattgcagcacgaact

SEQ ID NO: 357323 - DNA, 25 bp, Homo sapien
gcccttggctaaactggagactcat

SEQ ID NO: 357324 - DNA, 25 bp, Homo sapien
tcccctcaggaagggtaacgcgtgc

SEQ ID NO: 357325 - DNA, 25 bp, Homo sapien
taatttcaaagaggagacaccgcta

SEQ ID NO: 357326 - DNA, 25 bp, Homo sapien
tgtgatacagggctcccaaacgctt

SEQ ID NO: 357327 - DNA, 25 bp, Homo sapien
ctagacaaggcaggtaacgtggcag

SEQ ID NO: 357328 - DNA, 25 bp, Homo sapien
gctcgctcacagtcggggttgaagt

SEQ ID NO: 357329 - DNA, 25 bp, Homo sapien
ctcacagtcggggttgaagttcacc

SEQ ID NO: 357330 - DNA, 25 bp, Homo sapien
caggtaacgtggcagccaccgggct

SEQ ID NO: 357331 - DNA, 25 bp, Homo sapien
gtgtgaaggctcgttggcctccact

SEQ ID NO: 357332 - DNA, 25 bp, Homo sapien
agagtgtgaaggctcgttggcctcc

SEQ ID NO: 357333 - DNA, 25 bp, Homo sapien
tggcaaagagcgcagcagagtgtga

SEQ ID NO: 357334 - DNA, 25 bp, Homo sapien
caaagagcgcagcagagtgtgaagg

SEQ ID NO: 357335 - DNA, 25 bp, Homo sapien
cacttcagcatgaggtcgacggcat

SEQ ID NO: 357336 - DNA, 25 bp, Homo sapien
ttcagcatgaggtcgacggcataca

SEQ ID NO: 357337 - DNA, 25 bp, Homo sapien
gtcccacttcagcatgaggtcgacg

SEQ ID NO: 357338 - DNA, 25 bp, Homo sapien
ccacttcagcatgaggtcgacggca

SEQ ID NO: 357339 - DNA, 25 bp, Homo sapien
ccgtgaaggcccggaagatctcagc

SEQ ID NO: 357340 - DNA, 25 bp, Homo sapien
gatgaggggtagtcgcagaggccca

SEQ ID NO: 357341 - DNA, 25 bp, Homo sapien
tggcccgggatgaggggtagtcgca

SEQ ID NO: 357342 - DNA, 25 bp, Homo sapien
aacagctccgtgaaggcccggaaga

SEQ ID NO: 357343 - DNA, 25 bp, Homo sapien
ctggacgtccgtccagggaaattct

SEQ ID NO: 357344 - DNA, 25 bp, Homo sapien
tctgggtattgcttctcaaactcgg

SEQ ID NO: 357345 - DNA, 25 bp, Homo sapien
tgcttctcaaactcggggatgaact

SEQ ID NO: 357346 - DNA, 25 bp, Homo sapien
tggacgtccgtccagggaaattctg

SEQ ID NO: 357347 - DNA, 25 bp, Homo sapien
gatgcaagatctttctggcctcaag

SEQ ID NO: 357348 - DNA, 25 bp, Homo sapien
gtaaactgactttgccacgcagctg

SEQ ID NO: 357349 - DNA, 25 bp, Homo sapien
gaacctgagggcgacttccaacaat

SEQ ID NO: 357350 - DNA, 25 bp, Homo sapien
gacaatgaacatcgagggctccaga

SEQ ID NO: 357351 - DNA, 25 bp, Homo sapien
aatcgccttccatagcaggaactca

SEQ ID NO: 357352 - DNA, 25 bp, Homo sapien
gatggcagcgctaacaatcgccttc

SEQ ID NO: 357353 - DNA, 25 bp, Homo sapien
gctaacaatcgccttccatagcagg

SEQ ID NO: 357354 - DNA, 25 bp, Homo sapien
ccttccatagcaggaactcaggagg

SEQ ID NO: 357355 - DNA, 25 bp, Homo sapien
catccaggtcgttgagtgcaaaggc

SEQ ID NO: 357356 - DNA, 25 bp, Homo sapien
cgtgaagtgcttctcgtagtcatcc

SEQ ID NO: 357357 - DNA, 25 bp, Homo sapien
tcatagttcatgaccgtgaagtgct

SEQ ID NO: 357358 - DNA, 25 bp, Homo sapien
caccacatccgggtcatagttcatg

SEQ ID NO: 357359 - DNA, 25 bp, Homo sapien
catccattactgtgggcaacaccag

SEQ ID NO: 357360 - DNA, 25 bp, Homo sapien
cattactgtgggcaacaccagaact

SEQ ID NO: 357361 - DNA, 25 bp, Homo sapien
tgttcacatccattactgtgggcaa

SEQ ID NO: 357362 - DNA, 25 bp, Homo sapien
catgttggtgcccattttacaaaga

SEQ ID NO: 357363 - DNA, 25 bp, Homo sapien
ttgacctttcccacgtcttctcgaa

SEQ ID NO: 357364 - DNA, 25 bp, Homo sapien
cacgggactttcgatgtacttggac

SEQ ID NO: 357365 - DNA, 25 bp, Homo sapien
cgatgtagcggatgtcgaacttgac

SEQ ID NO: 357366 - DNA, 25 bp, Homo sapien
acatcatacacgaacaaccgtaggg

SEQ ID NO: 357367 - DNA, 25 bp, Homo sapien
caggctgcgcgccaggttccagggc

SEQ ID NO: 357368 - DNA, 25 bp, Homo sapien
gcagatccagtggttgtcctcgccc

SEQ ID NO: 357369 - DNA, 25 bp, Homo sapien
tgacgtgggtgtccaggctgcgcgc

SEQ ID NO: 357370 - DNA, 25 bp, Homo sapien
tctcggtgccggatgatgctgtgca

SEQ ID NO: 357371 - DNA, 25 bp, Homo sapien
tgcccggcgcgcgatggaggccagg

SEQ ID NO: 357372 - DNA, 25 bp, Homo sapien
tggaagtagctgacaaactggggca

SEQ ID NO: 357373 - DNA, 25 bp, Homo sapien
ttgacagtcagcaggttctcgcagg

SEQ ID NO: 357374 - DNA, 25 bp, Homo sapien
ttctcgcaggggaactggttcagca

SEQ ID NO: 357375 - DNA, 25 bp, Homo sapien
ggatgtcggcgtccgcctcactctg

SEQ ID NO: 357376 - DNA, 25 bp, Homo sapien
ccacctgctgcacgtccgtgtagac

SEQ ID NO: 357377 - DNA, 25 bp, Homo sapien
gaagttgaagaggatgtcggcgtcc

SEQ ID NO: 357378 - DNA, 25 bp, Homo sapien
tagtccttgaagtgtgagaagttga

SEQ ID NO: 357379 - DNA, 25 bp, Homo sapien
tcagcaagagcccctgggctgccca

SEQ ID NO: 357380 - DNA, 25 bp, Homo sapien
gtctcagcaagagcccctgggctgc

SEQ ID NO: 357381 - DNA, 25 bp, Homo sapien
cagcaagagcccctgggctgcccag

SEQ ID NO: 357382 - DNA, 25 bp, Homo sapien
tctcagcaagagcccctgggctgcc

SEQ ID NO: 357383 - DNA, 25 bp, Homo sapien
actccctgcacgtgtcactgctgtg

SEQ ID NO: 357384 - DNA, 25 bp, Homo sapien
actgctgtgcccagacaggatgcgg

SEQ ID NO: 357385 - DNA, 25 bp, Homo sapien
tgggaaccacgaagcatgggaggcg

SEQ ID NO: 357386 - DNA, 25 bp, Homo sapien
gctgcgtgccacgtgccaagcactg

SEQ ID NO: 357387 - DNA, 25 bp, Homo sapien
tgggggtgcaccacggggttgatgt

SEQ ID NO: 357388 - DNA, 25 bp, Homo sapien
accacggggttgatgtcaagtggca

SEQ ID NO: 357389 - DNA, 25 bp, Homo sapien
cgtgggggtgcaccacggggttgat

SEQ ID NO: 357390 - DNA, 25 bp, Homo sapien
gtgcaccacggggttgatgtcaagt

SEQ ID NO: 357391 - DNA, 25 bp, Homo sapien
gaaaccctccgaggcacttagtgag

SEQ ID NO: 357392 - DNA, 25 bp, Homo sapien
cttagtgagcgcctggtgtgcaaaa

SEQ ID NO: 357393 - DNA, 25 bp, Homo sapien
aaaggatgacttcagtcgccgtggg

SEQ ID NO: 357394 - DNA, 25 bp, Homo sapien
tctcacatgggtcaactcgtctaac

SEQ ID NO: 357395 - DNA, 25 bp, Homo sapien
tttgttatcaataacagtgaccatg

SEQ ID NO: 357396 - DNA, 25 bp, Homo sapien
gtgaccatgatggtaactcgcaggc

SEQ ID NO: 357397 - DNA, 25 bp, Homo sapien
tccagccaggcactaccgagtgggc

SEQ ID NO: 357398 - DNA, 25 bp, Homo sapien
ccctgaccaagactgaaagcacctt

SEQ ID NO: 357399 - DNA, 25 bp, Homo sapien
atcagggggtccgtctctccgtagg

SEQ ID NO: 357400 - DNA, 25 bp, Homo sapien
ccgtaggcaaagtctcgggtcacct

SEQ ID NO: 357401 - DNA, 25 bp, Homo sapien
cgggcggctcgggtgtgcaagagct

SEQ ID NO: 357402 - DNA, 25 bp, Homo sapien
catgcacttccggatcagggggtcc

SEQ ID NO: 357403 - DNA, 25 bp, Homo sapien
gaaccgaactcgtccatgatatacc

SEQ ID NO: 357404 - DNA, 25 bp, Homo sapien
cacctgctgcggcatgtagaagaag

SEQ ID NO: 357405 - DNA, 25 bp, Homo sapien
aagaagggtgccgtggcgaagctgg

SEQ ID NO: 357406 - DNA, 25 bp, Homo sapien
gcacgtccgcgtgctggatccgcga

SEQ ID NO: 357407 - DNA, 25 bp, Homo sapien
ggtaggtctggttgaacttccacat

SEQ ID NO: 357408 - DNA, 25 bp, Homo sapien
atcaggttggccatgcggtgcagca

SEQ ID NO: 357409 - DNA, 25 bp, Homo sapien
ctctgtactgggcagctcaccgtgg

SEQ ID NO: 357410 - DNA, 25 bp, Homo sapien
accgtggaactcaatgcccatcagg

SEQ ID NO: 357411 - DNA, 25 bp, Homo sapien
ctgcgggcacaggccacaatgtgag

SEQ ID NO: 357412 - DNA, 25 bp, Homo sapien
tgcgggcacaggccacaatgtgagg

SEQ ID NO: 357413 - DNA, 25 bp, Homo sapien
tgagctgctacagaagcatgctggg

SEQ ID NO: 357414 - DNA, 25 bp, Homo sapien
tggcacaggatcaactgtccctacc

SEQ ID NO: 357415 - DNA, 25 bp, Homo sapien
gctctccctggtcacgatgaccttg

SEQ ID NO: 357416 - DNA, 25 bp, Homo sapien
tcctccacttgcatgatcccaaaca

SEQ ID NO: 357417 - DNA, 25 bp, Homo sapien
tgaccttgtagcacagctcgttccc

SEQ ID NO: 357418 - DNA, 25 bp, Homo sapien
cgttccccgggttgggctgctgctt

SEQ ID NO: 357419 - DNA, 25 bp, Homo sapien
gtcatccagagcctcgtcccacagg

SEQ ID NO: 357420 - DNA, 25 bp, Homo sapien
atccagagcctcgtcccacaggatg

SEQ ID NO: 357421 - DNA, 25 bp, Homo sapien
accgtcacctgagctgtcatccaga

SEQ ID NO: 357422 - DNA, 25 bp, Homo sapien
cccaccgtcacctgagctgtcatcc

SEQ ID NO: 357423 - DNA, 25 bp, Homo sapien
gacccccgaagcgcgcagcgccggg

SEQ ID NO: 357424 - DNA, 25 bp, Homo sapien
cggggacccccgaagcgcgcagcgc

SEQ ID NO: 357425 - DNA, 25 bp, Homo sapien
ttcggggacccccgaagcgcgcagc

SEQ ID NO: 357426 - DNA, 25 bp, Homo sapien
gggacccccgaagcgcgcagcgccg

SEQ ID NO: 357427 - DNA, 25 bp, Homo sapien
ctacgctccgcaggccggcgctcgg

SEQ ID NO: 357428 - DNA, 25 bp, Homo sapien
ctgctacgctccgcaggccggcgct

SEQ ID NO: 357429 - DNA, 25 bp, Homo sapien
tgctacgctccgcaggccggcgctc

SEQ ID NO: 357430 - DNA, 25 bp, Homo sapien
tacgctccgcaggccggcgctcggg

SEQ ID NO: 357431 - DNA, 25 bp, Homo sapien
gcgccagcacccgcgccgactccag

SEQ ID NO: 357432 - DNA, 25 bp, Homo sapien
agcacccgcgccgactccagcgccg

SEQ ID NO: 357433 - DNA, 25 bp, Homo sapien
ggcgccagcacccgcgccgactcca

SEQ ID NO: 357434 - DNA, 25 bp, Homo sapien
gccagcacccgcgccgactccagcg

SEQ ID NO: 357435 - DNA, 25 bp, Homo sapien
aacaaaactgaatatttgtggcaac

SEQ ID NO: 357436 - DNA, 25 bp, Homo sapien
tatttgtggcaactaaaaggaagat

SEQ ID NO: 357437 - DNA, 25 bp, Homo sapien
tatttgccacttgcaggcagagtcg

SEQ ID NO: 357438 - DNA, 25 bp, Homo sapien
caagcgtctggacaatacagtgccc

SEQ ID NO: 357439 - DNA, 25 bp, Homo sapien
tgttccccgagcaatgtggcctgcg

SEQ ID NO: 357440 - DNA, 25 bp, Homo sapien
tcacgtcggcacagtgagtaccctg

SEQ ID NO: 357441 - DNA, 25 bp, Homo sapien
gacactcggcaagggcacttgagcc

SEQ ID NO: 357442 - DNA, 25 bp, Homo sapien
cagaagtgaagtctgcgggccgcta

SEQ ID NO: 357443 - DNA, 25 bp, Homo sapien
caggtgcagtttgccagggtgacca

SEQ ID NO: 357444 - DNA, 25 bp, Homo sapien
tgcctgcggatggtgcgtctcttaa

SEQ ID NO: 357445 - DNA, 25 bp, Homo sapien
gaatgatgtcggctcggcatggaca

SEQ ID NO: 357446 - DNA, 25 bp, Homo sapien
gaataggaggcgctctctgctctct

SEQ ID NO: 357447 - DNA, 25 bp, Homo sapien
ctggctgtcttcgaaaccctgctgc

SEQ ID NO: 357448 - DNA, 25 bp, Homo sapien
cctggctgtcttcgaaaccctgctg

SEQ ID NO: 357449 - DNA, 25 bp, Homo sapien
gcctggctgtcttcgaaaccctgct

SEQ ID NO: 357450 - DNA, 25 bp, Homo sapien
ggcctggctgtcttcgaaaccctgc

SEQ ID NO: 357451 - DNA, 25 bp, Homo sapien
gggaagctgtgcgggagacaccccg

SEQ ID NO: 357452 - DNA, 25 bp, Homo sapien
agctgtgcgggagacaccccggttt

SEQ ID NO: 357453 - DNA, 25 bp, Homo sapien
aagctgtgcgggagacaccccggtt

SEQ ID NO: 357454 - DNA, 25 bp, Homo sapien
gaagctgtgcgggagacaccccggt

SEQ ID NO: 357455 - DNA, 25 bp, Homo sapien
gaagaaatgcgctttgctgtccacg

SEQ ID NO: 357456 - DNA, 25 bp, Homo sapien
gcttcgacaacatgccaactggaag

SEQ ID NO: 357457 - DNA, 25 bp, Homo sapien
aacatgccaactggaagaaatgcgc

SEQ ID NO: 357458 - DNA, 25 bp, Homo sapien
tgcgctttgctgtccacggagctca

SEQ ID NO: 357459 - DNA, 25 bp, Homo sapien
tctgtgagtacgtgggtggcaactt

SEQ ID NO: 357460 - DNA, 25 bp, Homo sapien
ccaaaggaattgcagaaagagctca

SEQ ID NO: 357461 - DNA, 25 bp, Homo sapien
tgatgtggagactcaagacagagcc

SEQ ID NO: 357462 - DNA, 25 bp, Homo sapien
cccaagttccctggtgtgagactga

SEQ ID NO: 357463 - DNA, 25 bp, Homo sapien
caatcgcagacagccgatcgtggga

SEQ ID NO: 357464 - DNA, 25 bp, Homo sapien
tcagactgagttacggtgtggcttc

SEQ ID NO: 357465 - DNA, 25 bp, Homo sapien
cacatctacgtctgtatcctctggg

SEQ ID NO: 357466 - DNA, 25 bp, Homo sapien
ggtgaacggatacccagctagctgg

SEQ ID NO: 357467 - DNA, 25 bp, Homo sapien
ccctggcagggcttgttagttgaca

SEQ ID NO: 357468 - DNA, 25 bp, Homo sapien
gaatatgtgatcacggcctacctcg

SEQ ID NO: 357469 - DNA, 25 bp, Homo sapien
aaccgtgtttgtttctcgccagcca

SEQ ID NO: 357470 - DNA, 25 bp, Homo sapien
tgactgacggctccacaaagggagg

SEQ ID NO: 357471 - DNA, 25 bp, Homo sapien
ggtcctacagctcgcaggcagatga

SEQ ID NO: 357472 - DNA, 25 bp, Homo sapien
atgcactcggtcacagcccagactc

SEQ ID NO: 357473 - DNA, 25 bp, Homo sapien
ggcgctggccttccggctgggtggg

SEQ ID NO: 357474 - DNA, 25 bp, Homo sapien
ctcggcatggggttctgctggctcc

SEQ ID NO: 357475 - DNA, 25 bp, Homo sapien
gggtggcatggcgtagcaagaggag

SEQ ID NO: 357476 - DNA, 25 bp, Homo sapien
tggcatggcgtagcaagaggaggct

SEQ ID NO: 357477 - DNA, 25 bp, Homo sapien
agcctgtgctcctgtgagcaaggcc

SEQ ID NO: 357478 - DNA, 25 bp, Homo sapien
tggccgctctgaggctccttgtggt

SEQ ID NO: 357479 - DNA, 25 bp, Homo sapien
ccaagggcagtgatgttgctggcaa

SEQ ID NO: 357480 - DNA, 25 bp, Homo sapien
tccactgagtctcgtccaagggcag

SEQ ID NO: 357481 - DNA, 25 bp, Homo sapien
gagcctagttctcgaagaattcgtg

SEQ ID NO: 357482 - DNA, 25 bp, Homo sapien
gaattcgtgttcagaagcaagtcca

SEQ ID NO: 357483 - DNA, 25 bp, Homo sapien
tggactcctgtctcggatgaccacg

SEQ ID NO: 357484 - DNA, 25 bp, Homo sapien
taatcgttcagggaggctgatagct

SEQ ID NO: 357485 - DNA, 25 bp, Homo sapien
catatttacagtgaccaaagggcat

SEQ ID NO: 357486 - DNA, 25 bp, Homo sapien
tgctacctgcagtcggtctgccagg

SEQ ID NO: 357487 - DNA, 25 bp, Homo sapien
ggaccgtgggaacatctccttggat

SEQ ID NO: 357488 - DNA, 25 bp, Homo sapien
tttgtagggccgcaggaaccgagac

SEQ ID NO: 357489 - DNA, 25 bp, Homo sapien
gaaccgagacactttggagcgcagc

SEQ ID NO: 357490 - DNA, 25 bp, Homo sapien
gagcgcagcagtttgatgaaggacc

SEQ ID NO: 357491 - DNA, 25 bp, Homo sapien
ttctccgaggcgtacaggcgcccat

SEQ ID NO: 357492 - DNA, 25 bp, Homo sapien
gatgtcctctatgagttgctggtag

SEQ ID NO: 357493 - DNA, 25 bp, Homo sapien
tcctggtggttctccgaggcgtaca

SEQ ID NO: 357494 - DNA, 25 bp, Homo sapien
tacaggcgcccatcgcgcacgatgt

SEQ ID NO: 357495 - DNA, 25 bp, Homo sapien
gacagtgttcgttctgcttccaggt

SEQ ID NO: 357496 - DNA, 25 bp, Homo sapien
gggacgtgcgactcatctctgtgtc

SEQ ID NO: 357497 - DNA, 25 bp, Homo sapien
aaaaccctgcttgggcagcacctca

SEQ ID NO: 357498 - DNA, 25 bp, Homo sapien
gcagaggccactaaccgctgtcttg

SEQ ID NO: 357499 - DNA, 25 bp, Homo sapien
gacatagggcacttggaagcctttg

SEQ ID NO: 357500 - DNA, 25 bp, Homo sapien
aactggatccagagcttgcgggagc

SEQ ID NO: 357501 - DNA, 25 bp, Homo sapien
tttgccgctgttgccttcattggat

SEQ ID NO: 357502 - DNA, 25 bp, Homo sapien
cgatgggcctctcgtaggtctggca

SEQ ID NO: 357503 - DNA, 25 bp, Homo sapien
ggtatttggctggtgctcgggtggc

SEQ ID NO: 357504 - DNA, 25 bp, Homo sapien
gacaggtgcgctgcaggtatttggc

SEQ ID NO: 357505 - DNA, 25 bp, Homo sapien
ggtgcgctgcaggtatttggctggt

SEQ ID NO: 357506 - DNA, 25 bp, Homo sapien
gtatttggctggtgctcgggtggct

SEQ ID NO: 357507 - DNA, 25 bp, Homo sapien
attcagcgttggctgggtagtcgcc

SEQ ID NO: 357508 - DNA, 25 bp, Homo sapien
ggcgcgatgtgccagacgcattcag

SEQ ID NO: 357509 - DNA, 25 bp, Homo sapien
tagccggtgtagtcaccaagctcgc

SEQ ID NO: 357510 - DNA, 25 bp, Homo sapien
gaccacgatgaggatcctgcgcttt

SEQ ID NO: 357511 - DNA, 25 bp, Homo sapien
tgtgctggtgttgcccggacaggtg

SEQ ID NO: 357512 - DNA, 25 bp, Homo sapien
acaggtgatgcagtggttctggcca

SEQ ID NO: 357513 - DNA, 25 bp, Homo sapien
tgacgttggtggagccatcgaagtc

SEQ ID NO: 357514 - DNA, 25 bp, Homo sapien
caaactcgggctggtaggtgccgac

SEQ ID NO: 357515 - DNA, 25 bp, Homo sapien
tgccttcgtgtttggtgagcaaacc

SEQ ID NO: 357516 - DNA, 25 bp, Homo sapien
gaaggaggtggtgccttcgtgtttg

SEQ ID NO: 357517 - DNA, 25 bp, Homo sapien
tgtttggtgagcaaaccccctccac

SEQ ID NO: 357518 - DNA, 25 bp, Homo sapien
ttgaagccatcggccgagaagaagc

SEQ ID NO: 357519 - DNA, 25 bp, Homo sapien
ctgaaagtcagaggtcatggctcag

SEQ ID NO: 357520 - DNA, 25 bp, Homo sapien
agaggtcatggctcaggcgggcagg

SEQ ID NO: 357521 - DNA, 25 bp, Homo sapien
cagaggtcatggctcaggcgggcag

SEQ ID NO: 357522 - DNA, 25 bp, Homo sapien
aaagtcagaggtcatggctcaggcg

SEQ ID NO: 357523 - DNA, 25 bp, Homo sapien
tgatgccagcggttcatgtgcggcc

SEQ ID NO: 357524 - DNA, 25 bp, Homo sapien
gtgcggccttggtcaagcctggctc

SEQ ID NO: 357525 - DNA, 25 bp, Homo sapien
ctgggccctggtccggatgatgcca

SEQ ID NO: 357526 - DNA, 25 bp, Homo sapien
ggccttggtcaagcctggctctcct

SEQ ID NO: 357527 - DNA, 25 bp, Homo sapien
tccacattccgacacgttgcgggca

SEQ ID NO: 357528 - DNA, 25 bp, Homo sapien
attccgacacgttgcgggcaccagg

SEQ ID NO: 357529 - DNA, 25 bp, Homo sapien
acggtgtgcaactgagctggccttc

SEQ ID NO: 357530 - DNA, 25 bp, Homo sapien
gcacggtgtgcaactgagctggcct

SEQ ID NO: 357531 - DNA, 25 bp, Homo sapien
atacatgacacacactggccgagct

SEQ ID NO: 357532 - DNA, 25 bp, Homo sapien
gctcaccaccgaagtgggtgccagg

SEQ ID NO: 357533 - DNA, 25 bp, Homo sapien
ctggcatacatgacacacactggcc

SEQ ID NO: 357534 - DNA, 25 bp, Homo sapien
actggccgagctcaccaccgaagtg

SEQ ID NO: 357535 - DNA, 25 bp, Homo sapien
cccctgtccttcctgagtggaggag

SEQ ID NO: 357536 - DNA, 25 bp, Homo sapien
tctccacccgcttatagaagcctgt

SEQ ID NO: 357537 - DNA, 25 bp, Homo sapien
tggatatgctacagtcatttcaccc

SEQ ID NO: 357538 - DNA, 25 bp, Homo sapien
tgcctcctggatgtcgccacttgga

SEQ ID NO: 357539 - DNA, 25 bp, Homo sapien
tggccacccactttcctacaggaga

SEQ ID NO: 357540 - DNA, 25 bp, Homo sapien
gcctagaggcagtggtactccagga

SEQ ID NO: 357541 - DNA, 25 bp, Homo sapien
taacatcaggaatggatcaccacgc

SEQ ID NO: 357542 - DNA, 25 bp, Homo sapien
gagcgccgaactaaataacatcagg

SEQ ID NO: 357543 - DNA, 25 bp, Homo sapien
ggctctgttctgctcgcttccgcaa

SEQ ID NO: 357544 - DNA, 25 bp, Homo sapien
gagacctggacatagaactgctgcc

SEQ ID NO: 357545 - DNA, 25 bp, Homo sapien
gctacctcgtactcagtgcctgaga

SEQ ID NO: 357546 - DNA, 25 bp, Homo sapien
tccgcaagcagtccgcttcgcatgt

SEQ ID NO: 357547 - DNA, 25 bp, Homo sapien
ttccatctttgtctcgatctcaaac

SEQ ID NO: 357548 - DNA, 25 bp, Homo sapien
catctttgtctcgatctcaaactct

SEQ ID NO: 357549 - DNA, 25 bp, Homo sapien
gaggagtcacacttgagggtcacga

SEQ ID NO: 357550 - DNA, 25 bp, Homo sapien
acttgagggtcacgaaagtcacatg

SEQ ID NO: 357551 - DNA, 25 bp, Homo sapien
agcagcggctgcctggcggtctcct

SEQ ID NO: 357552 - DNA, 25 bp, Homo sapien
ggcggtctcctttgctcgtgcctgg

SEQ ID NO: 357553 - DNA, 25 bp, Homo sapien
gcagcggctgcctggcggtctcctt

SEQ ID NO: 357554 - DNA, 25 bp, Homo sapien
cagcagcggctgcctggcggtctcc

SEQ ID NO: 357555 - DNA, 25 bp, Homo sapien
ttgaagcgggccttctgtttgatgg

SEQ ID NO: 357556 - DNA, 25 bp, Homo sapien
cttggcatctcggatcttgaagcgg

SEQ ID NO: 357557 - DNA, 25 bp, Homo sapien
tcggatcttgaagcgggccttctgt

SEQ ID NO: 357558 - DNA, 25 bp, Homo sapien
catctcggatcttgaagcgggcctt

SEQ ID NO: 357559 - DNA, 25 bp, Homo sapien
gcaggcaaggaggtggtgggggacg

SEQ ID NO: 357560 - DNA, 25 bp, Homo sapien
tgcaggcaaggaggtggtgggggac

SEQ ID NO: 357561 - DNA, 25 bp, Homo sapien
ctgcaggcaaggaggtggtggggga

SEQ ID NO: 357562 - DNA, 25 bp, Homo sapien
caggcaaggaggtggtgggggacgg

SEQ ID NO: 357563 - DNA, 25 bp, Homo sapien
catgcagcatggacaggccgggggg

SEQ ID NO: 357564 - DNA, 25 bp, Homo sapien
gcagcatggacaggccgggggggtt

SEQ ID NO: 357565 - DNA, 25 bp, Homo sapien
tgcagcatggacaggccgggggggt

SEQ ID NO: 357566 - DNA, 25 bp, Homo sapien
cagcatggacaggccgggggggtta

SEQ ID NO: 357567 - DNA, 25 bp, Homo sapien
gctcaggacgtagctattttccgag

SEQ ID NO: 357568 - DNA, 25 bp, Homo sapien
tccgcagctcaggacgtagctattt

SEQ ID NO: 357569 - DNA, 25 bp, Homo sapien
ggccctggaactccgcagctcagga

SEQ ID NO: 357570 - DNA, 25 bp, Homo sapien
gaactccgcagctcaggacgtagct

SEQ ID NO: 357571 - DNA, 25 bp, Homo sapien
ctggcacgaagagtgtgtgagccgg

SEQ ID NO: 357572 - DNA, 25 bp, Homo sapien
ggcgcgagaaagacacttgcctgtc

SEQ ID NO: 357573 - DNA, 25 bp, Homo sapien
tcttggcgcgagaaagacacttgcc

SEQ ID NO: 357574 - DNA, 25 bp, Homo sapien
aggtcttggcgcgagaaagacactt

SEQ ID NO: 357575 - DNA, 25 bp, Homo sapien
tgctttgttagcaagtgggcctctg

SEQ ID NO: 357576 - DNA, 25 bp, Homo sapien
gggcaccgtgtgacaacactctgag

SEQ ID NO: 357577 - DNA, 25 bp, Homo sapien
tagaaacccttgcttcccagtgtcc

SEQ ID NO: 357578 - DNA, 25 bp, Homo sapien
tgattgctttctgcgagggcaccgt

SEQ ID NO: 357579 - DNA, 25 bp, Homo sapien
cttgtgttcggagacacacatttac

SEQ ID NO: 357580 - DNA, 25 bp, Homo sapien
ttgtgttcggagacacacatttacc

SEQ ID NO: 357581 - DNA, 25 bp, Homo sapien
gtcacagctcccgttgctcatgctg

SEQ ID NO: 357582 - DNA, 25 bp, Homo sapien
tggtgttgacgcagccctggtcaca

SEQ ID NO: 357583 - DNA, 25 bp, Homo sapien
gacgcactcgtagctgcccttggtg

SEQ ID NO: 357584 - DNA, 25 bp, Homo sapien
aatccttcccgttccagtggagccg

SEQ ID NO: 357585 - DNA, 25 bp, Homo sapien
gaggtggccctggcgggcaggctgc

SEQ ID NO: 357586 - DNA, 25 bp, Homo sapien
gtggccctggcgggcaggctgcaga

SEQ ID NO: 357587 - DNA, 25 bp, Homo sapien
gggaggtggccctggcgggcaggct

SEQ ID NO: 357588 - DNA, 25 bp, Homo sapien
ccaggcgcgtgcctcgggggggagg

SEQ ID NO: 357589 - DNA, 25 bp, Homo sapien
tagaggatgtagccgcggtgacaca

SEQ ID NO: 357590 - DNA, 25 bp, Homo sapien
ttgtcccgtagaggatgtagccgcg

SEQ ID NO: 357591 - DNA, 25 bp, Homo sapien
gatgtagccgcggtgacacaggcac

SEQ ID NO: 357592 - DNA, 25 bp, Homo sapien
tagccgcggtgacacaggcactgga

SEQ ID NO: 357593 - DNA, 25 bp, Homo sapien
tgtggtcacaggtccgctcgaagga

SEQ ID NO: 357594 - DNA, 25 bp, Homo sapien
tcacaggtccgctcgaaggagcact

SEQ ID NO: 357595 - DNA, 25 bp, Homo sapien
agatgtggtcacaggtccgctcgaa

SEQ ID NO: 357596 - DNA, 25 bp, Homo sapien
gcagatgtggtcacaggtccgctcg

SEQ ID NO: 357597 - DNA, 25 bp, Homo sapien
ggccgggattcttggcttctgccca

SEQ ID NO: 357598 - DNA, 25 bp, Homo sapien
tgtgcaacgctttccaacagatggc

SEQ ID NO: 357599 - DNA, 25 bp, Homo sapien
cactagactcttcctgggccgggat

SEQ ID NO: 357600 - DNA, 25 bp, Homo sapien
tatccttgttcccagcaggtgagga

SEQ ID NO: 357601 - DNA, 25 bp, Homo sapien
agaagtggtcgcagcctccgttgtt

SEQ ID NO: 357602 - DNA, 25 bp, Homo sapien
gagcagcttgtagcccttccggcag

SEQ ID NO: 357603 - DNA, 25 bp, Homo sapien
ctgcccacggtgttgcggcagaagt

SEQ ID NO: 357604 - DNA, 25 bp, Homo sapien
ttccggcagccgcactcgaagctgc

SEQ ID NO: 357605 - DNA, 25 bp, Homo sapien
agcaaaaaggaggtagcggaagagg

SEQ ID NO: 357606 - DNA, 25 bp, Homo sapien
gcaaaaaggaggtagcggaagaggc

SEQ ID NO: 357607 - DNA, 25 bp, Homo sapien
gctttcagaaaacgtggagcctttg

SEQ ID NO: 357608 - DNA, 25 bp, Homo sapien
tctctcctttgagatcctccccaga

SEQ ID NO: 357609 - DNA, 25 bp, Homo sapien
gcccgctgtgacctttgttctccag

SEQ ID NO: 357610 - DNA, 25 bp, Homo sapien
agccctgggttgtccaagcccgctg

SEQ ID NO: 357611 - DNA, 25 bp, Homo sapien
catgagtagacctgtgtgtcccaga

SEQ ID NO: 357612 - DNA, 25 bp, Homo sapien
gaagtcccacagtagagacgctggc

SEQ ID NO: 357613 - DNA, 25 bp, Homo sapien
ttcaaataaacaggcggaagcactg

SEQ ID NO: 357614 - DNA, 25 bp, Homo sapien
aacctgctgatgtgccgtgggacct

SEQ ID NO: 357615 - DNA, 25 bp, Homo sapien
agccctgggcccggctatgcaagca

SEQ ID NO: 357616 - DNA, 25 bp, Homo sapien
caagcacacggaggctcttggccag

SEQ ID NO: 357617 - DNA, 25 bp, Homo sapien
caggccagtacaggcaggggcaccc

SEQ ID NO: 357618 - DNA, 25 bp, Homo sapien
gggcccggctatgcaagcacacgga

SEQ ID NO: 357619 - DNA, 25 bp, Homo sapien
agctgcatcgcacgccagtggctgt

SEQ ID NO: 357620 - DNA, 25 bp, Homo sapien
gtccggctgcagtgtgaatccaacg

SEQ ID NO: 357621 - DNA, 25 bp, Homo sapien
gtccttgcatgtccggtcgcagcct

SEQ ID NO: 357622 - DNA, 25 bp, Homo sapien
cctccgttattgactgcgcacgtct

SEQ ID NO: 357623 - DNA, 25 bp, Homo sapien
aaggcatctggtttttgtccacttg

SEQ ID NO: 357624 - DNA, 25 bp, Homo sapien
gatgaggctttcagcccaacatctg

SEQ ID NO: 357625 - DNA, 25 bp, Homo sapien
tccacttgaagcttgtctagtgctt

SEQ ID NO: 357626 - DNA, 25 bp, Homo sapien
catctgttctcactgagtgatatgc

SEQ ID NO: 357627 - DNA, 25 bp, Homo sapien
gtgggcagagaatgtgcctgttttc

SEQ ID NO: 357628 - DNA, 25 bp, Homo sapien
cccacgcccgaatccaggagccaat

SEQ ID NO: 357629 - DNA, 25 bp, Homo sapien
tcctgcctcccacgcccgaatccag

SEQ ID NO: 357630 - DNA, 25 bp, Homo sapien
gggcagagaatgtgcctgttttcca

SEQ ID NO: 357631 - DNA, 25 bp, Homo sapien
attatggcctcatgaggaatctccc

SEQ ID NO: 357632 - DNA, 25 bp, Homo sapien
atggcctcatgaggaatctccccca

SEQ ID NO: 357633 - DNA, 25 bp, Homo sapien
caggggctgacattatggcctcatg

SEQ ID NO: 357634 - DNA, 25 bp, Homo sapien
gcctcatgaggaatctcccccaccc

SEQ ID NO: 357635 - DNA, 25 bp, Homo sapien
cgtgaggtctgcacccgctggtgcc

SEQ ID NO: 357636 - DNA, 25 bp, Homo sapien
tgaggtctgcacccgctggtgccct

SEQ ID NO: 357637 - DNA, 25 bp, Homo sapien
gtgaggtctgcacccgctggtgccc

SEQ ID NO: 357638 - DNA, 25 bp, Homo sapien
aggtctgcacccgctggtgccctgg

SEQ ID NO: 357639 - DNA, 25 bp, Homo sapien
tgtgtgtgcagaggcctctcccact

SEQ ID NO: 357640 - DNA, 25 bp, Homo sapien
tgggcttctgccccacagggcagcg

SEQ ID NO: 357641 - DNA, 25 bp, Homo sapien
ttctgccccacagggcagcgctgtc

SEQ ID NO: 357642 - DNA, 25 bp, Homo sapien
ccccacagggcagcgctgtctgtgt

SEQ ID NO: 357643 - DNA, 25 bp, Homo sapien
gcagcgtcaaggtgaccagcacggc

SEQ ID NO: 357644 - DNA, 25 bp, Homo sapien
ccagcacggcggaggtgtctaatga

SEQ ID NO: 357645 - DNA, 25 bp, Homo sapien
tctaatgagttgtgctcaatgacta

SEQ ID NO: 357646 - DNA, 25 bp, Homo sapien
aatgactagattaatgagcagggac

SEQ ID NO: 357647 - DNA, 25 bp, Homo sapien
aagaggaacagaagcaagtctggga

SEQ ID NO: 357648 - DNA, 25 bp, Homo sapien
ccaagaggaacagaagcaagtctgg

SEQ ID NO: 357649 - DNA, 25 bp, Homo sapien
caagaggaacagaagcaagtctggg

SEQ ID NO: 357650 - DNA, 25 bp, Homo sapien
agaatcaacagaagctgcggtgaaa

SEQ ID NO: 357651 - DNA, 25 bp, Homo sapien
gaatcaacagaagctgcggtgaaaa

SEQ ID NO: 357652 - DNA, 25 bp, Homo sapien
tggccggcccttccggcagatctgg

SEQ ID NO: 357653 - DNA, 25 bp, Homo sapien
ggattggccggcccttccggcagat

SEQ ID NO: 357654 - DNA, 25 bp, Homo sapien
ttcccacagctggctgctgaaccct

SEQ ID NO: 357655 - DNA, 25 bp, Homo sapien
ctctgaccatcttcccacagctggc

SEQ ID NO: 357656 - DNA, 25 bp, Homo sapien
cacagctggctgctgaaccctccat

SEQ ID NO: 357657 - DNA, 25 bp, Homo sapien
tcccacagctggctgctgaaccctc

SEQ ID NO: 357658 - DNA, 25 bp, Homo sapien
acagctacgctcaggaggtcttggg

SEQ ID NO: 357659 - DNA, 25 bp, Homo sapien
tgtccaagagcagtgatttctcctc

SEQ ID NO: 357660 - DNA, 25 bp, Homo sapien
gaaccgactgatagagaagaacgag

SEQ ID NO: 357661 - DNA, 25 bp, Homo sapien
tcacatcggtgcctgatcagccctg

SEQ ID NO: 357662 - DNA, 25 bp, Homo sapien
tgagaagtaggtggctttttccctg

SEQ ID NO: 357663 - DNA, 25 bp, Homo sapien
ctgagaagtaggtggctttttccct

SEQ ID NO: 357664 - DNA, 25 bp, Homo sapien
tgacgtggcattgaactgagagcgc

SEQ ID NO: 357665 - DNA, 25 bp, Homo sapien
gaactgagagcgctcaattgcagcc

SEQ ID NO: 357666 - DNA, 25 bp, Homo sapien
gagcgctcaattgcagcctcatcct

SEQ ID NO: 357667 - DNA, 25 bp, Homo sapien
tgtccacatcagctactgacgtggc

SEQ ID NO: 357668 - DNA, 25 bp, Homo sapien
accgtctgagtggagggcgtacttc

SEQ ID NO: 357669 - DNA, 25 bp, Homo sapien
cgatgcacgtgcgaccgtctgagtg

SEQ ID NO: 357670 - DNA, 25 bp, Homo sapien
gagggcgtacttctggtggcaacca

SEQ ID NO: 357671 - DNA, 25 bp, Homo sapien
tacttctggtggcaaccacacgtgg

SEQ ID NO: 357672 - DNA, 25 bp, Homo sapien
gcagcctccgtttccataattacag

SEQ ID NO: 357673 - DNA, 25 bp, Homo sapien
ctggcagcctccgtttccataatta

SEQ ID NO: 357674 - DNA, 25 bp, Homo sapien
ggcagcctccgtttccataattaca

SEQ ID NO: 357675 - DNA, 25 bp, Homo sapien
agcctccgtttccataattacaggt

SEQ ID NO: 357676 - DNA, 25 bp, Homo sapien
tcagtgcctcagatgctgtccgctg

SEQ ID NO: 357677 - DNA, 25 bp, Homo sapien
ggacacatgccgtctccacagcggg

SEQ ID NO: 357678 - DNA, 25 bp, Homo sapien
agaaaatggcttgatatggggacag

SEQ ID NO: 357679 - DNA, 25 bp, Homo sapien
gcgggcgaggaggatgtcaagaaaa

SEQ ID NO: 357680 - DNA, 25 bp, Homo sapien
catcgggctctccataccttggtga

SEQ ID NO: 357681 - DNA, 25 bp, Homo sapien
catattccaggcaagggttgagccc

SEQ ID NO: 357682 - DNA, 25 bp, Homo sapien
gaatgcactgtccttctggccaggg

SEQ ID NO: 357683 - DNA, 25 bp, Homo sapien
tcaaggactagagcgaatgcctcag

SEQ ID NO: 357684 - DNA, 25 bp, Homo sapien
tcaaagccgggcctgcagtcgcagg

SEQ ID NO: 357685 - DNA, 25 bp, Homo sapien
agatgtgggcacagccatggtcttt

SEQ ID NO: 357686 - DNA, 25 bp, Homo sapien
ttgggcaaggtcaaagccgggcctg

SEQ ID NO: 357687 - DNA, 25 bp, Homo sapien
agtcgcaggccaccccacctttggg

SEQ ID NO: 357688 - DNA, 25 bp, Homo sapien
cgttactgacagctgttgtcggcgg

SEQ ID NO: 357689 - DNA, 25 bp, Homo sapien
tgagtccagggtcgcccccttcatc

SEQ ID NO: 357690 - DNA, 25 bp, Homo sapien
ttactgacagctgttgtcggcggtg

SEQ ID NO: 357691 - DNA, 25 bp, Homo sapien
gctgagtccagggtcgcccccttca

SEQ ID NO: 357692 - DNA, 25 bp, Homo sapien
cagctgagaacgctgagcgcacaga

SEQ ID NO: 357693 - DNA, 25 bp, Homo sapien
tgggccgggaacataccctgcaaag

SEQ ID NO: 357694 - DNA, 25 bp, Homo sapien
tgggtccatccacaagctacttcat

SEQ ID NO: 357695 - DNA, 25 bp, Homo sapien
ggagctgcaacacactgtctcgcca

SEQ ID NO: 357696 - DNA, 25 bp, Homo sapien
gcctttacaacatcgccctgcaggg

SEQ ID NO: 357697 - DNA, 25 bp, Homo sapien
tagctttatccccatgtagcagaag

SEQ ID NO: 357698 - DNA, 25 bp, Homo sapien
gagcgatttgcctgtggtcactgag

SEQ ID NO: 357699 - DNA, 25 bp, Homo sapien
tgtccttcttcgagccctgggtgag

SEQ ID NO: 357700 - DNA, 25 bp, Homo sapien
aagagtccacatcttgtattatctg

SEQ ID NO: 357701 - DNA, 25 bp, Homo sapien
gagtccacatcttgtattatctggc

SEQ ID NO: 357702 - DNA, 25 bp, Homo sapien
ggctcccaacgccttccacgttcaa

SEQ ID NO: 357703 - DNA, 25 bp, Homo sapien
tgtattatctggctcccaacgcctt

SEQ ID NO: 357704 - DNA, 25 bp, Homo sapien
tgtggacacacgaacaggaggatct

SEQ ID NO: 357705 - DNA, 25 bp, Homo sapien
gaccctaaaggaagccatggcggac

SEQ ID NO: 357706 - DNA, 25 bp, Homo sapien
cactcaacagacaaacgtgtgggcg

SEQ ID NO: 357707 - DNA, 25 bp, Homo sapien
cagtaggtacgtttggatcatcggc

SEQ ID NO: 357708 - DNA, 25 bp, Homo sapien
gcagacctgcaagctgaccagctgt

SEQ ID NO: 357709 - DNA, 25 bp, Homo sapien
agcaaaccacgacgcgctgggcgtc

SEQ ID NO: 357710 - DNA, 25 bp, Homo sapien
ggcactttgtgaacggatgatgcac

SEQ ID NO: 357711 - DNA, 25 bp, Homo sapien
gggtctctgcgcttctgacagacaa

SEQ ID NO: 357712 - DNA, 25 bp, Homo sapien
gacgtgcacgcctgcctaagagtca

SEQ ID NO: 357713 - DNA, 25 bp, Homo sapien
gtaatcagtaaagggcacgtgtgcc

SEQ ID NO: 357714 - DNA, 25 bp, Homo sapien
cacgtgtgccgtaacagggagaaca

SEQ ID NO: 357715 - DNA, 25 bp, Homo sapien
tacatgctgaaagagtctggtgaca

SEQ ID NO: 357716 - DNA, 25 bp, Homo sapien
tctgtccccatcaatctgcttctta

SEQ ID NO: 357717 - DNA, 25 bp, Homo sapien
gcttcttatacaacctgttgggctc

SEQ ID NO: 357718 - DNA, 25 bp, Homo sapien
ccatcaatctgcttcttatacaacc

SEQ ID NO: 357719 - DNA, 25 bp, Homo sapien
atctgcttcttatacaacctgttgg

SEQ ID NO: 357720 - DNA, 25 bp, Homo sapien
tagtgtagcaggtagagggaaggaa

SEQ ID NO: 357721 - DNA, 25 bp, Homo sapien
ctagtgtagcaggtagagggaagga

SEQ ID NO: 357722 - DNA, 25 bp, Homo sapien
tggcattgacgcagatctgctggca

SEQ ID NO: 357723 - DNA, 25 bp, Homo sapien
ctgacactcgtagctgcccatggca

SEQ ID NO: 357724 - DNA, 25 bp, Homo sapien
ccactgtggcactgacactcgtagc

SEQ ID NO: 357725 - DNA, 25 bp, Homo sapien
ccattattgtcctgacactcgtcca

SEQ ID NO: 357726 - DNA, 25 bp, Homo sapien
aatgctgcgaagagccggctgctcc

SEQ ID NO: 357727 - DNA, 25 bp, Homo sapien
gctgcgaagagccggctgctcctca

SEQ ID NO: 357728 - DNA, 25 bp, Homo sapien
caatgctgcgaagagccggctgctc

SEQ ID NO: 357729 - DNA, 25 bp, Homo sapien
atgctgcgaagagccggctgctcct

SEQ ID NO: 357730 - DNA, 25 bp, Homo sapien
ccagtgtcaacttgagcacgtgcac

SEQ ID NO: 357731 - DNA, 25 bp, Homo sapien
cagcttgccgtgaggagcatcggga

SEQ ID NO: 357732 - DNA, 25 bp, Homo sapien
aacttgagcacgtgcacgtcagccc

SEQ ID NO: 357733 - DNA, 25 bp, Homo sapien
agcacgtgcacgtcagccccagatg

SEQ ID NO: 357734 - DNA, 25 bp, Homo sapien
gaggcgaagtacaagctgctttgag

SEQ ID NO: 357735 - DNA, 25 bp, Homo sapien
gaagaggcgaagtacaagctgcttt

SEQ ID NO: 357736 - DNA, 25 bp, Homo sapien
ggcgaagtacaagctgctttgagga

SEQ ID NO: 357737 - DNA, 25 bp, Homo sapien
gaagtacaagctgctttgaggacag

SEQ ID NO: 357738 - DNA, 25 bp, Homo sapien
cagctgtctggaccggcgtggttga

SEQ ID NO: 357739 - DNA, 25 bp, Homo sapien
gcctcttttgatgtacaactgtatc

SEQ ID NO: 357740 - DNA, 25 bp, Homo sapien
ccctcttccgggccaaggctgaaat

SEQ ID NO: 357741 - DNA, 25 bp, Homo sapien
tgtgattgtgccatcgaaccgccgg

SEQ ID NO: 357742 - DNA, 25 bp, Homo sapien
gctgactttttccacgccaccttgc

SEQ ID NO: 357743 - DNA, 25 bp, Homo sapien
ctgactttttccacgccaccttgcc

SEQ ID NO: 357744 - DNA, 25 bp, Homo sapien
tgactttttccacgccaccttgccc

SEQ ID NO: 357745 - DNA, 25 bp, Homo sapien
tgctgactttttccacgccaccttg

SEQ ID NO: 357746 - DNA, 25 bp, Homo sapien
gacatgaaaacgcttgctctattgg

SEQ ID NO: 357747 - DNA, 25 bp, Homo sapien
tctgtataattattgcacgtgtggc

SEQ ID NO: 357748 - DNA, 25 bp, Homo sapien
cacgtgtggctgatggataagtaaa

SEQ ID NO: 357749 - DNA, 25 bp, Homo sapien
tggacacggacatcaggacatgaaa

SEQ ID NO: 357750 - DNA, 25 bp, Homo sapien
ttgtctcccgttcagccacagcgtg

SEQ ID NO: 357751 - DNA, 25 bp, Homo sapien
ccaggtcacgggatgctggaaggag

SEQ ID NO: 357752 - DNA, 25 bp, Homo sapien
aggacacggaaaagagctgagctgc

SEQ ID NO: 357753 - DNA, 25 bp, Homo sapien
cagaggctccaggaactttgcagag

SEQ ID NO: 357754 - DNA, 25 bp, Homo sapien
aacatctggctaagtgaactaatgg

SEQ ID NO: 357755 - DNA, 25 bp, Homo sapien
tggctaagtgaactaatggctttag

SEQ ID NO: 357756 - DNA, 25 bp, Homo sapien
gggtcgaagaaaacatctggctaag

SEQ ID NO: 357757 - DNA, 25 bp, Homo sapien
tcaaggtaaagatcggggtcgaaga

SEQ ID NO: 357758 - DNA, 25 bp, Homo sapien
ggagacagagaaccttccaacaact

SEQ ID NO: 357759 - DNA, 25 bp, Homo sapien
agaggcagccaagaatgcacaaggc

SEQ ID NO: 357760 - DNA, 25 bp, Homo sapien
aatgcacaaggcagcggagacagag

SEQ ID NO: 357761 - DNA, 25 bp, Homo sapien
cagagaaccttccaacaactcagtg

SEQ ID NO: 357762 - DNA, 25 bp, Homo sapien
ggacactgggagtacttgctgtagc

SEQ ID NO: 357763 - DNA, 25 bp, Homo sapien
ctgggagtacttgctgtagccaaga

SEQ ID NO: 357764 - DNA, 25 bp, Homo sapien
ctagtctgcaggctgctggcgtcag

SEQ ID NO: 357765 - DNA, 25 bp, Homo sapien
cactgggagtacttgctgtagccaa

SEQ ID NO: 357766 - DNA, 25 bp, Homo sapien
ctaaggctaacaccccattaagagg

SEQ ID NO: 357767 - DNA, 25 bp, Homo sapien
ttatctgacatccaacatgggttgg

SEQ ID NO: 357768 - DNA, 25 bp, Homo sapien
aaaacaggcaggcaggtctaaggct

SEQ ID NO: 357769 - DNA, 25 bp, Homo sapien
gggaaagttccagagcactcaggac

SEQ ID NO: 357770 - DNA, 25 bp, Homo sapien
ggtaaggtggcgggtcaagcctgta

SEQ ID NO: 357771 - DNA, 25 bp, Homo sapien
aagtaatgcctgaggtaaggtggcg

SEQ ID NO: 357772 - DNA, 25 bp, Homo sapien
gtaatgcctgaggtaaggtggcggg

SEQ ID NO: 357773 - DNA, 25 bp, Homo sapien
ctgaagtaatgcctgaggtaaggtg

SEQ ID NO: 357774 - DNA, 25 bp, Homo sapien
cagttgtgtccatcgtgtgccagca

SEQ ID NO: 357775 - DNA, 25 bp, Homo sapien
tgttgatgcactcgtggacacagcc

SEQ ID NO: 357776 - DNA, 25 bp, Homo sapien
acacctgtagttccccgggatgttg

SEQ ID NO: 357777 - DNA, 25 bp, Homo sapien
tgtgccagcatgaagccatcaaagc

SEQ ID NO: 357778 - DNA, 25 bp, Homo sapien
accggaagtgcagcactaagtggaa

SEQ ID NO: 357779 - DNA, 25 bp, Homo sapien
agtgcagcactaagtggaaccggaa

SEQ ID NO: 357780 - DNA, 25 bp, Homo sapien
tgcagcactaagtggaaccggaagt

SEQ ID NO: 357781 - DNA, 25 bp, Homo sapien
ggaagtgcagcactaagtggaaccg

SEQ ID NO: 357782 - DNA, 25 bp, Homo sapien
tcgggactgactagaaacattctca

SEQ ID NO: 357783 - DNA, 25 bp, Homo sapien
gatcctattgcaatgaatcagagag

SEQ ID NO: 357784 - DNA, 25 bp, Homo sapien
cagtggagaccaaacgctctaacaa

SEQ ID NO: 357785 - DNA, 25 bp, Homo sapien
tactctcggagatcattactgaaaa

SEQ ID NO: 357786 - DNA, 25 bp, Homo sapien
atgcaaaggccggagaggcccacag

SEQ ID NO: 357787 - DNA, 25 bp, Homo sapien
gccacatagggctgggacccggtct

SEQ ID NO: 357788 - DNA, 25 bp, Homo sapien
agactgaggccagcattgggcgcca

SEQ ID NO: 357789 - DNA, 25 bp, Homo sapien
ttgggcgccatggaaacgaggagca

SEQ ID NO: 357790 - DNA, 25 bp, Homo sapien
gacacactcccagctccacttccct

SEQ ID NO: 357791 - DNA, 25 bp, Homo sapien
ggacacactcccagctccacttccc

SEQ ID NO: 357792 - DNA, 25 bp, Homo sapien
gagataggggggtcaaccatggccc

SEQ ID NO: 357793 - DNA, 25 bp, Homo sapien
gcagagataggggggtcaaccatgg

SEQ ID NO: 357794 - DNA, 25 bp, Homo sapien
ccagcagagataggggggtcaacca

SEQ ID NO: 357795 - DNA, 25 bp, Homo sapien
accagcagagataggggggtcaacc

SEQ ID NO: 357796 - DNA, 25 bp, Homo sapien
tgggcgtgttctgacagatggcatc

SEQ ID NO: 357797 - DNA, 25 bp, Homo sapien
ccccttgtagcctggcttgcagagg

SEQ ID NO: 357798 - DNA, 25 bp, Homo sapien
gcatttgtaggacttgggcgtgttc

SEQ ID NO: 357799 - DNA, 25 bp, Homo sapien
catcgatgtggcagtcatctgtgcc

SEQ ID NO: 357800 - DNA, 25 bp, Homo sapien
agggccagcagcacgcacaagtgcc

SEQ ID NO: 357801 - DNA, 25 bp, Homo sapien
agcagcacgcacaagtgccagcgca

SEQ ID NO: 357802 - DNA, 25 bp, Homo sapien
ccagccgcccgcgtgtgcccagggc

SEQ ID NO: 357803 - DNA, 25 bp, Homo sapien
cggccagccgcccgcgtgtgcccag

SEQ ID NO: 357804 - DNA, 25 bp, Homo sapien
gggcgtgcgggcgtgcggggcgcgg

SEQ ID NO: 357805 - DNA, 25 bp, Homo sapien
gtgcgggcgtgcggggcgcggggac

SEQ ID NO: 357806 - DNA, 25 bp, Homo sapien
ctgggcgtgcgggcgtgcggggcgc

SEQ ID NO: 357807 - DNA, 25 bp, Homo sapien
gcgtgcgggcgtgcggggcgcgggg

SEQ ID NO: 357808 - DNA, 25 bp, Homo sapien
cggcctccggccctccgaggaagag

SEQ ID NO: 357809 - DNA, 25 bp, Homo sapien
ctcattggcccgtggcgtcggaggg

SEQ ID NO: 357810 - DNA, 25 bp, Homo sapien
gggcgtcgcccagggccggccaatg

SEQ ID NO: 357811 - DNA, 25 bp, Homo sapien
tgatgagctgacagcgcgcgctcat

SEQ ID NO: 357812 - DNA, 25 bp, Homo sapien
gcctcgggggcggggatcctgcgaa

SEQ ID NO: 357813 - DNA, 25 bp, Homo sapien
ctcccggcccagaggcagcctcggg

SEQ ID NO: 357814 - DNA, 25 bp, Homo sapien
cccagaggcagcctcgggggcgggg

SEQ ID NO: 357815 - DNA, 25 bp, Homo sapien
ggcagcctcgggggcggggatcctg

SEQ ID NO: 357816 - DNA, 25 bp, Homo sapien
gggatcccgtgaggtcgcccgccat

SEQ ID NO: 357817 - DNA, 25 bp, Homo sapien
tgcgctgccgtttgctggacgtttc

SEQ ID NO: 357818 - DNA, 25 bp, Homo sapien
atccgtgggcagtgaaacgcgccag

SEQ ID NO: 357819 - DNA, 25 bp, Homo sapien
agcgcgcagagcagactcgcctgcg

SEQ ID NO: 357820 - DNA, 25 bp, Homo sapien
cagtggcccgtcagtgtgcttgtca

SEQ ID NO: 357821 - DNA, 25 bp, Homo sapien
acaatgccgcttggcggtcggtccc

SEQ ID NO: 357822 - DNA, 25 bp, Homo sapien
cgcaggacctgcgtctggaaccggg

SEQ ID NO: 357823 - DNA, 25 bp, Homo sapien
ttagcactcgtcaaaggacagtggc

SEQ ID NO: 357824 - DNA, 25 bp, Homo sapien
gcgaagttcgctgcccggaatgcga

SEQ ID NO: 357825 - DNA, 25 bp, Homo sapien
ctccccctgtgacagaccgggcggg

SEQ ID NO: 357826 - DNA, 25 bp, Homo sapien
ttcgctgcccggaatgcgaggccga

SEQ ID NO: 357827 - DNA, 25 bp, Homo sapien
ctcggccggcgaagttcgctgcccg

SEQ ID NO: 357828 - DNA, 25 bp, Homo sapien
gagtgaatccaactgcctactccgt

SEQ ID NO: 357829 - DNA, 25 bp, Homo sapien
ccaaaggaggatttaagccaaatct

SEQ ID NO: 357830 - DNA, 25 bp, Homo sapien
tccaaccagtaggatggcagtcgtc

SEQ ID NO: 357831 - DNA, 25 bp, Homo sapien
tggctatttgacagggtcttgagag

SEQ ID NO: 357832 - DNA, 25 bp, Homo sapien
aacgtgtatgagagccagctgttgg

SEQ ID NO: 357833 - DNA, 25 bp, Homo sapien
ttcttctgacaacgtgtatgagagc

SEQ ID NO: 357834 - DNA, 25 bp, Homo sapien
tgacaacgtgtatgagagccagctg

SEQ ID NO: 357835 - DNA, 25 bp, Homo sapien
tctgacaacgtgtatgagagccagc

SEQ ID NO: 357836 - DNA, 25 bp, Homo sapien
tcattagcgtgtgaggtgacagccc

SEQ ID NO: 357837 - DNA, 25 bp, Homo sapien
gggaggacccctcatttgcaactga

SEQ ID NO: 357838 - DNA, 25 bp, Homo sapien
tgctgggatcgtcaaccaatctggg

SEQ ID NO: 357839 - DNA, 25 bp, Homo sapien
gacatcgataggtcaagcccagcag

SEQ ID NO: 357840 - DNA, 25 bp, Homo sapien
gccagagggtgtctcccaagtcaaa

SEQ ID NO: 357841 - DNA, 25 bp, Homo sapien
ggccagagggtgtctcccaagtcaa

SEQ ID NO: 357842 - DNA, 25 bp, Homo sapien
ccagagggtgtctcccaagtcaaag

SEQ ID NO: 357843 - DNA, 25 bp, Homo sapien
tgggaccacgttggcactggtcagc

SEQ ID NO: 357844 - DNA, 25 bp, Homo sapien
tgaacgtgagcttcagatgggctgt

SEQ ID NO: 357845 - DNA, 25 bp, Homo sapien
tgtcctgggcccgtgggtggctgtg

SEQ ID NO: 357846 - DNA, 25 bp, Homo sapien
gcaccaatgactgccgccaaagaga

SEQ ID NO: 357847 - DNA, 25 bp, Homo sapien
cagagacgcaaggacacagtgccca

SEQ ID NO: 357848 - DNA, 25 bp, Homo sapien
ttgatccagagacgcaaggacacag

SEQ ID NO: 357849 - DNA, 25 bp, Homo sapien
tctgggttgatccagagacgcaagg

SEQ ID NO: 357850 - DNA, 25 bp, Homo sapien
tgggttgatccagagacgcaaggac

SEQ ID NO: 357851 - DNA, 25 bp, Homo sapien
gtgtggagaagtggggtaccaagta

SEQ ID NO: 357852 - DNA, 25 bp, Homo sapien
gggtaccaagtagagggctcttgag

SEQ ID NO: 357853 - DNA, 25 bp, Homo sapien
tggagaagtggggtaccaagtagag

SEQ ID NO: 357854 - DNA, 25 bp, Homo sapien
agtggggtaccaagtagagggctct

SEQ ID NO: 357855 - DNA, 25 bp, Homo sapien
agggacgtaattgcctctgggagcc

SEQ ID NO: 357856 - DNA, 25 bp, Homo sapien
tctttcacagggagataccagcttc

SEQ ID NO: 357857 - DNA, 25 bp, Homo sapien
gctttgagataaccatccaaacttc

SEQ ID NO: 357858 - DNA, 25 bp, Homo sapien
tctgtggcaagctttgagataacca

SEQ ID NO: 357859 - DNA, 25 bp, Homo sapien
ataatggcttccgttttagggtgct

SEQ ID NO: 357860 - DNA, 25 bp, Homo sapien
attggataatggcttccgttttagg

SEQ ID NO: 357861 - DNA, 25 bp, Homo sapien
tttcccaggatcctctgtctgatgc

SEQ ID NO: 357862 - DNA, 25 bp, Homo sapien
tctgatgcatcctggtgcatgctgt

SEQ ID NO: 357863 - DNA, 25 bp, Homo sapien
gatgcaggtcccatagtgcatagca

SEQ ID NO: 357864 - DNA, 25 bp, Homo sapien
tggagatgcaggtcccatagtgcat

SEQ ID NO: 357865 - DNA, 25 bp, Homo sapien
ggtagtaggaatggagatgcaggtc

SEQ ID NO: 357866 - DNA, 25 bp, Homo sapien
caggtcccatagtgcatagcatggg

SEQ ID NO: 357867 - DNA, 25 bp, Homo sapien
tggccgtgggccaaggtcgaggaca

SEQ ID NO: 357868 - DNA, 25 bp, Homo sapien
ccgtgggccaaggtcgaggacagag

SEQ ID NO: 357869 - DNA, 25 bp, Homo sapien
gtgggccaaggtcgaggacagagca

SEQ ID NO: 357870 - DNA, 25 bp, Homo sapien
cactggccgtgggccaaggtcgagg

SEQ ID NO: 357871 - DNA, 25 bp, Homo sapien
ctggaagaagctgcccgctctgagc

SEQ ID NO: 357872 - DNA, 25 bp, Homo sapien
tctgcacccccgaacattcgctgca

SEQ ID NO: 357873 - DNA, 25 bp, Homo sapien
cccgaacattcgctgcagggtctgc

SEQ ID NO: 357874 - DNA, 25 bp, Homo sapien
ttggtcctggccaggacactcgtgc

SEQ ID NO: 357875 - DNA, 25 bp, Homo sapien
aactgtgacagtgtgagctgccact

SEQ ID NO: 357876 - DNA, 25 bp, Homo sapien
tcagactcatgagctgttaaatggc

SEQ ID NO: 357877 - DNA, 25 bp, Homo sapien
tgcacggcccttgaggtagggatta

SEQ ID NO: 357878 - DNA, 25 bp, Homo sapien
cagacctggtatctagaactgtgac

SEQ ID NO: 357879 - DNA, 25 bp, Homo sapien
ggtgagcatggagcccattttccca

SEQ ID NO: 357880 - DNA, 25 bp, Homo sapien
ggctatttgaaactccccagacata

SEQ ID NO: 357881 - DNA, 25 bp, Homo sapien
tactgcctcaggacgcctttctgga

SEQ ID NO: 357882 - DNA, 25 bp, Homo sapien
gcacatgcactttggagcctctgag

SEQ ID NO: 357883 - DNA, 25 bp, Homo sapien
cagcacgtagtaggcgcctaggaaa

SEQ ID NO: 357884 - DNA, 25 bp, Homo sapien
aatgttttccagcagaacgagccat

SEQ ID NO: 357885 - DNA, 25 bp, Homo sapien
cgtagtaggcgcctaggaaatgttt

SEQ ID NO: 357886 - DNA, 25 bp, Homo sapien
cacgtagtaggcgcctaggaaatgt

SEQ ID NO: 357887 - DNA, 25 bp, Homo sapien
tgccagtgatgatgatagtggtaac

SEQ ID NO: 357888 - DNA, 25 bp, Homo sapien
gctggcggagtagctggtggaagca

SEQ ID NO: 357889 - DNA, 25 bp, Homo sapien
gtggtaacaatagcagcccccgctt

SEQ ID NO: 357890 - DNA, 25 bp, Homo sapien
agagcctactgtgtgcgctgccaag

SEQ ID NO: 357891 - DNA, 25 bp, Homo sapien
tctgatgtaaccaccccgtggtacg

SEQ ID NO: 357892 - DNA, 25 bp, Homo sapien
accctggctgatgccccgtgggcta

SEQ ID NO: 357893 - DNA, 25 bp, Homo sapien
ttagaatcactcacatccaccctgg

SEQ ID NO: 357894 - DNA, 25 bp, Homo sapien
ccaccccgtggtacgcttagaatca

SEQ ID NO: 357895 - DNA, 25 bp, Homo sapien
gcgttatccctggattgtctgtcaa

SEQ ID NO: 357896 - DNA, 25 bp, Homo sapien
taagggtggaatttctgcgttatcc

SEQ ID NO: 357897 - DNA, 25 bp, Homo sapien
ctggattgtctgtcaaagtctttaa

SEQ ID NO: 357898 - DNA, 25 bp, Homo sapien
gaatttctgcgttatccctggattg

SEQ ID NO: 357899 - DNA, 25 bp, Homo sapien
taagtacctttgtctgcctgccctt

SEQ ID NO: 357900 - DNA, 25 bp, Homo sapien
gagatctttccgttcagcaataagt

SEQ ID NO: 357901 - DNA, 25 bp, Homo sapien
tccgttcagcaataagtacctttgt

SEQ ID NO: 357902 - DNA, 25 bp, Homo sapien
cctttgtctgcctgcccttctggag

SEQ ID NO: 357903 - DNA, 25 bp, Homo sapien
ggtagtgaggcatcggaggaggttt

SEQ ID NO: 357904 - DNA, 25 bp, Homo sapien
agagagatggtagtgaggcatcgga

SEQ ID NO: 357905 - DNA, 25 bp, Homo sapien
gcatcggaggaggtttttgcaaaag

SEQ ID NO: 357906 - DNA, 25 bp, Homo sapien
tgaggcatcggaggaggtttttgca

SEQ ID NO: 357907 - DNA, 25 bp, Homo sapien
cacagccggctcatcatcgaggtgg

SEQ ID NO: 357908 - DNA, 25 bp, Homo sapien
gtggacgagtacagctccaacccca

SEQ ID NO: 357909 - DNA, 25 bp, Homo sapien
agtcccacgtgatggccgctcggcg

SEQ ID NO: 357910 - DNA, 25 bp, Homo sapien
ctctaggtgggatgccagcgtcctg

SEQ ID NO: 357911 - DNA, 25 bp, Homo sapien
tgatgtggtcatgtccgtggacctg

SEQ ID NO: 357912 - DNA, 25 bp, Homo sapien
ggagccatgatgtggtcatgtccgt

SEQ ID NO: 357913 - DNA, 25 bp, Homo sapien
ttccccattgcagggcttatctggg

SEQ ID NO: 357914 - DNA, 25 bp, Homo sapien
tgcagggcttatctgggtttcagag

SEQ ID NO: 357915 - DNA, 25 bp, Homo sapien
ccttcgctgagagcagcttagcgga

SEQ ID NO: 357916 - DNA, 25 bp, Homo sapien
tcagggaggccgtttgtggaccctc

SEQ ID NO: 357917 - DNA, 25 bp, Homo sapien
cagccggtgttgggccttcgctgag

SEQ ID NO: 357918 - DNA, 25 bp, Homo sapien
tggaccctcaggtgcagccggtgtt

SEQ ID NO: 357919 - DNA, 25 bp, Homo sapien
agcagtccccgttcacctggtgcag

SEQ ID NO: 357920 - DNA, 25 bp, Homo sapien
ggccagcagtccccgttcacctggt

SEQ ID NO: 357921 - DNA, 25 bp, Homo sapien
ccagcagtccccgttcacctggtgc

SEQ ID NO: 357922 - DNA, 25 bp, Homo sapien
ttaggactatgtcgcctggttgcag

SEQ ID NO: 357923 - DNA, 25 bp, Homo sapien
cactagtggtgctgtcacgtggtag

SEQ ID NO: 357924 - DNA, 25 bp, Homo sapien
tgaatttgtccagggtactgcacca

SEQ ID NO: 357925 - DNA, 25 bp, Homo sapien
ggtaggtgccgcctgaatgcatcag

SEQ ID NO: 357926 - DNA, 25 bp, Homo sapien
tgcttatgcaggatgtgtagacagc

SEQ ID NO: 357927 - DNA, 25 bp, Homo sapien
caggcttgcagccatcattccccag

SEQ ID NO: 357928 - DNA, 25 bp, Homo sapien
aggcttgcagccatcattccccagg

SEQ ID NO: 357929 - DNA, 25 bp, Homo sapien
agccccgaggcacaggagacagagc

SEQ ID NO: 357930 - DNA, 25 bp, Homo sapien
caggcagccccgaggcacaggagac

SEQ ID NO: 357931 - DNA, 25 bp, Homo sapien
ccagtatttgcgaagtatttgcgaa

SEQ ID NO: 357932 - DNA, 25 bp, Homo sapien
ggtttgcggacccagcgaacacatg

SEQ ID NO: 357933 - DNA, 25 bp, Homo sapien
cctgcgggcgcaggaaccagcgtgg

SEQ ID NO: 357934 - DNA, 25 bp, Homo sapien
tatttgcgaagcaagaagtgaccgt

SEQ ID NO: 357935 - DNA, 25 bp, Homo sapien
cagctataatagaaaagccgccgtg

SEQ ID NO: 357936 - DNA, 25 bp, Homo sapien
gggtgcccccgatcgcaataacagt

SEQ ID NO: 357937 - DNA, 25 bp, Homo sapien
agccgccgtggaaacgtcttcttgg

SEQ ID NO: 357938 - DNA, 25 bp, Homo sapien
cgcaataacagtctgggtgcaccat

SEQ ID NO: 357939 - DNA, 25 bp, Homo sapien
tagtgattgctctatggtttataaa

SEQ ID NO: 357940 - DNA, 25 bp, Homo sapien
taatacactgtgacagattttgctt

SEQ ID NO: 357941 - DNA, 25 bp, Homo sapien
tatatcatattgcttcacatgcagt

SEQ ID NO: 357942 - DNA, 25 bp, Homo sapien
ccatccctcgtgcttgttgttgtac

SEQ ID NO: 357943 - DNA, 25 bp, Homo sapien
gaatctactgatgagcgagcctgtc

SEQ ID NO: 357944 - DNA, 25 bp, Homo sapien
tatattctgcgatttttccccactc

SEQ ID NO: 357945 - DNA, 25 bp, Homo sapien
taggtttagatacatgctattgacc

SEQ ID NO: 357946 - DNA, 25 bp, Homo sapien
tagaccatcttatactgtcccacag

SEQ ID NO: 357947 - DNA, 25 bp, Homo sapien
ttatagtgtcaagaatcattcttgc

SEQ ID NO: 357948 - DNA, 25 bp, Homo sapien
tcctatgccagaacccagggcagct

SEQ ID NO: 357949 - DNA, 25 bp, Homo sapien
ggagagcaagcatcctatgccagaa

SEQ ID NO: 357950 - DNA, 25 bp, Homo sapien
ccaagacatagtggtagcacctggc

SEQ ID NO: 357951 - DNA, 25 bp, Homo sapien
aaattataggattttattagccttg

SEQ ID NO: 357952 - DNA, 25 bp, Homo sapien
aacaggccctgtggctgtcgtcccg

SEQ ID NO: 357953 - DNA, 25 bp, Homo sapien
tgtggctgtcgtcccgctgggcaca

SEQ ID NO: 357954 - DNA, 25 bp, Homo sapien
tttattagccttgaaacaggccctg

SEQ ID NO: 357955 - DNA, 25 bp, Homo sapien
ggaagtcgttgtaggagatttttga

SEQ ID NO: 357956 - DNA, 25 bp, Homo sapien
cagcgtcttatcgtaatactccaga

SEQ ID NO: 357957 - DNA, 25 bp, Homo sapien
tcgttgtaggagatttttgaagaca

SEQ ID NO: 357958 - DNA, 25 bp, Homo sapien
actggaggaatgcccggaggaagtc

SEQ ID NO: 357959 - DNA, 25 bp, Homo sapien
cccttggaaggtccaacataggtca

SEQ ID NO: 357960 - DNA, 25 bp, Homo sapien
tggaaggtccaacataggtcagaga

SEQ ID NO: 357961 - DNA, 25 bp, Homo sapien
ccttggaaggtccaacataggtcag

SEQ ID NO: 357962 - DNA, 25 bp, Homo sapien
ttggaaggtccaacataggtcagag

SEQ ID NO: 357963 - DNA, 25 bp, Homo sapien
cttcggcagcaggtagagggctccc

SEQ ID NO: 357964 - DNA, 25 bp, Homo sapien
tggacccaggactggataacttggg

SEQ ID NO: 357965 - DNA, 25 bp, Homo sapien
tgggaagtttctggccgctggcatt

SEQ ID NO: 357966 - DNA, 25 bp, Homo sapien
gtctgaaggtgaggcgagtggaccc

SEQ ID NO: 357967 - DNA, 25 bp, Homo sapien
aggcactgggcgcagagctgtgctc

SEQ ID NO: 357968 - DNA, 25 bp, Homo sapien
cagaggcactgggcgcagagctgtg

SEQ ID NO: 357969 - DNA, 25 bp, Homo sapien
gcactgggcgcagagctgtgctcac

SEQ ID NO: 357970 - DNA, 25 bp, Homo sapien
ctgcagaggcactgggcgcagagct

SEQ ID NO: 357971 - DNA, 25 bp, Homo sapien
catcatagcttttgaacgtgcgccg

SEQ ID NO: 357972 - DNA, 25 bp, Homo sapien
tgaaatctgcgacgcttagcagccc

SEQ ID NO: 357973 - DNA, 25 bp, Homo sapien
gagtaaaaagatggcgtctccgcgc

SEQ ID NO: 357974 - DNA, 25 bp, Homo sapien
ggcctccagcagtgcacaattttgg

SEQ ID NO: 357975 - DNA, 25 bp, Homo sapien
cagctgccagatgggacaagggctg

SEQ ID NO: 357976 - DNA, 25 bp, Homo sapien
gccttggcagctgccagatgggaca

SEQ ID NO: 357977 - DNA, 25 bp, Homo sapien
ggtggtggccttggcagctgccaga

SEQ ID NO: 357978 - DNA, 25 bp, Homo sapien
ggacaagggctgtgaccaggaccat

SEQ ID NO: 357979 - DNA, 25 bp, Homo sapien
cgcctgggaagagccaccataacca

SEQ ID NO: 357980 - DNA, 25 bp, Homo sapien
tggaaaacctgggatcaaggctact

SEQ ID NO: 357981 - DNA, 25 bp, Homo sapien
ccttggtcacacagacgcctgggaa

SEQ ID NO: 357982 - DNA, 25 bp, Homo sapien
gcctccagggcactgtatgacacct

SEQ ID NO: 357983 - DNA, 25 bp, Homo sapien
tggccccacatttcctgcaggtggg

SEQ ID NO: 357984 - DNA, 25 bp, Homo sapien
cccacatttcctgcaggtgggcaac

SEQ ID NO: 357985 - DNA, 25 bp, Homo sapien
ctggccccacatttcctgcaggtgg

SEQ ID NO: 357986 - DNA, 25 bp, Homo sapien
gccccacatttcctgcaggtgggca

SEQ ID NO: 357987 - DNA, 25 bp, Homo sapien
ctctttgcttatgtccaggttgaat

SEQ ID NO: 357988 - DNA, 25 bp, Homo sapien
catcttgtgtgcattctggatcttc

SEQ ID NO: 357989 - DNA, 25 bp, Homo sapien
tgcaaatttcccgttgctctttaag

SEQ ID NO: 357990 - DNA, 25 bp, Homo sapien
gtgcatcagtgagctttcctttgct

SEQ ID NO: 357991 - DNA, 25 bp, Homo sapien
ctggcctccacccggggtgtggctt

SEQ ID NO: 357992 - DNA, 25 bp, Homo sapien
ccggggtgtggctttgtacccagtg

SEQ ID NO: 357993 - DNA, 25 bp, Homo sapien
gggtgtggctttgtacccagtggga

SEQ ID NO: 357994 - DNA, 25 bp, Homo sapien
tgtggctttgtacccagtgggaaca

SEQ ID NO: 357995 - DNA, 25 bp, Homo sapien
gaggcgttgatgtccccctgtctgg

SEQ ID NO: 357996 - DNA, 25 bp, Homo sapien
ccggagcctgctctctatgggatca

SEQ ID NO: 357997 - DNA, 25 bp, Homo sapien
ccaggaaatcggaggcgttgatgtc

SEQ ID NO: 357998 - DNA, 25 bp, Homo sapien
tgcattctttcaggagctggcgcca

SEQ ID NO: 357999 - DNA, 25 bp, Homo sapien
gtggagtgcccgggatcacggtggt

SEQ ID NO: 358000 - DNA, 25 bp, Homo sapien
ggtggagtgcccgggatcacggtgg

SEQ ID NO: 358001 - DNA, 25 bp, Homo sapien
ggagtgcccgggatcacggtggtgc

SEQ ID NO: 358002 - DNA, 25 bp, Homo sapien
gggtggagtgcccgggatcacggtg

SEQ ID NO: 358003 - DNA, 25 bp, Homo sapien
gctgtctcggaactgaacctgctca

SEQ ID NO: 358004 - DNA, 25 bp, Homo sapien
tggtgccttccgagacgtcagggac

SEQ ID NO: 358005 - DNA, 25 bp, Homo sapien
gtggctctgcgactttgaccctggt

SEQ ID NO: 358006 - DNA, 25 bp, Homo sapien
caggaagtccgggtatttcagcctc

SEQ ID NO: 358007 - DNA, 25 bp, Homo sapien
ataaaacgcccatttggccttcgct

SEQ ID NO: 358008 - DNA, 25 bp, Homo sapien
aaacgcccatttggccttcgctcgg

SEQ ID NO: 358009 - DNA, 25 bp, Homo sapien
ttggccttcgctcggcggaggcctc

SEQ ID NO: 358010 - DNA, 25 bp, Homo sapien
ccatttggccttcgctcggcggagg

SEQ ID NO: 358011 - DNA, 25 bp, Homo sapien
tcgacatccttgcagaatgggcagc

SEQ ID NO: 358012 - DNA, 25 bp, Homo sapien
aatgggcagcgaccccttgggccca

SEQ ID NO: 358013 - DNA, 25 bp, Homo sapien
gggatgagcccaatagccgccagag

SEQ ID NO: 358014 - DNA, 25 bp, Homo sapien
gggaaggatcgacatccttgcagaa

SEQ ID NO: 358015 - DNA, 25 bp, Homo sapien
gttggctgcatgtaagagacacgtc

SEQ ID NO: 358016 - DNA, 25 bp, Homo sapien
taatggcccagttttggaggcgaaa

SEQ ID NO: 358017 - DNA, 25 bp, Homo sapien
gaaagagtgacatttccacgcagtg

SEQ ID NO: 358018 - DNA, 25 bp, Homo sapien
tgaaaagcgctgcaatgtacatacg

SEQ ID NO: 358019 - DNA, 25 bp, Homo sapien
tgttacttggctgatcagccacggg

SEQ ID NO: 358020 - DNA, 25 bp, Homo sapien
tctgtgttacttggctgatcagcca

SEQ ID NO: 358021 - DNA, 25 bp, Homo sapien
tgctctgtgttacttggctgatcag

SEQ ID NO: 358022 - DNA, 25 bp, Homo sapien
acggggctgccgaggacggtgaagg

SEQ ID NO: 358023 - DNA, 25 bp, Homo sapien
catttagggcacagcgaggaacaaa

SEQ ID NO: 358024 - DNA, 25 bp, Homo sapien
gcaggttgtcggagcctttgagcca

SEQ ID NO: 358025 - DNA, 25 bp, Homo sapien
tcatggtccagaacacgtagtcctc

SEQ ID NO: 358026 - DNA, 25 bp, Homo sapien
taaactctgtacattctggccaggg

SEQ ID NO: 358027 - DNA, 25 bp, Homo sapien
aatggccctaaactcctctctggag

SEQ ID NO: 358028 - DNA, 25 bp, Homo sapien
ccaggatgtctctgtcggctgtggc

SEQ ID NO: 358029 - DNA, 25 bp, Homo sapien
gacgcggcgattacaaatggcccta

SEQ ID NO: 358030 - DNA, 25 bp, Homo sapien
tggtgtcaaaattctcaaactcctg

SEQ ID NO: 358031 - DNA, 25 bp, Homo sapien
cttgggagaggtaggcggcgggcct

SEQ ID NO: 358032 - DNA, 25 bp, Homo sapien
gaggtaggcggcgggcctttgggca

SEQ ID NO: 358033 - DNA, 25 bp, Homo sapien
aggtaggcggcgggcctttgggcat

SEQ ID NO: 358034 - DNA, 25 bp, Homo sapien
cccatggatgctgccgcccagagaa

SEQ ID NO: 358035 - DNA, 25 bp, Homo sapien
tgggagagcgcctgggttttccatc

SEQ ID NO: 358036 - DNA, 25 bp, Homo sapien
ggatgctgccgcccagagaaccaca

SEQ ID NO: 358037 - DNA, 25 bp, Homo sapien
ctggtgggagagcgcctgggttttc

SEQ ID NO: 358038 - DNA, 25 bp, Homo sapien
tgtgtccctggcacttctcacgtga

SEQ ID NO: 358039 - DNA, 25 bp, Homo sapien
taactgcgctttacatcaaaggccc

SEQ ID NO: 358040 - DNA, 25 bp, Homo sapien
taggtctgacctcaacagagaacca

SEQ ID NO: 358041 - DNA, 25 bp, Homo sapien
tggcccctttgtgactacaccgtaa

SEQ ID NO: 358042 - DNA, 25 bp, Homo sapien
aagtaagctgttgagcacagatggc

SEQ ID NO: 358043 - DNA, 25 bp, Homo sapien
gaatacagacaggacaagtaagctg

SEQ ID NO: 358044 - DNA, 25 bp, Homo sapien
gcatcagtgttccacgaaatggaca

SEQ ID NO: 358045 - DNA, 25 bp, Homo sapien
tggtgagtatccaagatggcggtca

SEQ ID NO: 358046 - DNA, 25 bp, Homo sapien
tcctgccatggggtgtgctgcatag

SEQ ID NO: 358047 - DNA, 25 bp, Homo sapien
ccaacaggttcatgatagccttgtc

SEQ ID NO: 358048 - DNA, 25 bp, Homo sapien
gattacgagaaattctgtctgatgt

SEQ ID NO: 358049 - DNA, 25 bp, Homo sapien
ccacacaaattaaaacgattacgag

SEQ ID NO: 358050 - DNA, 25 bp, Homo sapien
ttcttcacttctctcttggaacaaa

SEQ ID NO: 358051 - DNA, 25 bp, Homo sapien
attcttcacttctctcttggaacaa

SEQ ID NO: 358052 - DNA, 25 bp, Homo sapien
cttcacttctctcttggaacaaaaa

SEQ ID NO: 358053 - DNA, 25 bp, Homo sapien
tcttcacttctctcttggaacaaaa

SEQ ID NO: 358054 - DNA, 25 bp, Homo sapien
ccgcggcccttgctgtgagaagagc

SEQ ID NO: 358055 - DNA, 25 bp, Homo sapien
tctcatgagaaggtgtgtgtgctgc

SEQ ID NO: 358056 - DNA, 25 bp, Homo sapien
gaggactcatggtcaagccacacag

SEQ ID NO: 358057 - DNA, 25 bp, Homo sapien
cctgggacctgcactttaagaagcg

SEQ ID NO: 358058 - DNA, 25 bp, Homo sapien
ctcctcaaggaaacagctaaagttc

SEQ ID NO: 358059 - DNA, 25 bp, Homo sapien
taatgatactgattgtccgttagtt

SEQ ID NO: 358060 - DNA, 25 bp, Homo sapien
tgtccgttagtttgtaacagaaatc

SEQ ID NO: 358061 - DNA, 25 bp, Homo sapien
acttgtccgaattctgtagccttta

SEQ ID NO: 358062 - DNA, 25 bp, Homo sapien
ggatgattccgacgctgccttgttc

SEQ ID NO: 358063 - DNA, 25 bp, Homo sapien
tgttctcttcgatgcctgccctctg

SEQ ID NO: 358064 - DNA, 25 bp, Homo sapien
gacgctgccttgttctcttcgatgc

SEQ ID NO: 358065 - DNA, 25 bp, Homo sapien
gccggcttcccacaggatgattccg

SEQ ID NO: 358066 - DNA, 25 bp, Homo sapien
cagctgggaggactcaactacttcc

SEQ ID NO: 358067 - DNA, 25 bp, Homo sapien
ccagctgggaggactcaactacttc

SEQ ID NO: 358068 - DNA, 25 bp, Homo sapien
cctgtggattcagcgttgcaaaatt

SEQ ID NO: 358069 - DNA, 25 bp, Homo sapien
aaaattgattggcatgctctcttct

SEQ ID NO: 358070 - DNA, 25 bp, Homo sapien
gtcgaggtaattgatagcattatca

SEQ ID NO: 358071 - DNA, 25 bp, Homo sapien
cactgctctcaggaagtcgaggtaa

SEQ ID NO: 358072 - DNA, 25 bp, Homo sapien
caggaagtcgaggtaattgatagca

SEQ ID NO: 358073 - DNA, 25 bp, Homo sapien
tgatagcattatcatgccggctgac

SEQ ID NO: 358074 - DNA, 25 bp, Homo sapien
ctggatatcagggttcgtggctttg

SEQ ID NO: 358075 - DNA, 25 bp, Homo sapien
tatcagggttcgtggctttgcagaa

SEQ ID NO: 358076 - DNA, 25 bp, Homo sapien
ctttgcagaagatggtaagggaggt

SEQ ID NO: 358077 - DNA, 25 bp, Homo sapien
ctgaggcttgaaggctggatatcag

SEQ ID NO: 358078 - DNA, 25 bp, Homo sapien
gctgatatcttgatggcggtccata

SEQ ID NO: 358079 - DNA, 25 bp, Homo sapien
tatgtagttggttttggattgatca

SEQ ID NO: 358080 - DNA, 25 bp, Homo sapien
cagcacttcctgcatcttgcatatg

SEQ ID NO: 358081 - DNA, 25 bp, Homo sapien
ggtcagctccccttcggtaagagaa

SEQ ID NO: 358082 - DNA, 25 bp, Homo sapien
aatcaagggccgtgctgccatctca

SEQ ID NO: 358083 - DNA, 25 bp, Homo sapien
tttctataacaggaacaggacagca

SEQ ID NO: 358084 - DNA, 25 bp, Homo sapien
tgcaaggcggtgtcatcagccctac

SEQ ID NO: 358085 - DNA, 25 bp, Homo sapien
aagcccagggcagaatcaggacaag

SEQ ID NO: 358086 - DNA, 25 bp, Homo sapien
ttcctgtagctgctgtggctttgta

SEQ ID NO: 358087 - DNA, 25 bp, Homo sapien
ttcatctcttcctgtagctgctgtg

SEQ ID NO: 358088 - DNA, 25 bp, Homo sapien
agctgctgtggctttgtaaaatgac

SEQ ID NO: 358089 - DNA, 25 bp, Homo sapien
ggctgccacagccttctctgtgctc

SEQ ID NO: 358090 - DNA, 25 bp, Homo sapien
aatgtgcccttttccctcggtgtcg

SEQ ID NO: 358091 - DNA, 25 bp, Homo sapien
agtaatgtgcccttttccctcggtg

SEQ ID NO: 358092 - DNA, 25 bp, Homo sapien
ccgatggacagcaggcgaatagtta

SEQ ID NO: 358093 - DNA, 25 bp, Homo sapien
caggcgaatagttaatacccaattt

SEQ ID NO: 358094 - DNA, 25 bp, Homo sapien
tgccctcattatcggtttctagaaa

SEQ ID NO: 358095 - DNA, 25 bp, Homo sapien
tgccattgccctcattatcggtttc

SEQ ID NO: 358096 - DNA, 25 bp, Homo sapien
ttatgtcccggcgtcgaagaatgcc

SEQ ID NO: 358097 - DNA, 25 bp, Homo sapien
accgtacagtgcgttctttatgtcc

SEQ ID NO: 358098 - DNA, 25 bp, Homo sapien
gctgctctgaaagtgggccacacag

SEQ ID NO: 358099 - DNA, 25 bp, Homo sapien
gacagtctgctttatggagtccaca

SEQ ID NO: 358100 - DNA, 25 bp, Homo sapien
gcacagacagtccactttatgcagc

SEQ ID NO: 358101 - DNA, 25 bp, Homo sapien
cagttgactctatggagttcacagc

SEQ ID NO: 358102 - DNA, 25 bp, Homo sapien
aggacaggaggttgggtagagacag

SEQ ID NO: 358103 - DNA, 25 bp, Homo sapien
gtgcaggacaggaggttgggtagag

SEQ ID NO: 358104 - DNA, 25 bp, Homo sapien
tgcaggacaggaggttgggtagaga

SEQ ID NO: 358105 - DNA, 25 bp, Homo sapien
tttttgctttggtaacaagatactg

SEQ ID NO: 358106 - DNA, 25 bp, Homo sapien
tgatgagcctgctcacaagctagtt

SEQ ID NO: 358107 - DNA, 25 bp, Homo sapien
caagctagttctgaatccgcaacct

SEQ ID NO: 358108 - DNA, 25 bp, Homo sapien
aacaagatactgatgagcctgctca

SEQ ID NO: 358109 - DNA, 25 bp, Homo sapien
ctggccagtgtaaactgcagtcact

SEQ ID NO: 358110 - DNA, 25 bp, Homo sapien
actcccgctgcccttgactgtgctg

SEQ ID NO: 358111 - DNA, 25 bp, Homo sapien
gctgcccttgactgtgctgtctctc

SEQ ID NO: 358112 - DNA, 25 bp, Homo sapien
tggccagtgtaaactgcagtcactg

SEQ ID NO: 358113 - DNA, 25 bp, Homo sapien
gggatccaaagttcaaccagccaat

SEQ ID NO: 358114 - DNA, 25 bp, Homo sapien
gcctaccggactctgcagaatcatg

SEQ ID NO: 358115 - DNA, 25 bp, Homo sapien
cagccaatcccctatgactacttga

SEQ ID NO: 358116 - DNA, 25 bp, Homo sapien
gaatcatggaatttcgagggtggaa

SEQ ID NO: 358117 - DNA, 25 bp, Homo sapien
aagaaaagtgactcggataacttca

SEQ ID NO: 358118 - DNA, 25 bp, Homo sapien
ataacttcagatactgcatgggacc

SEQ ID NO: 358119 - DNA, 25 bp, Homo sapien
gagacttcgtcaggaagaccaggga

SEQ ID NO: 358120 - DNA, 25 bp, Homo sapien
caggggagacttcgtcaggaagacc

SEQ ID NO: 358121 - DNA, 25 bp, Homo sapien
cattcatgtcggctctcggcagatc

SEQ ID NO: 358122 - DNA, 25 bp, Homo sapien
cctgctgccactgttggatggggtt

SEQ ID NO: 358123 - DNA, 25 bp, Homo sapien
gggacgggtgatcccctgctgccac

SEQ ID NO: 358124 - DNA, 25 bp, Homo sapien
gttggatggtagccccattgtgcct

SEQ ID NO: 358125 - DNA, 25 bp, Homo sapien
tgacactaagtctcaagccaagaag

SEQ ID NO: 358126 - DNA, 25 bp, Homo sapien
gagattaagcagtagatgcaggagc

SEQ ID NO: 358127 - DNA, 25 bp, Homo sapien
catgttgattatgccatccctgtca

SEQ ID NO: 358128 - DNA, 25 bp, Homo sapien
aaactcgtcgtctttgagattaagc

SEQ ID NO: 358129 - DNA, 25 bp, Homo sapien
ctgttttaaagaaggcagagtaggg

SEQ ID NO: 358130 - DNA, 25 bp, Homo sapien
ggctgtagccaagcttcactgatcg

SEQ ID NO: 358131 - DNA, 25 bp, Homo sapien
cgtaaagataggaaagcaacgatgt

SEQ ID NO: 358132 - DNA, 25 bp, Homo sapien
aaagcaacgatgtagcgtggagctg

SEQ ID NO: 358133 - DNA, 25 bp, Homo sapien
aagcttcactgatcgtaaagatagg

SEQ ID NO: 358134 - DNA, 25 bp, Homo sapien
gagcaggggaggcctagagaagccc

SEQ ID NO: 358135 - DNA, 25 bp, Homo sapien
gaagcccagcgccagacagtcacgg

SEQ ID NO: 358136 - DNA, 25 bp, Homo sapien
cacttgggctgcgtggttgggagca

SEQ ID NO: 358137 - DNA, 25 bp, Homo sapien
ccagcgccagacagtcacggtttac

SEQ ID NO: 358138 - DNA, 25 bp, Homo sapien
cctcctagggaaaagcttcaggcat

SEQ ID NO: 358139 - DNA, 25 bp, Homo sapien
tctgcggtgataaagtggctgttca

SEQ ID NO: 358140 - DNA, 25 bp, Homo sapien
ggtttccggccctctcattggagga

SEQ ID NO: 358141 - DNA, 25 bp, Homo sapien
gctgttcacgtaactttttgaagga

SEQ ID NO: 358142 - DNA, 25 bp, Homo sapien
ctcgaagcctattttagtggtcagc

SEQ ID NO: 358143 - DNA, 25 bp, Homo sapien
tggtcagcagggcatactgatcatc

SEQ ID NO: 358144 - DNA, 25 bp, Homo sapien
tactgatcatcgtccatgggcatcc

SEQ ID NO: 358145 - DNA, 25 bp, Homo sapien
gcaaaatcaagatagctcatccctt

SEQ ID NO: 358146 - DNA, 25 bp, Homo sapien
ttaggtggtccgcgggtcactactc

SEQ ID NO: 358147 - DNA, 25 bp, Homo sapien
gaggcgttaggtggtccgcgggtca

SEQ ID NO: 358148 - DNA, 25 bp, Homo sapien
ggtccgcgggtcactactcccagag

SEQ ID NO: 358149 - DNA, 25 bp, Homo sapien
ggtggtccgcgggtcactactccca

SEQ ID NO: 358150 - DNA, 25 bp, Homo sapien
aacgaagggacaagtggcacagttg

SEQ ID NO: 358151 - DNA, 25 bp, Homo sapien
agtgaacgaagggacaagtggcaca

SEQ ID NO: 358152 - DNA, 25 bp, Homo sapien
cttgtgtttgttgggtgagtgagtg

SEQ ID NO: 358153 - DNA, 25 bp, Homo sapien
gcacaaggcttgtgtttgttgggtg

SEQ ID NO: 358154 - DNA, 25 bp, Homo sapien
agaacacaaacgctgcaagtgccat

SEQ ID NO: 358155 - DNA, 25 bp, Homo sapien
ctgtccagcggtcgcaggagcgtaa

SEQ ID NO: 358156 - DNA, 25 bp, Homo sapien
gcggtcgcaggagcgtaatccccag

SEQ ID NO: 358157 - DNA, 25 bp, Homo sapien
gcacggagcaccggagcaccgcaga

SEQ ID NO: 358158 - DNA, 25 bp, Homo sapien
cactcatcaggctcttgctattgtg

SEQ ID NO: 358159 - DNA, 25 bp, Homo sapien
gctattgtgtctggttgaatcctga

SEQ ID NO: 358160 - DNA, 25 bp, Homo sapien
ggttgaatcctgagtctgactaaga

SEQ ID NO: 358161 - DNA, 25 bp, Homo sapien
cctgagtctgactaagaaagcccat

SEQ ID NO: 358162 - DNA, 25 bp, Homo sapien
caaacccaggtccatagtagcctga

SEQ ID NO: 358163 - DNA, 25 bp, Homo sapien
gtagcctgactgttgaaaatcaccc

SEQ ID NO: 358164 - DNA, 25 bp, Homo sapien
tggtcacaagaagactttcccaaag

SEQ ID NO: 358165 - DNA, 25 bp, Homo sapien
tatagcttatgaagtgcaaacccag

SEQ ID NO: 358166 - DNA, 25 bp, Homo sapien
cagtgccaggtatgcagcagatagc

SEQ ID NO: 358167 - DNA, 25 bp, Homo sapien
tagaaatggatctgctgcgtcctgg

SEQ ID NO: 358168 - DNA, 25 bp, Homo sapien
tgcgtcctgggataagccattgtcc

SEQ ID NO: 358169 - DNA, 25 bp, Homo sapien
gtggctttgtactctcacccgcagg

SEQ ID NO: 358170 - DNA, 25 bp, Homo sapien
tttcaatcacttcttctgtggtcat

SEQ ID NO: 358171 - DNA, 25 bp, Homo sapien
ccttgctgaagtcaagaaatcgttt

SEQ ID NO: 358172 - DNA, 25 bp, Homo sapien
cttcttaaagtcatgcacgttaatt

SEQ ID NO: 358173 - DNA, 25 bp, Homo sapien
tcgttttttgaatgccgggtcctgc

SEQ ID NO: 358174 - DNA, 25 bp, Homo sapien
gacacacgcagggtgcttcctccag

SEQ ID NO: 358175 - DNA, 25 bp, Homo sapien
cagtgtcaactgacacacgcagggt

SEQ ID NO: 358176 - DNA, 25 bp, Homo sapien
aagcaggcatttagacccagtgtca

SEQ ID NO: 358177 - DNA, 25 bp, Homo sapien
catgtaacccatgacagtaagaagg

SEQ ID NO: 358178 - DNA, 25 bp, Homo sapien
gctgctgctgttcatctttttgtaa

SEQ ID NO: 358179 - DNA, 25 bp, Homo sapien
tctcagaaagatctggctgctgctg

SEQ ID NO: 358180 - DNA, 25 bp, Homo sapien
tttgtaaatgttcacttaacagctg

SEQ ID NO: 358181 - DNA, 25 bp, Homo sapien
gtaaatgttcacttaacagctgatc

SEQ ID NO: 358182 - DNA, 25 bp, Homo sapien
caatgtcctgaatcttactgcagag

SEQ ID NO: 358183 - DNA, 25 bp, Homo sapien
attcctatgcatgccaaaagtttct

SEQ ID NO: 358184 - DNA, 25 bp, Homo sapien
gtaaaggattcttcctgaaccaatg

SEQ ID NO: 358185 - DNA, 25 bp, Homo sapien
cagtgggtgggccatcaattcctat

SEQ ID NO: 358186 - DNA, 25 bp, Homo sapien
aaatgtgcattcgttaaaaatggac

SEQ ID NO: 358187 - DNA, 25 bp, Homo sapien
tcttgaaattatttcggccaatgcg

SEQ ID NO: 358188 - DNA, 25 bp, Homo sapien
tatttcggccaatgcgccctgtgtc

SEQ ID NO: 358189 - DNA, 25 bp, Homo sapien
ggacagaagacgtgcatgattttct

SEQ ID NO: 358190 - DNA, 25 bp, Homo sapien
ttcctagtaattgtatcatgaacaa

SEQ ID NO: 358191 - DNA, 25 bp, Homo sapien
tcctagtaattgtatcatgaacaat

SEQ ID NO: 358192 - DNA, 25 bp, Homo sapien
ggttcctagtaattgtatcatgaac

SEQ ID NO: 358193 - DNA, 25 bp, Homo sapien
gttcctagtaattgtatcatgaaca

SEQ ID NO: 358194 - DNA, 25 bp, Homo sapien
gccaggaggaaaggtgtcttagcat

SEQ ID NO: 358195 - DNA, 25 bp, Homo sapien
tgaatcccaggccaggaggaaaggt

SEQ ID NO: 358196 - DNA, 25 bp, Homo sapien
ccaggccaggaggaaaggtgtctta

SEQ ID NO: 358197 - DNA, 25 bp, Homo sapien
caggccaggaggaaaggtgtcttag

SEQ ID NO: 358198 - DNA, 25 bp, Homo sapien
ctgtacagggagatgtctttctcat

SEQ ID NO: 358199 - DNA, 25 bp, Homo sapien
atcagatcaataaacatgctggtgt

SEQ ID NO: 358200 - DNA, 25 bp, Homo sapien
cctacagttctcttcaatcagatca

SEQ ID NO: 358201 - DNA, 25 bp, Homo sapien
tcaatcagatcaataaacatgctgg

SEQ ID NO: 358202 - DNA, 25 bp, Homo sapien
cagttctcttcaatcagatcaataa

SEQ ID NO: 358203 - DNA, 25 bp, Homo sapien
tgaattctgaatcgcttagttttac

SEQ ID NO: 358204 - DNA, 25 bp, Homo sapien
tagttttacagccatgcaatttaga

SEQ ID NO: 358205 - DNA, 25 bp, Homo sapien
gaatatatcgaaattcttctcttgt

SEQ ID NO: 358206 - DNA, 25 bp, Homo sapien
cttctcttgttatcggtccatcggg

SEQ ID NO: 358207 - DNA, 25 bp, Homo sapien
cttgttctgagtgtttgcattctta

SEQ ID NO: 358208 - DNA, 25 bp, Homo sapien
ggtcttgttctgagtgtttgcattc

SEQ ID NO: 358209 - DNA, 25 bp, Homo sapien
ttggtcttgttctgagtgtttgcat

SEQ ID NO: 358210 - DNA, 25 bp, Homo sapien
tgttctgagtgtttgcattcttaga

SEQ ID NO: 358211 - DNA, 25 bp, Homo sapien
gatcttcagtgtgtctaaataactt

SEQ ID NO: 358212 - DNA, 25 bp, Homo sapien
ttcagtgacgcagagtgatcttcag

SEQ ID NO: 358213 - DNA, 25 bp, Homo sapien
gcagagtgatcttcagtgtgtctaa

SEQ ID NO: 358214 - DNA, 25 bp, Homo sapien
gtgttgattatcagtaatgctttct

SEQ ID NO: 358215 - DNA, 25 bp, Homo sapien
tgtcaggggacctttactgctaact

SEQ ID NO: 358216 - DNA, 25 bp, Homo sapien
gggacctttactgctaacttgcaac

SEQ ID NO: 358217 - DNA, 25 bp, Homo sapien
gcttccaattgattttagtggtggc

SEQ ID NO: 358218 - DNA, 25 bp, Homo sapien
tgctaacttgcaacccctgaggctc

SEQ ID NO: 358219 - DNA, 25 bp, Homo sapien
aaaacaagtttggaggactcataca

SEQ ID NO: 358220 - DNA, 25 bp, Homo sapien
tattatatgcaagatccgaacattg

SEQ ID NO: 358221 - DNA, 25 bp, Homo sapien
gtactgatgcgagaatagaccgaca

SEQ ID NO: 358222 - DNA, 25 bp, Homo sapien
ccgacagagactaaggaatccagaa

SEQ ID NO: 358223 - DNA, 25 bp, Homo sapien
tcatagacgcagagccccttaactg

SEQ ID NO: 358224 - DNA, 25 bp, Homo sapien
catagggacccatgggaattcatgg

SEQ ID NO: 358225 - DNA, 25 bp, Homo sapien
gactctggatacctttgaagaacac

SEQ ID NO: 358226 - DNA, 25 bp, Homo sapien
gaggcaaagggactgatcatatcgg

SEQ ID NO: 358227 - DNA, 25 bp, Homo sapien
tcttggtatttggtatacaaaagtg

SEQ ID NO: 358228 - DNA, 25 bp, Homo sapien
cctgcactgagggccttttcaacct

SEQ ID NO: 358229 - DNA, 25 bp, Homo sapien
ataattaaaagacacgtagccacct

SEQ ID NO: 358230 - DNA, 25 bp, Homo sapien
gtgtcgaggacaatctttagataat

SEQ ID NO: 358231 - DNA, 25 bp, Homo sapien
cataggtaggatcgaaacaaatttt

SEQ ID NO: 358232 - DNA, 25 bp, Homo sapien
tcaatgtattgctgttattgggagg

SEQ ID NO: 358233 - DNA, 25 bp, Homo sapien
cagtattggagaagacataggtagg

SEQ ID NO: 358234 - DNA, 25 bp, Homo sapien
tgtttactctgtaggtaattgtggc

SEQ ID NO: 358235 - DNA, 25 bp, Homo sapien
tgcagaacctagcaaacgttccttt

SEQ ID NO: 358236 - DNA, 25 bp, Homo sapien
tcagatgatgcagaacctagcaaac

SEQ ID NO: 358237 - DNA, 25 bp, Homo sapien
ctcaatttcatccaaggagtagttt

SEQ ID NO: 358238 - DNA, 25 bp, Homo sapien
tcaatttcatccaaggagtagtttc

SEQ ID NO: 358239 - DNA, 25 bp, Homo sapien
ctggttttagatccttgagaaattg

SEQ ID NO: 358240 - DNA, 25 bp, Homo sapien
tctggttttagatccttgagaaatt

SEQ ID NO: 358241 - DNA, 25 bp, Homo sapien
ggttttagatccttgagaaattgcc

SEQ ID NO: 358242 - DNA, 25 bp, Homo sapien
tggttttagatccttgagaaattgc

SEQ ID NO: 358243 - DNA, 25 bp, Homo sapien
caagtcgttatttatgctgagattc

SEQ ID NO: 358244 - DNA, 25 bp, Homo sapien
cagtatccttgtggatgttgtagtg

SEQ ID NO: 358245 - DNA, 25 bp, Homo sapien
aaaaacacgttgtaatctactgcag

SEQ ID NO: 358246 - DNA, 25 bp, Homo sapien
tacaatatctaaggttcaagtcgtt

SEQ ID NO: 358247 - DNA, 25 bp, Homo sapien
tgcggtcgaaccagtccagtcttgt

SEQ ID NO: 358248 - DNA, 25 bp, Homo sapien
cctcgtctcttaacttcatacagaa

SEQ ID NO: 358249 - DNA, 25 bp, Homo sapien
cttcttagctcctgcggtcgaacca

SEQ ID NO: 358250 - DNA, 25 bp, Homo sapien
cgtattcctcgtctcttaacttcat

SEQ ID NO: 358251 - DNA, 25 bp, Homo sapien
aggctttcataacagtcttaatgtt

SEQ ID NO: 358252 - DNA, 25 bp, Homo sapien
cataacagtcttaatgtttttgaaa

SEQ ID NO: 358253 - DNA, 25 bp, Homo sapien
ctcaaaggctttcataacagtctta

SEQ ID NO: 358254 - DNA, 25 bp, Homo sapien
gctttcataacagtcttaatgtttt

SEQ ID NO: 358255 - DNA, 25 bp, Homo sapien
agtggtaggcatggcaaaaatgaca

SEQ ID NO: 358256 - DNA, 25 bp, Homo sapien
gacatgagcacgatgcgctttttta

SEQ ID NO: 358257 - DNA, 25 bp, Homo sapien
gagcgacgtctccaaggctcttatc

SEQ ID NO: 358258 - DNA, 25 bp, Homo sapien
tttggtaaaatggaggacatgagca

SEQ ID NO: 358259 - DNA, 25 bp, Homo sapien
tatggatctctagcgtgagcaccgg

SEQ ID NO: 358260 - DNA, 25 bp, Homo sapien
ggtgtccaagacttgtcccacacag

SEQ ID NO: 358261 - DNA, 25 bp, Homo sapien
gcaacaaagttagggccgtggtgtc

SEQ ID NO: 358262 - DNA, 25 bp, Homo sapien
taaaatggctaagctaaggctcccg

SEQ ID NO: 358263 - DNA, 25 bp, Homo sapien
cagatggcgaggcttatcaaaggca

SEQ ID NO: 358264 - DNA, 25 bp, Homo sapien
ctcccagccacggtctccgggctct

SEQ ID NO: 358265 - DNA, 25 bp, Homo sapien
tcccagccacggtctccgggctctg

SEQ ID NO: 358266 - DNA, 25 bp, Homo sapien
tctcccagccacggtctccgggctc

SEQ ID NO: 358267 - DNA, 25 bp, Homo sapien
ctctcccagccacggtctccgggct

SEQ ID NO: 358268 - DNA, 25 bp, Homo sapien
tttaaactgaactcgcctgcactgg

SEQ ID NO: 358269 - DNA, 25 bp, Homo sapien
gccccacacttgaggtttaaactga

SEQ ID NO: 358270 - DNA, 25 bp, Homo sapien
tgcactggacctgtttagacctaaa

SEQ ID NO: 358271 - DNA, 25 bp, Homo sapien
tgagaagggcgtgctgaaccagccc

SEQ ID NO: 358272 - DNA, 25 bp, Homo sapien
tcagtgtccaacagacacgcttgtc

SEQ ID NO: 358273 - DNA, 25 bp, Homo sapien
gactgggtagaccagatgttctggc

SEQ ID NO: 358274 - DNA, 25 bp, Homo sapien
tccaaggcaccagggtaatcccata

SEQ ID NO: 358275 - DNA, 25 bp, Homo sapien
cacgcttgtcacagccgactgggta

SEQ ID NO: 358276 - DNA, 25 bp, Homo sapien
ggatttcaagttctcttaatgtgcg

SEQ ID NO: 358277 - DNA, 25 bp, Homo sapien
ttctcttaatgtgcggcagcaattc

SEQ ID NO: 358278 - DNA, 25 bp, Homo sapien
caagttctcttaatgtgcggcagca

SEQ ID NO: 358279 - DNA, 25 bp, Homo sapien
cccacttggatttcaagttctctta

SEQ ID NO: 358280 - DNA, 25 bp, Homo sapien
tagcatcgtaccaagtgccacacgg

SEQ ID NO: 358281 - DNA, 25 bp, Homo sapien
gaaatgtcctacacgtccatctgaa

SEQ ID NO: 358282 - DNA, 25 bp, Homo sapien
tacaaggtcctctatgctcgataca

SEQ ID NO: 358283 - DNA, 25 bp, Homo sapien
gggccctctccgtccatatgtagaa

SEQ ID NO: 358284 - DNA, 25 bp, Homo sapien
tatatataggtcaattccaccaaac

SEQ ID NO: 358285 - DNA, 25 bp, Homo sapien
tacggtacagtaccagaggtgctaa

SEQ ID NO: 358286 - DNA, 25 bp, Homo sapien
ggtcaattccaccaaacctggacag

SEQ ID NO: 358287 - DNA, 25 bp, Homo sapien
tggacagaaaggcaaggtacggtac

SEQ ID NO: 358288 - DNA, 25 bp, Homo sapien
ccgtttaacatctaaggaggacagt

SEQ ID NO: 358289 - DNA, 25 bp, Homo sapien
tgaaactgttctcgtgtgagcggca

SEQ ID NO: 358290 - DNA, 25 bp, Homo sapien
tcaagttctgaccagtatccagcag

SEQ ID NO: 358291 - DNA, 25 bp, Homo sapien
ttttgcaactcatcccctctgtcgg

SEQ ID NO: 358292 - DNA, 25 bp, Homo sapien
caagacaaagacaactagaggaaca

SEQ ID NO: 358293 - DNA, 25 bp, Homo sapien
gagaggtgatacaccataggcctcc

SEQ ID NO: 358294 - DNA, 25 bp, Homo sapien
tatcaagctattgcacatttctggc

SEQ ID NO: 358295 - DNA, 25 bp, Homo sapien
taaagggctttaacattgcctcatc

SEQ ID NO: 358296 - DNA, 25 bp, Homo sapien
aggatttcctcagagctgtagggtg

SEQ ID NO: 358297 - DNA, 25 bp, Homo sapien
atacaagagacaacgtgcaggcacc

SEQ ID NO: 358298 - DNA, 25 bp, Homo sapien
tgacgctgccatggagattggctgc

SEQ ID NO: 358299 - DNA, 25 bp, Homo sapien
ttcggtaactgggatgcggcggtcc

SEQ ID NO: 358300 - DNA, 25 bp, Homo sapien
gagctgcatcggccaagagatgacg

SEQ ID NO: 358301 - DNA, 25 bp, Homo sapien
cagaggatggctggtttccggtgac

SEQ ID NO: 358302 - DNA, 25 bp, Homo sapien
ccactcagtggaaagcaacttggtg

SEQ ID NO: 358303 - DNA, 25 bp, Homo sapien
cacgggagacctaaacagaggatgg

SEQ ID NO: 358304 - DNA, 25 bp, Homo sapien
tcccccagtgcaggtaagtagcact

SEQ ID NO: 358305 - DNA, 25 bp, Homo sapien
ccccagtgcaggtaagtagcactgc

SEQ ID NO: 358306 - DNA, 25 bp, Homo sapien
gtagcactgcaccaaaggctggggc

SEQ ID NO: 358307 - DNA, 25 bp, Homo sapien
cccccagtgcaggtaagtagcactg

SEQ ID NO: 358308 - DNA, 25 bp, Homo sapien
aagaactcgtgactatgaactcagg

SEQ ID NO: 358309 - DNA, 25 bp, Homo sapien
tcaggtctatagaaatgattcaacc

SEQ ID NO: 358310 - DNA, 25 bp, Homo sapien
tgcttagtagcagagtgtacatgct

SEQ ID NO: 358311 - DNA, 25 bp, Homo sapien
aaacagtcatcagaagaacacccac

SEQ ID NO: 358312 - DNA, 25 bp, Homo sapien
tcattaggaaccttaagagcaggaa

SEQ ID NO: 358313 - DNA, 25 bp, Homo sapien
aggaaccttaagagcaggaacaggc

SEQ ID NO: 358314 - DNA, 25 bp, Homo sapien
cattaggaaccttaagagcaggaac

SEQ ID NO: 358315 - DNA, 25 bp, Homo sapien
ttaggaaccttaagagcaggaacag

SEQ ID NO: 358316 - DNA, 25 bp, Homo sapien
aattttcgtgtgtgaggatgcgacc

SEQ ID NO: 358317 - DNA, 25 bp, Homo sapien
tgaatatactctacacggtgaagaa

SEQ ID NO: 358318 - DNA, 25 bp, Homo sapien
taagccagtctggtataatcgccat

SEQ ID NO: 358319 - DNA, 25 bp, Homo sapien
tgtgaggatgcgacctaagccagtc

SEQ ID NO: 358320 - DNA, 25 bp, Homo sapien
aacaagtcgtgtcagaaacactgac

SEQ ID NO: 358321 - DNA, 25 bp, Homo sapien
gaaacactgaccacaagtgtgctgt

SEQ ID NO: 358322 - DNA, 25 bp, Homo sapien
atgacagacacagatacggcaaccg

SEQ ID NO: 358323 - DNA, 25 bp, Homo sapien
cagatacggcaaccgagaaaaaaca

SEQ ID NO: 358324 - DNA, 25 bp, Homo sapien
tttgttttggtgctatttcgtttca

SEQ ID NO: 358325 - DNA, 25 bp, Homo sapien
ctttggtactgcctgagagggtgct

SEQ ID NO: 358326 - DNA, 25 bp, Homo sapien
ggtgctgctgcctttgggagcattt

SEQ ID NO: 358327 - DNA, 25 bp, Homo sapien
ctggctttggtactgcctgagaggg

SEQ ID NO: 358328 - DNA, 25 bp, Homo sapien
gccagagcccaagcctaaaagggcc

SEQ ID NO: 358329 - DNA, 25 bp, Homo sapien
tcacagagatctgcaagcttgtctg

SEQ ID NO: 358330 - DNA, 25 bp, Homo sapien
agagatctgcaagcttgtctgctaa

SEQ ID NO: 358331 - DNA, 25 bp, Homo sapien
cacagagatctgcaagcttgtctgc

SEQ ID NO: 358332 - DNA, 25 bp, Homo sapien
ttttgatagtcggttgaagaaggga

SEQ ID NO: 358333 - DNA, 25 bp, Homo sapien
tgatttttgatagtcggttgaagaa

SEQ ID NO: 358334 - DNA, 25 bp, Homo sapien
catagggtttgataggggctttctg

SEQ ID NO: 358335 - DNA, 25 bp, Homo sapien
aacttcatagggtttgataggggct

SEQ ID NO: 358336 - DNA, 25 bp, Homo sapien
taatctaggcccttccaatcctctg

SEQ ID NO: 358337 - DNA, 25 bp, Homo sapien
ttgtcattgggcagtaatctaggcc

SEQ ID NO: 358338 - DNA, 25 bp, Homo sapien
tgaggacattaagcccacacttttg

SEQ ID NO: 358339 - DNA, 25 bp, Homo sapien
cagttcaaatgctaaagtccacatt

SEQ ID NO: 358340 - DNA, 25 bp, Homo sapien
ctgcagagatcagagcatgggtgct

SEQ ID NO: 358341 - DNA, 25 bp, Homo sapien
tgctatagagatctctgtacaaggg

SEQ ID NO: 358342 - DNA, 25 bp, Homo sapien
tagatagctggaacagggcagtttt

SEQ ID NO: 358343 - DNA, 25 bp, Homo sapien
tcagagcatgggtgctatagagatc

SEQ ID NO: 358344 - DNA, 25 bp, Homo sapien
gggctgcccattcggcgtctctagg

SEQ ID NO: 358345 - DNA, 25 bp, Homo sapien
tctctaggacgctgttgcccgagag

SEQ ID NO: 358346 - DNA, 25 bp, Homo sapien
cgacggcagtcgctgactggagaat

SEQ ID NO: 358347 - DNA, 25 bp, Homo sapien
tcgattctccgcctagctgggccgg

SEQ ID NO: 358348 - DNA, 25 bp, Homo sapien
tggtcaattggagataaacgaggag

SEQ ID NO: 358349 - DNA, 25 bp, Homo sapien
tcatgggagcgggtttctgttacgt

SEQ ID NO: 358350 - DNA, 25 bp, Homo sapien
ccctggcgacccgtgtcatgggagc

SEQ ID NO: 358351 - DNA, 25 bp, Homo sapien
tgttacgtgggctttagcgcgagct

SEQ ID NO: 358352 - DNA, 25 bp, Homo sapien
ctagataccattcagcatcactgaa

SEQ ID NO: 358353 - DNA, 25 bp, Homo sapien
cctagataccattcagcatcactga

SEQ ID NO: 358354 - DNA, 25 bp, Homo sapien
tcctagataccattcagcatcactg

SEQ ID NO: 358355 - DNA, 25 bp, Homo sapien
taccatctgtactatttacacccat

SEQ ID NO: 358356 - DNA, 25 bp, Homo sapien
gaaccgttaccatctgtactattta

SEQ ID NO: 358357 - DNA, 25 bp, Homo sapien
tgaggaaccgttaccatctgtacta

SEQ ID NO: 358358 - DNA, 25 bp, Homo sapien
tcctgaggaaccgttaccatctgta

SEQ ID NO: 358359 - DNA, 25 bp, Homo sapien
gctgctcaagacctttgatgagaat

SEQ ID NO: 358360 - DNA, 25 bp, Homo sapien
ccagcaccacgaatatatgggaaga

SEQ ID NO: 358361 - DNA, 25 bp, Homo sapien
gctcacacagtcttcagacttgcat

SEQ ID NO: 358362 - DNA, 25 bp, Homo sapien
gtgcccagcaccacgaatatatggg

SEQ ID NO: 358363 - DNA, 25 bp, Homo sapien
acgaatatatgggaagataacaact

SEQ ID NO: 358364 - DNA, 25 bp, Homo sapien
gggacaagatgtcccttgtcaggga

SEQ ID NO: 358365 - DNA, 25 bp, Homo sapien
atgtcccttgtcagggatgtcacag

SEQ ID NO: 358366 - DNA, 25 bp, Homo sapien
gacaagatgtcccttgtcagggatg

SEQ ID NO: 358367 - DNA, 25 bp, Homo sapien
caagatgtcccttgtcagggatgtc

SEQ ID NO: 358368 - DNA, 25 bp, Homo sapien
atctgtgctgatcccttttcagatg

SEQ ID NO: 358369 - DNA, 25 bp, Homo sapien
ttttcagatgaagagcggggggtcg

SEQ ID NO: 358370 - DNA, 25 bp, Homo sapien
actccaaatgacttggtgtcagagc

SEQ ID NO: 358371 - DNA, 25 bp, Homo sapien
ctgcttcaggtcagagaaccatgga

SEQ ID NO: 358372 - DNA, 25 bp, Homo sapien
agtgcgcaacgctgaacacagggct

SEQ ID NO: 358373 - DNA, 25 bp, Homo sapien
gaaagcaatgccctggactctcctt

SEQ ID NO: 358374 - DNA, 25 bp, Homo sapien
ttcccagtggggaagcacagttgga

SEQ ID NO: 358375 - DNA, 25 bp, Homo sapien
cagagactgggaggtcccgacacct

SEQ ID NO: 358376 - DNA, 25 bp, Homo sapien
tctaccattcgggtgtggctcgctc

SEQ ID NO: 358377 - DNA, 25 bp, Homo sapien
cagggctacactcgcaaaatggtcc

SEQ ID NO: 358378 - DNA, 25 bp, Homo sapien
acaaactgaatgataaagacccggg

SEQ ID NO: 358379 - DNA, 25 bp, Homo sapien
gaaacacaggcaaggtgctgccgag

SEQ ID NO: 358380 - DNA, 25 bp, Homo sapien
tgcacgttctaaaggcgagacagct

SEQ ID NO: 358381 - DNA, 25 bp, Homo sapien
gacagctgctttcggttgggaatca

SEQ ID NO: 358382 - DNA, 25 bp, Homo sapien
tacggtccaggccattggaactgca

SEQ ID NO: 358383 - DNA, 25 bp, Homo sapien
tacaggctttatccttacggtccag

SEQ ID NO: 358384 - DNA, 25 bp, Homo sapien
aagtcaaacgtgaggtcacactttc

SEQ ID NO: 358385 - DNA, 25 bp, Homo sapien
ctcattcatggagacggtgaagatg

SEQ ID NO: 358386 - DNA, 25 bp, Homo sapien
aaagtcaaacgtgaggtcacacttt

SEQ ID NO: 358387 - DNA, 25 bp, Homo sapien
aaacttctcattcatggagacggtg

SEQ ID NO: 358388 - DNA, 25 bp, Homo sapien
caaatctaagcaatgcagctggcta

SEQ ID NO: 358389 - DNA, 25 bp, Homo sapien
gtttaggatttggaatcaagacaat

SEQ ID NO: 358390 - DNA, 25 bp, Homo sapien
gctgtgacatgaatcaaatctaagc

SEQ ID NO: 358391 - DNA, 25 bp, Homo sapien
aagcaatgcagctggctactcggcc

SEQ ID NO: 358392 - DNA, 25 bp, Homo sapien
gaagatcttccgagcaaagacgcaa

SEQ ID NO: 358393 - DNA, 25 bp, Homo sapien
actcaagaagatcttccgagcaaag

SEQ ID NO: 358394 - DNA, 25 bp, Homo sapien
caagaagatcttccgagcaaagacg

SEQ ID NO: 358395 - DNA, 25 bp, Homo sapien
gatcttccgagcaaagacgcaatgt

SEQ ID NO: 358396 - DNA, 25 bp, Homo sapien
ctggtggcagtgctccgtcagggct

SEQ ID NO: 358397 - DNA, 25 bp, Homo sapien
tccagctgggccttgtcacaggaca

SEQ ID NO: 358398 - DNA, 25 bp, Homo sapien
agctgctccaccatcgtcaccaggt

SEQ ID NO: 358399 - DNA, 25 bp, Homo sapien
gggcctcagcgttgcagcactggtc

SEQ ID NO: 358400 - DNA, 25 bp, Homo sapien
tgctcaaaccaggagccgtagccca

SEQ ID NO: 358401 - DNA, 25 bp, Homo sapien
tacttgagaaaaagcacgttcgagt

SEQ ID NO: 358402 - DNA, 25 bp, Homo sapien
gcacgttcgagtccatgcggtgctc

SEQ ID NO: 358403 - DNA, 25 bp, Homo sapien
aactcctgcacgtgctcaaaccagg

SEQ ID NO: 358404 - DNA, 25 bp, Homo sapien
ttatcattcataaacctccggcaga

SEQ ID NO: 358405 - DNA, 25 bp, Homo sapien
tgaaaggtgcctcggtagctcatgg

SEQ ID NO: 358406 - DNA, 25 bp, Homo sapien
ctccggcagaattcttgaaaggtgc

SEQ ID NO: 358407 - DNA, 25 bp, Homo sapien
ccgcagagagcggtggaactgataa

SEQ ID NO: 358408 - DNA, 25 bp, Homo sapien
ttggggttgcgagccatatagatga

SEQ ID NO: 358409 - DNA, 25 bp, Homo sapien
cagatccttggggttgcgagccata

SEQ ID NO: 358410 - DNA, 25 bp, Homo sapien
gatccttggggttgcgagccatata

SEQ ID NO: 358411 - DNA, 25 bp, Homo sapien
ccttggggttgcgagccatatagat

SEQ ID NO: 358412 - DNA, 25 bp, Homo sapien
cttggagtctccattgtggaggtca

SEQ ID NO: 358413 - DNA, 25 bp, Homo sapien
tctccattgtggaggtcagagggca

SEQ ID NO: 358414 - DNA, 25 bp, Homo sapien
ggtcagagggcagaaagcggtaggg

SEQ ID NO: 358415 - DNA, 25 bp, Homo sapien
gcagaaagcggtagggcaggtggct

SEQ ID NO: 358416 - DNA, 25 bp, Homo sapien
ttgatgaggcggggagaggtcagtt

SEQ ID NO: 358417 - DNA, 25 bp, Homo sapien
cttgatgaggcggggagaggtcagt

SEQ ID NO: 358418 - DNA, 25 bp, Homo sapien
tgatgaggcggggagaggtcagttc

SEQ ID NO: 358419 - DNA, 25 bp, Homo sapien
gaccgggagctgctcgtcgatgttc

SEQ ID NO: 358420 - DNA, 25 bp, Homo sapien
gatgttcatcaagccgatctcatcg

SEQ ID NO: 358421 - DNA, 25 bp, Homo sapien
cttgatgatgtccaggcccggctgt

SEQ ID NO: 358422 - DNA, 25 bp, Homo sapien
tcagcgccctggctcaccaagtaga

SEQ ID NO: 358423 - DNA, 25 bp, Homo sapien
ccctgggatgcacgggacaggccct

SEQ ID NO: 358424 - DNA, 25 bp, Homo sapien
acaccctgggatgcacgggacaggc

SEQ ID NO: 358425 - DNA, 25 bp, Homo sapien
tgcacaccctgggatgcacgggaca

SEQ ID NO: 358426 - DNA, 25 bp, Homo sapien
gcagtgcacaccctgggatgcacgg

SEQ ID NO: 358427 - DNA, 25 bp, Homo sapien
ctgagtaggaagtaccaccatcctc

SEQ ID NO: 358428 - DNA, 25 bp, Homo sapien
tgagtaggaagtaccaccatcctca

SEQ ID NO: 358429 - DNA, 25 bp, Homo sapien
acagccaaccctgtggttccctcca

SEQ ID NO: 358430 - DNA, 25 bp, Homo sapien
ggagggtccacaagcactgccctta

SEQ ID NO: 358431 - DNA, 25 bp, Homo sapien
tccactagcctcgagcaggagggtc

SEQ ID NO: 358432 - DNA, 25 bp, Homo sapien
tgtggttccctccactagcctcgag

SEQ ID NO: 358433 - DNA, 25 bp, Homo sapien
tctgagtggcaaaccgatcaatacc

SEQ ID NO: 358434 - DNA, 25 bp, Homo sapien
gcagctcttcgcaagtcggctggaa

SEQ ID NO: 358435 - DNA, 25 bp, Homo sapien
tggccagtgactcgagccaaacgct

SEQ ID NO: 358436 - DNA, 25 bp, Homo sapien
acagtgacacctggacttgggtcga

SEQ ID NO: 358437 - DNA, 25 bp, Homo sapien
gaccctgggaaacgaattgcagcca

SEQ ID NO: 358438 - DNA, 25 bp, Homo sapien
cacttgcgggctaaatctctgacca

SEQ ID NO: 358439 - DNA, 25 bp, Homo sapien
ttctagctacgatcaagcaagggtg

SEQ ID NO: 358440 - DNA, 25 bp, Homo sapien
cagcgtgtgtgttcagtctgcccca

SEQ ID NO: 358441 - DNA, 25 bp, Homo sapien
tccatcttcccgcggcagaagggcg

SEQ ID NO: 358442 - DNA, 25 bp, Homo sapien
ggtgacgatccacacgtcgctgggc

SEQ ID NO: 358443 - DNA, 25 bp, Homo sapien
catggaactcgaagtacttgctctc

SEQ ID NO: 358444 - DNA, 25 bp, Homo sapien
ccgcaccgggaagttggcgatctcc

SEQ ID NO: 358445 - DNA, 25 bp, Homo sapien
ggcagctccgcaggcgtgacgtcat

SEQ ID NO: 358446 - DNA, 25 bp, Homo sapien
ctccgcgggtatgacgtcatggcgc

SEQ ID NO: 358447 - DNA, 25 bp, Homo sapien
acgctcgcgccccaccggcgcgcgg

SEQ ID NO: 358448 - DNA, 25 bp, Homo sapien
gcgctgcacgggcgtgacgtcatgg

SEQ ID NO: 358449 - DNA, 25 bp, Homo sapien
ggattgcaaattccaggaccccaga

SEQ ID NO: 358450 - DNA, 25 bp, Homo sapien
gttggattgcaaattccaggacccc

SEQ ID NO: 358451 - DNA, 25 bp, Homo sapien
tggattgcaaattccaggaccccag

SEQ ID NO: 358452 - DNA, 25 bp, Homo sapien
tgttggattgcaaattccaggaccc

SEQ ID NO: 358453 - DNA, 25 bp, Homo sapien
taaggtgctattgcattgtcgtttc

SEQ ID NO: 358454 - DNA, 25 bp, Homo sapien
agctctttaatttaagtccgagcta

SEQ ID NO: 358455 - DNA, 25 bp, Homo sapien
ctctttaatttaagtccgagctatt

SEQ ID NO: 358456 - DNA, 25 bp, Homo sapien
ctattgcattgtcgtttcgatttgc

SEQ ID NO: 358457 - DNA, 25 bp, Homo sapien
cagacagcgctttactagcatcacg

SEQ ID NO: 358458 - DNA, 25 bp, Homo sapien
gatgacatggagcaagtctgaagca

SEQ ID NO: 358459 - DNA, 25 bp, Homo sapien
aagcacatggcactggctcaggcag

SEQ ID NO: 358460 - DNA, 25 bp, Homo sapien
tcacgtgattccagctacacatggg

SEQ ID NO: 358461 - DNA, 25 bp, Homo sapien
ggcagggaggcttgtagcaggccca

SEQ ID NO: 358462 - DNA, 25 bp, Homo sapien
ggaaacacccagcacacaactggtg

SEQ ID NO: 358463 - DNA, 25 bp, Homo sapien
tgtggcccacaaacgggcaccatag

SEQ ID NO: 358464 - DNA, 25 bp, Homo sapien
ggcccaggaatgtggcccacaaacg

SEQ ID NO: 358465 - DNA, 25 bp, Homo sapien
acctcagaagatcaacacccttcgt

SEQ ID NO: 358466 - DNA, 25 bp, Homo sapien
ggaagacgcaggcagttggatttta

SEQ ID NO: 358467 - DNA, 25 bp, Homo sapien
ggattttagcaccacgtgagcaaaa

SEQ ID NO: 358468 - DNA, 25 bp, Homo sapien
agaagatcaacacccttcgtcccct

SEQ ID NO: 358469 - DNA, 25 bp, Homo sapien
gctgggatcctgaaaagacctggac

SEQ ID NO: 358470 - DNA, 25 bp, Homo sapien
gtctccacggagattggcagggcct

SEQ ID NO: 358471 - DNA, 25 bp, Homo sapien
cacaaaccttctgcaggaatgaggc

SEQ ID NO: 358472 - DNA, 25 bp, Homo sapien
tctggtctctgacgcgggcatcagg

SEQ ID NO: 358473 - DNA, 25 bp, Homo sapien
gcctggtgggtgggcccgagctcct

SEQ ID NO: 358474 - DNA, 25 bp, Homo sapien
aggcctggtgggtgggcccgagctc

SEQ ID NO: 358475 - DNA, 25 bp, Homo sapien
tcaggcctggtgggtgggcccgagc

SEQ ID NO: 358476 - DNA, 25 bp, Homo sapien
ctggtgggtgggcccgagctcctct

SEQ ID NO: 358477 - DNA, 25 bp, Homo sapien
cttgtttccaggacgcgagtggccg

SEQ ID NO: 358478 - DNA, 25 bp, Homo sapien
gagggggcttgtttccaggacgcga

SEQ ID NO: 358479 - DNA, 25 bp, Homo sapien
ggcttgtttccaggacgcgagtggc

SEQ ID NO: 358480 - DNA, 25 bp, Homo sapien
ggggcttgtttccaggacgcgagtg

SEQ ID NO: 358481 - DNA, 25 bp, Homo sapien
aggccctgcatccaccacaagtccg

SEQ ID NO: 358482 - DNA, 25 bp, Homo sapien
tggtcctggagaaaacctcgagggc

SEQ ID NO: 358483 - DNA, 25 bp, Homo sapien
agtccgccggcacatcgggcagcca

SEQ ID NO: 358484 - DNA, 25 bp, Homo sapien
aaacctcgagggccatgttcctcag

SEQ ID NO: 358485 - DNA, 25 bp, Homo sapien
cttctgctgcggaagtagatgtact

SEQ ID NO: 358486 - DNA, 25 bp, Homo sapien
agggtagcagcaggtacgtcagcac

SEQ ID NO: 358487 - DNA, 25 bp, Homo sapien
ttctgctgcggaagtagatgtactc

SEQ ID NO: 358488 - DNA, 25 bp, Homo sapien
gatccctcgtacatgctttcttcag

SEQ ID NO: 358489 - DNA, 25 bp, Homo sapien
gccccgagtgccagaagcgggccca

SEQ ID NO: 358490 - DNA, 25 bp, Homo sapien
accggctgggatccctcgtacatgc

SEQ ID NO: 358491 - DNA, 25 bp, Homo sapien
agaagcgggcccaccggctgggatc

SEQ ID NO: 358492 - DNA, 25 bp, Homo sapien
cctgcccacctgaagtctgtgggcc

SEQ ID NO: 358493 - DNA, 25 bp, Homo sapien
gccctgcccacctgaagtctgtggg

SEQ ID NO: 358494 - DNA, 25 bp, Homo sapien
gcaagagaagccctggcatggccct

SEQ ID NO: 358495 - DNA, 25 bp, Homo sapien
tgcaagagaagccctggcatggccc

SEQ ID NO: 358496 - DNA, 25 bp, Homo sapien
ctcgtgtggtctccggcatggaaag

SEQ ID NO: 358497 - DNA, 25 bp, Homo sapien
ttccagaatcccaagcttggacctc

SEQ ID NO: 358498 - DNA, 25 bp, Homo sapien
tctgcacgtcctcgtgtggtctccg

SEQ ID NO: 358499 - DNA, 25 bp, Homo sapien
cagaatcccaagcttggacctcagg

SEQ ID NO: 358500 - DNA, 25 bp, Homo sapien
tgagagctgctcaaagttgggtaca

SEQ ID NO: 358501 - DNA, 25 bp, Homo sapien
agagctgctcaaagttgggtacatc

SEQ ID NO: 358502 - DNA, 25 bp, Homo sapien
agcctccagctctggtgagagctgc

SEQ ID NO: 358503 - DNA, 25 bp, Homo sapien
tggtgagagctgctcaaagttgggt

SEQ ID NO: 358504 - DNA, 25 bp, Homo sapien
cagcatcccagtttccgtcagccgg

SEQ ID NO: 358505 - DNA, 25 bp, Homo sapien
catcccagtttccgtcagccggggc

SEQ ID NO: 358506 - DNA, 25 bp, Homo sapien
accagcgtccatagcactggttcct

SEQ ID NO: 358507 - DNA, 25 bp, Homo sapien
ccagcgtccatagcactggttcctt

SEQ ID NO: 358508 - DNA, 25 bp, Homo sapien
caggtagccttgtctgcagttgtcg

SEQ ID NO: 358509 - DNA, 25 bp, Homo sapien
tagccttgtctgcagttgtcggcca

SEQ ID NO: 358510 - DNA, 25 bp, Homo sapien
ggtagccttgtctgcagttgtcggc

SEQ ID NO: 358511 - DNA, 25 bp, Homo sapien
tccaggtagccttgtctgcagttgt

SEQ ID NO: 358512 - DNA, 25 bp, Homo sapien
gtcccatggaagggcgacaccgtga

SEQ ID NO: 358513 - DNA, 25 bp, Homo sapien
cgaggctggggggtatgagacatat

SEQ ID NO: 358514 - DNA, 25 bp, Homo sapien
aagggcgacaccgtgatggtggagg

SEQ ID NO: 358515 - DNA, 25 bp, Homo sapien
ggtatgagacatatgagccccagga

SEQ ID NO: 358516 - DNA, 25 bp, Homo sapien
aaagggcaagttgttgctcagagcc

SEQ ID NO: 358517 - DNA, 25 bp, Homo sapien
tgctcagagccccatcgatgtagcg

SEQ ID NO: 358518 - DNA, 25 bp, Homo sapien
ttgttgctcagagccccatcgatgt

SEQ ID NO: 358519 - DNA, 25 bp, Homo sapien
gcaagttgttgctcagagccccatc

SEQ ID NO: 358520 - DNA, 25 bp, Homo sapien
gggatcagcccgcagtagaaaggaa

SEQ ID NO: 358521 - DNA, 25 bp, Homo sapien
ggatcagcccgcagtagaaaggaaa

SEQ ID NO: 358522 - DNA, 25 bp, Homo sapien
tagaaaggaaagtataaggtgcaga

SEQ ID NO: 358523 - DNA, 25 bp, Homo sapien
gaaagtataaggtgcagaccaaggc

SEQ ID NO: 358524 - DNA, 25 bp, Homo sapien
gtcagtgaccaagaagttgcgtccg

SEQ ID NO: 358525 - DNA, 25 bp, Homo sapien
ggtcagcgaaatgcccagccgctgg

SEQ ID NO: 358526 - DNA, 25 bp, Homo sapien
ggatgcttaggctcagccgctccaa

SEQ ID NO: 358527 - DNA, 25 bp, Homo sapien
gctcatcgcaggtggcgaagtcagt

SEQ ID NO: 358528 - DNA, 25 bp, Homo sapien
cgcaggcattcggtggcgcccacgt

SEQ ID NO: 358529 - DNA, 25 bp, Homo sapien
gcgccggagaaggacaggttccatc

SEQ ID NO: 358530 - DNA, 25 bp, Homo sapien
gacttgccgcagacgatgctgactg

SEQ ID NO: 358531 - DNA, 25 bp, Homo sapien
ccagacgaggaaccgtagatgcggc

SEQ ID NO: 358532 - DNA, 25 bp, Homo sapien
gtcactccgtgacccgggatagggc

SEQ ID NO: 358533 - DNA, 25 bp, Homo sapien
gggtgatcgggacgaggaagggtca

SEQ ID NO: 358534 - DNA, 25 bp, Homo sapien
agggtcactccgtgacccgggatag

SEQ ID NO: 358535 - DNA, 25 bp, Homo sapien
gacgaggaagggtcactccgtgacc

SEQ ID NO: 358536 - DNA, 25 bp, Homo sapien
gtgagctccttgagggccaggtcct

SEQ ID NO: 358537 - DNA, 25 bp, Homo sapien
ccttgagggccaggtcctccatctg

SEQ ID NO: 358538 - DNA, 25 bp, Homo sapien
catgtgagctccttgagggccaggt

SEQ ID NO: 358539 - DNA, 25 bp, Homo sapien
gagctccttgagggccaggtcctcc

SEQ ID NO: 358540 - DNA, 25 bp, Homo sapien
gaagtgtggcacagtgtttgtggac

SEQ ID NO: 358541 - DNA, 25 bp, Homo sapien
aagtgtggcacagtgtttgtggact

SEQ ID NO: 358542 - DNA, 25 bp, Homo sapien
tctccattgcgggaaggacccagcc

SEQ ID NO: 358543 - DNA, 25 bp, Homo sapien
cagggggtaattagaagccatgtgc

SEQ ID NO: 358544 - DNA, 25 bp, Homo sapien
cccaggctatctccattgcgggaag

SEQ ID NO: 358545 - DNA, 25 bp, Homo sapien
ctggtggcaggtaccccaggctatc

SEQ ID NO: 358546 - DNA, 25 bp, Homo sapien
tgaaccaaggcaggctcacttctgg

SEQ ID NO: 358547 - DNA, 25 bp, Homo sapien
aaaaagcaaggtttgagcaggacct

SEQ ID NO: 358548 - DNA, 25 bp, Homo sapien
cttggaggtcgatcaagggttcacc

SEQ ID NO: 358549 - DNA, 25 bp, Homo sapien
tcagcagggacatgttccggaggtt

SEQ ID NO: 358550 - DNA, 25 bp, Homo sapien
cttgacgggttggtattgatcccgc

SEQ ID NO: 358551 - DNA, 25 bp, Homo sapien
cacagaagcttgcacagcacttgct

SEQ ID NO: 358552 - DNA, 25 bp, Homo sapien
cgggttggtattgatcccgccctgc

SEQ ID NO: 358553 - DNA, 25 bp, Homo sapien
ctcgcaggagctgacgccacagaag

SEQ ID NO: 358554 - DNA, 25 bp, Homo sapien
ccacgagtctcacggggtgtccatc

SEQ ID NO: 358555 - DNA, 25 bp, Homo sapien
ccagactgaccacgagtctcacggg

SEQ ID NO: 358556 - DNA, 25 bp, Homo sapien
tgagacccagactgaccacgagtct

SEQ ID NO: 358557 - DNA, 25 bp, Homo sapien
gaccacgagtctcacggggtgtcca

SEQ ID NO: 358558 - DNA, 25 bp, Homo sapien
ctcctccccacagccgtggcccagt

SEQ ID NO: 358559 - DNA, 25 bp, Homo sapien
ctccccacagccgtggcccagtcgc

SEQ ID NO: 358560 - DNA, 25 bp, Homo sapien
ctcctcctccccacagccgtggccc

SEQ ID NO: 358561 - DNA, 25 bp, Homo sapien
tcctcctccccacagccgtggccca

SEQ ID NO: 358562 - DNA, 25 bp, Homo sapien
ttactgaggactgcggttgcagccc

SEQ ID NO: 358563 - DNA, 25 bp, Homo sapien
cagagctgacgatccttactgagga

SEQ ID NO: 358564 - DNA, 25 bp, Homo sapien
tgacgatccttactgaggactgcgg

SEQ ID NO: 358565 - DNA, 25 bp, Homo sapien
ctgtcagagctgacgatccttactg

SEQ ID NO: 358566 - DNA, 25 bp, Homo sapien
ggcaggttctgtgccgaggaataaa

SEQ ID NO: 358567 - DNA, 25 bp, Homo sapien
accttcggagggtgccttatgagga

SEQ ID NO: 358568 - DNA, 25 bp, Homo sapien
gggagaagcaccactccatacgcat

SEQ ID NO: 358569 - DNA, 25 bp, Homo sapien
gctctgccaggacaagaccttcgga

SEQ ID NO: 358570 - DNA, 25 bp, Homo sapien
gagcagtgatcttatacatcaccat

SEQ ID NO: 358571 - DNA, 25 bp, Homo sapien
ggtcttgtggcctaggcattacttt

SEQ ID NO: 358572 - DNA, 25 bp, Homo sapien
ggtgttgggtgcagcccgggaggct

SEQ ID NO: 358573 - DNA, 25 bp, Homo sapien
ggctgagcagtgatcttatacatca

SEQ ID NO: 358574 - DNA, 25 bp, Homo sapien
aaggacaaatcccacaccgttgctg

SEQ ID NO: 358575 - DNA, 25 bp, Homo sapien
catagtaaggtgtcccctccttggg

SEQ ID NO: 358576 - DNA, 25 bp, Homo sapien
acttcggtcccttgatgtgtttgca

SEQ ID NO: 358577 - DNA, 25 bp, Homo sapien
taagccccggacatcagaaacatag

SEQ ID NO: 358578 - DNA, 25 bp, Homo sapien
ggatagggaggctccacatattcca

SEQ ID NO: 358579 - DNA, 25 bp, Homo sapien
tgtgttaacctggtcgtggccacag

SEQ ID NO: 358580 - DNA, 25 bp, Homo sapien
aaaatactgagtttggttcggatgt

SEQ ID NO: 358581 - DNA, 25 bp, Homo sapien
tagggaggctccacatattccagaa

SEQ ID NO: 358582 - DNA, 25 bp, Homo sapien
gaaaaaagagagcactgcaaccaga

SEQ ID NO: 358583 - DNA, 25 bp, Homo sapien
acactgggccaaggatggaggcgca

SEQ ID NO: 358584 - DNA, 25 bp, Homo sapien
tggcactgggcccatcagtgttccc

SEQ ID NO: 358585 - DNA, 25 bp, Homo sapien
gcagaggtgaggcaaggctggcact

SEQ ID NO: 358586 - DNA, 25 bp, Homo sapien
ccctgaatctggttcctatcccgtt

SEQ ID NO: 358587 - DNA, 25 bp, Homo sapien
gaaatgtcgggccaggtgtgtggac

SEQ ID NO: 358588 - DNA, 25 bp, Homo sapien
ctgccagcgtgggttgggaaatgtc

SEQ ID NO: 358589 - DNA, 25 bp, Homo sapien
aagggctgctctcacgtatgttctg

SEQ ID NO: 358590 - DNA, 25 bp, Homo sapien
gccagttctctcattgacagaaatg

SEQ ID NO: 358591 - DNA, 25 bp, Homo sapien
gacagaaatgtctctgtgaacagat

SEQ ID NO: 358592 - DNA, 25 bp, Homo sapien
cagaaatgtctctgtgaacagatca

SEQ ID NO: 358593 - DNA, 25 bp, Homo sapien
gctggaattagccagttctctcatt

SEQ ID NO: 358594 - DNA, 25 bp, Homo sapien
gatgttaaggatcaagtgggcacca

SEQ ID NO: 358595 - DNA, 25 bp, Homo sapien
tgcaacaacgcagagagtagactct

SEQ ID NO: 358596 - DNA, 25 bp, Homo sapien
aatgctttctctcgagtcgctgcgg

SEQ ID NO: 358597 - DNA, 25 bp, Homo sapien
gaagccgtttctctccaggacatgc

SEQ ID NO: 358598 - DNA, 25 bp, Homo sapien
gcctcctaaggagctgggacccaca

SEQ ID NO: 358599 - DNA, 25 bp, Homo sapien
gggacccacaggcatgcagcaccac

SEQ ID NO: 358600 - DNA, 25 bp, Homo sapien
gggtcttgctctgccgcttaggctg

SEQ ID NO: 358601 - DNA, 25 bp, Homo sapien
tcagcctcctaaggagctgggaccc

SEQ ID NO: 358602 - DNA, 25 bp, Homo sapien
aagtggaggtggccgttagccgaga

SEQ ID NO: 358603 - DNA, 25 bp, Homo sapien
gaagtggaggtggccgttagccgag

SEQ ID NO: 358604 - DNA, 25 bp, Homo sapien
gggtcttgccgtgttgtgcaggcta

SEQ ID NO: 358605 - DNA, 25 bp, Homo sapien
tgcaggctagtctcaagctgctagc

SEQ ID NO: 358606 - DNA, 25 bp, Homo sapien
ggtcttgccgtgttgtgcaggctag

SEQ ID NO: 358607 - DNA, 25 bp, Homo sapien
gctagtctcaagctgctagcctcaa

SEQ ID NO: 358608 - DNA, 25 bp, Homo sapien
ccacctccgtgcggttggccagact

SEQ ID NO: 358609 - DNA, 25 bp, Homo sapien
accacctccgtgcggttggccagac

SEQ ID NO: 358610 - DNA, 25 bp, Homo sapien
tcccaggcactcatggcttctctgg

SEQ ID NO: 358611 - DNA, 25 bp, Homo sapien
ctcccaggcactcatggcttctctg

SEQ ID NO: 358612 - DNA, 25 bp, Homo sapien
gctcccaggcactcatggcttctct

SEQ ID NO: 358613 - DNA, 25 bp, Homo sapien
atgggtgaatgcagacagctgtgcc

SEQ ID NO: 358614 - DNA, 25 bp, Homo sapien
ctggggccaggcgtacccaacatga

SEQ ID NO: 358615 - DNA, 25 bp, Homo sapien
cagacagctgtgccaatagaaaagg

SEQ ID NO: 358616 - DNA, 25 bp, Homo sapien
atagaaaagggctacctggggccag

SEQ ID NO: 358617 - DNA, 25 bp, Homo sapien
ggaattatttccagctgcaattgga

SEQ ID NO: 358618 - DNA, 25 bp, Homo sapien
gatggacggatgtggaataaaacaa

SEQ ID NO: 358619 - DNA, 25 bp, Homo sapien
gctgatggattgctggatagataga

SEQ ID NO: 358620 - DNA, 25 bp, Homo sapien
gaaatttgtgtcgtatgaagtccca

SEQ ID NO: 358621 - DNA, 25 bp, Homo sapien
ttgcagagatgggacgagaagacac

SEQ ID NO: 358622 - DNA, 25 bp, Homo sapien
caccctgggaactggcccgtgtctt

SEQ ID NO: 358623 - DNA, 25 bp, Homo sapien
cacttgtgatgtggttacagctgta

SEQ ID NO: 358624 - DNA, 25 bp, Homo sapien
tgtcttcacacgtcctgcactgctg

SEQ ID NO: 358625 - DNA, 25 bp, Homo sapien
tcttgcaggaagtcagaagtgtact

SEQ ID NO: 358626 - DNA, 25 bp, Homo sapien
ggacccttagcacaacagagctgct

SEQ ID NO: 358627 - DNA, 25 bp, Homo sapien
taggagatgcgtcctgaggctggcc

SEQ ID NO: 358628 - DNA, 25 bp, Homo sapien
tctggagtaggacccttagcacaac

SEQ ID NO: 358629 - DNA, 25 bp, Homo sapien
cagggagcacgagttgtttataggc

SEQ ID NO: 358630 - DNA, 25 bp, Homo sapien
caatggcaggagcagtgtatgcctc

SEQ ID NO: 358631 - DNA, 25 bp, Homo sapien
ccagcctcaacatagcaggaagttt

SEQ ID NO: 358632 - DNA, 25 bp, Homo sapien
tagtcctctgtcttgtaagcccggt

SEQ ID NO: 358633 - DNA, 25 bp, Homo sapien
ctgcccaccgtgagatagataagcc

SEQ ID NO: 358634 - DNA, 25 bp, Homo sapien
tttctcaggtgagatgctgagggcc

SEQ ID NO: 358635 - DNA, 25 bp, Homo sapien
ttctcaggtgagatgctgagggcca

SEQ ID NO: 358636 - DNA, 25 bp, Homo sapien
tgagatagataagccagggtgcctg

SEQ ID NO: 358637 - DNA, 25 bp, Homo sapien
gaggaggtggcctgccccaactccc

SEQ ID NO: 358638 - DNA, 25 bp, Homo sapien
gctgctgtgtcccatggaggaggtg

SEQ ID NO: 358639 - DNA, 25 bp, Homo sapien
ggaggaggtggcctgccccaactcc

SEQ ID NO: 358640 - DNA, 25 bp, Homo sapien
catggaggaggtggcctgccccaac

SEQ ID NO: 358641 - DNA, 25 bp, Homo sapien
gacagtagcaggatcgagaagccat

SEQ ID NO: 358642 - DNA, 25 bp, Homo sapien
tgacatctgggctgatattcaccgt

SEQ ID NO: 358643 - DNA, 25 bp, Homo sapien
gccagtaattggagggacagtagca

SEQ ID NO: 358644 - DNA, 25 bp, Homo sapien
gaagagctagtgcaccatccttgtg

SEQ ID NO: 358645 - DNA, 25 bp, Homo sapien
ccttttctgctgtgggcattgcatc

SEQ ID NO: 358646 - DNA, 25 bp, Homo sapien
ccctgtgggccgtgaaggcctttct

SEQ ID NO: 358647 - DNA, 25 bp, Homo sapien
cctgatgggtagagttgtctgtgcc

SEQ ID NO: 358648 - DNA, 25 bp, Homo sapien
tccaaaggtgcagtctccagcaggg

SEQ ID NO: 358649 - DNA, 25 bp, Homo sapien
cagtgctgccgggagaggcccgaga

SEQ ID NO: 358650 - DNA, 25 bp, Homo sapien
tgtgtcccccgaggcagccagtgct

SEQ ID NO: 358651 - DNA, 25 bp, Homo sapien
gagaggcccgagactccttctgggt

SEQ ID NO: 358652 - DNA, 25 bp, Homo sapien
tgccgggagaggcccgagactcctt

SEQ ID NO: 358653 - DNA, 25 bp, Homo sapien
cacggcactgtcctccatgacgggc

SEQ ID NO: 358654 - DNA, 25 bp, Homo sapien
ccatgacgggctcagctggctgcct

SEQ ID NO: 358655 - DNA, 25 bp, Homo sapien
actgtcctccatgacgggctcagct

SEQ ID NO: 358656 - DNA, 25 bp, Homo sapien
cccactgtctccacggcactgtcct

SEQ ID NO: 358657 - DNA, 25 bp, Homo sapien
ttctccatttgtcagagatgagttg

SEQ ID NO: 358658 - DNA, 25 bp, Homo sapien
cctcccctagtgctgggttctctgc

SEQ ID NO: 358659 - DNA, 25 bp, Homo sapien
cacaatcgctgaccgtgacttcctt

SEQ ID NO: 358660 - DNA, 25 bp, Homo sapien
tttgtcagagatgagttggcctccc

SEQ ID NO: 358661 - DNA, 25 bp, Homo sapien
gattcttgaaaatgccgatggtgac

SEQ ID NO: 358662 - DNA, 25 bp, Homo sapien
cgagcttgggcaccccgggattctt

SEQ ID NO: 358663 - DNA, 25 bp, Homo sapien
cttggtgaacccagggtgggctctt

SEQ ID NO: 358664 - DNA, 25 bp, Homo sapien
gcagacacttggcttccatagccca

SEQ ID NO: 358665 - DNA, 25 bp, Homo sapien
actgagatgcctgttactgcaactg

SEQ ID NO: 358666 - DNA, 25 bp, Homo sapien
cagacactgagatgcctgttactgc

SEQ ID NO: 358667 - DNA, 25 bp, Homo sapien
acactgagatgcctgttactgcaac

SEQ ID NO: 358668 - DNA, 25 bp, Homo sapien
agacactgagatgcctgttactgca

SEQ ID NO: 358669 - DNA, 25 bp, Homo sapien
gaactgggccgtgaacagcttttgc

SEQ ID NO: 358670 - DNA, 25 bp, Homo sapien
gggtggcagtggaactgggccgtga

SEQ ID NO: 358671 - DNA, 25 bp, Homo sapien
tggcagtggaactgggccgtgaaca

SEQ ID NO: 358672 - DNA, 25 bp, Homo sapien
agtggaactgggccgtgaacagctt

SEQ ID NO: 358673 - DNA, 25 bp, Homo sapien
ctataggcttgggatgaatggctgc

SEQ ID NO: 358674 - DNA, 25 bp, Homo sapien
cacttctgtatcctgagtccctgga

SEQ ID NO: 358675 - DNA, 25 bp, Homo sapien
gcagactacagactacagccttgaa

SEQ ID NO: 358676 - DNA, 25 bp, Homo sapien
tctgaattcatagcatggcctggac

SEQ ID NO: 358677 - DNA, 25 bp, Homo sapien
tttgagttcccgcacactcatttga

SEQ ID NO: 358678 - DNA, 25 bp, Homo sapien
ttgagttcccgcacactcatttgac

SEQ ID NO: 358679 - DNA, 25 bp, Homo sapien
atttgagttcccgcacactcatttg

SEQ ID NO: 358680 - DNA, 25 bp, Homo sapien
ttatttgagttcccgcacactcatt

SEQ ID NO: 358681 - DNA, 25 bp, Homo sapien
gaacgtgggacgtccaactgcagtt

SEQ ID NO: 358682 - DNA, 25 bp, Homo sapien
cgcatctgagcgaggcacagggctc

SEQ ID NO: 358683 - DNA, 25 bp, Homo sapien
aactgcagttgggatgttcttttaa

SEQ ID NO: 358684 - DNA, 25 bp, Homo sapien
tttaaaagagcatgtgccgctccca

SEQ ID NO: 358685 - DNA, 25 bp, Homo sapien
cattttacagccccaccagtaaggt

SEQ ID NO: 358686 - DNA, 25 bp, Homo sapien
taagctgcctcacacagccacgtgt

SEQ ID NO: 358687 - DNA, 25 bp, Homo sapien
cagccacgtgttcagtttctaaaga

SEQ ID NO: 358688 - DNA, 25 bp, Homo sapien
taggcatctgcctaatgattaatta

SEQ ID NO: 358689 - DNA, 25 bp, Homo sapien
tatgtaaacagtatccctgggagcc

SEQ ID NO: 358690 - DNA, 25 bp, Homo sapien
taagggtcaccgttctcagtgcagt

SEQ ID NO: 358691 - DNA, 25 bp, Homo sapien
caaggtcactttcacgggtgggaca

SEQ ID NO: 358692 - DNA, 25 bp, Homo sapien
ggttttcccggttatcagctctcag

SEQ ID NO: 358693 - DNA, 25 bp, Homo sapien
ttaagcaccagcgtgggacgtgttg

SEQ ID NO: 358694 - DNA, 25 bp, Homo sapien
gacgtgttggtgctacagcaaggaa

SEQ ID NO: 358695 - DNA, 25 bp, Homo sapien
aagtgcgcaggcttgtcttccagag

SEQ ID NO: 358696 - DNA, 25 bp, Homo sapien
cagcaaggaactagggcactgtgca

SEQ ID NO: 358697 - DNA, 25 bp, Homo sapien
tctcaagggatgcttaggtgaaccc

SEQ ID NO: 358698 - DNA, 25 bp, Homo sapien
ctattgcttgcggacaggtggctca

SEQ ID NO: 358699 - DNA, 25 bp, Homo sapien
taagcttgcggctcggacattgaca

SEQ ID NO: 358700 - DNA, 25 bp, Homo sapien
tctgtgagacagcaagtaccgtgac

SEQ ID NO: 358701 - DNA, 25 bp, Homo sapien
ccctgagtttgctcctaatcttaga

SEQ ID NO: 358702 - DNA, 25 bp, Homo sapien
gtttgctcctaatcttagaagtccg

SEQ ID NO: 358703 - DNA, 25 bp, Homo sapien
gcacaggcagcatttcctcctgtgc

SEQ ID NO: 358704 - DNA, 25 bp, Homo sapien
ctaatcttagaagtccgcggaaggg

SEQ ID NO: 358705 - DNA, 25 bp, Homo sapien
gtccctggcatctctgtagaagttg

SEQ ID NO: 358706 - DNA, 25 bp, Homo sapien
ggctgtccctggcatctctgtagaa

SEQ ID NO: 358707 - DNA, 25 bp, Homo sapien
ctgtccctggcatctctgtagaagt

SEQ ID NO: 358708 - DNA, 25 bp, Homo sapien
cggctgtccctggcatctctgtaga

SEQ ID NO: 358709 - DNA, 25 bp, Homo sapien
caggtgcggacagtgccattaggct

SEQ ID NO: 358710 - DNA, 25 bp, Homo sapien
cattaggctggtaaaggttgggaca

SEQ ID NO: 358711 - DNA, 25 bp, Homo sapien
tctgcaggtgcggacagtgccatta

SEQ ID NO: 358712 - DNA, 25 bp, Homo sapien
gtgacaattcagtctctggccttgg

SEQ ID NO: 358713 - DNA, 25 bp, Homo sapien
gtcctgacggatgtagtcactctca

SEQ ID NO: 358714 - DNA, 25 bp, Homo sapien
gtgtcctgacggatgtagtcactct

SEQ ID NO: 358715 - DNA, 25 bp, Homo sapien
tgtcctgacggatgtagtcactctc

SEQ ID NO: 358716 - DNA, 25 bp, Homo sapien
agcccacggattgcacctgggatgg

SEQ ID NO: 358717 - DNA, 25 bp, Homo sapien
acaggacggtgcctggtatgttgtt

SEQ ID NO: 358718 - DNA, 25 bp, Homo sapien
ttgttggagcccacggattgcacct

SEQ ID NO: 358719 - DNA, 25 bp, Homo sapien
ggtatgttgttggagcccacggatt

SEQ ID NO: 358720 - DNA, 25 bp, Homo sapien
gatgtcccacagactgactcatggc

SEQ ID NO: 358721 - DNA, 25 bp, Homo sapien
tccctcttggatgccgtcaacgttg

SEQ ID NO: 358722 - DNA, 25 bp, Homo sapien
gctggctccatatttcccttaaacg

SEQ ID NO: 358723 - DNA, 25 bp, Homo sapien
gcagacttgagtcccgaatctccct

SEQ ID NO: 358724 - DNA, 25 bp, Homo sapien
tcctctggtggggagtggtttgcag

SEQ ID NO: 358725 - DNA, 25 bp, Homo sapien
ttctgccgggccctcctctggtggg

SEQ ID NO: 358726 - DNA, 25 bp, Homo sapien
gggagtggtttgcagagggaggtgg

SEQ ID NO: 358727 - DNA, 25 bp, Homo sapien
cttctgttctgccgggccctcctct

SEQ ID NO: 358728 - DNA, 25 bp, Homo sapien
aacgtggcaacatcctcgggcctgg

SEQ ID NO: 358729 - DNA, 25 bp, Homo sapien
aggaacgtggcaacatcctcgggcc

SEQ ID NO: 358730 - DNA, 25 bp, Homo sapien
cgtggcaacatcctcgggcctggct

SEQ ID NO: 358731 - DNA, 25 bp, Homo sapien
gcaggaacgtggcaacatcctcggg

SEQ ID NO: 358732 - DNA, 25 bp, Homo sapien
tgcttgctcctttagcctgaggtgg

SEQ ID NO: 358733 - DNA, 25 bp, Homo sapien
cactgcttgctcctttagcctgagg

SEQ ID NO: 358734 - DNA, 25 bp, Homo sapien
tgctcctttagcctgaggtgggccc

SEQ ID NO: 358735 - DNA, 25 bp, Homo sapien
ggcacagcagcttccctcggtgccc

SEQ ID NO: 358736 - DNA, 25 bp, Homo sapien
ctggccacgcgattcggcagcactt

SEQ ID NO: 358737 - DNA, 25 bp, Homo sapien
agcacttggattttgcccagccagc

SEQ ID NO: 358738 - DNA, 25 bp, Homo sapien
cacgcgattcggcagcacttggatt

SEQ ID NO: 358739 - DNA, 25 bp, Homo sapien
catttcttatgattgatggagtgcg

SEQ ID NO: 358740 - DNA, 25 bp, Homo sapien
atactgctgttcagcggtggcctgg

SEQ ID NO: 358741 - DNA, 25 bp, Homo sapien
ttcaatactgctgttcagcggtggc

SEQ ID NO: 358742 - DNA, 25 bp, Homo sapien
ccttcaatactgctgttcagcggtg

SEQ ID NO: 358743 - DNA, 25 bp, Homo sapien
caatactgctgttcagcggtggcct

SEQ ID NO: 358744 - DNA, 25 bp, Homo sapien
cccgcaatgtgtgcacggcctgtgg

SEQ ID NO: 358745 - DNA, 25 bp, Homo sapien
gtgagcatctccccgcaatgtgtgc

SEQ ID NO: 358746 - DNA, 25 bp, Homo sapien
tctggaaggtcatcagcggtgggct

SEQ ID NO: 358747 - DNA, 25 bp, Homo sapien
ggtcatcagcggtgggctgtgagca

SEQ ID NO: 358748 - DNA, 25 bp, Homo sapien
cgccgggggtcctgtttcatccatc

SEQ ID NO: 358749 - DNA, 25 bp, Homo sapien
catccatcgtccttggatgccccac

SEQ ID NO: 358750 - DNA, 25 bp, Homo sapien
cgggggtcctgtttcatccatcgtc

SEQ ID NO: 358751 - DNA, 25 bp, Homo sapien
tttcatccatcgtccttggatgccc

SEQ ID NO: 358752 - DNA, 25 bp, Homo sapien
tgccgagtaatacaaaaggtccaga

SEQ ID NO: 358753 - DNA, 25 bp, Homo sapien
gccaggtagaccttgcagatgtcgt

SEQ ID NO: 358754 - DNA, 25 bp, Homo sapien
cactcccaacaaggcggtgtaattg

SEQ ID NO: 358755 - DNA, 25 bp, Homo sapien
gaaaaatccatagatccacactccc

SEQ ID NO: 358756 - DNA, 25 bp, Homo sapien
tttttcttcggtggttcccatggca

SEQ ID NO: 358757 - DNA, 25 bp, Homo sapien
ccacggaattgctctaagtgccagg

SEQ ID NO: 358758 - DNA, 25 bp, Homo sapien
cggaattgctctaagtgccaggttt

SEQ ID NO: 358759 - DNA, 25 bp, Homo sapien
attgctctaagtgccaggtttttct

SEQ ID NO: 358760 - DNA, 25 bp, Homo sapien
aggagcagatccgtcagcaggaaga

SEQ ID NO: 358761 - DNA, 25 bp, Homo sapien
acaggagcagatccgtcagcaggaa

SEQ ID NO: 358762 - DNA, 25 bp, Homo sapien
caggagcagatccgtcagcaggaag

SEQ ID NO: 358763 - DNA, 25 bp, Homo sapien
cacaggagcagatccgtcagcagga

SEQ ID NO: 358764 - DNA, 25 bp, Homo sapien
acagatcgcccagggacctgagtct

SEQ ID NO: 358765 - DNA, 25 bp, Homo sapien
acggaggcttccacagatcgcccag

SEQ ID NO: 358766 - DNA, 25 bp, Homo sapien
gggacctgagtctgagtcgccattg

SEQ ID NO: 358767 - DNA, 25 bp, Homo sapien
ctgagtctgagtcgccattgctggt

SEQ ID NO: 358768 - DNA, 25 bp, Homo sapien
ggaactccgtctcgttgcagcagta

SEQ ID NO: 358769 - DNA, 25 bp, Homo sapien
ttgtgcatgtaaccctcggagctgg

SEQ ID NO: 358770 - DNA, 25 bp, Homo sapien
tggccgtgaggttcgcctgcatcac

SEQ ID NO: 358771 - DNA, 25 bp, Homo sapien
tttgaagaccgtgttgttatggtga

SEQ ID NO: 358772 - DNA, 25 bp, Homo sapien
cttcccggagccaacagagccctgg

SEQ ID NO: 358773 - DNA, 25 bp, Homo sapien
atttggtaacgatgaagcctccccg

SEQ ID NO: 358774 - DNA, 25 bp, Homo sapien
cagcgccatgggctttggccatttg

SEQ ID NO: 358775 - DNA, 25 bp, Homo sapien
caccactgggcggtcagcgccatgg

SEQ ID NO: 358776 - DNA, 25 bp, Homo sapien
actggtcatcgtctggcttgcattg

SEQ ID NO: 358777 - DNA, 25 bp, Homo sapien
gacggcgagcacgttcaaggactgc

SEQ ID NO: 358778 - DNA, 25 bp, Homo sapien
aacagcaatgagaagaggacggcga

SEQ ID NO: 358779 - DNA, 25 bp, Homo sapien
gcttgcattgatccgtccagagctg

SEQ ID NO: 358780 - DNA, 25 bp, Homo sapien
tgcatacttgggggcagggtctgat

SEQ ID NO: 358781 - DNA, 25 bp, Homo sapien
ctgcggtcccacagatttggaaggt

SEQ ID NO: 358782 - DNA, 25 bp, Homo sapien
acgtagtagttgctctgtgtgcagg

SEQ ID NO: 358783 - DNA, 25 bp, Homo sapien
tcatcgccatggctgactgcggtcc

SEQ ID NO: 358784 - DNA, 25 bp, Homo sapien
cttggctgctgctgtattgtgagtc

SEQ ID NO: 358785 - DNA, 25 bp, Homo sapien
gtggatgcctttcccgggttgctgt

SEQ ID NO: 358786 - DNA, 25 bp, Homo sapien
cctggagtggatgcctttcccgggt

SEQ ID NO: 358787 - DNA, 25 bp, Homo sapien
tgcctttcccgggttgctgtccagc

SEQ ID NO: 358788 - DNA, 25 bp, Homo sapien
gagtggatgcctttcccgggttgct

SEQ ID NO: 358789 - DNA, 25 bp, Homo sapien
ggaacatctgtgcaatttactatca

SEQ ID NO: 358790 - DNA, 25 bp, Homo sapien
atttactatcaaccacgctgtcacc

SEQ ID NO: 358791 - DNA, 25 bp, Homo sapien
acatctgtgcaatttactatcaacc

SEQ ID NO: 358792 - DNA, 25 bp, Homo sapien
ccggaacatctgtgcaatttactat

SEQ ID NO: 358793 - DNA, 25 bp, Homo sapien
gaaagcgcagtcctgctggagccgc

SEQ ID NO: 358794 - DNA, 25 bp, Homo sapien
ggaacccaaacagcgcacagactgt

SEQ ID NO: 358795 - DNA, 25 bp, Homo sapien
gcacagactgtttggaaagcgcagt

SEQ ID NO: 358796 - DNA, 25 bp, Homo sapien
gaacaaagggaacccaaacagcgca

SEQ ID NO: 358797 - DNA, 25 bp, Homo sapien
tgtcggccaggattccgcagggcag

SEQ ID NO: 358798 - DNA, 25 bp, Homo sapien
tgcggaggctgcttctgcgggcatc

SEQ ID NO: 358799 - DNA, 25 bp, Homo sapien
aaatccatccgcctgtggtgtcggc

SEQ ID NO: 358800 - DNA, 25 bp, Homo sapien
ttctgcgggcatcacggccactgtc

SEQ ID NO: 358801 - DNA, 25 bp, Homo sapien
cctgggcttgttgctgtccagtacg

SEQ ID NO: 358802 - DNA, 25 bp, Homo sapien
cagctcagggcatagatgtgtgtgt

SEQ ID NO: 358803 - DNA, 25 bp, Homo sapien
gcaaggctggcaccgggagaagcgg

SEQ ID NO: 358804 - DNA, 25 bp, Homo sapien
tgtccagtacgcagagggcaaggct

SEQ ID NO: 358805 - DNA, 25 bp, Homo sapien
aggccgggggagcacgtccctccag

SEQ ID NO: 358806 - DNA, 25 bp, Homo sapien
tggcgaggccgggggagcacgtccc

SEQ ID NO: 358807 - DNA, 25 bp, Homo sapien
gcgaggccgggggagcacgtccctc

SEQ ID NO: 358808 - DNA, 25 bp, Homo sapien
agctggcgaggccgggggagcacgt

SEQ ID NO: 358809 - DNA, 25 bp, Homo sapien
cttttgacgatacgagaggaaactc

SEQ ID NO: 358810 - DNA, 25 bp, Homo sapien
gggcagtagtcacatgtagcatcaa

SEQ ID NO: 358811 - DNA, 25 bp, Homo sapien
taaaaggtcgctcaggtgatctgga

SEQ ID NO: 358812 - DNA, 25 bp, Homo sapien
caatgacagagctgtgcggctggta

SEQ ID NO: 358813 - DNA, 25 bp, Homo sapien
ctggaggccgttcaccttcccttgg

SEQ ID NO: 358814 - DNA, 25 bp, Homo sapien
ggctggattctctggaggccgttca

SEQ ID NO: 358815 - DNA, 25 bp, Homo sapien
gaggccaagggcgtgggctggattc

SEQ ID NO: 358816 - DNA, 25 bp, Homo sapien
caagggcgtgggctggattctctgg

SEQ ID NO: 358817 - DNA, 25 bp, Homo sapien
aggcaacttggagctggccagccat

SEQ ID NO: 358818 - DNA, 25 bp, Homo sapien
aatgttactcatggtgtgaagcagc

SEQ ID NO: 358819 - DNA, 25 bp, Homo sapien
gagactctccttcggagaaggctag

SEQ ID NO: 358820 - DNA, 25 bp, Homo sapien
aacatcccagggaaatgttactcat

SEQ ID NO: 358821 - DNA, 25 bp, Homo sapien
gcagctgtccacaggggatcccctg

SEQ ID NO: 358822 - DNA, 25 bp, Homo sapien
caagcctgcatgacgctggtgtgag

SEQ ID NO: 358823 - DNA, 25 bp, Homo sapien
aagcctgcatgacgctggtgtgagc

SEQ ID NO: 358824 - DNA, 25 bp, Homo sapien
tcaagcctgcatgacgctggtgtga

SEQ ID NO: 358825 - DNA, 25 bp, Homo sapien
tccactaaattgcttaagagagaag

SEQ ID NO: 358826 - DNA, 25 bp, Homo sapien
taaattgcttaagagagaagtcgct

SEQ ID NO: 358827 - DNA, 25 bp, Homo sapien
tcctccactaaattgcttaagagag

SEQ ID NO: 358828 - DNA, 25 bp, Homo sapien
cactaaattgcttaagagagaagtc

SEQ ID NO: 358829 - DNA, 25 bp, Homo sapien
tgggcagccccggattgttcagtag

SEQ ID NO: 358830 - DNA, 25 bp, Homo sapien
gcagccccggattgttcagtagatc

SEQ ID NO: 358831 - DNA, 25 bp, Homo sapien
gccccggattgttcagtagatcccc

SEQ ID NO: 358832 - DNA, 25 bp, Homo sapien
cccggattgttcagtagatccccgt

SEQ ID NO: 358833 - DNA, 25 bp, Homo sapien
aaactggaagtgacaaggcacagag

SEQ ID NO: 358834 - DNA, 25 bp, Homo sapien
ggtcgcagatggcaattcgcccgtc

SEQ ID NO: 358835 - DNA, 25 bp, Homo sapien
actggaagtgacaaggcacagagcg

SEQ ID NO: 358836 - DNA, 25 bp, Homo sapien
cacagagcgggtcgcagatggcaat

SEQ ID NO: 358837 - DNA, 25 bp, Homo sapien
tggcgatgccaaaggtagcccacgt

SEQ ID NO: 358838 - DNA, 25 bp, Homo sapien
tctgtggcaggcacaactctaggtc

SEQ ID NO: 358839 - DNA, 25 bp, Homo sapien
aaaccgaggctagctggagaagtcc

SEQ ID NO: 358840 - DNA, 25 bp, Homo sapien
taatccacacggcaattcgacgcca

SEQ ID NO: 358841 - DNA, 25 bp, Homo sapien
ctggctcgggcttcaagagggcagg

SEQ ID NO: 358842 - DNA, 25 bp, Homo sapien
gacactggccctcccgttccatggt

SEQ ID NO: 358843 - DNA, 25 bp, Homo sapien
ggttctgcgcttcaaacacgctgga

SEQ ID NO: 358844 - DNA, 25 bp, Homo sapien
accggccctatggtgcgtagctggt

SEQ ID NO: 358845 - DNA, 25 bp, Homo sapien
tttcttgttaacggtcagttctgca

SEQ ID NO: 358846 - DNA, 25 bp, Homo sapien
ttaacggtcagttctgcaccctggg

SEQ ID NO: 358847 - DNA, 25 bp, Homo sapien
ctttcttgttaacggtcagttctgc

SEQ ID NO: 358848 - DNA, 25 bp, Homo sapien
ttgttaacggtcagttctgcaccct

SEQ ID NO: 358849 - DNA, 25 bp, Homo sapien
caggatttccgtggacatggtttga

SEQ ID NO: 358850 - DNA, 25 bp, Homo sapien
tcaatttatctgagagccgcacgtt

SEQ ID NO: 358851 - DNA, 25 bp, Homo sapien
tcctcgaggaattagacagttcagt

SEQ ID NO: 358852 - DNA, 25 bp, Homo sapien
catggtttgacaatttcctcgagga

SEQ ID NO: 358853 - DNA, 25 bp, Homo sapien
gatgttggtgctccagtcagctggg

SEQ ID NO: 358854 - DNA, 25 bp, Homo sapien
cctttccactgtaacggacagggtg

SEQ ID NO: 358855 - DNA, 25 bp, Homo sapien
tttccactgtaacggacagggtggc

SEQ ID NO: 358856 - DNA, 25 bp, Homo sapien
ggccccgcactcccgacttgctgct

SEQ ID NO: 358857 - DNA, 25 bp, Homo sapien
acctgtcgtggactttgcttgggca

SEQ ID NO: 358858 - DNA, 25 bp, Homo sapien
ggactttgacagtttgttcctgcag

SEQ ID NO: 358859 - DNA, 25 bp, Homo sapien
cacatgtttgactgaagccactggg

SEQ ID NO: 358860 - DNA, 25 bp, Homo sapien
tggggaatcacctgcacctgtcgtg

SEQ ID NO: 358861 - DNA, 25 bp, Homo sapien
caacaattgcaccataggccgtgct

SEQ ID NO: 358862 - DNA, 25 bp, Homo sapien
tcaaccaacaattgcaccataggcc

SEQ ID NO: 358863 - DNA, 25 bp, Homo sapien
aaccaacaattgcaccataggccgt

SEQ ID NO: 358864 - DNA, 25 bp, Homo sapien
ccaacaattgcaccataggccgtgc

SEQ ID NO: 358865 - DNA, 25 bp, Homo sapien
tgctccaggcgggctacacccaggg

SEQ ID NO: 358866 - DNA, 25 bp, Homo sapien
tctcttagcaaccagccatgtgggc

SEQ ID NO: 358867 - DNA, 25 bp, Homo sapien
ggtctcttagcaaccagccatgtgg

SEQ ID NO: 358868 - DNA, 25 bp, Homo sapien
agcctgaaatttggctgtcggcctc

SEQ ID NO: 358869 - DNA, 25 bp, Homo sapien
aagccctgggcgatcggcccgcggg

SEQ ID NO: 358870 - DNA, 25 bp, Homo sapien
catgctcacgtcttcctaccaagcc

SEQ ID NO: 358871 - DNA, 25 bp, Homo sapien
ctggcgtaggagtgctgccacagct

SEQ ID NO: 358872 - DNA, 25 bp, Homo sapien
ctccatgttcagtgtgccccacatg

SEQ ID NO: 358873 - DNA, 25 bp, Homo sapien
gatggacagtagaggcggaagagga

SEQ ID NO: 358874 - DNA, 25 bp, Homo sapien
caagcctttattctgtcttcggtta

SEQ ID NO: 358875 - DNA, 25 bp, Homo sapien
tccaagcctttattctgtcttcggt

SEQ ID NO: 358876 - DNA, 25 bp, Homo sapien
ccaagcctttattctgtcttcggtt

SEQ ID NO: 358877 - DNA, 25 bp, Homo sapien
ctccaagcctttattctgtcttcgg

SEQ ID NO: 358878 - DNA, 25 bp, Homo sapien
cccccagggtcgcatacagcagctg

SEQ ID NO: 358879 - DNA, 25 bp, Homo sapien
ttcccccccagggtcgcatacagca

SEQ ID NO: 358880 - DNA, 25 bp, Homo sapien
ccagggtcgcatacagcagctgggt

SEQ ID NO: 358881 - DNA, 25 bp, Homo sapien
agggtcgcatacagcagctgggtca

SEQ ID NO: 358882 - DNA, 25 bp, Homo sapien
agttctccttcaacacagcatgctc

SEQ ID NO: 358883 - DNA, 25 bp, Homo sapien
agggatgaattgcaccctgaagttc

SEQ ID NO: 358884 - DNA, 25 bp, Homo sapien
gcccctgcgtgtggagttgaccctg

SEQ ID NO: 358885 - DNA, 25 bp, Homo sapien
ctgggcccctgcgtgtggagttgac

SEQ ID NO: 358886 - DNA, 25 bp, Homo sapien
tgggcccctgcgtgtggagttgacc

SEQ ID NO: 358887 - DNA, 25 bp, Homo sapien
ggcccctgcgtgtggagttgaccct

SEQ ID NO: 358888 - DNA, 25 bp, Homo sapien
ctggcatagggcagtgaggcaggtc

SEQ ID NO: 358889 - DNA, 25 bp, Homo sapien
ggcaggtcccaggagctggggtcat

SEQ ID NO: 358890 - DNA, 25 bp, Homo sapien
tggcatagggcagtgaggcaggtcc

SEQ ID NO: 358891 - DNA, 25 bp, Homo sapien
catagggcagtgaggcaggtcccag

SEQ ID NO: 358892 - DNA, 25 bp, Homo sapien
ctcaagctctaaggtttaatgttgt

SEQ ID NO: 358893 - DNA, 25 bp, Homo sapien
gcaaagccattagggaagggatccc

SEQ ID NO: 358894 - DNA, 25 bp, Homo sapien
cacctaagtgtctagaaggcaggac

SEQ ID NO: 358895 - DNA, 25 bp, Homo sapien
cttttggaatggcagtacctatcct

SEQ ID NO: 358896 - DNA, 25 bp, Homo sapien
acaaagacctataatgtaccttcca

SEQ ID NO: 358897 - DNA, 25 bp, Homo sapien
gctgtacattcttatcatctacacg

SEQ ID NO: 358898 - DNA, 25 bp, Homo sapien
gacctataatgtaccttccataaat

SEQ ID NO: 358899 - DNA, 25 bp, Homo sapien
cacaaagacctataatgtaccttcc

SEQ ID NO: 358900 - DNA, 25 bp, Homo sapien
agacgtggtgaagtggtaccgccca

SEQ ID NO: 358901 - DNA, 25 bp, Homo sapien
ccagaagctttggaacacacggaag

SEQ ID NO: 358902 - DNA, 25 bp, Homo sapien
cacacggaaggaccactgaaagacg

SEQ ID NO: 358903 - DNA, 25 bp, Homo sapien
tccacagaggaaggtgcgtggttcc

SEQ ID NO: 358904 - DNA, 25 bp, Homo sapien
agtgataaccagcagggcagtgcaa

SEQ ID NO: 358905 - DNA, 25 bp, Homo sapien
gcagtgataaccagcagggcagtgc

SEQ ID NO: 358906 - DNA, 25 bp, Homo sapien
cagtgataaccagcagggcagtgca

SEQ ID NO: 358907 - DNA, 25 bp, Homo sapien
taccattatgtccaagagatacgga

SEQ ID NO: 358908 - DNA, 25 bp, Homo sapien
tgtccaagagatacggaaaataact

SEQ ID NO: 358909 - DNA, 25 bp, Homo sapien
aataccattatgtccaagagatacg

SEQ ID NO: 358910 - DNA, 25 bp, Homo sapien
ccattatgtccaagagatacggaaa

SEQ ID NO: 358911 - DNA, 25 bp, Homo sapien
acccatgggcagacggcacgtggtt

SEQ ID NO: 358912 - DNA, 25 bp, Homo sapien
caccactcgtgccatgcaggatgca

SEQ ID NO: 358913 - DNA, 25 bp, Homo sapien
acgtggttcccagttatcgcttgca

SEQ ID NO: 358914 - DNA, 25 bp, Homo sapien
tctatgtggtctggtgactgtcgca

SEQ ID NO: 358915 - DNA, 25 bp, Homo sapien
tggtggaaacccagtcagtccgtgg

SEQ ID NO: 358916 - DNA, 25 bp, Homo sapien
cacgttcagcgaagcagccaaataa

SEQ ID NO: 358917 - DNA, 25 bp, Homo sapien
gaagcctgtgagactcgccatagga

SEQ ID NO: 358918 - DNA, 25 bp, Homo sapien
caaggcatccatggcaagggcagat

SEQ ID NO: 358919 - DNA, 25 bp, Homo sapien
tgttcactatgacgaaaattgtcaa

SEQ ID NO: 358920 - DNA, 25 bp, Homo sapien
attgttcactatgacgaaaattgtc

SEQ ID NO: 358921 - DNA, 25 bp, Homo sapien
agcattgttcactatgacgaaaatt

SEQ ID NO: 358922 - DNA, 25 bp, Homo sapien
tcactatgacgaaaattgtcaacac

SEQ ID NO: 358923 - DNA, 25 bp, Homo sapien
catattaagcatgtagaatattgtc

SEQ ID NO: 358924 - DNA, 25 bp, Homo sapien
ttaagcatgtagaatattgtcccat

SEQ ID NO: 358925 - DNA, 25 bp, Homo sapien
tattaagcatgtagaatattgtccc

SEQ ID NO: 358926 - DNA, 25 bp, Homo sapien
acatattaagcatgtagaatattgt

SEQ ID NO: 358927 - DNA, 25 bp, Homo sapien
ctgacagtcgctgaggaccacgagg

SEQ ID NO: 358928 - DNA, 25 bp, Homo sapien
tgacagtcgctgaggaccacgaggt

SEQ ID NO: 358929 - DNA, 25 bp, Homo sapien
cgctgaggaccacgaggtccaggca

SEQ ID NO: 358930 - DNA, 25 bp, Homo sapien
agtcgctgaggaccacgaggtccag

SEQ ID NO: 358931 - DNA, 25 bp, Homo sapien
ggaagatgcccagacgctaagctgg

SEQ ID NO: 358932 - DNA, 25 bp, Homo sapien
ttggggaaaccatagaatgttttca

SEQ ID NO: 358933 - DNA, 25 bp, Homo sapien
gaaaccatagaatgttttcaagttc

SEQ ID NO: 358934 - DNA, 25 bp, Homo sapien
aaccatagaatgttttcaagttcat

SEQ ID NO: 358935 - DNA, 25 bp, Homo sapien
tggggaaaccatagaatgttttcaa

SEQ ID NO: 358936 - DNA, 25 bp, Homo sapien
cacactatactaggccagggagtca

SEQ ID NO: 358937 - DNA, 25 bp, Homo sapien
gacattaagttagtcccagggtcac

SEQ ID NO: 358938 - DNA, 25 bp, Homo sapien
gggagatgcccacgatatgctaagt

SEQ ID NO: 358939 - DNA, 25 bp, Homo sapien
catctagtcaatgggagagtacaca

SEQ ID NO: 358940 - DNA, 25 bp, Homo sapien
tccaagtccaaggtggagggcaagc

SEQ ID NO: 358941 - DNA, 25 bp, Homo sapien
agctgcttggattgggtgcccatag

SEQ ID NO: 358942 - DNA, 25 bp, Homo sapien
tcatctgctccgtgttccaaagtgc

SEQ ID NO: 358943 - DNA, 25 bp, Homo sapien
tcaagaaggtcctaagtgcatacca

SEQ ID NO: 358944 - DNA, 25 bp, Homo sapien
acaggcctgacacagacatggtagg

SEQ ID NO: 358945 - DNA, 25 bp, Homo sapien
tagtcttaccaatatagctgctgga

SEQ ID NO: 358946 - DNA, 25 bp, Homo sapien
tccgatcacgcttaaagagcaccat

SEQ ID NO: 358947 - DNA, 25 bp, Homo sapien
gagaaagtgatctgtacacctccca

SEQ ID NO: 358948 - DNA, 25 bp, Homo sapien
ttgggctaacagagttgatggtgag

SEQ ID NO: 358949 - DNA, 25 bp, Homo sapien
aggggaacctaaagcctgtattcag

SEQ ID NO: 358950 - DNA, 25 bp, Homo sapien
ttcagcagggcaattgggctaacag

SEQ ID NO: 358951 - DNA, 25 bp, Homo sapien
caggggaacctaaagcctgtattca

SEQ ID NO: 358952 - DNA, 25 bp, Homo sapien
cagcggttcttcagaatcgcagtca

SEQ ID NO: 358953 - DNA, 25 bp, Homo sapien
cttcagaatcgcagtcacttttccc

SEQ ID NO: 358954 - DNA, 25 bp, Homo sapien
ccttgcaaggcagcggttcttcaga

SEQ ID NO: 358955 - DNA, 25 bp, Homo sapien
tgaatgtccttgaccttgcaaggca

SEQ ID NO: 358956 - DNA, 25 bp, Homo sapien
ttcatgtgcagagtggaacctggcc

SEQ ID NO: 358957 - DNA, 25 bp, Homo sapien
gatagacctgcccaatggctgagag

SEQ ID NO: 358958 - DNA, 25 bp, Homo sapien
taggaagccctatggtccaggtcat

SEQ ID NO: 358959 - DNA, 25 bp, Homo sapien
gaggtgcaacattggtccttcccag

SEQ ID NO: 358960 - DNA, 25 bp, Homo sapien
cacagatgaggccctgcccgctgca

SEQ ID NO: 358961 - DNA, 25 bp, Homo sapien
gctgcaccgggccctggcagggctg

SEQ ID NO: 358962 - DNA, 25 bp, Homo sapien
agatgaggccctgcccgctgcaccg

SEQ ID NO: 358963 - DNA, 25 bp, Homo sapien
cactacagcacagatgaggccctgc

SEQ ID NO: 358964 - DNA, 25 bp, Homo sapien
aaagagcgtatgctacctgggtggc

SEQ ID NO: 358965 - DNA, 25 bp, Homo sapien
tgcagacgctaccaagtgctggcgg

SEQ ID NO: 358966 - DNA, 25 bp, Homo sapien
tagcagagcggtagtcattgaaaca

SEQ ID NO: 358967 - DNA, 25 bp, Homo sapien
tcatcaataggaactgggcaaccag

SEQ ID NO: 358968 - DNA, 25 bp, Homo sapien
ttaaagattccgtgctcgggcaggc

SEQ ID NO: 358969 - DNA, 25 bp, Homo sapien
ctggcgctggactagtcccgttgga

SEQ ID NO: 358970 - DNA, 25 bp, Homo sapien
aaagattccgtgctcgggcaggcag

SEQ ID NO: 358971 - DNA, 25 bp, Homo sapien
tagtcccgttggaagctggatgcac

SEQ ID NO: 358972 - DNA, 25 bp, Homo sapien
gccagctggcggcagagcatctgcc

SEQ ID NO: 358973 - DNA, 25 bp, Homo sapien
agctggcggcagagcatctgcctct

SEQ ID NO: 358974 - DNA, 25 bp, Homo sapien
aggccagctggcggcagagcatctg

SEQ ID NO: 358975 - DNA, 25 bp, Homo sapien
ccagctggcggcagagcatctgcct

SEQ ID NO: 358976 - DNA, 25 bp, Homo sapien
gtaggttctccgcaactctgccagg

SEQ ID NO: 358977 - DNA, 25 bp, Homo sapien
gtcagtcgagacacaaggaaggcca

SEQ ID NO: 358978 - DNA, 25 bp, Homo sapien
ccggagcggagacttgtaggttctc

SEQ ID NO: 358979 - DNA, 25 bp, Homo sapien
gaacccctgatagttgttgcgcaag

SEQ ID NO: 358980 - DNA, 25 bp, Homo sapien
cgagtcccgtttgaagtaattgagg

SEQ ID NO: 358981 - DNA, 25 bp, Homo sapien
gtgtcaataacgtcatccatctggg

SEQ ID NO: 358982 - DNA, 25 bp, Homo sapien
tccatctgggcattcggagacgctg

SEQ ID NO: 358983 - DNA, 25 bp, Homo sapien
tggtgcgtaacaaggtcagctctgc

SEQ ID NO: 358984 - DNA, 25 bp, Homo sapien
gagccagacgggtggctggacctgc

SEQ ID NO: 358985 - DNA, 25 bp, Homo sapien
tgtggtgaccaggtgggcccctgta

SEQ ID NO: 358986 - DNA, 25 bp, Homo sapien
tttactgcagacttcgcggactacg

SEQ ID NO: 358987 - DNA, 25 bp, Homo sapien
acacgctgagatccgcgggtggacc

SEQ ID NO: 358988 - DNA, 25 bp, Homo sapien
gggtctcgcggttcctccgcggctc

SEQ ID NO: 358989 - DNA, 25 bp, Homo sapien
tctcgcggttcctccgcggctctgt

SEQ ID NO: 358990 - DNA, 25 bp, Homo sapien
cgccgccggccgtgaccaagatggc

SEQ ID NO: 358991 - DNA, 25 bp, Homo sapien
gccggccgtgaccaagatggcccgc

SEQ ID NO: 358992 - DNA, 25 bp, Homo sapien
aaatgacgagttgtccacatggaaa

SEQ ID NO: 358993 - DNA, 25 bp, Homo sapien
aatgacgagttgtccacatggaaaa

SEQ ID NO: 358994 - DNA, 25 bp, Homo sapien
tgacgagttgtccacatggaaaaga

SEQ ID NO: 358995 - DNA, 25 bp, Homo sapien
gaaatgacgagttgtccacatggaa

SEQ ID NO: 358996 - DNA, 25 bp, Homo sapien
gcacccccaatgccgggacccaggc

SEQ ID NO: 358997 - DNA, 25 bp, Homo sapien
ccccaatgccgggacccaggccact

SEQ ID NO: 358998 - DNA, 25 bp, Homo sapien
agcacccccaatgccgggacccagg

SEQ ID NO: 358999 - DNA, 25 bp, Homo sapien
caatgccgggacccaggccactgcc

SEQ ID NO: 359000 - DNA, 25 bp, Homo sapien
tgctgtcagacaatatgccagagtg

SEQ ID NO: 359001 - DNA, 25 bp, Homo sapien
tgccacttgatagaggattctgctg

SEQ ID NO: 359002 - DNA, 25 bp, Homo sapien
cagcagacgttttcctgggtaaaga

SEQ ID NO: 359003 - DNA, 25 bp, Homo sapien
tgattcaccctctttgcagcagacg

SEQ ID NO: 359004 - DNA, 25 bp, Homo sapien
cctttgcgtcttccatggatggaca

SEQ ID NO: 359005 - DNA, 25 bp, Homo sapien
tgaacgaagaagaatgccatgcggc

SEQ ID NO: 359006 - DNA, 25 bp, Homo sapien
cagcggcagcccctgtagtctaggt

SEQ ID NO: 359007 - DNA, 25 bp, Homo sapien
cacatgcacatagttgaatgaacga

SEQ ID NO: 359008 - DNA, 25 bp, Homo sapien
tatcctgggtactgggaacaagagg

SEQ ID NO: 359009 - DNA, 25 bp, Homo sapien
caggtaacaagtatcctgggtactg

SEQ ID NO: 359010 - DNA, 25 bp, Homo sapien
tagccaggtcatccagaaaaagctg

SEQ ID NO: 359011 - DNA, 25 bp, Homo sapien
caggaggaagtagcaggtaacaagt

SEQ ID NO: 359012 - DNA, 25 bp, Homo sapien
gtcacacacccctcaaaggaacact

SEQ ID NO: 359013 - DNA, 25 bp, Homo sapien
cactggtaggagctgcacgaaaagg

SEQ ID NO: 359014 - DNA, 25 bp, Homo sapien
tcatactggcagtcacacacccctc

SEQ ID NO: 359015 - DNA, 25 bp, Homo sapien
tccaaattcctgggcagtcatactg

SEQ ID NO: 359016 - DNA, 25 bp, Homo sapien
tctgctggtggaagtttcggggtcc

SEQ ID NO: 359017 - DNA, 25 bp, Homo sapien
gctctgctggtggaagtttcggggt

SEQ ID NO: 359018 - DNA, 25 bp, Homo sapien
tgcatcagctctgctggtggaagtt

SEQ ID NO: 359019 - DNA, 25 bp, Homo sapien
tcagctctgctggtggaagtttcgg

SEQ ID NO: 359020 - DNA, 25 bp, Homo sapien
gagcagggagccgaaaacgctcttt

SEQ ID NO: 359021 - DNA, 25 bp, Homo sapien
tcttgttaaaagcatctgacagccg

SEQ ID NO: 359022 - DNA, 25 bp, Homo sapien
tcagcagcgggactggaaacctgtt

SEQ ID NO: 359023 - DNA, 25 bp, Homo sapien
caatgccaatgagaaggtcgtcagc

SEQ ID NO: 359024 - DNA, 25 bp, Homo sapien
tacactggcattggcaagagcctct

SEQ ID NO: 359025 - DNA, 25 bp, Homo sapien
actggcattggcaagagcctctctg

SEQ ID NO: 359026 - DNA, 25 bp, Homo sapien
aatacactggcattggcaagagcct

SEQ ID NO: 359027 - DNA, 25 bp, Homo sapien
aaatacactggcattggcaagagcc

SEQ ID NO: 359028 - DNA, 25 bp, Homo sapien
ataggagcagcaaccagggacggca

SEQ ID NO: 359029 - DNA, 25 bp, Homo sapien
accacataggagcagcaaccaggga

SEQ ID NO: 359030 - DNA, 25 bp, Homo sapien
acataggagcagcaaccagggacgg

SEQ ID NO: 359031 - DNA, 25 bp, Homo sapien
ctgggaccacataggagcagcaacc

SEQ ID NO: 359032 - DNA, 25 bp, Homo sapien
ctctgcatcatcagcattgctcagc

SEQ ID NO: 359033 - DNA, 25 bp, Homo sapien
tctgcatcatcagcattgctcagca

SEQ ID NO: 359034 - DNA, 25 bp, Homo sapien
ctgcatcatcagcattgctcagcat

SEQ ID NO: 359035 - DNA, 25 bp, Homo sapien
tgtcatttgagaggcctggggccat

SEQ ID NO: 359036 - DNA, 25 bp, Homo sapien
gtgtcatttgagaggcctggggcca

SEQ ID NO: 359037 - DNA, 25 bp, Homo sapien
tgtgtcatttgagaggcctggggcc

SEQ ID NO: 359038 - DNA, 25 bp, Homo sapien
tagcaagaagggagagcttcgggca

SEQ ID NO: 359039 - DNA, 25 bp, Homo sapien
ccctgccggggatccatagcaagaa

SEQ ID NO: 359040 - DNA, 25 bp, Homo sapien
ctgccggggatccatagcaagaagg

SEQ ID NO: 359041 - DNA, 25 bp, Homo sapien
aagggagagcttcgggcagcctgca

SEQ ID NO: 359042 - DNA, 25 bp, Homo sapien
tccctcgctgtgactgagcgcaggc

SEQ ID NO: 359043 - DNA, 25 bp, Homo sapien
ctccctcgctgtgactgagcgcagg

SEQ ID NO: 359044 - DNA, 25 bp, Homo sapien
ccctcgctgtgactgagcgcaggcc

SEQ ID NO: 359045 - DNA, 25 bp, Homo sapien
gtcaggggtaaagcccaagctcctg

SEQ ID NO: 359046 - DNA, 25 bp, Homo sapien
cccttcagttccgttgtccaggtca

SEQ ID NO: 359047 - DNA, 25 bp, Homo sapien
caggggtaaagcccaagctcctgct

SEQ ID NO: 359048 - DNA, 25 bp, Homo sapien
ttcagttccgttgtccaggtcaggg

SEQ ID NO: 359049 - DNA, 25 bp, Homo sapien
gccaggacctgagtgtattctgggt

SEQ ID NO: 359050 - DNA, 25 bp, Homo sapien
caggccaggacctgagtgtattctg
